United States Patent Application Publication US 2011/0177960 A1 - sequence listing, part 18

SEQ ID NO: 308597 - DNA, 25 bp, Artificial
  probe
  misc_feature (1)..(25): SEQ ID NO: 1894; WAN024CI7; Start 224; Stop 248
agcaagatcacattagtagcattac

SEQ ID NO: 308598 - DNA, 25 bp, Artificial
  probe
  misc_feature (1)..(25): SEQ ID NO: 1894; WAN024CI7; Start 559; Stop 583
caagatgattggttagaactaggtc

SEQ ID NO: 308599 - DNA, 25 bp, Artificial
  probe
  misc_feature (1)..(25): SEQ ID NO: 1894; WAN024CI7; Start 484; Stop 508
gttacaatgaaggaagttgaagaag

SEQ ID NO: 308600 - DNA, 25 bp, Artificial
  probe
  misc_feature (1)..(25): SEQ ID NO: 1894; WAN024CI7; Start 1448; Stop 1472
atatcaacctactgacttcaacatc

SEQ ID NO: 308601 - DNA, 25 bp, Artificial
  probe
  misc_feature (1)..(25): SEQ ID NO: 1894; WAN024CI7; Start 157; Stop 181
cgcatgttaggtagtgagattatcg

SEQ ID NO: 308602 - DNA, 25 bp, Artificial
  probe
  misc_feature (1)..(25): SEQ ID NO: 1894; WAN024CI7; Start 461; Stop 485
aacgactaattgaacagagcattgt

SEQ ID NO: 308603 - DNA, 25 bp, Artificial
  probe
  misc_feature (1)..(25): SEQ ID NO: 1894; WAN024CI7; Start 1751; Stop 1775
cctaccaggattatgatgaagagtt

SEQ ID NO: 308604 - DNA, 25 bp, Artificial
  probe
  misc_feature (1)..(25): SEQ ID NO: 1895; WAN024DW5; Start 341; Stop 365
gtatggttgaagaattggcagaatt

SEQ ID NO: 308605 - DNA, 25 bp, Artificial
  probe
  misc_feature (1)..(25): SEQ ID NO: 1895; WAN024DW5; Start 340; Stop 364
cgtatggttgaagaattggcagaat

SEQ ID NO: 308606 - DNA, 25 bp, Artificial
  probe
  misc_feature (1)..(25): SEQ ID NO: 1895; WAN024DW5; Start 544; Stop 568
gtcaatgttcacatcttctcaccaa

SEQ ID NO: 308607 - DNA, 25 bp, Artificial
  probe
  misc_feature (1)..(25): SEQ ID NO: 1895; WAN024DW5; Start 137; Stop 161
ctggcaagaatatcgctctcctatt

SEQ ID NO: 308608 - DNA, 25 bp, Artificial
  probe
  misc_feature (1)..(25): SEQ ID NO: 1895; WAN024DW5; Start 534; Stop 558
tatccttggtgtcaatgttcacatc

SEQ ID NO: 308609 - DNA, 25 bp, Artificial
  probe
  misc_feature (1)..(25): SEQ ID NO: 1895; WAN024DW5; Start 533; Stop 557
ctatccttggtgtcaatgttcacat

SEQ ID NO: 308610 - DNA, 25 bp, Artificial
  probe
  misc_feature (1)..(25): SEQ ID NO: 1895; WAN024DW5; Start 115; Stop 139
aatattcaacaccactaccttgctg

SEQ ID NO: 308611 - DNA, 25 bp, Artificial
  probe
  misc_feature (1)..(25): SEQ ID NO: 1895; WAN024DW5; Start 114; Stop 138
caatattcaacaccactaccttgct

SEQ ID NO: 308612 - DNA, 25 bp, Artificial
  probe
  misc_feature (1)..(25): SEQ ID NO: 1895; WAN024DW5; Start 883; Stop 907
gaagaaatggaagtaacagacgaag

SEQ ID NO: 308613 - DNA, 25 bp, Artificial
  probe
  misc_feature (1)..(25): SEQ ID NO: 1895; WAN024DW5; Start 882; Stop 906
agaagaaatggaagtaacagacgaa

SEQ ID NO: 308614 - DNA, 25 bp, Artificial
  probe
  misc_feature (1)..(25): SEQ ID NO: 1895; WAN024DW5; Start 58; Stop 82
gcagagttagaataccttattggtc

SEQ ID NO: 308615 - DNA, 25 bp, Artificial
  probe
  misc_feature (1)..(25): SEQ ID NO: 1895; WAN024DW5; Start 605; Stop 629
cagaaggatttgctaaagaaagtgg

SEQ ID NO: 308616 - DNA, 25 bp, Artificial
  probe
  misc_feature (1)..(25): SEQ ID NO: 1895; WAN024DW5; Start 884; Stop 908
aagaaatggaagtaacagacgaagt

SEQ ID NO: 308617 - DNA, 25 bp, Artificial
  probe
  misc_feature (1)..(25): SEQ ID NO: 1895; WAN024DW5; Start 881; Stop 905
tagaagaaatggaagtaacagacga

SEQ ID NO: 308618 - DNA, 25 bp, Artificial
  probe
  misc_feature (1)..(25): SEQ ID NO: 1895; WAN024DW5; Start 880; Stop 904
gtagaagaaatggaagtaacagacg

SEQ ID NO: 308619 - DNA, 25 bp, Artificial
  probe
  misc_feature (1)..(25): SEQ ID NO: 1895; WAN024DW5; Start 227; Stop 251
cagaatacctcggagcaaatgatat

SEQ ID NO: 308620 - DNA, 25 bp, Artificial
  probe
  misc_feature (1)..(25): SEQ ID NO: 1895; WAN024DW5; Start 833; Stop 857
acgatactcacactgtttatggtaa

SEQ ID NO: 308621 - DNA, 25 bp, Artificial
  probe
  misc_feature (1)..(25): SEQ ID NO: 1895; WAN024DW5; Start 832; Stop 856
cacgatactcacactgtttatggta

SEQ ID NO: 308622 - DNA, 25 bp, Artificial
  probe
  misc_feature (1)..(25): SEQ ID NO: 1895; WAN024DW5; Start 539; Stop 563
ttggtgtcaatgttcacatcttctc

SEQ ID NO: 308623 - DNA, 25 bp, Artificial
  probe
  misc_feature (1)..(25): SEQ ID NO: 1895; WAN024DW5; Start 538; Stop 562
cttggtgtcaatgttcacatcttct

SEQ ID NO: 308624 - DNA, 25 bp, Artificial
  probe
  misc_feature (1)..(25): SEQ ID NO: 1895; WAN024DW5; Start 55; Stop 79
cgtgcagagttagaataccttattg

SEQ ID NO: 308625 - DNA, 25 bp, Artificial
  probe
  misc_feature (1)..(25): SEQ ID NO: 1895; WAN024DW5; Start 54; Stop 78
ccgtgcagagttagaataccttatt

SEQ ID NO: 308626 - DNA, 25 bp, Artificial
  probe
  misc_feature (1)..(25): SEQ ID NO: 1895; WAN024DW5; Start 875; Stop 899
ttggtgtagaagaaatggaagtaac

SEQ ID NO: 308627 - DNA, 25 bp, Artificial
  probe
  misc_feature (1)..(25): SEQ ID NO: 1895; WAN024DW5; Start 586; Stop 610
aaagaaatcgttgaattggcagaag

SEQ ID NO: 308628 - DNA, 25 bp, Artificial
  probe
  misc_feature (1)..(25): SEQ ID NO: 1895; WAN024DW5; Start 458; Stop 482
gcttggaaggcttgacattggtata

SEQ ID NO: 308629 - DNA, 25 bp, Artificial
  probe
  misc_feature (1)..(25): SEQ ID NO: 1895; WAN024DW5; Start 56; Stop 80
gtgcagagttagaataccttattgg

SEQ ID NO: 308630 - DNA, 25 bp, Artificial
  probe
  misc_feature (1)..(25): SEQ ID NO: 1895; WAN024DW5; Start 742; Stop 766
gctcttcttaaaccttaccaagtca

SEQ ID NO: 308631 - DNA, 25 bp, Artificial
  probe
  misc_feature (1)..(25): SEQ ID NO: 1895; WAN024DW5; Start 228; Stop 252
agaatacctcggagcaaatgatatt

SEQ ID NO: 308632 - DNA, 25 bp, Artificial
  probe
  misc_feature (1)..(25): SEQ ID NO: 1895; WAN024DW5; Start 979; Stop 1003
gctgctacacttggtaacctttata

SEQ ID NO: 308633 - DNA, 25 bp, Artificial
  probe
  misc_feature (1)..(25): SEQ ID NO: 1895; WAN024DW5; Start 380; Stop 404
tatggaacggtctaactgacgaatg

SEQ ID NO: 308634 - DNA, 25 bp, Artificial
  probe
  misc_feature (1)..(25): SEQ ID NO: 1895; WAN024DW5; Start 379; Stop 403
gtatggaacggtctaactgacgaat

SEQ ID NO: 308635 - DNA, 25 bp, Artificial
  probe
  misc_feature (1)..(25): SEQ ID NO: 1895; WAN024DW5; Start 230; Stop 254
aatacctcggagcaaatgatattca

SEQ ID NO: 308636 - DNA, 25 bp, Artificial
  probe
  misc_feature (1)..(25): SEQ ID NO: 1895; WAN024DW5; Start 140; Stop 164
gcaagaatatcgctctcctatttga

SEQ ID NO: 308637 - DNA, 25 bp, Artificial
  probe
  misc_feature (1)..(25): SEQ ID NO: 1896; WAN024DQ4; Start 6; Stop 30
accgcaagaaatgtggaataaatac

SEQ ID NO: 308638 - DNA, 25 bp, Artificial
  probe
  misc_feature (1)..(25): SEQ ID NO: 1896; WAN024DQ4; Start 7; Stop 31
ccgcaagaaatgtggaataaataca

SEQ ID NO: 308639 - DNA, 25 bp, Artificial
  probe
  misc_feature (1)..(25): SEQ ID NO: 1896; WAN024DQ4; Start 8; Stop 32
cgcaagaaatgtggaataaatacaa

SEQ ID NO: 308640 - DNA, 25 bp, Artificial
  probe
  misc_feature (1)..(25): SEQ ID NO: 1896; WAN024DQ4; Start 408; Stop 432
tttagaagaatttcgcaaggtctac

SEQ ID NO: 308641 - DNA, 25 bp, Artificial
  probe
  misc_feature (1)..(25): SEQ ID NO: 1896; WAN024DQ4; Start 409; Stop 433
ttagaagaatttcgcaaggtctacc

SEQ ID NO: 308642 - DNA, 25 bp, Artificial
  probe
  misc_feature (1)..(25): SEQ ID NO: 1896; WAN024DQ4; Start 97; Stop 121
ttagcggatttggtgtttaaaggag

SEQ ID NO: 308643 - DNA, 25 bp, Artificial
  probe
  misc_feature (1)..(25): SEQ ID NO: 1896; WAN024DQ4; Start 96; Stop 120
tttagcggatttggtgtttaaagga

SEQ ID NO: 308644 - DNA, 25 bp, Artificial
  probe
  misc_feature (1)..(25): SEQ ID NO: 1896; WAN024DQ4; Start 100; Stop 124
gcggatttggtgtttaaaggagaaa

SEQ ID NO: 308645 - DNA, 25 bp, Artificial
  probe
  misc_feature (1)..(25): SEQ ID NO: 1896; WAN024DQ4; Start 98; Stop 122
tagcggatttggtgtttaaaggaga

SEQ ID NO: 308646 - DNA, 25 bp, Artificial
  probe
  misc_feature (1)..(25): SEQ ID NO: 1896; WAN024DQ4; Start 392; Stop 416
ctgaaagcaaggttgttttagaaga

SEQ ID NO: 308647 - DNA, 25 bp, Artificial
  probe
  misc_feature (1)..(25): SEQ ID NO: 1896; WAN024DQ4; Start 410; Stop 434
tagaagaatttcgcaaggtctaccc

SEQ ID NO: 308648 - DNA, 25 bp, Artificial
  probe
  misc_feature (1)..(25): SEQ ID NO: 1896; WAN024DQ4; Start 393; Stop 417
tgaaagcaaggttgttttagaagaa

SEQ ID NO: 308649 - DNA, 25 bp, Artificial
  probe
  misc_feature (1)..(25): SEQ ID NO: 1896; WAN024DQ4; Start 400; Stop 424
aaggttgttttagaagaatttcgca

SEQ ID NO: 308650 - DNA, 25 bp, Artificial
  probe
  misc_feature (1)..(25): SEQ ID NO: 1896; WAN024DQ4; Start 405; Stop 429
tgttttagaagaatttcgcaaggtc

SEQ ID NO: 308651 - DNA, 25 bp, Artificial
  probe
  misc_feature (1)..(25): SEQ ID NO: 1896; WAN024DQ4; Start 399; Stop 423
caaggttgttttagaagaatttcgc

SEQ ID NO: 308652 - DNA, 25 bp, Artificial
  probe
  misc_feature (1)..(25): SEQ ID NO: 1896; WAN024DQ4; Start 398; Stop 422
gcaaggttgttttagaagaatttcg

SEQ ID NO: 308653 - DNA, 25 bp, Artificial
  probe
  misc_feature (1)..(25): SEQ ID NO: 1896; WAN024DQ4; Start 406; Stop 430
gttttagaagaatttcgcaaggtct

SEQ ID NO: 308654 - DNA, 25 bp, Artificial
  probe
  misc_feature (1)..(25): SEQ ID NO: 1896; WAN024DQ4; Start 404; Stop 428
ttgttttagaagaatttcgcaaggt

SEQ ID NO: 308655 - DNA, 25 bp, Artificial
  probe
  misc_feature (1)..(25): SEQ ID NO: 1896; WAN024DQ4; Start 403; Stop 427
gttgttttagaagaatttcgcaagg

SEQ ID NO: 308656 - DNA, 25 bp, Artificial
  probe
  misc_feature (1)..(25): SEQ ID NO: 1896; WAN024DQ4; Start 402; Stop 426
ggttgttttagaagaatttcgcaag

SEQ ID NO: 308657 - DNA, 25 bp, Artificial
  probe
  misc_feature (1)..(25): SEQ ID NO: 1896; WAN024DQ4; Start 401; Stop 425
aggttgttttagaagaatttcgcaa

SEQ ID NO: 308658 - DNA, 25 bp, Artificial
  probe
  misc_feature (1)..(25): SEQ ID NO: 1896; WAN024DQ4; Start 394; Stop 418
gaaagcaaggttgttttagaagaat

SEQ ID NO: 308659 - DNA, 25 bp, Artificial
  probe
  misc_feature (1)..(25): SEQ ID NO: 1896; WAN024DQ4; Start 234; Stop 258
tgtcgaaattacaaaggtttctgtt

SEQ ID NO: 308660 - DNA, 25 bp, Artificial
  probe
  misc_feature (1)..(25): SEQ ID NO: 1896; WAN024DQ4; Start 99; Stop 123
agcggatttggtgtttaaaggagaa

SEQ ID NO: 308661 - DNA, 25 bp, Artificial
  probe
  misc_feature (1)..(25): SEQ ID NO: 1896; WAN024DQ4; Start 397; Stop 421
agcaaggttgttttagaagaatttc

SEQ ID NO: 308662 - DNA, 25 bp, Artificial
  probe
  misc_feature (1)..(25): SEQ ID NO: 1896; WAN024DQ4; Start 113; Stop 137
ttaaaggagaaaagacagcaacagc

SEQ ID NO: 308663 - DNA, 25 bp, Artificial
  probe
  misc_feature (1)..(25): SEQ ID NO: 1896; WAN024DQ4; Start 396; Stop 420
aagcaaggttgttttagaagaattt

SEQ ID NO: 308664 - DNA, 25 bp, Artificial
  probe
  misc_feature (1)..(25): SEQ ID NO: 1896; WAN024DQ4; Start 395; Stop 419
aaagcaaggttgttttagaagaatt

SEQ ID NO: 308665 - DNA, 25 bp, Artificial
  probe
  misc_feature (1)..(25): SEQ ID NO: 1896; WAN024DQ4; Start 416; Stop 440
aatttcgcaaggtctacccactgta

SEQ ID NO: 308666 - DNA, 25 bp, Artificial
  probe
  misc_feature (1)..(25): SEQ ID NO: 1896; WAN024DQ4; Start 412; Stop 436
gaagaatttcgcaaggtctacccac

SEQ ID NO: 308667 - DNA, 25 bp, Artificial
  probe
  misc_feature (1)..(25): SEQ ID NO: 1896; WAN024DQ4; Start 112; Stop 136
tttaaaggagaaaagacagcaacag

SEQ ID NO: 308668 - DNA, 25 bp, Artificial
  probe
  misc_feature (1)..(25): SEQ ID NO: 1896; WAN024DQ4; Start 101; Stop 125
cggatttggtgtttaaaggagaaaa

SEQ ID NO: 308669 - DNA, 25 bp, Artificial
  probe
  misc_feature (1)..(25): SEQ ID NO: 1896; WAN024DQ4; Start 411; Stop 435
agaagaatttcgcaaggtctaccca

SEQ ID NO: 308670 - DNA, 25 bp, Artificial
  probe
  misc_feature (1)..(25): SEQ ID NO: 1897; WAN024CJP; Start 291; Stop 315
tggctattctgtcaactataatggc

SEQ ID NO: 308671 - DNA, 25 bp, Artificial
  probe
  misc_feature (1)..(25): SEQ ID NO: 1897; WAN024CJP; Start 293; Stop 317
gctattctgtcaactataatggcga

SEQ ID NO: 308672 - DNA, 25 bp, Artificial
  probe
  misc_feature (1)..(25): SEQ ID NO: 1897; WAN024CJP; Start 290; Stop 314
atggctattctgtcaactataatgg

SEQ ID NO: 308673 - DNA, 25 bp, Artificial
  probe
  misc_feature (1)..(25): SEQ ID NO: 1897; WAN024CJP; Start 297; Stop 321
ttctgtcaactataatggcgaatgg

SEQ ID NO: 308674 - DNA, 25 bp, Artificial
  probe
  misc_feature (1)..(25): SEQ ID NO: 1897; WAN024CJP; Start 294; Stop 318
ctattctgtcaactataatggcgaa

SEQ ID NO: 308675 - DNA, 25 bp, Artificial
  probe
  misc_feature (1)..(25): SEQ ID NO: 1897; WAN024CJP; Start 292; Stop 316
ggctattctgtcaactataatggcg

SEQ ID NO: 308676 - DNA, 25 bp, Artificial
  probe
  misc_feature (1)..(25): SEQ ID NO: 1897; WAN024CJP; Start 232; Stop 256
aatggcagatggtactacgcttata

SEQ ID NO: 308677 - DNA, 25 bp, Artificial
  probe
  misc_feature (1)..(25): SEQ ID NO: 1897; WAN024CJP; Start 233; Stop 257
atggcagatggtactacgcttatag

SEQ ID NO: 308678 - DNA, 25 bp, Artificial
  probe
  misc_feature (1)..(25): SEQ ID NO: 1897; WAN024CJP; Start 289; Stop 313
gatggctattctgtcaactataatg

SEQ ID NO: 308679 - DNA, 25 bp, Artificial
  probe
  misc_feature (1)..(25): SEQ ID NO: 1897; WAN024CJP; Start 296; Stop 320
attctgtcaactataatggcgaatg

SEQ ID NO: 308680 - DNA, 25 bp, Artificial
  probe
  misc_feature (1)..(25): SEQ ID NO: 1897; WAN024CJP; Start 286; Stop 310
gtagatggctattctgtcaactata

SEQ ID NO: 308681 - DNA, 25 bp, Artificial
  probe
  misc_feature (1)..(25): SEQ ID NO: 1897; WAN024CJP; Start 185; Stop 209
tatggagtttctttcgtcgttctat

SEQ ID NO: 308682 - DNA, 25 bp, Artificial
  probe
  misc_feature (1)..(25): SEQ ID NO: 1897; WAN024CJP; Start 157; Stop 181
cctcacgactttcctctttacttaa

SEQ ID NO: 308683 - DNA, 25 bp, Artificial
  probe
  misc_feature (1)..(25): SEQ ID NO: 1897; WAN024CJP; Start 184; Stop 208
gtatggagtttctttcgtcgttcta

SEQ ID NO: 308684 - DNA, 25 bp, Artificial
  probe
  misc_feature (1)..(25): SEQ ID NO: 1897; WAN024CJP; Start 288; Stop 312
agatggctattctgtcaactataat

SEQ ID NO: 308685 - DNA, 25 bp, Artificial
  probe
  misc_feature (1)..(25): SEQ ID NO: 1897; WAN024CJP; Start 186; Stop 210
atggagtttctttcgtcgttctatg

SEQ ID NO: 308686 - DNA, 25 bp, Artificial
  probe
  misc_feature (1)..(25): SEQ ID NO: 1897; WAN024CJP; Start 51; Stop 75
gattgaaccctatttctccaaacac

SEQ ID NO: 308687 - DNA, 25 bp, Artificial
  probe
  misc_feature (1)..(25): SEQ ID NO: 1897; WAN024CJP; Start 50; Stop 74
agattgaaccctatttctccaaaca

SEQ ID NO: 308688 - DNA, 25 bp, Artificial
  probe
  misc_feature (1)..(25): SEQ ID NO: 1897; WAN024CJP; Start 231; Stop 255
caatggcagatggtactacgcttat

SEQ ID NO: 308689 - DNA, 25 bp, Artificial
  probe
  misc_feature (1)..(25): SEQ ID NO: 1897; WAN024CJP; Start 295; Stop 319
tattctgtcaactataatggcgaat

SEQ ID NO: 308690 - DNA, 25 bp, Artificial
  probe
  misc_feature (1)..(25): SEQ ID NO: 1897; WAN024CJP; Start 49; Stop 73
aagattgaaccctatttctccaaac

SEQ ID NO: 308691 - DNA, 25 bp, Artificial
  probe
  misc_feature (1)..(25): SEQ ID NO: 1897; WAN024CJP; Start 156; Stop 180
ccctcacgactttcctctttactta

SEQ ID NO: 308692 - DNA, 25 bp, Artificial
  probe
  misc_feature (1)..(25): SEQ ID NO: 1897; WAN024CJP; Start 52; Stop 76
attgaaccctatttctccaaacacc

SEQ ID NO: 308693 - DNA, 25 bp, Artificial
  probe
  misc_feature (1)..(25): SEQ ID NO: 1897; WAN024CJP; Start 61; Stop 85
tatttctccaaacaccgcacctata

SEQ ID NO: 308694 - DNA, 25 bp, Artificial
  probe
  misc_feature (1)..(25): SEQ ID NO: 1897; WAN024CJP; Start 287; Stop 311
tagatggctattctgtcaactataa

SEQ ID NO: 308695 - DNA, 25 bp, Artificial
  probe
  misc_feature (1)..(25): SEQ ID NO: 1897; WAN024CJP; Start 187; Stop 211
tggagtttctttcgtcgttctatga

SEQ ID NO: 308696 - DNA, 25 bp, Artificial
  probe
  misc_feature (1)..(25): SEQ ID NO: 1897; WAN024CJP; Start 64; Stop 88
ttctccaaacaccgcacctataaat

SEQ ID NO: 308697 - DNA, 25 bp, Artificial
  probe
  misc_feature (1)..(25): SEQ ID NO: 1897; WAN024CJP; Start 62; Stop 86
atttctccaaacaccgcacctataa

SEQ ID NO: 308698 - DNA, 25 bp, Artificial
  probe
  misc_feature (1)..(25): SEQ ID NO: 1897; WAN024CJP; Start 298; Stop 322
tctgtcaactataatggcgaatggg

SEQ ID NO: 308699 - DNA, 25 bp, Artificial
  probe
  misc_feature (1)..(25): SEQ ID NO: 1897; WAN024CJP; Start 63; Stop 87
tttctccaaacaccgcacctataaa

SEQ ID NO: 308700 - DNA, 25 bp, Artificial
  probe
  misc_feature (1)..(25): SEQ ID NO: 1897; WAN024CJP; Start 188; Stop 212
ggagtttctttcgtcgttctatgac

SEQ ID NO: 308701 - DNA, 25 bp, Artificial
  probe
  misc_feature (1)..(25): SEQ ID NO: 1897; WAN024CJP; Start 230; Stop 254
tcaatggcagatggtactacgctta

SEQ ID NO: 308702 - DNA, 25 bp, Artificial
  probe
  misc_feature (1)..(25): SEQ ID NO: 1897; WAN024CJP; Start 238; Stop 262
agatggtactacgcttatagctcag

SEQ ID NO: 308703 - DNA, 25 bp, Artificial
  probe
  misc_feature (1)..(25): SEQ ID NO: 1898; WAN024CU4; Start 773; Stop 797
aatacaaggtgacgatcattggtaa

SEQ ID NO: 308704 - DNA, 25 bp, Artificial
  probe
  misc_feature (1)..(25): SEQ ID NO: 1898; WAN024CU4; Start 1017; Stop 1041
aacaagtgctgataataccattgcc

SEQ ID NO: 308705 - DNA, 25 bp, Artificial
  probe
  misc_feature (1)..(25): SEQ ID NO: 1898; WAN024CU4; Start 1067; Stop 1091
caagtccagaacaaatcaagtcaat

SEQ ID NO: 308706 - DNA, 25 bp, Artificial
  probe
  misc_feature (1)..(25): SEQ ID NO: 1898; WAN024CU4; Start 1068; Stop 1092
aagtccagaacaaatcaagtcaatc

SEQ ID NO: 308707 - DNA, 25 bp, Artificial
  probe
  misc_feature (1)..(25): SEQ ID NO: 1898; WAN024CU4; Start 1011; Stop 1035
cgatgaaacaagtgctgataatacc

SEQ ID NO: 308708 - DNA, 25 bp, Artificial
  probe
  misc_feature (1)..(25): SEQ ID NO: 1898; WAN024CU4; Start 731; Stop 755
cagaacacaaacttagaggagaact

SEQ ID NO: 308709 - DNA, 25 bp, Artificial
  probe
  misc_feature (1)..(25): SEQ ID NO: 1898; WAN024CU4; Start 1064; Stop 1088
gaacaagtccagaacaaatcaagtc

SEQ ID NO: 308710 - DNA, 25 bp, Artificial
  probe
  misc_feature (1)..(25): SEQ ID NO: 1898; WAN024CU4; Start 1012; Stop 1036
gatgaaacaagtgctgataatacca

SEQ ID NO: 308711 - DNA, 25 bp, Artificial
  probe
  misc_feature (1)..(25): SEQ ID NO: 1898; WAN024CU4; Start 1066; Stop 1090
acaagtccagaacaaatcaagtcaa

SEQ ID NO: 308712 - DNA, 25 bp, Artificial
  probe
  misc_feature (1)..(25): SEQ ID NO: 1898; WAN024CU4; Start 1065; Stop 1089
aacaagtccagaacaaatcaagtca

SEQ ID NO: 308713 - DNA, 25 bp, Artificial
  probe
  misc_feature (1)..(25): SEQ ID NO: 1898; WAN024CU4; Start 1014; Stop 1038
tgaaacaagtgctgataataccatt

SEQ ID NO: 308714 - DNA, 25 bp, Artificial
  probe
  misc_feature (1)..(25): SEQ ID NO: 1898; WAN024CU4; Start 304; Stop 328
ccttacacaccaactatcaaagatg

SEQ ID NO: 308715 - DNA, 25 bp, Artificial
  probe
  misc_feature (1)..(25): SEQ ID NO: 1898; WAN024CU4; Start 220; Stop 244
tttgagtttggtgatggagaagaag

SEQ ID NO: 308716 - DNA, 25 bp, Artificial
  probe
  misc_feature (1)..(25): SEQ ID NO: 1898; WAN024CU4; Start 1070; Stop 1094
gtccagaacaaatcaagtcaatcct

SEQ ID NO: 308717 - DNA, 25 bp, Artificial
  probe
  misc_feature (1)..(25): SEQ ID NO: 1898; WAN024CU4; Start 1069; Stop 1093
agtccagaacaaatcaagtcaatcc

SEQ ID NO: 308718 - DNA, 25 bp, Artificial
  probe
  misc_feature (1)..(25): SEQ ID NO: 1898; WAN024CU4; Start 1016; Stop 1040
aaacaagtgctgataataccattgc

SEQ ID NO: 308719 - DNA, 25 bp, Artificial
  probe
  misc_feature (1)..(25): SEQ ID NO: 1898; WAN024CU4; Start 1013; Stop 1037
atgaaacaagtgctgataataccat

SEQ ID NO: 308720 - DNA, 25 bp, Artificial
  probe
  misc_feature (1)..(25): SEQ ID NO: 1898; WAN024CU4; Start 742; Stop 766
cttagaggagaactccaagaagaag

SEQ ID NO: 308721 - DNA, 25 bp, Artificial
  probe
  misc_feature (1)..(25): SEQ ID NO: 1898; WAN024CU4; Start 741; Stop 765
acttagaggagaactccaagaagaa

SEQ ID NO: 308722 - DNA, 25 bp, Artificial
  probe
  misc_feature (1)..(25): SEQ ID NO: 1898; WAN024CU4; Start 740; Stop 764
aacttagaggagaactccaagaaga

SEQ ID NO: 308723 - DNA, 25 bp, Artificial
  probe
  misc_feature (1)..(25): SEQ ID NO: 1898; WAN024CU4; Start 732; Stop 756
agaacacaaacttagaggagaactc

SEQ ID NO: 308724 - DNA, 25 bp, Artificial
  probe
  misc_feature (1)..(25): SEQ ID NO: 1898; WAN024CU4; Start 1015; Stop 1039
gaaacaagtgctgataataccattg

SEQ ID NO: 308725 - DNA, 25 bp, Artificial
  probe
  misc_feature (1)..(25): SEQ ID NO: 1898; WAN024CU4; Start 223; Stop 247
gagtttggtgatggagaagaagttc

SEQ ID NO: 308726 - DNA, 25 bp, Artificial
  probe
  misc_feature (1)..(25): SEQ ID NO: 1898; WAN024CU4; Start 730; Stop 754
gcagaacacaaacttagaggagaac

SEQ ID NO: 308727 - DNA, 25 bp, Artificial
  probe
  misc_feature (1)..(25): SEQ ID NO: 1898; WAN024CU4; Start 424; Stop 448
tctaagaaagttcgcttcatcgttg

SEQ ID NO: 308728 - DNA, 25 bp, Artificial
  probe
  misc_feature (1)..(25): SEQ ID NO: 1898; WAN024CU4; Start 423; Stop 447
ttctaagaaagttcgcttcatcgtt

SEQ ID NO: 308729 - DNA, 25 bp, Artificial
  probe
  misc_feature (1)..(25): SEQ ID NO: 1898; WAN024CU4; Start 222; Stop 246
tgagtttggtgatggagaagaagtt

SEQ ID NO: 308730 - DNA, 25 bp, Artificial
  probe
  misc_feature (1)..(25): SEQ ID NO: 1898; WAN024CU4; Start 221; Stop 245
ttgagtttggtgatggagaagaagt

SEQ ID NO: 308731 - DNA, 25 bp, Artificial
  probe
  misc_feature (1)..(25): SEQ ID NO: 1898; WAN024CU4; Start 775; Stop 799
tacaaggtgacgatcattggtaaat

SEQ ID NO: 308732 - DNA, 25 bp, Artificial
  probe
  misc_feature (1)..(25): SEQ ID NO: 1898; WAN024CU4; Start 774; Stop 798
atacaaggtgacgatcattggtaaa

SEQ ID NO: 308733 - DNA, 25 bp, Artificial
  probe
  misc_feature (1)..(25): SEQ ID NO: 1898; WAN024CU4; Start 772; Stop 796
aaatacaaggtgacgatcattggta

SEQ ID NO: 308734 - DNA, 25 bp, Artificial
  probe
  misc_feature (1)..(25): SEQ ID NO: 1898; WAN024CU4; Start 422; Stop 446
cttctaagaaagttcgcttcatcgt

SEQ ID NO: 308735 - DNA, 25 bp, Artificial
  probe
  misc_feature (1)..(25): SEQ ID NO: 1898; WAN024CU4; Start 743; Stop 767
ttagaggagaactccaagaagaagc

SEQ ID NO: 308736 - DNA, 25 bp, Artificial
  probe
  misc_feature (1)..(25): SEQ ID NO: 1899; WAN024F8D; Start 212; Stop 236
agttggataacggtactcaagtaat

SEQ ID NO: 308737 - DNA, 25 bp, Artificial
  probe
  misc_feature (1)..(25): SEQ ID NO: 1899; WAN024F8D; Start 213; Stop 237
gttggataacggtactcaagtaatt

SEQ ID NO: 308738 - DNA, 25 bp, Artificial
  probe
  misc_feature (1)..(25): SEQ ID NO: 1899; WAN024F8D; Start 240; Stop 264
tgagattcaagtccatcatcagaat

SEQ ID NO: 308739 - DNA, 25 bp, Artificial
  probe
  misc_feature (1)..(25): SEQ ID NO: 1899; WAN024F8D; Start 143; Stop 167
atattcacgtattactctccatgcc

SEQ ID NO: 308740 - DNA, 25 bp, Artificial
  probe
  misc_feature (1)..(25): SEQ ID NO: 1899; WAN024F8D; Start 241; Stop 265
gagattcaagtccatcatcagaatt

SEQ ID NO: 308741 - DNA, 25 bp, Artificial
  probe
  misc_feature (1)..(25): SEQ ID NO: 1899; WAN024F8D; Start 144; Stop 168
tattcacgtattactctccatgcct

SEQ ID NO: 308742 - DNA, 25 bp, Artificial
  probe
  misc_feature (1)..(25): SEQ ID NO: 1899; WAN024F8D; Start 146; Stop 170
ttcacgtattactctccatgcctta

SEQ ID NO: 308743 - DNA, 25 bp, Artificial
  probe
  misc_feature (1)..(25): SEQ ID NO: 1899; WAN024F8D; Start 149; Stop 173
acgtattactctccatgccttactc

SEQ ID NO: 308744 - DNA, 25 bp, Artificial
  probe
  misc_feature (1)..(25): SEQ ID NO: 1899; WAN024F8D; Start 145; Stop 169
attcacgtattactctccatgcctt

SEQ ID NO: 308745 - DNA, 25 bp, Artificial
  probe
  misc_feature (1)..(25): SEQ ID NO: 1899; WAN024F8D; Start 148; Stop 172
cacgtattactctccatgccttact

SEQ ID NO: 308746 - DNA, 25 bp, Artificial
  probe
  misc_feature (1)..(25): SEQ ID NO: 1899; WAN024F8D; Start 147; Stop 171
tcacgtattactctccatgccttac

SEQ ID NO: 308747 - DNA, 25 bp, Artificial
  probe
  misc_feature (1)..(25): SEQ ID NO: 1899; WAN024F8D; Start 214; Stop 238
ttggataacggtactcaagtaatta

SEQ ID NO: 308748 - DNA, 25 bp, Artificial
  probe
  misc_feature (1)..(25): SEQ ID NO: 1899; WAN024F8D; Start 215; Stop 239
tggataacggtactcaagtaattat

SEQ ID NO: 308749 - DNA, 25 bp, Artificial
  probe
  misc_feature (1)..(25): SEQ ID NO: 1899; WAN024F8D; Start 239; Stop 263
ttgagattcaagtccatcatcagaa

SEQ ID NO: 308750 - DNA, 25 bp, Artificial
  probe
  misc_feature (1)..(25): SEQ ID NO: 1899; WAN024F8D; Start 238; Stop 262
attgagattcaagtccatcatcaga

SEQ ID NO: 308751 - DNA, 25 bp, Artificial
  probe
  misc_feature (1)..(25): SEQ ID NO: 1899; WAN024F8D; Start 267; Stop 291
tttcatcaatcacttgtgggcttac

SEQ ID NO: 308752 - DNA, 25 bp, Artificial
  probe
  misc_feature (1)..(25): SEQ ID NO: 1899; WAN024F8D; Start 237; Stop 261
tattgagattcaagtccatcatcag

SEQ ID NO: 308753 - DNA, 25 bp, Artificial
  probe
  misc_feature (1)..(25): SEQ ID NO: 1899; WAN024F8D; Start 236; Stop 260
ttattgagattcaagtccatcatca

SEQ ID NO: 308754 - DNA, 25 bp, Artificial
  probe
  misc_feature (1)..(25): SEQ ID NO: 1899; WAN024F8D; Start 242; Stop 266
agattcaagtccatcatcagaattt

SEQ ID NO: 308755 - DNA, 25 bp, Artificial
  probe
  misc_feature (1)..(25): SEQ ID NO: 1899; WAN024F8D; Start 216; Stop 240
ggataacggtactcaagtaattatt

SEQ ID NO: 308756 - DNA, 25 bp, Artificial
  probe
  misc_feature (1)..(25): SEQ ID NO: 1899; WAN024F8D; Start 211; Stop 235
gagttggataacggtactcaagtaa

SEQ ID NO: 308757 - DNA, 25 bp, Artificial
  probe
  misc_feature (1)..(25): SEQ ID NO: 1899; WAN024F8D; Start 268; Stop 292
ttcatcaatcacttgtgggcttacc

SEQ ID NO: 308758 - DNA, 25 bp, Artificial
  probe
  misc_feature (1)..(25): SEQ ID NO: 1899; WAN024F8D; Start 210; Stop 234
ggagttggataacggtactcaagta

SEQ ID NO: 308759 - DNA, 25 bp, Artificial
  probe
  misc_feature (1)..(25): SEQ ID NO: 1899; WAN024F8D; Start 235; Stop 259
attattgagattcaagtccatcatc

SEQ ID NO: 308760 - DNA, 25 bp, Artificial
  probe
  misc_feature (1)..(25): SEQ ID NO: 1899; WAN024F8D; Start 266; Stop 290
ttttcatcaatcacttgtgggctta

SEQ ID NO: 308761 - DNA, 25 bp, Artificial
  probe
  misc_feature (1)..(25): SEQ ID NO: 1899; WAN024F8D; Start 217; Stop 241
gataacggtactcaagtaattattg

SEQ ID NO: 308762 - DNA, 25 bp, Artificial
  probe
  misc_feature (1)..(25): SEQ ID NO: 1899; WAN024F8D; Start 270; Stop 294
catcaatcacttgtgggcttacctg

SEQ ID NO: 308763 - DNA, 25 bp, Artificial
  probe
  misc_feature (1)..(25): SEQ ID NO: 1899; WAN024F8D; Start 234; Stop 258
aattattgagattcaagtccatcat

SEQ ID NO: 308764 - DNA, 25 bp, Artificial
  probe
  misc_feature (1)..(25): SEQ ID NO: 1899; WAN024F8D; Start 269; Stop 293
tcatcaatcacttgtgggcttacct

SEQ ID NO: 308765 - DNA, 25 bp, Artificial
  probe
  misc_feature (1)..(25): SEQ ID NO: 1899; WAN024F8D; Start 294; Stop 318
gtgcagtcaggttaatcaaaatctt

SEQ ID NO: 308766 - DNA, 25 bp, Artificial
  probe
  misc_feature (1)..(25): SEQ ID NO: 1899; WAN024F8D; Start 271; Stop 295
atcaatcacttgtgggcttacctgt

SEQ ID NO: 308767 - DNA, 25 bp, Artificial
  probe
  misc_feature (1)..(25): SEQ ID NO: 1899; WAN024F8D; Start 293; Stop 317
tgtgcagtcaggttaatcaaaatct

SEQ ID NO: 308768 - DNA, 25 bp, Artificial
  probe
  misc_feature (1)..(25): SEQ ID NO: 1899; WAN024F8D; Start 295; Stop 319
tgcagtcaggttaatcaaaatcttg

SEQ ID NO: 308769 - DNA, 25 bp, Artificial
  probe
  misc_feature (1)..(25): SEQ ID NO: 1900; WAN024CRL; Start 437; Stop 461
aagaatatgctgctaaggctgttat

SEQ ID NO: 308770 - DNA, 25 bp, Artificial
  probe
  misc_feature (1)..(25): SEQ ID NO: 1900; WAN024CRL; Start 438; Stop 462
agaatatgctgctaaggctgttatt

SEQ ID NO: 308771 - DNA, 25 bp, Artificial
  probe
  misc_feature (1)..(25): SEQ ID NO: 1900; WAN024CRL; Start 439; Stop 463
gaatatgctgctaaggctgttattg

SEQ ID NO: 308772 - DNA, 25 bp, Artificial
  probe
  misc_feature (1)..(25): SEQ ID NO: 1900; WAN024CRL; Start 436; Stop 460
caagaatatgctgctaaggctgtta

SEQ ID NO: 308773 - DNA, 25 bp, Artificial
  probe
  misc_feature (1)..(25): SEQ ID NO: 1900; WAN024CRL; Start 440; Stop 464
aatatgctgctaaggctgttattgt

SEQ ID NO: 308774 - DNA, 25 bp, Artificial
  probe
  misc_feature (1)..(25): SEQ ID NO: 1900; WAN024CRL; Start 25; Stop 49
tacgatattattgtaattggtgcgg

SEQ ID NO: 308775 - DNA, 25 bp, Artificial
  probe
  misc_feature (1)..(25): SEQ ID NO: 1900; WAN024CRL; Start 441; Stop 465
atatgctgctaaggctgttattgtg

SEQ ID NO: 308776 - DNA, 25 bp, Artificial
  probe
  misc_feature (1)..(25): SEQ ID NO: 1900; WAN024CRL; Start 492; Stop 516
aattatcatcggagacctcaagtac

SEQ ID NO: 308777 - DNA, 25 bp, Artificial
  probe
  misc_feature (1)..(25): SEQ ID NO: 1900; WAN024CRL; Start 229; Stop 253
gacaagacttacatccagatgaaga

SEQ ID NO: 308778 - DNA, 25 bp, Artificial
  probe
  misc_feature (1)..(25): SEQ ID NO: 1900; WAN024CRL; Start 227; Stop 251
ttgacaagacttacatccagatgaa

SEQ ID NO: 308779 - DNA, 25 bp, Artificial
  probe
  misc_feature (1)..(25): SEQ ID NO: 1900; WAN024CRL; Start 228; Stop 252
tgacaagacttacatccagatgaag

SEQ ID NO: 308780 - DNA, 25 bp, Artificial
  probe
  misc_feature (1)..(25): SEQ ID NO: 1900; WAN024CRL; Start 226; Stop 250
attgacaagacttacatccagatga

SEQ ID NO: 308781 - DNA, 25 bp, Artificial
  probe
  misc_feature (1)..(25): SEQ ID NO: 1900; WAN024CRL; Start 230; Stop 254
acaagacttacatccagatgaagat

SEQ ID NO: 308782 - DNA, 25 bp, Artificial
  probe
  misc_feature (1)..(25): SEQ ID NO: 1900; WAN024CRL; Start 442; Stop 466
tatgctgctaaggctgttattgtga

SEQ ID NO: 308783 - DNA, 25 bp, Artificial
  probe
  misc_feature (1)..(25): SEQ ID NO: 1900; WAN024CRL; Start 433; Stop 457
catcaagaatatgctgctaaggctg

SEQ ID NO: 308784 - DNA, 25 bp, Artificial
  probe
  misc_feature (1)..(25): SEQ ID NO: 1900; WAN024CRL; Start 434; Stop 458
atcaagaatatgctgctaaggctgt

SEQ ID NO: 308785 - DNA, 25 bp, Artificial
  probe
  misc_feature (1)..(25): SEQ ID NO: 1900; WAN024CRL; Start 435; Stop 459
tcaagaatatgctgctaaggctgtt

SEQ ID NO: 308786 - DNA, 25 bp, Artificial
  probe
  misc_feature (1)..(25): SEQ ID NO: 1900; WAN024CRL; Start 24; Stop 48
atacgatattattgtaattggtgcg

SEQ ID NO: 308787 - DNA, 25 bp, Artificial
  probe
  misc_feature (1)..(25): SEQ ID NO: 1900; WAN024CRL; Start 490; Stop 514
gaaattatcatcggagacctcaagt

SEQ ID NO: 308788 - DNA, 25 bp, Artificial
  probe
  misc_feature (1)..(25): SEQ ID NO: 1900; WAN024CRL; Start 491; Stop 515
aaattatcatcggagacctcaagta

SEQ ID NO: 308789 - DNA, 25 bp, Artificial
  probe
  misc_feature (1)..(25): SEQ ID NO: 1900; WAN024CRL; Start 432; Stop 456
ccatcaagaatatgctgctaaggct

SEQ ID NO: 308790 - DNA, 25 bp, Artificial
  probe
  misc_feature (1)..(25): SEQ ID NO: 1900; WAN024CRL; Start 489; Stop 513
ggaaattatcatcggagacctcaag

SEQ ID NO: 308791 - DNA, 25 bp, Artificial
  probe
  misc_feature (1)..(25): SEQ ID NO: 1900; WAN024CRL; Start 28; Stop 52
gatattattgtaattggtgcgggac

SEQ ID NO: 308792 - DNA, 25 bp, Artificial
  probe
  misc_feature (1)..(25): SEQ ID NO: 1900; WAN024CRL; Start 27; Stop 51
cgatattattgtaattggtgcggga

SEQ ID NO: 308793 - DNA, 25 bp, Artificial
  probe
  misc_feature (1)..(25): SEQ ID NO: 1900; WAN024CRL; Start 134; Stop 158
ctttcatgccttgtaatccctctat

SEQ ID NO: 308794 - DNA, 25 bp, Artificial
  probe
  misc_feature (1)..(25): SEQ ID NO: 1900; WAN024CRL; Start 135; Stop 159
tttcatgccttgtaatccctctatc

SEQ ID NO: 308795 - DNA, 25 bp, Artificial
  probe
  misc_feature (1)..(25): SEQ ID NO: 1900; WAN024CRL; Start 29; Stop 53
atattattgtaattggtgcgggaca

SEQ ID NO: 308796 - DNA, 25 bp, Artificial
  probe
  misc_feature (1)..(25): SEQ ID NO: 1900; WAN024CRL; Start 26; Stop 50
acgatattattgtaattggtgcggg

SEQ ID NO: 308797 - DNA, 25 bp, Artificial
  probe
  misc_feature (1)..(25): SEQ ID NO: 1900; WAN024CRL; Start 429; Stop 453
cacccatcaagaatatgctgctaag

SEQ ID NO: 308798 - DNA, 25 bp, Artificial
  probe
  misc_feature (1)..(25): SEQ ID NO: 1900; WAN024CRL; Start 488; Stop 512
gggaaattatcatcggagacctcaa

SEQ ID NO: 308799 - DNA, 25 bp, Artificial
  probe
  misc_feature (1)..(25): SEQ ID NO: 1900; WAN024CRL; Start 443; Stop 467
atgctgctaaggctgttattgtgac

SEQ ID NO: 308800 - DNA, 25 bp, Artificial
  probe
  misc_feature (1)..(25): SEQ ID NO: 1900; WAN024CRL; Start 493; Stop 517
attatcatcggagacctcaagtact

SEQ ID NO: 308801 - DNA, 25 bp, Artificial
  probe
  misc_feature (1)..(25): SEQ ID NO: 1900; WAN024CRL; Start 143; Stop 167
cttgtaatccctctatcggtggttc

SEQ ID NO: 308802 - DNA, 25 bp, Artificial
  probe
  misc_feature (1)..(25): SEQ ID NO: 1901; WAN024FQ3; Start 245; Stop 269
cagtgtcattatggaacattatcgt

SEQ ID NO: 308803 - DNA, 25 bp, Artificial
  probe
  misc_feature (1)..(25): SEQ ID NO: 1901; WAN024FQ3; Start 244; Stop 268
acagtgtcattatggaacattatcg

SEQ ID NO: 308804 - DNA, 25 bp, Artificial
  probe
  misc_feature (1)..(25): SEQ ID NO: 1901; WAN024FQ3; Start 246; Stop 270
agtgtcattatggaacattatcgtt

SEQ ID NO: 308805 - DNA, 25 bp, Artificial
  probe
  misc_feature (1)..(25): SEQ ID NO: 1901; WAN024FQ3; Start 489; Stop 513
tttccttcagatgcctatacaaact

SEQ ID NO: 308806 - DNA, 25 bp, Artificial
  probe
  misc_feature (1)..(25): SEQ ID NO: 1901; WAN024FQ3; Start 490; Stop 514
ttccttcagatgcctatacaaactc

SEQ ID NO: 308807 - DNA, 25 bp, Artificial
  probe
  misc_feature (1)..(25): SEQ ID NO: 1901; WAN024FQ3; Start 362; Stop 386
tcggtgccttgatactgatttattt

SEQ ID NO: 308808 - DNA, 25 bp, Artificial
  probe
  misc_feature (1)..(25): SEQ ID NO: 1901; WAN024FQ3; Start 361; Stop 385
ttcggtgccttgatactgatttatt

SEQ ID NO: 308809 - DNA, 25 bp, Artificial
  probe
  misc_feature (1)..(25): SEQ ID NO: 1901; WAN024FQ3; Start 360; Stop 384
tttcggtgccttgatactgatttat

SEQ ID NO: 308810 - DNA, 25 bp, Artificial
  probe
  misc_feature (1)..(25): SEQ ID NO: 1901; WAN024FQ3; Start 363; Stop 387
cggtgccttgatactgatttattta

SEQ ID NO: 308811 - DNA, 25 bp, Artificial
  probe
  misc_feature (1)..(25): SEQ ID NO: 1901; WAN024FQ3; Start 492; Stop 516
ccttcagatgcctatacaaactcat

SEQ ID NO: 308812 - DNA, 25 bp, Artificial
  probe
  misc_feature (1)..(25): SEQ ID NO: 1901; WAN024FQ3; Start 251; Stop 275
cattatggaacattatcgtttggct

SEQ ID NO: 308813 - DNA, 25 bp, Artificial
  probe
  misc_feature (1)..(25): SEQ ID NO: 1901; WAN024FQ3; Start 250; Stop 274
tcattatggaacattatcgtttggc

SEQ ID NO: 308814 - DNA, 25 bp, Artificial
  probe
  misc_feature (1)..(25): SEQ ID NO: 1901; WAN024FQ3; Start 674; Stop 698
tcatagcgaagactacatatcataa

SEQ ID NO: 308815 - DNA, 25 bp, Artificial
  probe
  misc_feature (1)..(25): SEQ ID NO: 1901; WAN024FQ3; Start 565; Stop 589
ggtggttatatagcacaattcaatg

SEQ ID NO: 308816 - DNA, 25 bp, Artificial
  probe
  misc_feature (1)..(25): SEQ ID NO: 1901; WAN024FQ3; Start 564; Stop 588
aggtggttatatagcacaattcaat

SEQ ID NO: 308817 - DNA, 25 bp, Artificial
  probe
  misc_feature (1)..(25): SEQ ID NO: 1901; WAN024FQ3; Start 491; Stop 515
tccttcagatgcctatacaaactca

SEQ ID NO: 308818 - DNA, 25 bp, Artificial
  probe
  misc_feature (1)..(25): SEQ ID NO: 1901; WAN024FQ3; Start 253; Stop 277
ttatggaacattatcgtttggcttt

SEQ ID NO: 308819 - DNA, 25 bp, Artificial
  probe
  misc_feature (1)..(25): SEQ ID NO: 1901; WAN024FQ3; Start 252; Stop 276
attatggaacattatcgtttggctt

SEQ ID NO: 308820 - DNA, 25 bp, Artificial
  probe
  misc_feature (1)..(25): SEQ ID NO: 1901; WAN024FQ3; Start 673; Stop 697
ttcatagcgaagactacatatcata

SEQ ID NO: 308821 - DNA, 25 bp, Artificial
  probe
  misc_feature (1)..(25): SEQ ID NO: 1901; WAN024FQ3; Start 283; Stop 307
agagactttgcggttaatccaatta

SEQ ID NO: 308822 - DNA, 25 bp, Artificial
  probe
  misc_feature (1)..(25): SEQ ID NO: 1901; WAN024FQ3; Start 243; Stop 267
aacagtgtcattatggaacattatc

SEQ ID NO: 308823 - DNA, 25 bp, Artificial
  probe
  misc_feature (1)..(25): SEQ ID NO: 1901; WAN024FQ3; Start 249; Stop 273
gtcattatggaacattatcgtttgg

SEQ ID NO: 308824 - DNA, 25 bp, Artificial
  probe
  misc_feature (1)..(25): SEQ ID NO: 1901; WAN024FQ3; Start 563; Stop 587
taggtggttatatagcacaattcaa

SEQ ID NO: 308825 - DNA, 25 bp, Artificial
  probe
  misc_feature (1)..(25): SEQ ID NO: 1901; WAN024FQ3; Start 562; Stop 586
ttaggtggttatatagcacaattca

SEQ ID NO: 308826 - DNA, 25 bp, Artificial
  probe
  misc_feature (1)..(25): SEQ ID NO: 1901; WAN024FQ3; Start 282; Stop 306
aagagactttgcggttaatccaatt

SEQ ID NO: 308827 - DNA, 25 bp, Artificial
  probe
  misc_feature (1)..(25): SEQ ID NO: 1901; WAN024FQ3; Start 678; Stop 702
agcgaagactacatatcataatcta

SEQ ID NO: 308828 - DNA, 25 bp, Artificial
  probe
  misc_feature (1)..(25): SEQ ID NO: 1901; WAN024FQ3; Start 677; Stop 701
tagcgaagactacatatcataatct

SEQ ID NO: 308829 - DNA, 25 bp, Artificial
  probe
  misc_feature (1)..(25): SEQ ID NO: 1901; WAN024FQ3; Start 566; Stop 590
gtggttatatagcacaattcaatgt

SEQ ID NO: 308830 - DNA, 25 bp, Artificial
  probe
  misc_feature (1)..(25): SEQ ID NO: 1901; WAN024FQ3; Start 435; Stop 459
atacattctatctttattggtggca

SEQ ID NO: 308831 - DNA, 25 bp, Artificial
  probe
  misc_feature (1)..(25): SEQ ID NO: 1901; WAN024FQ3; Start 493; Stop 517
cttcagatgcctatacaaactcatg

SEQ ID NO: 308832 - DNA, 25 bp, Artificial
  probe
  misc_feature (1)..(25): SEQ ID NO: 1901; WAN024FQ3; Start 240; Stop 264
aataacagtgtcattatggaacatt

SEQ ID NO: 308833 - DNA, 25 bp, Artificial
  probe
  misc_feature (1)..(25): SEQ ID NO: 1901; WAN024FQ3; Start 237; Stop 261
tctaataacagtgtcattatggaac

SEQ ID NO: 308834 - DNA, 25 bp, Artificial
  probe
  misc_feature (1)..(25): SEQ ID NO: 1901; WAN024FQ3; Start 436; Stop 460
tacattctatctttattggtggcaa

SEQ ID NO: 308835 - DNA, 25 bp, Artificial
  probe
  misc_feature (1)..(25): SEQ ID NO: 1902; WAN024CZD; Start 106; Stop 130
tatgataaggagaaggtgagagagt

SEQ ID NO: 308836 - DNA, 25 bp, Artificial
  probe
  misc_feature (1)..(25): SEQ ID NO: 1902; WAN024CZD; Start 107; Stop 131
atgataaggagaaggtgagagagtt

SEQ ID NO: 308837 - DNA, 25 bp, Artificial
  probe
  misc_feature (1)..(25): SEQ ID NO: 1902; WAN024CZD; Start 573; Stop 597
caggattcaagcgttagcagatatt

SEQ ID NO: 308838 - DNA, 25 bp, Artificial
  probe
  misc_feature (1)..(25): SEQ ID NO: 1902; WAN024CZD; Start 105; Stop 129
ttatgataaggagaaggtgagagag

SEQ ID NO: 308839 - DNA, 25 bp, Artificial
  probe
  misc_feature (1)..(25): SEQ ID NO: 1902; WAN024CZD; Start 572; Stop 596
acaggattcaagcgttagcagatat

SEQ ID NO: 308840 - DNA, 25 bp, Artificial
  probe
  misc_feature (1)..(25): SEQ ID NO: 1902; WAN024CZD; Start 104; Stop 128
cttatgataaggagaaggtgagaga

SEQ ID NO: 308841 - DNA, 25 bp, Artificial
  probe
  misc_feature (1)..(25): SEQ ID NO: 1902; WAN024CZD; Start 20; Stop 44
tttgggatttagacgggactttatt

SEQ ID NO: 308842 - DNA, 25 bp, Artificial
  probe
  misc_feature (1)..(25): SEQ ID NO: 1902; WAN024CZD; Start 19; Stop 43
atttgggatttagacgggactttat

SEQ ID NO: 308843 - DNA, 25 bp, Artificial
  probe
  misc_feature (1)..(25): SEQ ID NO: 1902; WAN024CZD; Start 17; Stop 41
ttatttgggatttagacgggacttt

SEQ ID NO: 308844 - DNA, 25 bp, Artificial
  probe
  misc_feature (1)..(25): SEQ ID NO: 1902; WAN024CZD; Start 16; Stop 40
tttatttgggatttagacgggactt

SEQ ID NO: 308845 - DNA, 25 bp, Artificial
  probe
  misc_feature (1)..(25): SEQ ID NO: 1902; WAN024CZD; Start 26; Stop 50
atttagacgggactttattggactc

SEQ ID NO: 308846 - DNA, 25 bp, Artificial
  probe
  misc_feature (1)..(25): SEQ ID NO: 1902; WAN024CZD; Start 25; Stop 49
gatttagacgggactttattggact

SEQ ID NO: 308847 - DNA, 25 bp, Artificial
  probe
  misc_feature (1)..(25): SEQ ID NO: 1902; WAN024CZD; Start 127; Stop 151
gagtttatcttcaagtattcggtgc

SEQ ID NO: 308848 - DNA, 25 bp, Artificial
  probe
  misc_feature (1)..(25): SEQ ID NO: 1902; WAN024CZD; Start 576; Stop 600
gattcaagcgttagcagatatttcc

SEQ ID NO: 308849 - DNA, 25 bp, Artificial
  probe
  misc_feature (1)..(25): SEQ ID NO: 1902; WAN024CZD; Start 575; Stop 599
ggattcaagcgttagcagatatttc

SEQ ID NO: 308850 - DNA, 25 bp, Artificial
  probe
  misc_feature (1)..(25): SEQ ID NO: 1902; WAN024CZD; Start 108; Stop 132
tgataaggagaaggtgagagagttt

SEQ ID NO: 308851 - DNA, 25 bp, Artificial
  probe
  misc_feature (1)..(25): SEQ ID NO: 1902; WAN024CZD; Start 18; Stop 42
tatttgggatttagacgggacttta

SEQ ID NO: 308852 - DNA, 25 bp, Artificial
  probe
  misc_feature (1)..(25): SEQ ID NO: 1902; WAN024CZD; Start 574; Stop 598
aggattcaagcgttagcagatattt

SEQ ID NO: 308853 - DNA, 25 bp, Artificial
  probe
  misc_feature (1)..(25): SEQ ID NO: 1902; WAN024CZD; Start 183; Stop 207
aaatctggatgttgaggtgctaaat

SEQ ID NO: 308854 - DNA, 25 bp, Artificial
  probe
  misc_feature (1)..(25): SEQ ID NO: 1902; WAN024CZD; Start 571; Stop 595
cacaggattcaagcgttagcagata

SEQ ID NO: 308855 - DNA, 25 bp, Artificial
  probe
  misc_feature (1)..(25): SEQ ID NO: 1902; WAN024CZD; Start 21; Stop 45
ttgggatttagacgggactttattg

SEQ ID NO: 308856 - DNA, 25 bp, Artificial
  probe
  misc_feature (1)..(25): SEQ ID NO: 1902; WAN024CZD; Start 111; Stop 135
taaggagaaggtgagagagtttatc

SEQ ID NO: 308857 - DNA, 25 bp, Artificial
  probe
  misc_feature (1)..(25): SEQ ID NO: 1902; WAN024CZD; Start 109; Stop 133
gataaggagaaggtgagagagttta

SEQ ID NO: 308858 - DNA, 25 bp, Artificial
  probe
  misc_feature (1)..(25): SEQ ID NO: 1902; WAN024CZD; Start 40; Stop 64
ttattggactcttacgaagcgattt

SEQ ID NO: 308859 - DNA, 25 bp, Artificial
  probe
  misc_feature (1)..(25): SEQ ID NO: 1902; WAN024CZD; Start 39; Stop 63
tttattggactcttacgaagcgatt

SEQ ID NO: 308860 - DNA, 25 bp, Artificial
  probe
  misc_feature (1)..(25): SEQ ID NO: 1902; WAN024CZD; Start 113; Stop 137
aggagaaggtgagagagtttatctt

SEQ ID NO: 308861 - DNA, 25 bp, Artificial
  probe
  misc_feature (1)..(25): SEQ ID NO: 1902; WAN024CZD; Start 112; Stop 136
aaggagaaggtgagagagtttatct

SEQ ID NO: 308862 - DNA, 25 bp, Artificial
  probe
  misc_feature (1)..(25): SEQ ID NO: 1902; WAN024CZD; Start 29; Stop 53
tagacgggactttattggactctta

SEQ ID NO: 308863 - DNA, 25 bp, Artificial
  probe
  misc_feature (1)..(25): SEQ ID NO: 1902; WAN024CZD; Start 24; Stop 48
ggatttagacgggactttattggac

SEQ ID NO: 308864 - DNA, 25 bp, Artificial
  probe
  misc_feature (1)..(25): SEQ ID NO: 1902; WAN024CZD; Start 184; Stop 208
aatctggatgttgaggtgctaaatc

SEQ ID NO: 308865 - DNA, 25 bp, Artificial
  probe
  misc_feature (1)..(25): SEQ ID NO: 1902; WAN024CZD; Start 180; Stop 204
tagaaatctggatgttgaggtgcta

SEQ ID NO: 308866 - DNA, 25 bp, Artificial
  probe
  misc_feature (1)..(25): SEQ ID NO: 1902; WAN024CZD; Start 34; Stop 58
gggactttattggactcttacgaag

SEQ ID NO: 308867 - DNA, 25 bp, Artificial
  probe
  misc_feature (1)..(25): SEQ ID NO: 1902; WAN024CZD; Start 182; Stop 206
gaaatctggatgttgaggtgctaaa

SEQ ID NO: 308868 - DNA, 25 bp, Artificial
  probe
  misc_feature (1)..(25): SEQ ID NO: 1903; WAN024D8G; Start 385; Stop 409
tctatcctagtaccttgtcatcgtg

SEQ ID NO: 308869 - DNA, 25 bp, Artificial
  probe
  misc_feature (1)..(25): SEQ ID NO: 1903; WAN024D8G; Start 384; Stop 408
gtctatcctagtaccttgtcatcgt

SEQ ID NO: 308870 - DNA, 25 bp, Artificial
  probe
  misc_feature (1)..(25): SEQ ID NO: 1903; WAN024D8G; Start 386; Stop 410
ctatcctagtaccttgtcatcgtgt

SEQ ID NO: 308871 - DNA, 25 bp, Artificial
  probe
  misc_feature (1)..(25): SEQ ID NO: 1903; WAN024D8G; Start 387; Stop 411
tatcctagtaccttgtcatcgtgtg

SEQ ID NO: 308872 - DNA, 25 bp, Artificial
  probe
  misc_feature (1)..(25): SEQ ID NO: 1903; WAN024D8G; Start 52; Stop 76
tcacttgtagctgatgaccattatt

SEQ ID NO: 308873 - DNA, 25 bp, Artificial
  probe
  misc_feature (1)..(25): SEQ ID NO: 1903; WAN024D8G; Start 381; Stop 405
ttggtctatcctagtaccttgtcat

SEQ ID NO: 308874 - DNA, 25 bp, Artificial
  probe
  misc_feature (1)..(25): SEQ ID NO: 1903; WAN024D8G; Start 376; Stop 400
aatccttggtctatcctagtacctt

SEQ ID NO: 308875 - DNA, 25 bp, Artificial
  probe
  misc_feature (1)..(25): SEQ ID NO: 1903; WAN024D8G; Start 377; Stop 401
atccttggtctatcctagtaccttg

SEQ ID NO: 308876 - DNA, 25 bp, Artificial
  probe
  misc_feature (1)..(25): SEQ ID NO: 1903; WAN024D8G; Start 375; Stop 399
caatccttggtctatcctagtacct

SEQ ID NO: 308877 - DNA, 25 bp, Artificial
  probe
  misc_feature (1)..(25): SEQ ID NO: 1903; WAN024D8G; Start 382; Stop 406
tggtctatcctagtaccttgtcatc

SEQ ID NO: 308878 - DNA, 25 bp, Artificial
  probe
  misc_feature (1)..(25): SEQ ID NO: 1903; WAN024D8G; Start 41; Stop 65
ttggtattctatcacttgtagctga

SEQ ID NO: 308879 - DNA, 25 bp, Artificial
  probe
  misc_feature (1)..(25): SEQ ID NO: 1903; WAN024D8G; Start 40; Stop 64
attggtattctatcacttgtagctg

SEQ ID NO: 308880 - DNA, 25 bp, Artificial
  probe
  misc_feature (1)..(25): SEQ ID NO: 1903; WAN024D8G; Start 380; Stop 404
cttggtctatcctagtaccttgtca

SEQ ID NO: 308881 - DNA, 25 bp, Artificial
  probe
  misc_feature (1)..(25): SEQ ID NO: 1903; WAN024D8G; Start 373; Stop 397
cgcaatccttggtctatcctagtac

SEQ ID NO: 308882 - DNA, 25 bp, Artificial
  probe
  misc_feature (1)..(25): SEQ ID NO: 1903; WAN024D8G; Start 372; Stop 396
acgcaatccttggtctatcctagta

SEQ ID NO: 308883 - DNA, 25 bp, Artificial
  probe
  misc_feature (1)..(25): SEQ ID NO: 1903; WAN024D8G; Start 122; Stop 146
taggagatgaaacgatagaagaagt

SEQ ID NO: 308884 - DNA, 25 bp, Artificial
  probe
  misc_feature (1)..(25): SEQ ID NO: 1903; WAN024D8G; Start 124; Stop 148
ggagatgaaacgatagaagaagttg

SEQ ID NO: 308885 - DNA, 25 bp, Artificial
  probe
  misc_feature (1)..(25): SEQ ID NO: 1903; WAN024D8G; Start 123; Stop 147
aggagatgaaacgatagaagaagtt

SEQ ID NO: 308886 - DNA, 25 bp, Artificial
  probe
  misc_feature (1)..(25): SEQ ID NO: 1903; WAN024D8G; Start 118; Stop 142
ggactaggagatgaaacgatagaag

SEQ ID NO: 308887 - DNA, 25 bp, Artificial
  probe
  misc_feature (1)..(25): SEQ ID NO: 1903; WAN024D8G; Start 74; Stop 98
atttgtatggaatttgggttcagga

SEQ ID NO: 308888 - DNA, 25 bp, Artificial
  probe
  misc_feature (1)..(25): SEQ ID NO: 1903; WAN024D8G; Start 73; Stop 97
tatttgtatggaatttgggttcagg

SEQ ID NO: 308889 - DNA, 25 bp, Artificial
  probe
  misc_feature (1)..(25): SEQ ID NO: 1903; WAN024D8G; Start 379; Stop 403
ccttggtctatcctagtaccttgtc

SEQ ID NO: 308890 - DNA, 25 bp, Artificial
  probe
  misc_feature (1)..(25): SEQ ID NO: 1903; WAN024D8G; Start 259; Stop 283
aagagagtttgggactatttacagg

SEQ ID NO: 308891 - DNA, 25 bp, Artificial
  probe
  misc_feature (1)..(25): SEQ ID NO: 1903; WAN024D8G; Start 119; Stop 143
gactaggagatgaaacgatagaaga

SEQ ID NO: 308892 - DNA, 25 bp, Artificial
  probe
  misc_feature (1)..(25): SEQ ID NO: 1903; WAN024D8G; Start 383; Stop 407
ggtctatcctagtaccttgtcatcg

SEQ ID NO: 308893 - DNA, 25 bp, Artificial
  probe
  misc_feature (1)..(25): SEQ ID NO: 1903; WAN024D8G; Start 125; Stop 149
gagatgaaacgatagaagaagttgt

SEQ ID NO: 308894 - DNA, 25 bp, Artificial
  probe
  misc_feature (1)..(25): SEQ ID NO: 1903; WAN024D8G; Start 378; Stop 402
tccttggtctatcctagtaccttgt

SEQ ID NO: 308895 - DNA, 25 bp, Artificial
  probe
  misc_feature (1)..(25): SEQ ID NO: 1903; WAN024D8G; Start 117; Stop 141
gggactaggagatgaaacgatagaa

SEQ ID NO: 308896 - DNA, 25 bp, Artificial
  probe
  misc_feature (1)..(25): SEQ ID NO: 1903; WAN024D8G; Start 75; Stop 99
tttgtatggaatttgggttcaggag

SEQ ID NO: 308897 - DNA, 25 bp, Artificial
  probe
  misc_feature (1)..(25): SEQ ID NO: 1903; WAN024D8G; Start 39; Stop 63
aattggtattctatcacttgtagct

SEQ ID NO: 308898 - DNA, 25 bp, Artificial
  probe
  misc_feature (1)..(25): SEQ ID NO: 1903; WAN024D8G; Start 120; Stop 144
actaggagatgaaacgatagaagaa

SEQ ID NO: 308899 - DNA, 25 bp, Artificial
  probe
  misc_feature (1)..(25): SEQ ID NO: 1903; WAN024D8G; Start 298; Stop 322
cagacagtgacctatggacaaattg

SEQ ID NO: 308900 - DNA, 25 bp, Artificial
  probe
  misc_feature (1)..(25): SEQ ID NO: 1903; WAN024D8G; Start 265; Stop 289
gtttgggactatttacagggcattc

SEQ ID NO: 308901 - DNA, 25 bp, Artificial
  probe
  misc_feature (1)..(25): SEQ ID NO: 1904; WAN024EYY; Start 891; Stop 915
aggtgctactgataagatgaatgaa

SEQ ID NO: 308902 - DNA, 25 bp, Artificial
  probe
  misc_feature (1)..(25): SEQ ID NO: 1904; WAN024EYY; Start 312; Stop 336
tactggtggagatattgtgattcat

SEQ ID NO: 308903 - DNA, 25 bp, Artificial
  probe
  misc_feature (1)..(25): SEQ ID NO: 1904; WAN024EYY; Start 311; Stop 335
atactggtggagatattgtgattca

SEQ ID NO: 308904 - DNA, 25 bp, Artificial
  probe
  misc_feature (1)..(25): SEQ ID NO: 1904; WAN024EYY; Start 774; Stop 798
tcgttcttattcttactcagatggc

SEQ ID NO: 308905 - DNA, 25 bp, Artificial
  probe
  misc_feature (1)..(25): SEQ ID NO: 1904; WAN024EYY; Start 890; Stop 914
taggtgctactgataagatgaatga

SEQ ID NO: 308906 - DNA, 25 bp, Artificial
  probe
  misc_feature (1)..(25): SEQ ID NO: 1904; WAN024EYY; Start 562; Stop 586
aatggttcttatatggcagttcgtc

SEQ ID NO: 308907 - DNA, 25 bp, Artificial
  probe
  misc_feature (1)..(25): SEQ ID NO: 1904; WAN024EYY; Start 772; Stop 796
cgtcgttcttattcttactcagatg

SEQ ID NO: 308908 - DNA, 25 bp, Artificial
  probe
  misc_feature (1)..(25): SEQ ID NO: 1904; WAN024EYY; Start 892; Stop 916
ggtgctactgataagatgaatgaat

SEQ ID NO: 308909 - DNA, 25 bp, Artificial
  probe
  misc_feature (1)..(25): SEQ ID NO: 1904; WAN024EYY; Start 775; Stop 799
cgttcttattcttactcagatggca

SEQ ID NO: 308910 - DNA, 25 bp, Artificial
  probe
  misc_feature (1)..(25): SEQ ID NO: 1904; WAN024EYY; Start 70; Stop 94
ttcaaggattggacggattatagtg

SEQ ID NO: 308911 - DNA, 25 bp, Artificial
  probe
  misc_feature (1)..(25): SEQ ID NO: 1904; WAN024EYY; Start 69; Stop 93
attcaaggattggacggattatagt

SEQ ID NO: 308912 - DNA, 25 bp, Artificial
  probe
  misc_feature (1)..(25): SEQ ID NO: 1904; WAN024EYY; Start 773; Stop 797
gtcgttcttattcttactcagatgg

SEQ ID NO: 308913 - DNA, 25 bp, Artificial
  probe
  misc_feature (1)..(25): SEQ ID NO: 1904; WAN024EYY; Start 66; Stop 90
gctattcaaggattggacggattat

SEQ ID NO: 308914 - DNA, 25 bp, Artificial
  probe
  misc_feature (1)..(25): SEQ ID NO: 1904; WAN024EYY; Start 783; Stop 807
ttcttactcagatggcattgatgaa

SEQ ID NO: 308915 - DNA, 25 bp, Artificial
  probe
  misc_feature (1)..(25): SEQ ID NO: 1904; WAN024EYY; Start 782; Stop 806
attcttactcagatggcattgatga

SEQ ID NO: 308916 - DNA, 25 bp, Artificial
  probe
  misc_feature (1)..(25): SEQ ID NO: 1904; WAN024EYY; Start 778; Stop 802
tcttattcttactcagatggcattg

SEQ ID NO: 308917 - DNA, 25 bp, Artificial
  probe
  misc_feature (1)..(25): SEQ ID NO: 1904; WAN024EYY; Start 776; Stop 800
gttcttattcttactcagatggcat

SEQ ID NO: 308918 - DNA, 25 bp, Artificial
  probe
  misc_feature (1)..(25): SEQ ID NO: 1904; WAN024EYY; Start 319; Stop 343
ggagatattgtgattcatgcttgtg

SEQ ID NO: 308919 - DNA, 25 bp, Artificial
  probe
  misc_feature (1)..(25): SEQ ID NO: 1904; WAN024EYY; Start 317; Stop 341
gtggagatattgtgattcatgcttg

SEQ ID NO: 308920 - DNA, 25 bp, Artificial
  probe
  misc_feature (1)..(25): SEQ ID NO: 1904; WAN024EYY; Start 889; Stop 913
ctaggtgctactgataagatgaatg

SEQ ID NO: 308921 - DNA, 25 bp, Artificial
  probe
  misc_feature (1)..(25): SEQ ID NO: 1904; WAN024EYY; Start 318; Stop 342
tggagatattgtgattcatgcttgt

SEQ ID NO: 308922 - DNA, 25 bp, Artificial
  probe
  misc_feature (1)..(25): SEQ ID NO: 1904; WAN024EYY; Start 912; Stop 936
tgaatacatcactcacataggtagt

SEQ ID NO: 308923 - DNA, 25 bp, Artificial
  probe
  misc_feature (1)..(25): SEQ ID NO: 1904; WAN024EYY; Start 313; Stop 337
actggtggagatattgtgattcatg

SEQ ID NO: 308924 - DNA, 25 bp, Artificial
  probe
  misc_feature (1)..(25): SEQ ID NO: 1904; WAN024EYY; Start 781; Stop 805
tattcttactcagatggcattgatg

SEQ ID NO: 308925 - DNA, 25 bp, Artificial
  probe
  misc_feature (1)..(25): SEQ ID NO: 1904; WAN024EYY; Start 779; Stop 803
cttattcttactcagatggcattga

SEQ ID NO: 308926 - DNA, 25 bp, Artificial
  probe
  misc_feature (1)..(25): SEQ ID NO: 1904; WAN024EYY; Start 320; Stop 344
gagatattgtgattcatgcttgtgc

SEQ ID NO: 308927 - DNA, 25 bp, Artificial
  probe
  misc_feature (1)..(25): SEQ ID NO: 1904; WAN024EYY; Start 567; Stop 591
ttcttatatggcagttcgtcggatt

SEQ ID NO: 308928 - DNA, 25 bp, Artificial
  probe
  misc_feature (1)..(25): SEQ ID NO: 1904; WAN024EYY; Start 316; Stop 340
ggtggagatattgtgattcatgctt

SEQ ID NO: 308929 - DNA, 25 bp, Artificial
  probe
  misc_feature (1)..(25): SEQ ID NO: 1904; WAN024EYY; Start 909; Stop 933
gaatgaatacatcactcacataggt

SEQ ID NO: 308930 - DNA, 25 bp, Artificial
  probe
  misc_feature (1)..(25): SEQ ID NO: 1904; WAN024EYY; Start 908; Stop 932
tgaatgaatacatcactcacatagg

SEQ ID NO: 308931 - DNA, 25 bp, Artificial
  probe
  misc_feature (1)..(25): SEQ ID NO: 1904; WAN024EYY; Start 777; Stop 801
ttcttattcttactcagatggcatt

SEQ ID NO: 308932 - DNA, 25 bp, Artificial
  probe
  misc_feature (1)..(25): SEQ ID NO: 1904; WAN024EYY; Start 310; Stop 334
tatactggtggagatattgtgattc

SEQ ID NO: 308933 - DNA, 25 bp, Artificial
  probe
  misc_feature (1)..(25): SEQ ID NO: 1904; WAN024EYY; Start 68; Stop 92
tattcaaggattggacggattatag

SEQ ID NO: 308934 - DNA, 25 bp, Artificial
  probe
  misc_feature (1)..(25): SEQ ID NO: 1905; WAN024EV4; Start 1597; Stop 1621
ttaatgagattattggtcgcttcca

SEQ ID NO: 308935 - DNA, 25 bp, Artificial
  probe
  misc_feature (1)..(25): SEQ ID NO: 1905; WAN024EV4; Start 1598; Stop 1622
taatgagattattggtcgcttccag

SEQ ID NO: 308936 - DNA, 25 bp, Artificial
  probe
  misc_feature (1)..(25): SEQ ID NO: 1905; WAN024EV4; Start 1596; Stop 1620
tttaatgagattattggtcgcttcc

SEQ ID NO: 308937 - DNA, 25 bp, Artificial
  probe
  misc_feature (1)..(25): SEQ ID NO: 1905; WAN024EV4; Start 1599; Stop 1623
aatgagattattggtcgcttccagt

SEQ ID NO: 308938 - DNA, 25 bp, Artificial
  probe
  misc_feature (1)..(25): SEQ ID NO: 1905; WAN024EV4; Start 657; Stop 681
ccagctaaaccaactcattgtagat

SEQ ID NO: 308939 - DNA, 25 bp, Artificial
  probe
  misc_feature (1)..(25): SEQ ID NO: 1905; WAN024EV4; Start 658; Stop 682
cagctaaaccaactcattgtagata

SEQ ID NO: 308940 - DNA, 25 bp, Artificial
  probe
  misc_feature (1)..(25): SEQ ID NO: 1905; WAN024EV4; Start 655; Stop 679
caccagctaaaccaactcattgtag

SEQ ID NO: 308941 - DNA, 25 bp, Artificial
  probe
  misc_feature (1)..(25): SEQ ID NO: 1905; WAN024EV4; Start 656; Stop 680
accagctaaaccaactcattgtaga

SEQ ID NO: 308942 - DNA, 25 bp, Artificial
  probe
  misc_feature (1)..(25): SEQ ID NO: 1905; WAN024EV4; Start 652; Stop 676
tttcaccagctaaaccaactcattg

SEQ ID NO: 308943 - DNA, 25 bp, Artificial
  probe
  misc_feature (1)..(25): SEQ ID NO: 1905; WAN024EV4; Start 654; Stop 678
tcaccagctaaaccaactcattgta

SEQ ID NO: 308944 - DNA, 25 bp, Artificial
  probe
  misc_feature (1)..(25): SEQ ID NO: 1905; WAN024EV4; Start 659; Stop 683
agctaaaccaactcattgtagatat

SEQ ID NO: 308945 - DNA, 25 bp, Artificial
  probe
  misc_feature (1)..(25): SEQ ID NO: 1905; WAN024EV4; Start 664; Stop 688
aaccaactcattgtagatatcgatt

SEQ ID NO: 308946 - DNA, 25 bp, Artificial
  probe
  misc_feature (1)..(25): SEQ ID NO: 1905; WAN024EV4; Start 645; Stop 669
tttacagtttcaccagctaaaccaa

SEQ ID NO: 308947 - DNA, 25 bp, Artificial
  probe
  misc_feature (1)..(25): SEQ ID NO: 1905; WAN024EV4; Start 653; Stop 677
ttcaccagctaaaccaactcattgt

SEQ ID NO: 308948 - DNA, 25 bp, Artificial
  probe
  misc_feature (1)..(25): SEQ ID NO: 1905; WAN024EV4; Start 662; Stop 686
taaaccaactcattgtagatatcga

SEQ ID NO: 308949 - DNA, 25 bp, Artificial
  probe
  misc_feature (1)..(25): SEQ ID NO: 1905; WAN024EV4; Start 660; Stop 684
gctaaaccaactcattgtagatatc

SEQ ID NO: 308950 - DNA, 25 bp, Artificial
  probe
  misc_feature (1)..(25): SEQ ID NO: 1905; WAN024EV4; Start 646; Stop 670
ttacagtttcaccagctaaaccaac

SEQ ID NO: 308951 - DNA, 25 bp, Artificial
  probe
  misc_feature (1)..(25): SEQ ID NO: 1905; WAN024EV4; Start 661; Stop 685
ctaaaccaactcattgtagatatcg

SEQ ID NO: 308952 - DNA, 25 bp, Artificial
  probe
  misc_feature (1)..(25): SEQ ID NO: 1905; WAN024EV4; Start 651; Stop 675
gtttcaccagctaaaccaactcatt

SEQ ID NO: 308953 - DNA, 25 bp, Artificial
  probe
  misc_feature (1)..(25): SEQ ID NO: 1905; WAN024EV4; Start 647; Stop 671
tacagtttcaccagctaaaccaact

SEQ ID NO: 308954 - DNA, 25 bp, Artificial
  probe
  misc_feature (1)..(25): SEQ ID NO: 1905; WAN024EV4; Start 663; Stop 687
aaaccaactcattgtagatatcgat

SEQ ID NO: 308955 - DNA, 25 bp, Artificial
  probe
  misc_feature (1)..(25): SEQ ID NO: 1905; WAN024EV4; Start 650; Stop 674
agtttcaccagctaaaccaactcat

SEQ ID NO: 308956 - DNA, 25 bp, Artificial
  probe
  misc_feature (1)..(25): SEQ ID NO: 1905; WAN024EV4; Start 644; Stop 668
ttttacagtttcaccagctaaacca

SEQ ID NO: 308957 - DNA, 25 bp, Artificial
  probe
  misc_feature (1)..(25): SEQ ID NO: 1905; WAN024EV4; Start 649; Stop 673
cagtttcaccagctaaaccaactca

SEQ ID NO: 308958 - DNA, 25 bp, Artificial
  probe
  misc_feature (1)..(25): SEQ ID NO: 1905; WAN024EV4; Start 648; Stop 672
acagtttcaccagctaaaccaactc

SEQ ID NO: 308959 - DNA, 25 bp, Artificial
  probe
  misc_feature (1)..(25): SEQ ID NO: 1906; WAN024D2G; Start 7; Stop 31
aaggttagaatgattgcccaaggta

SEQ ID NO: 308960 - DNA, 25 bp, Artificial
  probe
  misc_feature (1)..(25): SEQ ID NO: 1906; WAN024D2G; Start 8; Stop 32
aggttagaatgattgcccaaggtag

SEQ ID NO: 308961 - DNA, 25 bp, Artificial
  probe
  misc_feature (1)..(25): SEQ ID NO: 1906; WAN024D2G; Start 103; Stop 127
gtatggaataacgacgatggcacag

SEQ ID NO: 308962 - DNA, 25 bp, Artificial
  probe
  misc_feature (1)..(25): SEQ ID NO: 1906; WAN024D2G; Start 6; Stop 30
aaaggttagaatgattgcccaaggt

SEQ ID NO: 308963 - DNA, 25 bp, Artificial
  probe
  misc_feature (1)..(25): SEQ ID NO: 1906; WAN024D2G; Start 104; Stop 128
tatggaataacgacgatggcacagt

SEQ ID NO: 308964 - DNA, 25 bp, Artificial
  probe
  misc_feature (1)..(25): SEQ ID NO: 1906; WAN024D2G; Start 131; Stop 155
aaatcttagcccaagcagactcatc

SEQ ID NO: 308965 - DNA, 25 bp, Artificial
  probe
  misc_feature (1)..(25): SEQ ID NO: 1906; WAN024D2G; Start 130; Stop 154
gaaatcttagcccaagcagactcat

SEQ ID NO: 308966 - DNA, 25 bp, Artificial
  probe
  misc_feature (1)..(25): SEQ ID NO: 1906; WAN024D2G; Start 9; Stop 33
ggttagaatgattgcccaaggtagg

SEQ ID NO: 308967 - DNA, 25 bp, Artificial
  probe
  misc_feature (1)..(25): SEQ ID NO: 1906; WAN024D2G; Start 4; Stop 28
caaaaggttagaatgattgcccaag

SEQ ID NO: 308968 - DNA, 25 bp, Artificial
  probe
  misc_feature (1)..(25): SEQ ID NO: 1906; WAN024D2G; Start 115; Stop 139
gacgatggcacagtggaaatcttag

SEQ ID NO: 308969 - DNA, 25 bp, Artificial
  probe
  misc_feature (1)..(25): SEQ ID NO: 1906; WAN024D2G; Start 5; Stop 29
aaaaggttagaatgattgcccaagg

SEQ ID NO: 308970 - DNA, 25 bp, Artificial
  probe
  misc_feature (1)..(25): SEQ ID NO: 1906; WAN024D2G; Start 172; Stop 196
tttatccaagaaatccgaaaaggac

SEQ ID NO: 308971 - DNA, 25 bp, Artificial
  probe
  misc_feature (1)..(25): SEQ ID NO: 1906; WAN024D2G; Start 173; Stop 197
ttatccaagaaatccgaaaaggacc

SEQ ID NO: 308972 - DNA, 25 bp, Artificial
  probe
  misc_feature (1)..(25): SEQ ID NO: 1906; WAN024D2G; Start 170; Stop 194
aatttatccaagaaatccgaaaagg

SEQ ID NO: 308973 - DNA, 25 bp, Artificial
  probe
  misc_feature (1)..(25): SEQ ID NO: 1906; WAN024D2G; Start 171; Stop 195
atttatccaagaaatccgaaaagga

SEQ ID NO: 308974 - DNA, 25 bp, Artificial
  probe
  misc_feature (1)..(25): SEQ ID NO: 1906; WAN024D2G; Start 165; Stop 189
ggcaaaatttatccaagaaatccga

SEQ ID NO: 308975 - DNA, 25 bp, Artificial
  probe
  misc_feature (1)..(25): SEQ ID NO: 1906; WAN024D2G; Start 129; Stop 153
ggaaatcttagcccaagcagactca

SEQ ID NO: 308976 - DNA, 25 bp, Artificial
  probe
  misc_feature (1)..(25): SEQ ID NO: 1906; WAN024D2G; Start 166; Stop 190
gcaaaatttatccaagaaatccgaa

SEQ ID NO: 308977 - DNA, 25 bp, Artificial
  probe
  misc_feature (1)..(25): SEQ ID NO: 1906; WAN024D2G; Start 10; Stop 34
gttagaatgattgcccaaggtaggg

SEQ ID NO: 308978 - DNA, 25 bp, Artificial
  probe
  misc_feature (1)..(25): SEQ ID NO: 1906; WAN024D2G; Start 164; Stop 188
tggcaaaatttatccaagaaatccg

SEQ ID NO: 308979 - DNA, 25 bp, Artificial
  probe
  misc_feature (1)..(25): SEQ ID NO: 1906; WAN024D2G; Start 110; Stop 134
ataacgacgatggcacagtggaaat

SEQ ID NO: 308980 - DNA, 25 bp, Artificial
  probe
  misc_feature (1)..(25): SEQ ID NO: 1906; WAN024D2G; Start 11; Stop 35
ttagaatgattgcccaaggtagggt

SEQ ID NO: 308981 - DNA, 25 bp, Artificial
  probe
  misc_feature (1)..(25): SEQ ID NO: 1906; WAN024D2G; Start 174; Stop 198
tatccaagaaatccgaaaaggaccg

SEQ ID NO: 308982 - DNA, 25 bp, Artificial
  probe
  misc_feature (1)..(25): SEQ ID NO: 1906; WAN024D2G; Start 109; Stop 133
aataacgacgatggcacagtggaaa

SEQ ID NO: 308983 - DNA, 25 bp, Artificial
  probe
  misc_feature (1)..(25): SEQ ID NO: 1906; WAN024D2G; Start 163; Stop 187
atggcaaaatttatccaagaaatcc

SEQ ID NO: 308984 - DNA, 25 bp, Artificial
  probe
  misc_feature (1)..(25): SEQ ID NO: 1906; WAN024D2G; Start 128; Stop 152
tggaaatcttagcccaagcagactc

SEQ ID NO: 308985 - DNA, 25 bp, Artificial
  probe
  misc_feature (1)..(25): SEQ ID NO: 1906; WAN024D2G; Start 127; Stop 151
gtggaaatcttagcccaagcagact

SEQ ID NO: 308986 - DNA, 25 bp, Artificial
  probe
  misc_feature (1)..(25): SEQ ID NO: 1906; WAN024D2G; Start 126; Stop 150
agtggaaatcttagcccaagcagac

SEQ ID NO: 308987 - DNA, 25 bp, Artificial
  probe
  misc_feature (1)..(25): SEQ ID NO: 1906; WAN024D2G; Start 125; Stop 149
cagtggaaatcttagcccaagcaga

SEQ ID NO: 308988 - DNA, 25 bp, Artificial
  probe
  misc_feature (1)..(25): SEQ ID NO: 1906; WAN024D2G; Start 167; Stop 191
caaaatttatccaagaaatccgaaa

SEQ ID NO: 308989 - DNA, 25 bp, Artificial
  probe
  misc_feature (1)..(25): SEQ ID NO: 1906; WAN024D2G; Start 124; Stop 148
acagtggaaatcttagcccaagcag

SEQ ID NO: 308990 - DNA, 25 bp, Artificial
  probe
  misc_feature (1)..(25): SEQ ID NO: 1906; WAN024D2G; Start 169; Stop 193
aaatttatccaagaaatccgaaaag

SEQ ID NO: 308991 - DNA, 25 bp, Artificial
  probe
  misc_feature (1)..(25): SEQ ID NO: 1906; WAN024D2G; Start 175; Stop 199
atccaagaaatccgaaaaggaccga

SEQ ID NO: 308992 - DNA, 25 bp, Artificial
  probe
  misc_feature (1)..(25): SEQ ID NO: 1907; WAN024G2V; Start 258; Stop 282
gacctacgactatacagagcataca

SEQ ID NO: 308993 - DNA, 25 bp, Artificial
  probe
  misc_feature (1)..(25): SEQ ID NO: 1907; WAN024G2V; Start 259; Stop 283
acctacgactatacagagcatacac

SEQ ID NO: 308994 - DNA, 25 bp, Artificial
  probe
  misc_feature (1)..(25): SEQ ID NO: 1907; WAN024G2V; Start 456; Stop 480
tagccttgatagcgttattaaccag

SEQ ID NO: 308995 - DNA, 25 bp, Artificial
  probe
  misc_feature (1)..(25): SEQ ID NO: 1907; WAN024G2V; Start 458; Stop 482
gccttgatagcgttattaaccagta

SEQ ID NO: 308996 - DNA, 25 bp, Artificial
  probe
  misc_feature (1)..(25): SEQ ID NO: 1907; WAN024G2V; Start 455; Stop 479
gtagccttgatagcgttattaacca

SEQ ID NO: 308997 - DNA, 25 bp, Artificial
  probe
  misc_feature (1)..(25): SEQ ID NO: 1907; WAN024G2V; Start 266; Stop 290
actatacagagcatacacggagtag

SEQ ID NO: 308998 - DNA, 25 bp, Artificial
  probe
  misc_feature (1)..(25): SEQ ID NO: 1907; WAN024G2V; Start 265; Stop 289
gactatacagagcatacacggagta

SEQ ID NO: 308999 - DNA, 25 bp, Artificial
  probe
  misc_feature (1)..(25): SEQ ID NO: 1907; WAN024G2V; Start 257; Stop 281
cgacctacgactatacagagcatac

SEQ ID NO: 309000 - DNA, 25 bp, Artificial
  probe
  misc_feature (1)..(25): SEQ ID NO: 1907; WAN024G2V; Start 459; Stop 483
ccttgatagcgttattaaccagtac

SEQ ID NO: 309001 - DNA, 25 bp, Artificial
  probe
  misc_feature (1)..(25): SEQ ID NO: 1907; WAN024G2V; Start 261; Stop 285
ctacgactatacagagcatacacgg

SEQ ID NO: 309002 - DNA, 25 bp, Artificial
  probe
  misc_feature (1)..(25): SEQ ID NO: 1907; WAN024G2V; Start 260; Stop 284
cctacgactatacagagcatacacg

SEQ ID NO: 309003 - DNA, 25 bp, Artificial
  probe
  misc_feature (1)..(25): SEQ ID NO: 1907; WAN024G2V; Start 267; Stop 291
ctatacagagcatacacggagtagc

SEQ ID NO: 309004 - DNA, 25 bp, Artificial
  probe
  misc_feature (1)..(25): SEQ ID NO: 1907; WAN024G2V; Start 454; Stop 478
cgtagccttgatagcgttattaacc

SEQ ID NO: 309005 - DNA, 25 bp, Artificial
  probe
  misc_feature (1)..(25): SEQ ID NO: 1907; WAN024G2V; Start 453; Stop 477
ccgtagccttgatagcgttattaac

SEQ ID NO: 309006 - DNA, 25 bp, Artificial
  probe
  misc_feature (1)..(25): SEQ ID NO: 1907; WAN024G2V; Start 112; Stop 136
gagcatgattcatactacaaggatc

SEQ ID NO: 309007 - DNA, 25 bp, Artificial
  probe
  misc_feature (1)..(25): SEQ ID NO: 1907; WAN024G2V; Start 110; Stop 134
ttgagcatgattcatactacaagga

SEQ ID NO: 309008 - DNA, 25 bp, Artificial
  probe
  misc_feature (1)..(25): SEQ ID NO: 1907; WAN024G2V; Start 111; Stop 135
tgagcatgattcatactacaaggat

SEQ ID NO: 309009 - DNA, 25 bp, Artificial
  probe
  misc_feature (1)..(25): SEQ ID NO: 1907; WAN024G2V; Start 277; Stop 301
catacacggagtagcaagacctatc

SEQ ID NO: 309010 - DNA, 25 bp, Artificial
  probe
  misc_feature (1)..(25): SEQ ID NO: 1907; WAN024G2V; Start 262; Stop 286
tacgactatacagagcatacacgga

SEQ ID NO: 309011 - DNA, 25 bp, Artificial
  probe
  misc_feature (1)..(25): SEQ ID NO: 1907; WAN024G2V; Start 16; Stop 40
atcattattggagtgacaggtggtt

SEQ ID NO: 309012 - DNA, 25 bp, Artificial
  probe
  misc_feature (1)..(25): SEQ ID NO: 1907; WAN024G2V; Start 15; Stop 39
aatcattattggagtgacaggtggt

SEQ ID NO: 309013 - DNA, 25 bp, Artificial
  probe
  misc_feature (1)..(25): SEQ ID NO: 1907; WAN024G2V; Start 121; Stop 145
tcatactacaaggatcagtctcatt

SEQ ID NO: 309014 - DNA, 25 bp, Artificial
  probe
  misc_feature (1)..(25): SEQ ID NO: 1907; WAN024G2V; Start 120; Stop 144
ttcatactacaaggatcagtctcat

SEQ ID NO: 309015 - DNA, 25 bp, Artificial
  probe
  misc_feature (1)..(25): SEQ ID NO: 1907; WAN024G2V; Start 119; Stop 143
attcatactacaaggatcagtctca

SEQ ID NO: 309016 - DNA, 25 bp, Artificial
  probe
  misc_feature (1)..(25): SEQ ID NO: 1907; WAN024G2V; Start 457; Stop 481
agccttgatagcgttattaaccagt

SEQ ID NO: 309017 - DNA, 25 bp, Artificial
  probe
  misc_feature (1)..(25): SEQ ID NO: 1907; WAN024G2V; Start 109; Stop 133
attgagcatgattcatactacaagg

SEQ ID NO: 309018 - DNA, 25 bp, Artificial
  probe
  misc_feature (1)..(25): SEQ ID NO: 1907; WAN024G2V; Start 18; Stop 42
cattattggagtgacaggtggttct

SEQ ID NO: 309019 - DNA, 25 bp, Artificial
  probe
  misc_feature (1)..(25): SEQ ID NO: 1907; WAN024G2V; Start 214; Stop 238
gagcagattaaggaattgttggcag

SEQ ID NO: 309020 - DNA, 25 bp, Artificial
  probe
  misc_feature (1)..(25): SEQ ID NO: 1907; WAN024G2V; Start 207; Stop 231
gatgatcgagcagattaaggaattg

SEQ ID NO: 309021 - DNA, 25 bp, Artificial
  probe
  misc_feature (1)..(25): SEQ ID NO: 1907; WAN024G2V; Start 206; Stop 230
tgatgatcgagcagattaaggaatt

SEQ ID NO: 309022 - DNA, 25 bp, Artificial
  probe
  misc_feature (1)..(25): SEQ ID NO: 1907; WAN024G2V; Start 205; Stop 229
ttgatgatcgagcagattaaggaat

SEQ ID NO: 309023 - DNA, 25 bp, Artificial
  probe
  misc_feature (1)..(25): SEQ ID NO: 1907; WAN024G2V; Start 210; Stop 234
gatcgagcagattaaggaattgttg

SEQ ID NO: 309024 - DNA, 25 bp, Artificial
  probe
  misc_feature (1)..(25): SEQ ID NO: 1907; WAN024G2V; Start 208; Stop 232
atgatcgagcagattaaggaattgt

SEQ ID NO: 309025 - DNA, 25 bp, Artificial
  probe
  misc_feature (1)..(25): SEQ ID NO: 1908; WAN024FTE; Start 1383; Stop 1407
tgatgaggaaggttatggacaattc

SEQ ID NO: 309026 - DNA, 25 bp, Artificial
  probe
  misc_feature (1)..(25): SEQ ID NO: 1908; WAN024FTE; Start 1382; Stop 1406
ttgatgaggaaggttatggacaatt

SEQ ID NO: 309027 - DNA, 25 bp, Artificial
  probe
  misc_feature (1)..(25): SEQ ID NO: 1908; WAN024FTE; Start 1380; Stop 1404
aattgatgaggaaggttatggacaa

SEQ ID NO: 309028 - DNA, 25 bp, Artificial
  probe
  misc_feature (1)..(25): SEQ ID NO: 1908; WAN024FTE; Start 1314; Stop 1338
tgtcggtcaagaatggactaatcaa

SEQ ID NO: 309029 - DNA, 25 bp, Artificial
  probe
  misc_feature (1)..(25): SEQ ID NO: 1908; WAN024FTE; Start 1313; Stop 1337
ttgtcggtcaagaatggactaatca

SEQ ID NO: 309030 - DNA, 25 bp, Artificial
  probe
  misc_feature (1)..(25): SEQ ID NO: 1908; WAN024FTE; Start 1094; Stop 1118
tttacggagactactatgggatttc

SEQ ID NO: 309031 - DNA, 25 bp, Artificial
  probe
  misc_feature (1)..(25): SEQ ID NO: 1908; WAN024FTE; Start 1095; Stop 1119
ttacggagactactatgggatttca

SEQ ID NO: 309032 - DNA, 25 bp, Artificial
  probe
  misc_feature (1)..(25): SEQ ID NO: 1908; WAN024FTE; Start 1096; Stop 1120
tacggagactactatgggatttcag

SEQ ID NO: 309033 - DNA, 25 bp, Artificial
  probe
  misc_feature (1)..(25): SEQ ID NO: 1908; WAN024FTE; Start 1381; Stop 1405
attgatgaggaaggttatggacaat

SEQ ID NO: 309034 - DNA, 25 bp, Artificial
  probe
  misc_feature (1)..(25): SEQ ID NO: 1908; WAN024FTE; Start 240; Stop 264
agactatcttcaagccattcaagcc

SEQ ID NO: 309035 - DNA, 25 bp, Artificial
  probe
  misc_feature (1)..(25): SEQ ID NO: 1908; WAN024FTE; Start 704; Stop 728
ccgttaagcatattgactctttctt

SEQ ID NO: 309036 - DNA, 25 bp, Artificial
  probe
  misc_feature (1)..(25): SEQ ID NO: 1908; WAN024FTE; Start 1265; Stop 1289
caatcgcagtccttatctcaaatga

SEQ ID NO: 309037 - DNA, 25 bp, Artificial
  probe
  misc_feature (1)..(25): SEQ ID NO: 1908; WAN024FTE; Start 1436; Stop 1460
gggcagtcaataccatctaactaat

SEQ ID NO: 309038 - DNA, 25 bp, Artificial
  probe
  misc_feature (1)..(25): SEQ ID NO: 1908; WAN024FTE; Start 1320; Stop 1344
tcaagaatggactaatcaaaccttt

SEQ ID NO: 309039 - DNA, 25 bp, Artificial
  probe
  misc_feature (1)..(25): SEQ ID NO: 1908; WAN024FTE; Start 1011; Stop 1035
ccttgagtctaccgttgaagaatgg

SEQ ID NO: 309040 - DNA, 25 bp, Artificial
  probe
  misc_feature (1)..(25): SEQ ID NO: 1908; WAN024FTE; Start 703; Stop 727
gccgttaagcatattgactctttct

SEQ ID NO: 309041 - DNA, 25 bp, Artificial
  probe
  misc_feature (1)..(25): SEQ ID NO: 1908; WAN024FTE; Start 1013; Stop 1037
ttgagtctaccgttgaagaatggtt

SEQ ID NO: 309042 - DNA, 25 bp, Artificial
  probe
  misc_feature (1)..(25): SEQ ID NO: 1908; WAN024FTE; Start 1205; Stop 1229
actactttgaccatgctaactgtat

SEQ ID NO: 309043 - DNA, 25 bp, Artificial
  probe
  misc_feature (1)..(25): SEQ ID NO: 1908; WAN024FTE; Start 1204; Stop 1228
gactactttgaccatgctaactgta

SEQ ID NO: 309044 - DNA, 25 bp, Artificial
  probe
  misc_feature (1)..(25): SEQ ID NO: 1908; WAN024FTE; Start 1303; Stop 1327
aagtcaatgtttgtcggtcaagaat

SEQ ID NO: 309045 - DNA, 25 bp, Artificial
  probe
  misc_feature (1)..(25): SEQ ID NO: 1908; WAN024FTE; Start 580; Stop 604
ggaaactacgactacctcatgtatg

SEQ ID NO: 309046 - DNA, 25 bp, Artificial
  probe
  misc_feature (1)..(25): SEQ ID NO: 1908; WAN024FTE; Start 1207; Stop 1231
tactttgaccatgctaactgtatcg

SEQ ID NO: 309047 - DNA, 25 bp, Artificial
  probe
  misc_feature (1)..(25): SEQ ID NO: 1908; WAN024FTE; Start 1206; Stop 1230
ctactttgaccatgctaactgtatc

SEQ ID NO: 309048 - DNA, 25 bp, Artificial
  probe
  misc_feature (1)..(25): SEQ ID NO: 1908; WAN024FTE; Start 239; Stop 263
aagactatcttcaagccattcaagc

SEQ ID NO: 309049 - DNA, 25 bp, Artificial
  probe
  misc_feature (1)..(25): SEQ ID NO: 1908; WAN024FTE; Start 1264; Stop 1288
ccaatcgcagtccttatctcaaatg

SEQ ID NO: 309050 - DNA, 25 bp, Artificial
  probe
  misc_feature (1)..(25): SEQ ID NO: 1908; WAN024FTE; Start 1201; Stop 1225
aatgactactttgaccatgctaact

SEQ ID NO: 309051 - DNA, 25 bp, Artificial
  probe
  misc_feature (1)..(25): SEQ ID NO: 1908; WAN024FTE; Start 1200; Stop 1224
aaatgactactttgaccatgctaac

SEQ ID NO: 309052 - DNA, 25 bp, Artificial
  probe
  misc_feature (1)..(25): SEQ ID NO: 1908; WAN024FTE; Start 1271; Stop 1295
cagtccttatctcaaatgaccaaga

SEQ ID NO: 309053 - DNA, 25 bp, Artificial
  probe
  misc_feature (1)..(25): SEQ ID NO: 1908; WAN024FTE; Start 760; Stop 784
aaatacggtgacgatttctatgttt

SEQ ID NO: 309054 - DNA, 25 bp, Artificial
  probe
  misc_feature (1)..(25): SEQ ID NO: 1908; WAN024FTE; Start 364; Stop 388
gtagaccgtacagttgaacttggag

SEQ ID NO: 309055 - DNA, 25 bp, Artificial
  probe
  misc_feature (1)..(25): SEQ ID NO: 1908; WAN024FTE; Start 1272; Stop 1296
agtccttatctcaaatgaccaagaa

SEQ ID NO: 309056 - DNA, 25 bp, Artificial
  probe
  misc_feature (1)..(25): SEQ ID NO: 1908; WAN024FTE; Start 1202; Stop 1226
atgactactttgaccatgctaactg

SEQ ID NO: 309057 - DNA, 25 bp, Artificial
  probe
  misc_feature (1)..(25): SEQ ID NO: 1908; WAN024FTE; Start 581; Stop 605
gaaactacgactacctcatgtatgc

SEQ ID NO: 309058 - DNA, 25 bp, Artificial
  probe
  misc_feature (1)..(25): SEQ ID NO: 1909; WAN024DBZ; Start 297; Stop 321
tataatcggtgtcacaagttcttca

SEQ ID NO: 309059 - DNA, 25 bp, Artificial
  probe
  misc_feature (1)..(25): SEQ ID NO: 1909; WAN024DBZ; Start 298; Stop 322
ataatcggtgtcacaagttcttcat

SEQ ID NO: 309060 - DNA, 25 bp, Artificial
  probe
  misc_feature (1)..(25): SEQ ID NO: 1909; WAN024DBZ; Start 767; Stop 791
ctacttcaattacaggaccaatagc

SEQ ID NO: 309061 - DNA, 25 bp, Artificial
  probe
  misc_feature (1)..(25): SEQ ID NO: 1909; WAN024DBZ; Start 946; Stop 970
ggcttgttaggttcaccatacttaa

SEQ ID NO: 309062 - DNA, 25 bp, Artificial
  probe
  misc_feature (1)..(25): SEQ ID NO: 1909; WAN024DBZ; Start 296; Stop 320
atataatcggtgtcacaagttcttc

SEQ ID NO: 309063 - DNA, 25 bp, Artificial
  probe
  misc_feature (1)..(25): SEQ ID NO: 1909; WAN024DBZ; Start 947; Stop 971
gcttgttaggttcaccatacttaat

SEQ ID NO: 309064 - DNA, 25 bp, Artificial
  probe
  misc_feature (1)..(25): SEQ ID NO: 1909; WAN024DBZ; Start 303; Stop 327
cggtgtcacaagttcttcatctatt

SEQ ID NO: 309065 - DNA, 25 bp, Artificial
  probe
  misc_feature (1)..(25): SEQ ID NO: 1909; WAN024DBZ; Start 299; Stop 323
taatcggtgtcacaagttcttcatc

SEQ ID NO: 309066 - DNA, 25 bp, Artificial
  probe
  misc_feature (1)..(25): SEQ ID NO: 1909; WAN024DBZ; Start 295; Stop 319
gatataatcggtgtcacaagttctt

SEQ ID NO: 309067 - DNA, 25 bp, Artificial
  probe
  misc_feature (1)..(25): SEQ ID NO: 1909; WAN024DBZ; Start 304; Stop 328
ggtgtcacaagttcttcatctattg

SEQ ID NO: 309068 - DNA, 25 bp, Artificial
  probe
  misc_feature (1)..(25): SEQ ID NO: 1909; WAN024DBZ; Start 305; Stop 329
gtgtcacaagttcttcatctattgc

SEQ ID NO: 309069 - DNA, 25 bp, Artificial
  probe
  misc_feature (1)..(25): SEQ ID NO: 1909; WAN024DBZ; Start 294; Stop 318
tgatataatcggtgtcacaagttct

SEQ ID NO: 309070 - DNA, 25 bp, Artificial
  probe
  misc_feature (1)..(25): SEQ ID NO: 1909; WAN024DBZ; Start 293; Stop 317
ctgatataatcggtgtcacaagttc

SEQ ID NO: 309071 - DNA, 25 bp, Artificial
  probe
  misc_feature (1)..(25): SEQ ID NO: 1909; WAN024DBZ; Start 292; Stop 316
cctgatataatcggtgtcacaagtt

SEQ ID NO: 309072 - DNA, 25 bp, Artificial
  probe
  misc_feature (1)..(25): SEQ ID NO: 1909; WAN024DBZ; Start 290; Stop 314
gtcctgatataatcggtgtcacaag

SEQ ID NO: 309073 - DNA, 25 bp, Artificial
  probe
  misc_feature (1)..(25): SEQ ID NO: 1909; WAN024DBZ; Start 287; Stop 311
caagtcctgatataatcggtgtcac

SEQ ID NO: 309074 - DNA, 25 bp, Artificial
  probe
  misc_feature (1)..(25): SEQ ID NO: 1909; WAN024DBZ; Start 302; Stop 326
tcggtgtcacaagttcttcatctat

SEQ ID NO: 309075 - DNA, 25 bp, Artificial
  probe
  misc_feature (1)..(25): SEQ ID NO: 1909; WAN024DBZ; Start 301; Stop 325
atcggtgtcacaagttcttcatcta

SEQ ID NO: 309076 - DNA, 25 bp, Artificial
  probe
  misc_feature (1)..(25): SEQ ID NO: 1909; WAN024DBZ; Start 539; Stop 563
aattacaagaagttatgagatggct

SEQ ID NO: 309077 - DNA, 25 bp, Artificial
  probe
  misc_feature (1)..(25): SEQ ID NO: 1909; WAN024DBZ; Start 538; Stop 562
gaattacaagaagttatgagatggc

SEQ ID NO: 309078 - DNA, 25 bp, Artificial
  probe
  misc_feature (1)..(25): SEQ ID NO: 1909; WAN024DBZ; Start 291; Stop 315
tcctgatataatcggtgtcacaagt

SEQ ID NO: 309079 - DNA, 25 bp, Artificial
  probe
  misc_feature (1)..(25): SEQ ID NO: 1909; WAN024DBZ; Start 289; Stop 313
agtcctgatataatcggtgtcacaa

SEQ ID NO: 309080 - DNA, 25 bp, Artificial
  probe
  misc_feature (1)..(25): SEQ ID NO: 1909; WAN024DBZ; Start 288; Stop 312
aagtcctgatataatcggtgtcaca

SEQ ID NO: 309081 - DNA, 25 bp, Artificial
  probe
  misc_feature (1)..(25): SEQ ID NO: 1909; WAN024DBZ; Start 540; Stop 564
attacaagaagttatgagatggctc

SEQ ID NO: 309082 - DNA, 25 bp, Artificial
  probe
  misc_feature (1)..(25): SEQ ID NO: 1909; WAN024DBZ; Start 587; Stop 611
agttagatgacatacctcttgttct

SEQ ID NO: 309083 - DNA, 25 bp, Artificial
  probe
  misc_feature (1)..(25): SEQ ID NO: 1909; WAN024DBZ; Start 766; Stop 790
tctacttcaattacaggaccaatag

SEQ ID NO: 309084 - DNA, 25 bp, Artificial
  probe
  misc_feature (1)..(25): SEQ ID NO: 1909; WAN024DBZ; Start 769; Stop 793
acttcaattacaggaccaatagctt

SEQ ID NO: 309085 - DNA, 25 bp, Artificial
  probe
  misc_feature (1)..(25): SEQ ID NO: 1909; WAN024DBZ; Start 384; Stop 408
ttcaataacttgtggactaacatca

SEQ ID NO: 309086 - DNA, 25 bp, Artificial
  probe
  misc_feature (1)..(25): SEQ ID NO: 1909; WAN024DBZ; Start 768; Stop 792
tacttcaattacaggaccaatagct

SEQ ID NO: 309087 - DNA, 25 bp, Artificial
  probe
  misc_feature (1)..(25): SEQ ID NO: 1909; WAN024DBZ; Start 586; Stop 610
aagttagatgacatacctcttgttc

SEQ ID NO: 309088 - DNA, 25 bp, Artificial
  probe
  misc_feature (1)..(25): SEQ ID NO: 1909; WAN024DBZ; Start 385; Stop 409
tcaataacttgtggactaacatcat

SEQ ID NO: 309089 - DNA, 25 bp, Artificial
  probe
  misc_feature (1)..(25): SEQ ID NO: 1909; WAN024DBZ; Start 300; Stop 324
aatcggtgtcacaagttcttcatct

SEQ ID NO: 309090 - DNA, 25 bp, Artificial
  probe
  misc_feature (1)..(25): SEQ ID NO: 1909; WAN024DBZ; Start 770; Stop 794
cttcaattacaggaccaatagcttg

SEQ ID NO: 309091 - DNA, 25 bp, Artificial
  probe
  misc_feature (1)..(25): SEQ ID NO: 1910; WAN024FCK; Start 1084; Stop 1108
aacaatgaacacaacttccttatcg

SEQ ID NO: 309092 - DNA, 25 bp, Artificial
  probe
  misc_feature (1)..(25): SEQ ID NO: 1910; WAN024FCK; Start 1081; Stop 1105
gctaacaatgaacacaacttcctta

SEQ ID NO: 309093 - DNA, 25 bp, Artificial
  probe
  misc_feature (1)..(25): SEQ ID NO: 1910; WAN024FCK; Start 1080; Stop 1104
tgctaacaatgaacacaacttcctt

SEQ ID NO: 309094 - DNA, 25 bp, Artificial
  probe
  misc_feature (1)..(25): SEQ ID NO: 1910; WAN024FCK; Start 1133; Stop 1157
tcggtctcaacaacagtaatctctt

SEQ ID NO: 309095 - DNA, 25 bp, Artificial
  probe
  misc_feature (1)..(25): SEQ ID NO: 1910; WAN024FCK; Start 1079; Stop 1103
ttgctaacaatgaacacaacttcct

SEQ ID NO: 309096 - DNA, 25 bp, Artificial
  probe
  misc_feature (1)..(25): SEQ ID NO: 1910; WAN024FCK; Start 52; Stop 76
ttactagccatgtactcaggatcta

SEQ ID NO: 309097 - DNA, 25 bp, Artificial
  probe
  misc_feature (1)..(25): SEQ ID NO: 1910; WAN024FCK; Start 53; Stop 77
tactagccatgtactcaggatctat

SEQ ID NO: 309098 - DNA, 25 bp, Artificial
  probe
  misc_feature (1)..(25): SEQ ID NO: 1910; WAN024FCK; Start 54; Stop 78
actagccatgtactcaggatctatc

SEQ ID NO: 309099 - DNA, 25 bp, Artificial
  probe
  misc_feature (1)..(25): SEQ ID NO: 1910; WAN024FCK; Start 1087; Stop 1111
aatgaacacaacttccttatcgcag

SEQ ID NO: 309100 - DNA, 25 bp, Artificial
  probe
  misc_feature (1)..(25): SEQ ID NO: 1910; WAN024FCK; Start 51; Stop 75
cttactagccatgtactcaggatct

SEQ ID NO: 309101 - DNA, 25 bp, Artificial
  probe
  misc_feature (1)..(25): SEQ ID NO: 1910; WAN024FCK; Start 50; Stop 74
acttactagccatgtactcaggatc

SEQ ID NO: 309102 - DNA, 25 bp, Artificial
  probe
  misc_feature (1)..(25): SEQ ID NO: 1910; WAN024FCK; Start 1132; Stop 1156
gtcggtctcaacaacagtaatctct

SEQ ID NO: 309103 - DNA, 25 bp, Artificial
  probe
  misc_feature (1)..(25): SEQ ID NO: 1910; WAN024FCK; Start 1086; Stop 1110
caatgaacacaacttccttatcgca

SEQ ID NO: 309104 - DNA, 25 bp, Artificial
  probe
  misc_feature (1)..(25): SEQ ID NO: 1910; WAN024FCK; Start 1085; Stop 1109
acaatgaacacaacttccttatcgc

SEQ ID NO: 309105 - DNA, 25 bp, Artificial
  probe
  misc_feature (1)..(25): SEQ ID NO: 1910; WAN024FCK; Start 487; Stop 511
gctattactgttctgattatcctct

SEQ ID NO: 309106 - DNA, 25 bp, Artificial
  probe
  misc_feature (1)..(25): SEQ ID NO: 1910; WAN024FCK; Start 49; Stop 73
cacttactagccatgtactcaggat

SEQ ID NO: 309107 - DNA, 25 bp, Artificial
  probe
  misc_feature (1)..(25): SEQ ID NO: 1910; WAN024FCK; Start 1083; Stop 1107
taacaatgaacacaacttccttatc

SEQ ID NO: 309108 - DNA, 25 bp, Artificial
  probe
  misc_feature (1)..(25): SEQ ID NO: 1910; WAN024FCK; Start 1082; Stop 1106
ctaacaatgaacacaacttccttat

SEQ ID NO: 309109 - DNA, 25 bp, Artificial
  probe
  misc_feature (1)..(25): SEQ ID NO: 1910; WAN024FCK; Start 360; Stop 384
caatctcttcccatctatcgtaaca

SEQ ID NO: 309110 - DNA, 25 bp, Artificial
  probe
  misc_feature (1)..(25): SEQ ID NO: 1910; WAN024FCK; Start 180; Stop 204
ccaactccaactcaacaaatacttt

SEQ ID NO: 309111 - DNA, 25 bp, Artificial
  probe
  misc_feature (1)..(25): SEQ ID NO: 1910; WAN024FCK; Start 490; Stop 514
attactgttctgattatcctcttga

SEQ ID NO: 309112 - DNA, 25 bp, Artificial
  probe
  misc_feature (1)..(25): SEQ ID NO: 1910; WAN024FCK; Start 361; Stop 385
aatctcttcccatctatcgtaacag

SEQ ID NO: 309113 - DNA, 25 bp, Artificial
  probe
  misc_feature (1)..(25): SEQ ID NO: 1910; WAN024FCK; Start 492; Stop 516
tactgttctgattatcctcttgatc

SEQ ID NO: 309114 - DNA, 25 bp, Artificial
  probe
  misc_feature (1)..(25): SEQ ID NO: 1910; WAN024FCK; Start 179; Stop 203
tccaactccaactcaacaaatactt

SEQ ID NO: 309115 - DNA, 25 bp, Artificial
  probe
  misc_feature (1)..(25): SEQ ID NO: 1910; WAN024FCK; Start 491; Stop 515
ttactgttctgattatcctcttgat

SEQ ID NO: 309116 - DNA, 25 bp, Artificial
  probe
  misc_feature (1)..(25): SEQ ID NO: 1910; WAN024FCK; Start 359; Stop 383
ccaatctcttcccatctatcgtaac

SEQ ID NO: 309117 - DNA, 25 bp, Artificial
  probe
  misc_feature (1)..(25): SEQ ID NO: 1910; WAN024FCK; Start 840; Stop 864
aatctttaacaccttcccttacacc

SEQ ID NO: 309118 - DNA, 25 bp, Artificial
  probe
  misc_feature (1)..(25): SEQ ID NO: 1910; WAN024FCK; Start 178; Stop 202
ctccaactccaactcaacaaatact

SEQ ID NO: 309119 - DNA, 25 bp, Artificial
  probe
  misc_feature (1)..(25): SEQ ID NO: 1910; WAN024FCK; Start 1134; Stop 1158
cggtctcaacaacagtaatctcttt

SEQ ID NO: 309120 - DNA, 25 bp, Artificial
  probe
  misc_feature (1)..(25): SEQ ID NO: 1910; WAN024FCK; Start 839; Stop 863
gaatctttaacaccttcccttacac

SEQ ID NO: 309121 - DNA, 25 bp, Artificial
  probe
  misc_feature (1)..(25): SEQ ID NO: 1910; WAN024FCK; Start 354; Stop 378
agtagccaatctcttcccatctatc

SEQ ID NO: 309122 - DNA, 25 bp, Artificial
  probe
  misc_feature (1)..(25): SEQ ID NO: 1910; WAN024FCK; Start 827; Stop 851
tacttctcggaggaatctttaacac

SEQ ID NO: 309123 - DNA, 25 bp, Artificial
  probe
  misc_feature (1)..(25): SEQ ID NO: 1910; WAN024FCK; Start 353; Stop 377
aagtagccaatctcttcccatctat

SEQ ID NO: 309124 - DNA, 25 bp, Artificial
  probe
  misc_feature (1)..(25): SEQ ID NO: 1911; WAN024GO3; Start 2283; Stop 2307
ctctgaacaatcctacatcctaacc

SEQ ID NO: 309125 - DNA, 25 bp, Artificial
  probe
  misc_feature (1)..(25): SEQ ID NO: 1911; WAN024GO3; Start 2282; Stop 2306
cctctgaacaatcctacatcctaac

SEQ ID NO: 309126 - DNA, 25 bp, Artificial
  probe
  misc_feature (1)..(25): SEQ ID NO: 1911; WAN024GO3; Start 2092; Stop 2116
aatctcatctacacagccattacac

SEQ ID NO: 309127 - DNA, 25 bp, Artificial
  probe
  misc_feature (1)..(25): SEQ ID NO: 1911; WAN024GO3; Start 1085; Stop 1109
ctggtaagacaactgttatcaatgg

SEQ ID NO: 309128 - DNA, 25 bp, Artificial
  probe
  misc_feature (1)..(25): SEQ ID NO: 1911; WAN024GO3; Start 2287; Stop 2311
gaacaatcctacatcctaaccgaag

SEQ ID NO: 309129 - DNA, 25 bp, Artificial
  probe
  misc_feature (1)..(25): SEQ ID NO: 1911; WAN024GO3; Start 1355; Stop 1379
ccaatcaactcttctccaatatctc

SEQ ID NO: 309130 - DNA, 25 bp, Artificial
  probe
  misc_feature (1)..(25): SEQ ID NO: 1911; WAN024GO3; Start 2289; Stop 2313
acaatcctacatcctaaccgaagaa

SEQ ID NO: 309131 - DNA, 25 bp, Artificial
  probe
  misc_feature (1)..(25): SEQ ID NO: 1911; WAN024GO3; Start 2288; Stop 2312
aacaatcctacatcctaaccgaaga

SEQ ID NO: 309132 - DNA, 25 bp, Artificial
  probe
  misc_feature (1)..(25): SEQ ID NO: 1911; WAN024GO3; Start 2130; Stop 2154
actcatcttactaggcgaattacaa

SEQ ID NO: 309133 - DNA, 25 bp, Artificial
  probe
  misc_feature (1)..(25): SEQ ID NO: 1911; WAN024GO3; Start 2129; Stop 2153
aactcatcttactaggcgaattaca

SEQ ID NO: 309134 - DNA, 25 bp, Artificial
  probe
  misc_feature (1)..(25): SEQ ID NO: 1911; WAN024GO3; Start 1084; Stop 1108
actggtaagacaactgttatcaatg

SEQ ID NO: 309135 - DNA, 25 bp, Artificial
  probe
  misc_feature (1)..(25): SEQ ID NO: 1911; WAN024GO3; Start 1359; Stop 1383
tcaactcttctccaatatctcttct

SEQ ID NO: 309136 - DNA, 25 bp, Artificial
  probe
  misc_feature (1)..(25): SEQ ID NO: 1911; WAN024GO3; Start 2286; Stop 2310
tgaacaatcctacatcctaaccgaa

SEQ ID NO: 309137 - DNA, 25 bp, Artificial
  probe
  misc_feature (1)..(25): SEQ ID NO: 1911; WAN024GO3; Start 1081; Stop 1105
ggtactggtaagacaactgttatca

SEQ ID NO: 309138 - DNA, 25 bp, Artificial
  probe
  misc_feature (1)..(25): SEQ ID NO: 1911; WAN024GO3; Start 1080; Stop 1104
tggtactggtaagacaactgttatc

SEQ ID NO: 309139 - DNA, 25 bp, Artificial
  probe
  misc_feature (1)..(25): SEQ ID NO: 1911; WAN024GO3; Start 1079; Stop 1103
ctggtactggtaagacaactgttat

SEQ ID NO: 309140 - DNA, 25 bp, Artificial
  probe
  misc_feature (1)..(25): SEQ ID NO: 1911; WAN024GO3; Start 2132; Stop 2156
tcatcttactaggcgaattacaagc

SEQ ID NO: 309141 - DNA, 25 bp, Artificial
  probe
  misc_feature (1)..(25): SEQ ID NO: 1911; WAN024GO3; Start 835; Stop 859
gaagacaaggttcagcagattgata

SEQ ID NO: 309142 - DNA, 25 bp, Artificial
  probe
  misc_feature (1)..(25): SEQ ID NO: 1911; WAN024GO3; Start 2131; Stop 2155
ctcatcttactaggcgaattacaag

SEQ ID NO: 309143 - DNA, 25 bp, Artificial
  probe
  misc_feature (1)..(25): SEQ ID NO: 1911; WAN024GO3; Start 836; Stop 860
aagacaaggttcagcagattgatac

SEQ ID NO: 309144 - DNA, 25 bp, Artificial
  probe
  misc_feature (1)..(25): SEQ ID NO: 1911; WAN024GO3; Start 2285; Stop 2309
ctgaacaatcctacatcctaaccga

SEQ ID NO: 309145 - DNA, 25 bp, Artificial
  probe
  misc_feature (1)..(25): SEQ ID NO: 1911; WAN024GO3; Start 2284; Stop 2308
tctgaacaatcctacatcctaaccg

SEQ ID NO: 309146 - DNA, 25 bp, Artificial
  probe
  misc_feature (1)..(25): SEQ ID NO: 1911; WAN024GO3; Start 2281; Stop 2305
gcctctgaacaatcctacatcctaa

SEQ ID NO: 309147 - DNA, 25 bp, Artificial
  probe
  misc_feature (1)..(25): SEQ ID NO: 1911; WAN024GO3; Start 2219; Stop 2243
gtgatctactggagaatgttgaaga

SEQ ID NO: 309148 - DNA, 25 bp, Artificial
  probe
  misc_feature (1)..(25): SEQ ID NO: 1911; WAN024GO3; Start 1379; Stop 1403
cttctaacagtaagatcctcatcgt

SEQ ID NO: 309149 - DNA, 25 bp, Artificial
  probe
  misc_feature (1)..(25): SEQ ID NO: 1911; WAN024GO3; Start 1356; Stop 1380
caatcaactcttctccaatatctct

SEQ ID NO: 309150 - DNA, 25 bp, Artificial
  probe
  misc_feature (1)..(25): SEQ ID NO: 1911; WAN024GO3; Start 2220; Stop 2244
tgatctactggagaatgttgaagaa

SEQ ID NO: 309151 - DNA, 25 bp, Artificial
  probe
  misc_feature (1)..(25): SEQ ID NO: 1911; WAN024GO3; Start 2218; Stop 2242
agtgatctactggagaatgttgaag

SEQ ID NO: 309152 - DNA, 25 bp, Artificial
  probe
  misc_feature (1)..(25): SEQ ID NO: 1911; WAN024GO3; Start 1381; Stop 1405
tctaacagtaagatcctcatcgtag

SEQ ID NO: 309153 - DNA, 25 bp, Artificial
  probe
  misc_feature (1)..(25): SEQ ID NO: 1911; WAN024GO3; Start 1358; Stop 1382
atcaactcttctccaatatctcttc

SEQ ID NO: 309154 - DNA, 25 bp, Artificial
  probe
  misc_feature (1)..(25): SEQ ID NO: 1911; WAN024GO3; Start 1082; Stop 1106
gtactggtaagacaactgttatcaa

SEQ ID NO: 309155 - DNA, 25 bp, Artificial
  probe
  misc_feature (1)..(25): SEQ ID NO: 1911; WAN024GO3; Start 1078; Stop 1102
cctggtactggtaagacaactgtta

SEQ ID NO: 309156 - DNA, 25 bp, Artificial
  probe
  misc_feature (1)..(25): SEQ ID NO: 1911; WAN024GO3; Start 1380; Stop 1404
ttctaacagtaagatcctcatcgta

SEQ ID NO: 309157 - DNA, 25 bp, Artificial
  probe
  misc_feature (1)..(25): SEQ ID NO: 1912; WAN024FRK; Start 111; Stop 135
catcatcataagaaaccacttcagc

SEQ ID NO: 309158 - DNA, 25 bp, Artificial
  probe
  misc_feature (1)..(25): SEQ ID NO: 1912; WAN024FRK; Start 110; Stop 134
gcatcatcataagaaaccacttcag

SEQ ID NO: 309159 - DNA, 25 bp, Artificial
  probe
  misc_feature (1)..(25): SEQ ID NO: 1912; WAN024FRK; Start 282; Stop 306
tttcaggactttcaagataggcatc

SEQ ID NO: 309160 - DNA, 25 bp, Artificial
  probe
  misc_feature (1)..(25): SEQ ID NO: 1912; WAN024FRK; Start 112; Stop 136
atcatcataagaaaccacttcagcg

SEQ ID NO: 309161 - DNA, 25 bp, Artificial
  probe
  misc_feature (1)..(25): SEQ ID NO: 1912; WAN024FRK; Start 109; Stop 133
cgcatcatcataagaaaccacttca

SEQ ID NO: 309162 - DNA, 25 bp, Artificial
  probe
  misc_feature (1)..(25): SEQ ID NO: 1912; WAN024FRK; Start 118; Stop 142
ataagaaaccacttcagcgacaaac

SEQ ID NO: 309163 - DNA, 25 bp, Artificial
  probe
  misc_feature (1)..(25): SEQ ID NO: 1912; WAN024FRK; Start 117; Stop 141
cataagaaaccacttcagcgacaaa

SEQ ID NO: 309164 - DNA, 25 bp, Artificial
  probe
  misc_feature (1)..(25): SEQ ID NO: 1912; WAN024FRK; Start 114; Stop 138
catcataagaaaccacttcagcgac

SEQ ID NO: 309165 - DNA, 25 bp, Artificial
  probe
  misc_feature (1)..(25): SEQ ID NO: 1912; WAN024FRK; Start 113; Stop 137
tcatcataagaaaccacttcagcga

SEQ ID NO: 309166 - DNA, 25 bp, Artificial
  probe
  misc_feature (1)..(25): SEQ ID NO: 1912; WAN024FRK; Start 108; Stop 132
ccgcatcatcataagaaaccacttc

SEQ ID NO: 309167 - DNA, 25 bp, Artificial
  probe
  misc_feature (1)..(25): SEQ ID NO: 1912; WAN024FRK; Start 115; Stop 139
atcataagaaaccacttcagcgaca

SEQ ID NO: 309168 - DNA, 25 bp, Artificial
  probe
  misc_feature (1)..(25): SEQ ID NO: 1912; WAN024FRK; Start 116; Stop 140
tcataagaaaccacttcagcgacaa

SEQ ID NO: 309169 - DNA, 25 bp, Artificial
  probe
  misc_feature (1)..(25): SEQ ID NO: 1912; WAN024FRK; Start 119; Stop 143
taagaaaccacttcagcgacaaact

SEQ ID NO: 309170 - DNA, 25 bp, Artificial
  probe
  misc_feature (1)..(25): SEQ ID NO: 1912; WAN024FRK; Start 26; Stop 50
aaatgacggaaacctggaccataaa

SEQ ID NO: 309171 - DNA, 25 bp, Artificial
  probe
  misc_feature (1)..(25): SEQ ID NO: 1912; WAN024FRK; Start 253; Stop 277
caccaagtcttgtttgatagcttca

SEQ ID NO: 309172 - DNA, 25 bp, Artificial
  probe
  misc_feature (1)..(25): SEQ ID NO: 1912; WAN024FRK; Start 283; Stop 307
ttcaggactttcaagataggcatcc

SEQ ID NO: 309173 - DNA, 25 bp, Artificial
  probe
  misc_feature (1)..(25): SEQ ID NO: 1912; WAN024FRK; Start 281; Stop 305
ttttcaggactttcaagataggcat

SEQ ID NO: 309174 - DNA, 25 bp, Artificial
  probe
  misc_feature (1)..(25): SEQ ID NO: 1912; WAN024FRK; Start 272; Stop 296
gcttcaaacttttcaggactttcaa

SEQ ID NO: 309175 - DNA, 25 bp, Artificial
  probe
  misc_feature (1)..(25): SEQ ID NO: 1912; WAN024FRK; Start 252; Stop 276
ccaccaagtcttgtttgatagcttc

SEQ ID NO: 309176 - DNA, 25 bp, Artificial
  probe
  misc_feature (1)..(25): SEQ ID NO: 1912; WAN024FRK; Start 248; Stop 272
tcgtccaccaagtcttgtttgatag

SEQ ID NO: 309177 - DNA, 25 bp, Artificial
  probe
  misc_feature (1)..(25): SEQ ID NO: 1912; WAN024FRK; Start 247; Stop 271
ctcgtccaccaagtcttgtttgata

SEQ ID NO: 309178 - DNA, 25 bp, Artificial
  probe
  misc_feature (1)..(25): SEQ ID NO: 1912; WAN024FRK; Start 274; Stop 298
ttcaaacttttcaggactttcaaga

SEQ ID NO: 309179 - DNA, 25 bp, Artificial
  probe
  misc_feature (1)..(25): SEQ ID NO: 1912; WAN024FRK; Start 251; Stop 275
tccaccaagtcttgtttgatagctt

SEQ ID NO: 309180 - DNA, 25 bp, Artificial
  probe
  misc_feature (1)..(25): SEQ ID NO: 1912; WAN024FRK; Start 280; Stop 304
cttttcaggactttcaagataggca

SEQ ID NO: 309181 - DNA, 25 bp, Artificial
  probe
  misc_feature (1)..(25): SEQ ID NO: 1912; WAN024FRK; Start 279; Stop 303
acttttcaggactttcaagataggc

SEQ ID NO: 309182 - DNA, 25 bp, Artificial
  probe
  misc_feature (1)..(25): SEQ ID NO: 1912; WAN024FRK; Start 275; Stop 299
tcaaacttttcaggactttcaagat

SEQ ID NO: 309183 - DNA, 25 bp, Artificial
  probe
  misc_feature (1)..(25): SEQ ID NO: 1912; WAN024FRK; Start 273; Stop 297
cttcaaacttttcaggactttcaag

SEQ ID NO: 309184 - DNA, 25 bp, Artificial
  probe
  misc_feature (1)..(25): SEQ ID NO: 1912; WAN024FRK; Start 35; Stop 59
aaacctggaccataaaactcaactt

SEQ ID NO: 309185 - DNA, 25 bp, Artificial
  probe
  misc_feature (1)..(25): SEQ ID NO: 1912; WAN024FRK; Start 278; Stop 302
aacttttcaggactttcaagatagg

SEQ ID NO: 309186 - DNA, 25 bp, Artificial
  probe
  misc_feature (1)..(25): SEQ ID NO: 1912; WAN024FRK; Start 120; Stop 144
aagaaaccacttcagcgacaaactt

SEQ ID NO: 309187 - DNA, 25 bp, Artificial
  probe
  misc_feature (1)..(25): SEQ ID NO: 1912; WAN024FRK; Start 3; Stop 27
gcaaatcttcaatataggtttcaaa

SEQ ID NO: 309188 - DNA, 25 bp, Artificial
  probe
  misc_feature (1)..(25): SEQ ID NO: 1912; WAN024FRK; Start 288; Stop 312
gactttcaagataggcatccacagc

SEQ ID NO: 309189 - DNA, 25 bp, Artificial
  probe
  misc_feature (1)..(25): SEQ ID NO: 1912; WAN024FRK; Start 34; Stop 58
gaaacctggaccataaaactcaact

SEQ ID NO: 309190 - DNA, 25 bp, Artificial
  probe
  misc_feature (1)..(25): SEQ ID NO: 1913; WAN024D6N; Start 415; Stop 439
gcagagagtcagatgaaggattaac

SEQ ID NO: 309191 - DNA, 25 bp, Artificial
  probe
  misc_feature (1)..(25): SEQ ID NO: 1913; WAN024D6N; Start 416; Stop 440
cagagagtcagatgaaggattaact

SEQ ID NO: 309192 - DNA, 25 bp, Artificial
  probe
  misc_feature (1)..(25): SEQ ID NO: 1913; WAN024D6N; Start 354; Stop 378
aattcagttgactatggaggcagaa

SEQ ID NO: 309193 - DNA, 25 bp, Artificial
  probe
  misc_feature (1)..(25): SEQ ID NO: 1913; WAN024D6N; Start 417; Stop 441
agagagtcagatgaaggattaacta

SEQ ID NO: 309194 - DNA, 25 bp, Artificial
  probe
  misc_feature (1)..(25): SEQ ID NO: 1913; WAN024D6N; Start 188; Stop 212
gaacagagattgtcaaggaccttaa

SEQ ID NO: 309195 - DNA, 25 bp, Artificial
  probe
  misc_feature (1)..(25): SEQ ID NO: 1913; WAN024D6N; Start 355; Stop 379
attcagttgactatggaggcagaac

SEQ ID NO: 309196 - DNA, 25 bp, Artificial
  probe
  misc_feature (1)..(25): SEQ ID NO: 1913; WAN024D6N; Start 418; Stop 442
gagagtcagatgaaggattaactaa

SEQ ID NO: 309197 - DNA, 25 bp, Artificial
  probe
  misc_feature (1)..(25): SEQ ID NO: 1913; WAN024D6N; Start 413; Stop 437
atgcagagagtcagatgaaggatta

SEQ ID NO: 309198 - DNA, 25 bp, Artificial
  probe
  misc_feature (1)..(25): SEQ ID NO: 1913; WAN024D6N; Start 414; Stop 438
tgcagagagtcagatgaaggattaa

SEQ ID NO: 309199 - DNA, 25 bp, Artificial
  probe
  misc_feature (1)..(25): SEQ ID NO: 1913; WAN024D6N; Start 187; Stop 211
ggaacagagattgtcaaggacctta

SEQ ID NO: 309200 - DNA, 25 bp, Artificial
  probe
  misc_feature (1)..(25): SEQ ID NO: 1913; WAN024D6N; Start 419; Stop 443
agagtcagatgaaggattaactaat

SEQ ID NO: 309201 - DNA, 25 bp, Artificial
  probe
  misc_feature (1)..(25): SEQ ID NO: 1913; WAN024D6N; Start 346; Stop 370
ttggagagaattcagttgactatgg

SEQ ID NO: 309202 - DNA, 25 bp, Artificial
  probe
  misc_feature (1)..(25): SEQ ID NO: 1913; WAN024D6N; Start 349; Stop 373
gagagaattcagttgactatggagg

SEQ ID NO: 309203 - DNA, 25 bp, Artificial
  probe
  misc_feature (1)..(25): SEQ ID NO: 1913; WAN024D6N; Start 348; Stop 372
ggagagaattcagttgactatggag

SEQ ID NO: 309204 - DNA, 25 bp, Artificial
  probe
  misc_feature (1)..(25): SEQ ID NO: 1913; WAN024D6N; Start 412; Stop 436
gatgcagagagtcagatgaaggatt

SEQ ID NO: 309205 - DNA, 25 bp, Artificial
  probe
  misc_feature (1)..(25): SEQ ID NO: 1913; WAN024D6N; Start 108; Stop 132
ggtcaatcctgtcattatcagaaag

SEQ ID NO: 309206 - DNA, 25 bp, Artificial
  probe
  misc_feature (1)..(25): SEQ ID NO: 1913; WAN024D6N; Start 107; Stop 131
gggtcaatcctgtcattatcagaaa

SEQ ID NO: 309207 - DNA, 25 bp, Artificial
  probe
  misc_feature (1)..(25): SEQ ID NO: 1913; WAN024D6N; Start 347; Stop 371
tggagagaattcagttgactatgga

SEQ ID NO: 309208 - DNA, 25 bp, Artificial
  probe
  misc_feature (1)..(25): SEQ ID NO: 1913; WAN024D6N; Start 280; Stop 304
ttccatgacaatccgaatccaaatt

SEQ ID NO: 309209 - DNA, 25 bp, Artificial
  probe
  misc_feature (1)..(25): SEQ ID NO: 1913; WAN024D6N; Start 279; Stop 303
tttccatgacaatccgaatccaaat

SEQ ID NO: 309210 - DNA, 25 bp, Artificial
  probe
  misc_feature (1)..(25): SEQ ID NO: 1913; WAN024D6N; Start 345; Stop 369
attggagagaattcagttgactatg

SEQ ID NO: 309211 - DNA, 25 bp, Artificial
  probe
  misc_feature (1)..(25): SEQ ID NO: 1913; WAN024D6N; Start 189; Stop 213
aacagagattgtcaaggaccttaag

SEQ ID NO: 309212 - DNA, 25 bp, Artificial
  probe
  misc_feature (1)..(25): SEQ ID NO: 1913; WAN024D6N; Start 252; Stop 276
tcttggtaagacaggtcaactcttc

SEQ ID NO: 309213 - DNA, 25 bp, Artificial
  probe
  misc_feature (1)..(25): SEQ ID NO: 1913; WAN024D6N; Start 109; Stop 133
gtcaatcctgtcattatcagaaaga

SEQ ID NO: 309214 - DNA, 25 bp, Artificial
  probe
  misc_feature (1)..(25): SEQ ID NO: 1913; WAN024D6N; Start 254; Stop 278
ttggtaagacaggtcaactcttcag

SEQ ID NO: 309215 - DNA, 25 bp, Artificial
  probe
  misc_feature (1)..(25): SEQ ID NO: 1913; WAN024D6N; Start 253; Stop 277
cttggtaagacaggtcaactcttca

SEQ ID NO: 309216 - DNA, 25 bp, Artificial
  probe
  misc_feature (1)..(25): SEQ ID NO: 1913; WAN024D6N; Start 5; Stop 29
aaattccaagtagatttaccattgc

SEQ ID NO: 309217 - DNA, 25 bp, Artificial
  probe
  misc_feature (1)..(25): SEQ ID NO: 1913; WAN024D6N; Start 3; Stop 27
gcaaattccaagtagatttaccatt

SEQ ID NO: 309218 - DNA, 25 bp, Artificial
  probe
  misc_feature (1)..(25): SEQ ID NO: 1913; WAN024D6N; Start 274; Stop 298
ttcagtttccatgacaatccgaatc

SEQ ID NO: 309219 - DNA, 25 bp, Artificial
  probe
  misc_feature (1)..(25): SEQ ID NO: 1913; WAN024D6N; Start 273; Stop 297
cttcagtttccatgacaatccgaat

SEQ ID NO: 309220 - DNA, 25 bp, Artificial
  probe
  misc_feature (1)..(25): SEQ ID NO: 1913; WAN024D6N; Start 278; Stop 302
gtttccatgacaatccgaatccaaa

SEQ ID NO: 309221 - DNA, 25 bp, Artificial
  probe
  misc_feature (1)..(25): SEQ ID NO: 1913; WAN024D6N; Start 350; Stop 374
agagaattcagttgactatggaggc

SEQ ID NO: 309222 - DNA, 25 bp, Artificial
  probe
  misc_feature (1)..(25): SEQ ID NO: 1913; WAN024D6N; Start 353; Stop 377
gaattcagttgactatggaggcaga

SEQ ID NO: 309223 - DNA, 25 bp, Artificial
  probe
  misc_feature (1)..(25): SEQ ID NO: 1914; WAN024GHA; Start 248; Stop 272
ataatcaacctgctactgaagttcc

SEQ ID NO: 309224 - DNA, 25 bp, Artificial
  probe
  misc_feature (1)..(25): SEQ ID NO: 1914; WAN024GHA; Start 250; Stop 274
aatcaacctgctactgaagttccta

SEQ ID NO: 309225 - DNA, 25 bp, Artificial
  probe
  misc_feature (1)..(25): SEQ ID NO: 1914; WAN024GHA; Start 249; Stop 273
taatcaacctgctactgaagttcct

SEQ ID NO: 309226 - DNA, 25 bp, Artificial
  probe
  misc_feature (1)..(25): SEQ ID NO: 1914; WAN024GHA; Start 251; Stop 275
atcaacctgctactgaagttcctag

SEQ ID NO: 309227 - DNA, 25 bp, Artificial
  probe
  misc_feature (1)..(25): SEQ ID NO: 1914; WAN024GHA; Start 254; Stop 278
aacctgctactgaagttcctagttc

SEQ ID NO: 309228 - DNA, 25 bp, Artificial
  probe
  misc_feature (1)..(25): SEQ ID NO: 1914; WAN024GHA; Start 303; Stop 327
taaagataatgctggaaactggaca

SEQ ID NO: 309229 - DNA, 25 bp, Artificial
  probe
  misc_feature (1)..(25): SEQ ID NO: 1914; WAN024GHA; Start 302; Stop 326
ctaaagataatgctggaaactggac

SEQ ID NO: 309230 - DNA, 25 bp, Artificial
  probe
  misc_feature (1)..(25): SEQ ID NO: 1914; WAN024GHA; Start 253; Stop 277
caacctgctactgaagttcctagtt

SEQ ID NO: 309231 - DNA, 25 bp, Artificial
  probe
  misc_feature (1)..(25): SEQ ID NO: 1914; WAN024GHA; Start 304; Stop 328
aaagataatgctggaaactggacaa

SEQ ID NO: 309232 - DNA, 25 bp, Artificial
  probe
  misc_feature (1)..(25): SEQ ID NO: 1914; WAN024GHA; Start 305; Stop 329
aagataatgctggaaactggacaag

SEQ ID NO: 309233 - DNA, 25 bp, Artificial
  probe
  misc_feature (1)..(25): SEQ ID NO: 1914; WAN024GHA; Start 74; Stop 98
taagcattgaagataatcagggagg

SEQ ID NO: 309234 - DNA, 25 bp, Artificial
  probe
  misc_feature (1)..(25): SEQ ID NO: 1914; WAN024GHA; Start 79; Stop 103
attgaagataatcagggaggtagtg

SEQ ID NO: 309235 - DNA, 25 bp, Artificial
  probe
  misc_feature (1)..(25): SEQ ID NO: 1914; WAN024GHA; Start 78; Stop 102
cattgaagataatcagggaggtagt

SEQ ID NO: 309236 - DNA, 25 bp, Artificial
  probe
  misc_feature (1)..(25): SEQ ID NO: 1914; WAN024GHA; Start 73; Stop 97
gtaagcattgaagataatcagggag

SEQ ID NO: 309237 - DNA, 25 bp, Artificial
  probe
  misc_feature (1)..(25): SEQ ID NO: 1914; WAN024GHA; Start 77; Stop 101
gcattgaagataatcagggaggtag

SEQ ID NO: 309238 - DNA, 25 bp, Artificial
  probe
  misc_feature (1)..(25): SEQ ID NO: 1914; WAN024GHA; Start 76; Stop 100
agcattgaagataatcagggaggta

SEQ ID NO: 309239 - DNA, 25 bp, Artificial
  probe
  misc_feature (1)..(25): SEQ ID NO: 1914; WAN024GHA; Start 252; Stop 276
tcaacctgctactgaagttcctagt

SEQ ID NO: 309240 - DNA, 25 bp, Artificial
  probe
  misc_feature (1)..(25): SEQ ID NO: 1914; WAN024GHA; Start 80; Stop 104
ttgaagataatcagggaggtagtgg

SEQ ID NO: 309241 - DNA, 25 bp, Artificial
  probe
  misc_feature (1)..(25): SEQ ID NO: 1914; WAN024GHA; Start 369; Stop 393
tgctaaaccgacatatccagacaaa

SEQ ID NO: 309242 - DNA, 25 bp, Artificial
  probe
  misc_feature (1)..(25): SEQ ID NO: 1914; WAN024GHA; Start 75; Stop 99
aagcattgaagataatcagggaggt

SEQ ID NO: 309243 - DNA, 25 bp, Artificial
  probe
  misc_feature (1)..(25): SEQ ID NO: 1914; WAN024GHA; Start 108; Stop 132
taatttcagttctgtttcaagtagc

SEQ ID NO: 309244 - DNA, 25 bp, Artificial
  probe
  misc_feature (1)..(25): SEQ ID NO: 1914; WAN024GHA; Start 110; Stop 134
atttcagttctgtttcaagtagctc

SEQ ID NO: 309245 - DNA, 25 bp, Artificial
  probe
  misc_feature (1)..(25): SEQ ID NO: 1914; WAN024GHA; Start 111; Stop 135
tttcagttctgtttcaagtagctca

SEQ ID NO: 309246 - DNA, 25 bp, Artificial
  probe
  misc_feature (1)..(25): SEQ ID NO: 1914; WAN024GHA; Start 307; Stop 331
gataatgctggaaactggacaagtg

SEQ ID NO: 309247 - DNA, 25 bp, Artificial
  probe
  misc_feature (1)..(25): SEQ ID NO: 1914; WAN024GHA; Start 306; Stop 330
agataatgctggaaactggacaagt

SEQ ID NO: 309248 - DNA, 25 bp, Artificial
  probe
  misc_feature (1)..(25): SEQ ID NO: 1914; WAN024GHA; Start 109; Stop 133
aatttcagttctgtttcaagtagct

SEQ ID NO: 309249 - DNA, 25 bp, Artificial
  probe
  misc_feature (1)..(25): SEQ ID NO: 1914; WAN024GHA; Start 112; Stop 136
ttcagttctgtttcaagtagctcac

SEQ ID NO: 309250 - DNA, 25 bp, Artificial
  probe
  misc_feature (1)..(25): SEQ ID NO: 1914; WAN024GHA; Start 115; Stop 139
agttctgtttcaagtagctcacaaa

SEQ ID NO: 309251 - DNA, 25 bp, Artificial
  probe
  misc_feature (1)..(25): SEQ ID NO: 1914; WAN024GHA; Start 361; Stop 385
attgtttctgctaaaccgacatatc

SEQ ID NO: 309252 - DNA, 25 bp, Artificial
  probe
  misc_feature (1)..(25): SEQ ID NO: 1914; WAN024GHA; Start 81; Stop 105
tgaagataatcagggaggtagtggg

SEQ ID NO: 309253 - DNA, 25 bp, Artificial
  probe
  misc_feature (1)..(25): SEQ ID NO: 1914; WAN024GHA; Start 359; Stop 383
aaattgtttctgctaaaccgacata

SEQ ID NO: 309254 - DNA, 25 bp, Artificial
  probe
  misc_feature (1)..(25): SEQ ID NO: 1914; WAN024GHA; Start 360; Stop 384
aattgtttctgctaaaccgacatat

SEQ ID NO: 309255 - DNA, 25 bp, Artificial
  probe
  misc_feature (1)..(25): SEQ ID NO: 1914; WAN024GHA; Start 114; Stop 138
cagttctgtttcaagtagctcacaa

SEQ ID NO: 309256 - DNA, 25 bp, Artificial
  probe
  misc_feature (1)..(25): SEQ ID NO: 1915; WAN024CCN; Start 24; Stop 48
tactaatggagcaatcagcatccta

SEQ ID NO: 309257 - DNA, 25 bp, Artificial
  probe
  misc_feature (1)..(25): SEQ ID NO: 1915; WAN024CCN; Start 27; Stop 51
taatggagcaatcagcatcctagtc

SEQ ID NO: 309258 - DNA, 25 bp, Artificial
  probe
  misc_feature (1)..(25): SEQ ID NO: 1915; WAN024CCN; Start 26; Stop 50
ctaatggagcaatcagcatcctagt

SEQ ID NO: 309259 - DNA, 25 bp, Artificial
  probe
  misc_feature (1)..(25): SEQ ID NO: 1915; WAN024CCN; Start 25; Stop 49
actaatggagcaatcagcatcctag

SEQ ID NO: 309260 - DNA, 25 bp, Artificial
  probe
  misc_feature (1)..(25): SEQ ID NO: 1915; WAN024CCN; Start 29; Stop 53
atggagcaatcagcatcctagtcat

SEQ ID NO: 309261 - DNA, 25 bp, Artificial
  probe
  misc_feature (1)..(25): SEQ ID NO: 1915; WAN024CCN; Start 35; Stop 59
caatcagcatcctagtcattttagc

SEQ ID NO: 309262 - DNA, 25 bp, Artificial
  probe
  misc_feature (1)..(25): SEQ ID NO: 1915; WAN024CCN; Start 34; Stop 58
gcaatcagcatcctagtcattttag

SEQ ID NO: 309263 - DNA, 25 bp, Artificial
  probe
  misc_feature (1)..(25): SEQ ID NO: 1915; WAN024CCN; Start 36; Stop 60
aatcagcatcctagtcattttagca

SEQ ID NO: 309264 - DNA, 25 bp, Artificial
  probe
  misc_feature (1)..(25): SEQ ID NO: 1915; WAN024CCN; Start 33; Stop 57
agcaatcagcatcctagtcatttta

SEQ ID NO: 309265 - DNA, 25 bp, Artificial
  probe
  misc_feature (1)..(25): SEQ ID NO: 1915; WAN024CCN; Start 30; Stop 54
tggagcaatcagcatcctagtcatt

SEQ ID NO: 309266 - DNA, 25 bp, Artificial
  probe
  misc_feature (1)..(25): SEQ ID NO: 1915; WAN024CCN; Start 28; Stop 52
aatggagcaatcagcatcctagtca

SEQ ID NO: 309267 - DNA, 25 bp, Artificial
  probe
  misc_feature (1)..(25): SEQ ID NO: 1915; WAN024CCN; Start 37; Stop 61
atcagcatcctagtcattttagcag

SEQ ID NO: 309268 - DNA, 25 bp, Artificial
  probe
  misc_feature (1)..(25): SEQ ID NO: 1915; WAN024CCN; Start 106; Stop 130
ggagaaaagaccatcaaaatcgttg

SEQ ID NO: 309269 - DNA, 25 bp, Artificial
  probe
  misc_feature (1)..(25): SEQ ID NO: 1915; WAN024CCN; Start 32; Stop 56
gagcaatcagcatcctagtcatttt

SEQ ID NO: 309270 - DNA, 25 bp, Artificial
  probe
  misc_feature (1)..(25): SEQ ID NO: 1915; WAN024CCN; Start 31; Stop 55
ggagcaatcagcatcctagtcattt

SEQ ID NO: 309271 - DNA, 25 bp, Artificial
  probe
  misc_feature (1)..(25): SEQ ID NO: 1915; WAN024CCN; Start 50; Stop 74
tcattttagcaggggtggtagttag

SEQ ID NO: 309272 - DNA, 25 bp, Artificial
  probe
  misc_feature (1)..(25): SEQ ID NO: 1915; WAN024CCN; Start 49; Stop 73
gtcattttagcaggggtggtagtta

SEQ ID NO: 309273 - DNA, 25 bp, Artificial
  probe
  misc_feature (1)..(25): SEQ ID NO: 1915; WAN024CCN; Start 46; Stop 70
ctagtcattttagcaggggtggtag

SEQ ID NO: 309274 - DNA, 25 bp, Artificial
  probe
  misc_feature (1)..(25): SEQ ID NO: 1915; WAN024CCN; Start 101; Stop 125
aaggtggagaaaagaccatcaaaat

SEQ ID NO: 309275 - DNA, 25 bp, Artificial
  probe
  misc_feature (1)..(25): SEQ ID NO: 1915; WAN024CCN; Start 100; Stop 124
aaaggtggagaaaagaccatcaaaa

SEQ ID NO: 309276 - DNA, 25 bp, Artificial
  probe
  misc_feature (1)..(25): SEQ ID NO: 1915; WAN024CCN; Start 99; Stop 123
aaaaggtggagaaaagaccatcaaa

SEQ ID NO: 309277 - DNA, 25 bp, Artificial
  probe
  misc_feature (1)..(25): SEQ ID NO: 1915; WAN024CCN; Start 51; Stop 75
cattttagcaggggtggtagttagg

SEQ ID NO: 309278 - DNA, 25 bp, Artificial
  probe
  misc_feature (1)..(25): SEQ ID NO: 1915; WAN024CCN; Start 105; Stop 129
tggagaaaagaccatcaaaatcgtt

SEQ ID NO: 309279 - DNA, 25 bp, Artificial
  probe
  misc_feature (1)..(25): SEQ ID NO: 1915; WAN024CCN; Start 102; Stop 126
aggtggagaaaagaccatcaaaatc

SEQ ID NO: 309280 - DNA, 25 bp, Artificial
  probe
  misc_feature (1)..(25): SEQ ID NO: 1915; WAN024CCN; Start 47; Stop 71
tagtcattttagcaggggtggtagt

SEQ ID NO: 309281 - DNA, 25 bp, Artificial
  probe
  misc_feature (1)..(25): SEQ ID NO: 1915; WAN024CCN; Start 104; Stop 128
gtggagaaaagaccatcaaaatcgt

SEQ ID NO: 309282 - DNA, 25 bp, Artificial
  probe
  misc_feature (1)..(25): SEQ ID NO: 1915; WAN024CCN; Start 38; Stop 62
tcagcatcctagtcattttagcagg

SEQ ID NO: 309283 - DNA, 25 bp, Artificial
  probe
  misc_feature (1)..(25): SEQ ID NO: 1915; WAN024CCN; Start 103; Stop 127
ggtggagaaaagaccatcaaaatcg

SEQ ID NO: 309284 - DNA, 25 bp, Artificial
  probe
  misc_feature (1)..(25): SEQ ID NO: 1915; WAN024CCN; Start 107; Stop 131
gagaaaagaccatcaaaatcgttga

SEQ ID NO: 309285 - DNA, 25 bp, Artificial
  probe
  misc_feature (1)..(25): SEQ ID NO: 1915; WAN024CCN; Start 108; Stop 132
agaaaagaccatcaaaatcgttgaa

SEQ ID NO: 309286 - DNA, 25 bp, Artificial
  probe
  misc_feature (1)..(25): SEQ ID NO: 1915; WAN024CCN; Start 114; Stop 138
gaccatcaaaatcgttgaaatcttg

SEQ ID NO: 309287 - DNA, 25 bp, Artificial
  probe
  misc_feature (1)..(25): SEQ ID NO: 1915; WAN024CCN; Start 113; Stop 137
agaccatcaaaatcgttgaaatctt

SEQ ID NO: 309288 - DNA, 25 bp, Artificial
  probe
  misc_feature (1)..(25): SEQ ID NO: 1915; WAN024CCN; Start 112; Stop 136
aagaccatcaaaatcgttgaaatct

SEQ ID NO: 309289 - DNA, 25 bp, Artificial
  probe
  misc_feature (1)..(25): SEQ ID NO: 1916; WAN024F67; Start 401; Stop 425
gtgttgtgtactctgattactccat

SEQ ID NO: 309290 - DNA, 25 bp, Artificial
  probe
  misc_feature (1)..(25): SEQ ID NO: 1916; WAN024F67; Start 7; Stop 31
ccaacttacaacattgacaatccaa

SEQ ID NO: 309291 - DNA, 25 bp, Artificial
  probe
  misc_feature (1)..(25): SEQ ID NO: 1916; WAN024F67; Start 5; Stop 29
aaccaacttacaacattgacaatcc

SEQ ID NO: 309292 - DNA, 25 bp, Artificial
  probe
  misc_feature (1)..(25): SEQ ID NO: 1916; WAN024F67; Start 403; Stop 427
gttgtgtactctgattactccatga

SEQ ID NO: 309293 - DNA, 25 bp, Artificial
  probe
  misc_feature (1)..(25): SEQ ID NO: 1916; WAN024F67; Start 4; Stop 28
caaccaacttacaacattgacaatc

SEQ ID NO: 309294 - DNA, 25 bp, Artificial
  probe
  misc_feature (1)..(25): SEQ ID NO: 1916; WAN024F67; Start 402; Stop 426
tgttgtgtactctgattactccatg

SEQ ID NO: 309295 - DNA, 25 bp, Artificial
  probe
  misc_feature (1)..(25): SEQ ID NO: 1916; WAN024F67; Start 405; Stop 429
tgtgtactctgattactccatgatt

SEQ ID NO: 309296 - DNA, 25 bp, Artificial
  probe
  misc_feature (1)..(25): SEQ ID NO: 1916; WAN024F67; Start 404; Stop 428
ttgtgtactctgattactccatgat

SEQ ID NO: 309297 - DNA, 25 bp, Artificial
  probe
  misc_feature (1)..(25): SEQ ID NO: 1916; WAN024F67; Start 3; Stop 27
gcaaccaacttacaacattgacaat

SEQ ID NO: 309298 - DNA, 25 bp, Artificial
  probe
  misc_feature (1)..(25): SEQ ID NO: 1916; WAN024F67; Start 399; Stop 423
aagtgttgtgtactctgattactcc

SEQ ID NO: 309299 - DNA, 25 bp, Artificial
  probe
  misc_feature (1)..(25): SEQ ID NO: 1916; WAN024F67; Start 6; Stop 30
accaacttacaacattgacaatcca

SEQ ID NO: 309300 - DNA, 25 bp, Artificial
  probe
  misc_feature (1)..(25): SEQ ID NO: 1916; WAN024F67; Start 406; Stop 430
gtgtactctgattactccatgattc

SEQ ID NO: 309301 - DNA, 25 bp, Artificial
  probe
  misc_feature (1)..(25): SEQ ID NO: 1916; WAN024F67; Start 400; Stop 424
agtgttgtgtactctgattactcca

SEQ ID NO: 309302 - DNA, 25 bp, Artificial
  probe
  misc_feature (1)..(25): SEQ ID NO: 1916; WAN024F67; Start 407; Stop 431
tgtactctgattactccatgattca

SEQ ID NO: 309303 - DNA, 25 bp, Artificial
  probe
  misc_feature (1)..(25): SEQ ID NO: 1916; WAN024F67; Start 290; Stop 314
tacttgctattcataaggagttgtt

SEQ ID NO: 309304 - DNA, 25 bp, Artificial
  probe
  misc_feature (1)..(25): SEQ ID NO: 1916; WAN024F67; Start 289; Stop 313
ttacttgctattcataaggagttgt

SEQ ID NO: 309305 - DNA, 25 bp, Artificial
  probe
  misc_feature (1)..(25): SEQ ID NO: 1916; WAN024F67; Start 153; Stop 177
gacttatgagcaggtttatgaggat

SEQ ID NO: 309306 - DNA, 25 bp, Artificial
  probe
  misc_feature (1)..(25): SEQ ID NO: 1916; WAN024F67; Start 154; Stop 178
acttatgagcaggtttatgaggatg

SEQ ID NO: 309307 - DNA, 25 bp, Artificial
  probe
  misc_feature (1)..(25): SEQ ID NO: 1916; WAN024F67; Start 242; Stop 266
ttgtagaactattgtctcgaagagg

SEQ ID NO: 309308 - DNA, 25 bp, Artificial
  probe
  misc_feature (1)..(25): SEQ ID NO: 1916; WAN024F67; Start 408; Stop 432
gtactctgattactccatgattcaa

SEQ ID NO: 309309 - DNA, 25 bp, Artificial
  probe
  misc_feature (1)..(25): SEQ ID NO: 1916; WAN024F67; Start 152; Stop 176
tgacttatgagcaggtttatgagga

SEQ ID NO: 309310 - DNA, 25 bp, Artificial
  probe
  misc_feature (1)..(25): SEQ ID NO: 1916; WAN024F67; Start 113; Stop 137
atatggaatctttggctgagaaaca

SEQ ID NO: 309311 - DNA, 25 bp, Artificial
  probe
  misc_feature (1)..(25): SEQ ID NO: 1916; WAN024F67; Start 293; Stop 317
ttgctattcataaggagttgtttca

SEQ ID NO: 309312 - DNA, 25 bp, Artificial
  probe
  misc_feature (1)..(25): SEQ ID NO: 1916; WAN024F67; Start 245; Stop 269
tagaactattgtctcgaagaggctt

SEQ ID NO: 309313 - DNA, 25 bp, Artificial
  probe
  misc_feature (1)..(25): SEQ ID NO: 1916; WAN024F67; Start 589; Stop 613
attcagtatcttcgtgagtttggtt

SEQ ID NO: 309314 - DNA, 25 bp, Artificial
  probe
  misc_feature (1)..(25): SEQ ID NO: 1916; WAN024F67; Start 112; Stop 136
tatatggaatctttggctgagaaac

SEQ ID NO: 309315 - DNA, 25 bp, Artificial
  probe
  misc_feature (1)..(25): SEQ ID NO: 1916; WAN024F67; Start 590; Stop 614
ttcagtatcttcgtgagtttggttt

SEQ ID NO: 309316 - DNA, 25 bp, Artificial
  probe
  misc_feature (1)..(25): SEQ ID NO: 1916; WAN024F67; Start 586; Stop 610
ttgattcagtatcttcgtgagtttg

SEQ ID NO: 309317 - DNA, 25 bp, Artificial
  probe
  misc_feature (1)..(25): SEQ ID NO: 1916; WAN024F67; Start 288; Stop 312
cttacttgctattcataaggagttg

SEQ ID NO: 309318 - DNA, 25 bp, Artificial
  probe
  misc_feature (1)..(25): SEQ ID NO: 1916; WAN024F67; Start 387; Stop 411
tttgaatggtgaaagtgttgtgtac

SEQ ID NO: 309319 - DNA, 25 bp, Artificial
  probe
  misc_feature (1)..(25): SEQ ID NO: 1916; WAN024F67; Start 588; Stop 612
gattcagtatcttcgtgagtttggt

SEQ ID NO: 309320 - DNA, 25 bp, Artificial
  probe
  misc_feature (1)..(25): SEQ ID NO: 1916; WAN024F67; Start 587; Stop 611
tgattcagtatcttcgtgagtttgg

SEQ ID NO: 309321 - DNA, 25 bp, Artificial
  probe
  misc_feature (1)..(25): SEQ ID NO: 1916; WAN024F67; Start 244; Stop 268
gtagaactattgtctcgaagaggct

SEQ ID NO: 309322 - DNA, 25 bp, Artificial
  probe
  misc_feature (1)..(25): SEQ ID NO: 1917; WAN024CPO; Start 22; Stop 46
aatgccgtagtctatcaagtctatc

SEQ ID NO: 309323 - DNA, 25 bp, Artificial
  probe
  misc_feature (1)..(25): SEQ ID NO: 1917; WAN024CPO; Start 619; Stop 643
gtagtcaataatggtcctatgctcc

SEQ ID NO: 309324 - DNA, 25 bp, Artificial
  probe
  misc_feature (1)..(25): SEQ ID NO: 1917; WAN024CPO; Start 618; Stop 642
ggtagtcaataatggtcctatgctc

SEQ ID NO: 309325 - DNA, 25 bp, Artificial
  probe
  misc_feature (1)..(25): SEQ ID NO: 1917; WAN024CPO; Start 788; Stop 812
aacatatcggtcttcagtatcagga

SEQ ID NO: 309326 - DNA, 25 bp, Artificial
  probe
  misc_feature (1)..(25): SEQ ID NO: 1917; WAN024CPO; Start 787; Stop 811
gaacatatcggtcttcagtatcagg

SEQ ID NO: 309327 - DNA, 25 bp, Artificial
  probe
  misc_feature (1)..(25): SEQ ID NO: 1917; WAN024CPO; Start 789; Stop 813
acatatcggtcttcagtatcaggaa

SEQ ID NO: 309328 - DNA, 25 bp, Artificial
  probe
  misc_feature (1)..(25): SEQ ID NO: 1917; WAN024CPO; Start 23; Stop 47
atgccgtagtctatcaagtctatcc

SEQ ID NO: 309329 - DNA, 25 bp, Artificial
  probe
  misc_feature (1)..(25): SEQ ID NO: 1917; WAN024CPO; Start 25; Stop 49
gccgtagtctatcaagtctatccaa

SEQ ID NO: 309330 - DNA, 25 bp, Artificial
  probe
  misc_feature (1)..(25): SEQ ID NO: 1917; WAN024CPO; Start 611; Stop 635
acgagaaggtagtcaataatggtcc

SEQ ID NO: 309331 - DNA, 25 bp, Artificial
  probe
  misc_feature (1)..(25): SEQ ID NO: 1917; WAN024CPO; Start 610; Stop 634
gacgagaaggtagtcaataatggtc

SEQ ID NO: 309332 - DNA, 25 bp, Artificial
  probe
  misc_feature (1)..(25): SEQ ID NO: 1917; WAN024CPO; Start 616; Stop 640
aaggtagtcaataatggtcctatgc

SEQ ID NO: 309333 - DNA, 25 bp, Artificial
  probe
  misc_feature (1)..(25): SEQ ID NO: 1917; WAN024CPO; Start 24; Stop 48
tgccgtagtctatcaagtctatcca

SEQ ID NO: 309334 - DNA, 25 bp, Artificial
  probe
  misc_feature (1)..(25): SEQ ID NO: 1917; WAN024CPO; Start 617; Stop 641
aggtagtcaataatggtcctatgct

SEQ ID NO: 309335 - DNA, 25 bp, Artificial
  probe
  misc_feature (1)..(25): SEQ ID NO: 1917; WAN024CPO; Start 613; Stop 637
gagaaggtagtcaataatggtccta

SEQ ID NO: 309336 - DNA, 25 bp, Artificial
  probe
  misc_feature (1)..(25): SEQ ID NO: 1917; WAN024CPO; Start 615; Stop 639
gaaggtagtcaataatggtcctatg

SEQ ID NO: 309337 - DNA, 25 bp, Artificial
  probe
  misc_feature (1)..(25): SEQ ID NO: 1917; WAN024CPO; Start 620; Stop 644
tagtcaataatggtcctatgctcca

SEQ ID NO: 309338 - DNA, 25 bp, Artificial
  probe
  misc_feature (1)..(25): SEQ ID NO: 1917; WAN024CPO; Start 98; Stop 122
ttaccagtaagttggactatctagc

SEQ ID NO: 309339 - DNA, 25 bp, Artificial
  probe
  misc_feature (1)..(25): SEQ ID NO: 1917; WAN024CPO; Start 614; Stop 638
agaaggtagtcaataatggtcctat

SEQ ID NO: 309340 - DNA, 25 bp, Artificial
  probe
  misc_feature (1)..(25): SEQ ID NO: 1917; WAN024CPO; Start 612; Stop 636
cgagaaggtagtcaataatggtcct

SEQ ID NO: 309341 - DNA, 25 bp, Artificial
  probe
  misc_feature (1)..(25): SEQ ID NO: 1917; WAN024CPO; Start 160; Stop 184
tatgacagccctatggatgataatg

SEQ ID NO: 309342 - DNA, 25 bp, Artificial
  probe
  misc_feature (1)..(25): SEQ ID NO: 1917; WAN024CPO; Start 1164; Stop 1188
aatcatggacagtatccgtgttatt

SEQ ID NO: 309343 - DNA, 25 bp, Artificial
  probe
  misc_feature (1)..(25): SEQ ID NO: 1917; WAN024CPO; Start 26; Stop 50
ccgtagtctatcaagtctatccaaa

SEQ ID NO: 309344 - DNA, 25 bp, Artificial
  probe
  misc_feature (1)..(25): SEQ ID NO: 1917; WAN024CPO; Start 1165; Stop 1189
atcatggacagtatccgtgttattg

SEQ ID NO: 309345 - DNA, 25 bp, Artificial
  probe
  misc_feature (1)..(25): SEQ ID NO: 1917; WAN024CPO; Start 1025; Stop 1049
tgagaggaactccttatatctacca

SEQ ID NO: 309346 - DNA, 25 bp, Artificial
  probe
  misc_feature (1)..(25): SEQ ID NO: 1917; WAN024CPO; Start 159; Stop 183
ttatgacagccctatggatgataat

SEQ ID NO: 309347 - DNA, 25 bp, Artificial
  probe
  misc_feature (1)..(25): SEQ ID NO: 1917; WAN024CPO; Start 778; Stop 802
ttccagtttgaacatatcggtcttc

SEQ ID NO: 309348 - DNA, 25 bp, Artificial
  probe
  misc_feature (1)..(25): SEQ ID NO: 1917; WAN024CPO; Start 777; Stop 801
cttccagtttgaacatatcggtctt

SEQ ID NO: 309349 - DNA, 25 bp, Artificial
  probe
  misc_feature (1)..(25): SEQ ID NO: 1917; WAN024CPO; Start 761; Stop 785
aagaattgtctatggtcttccagtt

SEQ ID NO: 309350 - DNA, 25 bp, Artificial
  probe
  misc_feature (1)..(25): SEQ ID NO: 1917; WAN024CPO; Start 1039; Stop 1063
tatatctaccaaggtgaggagattg

SEQ ID NO: 309351 - DNA, 25 bp, Artificial
  probe
  misc_feature (1)..(25): SEQ ID NO: 1917; WAN024CPO; Start 1027; Stop 1051
agaggaactccttatatctaccaag

SEQ ID NO: 309352 - DNA, 25 bp, Artificial
  probe
  misc_feature (1)..(25): SEQ ID NO: 1917; WAN024CPO; Start 1026; Stop 1050
gagaggaactccttatatctaccaa

SEQ ID NO: 309353 - DNA, 25 bp, Artificial
  probe
  misc_feature (1)..(25): SEQ ID NO: 1917; WAN024CPO; Start 865; Stop 889
gaaatcttcaacaaatggcagacag

SEQ ID NO: 309354 - DNA, 25 bp, Artificial
  probe
  misc_feature (1)..(25): SEQ ID NO: 1917; WAN024CPO; Start 760; Stop 784
caagaattgtctatggtcttccagt

SEQ ID NO: 309355 - DNA, 25 bp, Artificial
  probe
  misc_feature (1)..(25): SEQ ID NO: 1918; WAN024ESO; Start 292; Stop 316
tactatgacaacaatatcgctggaa

SEQ ID NO: 309356 - DNA, 25 bp, Artificial
  probe
  misc_feature (1)..(25): SEQ ID NO: 1918; WAN024ESO; Start 291; Stop 315
ctactatgacaacaatatcgctgga

SEQ ID NO: 309357 - DNA, 25 bp, Artificial
  probe
  misc_feature (1)..(25): SEQ ID NO: 1918; WAN024ESO; Start 294; Stop 318
ctatgacaacaatatcgctggaact

SEQ ID NO: 309358 - DNA, 25 bp, Artificial
  probe
  misc_feature (1)..(25): SEQ ID NO: 1918; WAN024ESO; Start 91; Stop 115
gtggtggataatcttgtcaatagca

SEQ ID NO: 309359 - DNA, 25 bp, Artificial
  probe
  misc_feature (1)..(25): SEQ ID NO: 1918; WAN024ESO; Start 90; Stop 114
tgtggtggataatcttgtcaatagc

SEQ ID NO: 309360 - DNA, 25 bp, Artificial
  probe
  misc_feature (1)..(25): SEQ ID NO: 1918; WAN024ESO; Start 664; Stop 688
gattacgatacggaagatggaacag

SEQ ID NO: 309361 - DNA, 25 bp, Artificial
  probe
  misc_feature (1)..(25): SEQ ID NO: 1918; WAN024ESO; Start 290; Stop 314
cctactatgacaacaatatcgctgg

SEQ ID NO: 309362 - DNA, 25 bp, Artificial
  probe
  misc_feature (1)..(25): SEQ ID NO: 1918; WAN024ESO; Start 84; Stop 108
agttgttgtggtggataatcttgtc

SEQ ID NO: 309363 - DNA, 25 bp, Artificial
  probe
  misc_feature (1)..(25): SEQ ID NO: 1918; WAN024ESO; Start 83; Stop 107
aagttgttgtggtggataatcttgt

SEQ ID NO: 309364 - DNA, 25 bp, Artificial
  probe
  misc_feature (1)..(25): SEQ ID NO: 1918; WAN024ESO; Start 295; Stop 319
tatgacaacaatatcgctggaactg

SEQ ID NO: 309365 - DNA, 25 bp, Artificial
  probe
  misc_feature (1)..(25): SEQ ID NO: 1918; WAN024ESO; Start 293; Stop 317
actatgacaacaatatcgctggaac

SEQ ID NO: 309366 - DNA, 25 bp, Artificial
  probe
  misc_feature (1)..(25): SEQ ID NO: 1918; WAN024ESO; Start 283; Stop 307
cctcttgcctactatgacaacaata

SEQ ID NO: 309367 - DNA, 25 bp, Artificial
  probe
  misc_feature (1)..(25): SEQ ID NO: 1918; WAN024ESO; Start 92; Stop 116
tggtggataatcttgtcaatagcaa

SEQ ID NO: 309368 - DNA, 25 bp, Artificial
  probe
  misc_feature (1)..(25): SEQ ID NO: 1918; WAN024ESO; Start 286; Stop 310
cttgcctactatgacaacaatatcg

SEQ ID NO: 309369 - DNA, 25 bp, Artificial
  probe
  misc_feature (1)..(25): SEQ ID NO: 1918; WAN024ESO; Start 80; Stop 104
atcaagttgttgtggtggataatct

SEQ ID NO: 309370 - DNA, 25 bp, Artificial
  probe
  misc_feature (1)..(25): SEQ ID NO: 1918; WAN024ESO; Start 79; Stop 103
catcaagttgttgtggtggataatc

SEQ ID NO: 309371 - DNA, 25 bp, Artificial
  probe
  misc_feature (1)..(25): SEQ ID NO: 1918; WAN024ESO; Start 85; Stop 109
gttgttgtggtggataatcttgtca

SEQ ID NO: 309372 - DNA, 25 bp, Artificial
  probe
  misc_feature (1)..(25): SEQ ID NO: 1918; WAN024ESO; Start 103; Stop 127
cttgtcaatagcaatcgtaagagtt

SEQ ID NO: 309373 - DNA, 25 bp, Artificial
  probe
  misc_feature (1)..(25): SEQ ID NO: 1918; WAN024ESO; Start 87; Stop 111
tgttgtggtggataatcttgtcaat

SEQ ID NO: 309374 - DNA, 25 bp, Artificial
  probe
  misc_feature (1)..(25): SEQ ID NO: 1918; WAN024ESO; Start 81; Stop 105
tcaagttgttgtggtggataatctt

SEQ ID NO: 309375 - DNA, 25 bp, Artificial
  probe
  misc_feature (1)..(25): SEQ ID NO: 1918; WAN024ESO; Start 96; Stop 120
ggataatcttgtcaatagcaatcgt

SEQ ID NO: 309376 - DNA, 25 bp, Artificial
  probe
  misc_feature (1)..(25): SEQ ID NO: 1918; WAN024ESO; Start 95; Stop 119
tggataatcttgtcaatagcaatcg

SEQ ID NO: 309377 - DNA, 25 bp, Artificial
  probe
  misc_feature (1)..(25): SEQ ID NO: 1918; WAN024ESO; Start 93; Stop 117
ggtggataatcttgtcaatagcaat

SEQ ID NO: 309378 - DNA, 25 bp, Artificial
  probe
  misc_feature (1)..(25): SEQ ID NO: 1918; WAN024ESO; Start 86; Stop 110
ttgttgtggtggataatcttgtcaa

SEQ ID NO: 309379 - DNA, 25 bp, Artificial
  probe
  misc_feature (1)..(25): SEQ ID NO: 1918; WAN024ESO; Start 88; Stop 112
gttgtggtggataatcttgtcaata

SEQ ID NO: 309380 - DNA, 25 bp, Artificial
  probe
  misc_feature (1)..(25): SEQ ID NO: 1918; WAN024ESO; Start 289; Stop 313
gcctactatgacaacaatatcgctg

SEQ ID NO: 309381 - DNA, 25 bp, Artificial
  probe
  misc_feature (1)..(25): SEQ ID NO: 1918; WAN024ESO; Start 509; Stop 533
aatggaatgttgtcttgcttcgtta

SEQ ID NO: 309382 - DNA, 25 bp, Artificial
  probe
  misc_feature (1)..(25): SEQ ID NO: 1918; WAN024ESO; Start 89; Stop 113
ttgtggtggataatcttgtcaatag

SEQ ID NO: 309383 - DNA, 25 bp, Artificial
  probe
  misc_feature (1)..(25): SEQ ID NO: 1918; WAN024ESO; Start 166; Stop 190
ttctatgaggcagatattcgtgaca

SEQ ID NO: 309384 - DNA, 25 bp, Artificial
  probe
  misc_feature (1)..(25): SEQ ID NO: 1918; WAN024ESO; Start 287; Stop 311
ttgcctactatgacaacaatatcgc

SEQ ID NO: 309385 - DNA, 25 bp, Artificial
  probe
  misc_feature (1)..(25): SEQ ID NO: 1918; WAN024ESO; Start 288; Stop 312
tgcctactatgacaacaatatcgct

SEQ ID NO: 309386 - DNA, 25 bp, Artificial
  probe
  misc_feature (1)..(25): SEQ ID NO: 1918; WAN024ESO; Start 51; Stop 75
cactgttattgaattgatccaagca

SEQ ID NO: 309387 - DNA, 25 bp, Artificial
  probe
  misc_feature (1)..(25): SEQ ID NO: 1918; WAN024ESO; Start 50; Stop 74
acactgttattgaattgatccaagc

SEQ ID NO: 309388 - DNA, 25 bp, Artificial
  probe
  misc_feature (1)..(25): SEQ ID NO: 1919; WAN024CX6; Start 48; Stop 72
tgctatggtacaattactgatggaa

SEQ ID NO: 309389 - DNA, 25 bp, Artificial
  probe
  misc_feature (1)..(25): SEQ ID NO: 1919; WAN024CX6; Start 47; Stop 71
atgctatggtacaattactgatgga

SEQ ID NO: 309390 - DNA, 25 bp, Artificial
  probe
  misc_feature (1)..(25): SEQ ID NO: 1919; WAN024CX6; Start 49; Stop 73
gctatggtacaattactgatggaac

SEQ ID NO: 309391 - DNA, 25 bp, Artificial
  probe
  misc_feature (1)..(25): SEQ ID NO: 1919; WAN024CX6; Start 46; Stop 70
aatgctatggtacaattactgatgg

SEQ ID NO: 309392 - DNA, 25 bp, Artificial
  probe
  misc_feature (1)..(25): SEQ ID NO: 1919; WAN024CX6; Start 50; Stop 74
ctatggtacaattactgatggaaca

SEQ ID NO: 309393 - DNA, 25 bp, Artificial
  probe
  misc_feature (1)..(25): SEQ ID NO: 1919; WAN024CX6; Start 126; Stop 150
tcgttccagcttctatactcactat

SEQ ID NO: 309394 - DNA, 25 bp, Artificial
  probe
  misc_feature (1)..(25): SEQ ID NO: 1919; WAN024CX6; Start 127; Stop 151
cgttccagcttctatactcactata

SEQ ID NO: 309395 - DNA, 25 bp, Artificial
  probe
  misc_feature (1)..(25): SEQ ID NO: 1919; WAN024CX6; Start 52; Stop 76
atggtacaattactgatggaacagc

SEQ ID NO: 309396 - DNA, 25 bp, Artificial
  probe
  misc_feature (1)..(25): SEQ ID NO: 1919; WAN024CX6; Start 119; Stop 143
gaattagtcgttccagcttctatac

SEQ ID NO: 309397 - DNA, 25 bp, Artificial
  probe
  misc_feature (1)..(25): SEQ ID NO: 1919; WAN024CX6; Start 121; Stop 145
attagtcgttccagcttctatactc

SEQ ID NO: 309398 - DNA, 25 bp, Artificial
  probe
  misc_feature (1)..(25): SEQ ID NO: 1919; WAN024CX6; Start 125; Stop 149
gtcgttccagcttctatactcacta

SEQ ID NO: 309399 - DNA, 25 bp, Artificial
  probe
  misc_feature (1)..(25): SEQ ID NO: 1919; WAN024CX6; Start 153; Stop 177
ggataagtatgatatgattgagcac

SEQ ID NO: 309400 - DNA, 25 bp, Artificial
  probe
  misc_feature (1)..(25): SEQ ID NO: 1919; WAN024CX6; Start 120; Stop 144
aattagtcgttccagcttctatact

SEQ ID NO: 309401 - DNA, 25 bp, Artificial
  probe
  misc_feature (1)..(25): SEQ ID NO: 1919; WAN024CX6; Start 131; Stop 155
ccagcttctatactcactataagga

SEQ ID NO: 309402 - DNA, 25 bp, Artificial
  probe
  misc_feature (1)..(25): SEQ ID NO: 1919; WAN024CX6; Start 130; Stop 154
tccagcttctatactcactataagg

SEQ ID NO: 309403 - DNA, 25 bp, Artificial
  probe
  misc_feature (1)..(25): SEQ ID NO: 1919; WAN024CX6; Start 122; Stop 146
ttagtcgttccagcttctatactca

SEQ ID NO: 309404 - DNA, 25 bp, Artificial
  probe
  misc_feature (1)..(25): SEQ ID NO: 1919; WAN024CX6; Start 51; Stop 75
tatggtacaattactgatggaacag

SEQ ID NO: 309405 - DNA, 25 bp, Artificial
  probe
  misc_feature (1)..(25): SEQ ID NO: 1919; WAN024CX6; Start 152; Stop 176
aggataagtatgatatgattgagca

SEQ ID NO: 309406 - DNA, 25 bp, Artificial
  probe
  misc_feature (1)..(25): SEQ ID NO: 1919; WAN024CX6; Start 123; Stop 147
tagtcgttccagcttctatactcac

SEQ ID NO: 309407 - DNA, 25 bp, Artificial
  probe
  misc_feature (1)..(25): SEQ ID NO: 1919; WAN024CX6; Start 344; Stop 368
aacttcatatcatgcttagtacaga

SEQ ID NO: 309408 - DNA, 25 bp, Artificial
  probe
  misc_feature (1)..(25): SEQ ID NO: 1919; WAN024CX6; Start 345; Stop 369
acttcatatcatgcttagtacagat

SEQ ID NO: 309409 - DNA, 25 bp, Artificial
  probe
  misc_feature (1)..(25): SEQ ID NO: 1919; WAN024CX6; Start 491; Stop 515
gttctcaagaaataacagacttcct

SEQ ID NO: 309410 - DNA, 25 bp, Artificial
  probe
  misc_feature (1)..(25): SEQ ID NO: 1919; WAN024CX6; Start 128; Stop 152
gttccagcttctatactcactataa

SEQ ID NO: 309411 - DNA, 25 bp, Artificial
  probe
  misc_feature (1)..(25): SEQ ID NO: 1919; WAN024CX6; Start 490; Stop 514
agttctcaagaaataacagacttcc

SEQ ID NO: 309412 - DNA, 25 bp, Artificial
  probe
  misc_feature (1)..(25): SEQ ID NO: 1919; WAN024CX6; Start 53; Stop 77
tggtacaattactgatggaacagcc

SEQ ID NO: 309413 - DNA, 25 bp, Artificial
  probe
  misc_feature (1)..(25): SEQ ID NO: 1919; WAN024CX6; Start 151; Stop 175
aaggataagtatgatatgattgagc

SEQ ID NO: 309414 - DNA, 25 bp, Artificial
  probe
  misc_feature (1)..(25): SEQ ID NO: 1919; WAN024CX6; Start 180; Stop 204
tcaaagcaagctattccatacattt

SEQ ID NO: 309415 - DNA, 25 bp, Artificial
  probe
  misc_feature (1)..(25): SEQ ID NO: 1919; WAN024CX6; Start 492; Stop 516
ttctcaagaaataacagacttcctt

SEQ ID NO: 309416 - DNA, 25 bp, Artificial
  probe
  misc_feature (1)..(25): SEQ ID NO: 1919; WAN024CX6; Start 129; Stop 153
ttccagcttctatactcactataag

SEQ ID NO: 309417 - DNA, 25 bp, Artificial
  probe
  misc_feature (1)..(25): SEQ ID NO: 1919; WAN024CX6; Start 179; Stop 203
atcaaagcaagctattccatacatt

SEQ ID NO: 309418 - DNA, 25 bp, Artificial
  probe
  misc_feature (1)..(25): SEQ ID NO: 1919; WAN024CX6; Start 177; Stop 201
ctatcaaagcaagctattccataca

SEQ ID NO: 309419 - DNA, 25 bp, Artificial
  probe
  misc_feature (1)..(25): SEQ ID NO: 1919; WAN024CX6; Start 176; Stop 200
actatcaaagcaagctattccatac

SEQ ID NO: 309420 - DNA, 25 bp, Artificial
  probe
  misc_feature (1)..(25): SEQ ID NO: 1919; WAN024CX6; Start 175; Stop 199
cactatcaaagcaagctattccata

SEQ ID NO: 309421 - DNA, 25 bp, Artificial
  probe
  misc_feature (1)..(25): SEQ ID NO: 1920; WAN024FQD; Start 127; Stop 151
aatgatagaagtacagacgatacgg

SEQ ID NO: 309422 - DNA, 25 bp, Artificial
  probe
  misc_feature (1)..(25): SEQ ID NO: 1920; WAN024FQD; Start 126; Stop 150
caatgatagaagtacagacgatacg

SEQ ID NO: 309423 - DNA, 25 bp, Artificial
  probe
  misc_feature (1)..(25): SEQ ID NO: 1920; WAN024FQD; Start 117; Stop 141
actggttgtcaatgatagaagtaca

SEQ ID NO: 309424 - DNA, 25 bp, Artificial
  probe
  misc_feature (1)..(25): SEQ ID NO: 1920; WAN024FQD; Start 119; Stop 143
tggttgtcaatgatagaagtacaga

SEQ ID NO: 309425 - DNA, 25 bp, Artificial
  probe
  misc_feature (1)..(25): SEQ ID NO: 1920; WAN024FQD; Start 128; Stop 152
atgatagaagtacagacgatacggc

SEQ ID NO: 309426 - DNA, 25 bp, Artificial
  probe
  misc_feature (1)..(25): SEQ ID NO: 1920; WAN024FQD; Start 121; Stop 145
gttgtcaatgatagaagtacagacg

SEQ ID NO: 309427 - DNA, 25 bp, Artificial
  probe
  misc_feature (1)..(25): SEQ ID NO: 1920; WAN024FQD; Start 122; Stop 146
ttgtcaatgatagaagtacagacga

SEQ ID NO: 309428 - DNA, 25 bp, Artificial
  probe
  misc_feature (1)..(25): SEQ ID NO: 1920; WAN024FQD; Start 123; Stop 147
tgtcaatgatagaagtacagacgat

SEQ ID NO: 309429 - DNA, 25 bp, Artificial
  probe
  misc_feature (1)..(25): SEQ ID NO: 1920; WAN024FQD; Start 130; Stop 154
gatagaagtacagacgatacggctt

SEQ ID NO: 309430 - DNA, 25 bp, Artificial
  probe
  misc_feature (1)..(25): SEQ ID NO: 1920; WAN024FQD; Start 120; Stop 144
ggttgtcaatgatagaagtacagac

SEQ ID NO: 309431 - DNA, 25 bp, Artificial
  probe
  misc_feature (1)..(25): SEQ ID NO: 1920; WAN024FQD; Start 118; Stop 142
ctggttgtcaatgatagaagtacag

SEQ ID NO: 309432 - DNA, 25 bp, Artificial
  probe
  misc_feature (1)..(25): SEQ ID NO: 1920; WAN024FQD; Start 125; Stop 149
tcaatgatagaagtacagacgatac

SEQ ID NO: 309433 - DNA, 25 bp, Artificial
  probe
  misc_feature (1)..(25): SEQ ID NO: 1920; WAN024FQD; Start 129; Stop 153
tgatagaagtacagacgatacggct

SEQ ID NO: 309434 - DNA, 25 bp, Artificial
  probe
  misc_feature (1)..(25): SEQ ID NO: 1920; WAN024FQD; Start 124; Stop 148
gtcaatgatagaagtacagacgata

SEQ ID NO: 309435 - DNA, 25 bp, Artificial
  probe
  misc_feature (1)..(25): SEQ ID NO: 1920; WAN024FQD; Start 116; Stop 140
tactggttgtcaatgatagaagtac

SEQ ID NO: 309436 - DNA, 25 bp, Artificial
  probe
  misc_feature (1)..(25): SEQ ID NO: 1920; WAN024FQD; Start 115; Stop 139
gtactggttgtcaatgatagaagta

SEQ ID NO: 309437 - DNA, 25 bp, Artificial
  probe
  misc_feature (1)..(25): SEQ ID NO: 1920; WAN024FQD; Start 132; Stop 156
tagaagtacagacgatacggcttta

SEQ ID NO: 309438 - DNA, 25 bp, Artificial
  probe
  misc_feature (1)..(25): SEQ ID NO: 1920; WAN024FQD; Start 135; Stop 159
aagtacagacgatacggctttagta

SEQ ID NO: 309439 - DNA, 25 bp, Artificial
  probe
  misc_feature (1)..(25): SEQ ID NO: 1920; WAN024FQD; Start 136; Stop 160
agtacagacgatacggctttagtag

SEQ ID NO: 309440 - DNA, 25 bp, Artificial
  probe
  misc_feature (1)..(25): SEQ ID NO: 1920; WAN024FQD; Start 131; Stop 155
atagaagtacagacgatacggcttt

SEQ ID NO: 309441 - DNA, 25 bp, Artificial
  probe
  misc_feature (1)..(25): SEQ ID NO: 1920; WAN024FQD; Start 133; Stop 157
agaagtacagacgatacggctttag

SEQ ID NO: 309442 - DNA, 25 bp, Artificial
  probe
  misc_feature (1)..(25): SEQ ID NO: 1920; WAN024FQD; Start 113; Stop 137
aagtactggttgtcaatgatagaag

SEQ ID NO: 309443 - DNA, 25 bp, Artificial
  probe
  misc_feature (1)..(25): SEQ ID NO: 1920; WAN024FQD; Start 112; Stop 136
gaagtactggttgtcaatgatagaa

SEQ ID NO: 309444 - DNA, 25 bp, Artificial
  probe
  misc_feature (1)..(25): SEQ ID NO: 1920; WAN024FQD; Start 114; Stop 138
agtactggttgtcaatgatagaagt

SEQ ID NO: 309445 - DNA, 25 bp, Artificial
  probe
  misc_feature (1)..(25): SEQ ID NO: 1920; WAN024FQD; Start 111; Stop 135
tgaagtactggttgtcaatgataga

SEQ ID NO: 309446 - DNA, 25 bp, Artificial
  probe
  misc_feature (1)..(25): SEQ ID NO: 1920; WAN024FQD; Start 134; Stop 158
gaagtacagacgatacggctttagt

SEQ ID NO: 309447 - DNA, 25 bp, Artificial
  probe
  misc_feature (1)..(25): SEQ ID NO: 1920; WAN024FQD; Start 66; Stop 90
aatcgagtcattccagcaagtacac

SEQ ID NO: 309448 - DNA, 25 bp, Artificial
  probe
  misc_feature (1)..(25): SEQ ID NO: 1920; WAN024FQD; Start 65; Stop 89
gaatcgagtcattccagcaagtaca

SEQ ID NO: 309449 - DNA, 25 bp, Artificial
  probe
  misc_feature (1)..(25): SEQ ID NO: 1920; WAN024FQD; Start 247; Stop 271
ggtattcaagaagcaaagggaaaat

SEQ ID NO: 309450 - DNA, 25 bp, Artificial
  probe
  misc_feature (1)..(25): SEQ ID NO: 1920; WAN024FQD; Start 168; Stop 192
aatattagccaaagattcgttgctg

SEQ ID NO: 309451 - DNA, 25 bp, Artificial
  probe
  misc_feature (1)..(25): SEQ ID NO: 1920; WAN024FQD; Start 169; Stop 193
atattagccaaagattcgttgctgg

SEQ ID NO: 309452 - DNA, 25 bp, Artificial
  probe
  misc_feature (1)..(25): SEQ ID NO: 1920; WAN024FQD; Start 167; Stop 191
aaatattagccaaagattcgttgct

SEQ ID NO: 309453 - DNA, 25 bp, Artificial
  probe
  misc_feature (1)..(25): SEQ ID NO: 1920; WAN024FQD; Start 275; Stop 299
ttaaagtgattgatggggatgactg

SEQ ID NO: 309454 - DNA, 25 bp, Artificial
  probe
  misc_feature (1)..(25): SEQ ID NO: 1921; WAN024FQE; Start 119; Stop 143
taattgtgaatgatggaagtacgga

SEQ ID NO: 309455 - DNA, 25 bp, Artificial
  probe
  misc_feature (1)..(25): SEQ ID NO: 1921; WAN024FQE; Start 118; Stop 142
ttaattgtgaatgatggaagtacgg

SEQ ID NO: 309456 - DNA, 25 bp, Artificial
  probe
  misc_feature (1)..(25): SEQ ID NO: 1921; WAN024FQE; Start 859; Stop 883
gagcagagttcttatgagtatatcc

SEQ ID NO: 309457 - DNA, 25 bp, Artificial
  probe
  misc_feature (1)..(25): SEQ ID NO: 1921; WAN024FQE; Start 120; Stop 144
aattgtgaatgatggaagtacggac

SEQ ID NO: 309458 - DNA, 25 bp, Artificial
  probe
  misc_feature (1)..(25): SEQ ID NO: 1921; WAN024FQE; Start 642; Stop 666
cgagcagagtatgaatattgagagt

SEQ ID NO: 309459 - DNA, 25 bp, Artificial
  probe
  misc_feature (1)..(25): SEQ ID NO: 1921; WAN024FQE; Start 641; Stop 665
ccgagcagagtatgaatattgagag

SEQ ID NO: 309460 - DNA, 25 bp, Artificial
  probe
  misc_feature (1)..(25): SEQ ID NO: 1921; WAN024FQE; Start 855; Stop 879
aattgagcagagttcttatgagtat

SEQ ID NO: 309461 - DNA, 25 bp, Artificial
  probe
  misc_feature (1)..(25): SEQ ID NO: 1921; WAN024FQE; Start 117; Stop 141
cttaattgtgaatgatggaagtacg

SEQ ID NO: 309462 - DNA, 25 bp, Artificial
  probe
  misc_feature (1)..(25): SEQ ID NO: 1921; WAN024FQE; Start 858; Stop 882
tgagcagagttcttatgagtatatc

SEQ ID NO: 309463 - DNA, 25 bp, Artificial
  probe
  misc_feature (1)..(25): SEQ ID NO: 1921; WAN024FQE; Start 192; Stop 216
gaatggtcgtattatcacaaaggaa

SEQ ID NO: 309464 - DNA, 25 bp, Artificial
  probe
  misc_feature (1)..(25): SEQ ID NO: 1921; WAN024FQE; Start 861; Stop 885
gcagagttcttatgagtatatccct

SEQ ID NO: 309465 - DNA, 25 bp, Artificial
  probe
  misc_feature (1)..(25): SEQ ID NO: 1921; WAN024FQE; Start 860; Stop 884
agcagagttcttatgagtatatccc

SEQ ID NO: 309466 - DNA, 25 bp, Artificial
  probe
  misc_feature (1)..(25): SEQ ID NO: 1921; WAN024FQE; Start 857; Stop 881
ttgagcagagttcttatgagtatat

SEQ ID NO: 309467 - DNA, 25 bp, Artificial
  probe
  misc_feature (1)..(25): SEQ ID NO: 1921; WAN024FQE; Start 856; Stop 880
attgagcagagttcttatgagtata

SEQ ID NO: 309468 - DNA, 25 bp, Artificial
  probe
  misc_feature (1)..(25): SEQ ID NO: 1921; WAN024FQE; Start 851; Stop 875
gacaaattgagcagagttcttatga

SEQ ID NO: 309469 - DNA, 25 bp, Artificial
  probe
  misc_feature (1)..(25): SEQ ID NO: 1921; WAN024FQE; Start 853; Stop 877
caaattgagcagagttcttatgagt

SEQ ID NO: 309470 - DNA, 25 bp, Artificial
  probe
  misc_feature (1)..(25): SEQ ID NO: 1921; WAN024FQE; Start 852; Stop 876
acaaattgagcagagttcttatgag

SEQ ID NO: 309471 - DNA, 25 bp, Artificial
  probe
  misc_feature (1)..(25): SEQ ID NO: 1921; WAN024FQE; Start 193; Stop 217
aatggtcgtattatcacaaaggaaa

SEQ ID NO: 309472 - DNA, 25 bp, Artificial
  probe
  misc_feature (1)..(25): SEQ ID NO: 1921; WAN024FQE; Start 846; Stop 870
atacagacaaattgagcagagttct

SEQ ID NO: 309473 - DNA, 25 bp, Artificial
  probe
  misc_feature (1)..(25): SEQ ID NO: 1921; WAN024FQE; Start 848; Stop 872
acagacaaattgagcagagttctta

SEQ ID NO: 309474 - DNA, 25 bp, Artificial
  probe
  misc_feature (1)..(25): SEQ ID NO: 1921; WAN024FQE; Start 847; Stop 871
tacagacaaattgagcagagttctt

SEQ ID NO: 309475 - DNA, 25 bp, Artificial
  probe
  misc_feature (1)..(25): SEQ ID NO: 1921; WAN024FQE; Start 845; Stop 869
tatacagacaaattgagcagagttc

SEQ ID NO: 309476 - DNA, 25 bp, Artificial
  probe
  misc_feature (1)..(25): SEQ ID NO: 1921; WAN024FQE; Start 850; Stop 874
agacaaattgagcagagttcttatg

SEQ ID NO: 309477 - DNA, 25 bp, Artificial
  probe
  misc_feature (1)..(25): SEQ ID NO: 1921; WAN024FQE; Start 849; Stop 873
cagacaaattgagcagagttcttat

SEQ ID NO: 309478 - DNA, 25 bp, Artificial
  probe
  misc_feature (1)..(25): SEQ ID NO: 1921; WAN024FQE; Start 191; Stop 215
tgaatggtcgtattatcacaaagga

SEQ ID NO: 309479 - DNA, 25 bp, Artificial
  probe
  misc_feature (1)..(25): SEQ ID NO: 1921; WAN024FQE; Start 844; Stop 868
ttatacagacaaattgagcagagtt

SEQ ID NO: 309480 - DNA, 25 bp, Artificial
  probe
  misc_feature (1)..(25): SEQ ID NO: 1921; WAN024FQE; Start 643; Stop 667
gagcagagtatgaatattgagagta

SEQ ID NO: 309481 - DNA, 25 bp, Artificial
  probe
  misc_feature (1)..(25): SEQ ID NO: 1921; WAN024FQE; Start 843; Stop 867
attatacagacaaattgagcagagt

SEQ ID NO: 309482 - DNA, 25 bp, Artificial
  probe
  misc_feature (1)..(25): SEQ ID NO: 1921; WAN024FQE; Start 116; Stop 140
tcttaattgtgaatgatggaagtac

SEQ ID NO: 309483 - DNA, 25 bp, Artificial
  probe
  misc_feature (1)..(25): SEQ ID NO: 1921; WAN024FQE; Start 121; Stop 145
attgtgaatgatggaagtacggacg

SEQ ID NO: 309484 - DNA, 25 bp, Artificial
  probe
  misc_feature (1)..(25): SEQ ID NO: 1921; WAN024FQE; Start 865; Stop 889
agttcttatgagtatatccctacga

SEQ ID NO: 309485 - DNA, 25 bp, Artificial
  probe
  misc_feature (1)..(25): SEQ ID NO: 1921; WAN024FQE; Start 854; Stop 878
aaattgagcagagttcttatgagta

SEQ ID NO: 309486 - DNA, 25 bp, Artificial
  probe
  misc_feature (1)..(25): SEQ ID NO: 1921; WAN024FQE; Start 658; Stop 682
attgagagtatgaaacgaaatgttc

SEQ ID NO: 309487 - DNA, 25 bp, Artificial
  probe
  misc_feature (1)..(25): SEQ ID NO: 1922; WAN024F88; Start 353; Stop 377
gtccttccttcctcaaacatatcta

SEQ ID NO: 309488 - DNA, 25 bp, Artificial
  probe
  misc_feature (1)..(25): SEQ ID NO: 1922; WAN024F88; Start 96; Stop 120
cggcgatataaacatcatctacatc

SEQ ID NO: 309489 - DNA, 25 bp, Artificial
  probe
  misc_feature (1)..(25): SEQ ID NO: 1922; WAN024F88; Start 352; Stop 376
agtccttccttcctcaaacatatct

SEQ ID NO: 309490 - DNA, 25 bp, Artificial
  probe
  misc_feature (1)..(25): SEQ ID NO: 1922; WAN024F88; Start 351; Stop 375
cagtccttccttcctcaaacatatc

SEQ ID NO: 309491 - DNA, 25 bp, Artificial
  probe
  misc_feature (1)..(25): SEQ ID NO: 1922; WAN024F88; Start 136; Stop 160
ataaaccaggtgagacagcatattt

SEQ ID NO: 309492 - DNA, 25 bp, Artificial
  probe
  misc_feature (1)..(25): SEQ ID NO: 1922; WAN024F88; Start 135; Stop 159
cataaaccaggtgagacagcatatt

SEQ ID NO: 309493 - DNA, 25 bp, Artificial
  probe
  misc_feature (1)..(25): SEQ ID NO: 1922; WAN024F88; Start 354; Stop 378
tccttccttcctcaaacatatctag

SEQ ID NO: 309494 - DNA, 25 bp, Artificial
  probe
  misc_feature (1)..(25): SEQ ID NO: 1922; WAN024F88; Start 97; Stop 121
ggcgatataaacatcatctacatca

SEQ ID NO: 309495 - DNA, 25 bp, Artificial
  probe
  misc_feature (1)..(25): SEQ ID NO: 1922; WAN024F88; Start 98; Stop 122
gcgatataaacatcatctacatcac

SEQ ID NO: 309496 - DNA, 25 bp, Artificial
  probe
  misc_feature (1)..(25): SEQ ID NO: 1922; WAN024F88; Start 350; Stop 374
gcagtccttccttcctcaaacatat

SEQ ID NO: 309497 - DNA, 25 bp, Artificial
  probe
  misc_feature (1)..(25): SEQ ID NO: 1922; WAN024F88; Start 67; Stop 91
gacttgaccttgcttaacaacctgt

SEQ ID NO: 309498 - DNA, 25 bp, Artificial
  probe
  misc_feature (1)..(25): SEQ ID NO: 1922; WAN024F88; Start 63; Stop 87
tcaggacttgaccttgcttaacaac

SEQ ID NO: 309499 - DNA, 25 bp, Artificial
  probe
  misc_feature (1)..(25): SEQ ID NO: 1922; WAN024F88; Start 269; Stop 293
ccttcgattgtcagtaccttgagag

SEQ ID NO: 309500 - DNA, 25 bp, Artificial
  probe
  misc_feature (1)..(25): SEQ ID NO: 1922; WAN024F88; Start 274; Stop 298
gattgtcagtaccttgagagctgtt

SEQ ID NO: 309501 - DNA, 25 bp, Artificial
  probe
  misc_feature (1)..(25): SEQ ID NO: 1922; WAN024F88; Start 66; Stop 90
ggacttgaccttgcttaacaacctg

SEQ ID NO: 309502 - DNA, 25 bp, Artificial
  probe
  misc_feature (1)..(25): SEQ ID NO: 1922; WAN024F88; Start 270; Stop 294
cttcgattgtcagtaccttgagagc

SEQ ID NO: 309503 - DNA, 25 bp, Artificial
  probe
  misc_feature (1)..(25): SEQ ID NO: 1922; WAN024F88; Start 134; Stop 158
gcataaaccaggtgagacagcatat

SEQ ID NO: 309504 - DNA, 25 bp, Artificial
  probe
  misc_feature (1)..(25): SEQ ID NO: 1922; WAN024F88; Start 125; Stop 149
gatttaactgcataaaccaggtgag

SEQ ID NO: 309505 - DNA, 25 bp, Artificial
  probe
  misc_feature (1)..(25): SEQ ID NO: 1922; WAN024F88; Start 126; Stop 150
atttaactgcataaaccaggtgaga

SEQ ID NO: 309506 - DNA, 25 bp, Artificial
  probe
  misc_feature (1)..(25): SEQ ID NO: 1922; WAN024F88; Start 124; Stop 148
agatttaactgcataaaccaggtga

SEQ ID NO: 309507 - DNA, 25 bp, Artificial
  probe
  misc_feature (1)..(25): SEQ ID NO: 1922; WAN024F88; Start 232; Stop 256
acttcctatctgattttccattcca

SEQ ID NO: 309508 - DNA, 25 bp, Artificial
  probe
  misc_feature (1)..(25): SEQ ID NO: 1922; WAN024F88; Start 231; Stop 255
gacttcctatctgattttccattcc

SEQ ID NO: 309509 - DNA, 25 bp, Artificial
  probe
  misc_feature (1)..(25): SEQ ID NO: 1922; WAN024F88; Start 123; Stop 147
tagatttaactgcataaaccaggtg

SEQ ID NO: 309510 - DNA, 25 bp, Artificial
  probe
  misc_feature (1)..(25): SEQ ID NO: 1922; WAN024F88; Start 271; Stop 295
ttcgattgtcagtaccttgagagct

SEQ ID NO: 309511 - DNA, 25 bp, Artificial
  probe
  misc_feature (1)..(25): SEQ ID NO: 1922; WAN024F88; Start 119; Stop 143
tcactagatttaactgcataaacca

SEQ ID NO: 309512 - DNA, 25 bp, Artificial
  probe
  misc_feature (1)..(25): SEQ ID NO: 1922; WAN024F88; Start 234; Stop 258
ttcctatctgattttccattccaag

SEQ ID NO: 309513 - DNA, 25 bp, Artificial
  probe
  misc_feature (1)..(25): SEQ ID NO: 1922; WAN024F88; Start 233; Stop 257
cttcctatctgattttccattccaa

SEQ ID NO: 309514 - DNA, 25 bp, Artificial
  probe
  misc_feature (1)..(25): SEQ ID NO: 1922; WAN024F88; Start 174; Stop 198
gatgaattttcccttgtggttgaat

SEQ ID NO: 309515 - DNA, 25 bp, Artificial
  probe
  misc_feature (1)..(25): SEQ ID NO: 1922; WAN024F88; Start 127; Stop 151
tttaactgcataaaccaggtgagac

SEQ ID NO: 309516 - DNA, 25 bp, Artificial
  probe
  misc_feature (1)..(25): SEQ ID NO: 1922; WAN024F88; Start 122; Stop 146
ctagatttaactgcataaaccaggt

SEQ ID NO: 309517 - DNA, 25 bp, Artificial
  probe
  misc_feature (1)..(25): SEQ ID NO: 1922; WAN024F88; Start 121; Stop 145
actagatttaactgcataaaccagg

SEQ ID NO: 309518 - DNA, 25 bp, Artificial
  probe
  misc_feature (1)..(25): SEQ ID NO: 1922; WAN024F88; Start 64; Stop 88
caggacttgaccttgcttaacaacc

SEQ ID NO: 309519 - DNA, 25 bp, Artificial
  probe
  misc_feature (1)..(25): SEQ ID NO: 1922; WAN024F88; Start 175; Stop 199
atgaattttcccttgtggttgaatg

SEQ ID NO: 309520 - DNA, 25 bp, Artificial
  probe
  misc_feature (1)..(25): SEQ ID NO: 1923; WAN024CWS; Start 2089; Stop 2113
gatacttatactcacgcaacagatg

SEQ ID NO: 309521 - DNA, 25 bp, Artificial
  probe
  misc_feature (1)..(25): SEQ ID NO: 1923; WAN024CWS; Start 1557; Stop 1581
ccactatattaccgactatcaagga

SEQ ID NO: 309522 - DNA, 25 bp, Artificial
  probe
  misc_feature (1)..(25): SEQ ID NO: 1923; WAN024CWS; Start 2087; Stop 2111
ttgatacttatactcacgcaacaga

SEQ ID NO: 309523 - DNA, 25 bp, Artificial
  probe
  misc_feature (1)..(25): SEQ ID NO: 1923; WAN024CWS; Start 2085; Stop 2109
tcttgatacttatactcacgcaaca

SEQ ID NO: 309524 - DNA, 25 bp, Artificial
  probe
  misc_feature (1)..(25): SEQ ID NO: 1923; WAN024CWS; Start 2088; Stop 2112
tgatacttatactcacgcaacagat

SEQ ID NO: 309525 - DNA, 25 bp, Artificial
  probe
  misc_feature (1)..(25): SEQ ID NO: 1923; WAN024CWS; Start 2086; Stop 2110
cttgatacttatactcacgcaacag

SEQ ID NO: 309526 - DNA, 25 bp, Artificial
  probe
  misc_feature (1)..(25): SEQ ID NO: 1923; WAN024CWS; Start 1884; Stop 1908
agaatcagatgaggatgaattggtt

SEQ ID NO: 309527 - DNA, 25 bp, Artificial
  probe
  misc_feature (1)..(25): SEQ ID NO: 1923; WAN024CWS; Start 1885; Stop 1909
gaatcagatgaggatgaattggttc

SEQ ID NO: 309528 - DNA, 25 bp, Artificial
  probe
  misc_feature (1)..(25): SEQ ID NO: 1923; WAN024CWS; Start 1883; Stop 1907
gagaatcagatgaggatgaattggt

SEQ ID NO: 309529 - DNA, 25 bp, Artificial
  probe
  misc_feature (1)..(25): SEQ ID NO: 1923; WAN024CWS; Start 1562; Stop 1586
atattaccgactatcaaggagactt

SEQ ID NO: 309530 - DNA, 25 bp, Artificial
  probe
  misc_feature (1)..(25): SEQ ID NO: 1923; WAN024CWS; Start 1691; Stop 1715
cagacttgcttccagttcttgataa

SEQ ID NO: 309531 - DNA, 25 bp, Artificial
  probe
  misc_feature (1)..(25): SEQ ID NO: 1923; WAN024CWS; Start 2348; Stop 2372
ttgttatccttcctgctcatgtatt

SEQ ID NO: 309532 - DNA, 25 bp, Artificial
  probe
  misc_feature (1)..(25): SEQ ID NO: 1923; WAN024CWS; Start 1882; Stop 1906
ggagaatcagatgaggatgaattgg

SEQ ID NO: 309533 - DNA, 25 bp, Artificial
  probe
  misc_feature (1)..(25): SEQ ID NO: 1923; WAN024CWS; Start 2084; Stop 2108
atcttgatacttatactcacgcaac

SEQ ID NO: 309534 - DNA, 25 bp, Artificial
  probe
  misc_feature (1)..(25): SEQ ID NO: 1923; WAN024CWS; Start 1886; Stop 1910
aatcagatgaggatgaattggttcg

SEQ ID NO: 309535 - DNA, 25 bp, Artificial
  probe
  misc_feature (1)..(25): SEQ ID NO: 1923; WAN024CWS; Start 1881; Stop 1905
cggagaatcagatgaggatgaattg

SEQ ID NO: 309536 - DNA, 25 bp, Artificial
  probe
  misc_feature (1)..(25): SEQ ID NO: 1923; WAN024CWS; Start 1561; Stop 1585
tatattaccgactatcaaggagact

SEQ ID NO: 309537 - DNA, 25 bp, Artificial
  probe
  misc_feature (1)..(25): SEQ ID NO: 1923; WAN024CWS; Start 1559; Stop 1583
actatattaccgactatcaaggaga

SEQ ID NO: 309538 - DNA, 25 bp, Artificial
  probe
  misc_feature (1)..(25): SEQ ID NO: 1923; WAN024CWS; Start 1558; Stop 1582
cactatattaccgactatcaaggag

SEQ ID NO: 309539 - DNA, 25 bp, Artificial
  probe
  misc_feature (1)..(25): SEQ ID NO: 1923; WAN024CWS; Start 1880; Stop 1904
acggagaatcagatgaggatgaatt

SEQ ID NO: 309540 - DNA, 25 bp, Artificial
  probe
  misc_feature (1)..(25): SEQ ID NO: 1923; WAN024CWS; Start 1785; Stop 1809
tattgatgaaggaacggatgctgaa

SEQ ID NO: 309541 - DNA, 25 bp, Artificial
  probe
  misc_feature (1)..(25): SEQ ID NO: 1923; WAN024CWS; Start 1784; Stop 1808
ttattgatgaaggaacggatgctga

SEQ ID NO: 309542 - DNA, 25 bp, Artificial
  probe
  misc_feature (1)..(25): SEQ ID NO: 1923; WAN024CWS; Start 1716; Stop 1740
acttgctaaggaagagtcttatctg

SEQ ID NO: 309543 - DNA, 25 bp, Artificial
  probe
  misc_feature (1)..(25): SEQ ID NO: 1923; WAN024CWS; Start 1560; Stop 1584
ctatattaccgactatcaaggagac

SEQ ID NO: 309544 - DNA, 25 bp, Artificial
  probe
  misc_feature (1)..(25): SEQ ID NO: 1923; WAN024CWS; Start 1717; Stop 1741
cttgctaaggaagagtcttatctgg

SEQ ID NO: 309545 - DNA, 25 bp, Artificial
  probe
  misc_feature (1)..(25): SEQ ID NO: 1923; WAN024CWS; Start 1722; Stop 1746
taaggaagagtcttatctggtggtt

SEQ ID NO: 309546 - DNA, 25 bp, Artificial
  probe
  misc_feature (1)..(25): SEQ ID NO: 1923; WAN024CWS; Start 1715; Stop 1739
aacttgctaaggaagagtcttatct

SEQ ID NO: 309547 - DNA, 25 bp, Artificial
  probe
  misc_feature (1)..(25): SEQ ID NO: 1923; WAN024CWS; Start 1718; Stop 1742
ttgctaaggaagagtcttatctggt

SEQ ID NO: 309548 - DNA, 25 bp, Artificial
  probe
  misc_feature (1)..(25): SEQ ID NO: 1923; WAN024CWS; Start 1879; Stop 1903
gacggagaatcagatgaggatgaat

SEQ ID NO: 309549 - DNA, 25 bp, Artificial
  probe
  misc_feature (1)..(25): SEQ ID NO: 1923; WAN024CWS; Start 1604; Stop 1628
ctgagctagagacacttgataacac

SEQ ID NO: 309550 - DNA, 25 bp, Artificial
  probe
  misc_feature (1)..(25): SEQ ID NO: 1923; WAN024CWS; Start 1721; Stop 1745
ctaaggaagagtcttatctggtggt

SEQ ID NO: 309551 - DNA, 25 bp, Artificial
  probe
  misc_feature (1)..(25): SEQ ID NO: 1923; WAN024CWS; Start 2147; Stop 2171
catacagtacagatgcggataatat

SEQ ID NO: 309552 - DNA, 25 bp, Artificial
  probe
  misc_feature (1)..(25): SEQ ID NO: 1923; WAN024CWS; Start 1887; Stop 1911
atcagatgaggatgaattggttcgt

SEQ ID NO: 309553 - DNA, 25 bp, Artificial
  probe
  misc_feature (1)..(25): SEQ ID NO: 1924; WAN024FKR; Start 117; Stop 141
tttaaccaaggtttcaaacttattt

SEQ ID NO: 309554 - DNA, 25 bp, Artificial
  probe
  misc_feature (1)..(25): SEQ ID NO: 1924; WAN024FKR; Start 83; Stop 107
acgaaaatgtgaaagataatgaaat

SEQ ID NO: 309555 - DNA, 25 bp, Artificial
  probe
  misc_feature (1)..(25): SEQ ID NO: 1924; WAN024FKR; Start 82; Stop 106
tacgaaaatgtgaaagataatgaaa

SEQ ID NO: 309556 - DNA, 25 bp, Artificial
  probe
  misc_feature (1)..(25): SEQ ID NO: 1924; WAN024FKR; Start 81; Stop 105
ttacgaaaatgtgaaagataatgaa

SEQ ID NO: 309557 - DNA, 25 bp, Artificial
  probe
  misc_feature (1)..(25): SEQ ID NO: 1924; WAN024FKR; Start 80; Stop 104
tttacgaaaatgtgaaagataatga

SEQ ID NO: 309558 - DNA, 25 bp, Artificial
  probe
  misc_feature (1)..(25): SEQ ID NO: 1924; WAN024FKR; Start 118; Stop 142
ttaaccaaggtttcaaacttatttt

SEQ ID NO: 309559 - DNA, 25 bp, Artificial
  probe
  misc_feature (1)..(25): SEQ ID NO: 1924; WAN024FKR; Start 116; Stop 140
ttttaaccaaggtttcaaacttatt

SEQ ID NO: 309560 - DNA, 25 bp, Artificial
  probe
  misc_feature (1)..(25): SEQ ID NO: 1924; WAN024FKR; Start 79; Stop 103
ttttacgaaaatgtgaaagataatg

SEQ ID NO: 309561 - DNA, 25 bp, Artificial
  probe
  misc_feature (1)..(25): SEQ ID NO: 1925; WAN024D5J; Start 28; Stop 52
catagagatactgtgattcatcgct

SEQ ID NO: 309562 - DNA, 25 bp, Artificial
  probe
  misc_feature (1)..(25): SEQ ID NO: 1925; WAN024D5J; Start 26; Stop 50
agcatagagatactgtgattcatcg

SEQ ID NO: 309563 - DNA, 25 bp, Artificial
  probe
  misc_feature (1)..(25): SEQ ID NO: 1925; WAN024D5J; Start 30; Stop 54
tagagatactgtgattcatcgcttg

SEQ ID NO: 309564 - DNA, 25 bp, Artificial
  probe
  misc_feature (1)..(25): SEQ ID NO: 1925; WAN024D5J; Start 29; Stop 53
atagagatactgtgattcatcgctt

SEQ ID NO: 309565 - DNA, 25 bp, Artificial
  probe
  misc_feature (1)..(25): SEQ ID NO: 1925; WAN024D5J; Start 14; Stop 38
taatcggttaccagcatagagatac

SEQ ID NO: 309566 - DNA, 25 bp, Artificial
  probe
  misc_feature (1)..(25): SEQ ID NO: 1925; WAN024D5J; Start 15; Stop 39
aatcggttaccagcatagagatact

SEQ ID NO: 309567 - DNA, 25 bp, Artificial
  probe
  misc_feature (1)..(25): SEQ ID NO: 1925; WAN024D5J; Start 13; Stop 37
ttaatcggttaccagcatagagata

SEQ ID NO: 309568 - DNA, 25 bp, Artificial
  probe
  misc_feature (1)..(25): SEQ ID NO: 1925; WAN024D5J; Start 27; Stop 51
gcatagagatactgtgattcatcgc

SEQ ID NO: 309569 - DNA, 25 bp, Artificial
  probe
  misc_feature (1)..(25): SEQ ID NO: 1925; WAN024D5J; Start 32; Stop 56
gagatactgtgattcatcgcttgtc

SEQ ID NO: 309570 - DNA, 25 bp, Artificial
  probe
  misc_feature (1)..(25): SEQ ID NO: 1925; WAN024D5J; Start 734; Stop 758
gagactatattaccttgctcttggc

SEQ ID NO: 309571 - DNA, 25 bp, Artificial
  probe
  misc_feature (1)..(25): SEQ ID NO: 1925; WAN024D5J; Start 31; Stop 55
agagatactgtgattcatcgcttgt

SEQ ID NO: 309572 - DNA, 25 bp, Artificial
  probe
  misc_feature (1)..(25): SEQ ID NO: 1925; WAN024D5J; Start 24; Stop 48
ccagcatagagatactgtgattcat

SEQ ID NO: 309573 - DNA, 25 bp, Artificial
  probe
  misc_feature (1)..(25): SEQ ID NO: 1925; WAN024D5J; Start 20; Stop 44
gttaccagcatagagatactgtgat

SEQ ID NO: 309574 - DNA, 25 bp, Artificial
  probe
  misc_feature (1)..(25): SEQ ID NO: 1925; WAN024D5J; Start 22; Stop 46
taccagcatagagatactgtgattc

SEQ ID NO: 309575 - DNA, 25 bp, Artificial
  probe
  misc_feature (1)..(25): SEQ ID NO: 1925; WAN024D5J; Start 11; Stop 35
aattaatcggttaccagcatagaga

SEQ ID NO: 309576 - DNA, 25 bp, Artificial
  probe
  misc_feature (1)..(25): SEQ ID NO: 1925; WAN024D5J; Start 23; Stop 47
accagcatagagatactgtgattca

SEQ ID NO: 309577 - DNA, 25 bp, Artificial
  probe
  misc_feature (1)..(25): SEQ ID NO: 1925; WAN024D5J; Start 21; Stop 45
ttaccagcatagagatactgtgatt

SEQ ID NO: 309578 - DNA, 25 bp, Artificial
  probe
  misc_feature (1)..(25): SEQ ID NO: 1925; WAN024D5J; Start 12; Stop 36
attaatcggttaccagcatagagat

SEQ ID NO: 309579 - DNA, 25 bp, Artificial
  probe
  misc_feature (1)..(25): SEQ ID NO: 1925; WAN024D5J; Start 25; Stop 49
cagcatagagatactgtgattcatc

SEQ ID NO: 309580 - DNA, 25 bp, Artificial
  probe
  misc_feature (1)..(25): SEQ ID NO: 1925; WAN024D5J; Start 33; Stop 57
agatactgtgattcatcgcttgtca

SEQ ID NO: 309581 - DNA, 25 bp, Artificial
  probe
  misc_feature (1)..(25): SEQ ID NO: 1925; WAN024D5J; Start 19; Stop 43
ggttaccagcatagagatactgtga

SEQ ID NO: 309582 - DNA, 25 bp, Artificial
  probe
  misc_feature (1)..(25): SEQ ID NO: 1925; WAN024D5J; Start 16; Stop 40
atcggttaccagcatagagatactg

SEQ ID NO: 309583 - DNA, 25 bp, Artificial
  probe
  misc_feature (1)..(25): SEQ ID NO: 1925; WAN024D5J; Start 34; Stop 58
gatactgtgattcatcgcttgtcag

SEQ ID NO: 309584 - DNA, 25 bp, Artificial
  probe
  misc_feature (1)..(25): SEQ ID NO: 1925; WAN024D5J; Start 418; Stop 442
cctagtcagtttgcttccagtttaa

SEQ ID NO: 309585 - DNA, 25 bp, Artificial
  probe
  misc_feature (1)..(25): SEQ ID NO: 1925; WAN024D5J; Start 18; Stop 42
cggttaccagcatagagatactgtg

SEQ ID NO: 309586 - DNA, 25 bp, Artificial
  probe
  misc_feature (1)..(25): SEQ ID NO: 1925; WAN024D5J; Start 17; Stop 41
tcggttaccagcatagagatactgt

SEQ ID NO: 309587 - DNA, 25 bp, Artificial
  probe
  misc_feature (1)..(25): SEQ ID NO: 1925; WAN024D5J; Start 781; Stop 805
ttactacttatcttgcagaatcagg

SEQ ID NO: 309588 - DNA, 25 bp, Artificial
  probe
  misc_feature (1)..(25): SEQ ID NO: 1925; WAN024D5J; Start 35; Stop 59
atactgtgattcatcgcttgtcagg

SEQ ID NO: 309589 - DNA, 25 bp, Artificial
  probe
  misc_feature (1)..(25): SEQ ID NO: 1925; WAN024D5J; Start 698; Stop 722
aacgcacatggtatagttatcaggc

SEQ ID NO: 309590 - DNA, 25 bp, Artificial
  probe
  misc_feature (1)..(25): SEQ ID NO: 1925; WAN024D5J; Start 604; Stop 628
ctgctcattattacgcccttgattt

SEQ ID NO: 309591 - DNA, 25 bp, Artificial
  probe
  misc_feature (1)..(25): SEQ ID NO: 1925; WAN024D5J; Start 697; Stop 721
aaacgcacatggtatagttatcagg

SEQ ID NO: 309592 - DNA, 25 bp, Artificial
  probe
  misc_feature (1)..(25): SEQ ID NO: 1925; WAN024D5J; Start 10; Stop 34
aaattaatcggttaccagcatagag

SEQ ID NO: 309593 - DNA, 25 bp, Artificial
  probe
  misc_feature (1)..(25): SEQ ID NO: 1925; WAN024D5J; Start 422; Stop 446
gtcagtttgcttccagtttaaatca

SEQ ID NO: 309594 - DNA, 25 bp, Artificial
  probe
  misc_feature (1)..(25): SEQ ID NO: 1926; WAN024GCG; Start 118; Stop 142
cttgctcaagtcactaagaaggtag

SEQ ID NO: 309595 - DNA, 25 bp, Artificial
  probe
  misc_feature (1)..(25): SEQ ID NO: 1926; WAN024GCG; Start 41; Stop 65
atccagataagatttaccaagccat

SEQ ID NO: 309596 - DNA, 25 bp, Artificial
  probe
  misc_feature (1)..(25): SEQ ID NO: 1926; WAN024GCG; Start 42; Stop 66
tccagataagatttaccaagccatc

SEQ ID NO: 309597 - DNA, 25 bp, Artificial
  probe
  misc_feature (1)..(25): SEQ ID NO: 1926; WAN024GCG; Start 120; Stop 144
tgctcaagtcactaagaaggtagtt

SEQ ID NO: 309598 - DNA, 25 bp, Artificial
  probe
  misc_feature (1)..(25): SEQ ID NO: 1926; WAN024GCG; Start 119; Stop 143
ttgctcaagtcactaagaaggtagt

SEQ ID NO: 309599 - DNA, 25 bp, Artificial
  probe
  misc_feature (1)..(25): SEQ ID NO: 1926; WAN024GCG; Start 276; Stop 300
cttggaaagaagtggttatggagat

SEQ ID NO: 309600 - DNA, 25 bp, Artificial
  probe
  misc_feature (1)..(25): SEQ ID NO: 1926; WAN024GCG; Start 227; Stop 251
gttacattaccattgcagaacacta

SEQ ID NO: 309601 - DNA, 25 bp, Artificial
  probe
  misc_feature (1)..(25): SEQ ID NO: 1926; WAN024GCG; Start 197; Stop 221
ctatggttgaacatcgtttattggg

SEQ ID NO: 309602 - DNA, 25 bp, Artificial
  probe
  misc_feature (1)..(25): SEQ ID NO: 1926; WAN024GCG; Start 196; Stop 220
tctatggttgaacatcgtttattgg

SEQ ID NO: 309603 - DNA, 25 bp, Artificial
  probe
  misc_feature (1)..(25): SEQ ID NO: 1926; WAN024GCG; Start 277; Stop 301
ttggaaagaagtggttatggagatc

SEQ ID NO: 309604 - DNA, 25 bp, Artificial
  probe
  misc_feature (1)..(25): SEQ ID NO: 1926; WAN024GCG; Start 279; Stop 303
ggaaagaagtggttatggagatcat

SEQ ID NO: 309605 - DNA, 25 bp, Artificial
  probe
  misc_feature (1)..(25): SEQ ID NO: 1926; WAN024GCG; Start 174; Stop 198
tgcgactatcagtatgattcaatct

SEQ ID NO: 309606 - DNA, 25 bp, Artificial
  probe
  misc_feature (1)..(25): SEQ ID NO: 1926; WAN024GCG; Start 173; Stop 197
gtgcgactatcagtatgattcaatc

SEQ ID NO: 309607 - DNA, 25 bp, Artificial
  probe
  misc_feature (1)..(25): SEQ ID NO: 1926; WAN024GCG; Start 115; Stop 139
aatcttgctcaagtcactaagaagg

SEQ ID NO: 309608 - DNA, 25 bp, Artificial
  probe
  misc_feature (1)..(25): SEQ ID NO: 1926; WAN024GCG; Start 278; Stop 302
tggaaagaagtggttatggagatca

SEQ ID NO: 309609 - DNA, 25 bp, Artificial
  probe
  misc_feature (1)..(25): SEQ ID NO: 1926; WAN024GCG; Start 172; Stop 196
cgtgcgactatcagtatgattcaat

SEQ ID NO: 309610 - DNA, 25 bp, Artificial
  probe
  misc_feature (1)..(25): SEQ ID NO: 1926; WAN024GCG; Start 117; Stop 141
tcttgctcaagtcactaagaaggta

SEQ ID NO: 309611 - DNA, 25 bp, Artificial
  probe
  misc_feature (1)..(25): SEQ ID NO: 1926; WAN024GCG; Start 198; Stop 222
tatggttgaacatcgtttattgggc

SEQ ID NO: 309612 - DNA, 25 bp, Artificial
  probe
  misc_feature (1)..(25): SEQ ID NO: 1926; WAN024GCG; Start 195; Stop 219
atctatggttgaacatcgtttattg

SEQ ID NO: 309613 - DNA, 25 bp, Artificial
  probe
  misc_feature (1)..(25): SEQ ID NO: 1926; WAN024GCG; Start 116; Stop 140
atcttgctcaagtcactaagaaggt

SEQ ID NO: 309614 - DNA, 25 bp, Artificial
  probe
  misc_feature (1)..(25): SEQ ID NO: 1926; WAN024GCG; Start 193; Stop 217
caatctatggttgaacatcgtttat

SEQ ID NO: 309615 - DNA, 25 bp, Artificial
  probe
  misc_feature (1)..(25): SEQ ID NO: 1926; WAN024GCG; Start 175; Stop 199
gcgactatcagtatgattcaatcta

SEQ ID NO: 309616 - DNA, 25 bp, Artificial
  probe
  misc_feature (1)..(25): SEQ ID NO: 1926; WAN024GCG; Start 40; Stop 64
aatccagataagatttaccaagcca

SEQ ID NO: 309617 - DNA, 25 bp, Artificial
  probe
  misc_feature (1)..(25): SEQ ID NO: 1926; WAN024GCG; Start 121; Stop 145
gctcaagtcactaagaaggtagttt

SEQ ID NO: 309618 - DNA, 25 bp, Artificial
  probe
  misc_feature (1)..(25): SEQ ID NO: 1926; WAN024GCG; Start 226; Stop 250
ggttacattaccattgcagaacact

SEQ ID NO: 309619 - DNA, 25 bp, Artificial
  probe
  misc_feature (1)..(25): SEQ ID NO: 1926; WAN024GCG; Start 225; Stop 249
aggttacattaccattgcagaacac

SEQ ID NO: 309620 - DNA, 25 bp, Artificial
  probe
  misc_feature (1)..(25): SEQ ID NO: 1926; WAN024GCG; Start 224; Stop 248
caggttacattaccattgcagaaca

SEQ ID NO: 309621 - DNA, 25 bp, Artificial
  probe
  misc_feature (1)..(25): SEQ ID NO: 1926; WAN024GCG; Start 6; Stop 30
agtaatcaaacgtaatggcgaaatt

SEQ ID NO: 309622 - DNA, 25 bp, Artificial
  probe
  misc_feature (1)..(25): SEQ ID NO: 1926; WAN024GCG; Start 5; Stop 29
aagtaatcaaacgtaatggcgaaat

SEQ ID NO: 309623 - DNA, 25 bp, Artificial
  probe
  misc_feature (1)..(25): SEQ ID NO: 1926; WAN024GCG; Start 4; Stop 28
caagtaatcaaacgtaatggcgaaa

SEQ ID NO: 309624 - DNA, 25 bp, Artificial
  probe
  misc_feature (1)..(25): SEQ ID NO: 1926; WAN024GCG; Start 7; Stop 31
gtaatcaaacgtaatggcgaaattg

SEQ ID NO: 309625 - DNA, 25 bp, Artificial
  probe
  misc_feature (1)..(25): SEQ ID NO: 1926; WAN024GCG; Start 43; Stop 67
ccagataagatttaccaagccatct

SEQ ID NO: 309626 - DNA, 25 bp, Artificial
  probe
  misc_feature (1)..(25): SEQ ID NO: 1926; WAN024GCG; Start 39; Stop 63
taatccagataagatttaccaagcc

SEQ ID NO: 309627 - DNA, 25 bp, Artificial
  probe
  misc_feature (1)..(25): SEQ ID NO: 1927; WAN024GGZ; Start 64; Stop 88
acctatctcatccttagaatccacg

SEQ ID NO: 309628 - DNA, 25 bp, Artificial
  probe
  misc_feature (1)..(25): SEQ ID NO: 1927; WAN024GGZ; Start 63; Stop 87
tacctatctcatccttagaatccac

SEQ ID NO: 309629 - DNA, 25 bp, Artificial
  probe
  misc_feature (1)..(25): SEQ ID NO: 1927; WAN024GGZ; Start 25; Stop 49
gagatgctggtagaggctattgatt

SEQ ID NO: 309630 - DNA, 25 bp, Artificial
  probe
  misc_feature (1)..(25): SEQ ID NO: 1927; WAN024GGZ; Start 13; Stop 37
aataacagtcaagagatgctggtag

SEQ ID NO: 309631 - DNA, 25 bp, Artificial
  probe
  misc_feature (1)..(25): SEQ ID NO: 1927; WAN024GGZ; Start 12; Stop 36
caataacagtcaagagatgctggta

SEQ ID NO: 309632 - DNA, 25 bp, Artificial
  probe
  misc_feature (1)..(25): SEQ ID NO: 1927; WAN024GGZ; Start 5; Stop 29
aagtccgcaataacagtcaagagat

SEQ ID NO: 309633 - DNA, 25 bp, Artificial
  probe
  misc_feature (1)..(25): SEQ ID NO: 1927; WAN024GGZ; Start 14; Stop 38
ataacagtcaagagatgctggtaga

SEQ ID NO: 309634 - DNA, 25 bp, Artificial
  probe
  misc_feature (1)..(25): SEQ ID NO: 1927; WAN024GGZ; Start 62; Stop 86
ttacctatctcatccttagaatcca

SEQ ID NO: 309635 - DNA, 25 bp, Artificial
  probe
  misc_feature (1)..(25): SEQ ID NO: 1927; WAN024GGZ; Start 65; Stop 89
cctatctcatccttagaatccacgc

SEQ ID NO: 309636 - DNA, 25 bp, Artificial
  probe
  misc_feature (1)..(25): SEQ ID NO: 1927; WAN024GGZ; Start 24; Stop 48
agagatgctggtagaggctattgat

SEQ ID NO: 309637 - DNA, 25 bp, Artificial
  probe
  misc_feature (1)..(25): SEQ ID NO: 1927; WAN024GGZ; Start 15; Stop 39
taacagtcaagagatgctggtagag

SEQ ID NO: 309638 - DNA, 25 bp, Artificial
  probe
  misc_feature (1)..(25): SEQ ID NO: 1927; WAN024GGZ; Start 157; Stop 181
aacaatagtccgagcgtagatgtag

SEQ ID NO: 309639 - DNA, 25 bp, Artificial
  probe
  misc_feature (1)..(25): SEQ ID NO: 1927; WAN024GGZ; Start 219; Stop 243
tatagggaagaaactggagactgat

SEQ ID NO: 309640 - DNA, 25 bp, Artificial
  probe
  misc_feature (1)..(25): SEQ ID NO: 1927; WAN024GGZ; Start 23; Stop 47
aagagatgctggtagaggctattga

SEQ ID NO: 309641 - DNA, 25 bp, Artificial
  probe
  misc_feature (1)..(25): SEQ ID NO: 1927; WAN024GGZ; Start 21; Stop 45
tcaagagatgctggtagaggctatt

SEQ ID NO: 309642 - DNA, 25 bp, Artificial
  probe
  misc_feature (1)..(25): SEQ ID NO: 1927; WAN024GGZ; Start 6; Stop 30
agtccgcaataacagtcaagagatg

SEQ ID NO: 309643 - DNA, 25 bp, Artificial
  probe
  misc_feature (1)..(25): SEQ ID NO: 1927; WAN024GGZ; Start 39; Stop 63
ggctattgatttgttccttgagatt

SEQ ID NO: 309644 - DNA, 25 bp, Artificial
  probe
  misc_feature (1)..(25): SEQ ID NO: 1927; WAN024GGZ; Start 156; Stop 180
caacaatagtccgagcgtagatgta

SEQ ID NO: 309645 - DNA, 25 bp, Artificial
  probe
  misc_feature (1)..(25): SEQ ID NO: 1927; WAN024GGZ; Start 220; Stop 244
atagggaagaaactggagactgatt

SEQ ID NO: 309646 - DNA, 25 bp, Artificial
  probe
  misc_feature (1)..(25): SEQ ID NO: 1927; WAN024GGZ; Start 218; Stop 242
gtatagggaagaaactggagactga

SEQ ID NO: 309647 - DNA, 25 bp, Artificial
  probe
  misc_feature (1)..(25): SEQ ID NO: 1927; WAN024GGZ; Start 22; Stop 46
caagagatgctggtagaggctattg

SEQ ID NO: 309648 - DNA, 25 bp, Artificial
  probe
  misc_feature (1)..(25): SEQ ID NO: 1927; WAN024GGZ; Start 4; Stop 28
caagtccgcaataacagtcaagaga

SEQ ID NO: 309649 - DNA, 25 bp, Artificial
  probe
  misc_feature (1)..(25): SEQ ID NO: 1927; WAN024GGZ; Start 221; Stop 245
tagggaagaaactggagactgattt

SEQ ID NO: 309650 - DNA, 25 bp, Artificial
  probe
  misc_feature (1)..(25): SEQ ID NO: 1927; WAN024GGZ; Start 215; Stop 239
aaggtatagggaagaaactggagac

SEQ ID NO: 309651 - DNA, 25 bp, Artificial
  probe
  misc_feature (1)..(25): SEQ ID NO: 1927; WAN024GGZ; Start 214; Stop 238
caaggtatagggaagaaactggaga

SEQ ID NO: 309652 - DNA, 25 bp, Artificial
  probe
  misc_feature (1)..(25): SEQ ID NO: 1927; WAN024GGZ; Start 31; Stop 55
ctggtagaggctattgatttgttcc

SEQ ID NO: 309653 - DNA, 25 bp, Artificial
  probe
  misc_feature (1)..(25): SEQ ID NO: 1927; WAN024GGZ; Start 27; Stop 51
gatgctggtagaggctattgatttg

SEQ ID NO: 309654 - DNA, 25 bp, Artificial
  probe
  misc_feature (1)..(25): SEQ ID NO: 1927; WAN024GGZ; Start 26; Stop 50
agatgctggtagaggctattgattt

SEQ ID NO: 309655 - DNA, 25 bp, Artificial
  probe
  misc_feature (1)..(25): SEQ ID NO: 1927; WAN024GGZ; Start 43; Stop 67
attgatttgttccttgagattacct

SEQ ID NO: 309656 - DNA, 25 bp, Artificial
  probe
  misc_feature (1)..(25): SEQ ID NO: 1927; WAN024GGZ; Start 30; Stop 54
gctggtagaggctattgatttgttc

SEQ ID NO: 309657 - DNA, 25 bp, Artificial
  probe
  misc_feature (1)..(25): SEQ ID NO: 1927; WAN024GGZ; Start 61; Stop 85
attacctatctcatccttagaatcc

SEQ ID NO: 309658 - DNA, 25 bp, Artificial
  probe
  misc_feature (1)..(25): SEQ ID NO: 1927; WAN024GGZ; Start 217; Stop 241
ggtatagggaagaaactggagactg

SEQ ID NO: 309659 - DNA, 25 bp, Artificial
  probe
  misc_feature (1)..(25): SEQ ID NO: 1927; WAN024GGZ; Start 216; Stop 240
aggtatagggaagaaactggagact

SEQ ID NO: 309660 - DNA, 25 bp, Artificial
  probe
  misc_feature (1)..(25): SEQ ID NO: 1928; WAN024FGH; Start 135; Stop 159
aattgttattcctcctcagtggttc

SEQ ID NO: 309661 - DNA, 25 bp, Artificial
  probe
  misc_feature (1)..(25): SEQ ID NO: 1928; WAN024FGH; Start 136; Stop 160
attgttattcctcctcagtggttcc

SEQ ID NO: 309662 - DNA, 25 bp, Artificial
  probe
  misc_feature (1)..(25): SEQ ID NO: 1928; WAN024FGH; Start 544; Stop 568
gagattcgtaccttctggagtgtag

SEQ ID NO: 309663 - DNA, 25 bp, Artificial
  probe
  misc_feature (1)..(25): SEQ ID NO: 1928; WAN024FGH; Start 619; Stop 643
atcaatacttggaatgactacttca

SEQ ID NO: 309664 - DNA, 25 bp, Artificial
  probe
  misc_feature (1)..(25): SEQ ID NO: 1928; WAN024FGH; Start 333; Stop 357
atttgctatctttatcgctgctatg

SEQ ID NO: 309665 - DNA, 25 bp, Artificial
  probe
  misc_feature (1)..(25): SEQ ID NO: 1928; WAN024FGH; Start 647; Stop 671
aattggtaatgttgacttcacgtaa

SEQ ID NO: 309666 - DNA, 25 bp, Artificial
  probe
  misc_feature (1)..(25): SEQ ID NO: 1928; WAN024FGH; Start 434; Stop 458
cagttatcttgcctttgattggatg

SEQ ID NO: 309667 - DNA, 25 bp, Artificial
  probe
  misc_feature (1)..(25): SEQ ID NO: 1928; WAN024FGH; Start 618; Stop 642
catcaatacttggaatgactacttc

SEQ ID NO: 309668 - DNA, 25 bp, Artificial
  probe
  misc_feature (1)..(25): SEQ ID NO: 1928; WAN024FGH; Start 648; Stop 672
attggtaatgttgacttcacgtaac

SEQ ID NO: 309669 - DNA, 25 bp, Artificial
  probe
  misc_feature (1)..(25): SEQ ID NO: 1928; WAN024FGH; Start 74; Stop 98
tgctgttcatctttccattctactg

SEQ ID NO: 309670 - DNA, 25 bp, Artificial
  probe
  misc_feature (1)..(25): SEQ ID NO: 1928; WAN024FGH; Start 73; Stop 97
gtgctgttcatctttccattctact

SEQ ID NO: 309671 - DNA, 25 bp, Artificial
  probe
  misc_feature (1)..(25): SEQ ID NO: 1928; WAN024FGH; Start 71; Stop 95
ctgtgctgttcatctttccattcta

SEQ ID NO: 309672 - DNA, 25 bp, Artificial
  probe
  misc_feature (1)..(25): SEQ ID NO: 1928; WAN024FGH; Start 331; Stop 355
ctatttgctatctttatcgctgcta

SEQ ID NO: 309673 - DNA, 25 bp, Artificial
  probe
  misc_feature (1)..(25): SEQ ID NO: 1928; WAN024FGH; Start 220; Stop 244
tggatgtggaactcagtatttatct

SEQ ID NO: 309674 - DNA, 25 bp, Artificial
  probe
  misc_feature (1)..(25): SEQ ID NO: 1928; WAN024FGH; Start 543; Stop 567
tgagattcgtaccttctggagtgta

SEQ ID NO: 309675 - DNA, 25 bp, Artificial
  probe
  misc_feature (1)..(25): SEQ ID NO: 1928; WAN024FGH; Start 334; Stop 358
tttgctatctttatcgctgctatgg

SEQ ID NO: 309676 - DNA, 25 bp, Artificial
  probe
  misc_feature (1)..(25): SEQ ID NO: 1928; WAN024FGH; Start 72; Stop 96
tgtgctgttcatctttccattctac

SEQ ID NO: 309677 - DNA, 25 bp, Artificial
  probe
  misc_feature (1)..(25): SEQ ID NO: 1928; WAN024FGH; Start 802; Stop 826
ttcacacagggtattactatgggag

SEQ ID NO: 309678 - DNA, 25 bp, Artificial
  probe
  misc_feature (1)..(25): SEQ ID NO: 1928; WAN024FGH; Start 801; Stop 825
cttcacacagggtattactatggga

SEQ ID NO: 309679 - DNA, 25 bp, Artificial
  probe
  misc_feature (1)..(25): SEQ ID NO: 1928; WAN024FGH; Start 724; Stop 748
aactatggtttgattatggcaggag

SEQ ID NO: 309680 - DNA, 25 bp, Artificial
  probe
  misc_feature (1)..(25): SEQ ID NO: 1928; WAN024FGH; Start 217; Stop 241
caatggatgtggaactcagtattta

SEQ ID NO: 309681 - DNA, 25 bp, Artificial
  probe
  misc_feature (1)..(25): SEQ ID NO: 1928; WAN024FGH; Start 435; Stop 459
agttatcttgcctttgattggatgg

SEQ ID NO: 309682 - DNA, 25 bp, Artificial
  probe
  misc_feature (1)..(25): SEQ ID NO: 1928; WAN024FGH; Start 221; Stop 245
ggatgtggaactcagtatttatctc

SEQ ID NO: 309683 - DNA, 25 bp, Artificial
  probe
  misc_feature (1)..(25): SEQ ID NO: 1928; WAN024FGH; Start 62; Stop 86
tcttgttgactgtgctgttcatctt

SEQ ID NO: 309684 - DNA, 25 bp, Artificial
  probe
  misc_feature (1)..(25): SEQ ID NO: 1928; WAN024FGH; Start 332; Stop 356
tatttgctatctttatcgctgctat

SEQ ID NO: 309685 - DNA, 25 bp, Artificial
  probe
  misc_feature (1)..(25): SEQ ID NO: 1928; WAN024FGH; Start 723; Stop 747
caactatggtttgattatggcagga

SEQ ID NO: 309686 - DNA, 25 bp, Artificial
  probe
  misc_feature (1)..(25): SEQ ID NO: 1928; WAN024FGH; Start 667; Stop 691
cgtaacaatttgaccatctcacttg

SEQ ID NO: 309687 - DNA, 25 bp, Artificial
  probe
  misc_feature (1)..(25): SEQ ID NO: 1928; WAN024FGH; Start 216; Stop 240
gcaatggatgtggaactcagtattt

SEQ ID NO: 309688 - DNA, 25 bp, Artificial
  probe
  misc_feature (1)..(25): SEQ ID NO: 1928; WAN024FGH; Start 242; Stop 266
tctcattggtaaccatgttcttagt

SEQ ID NO: 309689 - DNA, 25 bp, Artificial
  probe
  misc_feature (1)..(25): SEQ ID NO: 1928; WAN024FGH; Start 219; Stop 243
atggatgtggaactcagtatttatc

SEQ ID NO: 309690 - DNA, 25 bp, Artificial
  probe
  misc_feature (1)..(25): SEQ ID NO: 1928; WAN024FGH; Start 227; Stop 251
ggaactcagtatttatctcattggt

SEQ ID NO: 309691 - DNA, 25 bp, Artificial
  probe
  misc_feature (1)..(25): SEQ ID NO: 1928; WAN024FGH; Start 226; Stop 250
tggaactcagtatttatctcattgg

SEQ ID NO: 309692 - DNA, 25 bp, Artificial
  probe
  misc_feature (1)..(25): SEQ ID NO: 1928; WAN024FGH; Start 613; Stop 637
accttcatcaatacttggaatgact

SEQ ID NO: 309693 - DNA, 25 bp, Artificial
  probe
  misc_feature (1)..(25): SEQ ID NO: 1929; WAN024DZV; Start 53; Stop 77
tgaatatgagtatccacaagacctg

SEQ ID NO: 309694 - DNA, 25 bp, Artificial
  probe
  misc_feature (1)..(25): SEQ ID NO: 1929; WAN024DZV; Start 52; Stop 76
atgaatatgagtatccacaagacct

SEQ ID NO: 309695 - DNA, 25 bp, Artificial
  probe
  misc_feature (1)..(25): SEQ ID NO: 1929; WAN024DZV; Start 88; Stop 112
ataacctgtatagtcaatcacctca

SEQ ID NO: 309696 - DNA, 25 bp, Artificial
  probe
  misc_feature (1)..(25): SEQ ID NO: 1929; WAN024DZV; Start 9; Stop 33
taccttcaatgttgttgtccatcac

SEQ ID NO: 309697 - DNA, 25 bp, Artificial
  probe
  misc_feature (1)..(25): SEQ ID NO: 1929; WAN024DZV; Start 4; Stop 28
caatgtaccttcaatgttgttgtcc

SEQ ID NO: 309698 - DNA, 25 bp, Artificial
  probe
  misc_feature (1)..(25): SEQ ID NO: 1929; WAN024DZV; Start 89; Stop 113
taacctgtatagtcaatcacctcag

SEQ ID NO: 309699 - DNA, 25 bp, Artificial
  probe
  misc_feature (1)..(25): SEQ ID NO: 1929; WAN024DZV; Start 6; Stop 30
atgtaccttcaatgttgttgtccat

SEQ ID NO: 309700 - DNA, 25 bp, Artificial
  probe
  misc_feature (1)..(25): SEQ ID NO: 1929; WAN024DZV; Start 51; Stop 75
catgaatatgagtatccacaagacc

SEQ ID NO: 309701 - DNA, 25 bp, Artificial
  probe
  misc_feature (1)..(25): SEQ ID NO: 1929; WAN024DZV; Start 50; Stop 74
ccatgaatatgagtatccacaagac

SEQ ID NO: 309702 - DNA, 25 bp, Artificial
  probe
  misc_feature (1)..(25): SEQ ID NO: 1929; WAN024DZV; Start 49; Stop 73
tccatgaatatgagtatccacaaga

SEQ ID NO: 309703 - DNA, 25 bp, Artificial
  probe
  misc_feature (1)..(25): SEQ ID NO: 1929; WAN024DZV; Start 5; Stop 29
aatgtaccttcaatgttgttgtcca

SEQ ID NO: 309704 - DNA, 25 bp, Artificial
  probe
  misc_feature (1)..(25): SEQ ID NO: 1929; WAN024DZV; Start 8; Stop 32
gtaccttcaatgttgttgtccatca

SEQ ID NO: 309705 - DNA, 25 bp, Artificial
  probe
  misc_feature (1)..(25): SEQ ID NO: 1929; WAN024DZV; Start 7; Stop 31
tgtaccttcaatgttgttgtccatc

SEQ ID NO: 309706 - DNA, 25 bp, Artificial
  probe
  misc_feature (1)..(25): SEQ ID NO: 1929; WAN024DZV; Start 3; Stop 27
gcaatgtaccttcaatgttgttgtc

SEQ ID NO: 309707 - DNA, 25 bp, Artificial
  probe
  misc_feature (1)..(25): SEQ ID NO: 1929; WAN024DZV; Start 54; Stop 78
gaatatgagtatccacaagacctgg

SEQ ID NO: 309708 - DNA, 25 bp, Artificial
  probe
  misc_feature (1)..(25): SEQ ID NO: 1929; WAN024DZV; Start 48; Stop 72
atccatgaatatgagtatccacaag

SEQ ID NO: 309709 - DNA, 25 bp, Artificial
  probe
  misc_feature (1)..(25): SEQ ID NO: 1929; WAN024DZV; Start 87; Stop 111
tataacctgtatagtcaatcacctc

SEQ ID NO: 309710 - DNA, 25 bp, Artificial
  probe
  misc_feature (1)..(25): SEQ ID NO: 1929; WAN024DZV; Start 33; Stop 57
catctacacctgcatatccatgaat

SEQ ID NO: 309711 - DNA, 25 bp, Artificial
  probe
  misc_feature (1)..(25): SEQ ID NO: 1929; WAN024DZV; Start 90; Stop 114
aacctgtatagtcaatcacctcagc

SEQ ID NO: 309712 - DNA, 25 bp, Artificial
  probe
  misc_feature (1)..(25): SEQ ID NO: 1929; WAN024DZV; Start 35; Stop 59
tctacacctgcatatccatgaatat

SEQ ID NO: 309713 - DNA, 25 bp, Artificial
  probe
  misc_feature (1)..(25): SEQ ID NO: 1929; WAN024DZV; Start 34; Stop 58
atctacacctgcatatccatgaata

SEQ ID NO: 309714 - DNA, 25 bp, Artificial
  probe
  misc_feature (1)..(25): SEQ ID NO: 1929; WAN024DZV; Start 29; Stop 53
atcacatctacacctgcatatccat

SEQ ID NO: 309715 - DNA, 25 bp, Artificial
  probe
  misc_feature (1)..(25): SEQ ID NO: 1929; WAN024DZV; Start 1; Stop 25
atgcaatgtaccttcaatgttgttg

SEQ ID NO: 309716 - DNA, 25 bp, Artificial
  probe
  misc_feature (1)..(25): SEQ ID NO: 1929; WAN024DZV; Start 79; Stop 103
ggcaatgctataacctgtatagtca

SEQ ID NO: 309717 - DNA, 25 bp, Artificial
  probe
  misc_feature (1)..(25): SEQ ID NO: 1929; WAN024DZV; Start 206; Stop 230
tgatccgctttaatatagttaggca

SEQ ID NO: 309718 - DNA, 25 bp, Artificial
  probe
  misc_feature (1)..(25): SEQ ID NO: 1929; WAN024DZV; Start 20; Stop 44
ttgttgtccatcacatctacacctg

SEQ ID NO: 309719 - DNA, 25 bp, Artificial
  probe
  misc_feature (1)..(25): SEQ ID NO: 1929; WAN024DZV; Start 19; Stop 43
gttgttgtccatcacatctacacct

SEQ ID NO: 309720 - DNA, 25 bp, Artificial
  probe
  misc_feature (1)..(25): SEQ ID NO: 1929; WAN024DZV; Start 85; Stop 109
gctataacctgtatagtcaatcacc

SEQ ID NO: 309721 - DNA, 25 bp, Artificial
  probe
  misc_feature (1)..(25): SEQ ID NO: 1929; WAN024DZV; Start 32; Stop 56
acatctacacctgcatatccatgaa

SEQ ID NO: 309722 - DNA, 25 bp, Artificial
  probe
  misc_feature (1)..(25): SEQ ID NO: 1929; WAN024DZV; Start 205; Stop 229
ctgatccgctttaatatagttaggc

SEQ ID NO: 309723 - DNA, 25 bp, Artificial
  probe
  misc_feature (1)..(25): SEQ ID NO: 1929; WAN024DZV; Start 26; Stop 50
tccatcacatctacacctgcatatc

SEQ ID NO: 309724 - DNA, 25 bp, Artificial
  probe
  misc_feature (1)..(25): SEQ ID NO: 1929; WAN024DZV; Start 80; Stop 104
gcaatgctataacctgtatagtcaa

SEQ ID NO: 309725 - DNA, 25 bp, Artificial
  probe
  misc_feature (1)..(25): SEQ ID NO: 1929; WAN024DZV; Start 18; Stop 42
tgttgttgtccatcacatctacacc

SEQ ID NO: 309726 - DNA, 25 bp, Artificial
  probe
  misc_feature (1)..(25): SEQ ID NO: 1930; WAN024ERX; Start 332; Stop 356
ttcttaaccatgtcagtacctatgt

SEQ ID NO: 309727 - DNA, 25 bp, Artificial
  probe
  misc_feature (1)..(25): SEQ ID NO: 1930; WAN024ERX; Start 334; Stop 358
cttaaccatgtcagtacctatgttg

SEQ ID NO: 309728 - DNA, 25 bp, Artificial
  probe
  misc_feature (1)..(25): SEQ ID NO: 1930; WAN024ERX; Start 333; Stop 357
tcttaaccatgtcagtacctatgtt

SEQ ID NO: 309729 - DNA, 25 bp, Artificial
  probe
  misc_feature (1)..(25): SEQ ID NO: 1930; WAN024ERX; Start 331; Stop 355
cttcttaaccatgtcagtacctatg

SEQ ID NO: 309730 - DNA, 25 bp, Artificial
  probe
  misc_feature (1)..(25): SEQ ID NO: 1930; WAN024ERX; Start 49; Stop 73
aagcaattacttgaggaacaactcc

SEQ ID NO: 309731 - DNA, 25 bp, Artificial
  probe
  misc_feature (1)..(25): SEQ ID NO: 1930; WAN024ERX; Start 819; Stop 843
gctaactttcactaccctttcaaat

SEQ ID NO: 309732 - DNA, 25 bp, Artificial
  probe
  misc_feature (1)..(25): SEQ ID NO: 1930; WAN024ERX; Start 792; Stop 816
ctttacccacccacttactttagag

SEQ ID NO: 309733 - DNA, 25 bp, Artificial
  probe
  misc_feature (1)..(25): SEQ ID NO: 1930; WAN024ERX; Start 793; Stop 817
tttacccacccacttactttagaga

SEQ ID NO: 309734 - DNA, 25 bp, Artificial
  probe
  misc_feature (1)..(25): SEQ ID NO: 1930; WAN024ERX; Start 335; Stop 359
ttaaccatgtcagtacctatgttgg

SEQ ID NO: 309735 - DNA, 25 bp, Artificial
  probe
  misc_feature (1)..(25): SEQ ID NO: 1930; WAN024ERX; Start 789; Stop 813
ttcctttacccacccacttacttta

SEQ ID NO: 309736 - DNA, 25 bp, Artificial
  probe
  misc_feature (1)..(25): SEQ ID NO: 1930; WAN024ERX; Start 485; Stop 509
attgggctctagttgatggaaatat

SEQ ID NO: 309737 - DNA, 25 bp, Artificial
  probe
  misc_feature (1)..(25): SEQ ID NO: 1930; WAN024ERX; Start 483; Stop 507
atattgggctctagttgatggaaat

SEQ ID NO: 309738 - DNA, 25 bp, Artificial
  probe
  misc_feature (1)..(25): SEQ ID NO: 1930; WAN024ERX; Start 152; Stop 176
aaatcgtaaatcctggagatgtttg

SEQ ID NO: 309739 - DNA, 25 bp, Artificial
  probe
  misc_feature (1)..(25): SEQ ID NO: 1930; WAN024ERX; Start 151; Stop 175
gaaatcgtaaatcctggagatgttt

SEQ ID NO: 309740 - DNA, 25 bp, Artificial
  probe
  misc_feature (1)..(25): SEQ ID NO: 1930; WAN024ERX; Start 624; Stop 648
aaagcaattctcaaacaagacttcc

SEQ ID NO: 309741 - DNA, 25 bp, Artificial
  probe
  misc_feature (1)..(25): SEQ ID NO: 1930; WAN024ERX; Start 486; Stop 510
ttgggctctagttgatggaaatatc

SEQ ID NO: 309742 - DNA, 25 bp, Artificial
  probe
  misc_feature (1)..(25): SEQ ID NO: 1930; WAN024ERX; Start 822; Stop 846
aactttcactaccctttcaaataca

SEQ ID NO: 309743 - DNA, 25 bp, Artificial
  probe
  misc_feature (1)..(25): SEQ ID NO: 1930; WAN024ERX; Start 791; Stop 815
cctttacccacccacttactttaga

SEQ ID NO: 309744 - DNA, 25 bp, Artificial
  probe
  misc_feature (1)..(25): SEQ ID NO: 1930; WAN024ERX; Start 790; Stop 814
tcctttacccacccacttactttag

SEQ ID NO: 309745 - DNA, 25 bp, Artificial
  probe
  misc_feature (1)..(25): SEQ ID NO: 1930; WAN024ERX; Start 626; Stop 650
agcaattctcaaacaagacttcctt

SEQ ID NO: 309746 - DNA, 25 bp, Artificial
  probe
  misc_feature (1)..(25): SEQ ID NO: 1930; WAN024ERX; Start 625; Stop 649
aagcaattctcaaacaagacttcct

SEQ ID NO: 309747 - DNA, 25 bp, Artificial
  probe
  misc_feature (1)..(25): SEQ ID NO: 1930; WAN024ERX; Start 823; Stop 847
actttcactaccctttcaaatacat

SEQ ID NO: 309748 - DNA, 25 bp, Artificial
  probe
  misc_feature (1)..(25): SEQ ID NO: 1930; WAN024ERX; Start 48; Stop 72
aaagcaattacttgaggaacaactc

SEQ ID NO: 309749 - DNA, 25 bp, Artificial
  probe
  misc_feature (1)..(25): SEQ ID NO: 1930; WAN024ERX; Start 484; Stop 508
tattgggctctagttgatggaaata

SEQ ID NO: 309750 - DNA, 25 bp, Artificial
  probe
  misc_feature (1)..(25): SEQ ID NO: 1930; WAN024ERX; Start 47; Stop 71
taaagcaattacttgaggaacaact

SEQ ID NO: 309751 - DNA, 25 bp, Artificial
  probe
  misc_feature (1)..(25): SEQ ID NO: 1930; WAN024ERX; Start 5; Stop 29
aattcacatttacattacccgcctc

SEQ ID NO: 309752 - DNA, 25 bp, Artificial
  probe
  misc_feature (1)..(25): SEQ ID NO: 1930; WAN024ERX; Start 788; Stop 812
tttcctttacccacccacttacttt

SEQ ID NO: 309753 - DNA, 25 bp, Artificial
  probe
  misc_feature (1)..(25): SEQ ID NO: 1930; WAN024ERX; Start 243; Stop 267
gcaggaagtttatcaagatcaacac

SEQ ID NO: 309754 - DNA, 25 bp, Artificial
  probe
  misc_feature (1)..(25): SEQ ID NO: 1930; WAN024ERX; Start 153; Stop 177
aatcgtaaatcctggagatgtttgc

SEQ ID NO: 309755 - DNA, 25 bp, Artificial
  probe
  misc_feature (1)..(25): SEQ ID NO: 1930; WAN024ERX; Start 4; Stop 28
caattcacatttacattacccgcct

SEQ ID NO: 309756 - DNA, 25 bp, Artificial
  probe
  misc_feature (1)..(25): SEQ ID NO: 1930; WAN024ERX; Start 10; Stop 34
acatttacattacccgcctctctac

SEQ ID NO: 309757 - DNA, 25 bp, Artificial
  probe
  misc_feature (1)..(25): SEQ ID NO: 1930; WAN024ERX; Start 9; Stop 33
cacatttacattacccgcctctcta

SEQ ID NO: 309758 - DNA, 25 bp, Artificial
  probe
  misc_feature (1)..(25): SEQ ID NO: 1930; WAN024ERX; Start 623; Stop 647
taaagcaattctcaaacaagacttc

SEQ ID NO: 309759 - DNA, 25 bp, Artificial
  probe
  misc_feature (1)..(25): SEQ ID NO: 1931; WAN024CTS; Start 20; Stop 44
agattattagcagttggaaccacat

SEQ ID NO: 309760 - DNA, 25 bp, Artificial
  probe
  misc_feature (1)..(25): SEQ ID NO: 1931; WAN024CTS; Start 21; Stop 45
gattattagcagttggaaccacatt

SEQ ID NO: 309761 - DNA, 25 bp, Artificial
  probe
  misc_feature (1)..(25): SEQ ID NO: 1931; WAN024CTS; Start 22; Stop 46
attattagcagttggaaccacattc

SEQ ID NO: 309762 - DNA, 25 bp, Artificial
  probe
  misc_feature (1)..(25): SEQ ID NO: 1931; WAN024CTS; Start 19; Stop 43
cagattattagcagttggaaccaca

SEQ ID NO: 309763 - DNA, 25 bp, Artificial
  probe
  misc_feature (1)..(25): SEQ ID NO: 1931; WAN024CTS; Start 10; Stop 34
gaagcgaaccagattattagcagtt

SEQ ID NO: 309764 - DNA, 25 bp, Artificial
  probe
  misc_feature (1)..(25): SEQ ID NO: 1931; WAN024CTS; Start 144; Stop 168
taccagcagtcgtaatcttatctcg

SEQ ID NO: 309765 - DNA, 25 bp, Artificial
  probe
  misc_feature (1)..(25): SEQ ID NO: 1931; WAN024CTS; Start 102; Stop 126
caatcgcatggtcttccttaataag

SEQ ID NO: 309766 - DNA, 25 bp, Artificial
  probe
  misc_feature (1)..(25): SEQ ID NO: 1931; WAN024CTS; Start 11; Stop 35
aagcgaaccagattattagcagttg

SEQ ID NO: 309767 - DNA, 25 bp, Artificial
  probe
  misc_feature (1)..(25): SEQ ID NO: 1931; WAN024CTS; Start 365; Stop 389
gaataagcacgaactggaatcttac

SEQ ID NO: 309768 - DNA, 25 bp, Artificial
  probe
  misc_feature (1)..(25): SEQ ID NO: 1931; WAN024CTS; Start 366; Stop 390
aataagcacgaactggaatcttacc

SEQ ID NO: 309769 - DNA, 25 bp, Artificial
  probe
  misc_feature (1)..(25): SEQ ID NO: 1931; WAN024CTS; Start 364; Stop 388
cgaataagcacgaactggaatctta

SEQ ID NO: 309770 - DNA, 25 bp, Artificial
  probe
  misc_feature (1)..(25): SEQ ID NO: 1931; WAN024CTS; Start 143; Stop 167
ttaccagcagtcgtaatcttatctc

SEQ ID NO: 309771 - DNA, 25 bp, Artificial
  probe
  misc_feature (1)..(25): SEQ ID NO: 1931; WAN024CTS; Start 142; Stop 166
cttaccagcagtcgtaatcttatct

SEQ ID NO: 309772 - DNA, 25 bp, Artificial
  probe
  misc_feature (1)..(25): SEQ ID NO: 1931; WAN024CTS; Start 372; Stop 396
cacgaactggaatcttaccttctga

SEQ ID NO: 309773 - DNA, 25 bp, Artificial
  probe
  misc_feature (1)..(25): SEQ ID NO: 1931; WAN024CTS; Start 101; Stop 125
gcaatcgcatggtcttccttaataa

SEQ ID NO: 309774 - DNA, 25 bp, Artificial
  probe
  misc_feature (1)..(25): SEQ ID NO: 1931; WAN024CTS; Start 15; Stop 39
gaaccagattattagcagttggaac

SEQ ID NO: 309775 - DNA, 25 bp, Artificial
  probe
  misc_feature (1)..(25): SEQ ID NO: 1931; WAN024CTS; Start 5; Stop 29
aattggaagcgaaccagattattag

SEQ ID NO: 309776 - DNA, 25 bp, Artificial
  probe
  misc_feature (1)..(25): SEQ ID NO: 1931; WAN024CTS; Start 367; Stop 391
ataagcacgaactggaatcttacct

SEQ ID NO: 309777 - DNA, 25 bp, Artificial
  probe
  misc_feature (1)..(25): SEQ ID NO: 1931; WAN024CTS; Start 368; Stop 392
taagcacgaactggaatcttacctt

SEQ ID NO: 309778 - DNA, 25 bp, Artificial
  probe
  misc_feature (1)..(25): SEQ ID NO: 1931; WAN024CTS; Start 16; Stop 40
aaccagattattagcagttggaacc

SEQ ID NO: 309779 - DNA, 25 bp, Artificial
  probe
  misc_feature (1)..(25): SEQ ID NO: 1931; WAN024CTS; Start 14; Stop 38
cgaaccagattattagcagttggaa

SEQ ID NO: 309780 - DNA, 25 bp, Artificial
  probe
  misc_feature (1)..(25): SEQ ID NO: 1931; WAN024CTS; Start 9; Stop 33
ggaagcgaaccagattattagcagt

SEQ ID NO: 309781 - DNA, 25 bp, Artificial
  probe
  misc_feature (1)..(25): SEQ ID NO: 1931; WAN024CTS; Start 50; Stop 74
tggctgtcaacaatttcatagtaga

SEQ ID NO: 309782 - DNA, 25 bp, Artificial
  probe
  misc_feature (1)..(25): SEQ ID NO: 1931; WAN024CTS; Start 49; Stop 73
ctggctgtcaacaatttcatagtag

SEQ ID NO: 309783 - DNA, 25 bp, Artificial
  probe
  misc_feature (1)..(25): SEQ ID NO: 1931; WAN024CTS; Start 6; Stop 30
attggaagcgaaccagattattagc

SEQ ID NO: 309784 - DNA, 25 bp, Artificial
  probe
  misc_feature (1)..(25): SEQ ID NO: 1931; WAN024CTS; Start 51; Stop 75
ggctgtcaacaatttcatagtagat

SEQ ID NO: 309785 - DNA, 25 bp, Artificial
  probe
  misc_feature (1)..(25): SEQ ID NO: 1931; WAN024CTS; Start 18; Stop 42
ccagattattagcagttggaaccac

SEQ ID NO: 309786 - DNA, 25 bp, Artificial
  probe
  misc_feature (1)..(25): SEQ ID NO: 1931; WAN024CTS; Start 48; Stop 72
cctggctgtcaacaatttcatagta

SEQ ID NO: 309787 - DNA, 25 bp, Artificial
  probe
  misc_feature (1)..(25): SEQ ID NO: 1931; WAN024CTS; Start 369; Stop 393
aagcacgaactggaatcttaccttc

SEQ ID NO: 309788 - DNA, 25 bp, Artificial
  probe
  misc_feature (1)..(25): SEQ ID NO: 1931; WAN024CTS; Start 222; Stop 246
gataggcaactttccattcaagata

SEQ ID NO: 309789 - DNA, 25 bp, Artificial
  probe
  misc_feature (1)..(25): SEQ ID NO: 1931; WAN024CTS; Start 221; Stop 245
tgataggcaactttccattcaagat

SEQ ID NO: 309790 - DNA, 25 bp, Artificial
  probe
  misc_feature (1)..(25): SEQ ID NO: 1931; WAN024CTS; Start 17; Stop 41
accagattattagcagttggaacca

SEQ ID NO: 309791 - DNA, 25 bp, Artificial
  probe
  misc_feature (1)..(25): SEQ ID NO: 1931; WAN024CTS; Start 224; Stop 248
taggcaactttccattcaagataaa

SEQ ID NO: 309792 - DNA, 25 bp, Artificial
  probe
  misc_feature (1)..(25): SEQ ID NO: 1932; WAN024D8X; Start 564; Stop 588
cttagattatccgagtcaatgtgct

SEQ ID NO: 309793 - DNA, 25 bp, Artificial
  probe
  misc_feature (1)..(25): SEQ ID NO: 1932; WAN024D8X; Start 565; Stop 589
ttagattatccgagtcaatgtgcta

SEQ ID NO: 309794 - DNA, 25 bp, Artificial
  probe
  misc_feature (1)..(25): SEQ ID NO: 1932; WAN024D8X; Start 737; Stop 761
tagagcatatcaatggaatggtagc

SEQ ID NO: 309795 - DNA, 25 bp, Artificial
  probe
  misc_feature (1)..(25): SEQ ID NO: 1932; WAN024D8X; Start 734; Stop 758
cagtagagcatatcaatggaatggt

SEQ ID NO: 309796 - DNA, 25 bp, Artificial
  probe
  misc_feature (1)..(25): SEQ ID NO: 1932; WAN024D8X; Start 697; Stop 721
aattggttgctggaagagtatgatt

SEQ ID NO: 309797 - DNA, 25 bp, Artificial
  probe
  misc_feature (1)..(25): SEQ ID NO: 1932; WAN024D8X; Start 566; Stop 590
tagattatccgagtcaatgtgctag

SEQ ID NO: 309798 - DNA, 25 bp, Artificial
  probe
  misc_feature (1)..(25): SEQ ID NO: 1932; WAN024D8X; Start 735; Stop 759
agtagagcatatcaatggaatggta

SEQ ID NO: 309799 - DNA, 25 bp, Artificial
  probe
  misc_feature (1)..(25): SEQ ID NO: 1932; WAN024D8X; Start 736; Stop 760
gtagagcatatcaatggaatggtag

SEQ ID NO: 309800 - DNA, 25 bp, Artificial
  probe
  misc_feature (1)..(25): SEQ ID NO: 1932; WAN024D8X; Start 539; Stop 563
aacctgatgctatggactattggag

SEQ ID NO: 309801 - DNA, 25 bp, Artificial
  probe
  misc_feature (1)..(25): SEQ ID NO: 1932; WAN024D8X; Start 563; Stop 587
gcttagattatccgagtcaatgtgc

SEQ ID NO: 309802 - DNA, 25 bp, Artificial
  probe
  misc_feature (1)..(25): SEQ ID NO: 1932; WAN024D8X; Start 869; Stop 893
ttaaggcaagtaagagtaacctcag

SEQ ID NO: 309803 - DNA, 25 bp, Artificial
  probe
  misc_feature (1)..(25): SEQ ID NO: 1932; WAN024D8X; Start 561; Stop 585
gagcttagattatccgagtcaatgt

SEQ ID NO: 309804 - DNA, 25 bp, Artificial
  probe
  misc_feature (1)..(25): SEQ ID NO: 1932; WAN024D8X; Start 744; Stop 768
tatcaatggaatggtagctggtatt

SEQ ID NO: 309805 - DNA, 25 bp, Artificial
  probe
  misc_feature (1)..(25): SEQ ID NO: 1932; WAN024D8X; Start 562; Stop 586
agcttagattatccgagtcaatgtg

SEQ ID NO: 309806 - DNA, 25 bp, Artificial
  probe
  misc_feature (1)..(25): SEQ ID NO: 1932; WAN024D8X; Start 538; Stop 562
caacctgatgctatggactattgga

SEQ ID NO: 309807 - DNA, 25 bp, Artificial
  probe
  misc_feature (1)..(25): SEQ ID NO: 1932; WAN024D8X; Start 743; Stop 767
atatcaatggaatggtagctggtat

SEQ ID NO: 309808 - DNA, 25 bp, Artificial
  probe
  misc_feature (1)..(25): SEQ ID NO: 1932; WAN024D8X; Start 742; Stop 766
catatcaatggaatggtagctggta

SEQ ID NO: 309809 - DNA, 25 bp, Artificial
  probe
  misc_feature (1)..(25): SEQ ID NO: 1932; WAN024D8X; Start 733; Stop 757
ccagtagagcatatcaatggaatgg

SEQ ID NO: 309810 - DNA, 25 bp, Artificial
  probe
  misc_feature (1)..(25): SEQ ID NO: 1932; WAN024D8X; Start 205; Stop 229
gctacaggtttagtttattcgcaag

SEQ ID NO: 309811 - DNA, 25 bp, Artificial
  probe
  misc_feature (1)..(25): SEQ ID NO: 1932; WAN024D8X; Start 698; Stop 722
attggttgctggaagagtatgattt

SEQ ID NO: 309812 - DNA, 25 bp, Artificial
  probe
  misc_feature (1)..(25): SEQ ID NO: 1932; WAN024D8X; Start 206; Stop 230
ctacaggtttagtttattcgcaaga

SEQ ID NO: 309813 - DNA, 25 bp, Artificial
  probe
  misc_feature (1)..(25): SEQ ID NO: 1932; WAN024D8X; Start 870; Stop 894
taaggcaagtaagagtaacctcagc

SEQ ID NO: 309814 - DNA, 25 bp, Artificial
  probe
  misc_feature (1)..(25): SEQ ID NO: 1932; WAN024D8X; Start 208; Stop 232
acaggtttagtttattcgcaagaac

SEQ ID NO: 309815 - DNA, 25 bp, Artificial
  probe
  misc_feature (1)..(25): SEQ ID NO: 1932; WAN024D8X; Start 732; Stop 756
gccagtagagcatatcaatggaatg

SEQ ID NO: 309816 - DNA, 25 bp, Artificial
  probe
  misc_feature (1)..(25): SEQ ID NO: 1932; WAN024D8X; Start 836; Stop 860
tacagtttaagggtaacaatccagc

SEQ ID NO: 309817 - DNA, 25 bp, Artificial
  probe
  misc_feature (1)..(25): SEQ ID NO: 1932; WAN024D8X; Start 834; Stop 858
tctacagtttaagggtaacaatcca

SEQ ID NO: 309818 - DNA, 25 bp, Artificial
  probe
  misc_feature (1)..(25): SEQ ID NO: 1932; WAN024D8X; Start 835; Stop 859
ctacagtttaagggtaacaatccag

SEQ ID NO: 309819 - DNA, 25 bp, Artificial
  probe
  misc_feature (1)..(25): SEQ ID NO: 1932; WAN024D8X; Start 207; Stop 231
tacaggtttagtttattcgcaagaa

SEQ ID NO: 309820 - DNA, 25 bp, Artificial
  probe
  misc_feature (1)..(25): SEQ ID NO: 1932; WAN024D8X; Start 552; Stop 576
ggactattggagcttagattatccg

SEQ ID NO: 309821 - DNA, 25 bp, Artificial
  probe
  misc_feature (1)..(25): SEQ ID NO: 1932; WAN024D8X; Start 556; Stop 580
tattggagcttagattatccgagtc

SEQ ID NO: 309822 - DNA, 25 bp, Artificial
  probe
  misc_feature (1)..(25): SEQ ID NO: 1932; WAN024D8X; Start 555; Stop 579
ctattggagcttagattatccgagt

SEQ ID NO: 309823 - DNA, 25 bp, Artificial
  probe
  misc_feature (1)..(25): SEQ ID NO: 1932; WAN024D8X; Start 554; Stop 578
actattggagcttagattatccgag

SEQ ID NO: 309824 - DNA, 25 bp, Artificial
  probe
  misc_feature (1)..(25): SEQ ID NO: 1932; WAN024D8X; Start 553; Stop 577
gactattggagcttagattatccga

SEQ ID NO: 309825 - DNA, 25 bp, Artificial
  probe
  misc_feature (1)..(25): SEQ ID NO: 1933; WAN024BHK; Start 120; Stop 144
gttgaccaataacttaccaggtagt

SEQ ID NO: 309826 - DNA, 25 bp, Artificial
  probe
  misc_feature (1)..(25): SEQ ID NO: 1933; WAN024BHK; Start 119; Stop 143
ggttgaccaataacttaccaggtag

SEQ ID NO: 309827 - DNA, 25 bp, Artificial
  probe
  misc_feature (1)..(25): SEQ ID NO: 1933; WAN024BHK; Start 16; Stop 40
tttgtcgtagtatttggcagtgatg

SEQ ID NO: 309828 - DNA, 25 bp, Artificial
  probe
  misc_feature (1)..(25): SEQ ID NO: 1933; WAN024BHK; Start 121; Stop 145
ttgaccaataacttaccaggtagtt

SEQ ID NO: 309829 - DNA, 25 bp, Artificial
  probe
  misc_feature (1)..(25): SEQ ID NO: 1933; WAN024BHK; Start 77; Stop 101
ccttatctaaatcatctaacccaga

SEQ ID NO: 309830 - DNA, 25 bp, Artificial
  probe
  misc_feature (1)..(25): SEQ ID NO: 1933; WAN024BHK; Start 87; Stop 111
atcatctaacccagatttccaaacc

SEQ ID NO: 309831 - DNA, 25 bp, Artificial
  probe
  misc_feature (1)..(25): SEQ ID NO: 1933; WAN024BHK; Start 86; Stop 110
aatcatctaacccagatttccaaac

SEQ ID NO: 309832 - DNA, 25 bp, Artificial
  probe
  misc_feature (1)..(25): SEQ ID NO: 1933; WAN024BHK; Start 17; Stop 41
ttgtcgtagtatttggcagtgatgg

SEQ ID NO: 309833 - DNA, 25 bp, Artificial
  probe
  misc_feature (1)..(25): SEQ ID NO: 1933; WAN024BHK; Start 11; Stop 35
atcattttgtcgtagtatttggcag

SEQ ID NO: 309834 - DNA, 25 bp, Artificial
  probe
  misc_feature (1)..(25): SEQ ID NO: 1933; WAN024BHK; Start 10; Stop 34
catcattttgtcgtagtatttggca

SEQ ID NO: 309835 - DNA, 25 bp, Artificial
  probe
  misc_feature (1)..(25): SEQ ID NO: 1933; WAN024BHK; Start 9; Stop 33
tcatcattttgtcgtagtatttggc

SEQ ID NO: 309836 - DNA, 25 bp, Artificial
  probe
  misc_feature (1)..(25): SEQ ID NO: 1933; WAN024BHK; Start 89; Stop 113
catctaacccagatttccaaacctg

SEQ ID NO: 309837 - DNA, 25 bp, Artificial
  probe
  misc_feature (1)..(25): SEQ ID NO: 1933; WAN024BHK; Start 88; Stop 112
tcatctaacccagatttccaaacct

SEQ ID NO: 309838 - DNA, 25 bp, Artificial
  probe
  misc_feature (1)..(25): SEQ ID NO: 1933; WAN024BHK; Start 15; Stop 39
ttttgtcgtagtatttggcagtgat

SEQ ID NO: 309839 - DNA, 25 bp, Artificial
  probe
  misc_feature (1)..(25): SEQ ID NO: 1933; WAN024BHK; Start 14; Stop 38
attttgtcgtagtatttggcagtga

SEQ ID NO: 309840 - DNA, 25 bp, Artificial
  probe
  misc_feature (1)..(25): SEQ ID NO: 1933; WAN024BHK; Start 13; Stop 37
cattttgtcgtagtatttggcagtg

SEQ ID NO: 309841 - DNA, 25 bp, Artificial
  probe
  misc_feature (1)..(25): SEQ ID NO: 1933; WAN024BHK; Start 12; Stop 36
tcattttgtcgtagtatttggcagt

SEQ ID NO: 309842 - DNA, 25 bp, Artificial
  probe
  misc_feature (1)..(25): SEQ ID NO: 1933; WAN024BHK; Start 122; Stop 146
tgaccaataacttaccaggtagttt

SEQ ID NO: 309843 - DNA, 25 bp, Artificial
  probe
  misc_feature (1)..(25): SEQ ID NO: 1933; WAN024BHK; Start 8; Stop 32
atcatcattttgtcgtagtatttgg

SEQ ID NO: 309844 - DNA, 25 bp, Artificial
  probe
  misc_feature (1)..(25): SEQ ID NO: 1933; WAN024BHK; Start 124; Stop 148
accaataacttaccaggtagtttag

SEQ ID NO: 309845 - DNA, 25 bp, Artificial
  probe
  misc_feature (1)..(25): SEQ ID NO: 1933; WAN024BHK; Start 123; Stop 147
gaccaataacttaccaggtagttta

SEQ ID NO: 309846 - DNA, 25 bp, Artificial
  probe
  misc_feature (1)..(25): SEQ ID NO: 1933; WAN024BHK; Start 125; Stop 149
ccaataacttaccaggtagtttaga

SEQ ID NO: 309847 - DNA, 25 bp, Artificial
  probe
  misc_feature (1)..(25): SEQ ID NO: 1933; WAN024BHK; Start 118; Stop 142
tggttgaccaataacttaccaggta

SEQ ID NO: 309848 - DNA, 25 bp, Artificial
  probe
  misc_feature (1)..(25): SEQ ID NO: 1933; WAN024BHK; Start 85; Stop 109
aaatcatctaacccagatttccaaa

SEQ ID NO: 309849 - DNA, 25 bp, Artificial
  probe
  misc_feature (1)..(25): SEQ ID NO: 1933; WAN024BHK; Start 115; Stop 139
acttggttgaccaataacttaccag

SEQ ID NO: 309850 - DNA, 25 bp, Artificial
  probe
  misc_feature (1)..(25): SEQ ID NO: 1933; WAN024BHK; Start 83; Stop 107
ctaaatcatctaacccagatttcca

SEQ ID NO: 309851 - DNA, 25 bp, Artificial
  probe
  misc_feature (1)..(25): SEQ ID NO: 1933; WAN024BHK; Start 126; Stop 150
caataacttaccaggtagtttagaa

SEQ ID NO: 309852 - DNA, 25 bp, Artificial
  probe
  misc_feature (1)..(25): SEQ ID NO: 1933; WAN024BHK; Start 82; Stop 106
tctaaatcatctaacccagatttcc

SEQ ID NO: 309853 - DNA, 25 bp, Artificial
  probe
  misc_feature (1)..(25): SEQ ID NO: 1933; WAN024BHK; Start 116; Stop 140
cttggttgaccaataacttaccagg

SEQ ID NO: 309854 - DNA, 25 bp, Artificial
  probe
  misc_feature (1)..(25): SEQ ID NO: 1933; WAN024BHK; Start 78; Stop 102
cttatctaaatcatctaacccagat

SEQ ID NO: 309855 - DNA, 25 bp, Artificial
  probe
  misc_feature (1)..(25): SEQ ID NO: 1933; WAN024BHK; Start 84; Stop 108
taaatcatctaacccagatttccaa

SEQ ID NO: 309856 - DNA, 25 bp, Artificial
  probe
  misc_feature (1)..(25): SEQ ID NO: 1933; WAN024BHK; Start 117; Stop 141
ttggttgaccaataacttaccaggt

SEQ ID NO: 309857 - DNA, 25 bp, Artificial
  probe
  misc_feature (1)..(25): SEQ ID NO: 1933; WAN024BHK; Start 79; Stop 103
ttatctaaatcatctaacccagatt

SEQ ID NO: 309858 - DNA, 25 bp, Artificial
  probe
  misc_feature (1)..(25): SEQ ID NO: 1934; WAN024FHS; Start 389; Stop 413
aatatgctggtgttatcctcaatac

SEQ ID NO: 309859 - DNA, 25 bp, Artificial
  probe
  misc_feature (1)..(25): SEQ ID NO: 1934; WAN024FHS; Start 388; Stop 412
gaatatgctggtgttatcctcaata

SEQ ID NO: 309860 - DNA, 25 bp, Artificial
  probe
  misc_feature (1)..(25): SEQ ID NO: 1934; WAN024FHS; Start 387; Stop 411
ggaatatgctggtgttatcctcaat

SEQ ID NO: 309861 - DNA, 25 bp, Artificial
  probe
  misc_feature (1)..(25): SEQ ID NO: 1934; WAN024FHS; Start 174; Stop 198
taatggttatcactggtgtcaggaa

SEQ ID NO: 309862 - DNA, 25 bp, Artificial
  probe
  misc_feature (1)..(25): SEQ ID NO: 1934; WAN024FHS; Start 173; Stop 197
ttaatggttatcactggtgtcagga

SEQ ID NO: 309863 - DNA, 25 bp, Artificial
  probe
  misc_feature (1)..(25): SEQ ID NO: 1934; WAN024FHS; Start 390; Stop 414
atatgctggtgttatcctcaatacc

SEQ ID NO: 309864 - DNA, 25 bp, Artificial
  probe
  misc_feature (1)..(25): SEQ ID NO: 1934; WAN024FHS; Start 565; Stop 589
gataataccctctctgtcaatgtgg

SEQ ID NO: 309865 - DNA, 25 bp, Artificial
  probe
  misc_feature (1)..(25): SEQ ID NO: 1934; WAN024FHS; Start 153; Stop 177
ggatattggtttgcccttgtttaat

SEQ ID NO: 309866 - DNA, 25 bp, Artificial
  probe
  misc_feature (1)..(25): SEQ ID NO: 1934; WAN024FHS; Start 162; Stop 186
tttgcccttgtttaatggttatcac

SEQ ID NO: 309867 - DNA, 25 bp, Artificial
  probe
  misc_feature (1)..(25): SEQ ID NO: 1934; WAN024FHS; Start 161; Stop 185
gtttgcccttgtttaatggttatca

SEQ ID NO: 309868 - DNA, 25 bp, Artificial
  probe
  misc_feature (1)..(25): SEQ ID NO: 1934; WAN024FHS; Start 155; Stop 179
atattggtttgcccttgtttaatgg

SEQ ID NO: 309869 - DNA, 25 bp, Artificial
  probe
  misc_feature (1)..(25): SEQ ID NO: 1934; WAN024FHS; Start 422; Stop 446
tggatttacattatcaagggcaagt

SEQ ID NO: 309870 - DNA, 25 bp, Artificial
  probe
  misc_feature (1)..(25): SEQ ID NO: 1934; WAN024FHS; Start 386; Stop 410
tggaatatgctggtgttatcctcaa

SEQ ID NO: 309871 - DNA, 25 bp, Artificial
  probe
  misc_feature (1)..(25): SEQ ID NO: 1934; WAN024FHS; Start 160; Stop 184
ggtttgcccttgtttaatggttatc

SEQ ID NO: 309872 - DNA, 25 bp, Artificial
  probe
  misc_feature (1)..(25): SEQ ID NO: 1934; WAN024FHS; Start 154; Stop 178
gatattggtttgcccttgtttaatg

SEQ ID NO: 309873 - DNA, 25 bp, Artificial
  probe
  misc_feature (1)..(25): SEQ ID NO: 1934; WAN024FHS; Start 151; Stop 175
atggatattggtttgcccttgttta

SEQ ID NO: 309874 - DNA, 25 bp, Artificial
  probe
  misc_feature (1)..(25): SEQ ID NO: 1934; WAN024FHS; Start 167; Stop 191
ccttgtttaatggttatcactggtg

SEQ ID NO: 309875 - DNA, 25 bp, Artificial
  probe
  misc_feature (1)..(25): SEQ ID NO: 1934; WAN024FHS; Start 170; Stop 194
tgtttaatggttatcactggtgtca

SEQ ID NO: 309876 - DNA, 25 bp, Artificial
  probe
  misc_feature (1)..(25): SEQ ID NO: 1934; WAN024FHS; Start 166; Stop 190
cccttgtttaatggttatcactggt

SEQ ID NO: 309877 - DNA, 25 bp, Artificial
  probe
  misc_feature (1)..(25): SEQ ID NO: 1934; WAN024FHS; Start 163; Stop 187
ttgcccttgtttaatggttatcact

SEQ ID NO: 309878 - DNA, 25 bp, Artificial
  probe
  misc_feature (1)..(25): SEQ ID NO: 1934; WAN024FHS; Start 421; Stop 445
atggatttacattatcaagggcaag

SEQ ID NO: 309879 - DNA, 25 bp, Artificial
  probe
  misc_feature (1)..(25): SEQ ID NO: 1934; WAN024FHS; Start 169; Stop 193
ttgtttaatggttatcactggtgtc

SEQ ID NO: 309880 - DNA, 25 bp, Artificial
  probe
  misc_feature (1)..(25): SEQ ID NO: 1934; WAN024FHS; Start 168; Stop 192
cttgtttaatggttatcactggtgt

SEQ ID NO: 309881 - DNA, 25 bp, Artificial
  probe
  misc_feature (1)..(25): SEQ ID NO: 1934; WAN024FHS; Start 398; Stop 422
gtgttatcctcaataccaaatccat

SEQ ID NO: 309882 - DNA, 25 bp, Artificial
  probe
  misc_feature (1)..(25): SEQ ID NO: 1934; WAN024FHS; Start 152; Stop 176
tggatattggtttgcccttgtttaa

SEQ ID NO: 309883 - DNA, 25 bp, Artificial
  probe
  misc_feature (1)..(25): SEQ ID NO: 1934; WAN024FHS; Start 242; Stop 266
gagaccaggctatggatattgtcat

SEQ ID NO: 309884 - DNA, 25 bp, Artificial
  probe
  misc_feature (1)..(25): SEQ ID NO: 1934; WAN024FHS; Start 159; Stop 183
tggtttgcccttgtttaatggttat

SEQ ID NO: 309885 - DNA, 25 bp, Artificial
  probe
  misc_feature (1)..(25): SEQ ID NO: 1934; WAN024FHS; Start 156; Stop 180
tattggtttgcccttgtttaatggt

SEQ ID NO: 309886 - DNA, 25 bp, Artificial
  probe
  misc_feature (1)..(25): SEQ ID NO: 1934; WAN024FHS; Start 558; Stop 582
cattgatgataataccctctctgtc

SEQ ID NO: 309887 - DNA, 25 bp, Artificial
  probe
  misc_feature (1)..(25): SEQ ID NO: 1934; WAN024FHS; Start 564; Stop 588
tgataataccctctctgtcaatgtg

SEQ ID NO: 309888 - DNA, 25 bp, Artificial
  probe
  misc_feature (1)..(25): SEQ ID NO: 1934; WAN024FHS; Start 111; Stop 135
tttgagtctatttgttcagtcggaa

SEQ ID NO: 309889 - DNA, 25 bp, Artificial
  probe
  misc_feature (1)..(25): SEQ ID NO: 1934; WAN024FHS; Start 385; Stop 409
ctggaatatgctggtgttatcctca

SEQ ID NO: 309890 - DNA, 25 bp, Artificial
  probe
  misc_feature (1)..(25): SEQ ID NO: 1934; WAN024FHS; Start 164; Stop 188
tgcccttgtttaatggttatcactg

SEQ ID NO: 309891 - DNA, 25 bp, Artificial
  probe
  misc_feature (1)..(25): SEQ ID NO: 1935; WAN024FBJ; Start 96; Stop 120
agagcttgaacttgcgatattcttc

SEQ ID NO: 309892 - DNA, 25 bp, Artificial
  probe
  misc_feature (1)..(25): SEQ ID NO: 1935; WAN024FBJ; Start 15; Stop 39
catcttcgtaaatcaactctgtcgg

SEQ ID NO: 309893 - DNA, 25 bp, Artificial
  probe
  misc_feature (1)..(25): SEQ ID NO: 1935; WAN024FBJ; Start 188; Stop 212
agtttacgactcttaatcagcatga

SEQ ID NO: 309894 - DNA, 25 bp, Artificial
  probe
  misc_feature (1)..(25): SEQ ID NO: 1935; WAN024FBJ; Start 14; Stop 38
gcatcttcgtaaatcaactctgtcg

SEQ ID NO: 309895 - DNA, 25 bp, Artificial
  probe
  misc_feature (1)..(25): SEQ ID NO: 1935; WAN024FBJ; Start 13; Stop 37
cgcatcttcgtaaatcaactctgtc

SEQ ID NO: 309896 - DNA, 25 bp, Artificial
  probe
  misc_feature (1)..(25): SEQ ID NO: 1935; WAN024FBJ; Start 189; Stop 213
gtttacgactcttaatcagcatgag

SEQ ID NO: 309897 - DNA, 25 bp, Artificial
  probe
  misc_feature (1)..(25): SEQ ID NO: 1935; WAN024FBJ; Start 100; Stop 124
cttgaacttgcgatattcttcgatt

SEQ ID NO: 309898 - DNA, 25 bp, Artificial
  probe
  misc_feature (1)..(25): SEQ ID NO: 1935; WAN024FBJ; Start 190; Stop 214
tttacgactcttaatcagcatgagc

SEQ ID NO: 309899 - DNA, 25 bp, Artificial
  probe
  misc_feature (1)..(25): SEQ ID NO: 1935; WAN024FBJ; Start 95; Stop 119
aagagcttgaacttgcgatattctt

SEQ ID NO: 309900 - DNA, 25 bp, Artificial
  probe
  misc_feature (1)..(25): SEQ ID NO: 1935; WAN024FBJ; Start 112; Stop 136
atattcttcgatttgagagaggagg

SEQ ID NO: 309901 - DNA, 25 bp, Artificial
  probe
  misc_feature (1)..(25): SEQ ID NO: 1935; WAN024FBJ; Start 113; Stop 137
tattcttcgatttgagagaggaggt

SEQ ID NO: 309902 - DNA, 25 bp, Artificial
  probe
  misc_feature (1)..(25): SEQ ID NO: 1935; WAN024FBJ; Start 10; Stop 34
ctccgcatcttcgtaaatcaactct

SEQ ID NO: 309903 - DNA, 25 bp, Artificial
  probe
  misc_feature (1)..(25): SEQ ID NO: 1935; WAN024FBJ; Start 111; Stop 135
gatattcttcgatttgagagaggag

SEQ ID NO: 309904 - DNA, 25 bp, Artificial
  probe
  misc_feature (1)..(25): SEQ ID NO: 1935; WAN024FBJ; Start 191; Stop 215
ttacgactcttaatcagcatgagct

SEQ ID NO: 309905 - DNA, 25 bp, Artificial
  probe
  misc_feature (1)..(25): SEQ ID NO: 1935; WAN024FBJ; Start 16; Stop 40
atcttcgtaaatcaactctgtcggc

SEQ ID NO: 309906 - DNA, 25 bp, Artificial
  probe
  misc_feature (1)..(25): SEQ ID NO: 1935; WAN024FBJ; Start 11; Stop 35
tccgcatcttcgtaaatcaactctg

SEQ ID NO: 309907 - DNA, 25 bp, Artificial
  probe
  misc_feature (1)..(25): SEQ ID NO: 1935; WAN024FBJ; Start 214; Stop 238
ctgactagccatgaccatgtactca

SEQ ID NO: 309908 - DNA, 25 bp, Artificial
  probe
  misc_feature (1)..(25): SEQ ID NO: 1935; WAN024FBJ; Start 114; Stop 138
attcttcgatttgagagaggaggtc

SEQ ID NO: 309909 - DNA, 25 bp, Artificial
  probe
  misc_feature (1)..(25): SEQ ID NO: 1935; WAN024FBJ; Start 99; Stop 123
gcttgaacttgcgatattcttcgat

SEQ ID NO: 309910 - DNA, 25 bp, Artificial
  probe
  misc_feature (1)..(25): SEQ ID NO: 1935; WAN024FBJ; Start 12; Stop 36
ccgcatcttcgtaaatcaactctgt

SEQ ID NO: 309911 - DNA, 25 bp, Artificial
  probe
  misc_feature (1)..(25): SEQ ID NO: 1935; WAN024FBJ; Start 215; Stop 239
tgactagccatgaccatgtactcac

SEQ ID NO: 309912 - DNA, 25 bp, Artificial
  probe
  misc_feature (1)..(25): SEQ ID NO: 1935; WAN024FBJ; Start 97; Stop 121
gagcttgaacttgcgatattcttcg

SEQ ID NO: 309913 - DNA, 25 bp, Artificial
  probe
  misc_feature (1)..(25): SEQ ID NO: 1935; WAN024FBJ; Start 157; Stop 181
caagtctgtcacttctgctaccttc

SEQ ID NO: 309914 - DNA, 25 bp, Artificial
  probe
  misc_feature (1)..(25): SEQ ID NO: 1935; WAN024FBJ; Start 110; Stop 134
cgatattcttcgatttgagagagga

SEQ ID NO: 309915 - DNA, 25 bp, Artificial
  probe
  misc_feature (1)..(25): SEQ ID NO: 1935; WAN024FBJ; Start 106; Stop 130
cttgcgatattcttcgatttgagag

SEQ ID NO: 309916 - DNA, 25 bp, Artificial
  probe
  misc_feature (1)..(25): SEQ ID NO: 1935; WAN024FBJ; Start 104; Stop 128
aacttgcgatattcttcgatttgag

SEQ ID NO: 309917 - DNA, 25 bp, Artificial
  probe
  misc_feature (1)..(25): SEQ ID NO: 1935; WAN024FBJ; Start 103; Stop 127
gaacttgcgatattcttcgatttga

SEQ ID NO: 309918 - DNA, 25 bp, Artificial
  probe
  misc_feature (1)..(25): SEQ ID NO: 1935; WAN024FBJ; Start 98; Stop 122
agcttgaacttgcgatattcttcga

SEQ ID NO: 309919 - DNA, 25 bp, Artificial
  probe
  misc_feature (1)..(25): SEQ ID NO: 1935; WAN024FBJ; Start 107; Stop 131
ttgcgatattcttcgatttgagaga

SEQ ID NO: 309920 - DNA, 25 bp, Artificial
  probe
  misc_feature (1)..(25): SEQ ID NO: 1935; WAN024FBJ; Start 102; Stop 126
tgaacttgcgatattcttcgatttg

SEQ ID NO: 309921 - DNA, 25 bp, Artificial
  probe
  misc_feature (1)..(25): SEQ ID NO: 1935; WAN024FBJ; Start 101; Stop 125
ttgaacttgcgatattcttcgattt

SEQ ID NO: 309922 - DNA, 25 bp, Artificial
  probe
  misc_feature (1)..(25): SEQ ID NO: 1935; WAN024FBJ; Start 94; Stop 118
caagagcttgaacttgcgatattct

SEQ ID NO: 309923 - DNA, 25 bp, Artificial
  probe
  misc_feature (1)..(25): SEQ ID NO: 1935; WAN024FBJ; Start 105; Stop 129
acttgcgatattcttcgatttgaga

SEQ ID NO: 309924 - DNA, 25 bp, Artificial
  probe
  misc_feature (1)..(25): SEQ ID NO: 1936; WAN024AZR; Start 28; Stop 52
aatcacaacaggctcattcatagat

SEQ ID NO: 309925 - DNA, 25 bp, Artificial
  probe
  misc_feature (1)..(25): SEQ ID NO: 1936; WAN024AZR; Start 34; Stop 58
aacaggctcattcatagatggttac

SEQ ID NO: 309926 - DNA, 25 bp, Artificial
  probe
  misc_feature (1)..(25): SEQ ID NO: 1936; WAN024AZR; Start 33; Stop 57
caacaggctcattcatagatggtta

SEQ ID NO: 309927 - DNA, 25 bp, Artificial
  probe
  misc_feature (1)..(25): SEQ ID NO: 1936; WAN024AZR; Start 29; Stop 53
atcacaacaggctcattcatagatg

SEQ ID NO: 309928 - DNA, 25 bp, Artificial
  probe
  misc_feature (1)..(25): SEQ ID NO: 1936; WAN024AZR; Start 42; Stop 66
cattcatagatggttacctaagcct

SEQ ID NO: 309929 - DNA, 25 bp, Artificial
  probe
  misc_feature (1)..(25): SEQ ID NO: 1936; WAN024AZR; Start 41; Stop 65
tcattcatagatggttacctaagcc

SEQ ID NO: 309930 - DNA, 25 bp, Artificial
  probe
  misc_feature (1)..(25): SEQ ID NO: 1936; WAN024AZR; Start 38; Stop 62
ggctcattcatagatggttacctaa

SEQ ID NO: 309931 - DNA, 25 bp, Artificial
  probe
  misc_feature (1)..(25): SEQ ID NO: 1936; WAN024AZR; Start 45; Stop 69
tcatagatggttacctaagcctaag

SEQ ID NO: 309932 - DNA, 25 bp, Artificial
  probe
  misc_feature (1)..(25): SEQ ID NO: 1936; WAN024AZR; Start 44; Stop 68
ttcatagatggttacctaagcctaa

SEQ ID NO: 309933 - DNA, 25 bp, Artificial
  probe
  misc_feature (1)..(25): SEQ ID NO: 1936; WAN024AZR; Start 40; Stop 64
ctcattcatagatggttacctaagc

SEQ ID NO: 309934 - DNA, 25 bp, Artificial
  probe
  misc_feature (1)..(25): SEQ ID NO: 1936; WAN024AZR; Start 39; Stop 63
gctcattcatagatggttacctaag

SEQ ID NO: 309935 - DNA, 25 bp, Artificial
  probe
  misc_feature (1)..(25): SEQ ID NO: 1936; WAN024AZR; Start 43; Stop 67
attcatagatggttacctaagccta

SEQ ID NO: 309936 - DNA, 25 bp, Artificial
  probe
  misc_feature (1)..(25): SEQ ID NO: 1936; WAN024AZR; Start 46; Stop 70
catagatggttacctaagcctaagg

SEQ ID NO: 309937 - DNA, 25 bp, Artificial
  probe
  misc_feature (1)..(25): SEQ ID NO: 1936; WAN024AZR; Start 37; Stop 61
aggctcattcatagatggttaccta

SEQ ID NO: 309938 - DNA, 25 bp, Artificial
  probe
  misc_feature (1)..(25): SEQ ID NO: 1936; WAN024AZR; Start 32; Stop 56
acaacaggctcattcatagatggtt

SEQ ID NO: 309939 - DNA, 25 bp, Artificial
  probe
  misc_feature (1)..(25): SEQ ID NO: 1936; WAN024AZR; Start 35; Stop 59
acaggctcattcatagatggttacc

SEQ ID NO: 309940 - DNA, 25 bp, Artificial
  probe
  misc_feature (1)..(25): SEQ ID NO: 1936; WAN024AZR; Start 30; Stop 54
tcacaacaggctcattcatagatgg

SEQ ID NO: 309941 - DNA, 25 bp, Artificial
  probe
  misc_feature (1)..(25): SEQ ID NO: 1936; WAN024AZR; Start 27; Stop 51
aaatcacaacaggctcattcataga

SEQ ID NO: 309942 - DNA, 25 bp, Artificial
  probe
  misc_feature (1)..(25): SEQ ID NO: 1936; WAN024AZR; Start 31; Stop 55
cacaacaggctcattcatagatggt

SEQ ID NO: 309943 - DNA, 25 bp, Artificial
  probe
  misc_feature (1)..(25): SEQ ID NO: 1936; WAN024AZR; Start 36; Stop 60
caggctcattcatagatggttacct

SEQ ID NO: 309944 - DNA, 25 bp, Artificial
  probe
  misc_feature (1)..(25): SEQ ID NO: 1936; WAN024AZR; Start 56; Stop 80
tacctaagcctaagggaactaagaa

SEQ ID NO: 309945 - DNA, 25 bp, Artificial
  probe
  misc_feature (1)..(25): SEQ ID NO: 1936; WAN024AZR; Start 55; Stop 79
ttacctaagcctaagggaactaaga

SEQ ID NO: 309946 - DNA, 25 bp, Artificial
  probe
  misc_feature (1)..(25): SEQ ID NO: 1936; WAN024AZR; Start 54; Stop 78
gttacctaagcctaagggaactaag

SEQ ID NO: 309947 - DNA, 25 bp, Artificial
  probe
  misc_feature (1)..(25): SEQ ID NO: 1936; WAN024AZR; Start 57; Stop 81
acctaagcctaagggaactaagaaa

SEQ ID NO: 309948 - DNA, 25 bp, Artificial
  probe
  misc_feature (1)..(25): SEQ ID NO: 1936; WAN024AZR; Start 47; Stop 71
atagatggttacctaagcctaaggg

SEQ ID NO: 309949 - DNA, 25 bp, Artificial
  probe
  misc_feature (1)..(25): SEQ ID NO: 1936; WAN024AZR; Start 53; Stop 77
ggttacctaagcctaagggaactaa

SEQ ID NO: 309950 - DNA, 25 bp, Artificial
  probe
  misc_feature (1)..(25): SEQ ID NO: 1936; WAN024AZR; Start 48; Stop 72
tagatggttacctaagcctaaggga

SEQ ID NO: 309951 - DNA, 25 bp, Artificial
  probe
  misc_feature (1)..(25): SEQ ID NO: 1936; WAN024AZR; Start 52; Stop 76
tggttacctaagcctaagggaacta

SEQ ID NO: 309952 - DNA, 25 bp, Artificial
  probe
  misc_feature (1)..(25): SEQ ID NO: 1936; WAN024AZR; Start 50; Stop 74
gatggttacctaagcctaagggaac

SEQ ID NO: 309953 - DNA, 25 bp, Artificial
  probe
  misc_feature (1)..(25): SEQ ID NO: 1936; WAN024AZR; Start 26; Stop 50
aaaatcacaacaggctcattcatag

SEQ ID NO: 309954 - DNA, 25 bp, Artificial
  probe
  misc_feature (1)..(25): SEQ ID NO: 1936; WAN024AZR; Start 49; Stop 73
agatggttacctaagcctaagggaa

SEQ ID NO: 309955 - DNA, 25 bp, Artificial
  probe
  misc_feature (1)..(25): SEQ ID NO: 1936; WAN024AZR; Start 25; Stop 49
gaaaatcacaacaggctcattcata

SEQ ID NO: 309956 - DNA, 25 bp, Artificial
  probe
  misc_feature (1)..(25): SEQ ID NO: 1936; WAN024AZR; Start 64; Stop 88
cctaagggaactaagaaaacgacta

SEQ ID NO: 309957 - DNA, 25 bp, Artificial
  probe
  misc_feature (1)..(25): SEQ ID NO: 1937; WAN024C5C; Start 94; Stop 118
gtattgaacagaataatccaccgct

SEQ ID NO: 309958 - DNA, 25 bp, Artificial
  probe
  misc_feature (1)..(25): SEQ ID NO: 1937; WAN024C5C; Start 256; Stop 280
attcttcaagatggtgttacggtat

SEQ ID NO: 309959 - DNA, 25 bp, Artificial
  probe
  misc_feature (1)..(25): SEQ ID NO: 1937; WAN024C5C; Start 257; Stop 281
ttcttcaagatggtgttacggtatt

SEQ ID NO: 309960 - DNA, 25 bp, Artificial
  probe
  misc_feature (1)..(25): SEQ ID NO: 1937; WAN024C5C; Start 147; Stop 171
cattgtggtgttgttgatagaggtc

SEQ ID NO: 309961 - DNA, 25 bp, Artificial
  probe
  misc_feature (1)..(25): SEQ ID NO: 1937; WAN024C5C; Start 258; Stop 282
tcttcaagatggtgttacggtattc

SEQ ID NO: 309962 - DNA, 25 bp, Artificial
  probe
  misc_feature (1)..(25): SEQ ID NO: 1937; WAN024C5C; Start 259; Stop 283
cttcaagatggtgttacggtattcg

SEQ ID NO: 309963 - DNA, 25 bp, Artificial
  probe
  misc_feature (1)..(25): SEQ ID NO: 1937; WAN024C5C; Start 255; Stop 279
cattcttcaagatggtgttacggta

SEQ ID NO: 309964 - DNA, 25 bp, Artificial
  probe
  misc_feature (1)..(25): SEQ ID NO: 1937; WAN024C5C; Start 142; Stop 166
gatgacattgtggtgttgttgatag

SEQ ID NO: 309965 - DNA, 25 bp, Artificial
  probe
  misc_feature (1)..(25): SEQ ID NO: 1937; WAN024C5C; Start 83; Stop 107
cgttgaggaatgtattgaacagaat

SEQ ID NO: 309966 - DNA, 25 bp, Artificial
  probe
  misc_feature (1)..(25): SEQ ID NO: 1937; WAN024C5C; Start 143; Stop 167
atgacattgtggtgttgttgataga

SEQ ID NO: 309967 - DNA, 25 bp, Artificial
  probe
  misc_feature (1)..(25): SEQ ID NO: 1937; WAN024C5C; Start 141; Stop 165
agatgacattgtggtgttgttgata

SEQ ID NO: 309968 - DNA, 25 bp, Artificial
  probe
  misc_feature (1)..(25): SEQ ID NO: 1937; WAN024C5C; Start 92; Stop 116
atgtattgaacagaataatccaccg

SEQ ID NO: 309969 - DNA, 25 bp, Artificial
  probe
  misc_feature (1)..(25): SEQ ID NO: 1937; WAN024C5C; Start 144; Stop 168
tgacattgtggtgttgttgatagag

SEQ ID NO: 309970 - DNA, 25 bp, Artificial
  probe
  misc_feature (1)..(25): SEQ ID NO: 1937; WAN024C5C; Start 140; Stop 164
aagatgacattgtggtgttgttgat

SEQ ID NO: 309971 - DNA, 25 bp, Artificial
  probe
  misc_feature (1)..(25): SEQ ID NO: 1937; WAN024C5C; Start 93; Stop 117
tgtattgaacagaataatccaccgc

SEQ ID NO: 309972 - DNA, 25 bp, Artificial
  probe
  misc_feature (1)..(25): SEQ ID NO: 1937; WAN024C5C; Start 95; Stop 119
tattgaacagaataatccaccgctg

SEQ ID NO: 309973 - DNA, 25 bp, Artificial
  probe
  misc_feature (1)..(25): SEQ ID NO: 1937; WAN024C5C; Start 154; Stop 178
gtgttgttgatagaggtcacgaatt

SEQ ID NO: 309974 - DNA, 25 bp, Artificial
  probe
  misc_feature (1)..(25): SEQ ID NO: 1937; WAN024C5C; Start 148; Stop 172
attgtggtgttgttgatagaggtca

SEQ ID NO: 309975 - DNA, 25 bp, Artificial
  probe
  misc_feature (1)..(25): SEQ ID NO: 1937; WAN024C5C; Start 145; Stop 169
gacattgtggtgttgttgatagagg

SEQ ID NO: 309976 - DNA, 25 bp, Artificial
  probe
  misc_feature (1)..(25): SEQ ID NO: 1937; WAN024C5C; Start 77; Stop 101
aagctacgttgaggaatgtattgaa

SEQ ID NO: 309977 - DNA, 25 bp, Artificial
  probe
  misc_feature (1)..(25): SEQ ID NO: 1937; WAN024C5C; Start 426; Stop 450
tattccctgcttctttcacttcatt

SEQ ID NO: 309978 - DNA, 25 bp, Artificial
  probe
  misc_feature (1)..(25): SEQ ID NO: 1937; WAN024C5C; Start 425; Stop 449
atattccctgcttctttcacttcat

SEQ ID NO: 309979 - DNA, 25 bp, Artificial
  probe
  misc_feature (1)..(25): SEQ ID NO: 1937; WAN024C5C; Start 337; Stop 361
gagaatatccgcaagtcctttagaa

SEQ ID NO: 309980 - DNA, 25 bp, Artificial
  probe
  misc_feature (1)..(25): SEQ ID NO: 1937; WAN024C5C; Start 139; Stop 163
caagatgacattgtggtgttgttga

SEQ ID NO: 309981 - DNA, 25 bp, Artificial
  probe
  misc_feature (1)..(25): SEQ ID NO: 1937; WAN024C5C; Start 338; Stop 362
agaatatccgcaagtcctttagaac

SEQ ID NO: 309982 - DNA, 25 bp, Artificial
  probe
  misc_feature (1)..(25): SEQ ID NO: 1937; WAN024C5C; Start 252; Stop 276
cagcattcttcaagatggtgttacg

SEQ ID NO: 309983 - DNA, 25 bp, Artificial
  probe
  misc_feature (1)..(25): SEQ ID NO: 1937; WAN024C5C; Start 146; Stop 170
acattgtggtgttgttgatagaggt

SEQ ID NO: 309984 - DNA, 25 bp, Artificial
  probe
  misc_feature (1)..(25): SEQ ID NO: 1937; WAN024C5C; Start 336; Stop 360
tgagaatatccgcaagtcctttaga

SEQ ID NO: 309985 - DNA, 25 bp, Artificial
  probe
  misc_feature (1)..(25): SEQ ID NO: 1937; WAN024C5C; Start 251; Stop 275
gcagcattcttcaagatggtgttac

SEQ ID NO: 309986 - DNA, 25 bp, Artificial
  probe
  misc_feature (1)..(25): SEQ ID NO: 1937; WAN024C5C; Start 78; Stop 102
agctacgttgaggaatgtattgaac

SEQ ID NO: 309987 - DNA, 25 bp, Artificial
  probe
  misc_feature (1)..(25): SEQ ID NO: 1937; WAN024C5C; Start 335; Stop 359
ttgagaatatccgcaagtcctttag

SEQ ID NO: 309988 - DNA, 25 bp, Artificial
  probe
  misc_feature (1)..(25): SEQ ID NO: 1937; WAN024C5C; Start 76; Stop 100
caagctacgttgaggaatgtattga

SEQ ID NO: 309989 - DNA, 25 bp, Artificial
  probe
  misc_feature (1)..(25): SEQ ID NO: 1937; WAN024C5C; Start 432; Stop 456
ctgcttctttcacttcattgactaa

SEQ ID NO: 309990 - DNA, 25 bp, Artificial
  probe
  misc_feature (1)..(25): SEQ ID NO: 1938; WAN024DXS; Start 1070; Stop 1094
tgctcgtctcatctggtatagttaa

SEQ ID NO: 309991 - DNA, 25 bp, Artificial
  probe
  misc_feature (1)..(25): SEQ ID NO: 1938; WAN024DXS; Start 1069; Stop 1093
ctgctcgtctcatctggtatagtta

SEQ ID NO: 309992 - DNA, 25 bp, Artificial
  probe
  misc_feature (1)..(25): SEQ ID NO: 1938; WAN024DXS; Start 811; Stop 835
ttcttgtcacttgatgagattgaag

SEQ ID NO: 309993 - DNA, 25 bp, Artificial
  probe
  misc_feature (1)..(25): SEQ ID NO: 1938; WAN024DXS; Start 1175; Stop 1199
tcttgagtgacgctgataagttaga

SEQ ID NO: 309994 - DNA, 25 bp, Artificial
  probe
  misc_feature (1)..(25): SEQ ID NO: 1938; WAN024DXS; Start 813; Stop 837
cttgtcacttgatgagattgaagat

SEQ ID NO: 309995 - DNA, 25 bp, Artificial
  probe
  misc_feature (1)..(25): SEQ ID NO: 1938; WAN024DXS; Start 941; Stop 965
cacttaacatcactgagcaactctt

SEQ ID NO: 309996 - DNA, 25 bp, Artificial
  probe
  misc_feature (1)..(25): SEQ ID NO: 1938; WAN024DXS; Start 645; Stop 669
cgttatcactgttccactaatcaca

SEQ ID NO: 309997 - DNA, 25 bp, Artificial
  probe
  misc_feature (1)..(25): SEQ ID NO: 1938; WAN024DXS; Start 539; Stop 563
ttaaccaagaccataatgtcactct

SEQ ID NO: 309998 - DNA, 25 bp, Artificial
  probe
  misc_feature (1)..(25): SEQ ID NO: 1938; WAN024DXS; Start 537; Stop 561
ccttaaccaagaccataatgtcact

SEQ ID NO: 309999 - DNA, 25 bp, Artificial
  probe
  misc_feature (1)..(25): SEQ ID NO: 1938; WAN024DXS; Start 536; Stop 560
tccttaaccaagaccataatgtcac

SEQ ID NO: 310000 - DNA, 25 bp, Artificial
  probe
  misc_feature (1)..(25): SEQ ID NO: 1938; WAN024DXS; Start 535; Stop 559
gtccttaaccaagaccataatgtca

SEQ ID NO: 310001 - DNA, 25 bp, Artificial
  probe
  misc_feature (1)..(25): SEQ ID NO: 1938; WAN024DXS; Start 538; Stop 562
cttaaccaagaccataatgtcactc

SEQ ID NO: 310002 - DNA, 25 bp, Artificial
  probe
  misc_feature (1)..(25): SEQ ID NO: 1938; WAN024DXS; Start 531; Stop 555
cttcgtccttaaccaagaccataat

SEQ ID NO: 310003 - DNA, 25 bp, Artificial
  probe
  misc_feature (1)..(25): SEQ ID NO: 1938; WAN024DXS; Start 904; Stop 928
gttacacttgttcacggagaagaag

SEQ ID NO: 310004 - DNA, 25 bp, Artificial
  probe
  misc_feature (1)..(25): SEQ ID NO: 1938; WAN024DXS; Start 818; Stop 842
cacttgatgagattgaagatattcg

SEQ ID NO: 310005 - DNA, 25 bp, Artificial
  probe
  misc_feature (1)..(25): SEQ ID NO: 1938; WAN024DXS; Start 532; Stop 556
ttcgtccttaaccaagaccataatg

SEQ ID NO: 310006 - DNA, 25 bp, Artificial
  probe
  misc_feature (1)..(25): SEQ ID NO: 1938; WAN024DXS; Start 486; Stop 510
ttcttacactgagttcgcttaccaa

SEQ ID NO: 310007 - DNA, 25 bp, Artificial
  probe
  misc_feature (1)..(25): SEQ ID NO: 1938; WAN024DXS; Start 432; Stop 456
ggtcaactacatgatgagtaaggaa

SEQ ID NO: 310008 - DNA, 25 bp, Artificial
  probe
  misc_feature (1)..(25): SEQ ID NO: 1938; WAN024DXS; Start 422; Stop 446
aatacttcacggtcaactacatgat

SEQ ID NO: 310009 - DNA, 25 bp, Artificial
  probe
  misc_feature (1)..(25): SEQ ID NO: 1938; WAN024DXS; Start 1066; Stop 1090
gaactgctcgtctcatctggtatag

SEQ ID NO: 310010 - DNA, 25 bp, Artificial
  probe
  misc_feature (1)..(25): SEQ ID NO: 1938; WAN024DXS; Start 1170; Stop 1194
ctatgtcttgagtgacgctgataag

SEQ ID NO: 310011 - DNA, 25 bp, Artificial
  probe
  misc_feature (1)..(25): SEQ ID NO: 1938; WAN024DXS; Start 423; Stop 447
atacttcacggtcaactacatgatg

SEQ ID NO: 310012 - DNA, 25 bp, Artificial
  probe
  misc_feature (1)..(25): SEQ ID NO: 1938; WAN024DXS; Start 1174; Stop 1198
gtcttgagtgacgctgataagttag

SEQ ID NO: 310013 - DNA, 25 bp, Artificial
  probe
  misc_feature (1)..(25): SEQ ID NO: 1938; WAN024DXS; Start 534; Stop 558
cgtccttaaccaagaccataatgtc

SEQ ID NO: 310014 - DNA, 25 bp, Artificial
  probe
  misc_feature (1)..(25): SEQ ID NO: 1938; WAN024DXS; Start 814; Stop 838
ttgtcacttgatgagattgaagata

SEQ ID NO: 310015 - DNA, 25 bp, Artificial
  probe
  misc_feature (1)..(25): SEQ ID NO: 1938; WAN024DXS; Start 429; Stop 453
cacggtcaactacatgatgagtaag

SEQ ID NO: 310016 - DNA, 25 bp, Artificial
  probe
  misc_feature (1)..(25): SEQ ID NO: 1938; WAN024DXS; Start 903; Stop 927
tgttacacttgttcacggagaagaa

SEQ ID NO: 310017 - DNA, 25 bp, Artificial
  probe
  misc_feature (1)..(25): SEQ ID NO: 1938; WAN024DXS; Start 902; Stop 926
ttgttacacttgttcacggagaaga

SEQ ID NO: 310018 - DNA, 25 bp, Artificial
  probe
  misc_feature (1)..(25): SEQ ID NO: 1938; WAN024DXS; Start 901; Stop 925
gttgttacacttgttcacggagaag

SEQ ID NO: 310019 - DNA, 25 bp, Artificial
  probe
  misc_feature (1)..(25): SEQ ID NO: 1938; WAN024DXS; Start 1171; Stop 1195
tatgtcttgagtgacgctgataagt

SEQ ID NO: 310020 - DNA, 25 bp, Artificial
  probe
  misc_feature (1)..(25): SEQ ID NO: 1938; WAN024DXS; Start 1169; Stop 1193
actatgtcttgagtgacgctgataa

SEQ ID NO: 310021 - DNA, 25 bp, Artificial
  probe
  misc_feature (1)..(25): SEQ ID NO: 1938; WAN024DXS; Start 815; Stop 839
tgtcacttgatgagattgaagatat

SEQ ID NO: 310022 - DNA, 25 bp, Artificial
  probe
  misc_feature (1)..(25): SEQ ID NO: 1938; WAN024DXS; Start 1173; Stop 1197
tgtcttgagtgacgctgataagtta

SEQ ID NO: 310023 - DNA, 25 bp, Artificial
  probe
  misc_feature (1)..(25): SEQ ID NO: 1939; WAN024CHQ; Start 124; Stop 148
gaagccctcaaggatattcacttta

SEQ ID NO: 310024 - DNA, 25 bp, Artificial
  probe
  misc_feature (1)..(25): SEQ ID NO: 1939; WAN024CHQ; Start 125; Stop 149
aagccctcaaggatattcactttac

SEQ ID NO: 310025 - DNA, 25 bp, Artificial
  probe
  misc_feature (1)..(25): SEQ ID NO: 1939; WAN024CHQ; Start 118; Stop 142
caagtagaagccctcaaggatattc

SEQ ID NO: 310026 - DNA, 25 bp, Artificial
  probe
  misc_feature (1)..(25): SEQ ID NO: 1939; WAN024CHQ; Start 122; Stop 146
tagaagccctcaaggatattcactt

SEQ ID NO: 310027 - DNA, 25 bp, Artificial
  probe
  misc_feature (1)..(25): SEQ ID NO: 1939; WAN024CHQ; Start 119; Stop 143
aagtagaagccctcaaggatattca

SEQ ID NO: 310028 - DNA, 25 bp, Artificial
  probe
  misc_feature (1)..(25): SEQ ID NO: 1939; WAN024CHQ; Start 421; Stop 445
atgatgaagaaattggtggtgacag

SEQ ID NO: 310029 - DNA, 25 bp, Artificial
  probe
  misc_feature (1)..(25): SEQ ID NO: 1939; WAN024CHQ; Start 117; Stop 141
ccaagtagaagccctcaaggatatt

SEQ ID NO: 310030 - DNA, 25 bp, Artificial
  probe
  misc_feature (1)..(25): SEQ ID NO: 1939; WAN024CHQ; Start 123; Stop 147
agaagccctcaaggatattcacttt

SEQ ID NO: 310031 - DNA, 25 bp, Artificial
  probe
  misc_feature (1)..(25): SEQ ID NO: 1939; WAN024CHQ; Start 121; Stop 145
gtagaagccctcaaggatattcact

SEQ ID NO: 310032 - DNA, 25 bp, Artificial
  probe
  misc_feature (1)..(25): SEQ ID NO: 1939; WAN024CHQ; Start 120; Stop 144
agtagaagccctcaaggatattcac

SEQ ID NO: 310033 - DNA, 25 bp, Artificial
  probe
  misc_feature (1)..(25): SEQ ID NO: 1939; WAN024CHQ; Start 128; Stop 152
ccctcaaggatattcactttaccgt

SEQ ID NO: 310034 - DNA, 25 bp, Artificial
  probe
  misc_feature (1)..(25): SEQ ID NO: 1939; WAN024CHQ; Start 126; Stop 150
agccctcaaggatattcactttacc

SEQ ID NO: 310035 - DNA, 25 bp, Artificial
  probe
  misc_feature (1)..(25): SEQ ID NO: 1939; WAN024CHQ; Start 17; Stop 41
gctacatttcatttgatgggatatt

SEQ ID NO: 310036 - DNA, 25 bp, Artificial
  probe
  misc_feature (1)..(25): SEQ ID NO: 1939; WAN024CHQ; Start 28; Stop 52
tttgatgggatattaagaaaggaga

SEQ ID NO: 310037 - DNA, 25 bp, Artificial
  probe
  misc_feature (1)..(25): SEQ ID NO: 1939; WAN024CHQ; Start 14; Stop 38
caagctacatttcatttgatgggat

SEQ ID NO: 310038 - DNA, 25 bp, Artificial
  probe
  misc_feature (1)..(25): SEQ ID NO: 1939; WAN024CHQ; Start 730; Stop 754
caaatctaccgtggagagaagacag

SEQ ID NO: 310039 - DNA, 25 bp, Artificial
  probe
  misc_feature (1)..(25): SEQ ID NO: 1939; WAN024CHQ; Start 30; Stop 54
tgatgggatattaagaaaggagatt

SEQ ID NO: 310040 - DNA, 25 bp, Artificial
  probe
  misc_feature (1)..(25): SEQ ID NO: 1939; WAN024CHQ; Start 29; Stop 53
ttgatgggatattaagaaaggagat

SEQ ID NO: 310041 - DNA, 25 bp, Artificial
  probe
  misc_feature (1)..(25): SEQ ID NO: 1939; WAN024CHQ; Start 116; Stop 140
accaagtagaagccctcaaggatat

SEQ ID NO: 310042 - DNA, 25 bp, Artificial
  probe
  misc_feature (1)..(25): SEQ ID NO: 1939; WAN024CHQ; Start 731; Stop 755
aaatctaccgtggagagaagacaga

SEQ ID NO: 310043 - DNA, 25 bp, Artificial
  probe
  misc_feature (1)..(25): SEQ ID NO: 1939; WAN024CHQ; Start 15; Stop 39
aagctacatttcatttgatgggata

SEQ ID NO: 310044 - DNA, 25 bp, Artificial
  probe
  misc_feature (1)..(25): SEQ ID NO: 1939; WAN024CHQ; Start 10; Stop 34
gatgcaagctacatttcatttgatg

SEQ ID NO: 310045 - DNA, 25 bp, Artificial
  probe
  misc_feature (1)..(25): SEQ ID NO: 1939; WAN024CHQ; Start 115; Stop 139
aaccaagtagaagccctcaaggata

SEQ ID NO: 310046 - DNA, 25 bp, Artificial
  probe
  misc_feature (1)..(25): SEQ ID NO: 1939; WAN024CHQ; Start 16; Stop 40
agctacatttcatttgatgggatat

SEQ ID NO: 310047 - DNA, 25 bp, Artificial
  probe
  misc_feature (1)..(25): SEQ ID NO: 1939; WAN024CHQ; Start 11; Stop 35
atgcaagctacatttcatttgatgg

SEQ ID NO: 310048 - DNA, 25 bp, Artificial
  probe
  misc_feature (1)..(25): SEQ ID NO: 1939; WAN024CHQ; Start 9; Stop 33
tgatgcaagctacatttcatttgat

SEQ ID NO: 310049 - DNA, 25 bp, Artificial
  probe
  misc_feature (1)..(25): SEQ ID NO: 1939; WAN024CHQ; Start 338; Stop 362
aagactttaacttgctagatactct

SEQ ID NO: 310050 - DNA, 25 bp, Artificial
  probe
  misc_feature (1)..(25): SEQ ID NO: 1939; WAN024CHQ; Start 178; Stop 202
atgggtgagtctggttctggtaaat

SEQ ID NO: 310051 - DNA, 25 bp, Artificial
  probe
  misc_feature (1)..(25): SEQ ID NO: 1939; WAN024CHQ; Start 31; Stop 55
gatgggatattaagaaaggagattc

SEQ ID NO: 310052 - DNA, 25 bp, Artificial
  probe
  misc_feature (1)..(25): SEQ ID NO: 1939; WAN024CHQ; Start 26; Stop 50
catttgatgggatattaagaaagga

SEQ ID NO: 310053 - DNA, 25 bp, Artificial
  probe
  misc_feature (1)..(25): SEQ ID NO: 1939; WAN024CHQ; Start 25; Stop 49
tcatttgatgggatattaagaaagg

SEQ ID NO: 310054 - DNA, 25 bp, Artificial
  probe
  misc_feature (1)..(25): SEQ ID NO: 1939; WAN024CHQ; Start 13; Stop 37
gcaagctacatttcatttgatggga

SEQ ID NO: 310055 - DNA, 25 bp, Artificial
  probe
  misc_feature (1)..(25): SEQ ID NO: 1939; WAN024CHQ; Start 127; Stop 151
gccctcaaggatattcactttaccg

SEQ ID NO: 310056 - DNA, 25 bp, Artificial
  probe
  misc_feature (1)..(25): SEQ ID NO: 1940; WAN024D9M; Start 493; Stop 517
gacctagaccttgagacagttgatt

SEQ ID NO: 310057 - DNA, 25 bp, Artificial
  probe
  misc_feature (1)..(25): SEQ ID NO: 1940; WAN024D9M; Start 494; Stop 518
acctagaccttgagacagttgattg

SEQ ID NO: 310058 - DNA, 25 bp, Artificial
  probe
  misc_feature (1)..(25): SEQ ID NO: 1940; WAN024D9M; Start 490; Stop 514
aatgacctagaccttgagacagttg

SEQ ID NO: 310059 - DNA, 25 bp, Artificial
  probe
  misc_feature (1)..(25): SEQ ID NO: 1940; WAN024D9M; Start 495; Stop 519
cctagaccttgagacagttgattgg

SEQ ID NO: 310060 - DNA, 25 bp, Artificial
  probe
  misc_feature (1)..(25): SEQ ID NO: 1940; WAN024D9M; Start 492; Stop 516
tgacctagaccttgagacagttgat

SEQ ID NO: 310061 - DNA, 25 bp, Artificial
  probe
  misc_feature (1)..(25): SEQ ID NO: 1940; WAN024D9M; Start 491; Stop 515
atgacctagaccttgagacagttga

SEQ ID NO: 310062 - DNA, 25 bp, Artificial
  probe
  misc_feature (1)..(25): SEQ ID NO: 1940; WAN024D9M; Start 325; Stop 349
gactacagtatcctctatcgtttgg

SEQ ID NO: 310063 - DNA, 25 bp, Artificial
  probe
  misc_feature (1)..(25): SEQ ID NO: 1940; WAN024D9M; Start 944; Stop 968
acatccaaccattaccagcttctaa

SEQ ID NO: 310064 - DNA, 25 bp, Artificial
  probe
  misc_feature (1)..(25): SEQ ID NO: 1940; WAN024D9M; Start 324; Stop 348
agactacagtatcctctatcgtttg

SEQ ID NO: 310065 - DNA, 25 bp, Artificial
  probe
  misc_feature (1)..(25): SEQ ID NO: 1940; WAN024D9M; Start 322; Stop 346
ttagactacagtatcctctatcgtt

SEQ ID NO: 310066 - DNA, 25 bp, Artificial
  probe
  misc_feature (1)..(25): SEQ ID NO: 1940; WAN024D9M; Start 943; Stop 967
gacatccaaccattaccagcttcta

SEQ ID NO: 310067 - DNA, 25 bp, Artificial
  probe
  misc_feature (1)..(25): SEQ ID NO: 1940; WAN024D9M; Start 489; Stop 513
aaatgacctagaccttgagacagtt

SEQ ID NO: 310068 - DNA, 25 bp, Artificial
  probe
  misc_feature (1)..(25): SEQ ID NO: 1940; WAN024D9M; Start 326; Stop 350
actacagtatcctctatcgtttggc

SEQ ID NO: 310069 - DNA, 25 bp, Artificial
  probe
  misc_feature (1)..(25): SEQ ID NO: 1940; WAN024D9M; Start 477; Stop 501
agatgaaccttcaaatgacctagac

SEQ ID NO: 310070 - DNA, 25 bp, Artificial
  probe
  misc_feature (1)..(25): SEQ ID NO: 1940; WAN024D9M; Start 481; Stop 505
gaaccttcaaatgacctagaccttg

SEQ ID NO: 310071 - DNA, 25 bp, Artificial
  probe
  misc_feature (1)..(25): SEQ ID NO: 1940; WAN024D9M; Start 478; Stop 502
gatgaaccttcaaatgacctagacc

SEQ ID NO: 310072 - DNA, 25 bp, Artificial
  probe
  misc_feature (1)..(25): SEQ ID NO: 1940; WAN024D9M; Start 476; Stop 500
tagatgaaccttcaaatgacctaga

SEQ ID NO: 310073 - DNA, 25 bp, Artificial
  probe
  misc_feature (1)..(25): SEQ ID NO: 1940; WAN024D9M; Start 910; Stop 934
cttgaagaggaacaaatccaacttt

SEQ ID NO: 310074 - DNA, 25 bp, Artificial
  probe
  misc_feature (1)..(25): SEQ ID NO: 1940; WAN024D9M; Start 961; Stop 985
gcttctaaagtcttagtccaactgg

SEQ ID NO: 310075 - DNA, 25 bp, Artificial
  probe
  misc_feature (1)..(25): SEQ ID NO: 1940; WAN024D9M; Start 479; Stop 503
atgaaccttcaaatgacctagacct

SEQ ID NO: 310076 - DNA, 25 bp, Artificial
  probe
  misc_feature (1)..(25): SEQ ID NO: 1940; WAN024D9M; Start 909; Stop 933
acttgaagaggaacaaatccaactt

SEQ ID NO: 310077 - DNA, 25 bp, Artificial
  probe
  misc_feature (1)..(25): SEQ ID NO: 1940; WAN024D9M; Start 950; Stop 974
aaccattaccagcttctaaagtctt

SEQ ID NO: 310078 - DNA, 25 bp, Artificial
  probe
  misc_feature (1)..(25): SEQ ID NO: 1940; WAN024D9M; Start 488; Stop 512
caaatgacctagaccttgagacagt

SEQ ID NO: 310079 - DNA, 25 bp, Artificial
  probe
  misc_feature (1)..(25): SEQ ID NO: 1940; WAN024D9M; Start 480; Stop 504
tgaaccttcaaatgacctagacctt

SEQ ID NO: 310080 - DNA, 25 bp, Artificial
  probe
  misc_feature (1)..(25): SEQ ID NO: 1940; WAN024D9M; Start 597; Stop 621
agacactattgttcacttgcgactg

SEQ ID NO: 310081 - DNA, 25 bp, Artificial
  probe
  misc_feature (1)..(25): SEQ ID NO: 1940; WAN024D9M; Start 596; Stop 620
cagacactattgttcacttgcgact

SEQ ID NO: 310082 - DNA, 25 bp, Artificial
  probe
  misc_feature (1)..(25): SEQ ID NO: 1940; WAN024D9M; Start 602; Stop 626
ctattgttcacttgcgactggtcaa

SEQ ID NO: 310083 - DNA, 25 bp, Artificial
  probe
  misc_feature (1)..(25): SEQ ID NO: 1940; WAN024D9M; Start 327; Stop 351
ctacagtatcctctatcgtttggcg

SEQ ID NO: 310084 - DNA, 25 bp, Artificial
  probe
  misc_feature (1)..(25): SEQ ID NO: 1940; WAN024D9M; Start 951; Stop 975
accattaccagcttctaaagtctta

SEQ ID NO: 310085 - DNA, 25 bp, Artificial
  probe
  misc_feature (1)..(25): SEQ ID NO: 1940; WAN024D9M; Start 945; Stop 969
catccaaccattaccagcttctaaa

SEQ ID NO: 310086 - DNA, 25 bp, Artificial
  probe
  misc_feature (1)..(25): SEQ ID NO: 1940; WAN024D9M; Start 429; Stop 453
aattcagcttatccatgagttagcc

SEQ ID NO: 310087 - DNA, 25 bp, Artificial
  probe
  misc_feature (1)..(25): SEQ ID NO: 1940; WAN024D9M; Start 949; Stop 973
caaccattaccagcttctaaagtct

SEQ ID NO: 310088 - DNA, 25 bp, Artificial
  probe
  misc_feature (1)..(25): SEQ ID NO: 1940; WAN024D9M; Start 1503; Stop 1527
gatcatctatcgcatgacagaacac

SEQ ID NO: 310089 - DNA, 25 bp, Artificial
  probe
  misc_feature (1)..(25): SEQ ID NO: 1941; WAN024GFY; Start 243; Stop 267
ctcggtaagtaatcaactcctgaac

SEQ ID NO: 310090 - DNA, 25 bp, Artificial
  probe
  misc_feature (1)..(25): SEQ ID NO: 1941; WAN024GFY; Start 242; Stop 266
actcggtaagtaatcaactcctgaa

SEQ ID NO: 310091 - DNA, 25 bp, Artificial
  probe
  misc_feature (1)..(25): SEQ ID NO: 1941; WAN024GFY; Start 241; Stop 265
gactcggtaagtaatcaactcctga

SEQ ID NO: 310092 - DNA, 25 bp, Artificial
  probe
  misc_feature (1)..(25): SEQ ID NO: 1941; WAN024GFY; Start 240; Stop 264
tgactcggtaagtaatcaactcctg

SEQ ID NO: 310093 - DNA, 25 bp, Artificial
  probe
  misc_feature (1)..(25): SEQ ID NO: 1941; WAN024GFY; Start 216; Stop 240
cgccaatccgatagagaataaagtt

SEQ ID NO: 310094 - DNA, 25 bp, Artificial
  probe
  misc_feature (1)..(25): SEQ ID NO: 1941; WAN024GFY; Start 217; Stop 241
gccaatccgatagagaataaagttg

SEQ ID NO: 310095 - DNA, 25 bp, Artificial
  probe
  misc_feature (1)..(25): SEQ ID NO: 1941; WAN024GFY; Start 74; Stop 98
gatctagtcagaagattggtcacaa

SEQ ID NO: 310096 - DNA, 25 bp, Artificial
  probe
  misc_feature (1)..(25): SEQ ID NO: 1941; WAN024GFY; Start 68; Stop 92
gaatcggatctagtcagaagattgg

SEQ ID NO: 310097 - DNA, 25 bp, Artificial
  probe
  misc_feature (1)..(25): SEQ ID NO: 1941; WAN024GFY; Start 67; Stop 91
cgaatcggatctagtcagaagattg

SEQ ID NO: 310098 - DNA, 25 bp, Artificial
  probe
  misc_feature (1)..(25): SEQ ID NO: 1941; WAN024GFY; Start 69; Stop 93
aatcggatctagtcagaagattggt

SEQ ID NO: 310099 - DNA, 25 bp, Artificial
  probe
  misc_feature (1)..(25): SEQ ID NO: 1941; WAN024GFY; Start 56; Stop 80
atcataaaggacgaatcggatctag

SEQ ID NO: 310100 - DNA, 25 bp, Artificial
  probe
  misc_feature (1)..(25): SEQ ID NO: 1941; WAN024GFY; Start 166; Stop 190
atcaaagacagccttccagagataa

SEQ ID NO: 310101 - DNA, 25 bp, Artificial
  probe
  misc_feature (1)..(25): SEQ ID NO: 1941; WAN024GFY; Start 165; Stop 189
aatcaaagacagccttccagagata

SEQ ID NO: 310102 - DNA, 25 bp, Artificial
  probe
  misc_feature (1)..(25): SEQ ID NO: 1941; WAN024GFY; Start 244; Stop 268
tcggtaagtaatcaactcctgaacc

SEQ ID NO: 310103 - DNA, 25 bp, Artificial
  probe
  misc_feature (1)..(25): SEQ ID NO: 1941; WAN024GFY; Start 66; Stop 90
acgaatcggatctagtcagaagatt

SEQ ID NO: 310104 - DNA, 25 bp, Artificial
  probe
  misc_feature (1)..(25): SEQ ID NO: 1941; WAN024GFY; Start 55; Stop 79
aatcataaaggacgaatcggatcta

SEQ ID NO: 310105 - DNA, 25 bp, Artificial
  probe
  misc_feature (1)..(25): SEQ ID NO: 1941; WAN024GFY; Start 228; Stop 252
agagaataaagttgactcggtaagt

SEQ ID NO: 310106 - DNA, 25 bp, Artificial
  probe
  misc_feature (1)..(25): SEQ ID NO: 1941; WAN024GFY; Start 57; Stop 81
tcataaaggacgaatcggatctagt

SEQ ID NO: 310107 - DNA, 25 bp, Artificial
  probe
  misc_feature (1)..(25): SEQ ID NO: 1941; WAN024GFY; Start 54; Stop 78
caatcataaaggacgaatcggatct

SEQ ID NO: 310108 - DNA, 25 bp, Artificial
  probe
  misc_feature (1)..(25): SEQ ID NO: 1941; WAN024GFY; Start 167; Stop 191
tcaaagacagccttccagagataaa

SEQ ID NO: 310109 - DNA, 25 bp, Artificial
  probe
  misc_feature (1)..(25): SEQ ID NO: 1941; WAN024GFY; Start 70; Stop 94
atcggatctagtcagaagattggtc

SEQ ID NO: 310110 - DNA, 25 bp, Artificial
  probe
  misc_feature (1)..(25): SEQ ID NO: 1941; WAN024GFY; Start 73; Stop 97
ggatctagtcagaagattggtcaca

SEQ ID NO: 310111 - DNA, 25 bp, Artificial
  probe
  misc_feature (1)..(25): SEQ ID NO: 1941; WAN024GFY; Start 65; Stop 89
gacgaatcggatctagtcagaagat

SEQ ID NO: 310112 - DNA, 25 bp, Artificial
  probe
  misc_feature (1)..(25): SEQ ID NO: 1941; WAN024GFY; Start 218; Stop 242
ccaatccgatagagaataaagttga

SEQ ID NO: 310113 - DNA, 25 bp, Artificial
  probe
  misc_feature (1)..(25): SEQ ID NO: 1941; WAN024GFY; Start 130; Stop 154
catactgaagccctgaatcaaagac

SEQ ID NO: 310114 - DNA, 25 bp, Artificial
  probe
  misc_feature (1)..(25): SEQ ID NO: 1941; WAN024GFY; Start 131; Stop 155
atactgaagccctgaatcaaagact

SEQ ID NO: 310115 - DNA, 25 bp, Artificial
  probe
  misc_feature (1)..(25): SEQ ID NO: 1941; WAN024GFY; Start 53; Stop 77
ccaatcataaaggacgaatcggatc

SEQ ID NO: 310116 - DNA, 25 bp, Artificial
  probe
  misc_feature (1)..(25): SEQ ID NO: 1941; WAN024GFY; Start 62; Stop 86
aaggacgaatcggatctagtcagaa

SEQ ID NO: 310117 - DNA, 25 bp, Artificial
  probe
  misc_feature (1)..(25): SEQ ID NO: 1941; WAN024GFY; Start 239; Stop 263
ttgactcggtaagtaatcaactcct

SEQ ID NO: 310118 - DNA, 25 bp, Artificial
  probe
  misc_feature (1)..(25): SEQ ID NO: 1941; WAN024GFY; Start 220; Stop 244
aatccgatagagaataaagttgact

SEQ ID NO: 310119 - DNA, 25 bp, Artificial
  probe
  misc_feature (1)..(25): SEQ ID NO: 1941; WAN024GFY; Start 58; Stop 82
cataaaggacgaatcggatctagtc

SEQ ID NO: 310120 - DNA, 25 bp, Artificial
  probe
  misc_feature (1)..(25): SEQ ID NO: 1941; WAN024GFY; Start 229; Stop 253
gagaataaagttgactcggtaagta

SEQ ID NO: 310121 - DNA, 25 bp, Artificial
  probe
  misc_feature (1)..(25): SEQ ID NO: 1941; WAN024GFY; Start 59; Stop 83
ataaaggacgaatcggatctagtca

SEQ ID NO: 310122 - DNA, 25 bp, Artificial
  probe
  misc_feature (1)..(25): SEQ ID NO: 1942; WAN024EUH; Start 66; Stop 90
ctacgaactctatcaactcctgctc

SEQ ID NO: 310123 - DNA, 25 bp, Artificial
  probe
  misc_feature (1)..(25): SEQ ID NO: 1942; WAN024EUH; Start 67; Stop 91
tacgaactctatcaactcctgctct

SEQ ID NO: 310124 - DNA, 25 bp, Artificial
  probe
  misc_feature (1)..(25): SEQ ID NO: 1942; WAN024EUH; Start 65; Stop 89
actacgaactctatcaactcctgct

SEQ ID NO: 310125 - DNA, 25 bp, Artificial
  probe
  misc_feature (1)..(25): SEQ ID NO: 1942; WAN024EUH; Start 74; Stop 98
tctatcaactcctgctctttcattt

SEQ ID NO: 310126 - DNA, 25 bp, Artificial
  probe
  misc_feature (1)..(25): SEQ ID NO: 1942; WAN024EUH; Start 73; Stop 97
ctctatcaactcctgctctttcatt

SEQ ID NO: 310127 - DNA, 25 bp, Artificial
  probe
  misc_feature (1)..(25): SEQ ID NO: 1942; WAN024EUH; Start 562; Stop 586
gataaccttgacatctgtgatttcg

SEQ ID NO: 310128 - DNA, 25 bp, Artificial
  probe
  misc_feature (1)..(25): SEQ ID NO: 1942; WAN024EUH; Start 34; Stop 58
ctgctttcttactctgagggattac

SEQ ID NO: 310129 - DNA, 25 bp, Artificial
  probe
  misc_feature (1)..(25): SEQ ID NO: 1942; WAN024EUH; Start 72; Stop 96
actctatcaactcctgctctttcat

SEQ ID NO: 310130 - DNA, 25 bp, Artificial
  probe
  misc_feature (1)..(25): SEQ ID NO: 1942; WAN024EUH; Start 70; Stop 94
gaactctatcaactcctgctctttc

SEQ ID NO: 310131 - DNA, 25 bp, Artificial
  probe
  misc_feature (1)..(25): SEQ ID NO: 1942; WAN024EUH; Start 561; Stop 585
tgataaccttgacatctgtgatttc

SEQ ID NO: 310132 - DNA, 25 bp, Artificial
  probe
  misc_feature (1)..(25): SEQ ID NO: 1942; WAN024EUH; Start 35; Stop 59
tgctttcttactctgagggattaca

SEQ ID NO: 310133 - DNA, 25 bp, Artificial
  probe
  misc_feature (1)..(25): SEQ ID NO: 1942; WAN024EUH; Start 229; Stop 253
ccttattccaacgctaaacttgaag

SEQ ID NO: 310134 - DNA, 25 bp, Artificial
  probe
  misc_feature (1)..(25): SEQ ID NO: 1942; WAN024EUH; Start 118; Stop 142
catttctttggattgattgagcaag

SEQ ID NO: 310135 - DNA, 25 bp, Artificial
  probe
  misc_feature (1)..(25): SEQ ID NO: 1942; WAN024EUH; Start 71; Stop 95
aactctatcaactcctgctctttca

SEQ ID NO: 310136 - DNA, 25 bp, Artificial
  probe
  misc_feature (1)..(25): SEQ ID NO: 1942; WAN024EUH; Start 244; Stop 268
aaacttgaagcgaccaataatttga

SEQ ID NO: 310137 - DNA, 25 bp, Artificial
  probe
  misc_feature (1)..(25): SEQ ID NO: 1942; WAN024EUH; Start 563; Stop 587
ataaccttgacatctgtgatttcgg

SEQ ID NO: 310138 - DNA, 25 bp, Artificial
  probe
  misc_feature (1)..(25): SEQ ID NO: 1942; WAN024EUH; Start 246; Stop 270
acttgaagcgaccaataatttgatt

SEQ ID NO: 310139 - DNA, 25 bp, Artificial
  probe
  misc_feature (1)..(25): SEQ ID NO: 1942; WAN024EUH; Start 245; Stop 269
aacttgaagcgaccaataatttgat

SEQ ID NO: 310140 - DNA, 25 bp, Artificial
  probe
  misc_feature (1)..(25): SEQ ID NO: 1942; WAN024EUH; Start 68; Stop 92
acgaactctatcaactcctgctctt

SEQ ID NO: 310141 - DNA, 25 bp, Artificial
  probe
  misc_feature (1)..(25): SEQ ID NO: 1942; WAN024EUH; Start 123; Stop 147
ctttggattgattgagcaagaactg

SEQ ID NO: 310142 - DNA, 25 bp, Artificial
  probe
  misc_feature (1)..(25): SEQ ID NO: 1942; WAN024EUH; Start 198; Stop 222
tagagataagattatcaacgcactt

SEQ ID NO: 310143 - DNA, 25 bp, Artificial
  probe
  misc_feature (1)..(25): SEQ ID NO: 1942; WAN024EUH; Start 560; Stop 584
atgataaccttgacatctgtgattt

SEQ ID NO: 310144 - DNA, 25 bp, Artificial
  probe
  misc_feature (1)..(25): SEQ ID NO: 1942; WAN024EUH; Start 243; Stop 267
taaacttgaagcgaccaataatttg

SEQ ID NO: 310145 - DNA, 25 bp, Artificial
  probe
  misc_feature (1)..(25): SEQ ID NO: 1942; WAN024EUH; Start 199; Stop 223
agagataagattatcaacgcactta

SEQ ID NO: 310146 - DNA, 25 bp, Artificial
  probe
  misc_feature (1)..(25): SEQ ID NO: 1942; WAN024EUH; Start 37; Stop 61
ctttcttactctgagggattacagg

SEQ ID NO: 310147 - DNA, 25 bp, Artificial
  probe
  misc_feature (1)..(25): SEQ ID NO: 1942; WAN024EUH; Start 197; Stop 221
atagagataagattatcaacgcact

SEQ ID NO: 310148 - DNA, 25 bp, Artificial
  probe
  misc_feature (1)..(25): SEQ ID NO: 1942; WAN024EUH; Start 39; Stop 63
ttcttactctgagggattacaggtt

SEQ ID NO: 310149 - DNA, 25 bp, Artificial
  probe
  misc_feature (1)..(25): SEQ ID NO: 1942; WAN024EUH; Start 38; Stop 62
tttcttactctgagggattacaggt

SEQ ID NO: 310150 - DNA, 25 bp, Artificial
  probe
  misc_feature (1)..(25): SEQ ID NO: 1942; WAN024EUH; Start 242; Stop 266
ctaaacttgaagcgaccaataattt

SEQ ID NO: 310151 - DNA, 25 bp, Artificial
  probe
  misc_feature (1)..(25): SEQ ID NO: 1942; WAN024EUH; Start 36; Stop 60
gctttcttactctgagggattacag

SEQ ID NO: 310152 - DNA, 25 bp, Artificial
  probe
  misc_feature (1)..(25): SEQ ID NO: 1942; WAN024EUH; Start 33; Stop 57
gctgctttcttactctgagggatta

SEQ ID NO: 310153 - DNA, 25 bp, Artificial
  probe
  misc_feature (1)..(25): SEQ ID NO: 1942; WAN024EUH; Start 69; Stop 93
cgaactctatcaactcctgctcttt

SEQ ID NO: 310154 - DNA, 25 bp, Artificial
  probe
  misc_feature (1)..(25): SEQ ID NO: 1942; WAN024EUH; Start 249; Stop 273
tgaagcgaccaataatttgattaag

SEQ ID NO: 310155 - DNA, 25 bp, Artificial
  probe
  misc_feature (1)..(25): SEQ ID NO: 1943; WAN024DSY; Start 46; Stop 70
gagcacttcccagtcttattctatt

SEQ ID NO: 310156 - DNA, 25 bp, Artificial
  probe
  misc_feature (1)..(25): SEQ ID NO: 1943; WAN024DSY; Start 47; Stop 71
agcacttcccagtcttattctattt

SEQ ID NO: 310157 - DNA, 25 bp, Artificial
  probe
  misc_feature (1)..(25): SEQ ID NO: 1943; WAN024DSY; Start 45; Stop 69
ggagcacttcccagtcttattctat

SEQ ID NO: 310158 - DNA, 25 bp, Artificial
  probe
  misc_feature (1)..(25): SEQ ID NO: 1943; WAN024DSY; Start 24; Stop 48
gctctataaacatcaaggctgggag

SEQ ID NO: 310159 - DNA, 25 bp, Artificial
  probe
  misc_feature (1)..(25): SEQ ID NO: 1943; WAN024DSY; Start 48; Stop 72
gcacttcccagtcttattctatttt

SEQ ID NO: 310160 - DNA, 25 bp, Artificial
  probe
  misc_feature (1)..(25): SEQ ID NO: 1943; WAN024DSY; Start 25; Stop 49
ctctataaacatcaaggctgggagc

SEQ ID NO: 310161 - DNA, 25 bp, Artificial
  probe
  misc_feature (1)..(25): SEQ ID NO: 1943; WAN024DSY; Start 14; Stop 38
tttgcgtgcagctctataaacatca

SEQ ID NO: 310162 - DNA, 25 bp, Artificial
  probe
  misc_feature (1)..(25): SEQ ID NO: 1943; WAN024DSY; Start 15; Stop 39
ttgcgtgcagctctataaacatcaa

SEQ ID NO: 310163 - DNA, 25 bp, Artificial
  probe
  misc_feature (1)..(25): SEQ ID NO: 1943; WAN024DSY; Start 16; Stop 40
tgcgtgcagctctataaacatcaag

SEQ ID NO: 310164 - DNA, 25 bp, Artificial
  probe
  misc_feature (1)..(25): SEQ ID NO: 1943; WAN024DSY; Start 27; Stop 51
ctataaacatcaaggctgggagcac

SEQ ID NO: 310165 - DNA, 25 bp, Artificial
  probe
  misc_feature (1)..(25): SEQ ID NO: 1943; WAN024DSY; Start 26; Stop 50
tctataaacatcaaggctgggagca

SEQ ID NO: 310166 - DNA, 25 bp, Artificial
  probe
  misc_feature (1)..(25): SEQ ID NO: 1943; WAN024DSY; Start 28; Stop 52
tataaacatcaaggctgggagcact

SEQ ID NO: 310167 - DNA, 25 bp, Artificial
  probe
  misc_feature (1)..(25): SEQ ID NO: 1943; WAN024DSY; Start 23; Stop 47
agctctataaacatcaaggctggga

SEQ ID NO: 310168 - DNA, 25 bp, Artificial
  probe
  misc_feature (1)..(25): SEQ ID NO: 1943; WAN024DSY; Start 13; Stop 37
gtttgcgtgcagctctataaacatc

SEQ ID NO: 310169 - DNA, 25 bp, Artificial
  probe
  misc_feature (1)..(25): SEQ ID NO: 1943; WAN024DSY; Start 19; Stop 43
gtgcagctctataaacatcaaggct

SEQ ID NO: 310170 - DNA, 25 bp, Artificial
  probe
  misc_feature (1)..(25): SEQ ID NO: 1943; WAN024DSY; Start 18; Stop 42
cgtgcagctctataaacatcaaggc

SEQ ID NO: 310171 - DNA, 25 bp, Artificial
  probe
  misc_feature (1)..(25): SEQ ID NO: 1943; WAN024DSY; Start 17; Stop 41
gcgtgcagctctataaacatcaagg

SEQ ID NO: 310172 - DNA, 25 bp, Artificial
  probe
  misc_feature (1)..(25): SEQ ID NO: 1943; WAN024DSY; Start 49; Stop 73
cacttcccagtcttattctatttta

SEQ ID NO: 310173 - DNA, 25 bp, Artificial
  probe
  misc_feature (1)..(25): SEQ ID NO: 1943; WAN024DSY; Start 29; Stop 53
ataaacatcaaggctgggagcactt

SEQ ID NO: 310174 - DNA, 25 bp, Artificial
  probe
  misc_feature (1)..(25): SEQ ID NO: 1943; WAN024DSY; Start 50; Stop 74
acttcccagtcttattctattttaa

SEQ ID NO: 310175 - DNA, 25 bp, Artificial
  probe
  misc_feature (1)..(25): SEQ ID NO: 1943; WAN024DSY; Start 30; Stop 54
taaacatcaaggctgggagcacttc

SEQ ID NO: 310176 - DNA, 25 bp, Artificial
  probe
  misc_feature (1)..(25): SEQ ID NO: 1943; WAN024DSY; Start 12; Stop 36
cgtttgcgtgcagctctataaacat

SEQ ID NO: 310177 - DNA, 25 bp, Artificial
  probe
  misc_feature (1)..(25): SEQ ID NO: 1944; WAN024FCS; Start 382; Stop 406
gataccgagacgattagtgatatgt

SEQ ID NO: 310178 - DNA, 25 bp, Artificial
  probe
  misc_feature (1)..(25): SEQ ID NO: 1944; WAN024FCS; Start 381; Stop 405
cgataccgagacgattagtgatatg

SEQ ID NO: 310179 - DNA, 25 bp, Artificial
  probe
  misc_feature (1)..(25): SEQ ID NO: 1944; WAN024FCS; Start 1190; Stop 1214
gagttctcttggatgatgtggatat

SEQ ID NO: 310180 - DNA, 25 bp, Artificial
  probe
  misc_feature (1)..(25): SEQ ID NO: 1944; WAN024FCS; Start 383; Stop 407
ataccgagacgattagtgatatgtt

SEQ ID NO: 310181 - DNA, 25 bp, Artificial
  probe
  misc_feature (1)..(25): SEQ ID NO: 1944; WAN024FCS; Start 380; Stop 404
acgataccgagacgattagtgatat

SEQ ID NO: 310182 - DNA, 25 bp, Artificial
  probe
  misc_feature (1)..(25): SEQ ID NO: 1944; WAN024FCS; Start 379; Stop 403
aacgataccgagacgattagtgata

SEQ ID NO: 310183 - DNA, 25 bp, Artificial
  probe
  misc_feature (1)..(25): SEQ ID NO: 1944; WAN024FCS; Start 198; Stop 222
ggtctactatggtctctacatccta

SEQ ID NO: 310184 - DNA, 25 bp, Artificial
  probe
  misc_feature (1)..(25): SEQ ID NO: 1944; WAN024FCS; Start 200; Stop 224
tctactatggtctctacatcctaca

SEQ ID NO: 310185 - DNA, 25 bp, Artificial
  probe
  misc_feature (1)..(25): SEQ ID NO: 1944; WAN024FCS; Start 196; Stop 220
ctggtctactatggtctctacatcc

SEQ ID NO: 310186 - DNA, 25 bp, Artificial
  probe
  misc_feature (1)..(25): SEQ ID NO: 1944; WAN024FCS; Start 230; Stop 254
tagttcagtatgtcggcaatcttct

SEQ ID NO: 310187 - DNA, 25 bp, Artificial
  probe
  misc_feature (1)..(25): SEQ ID NO: 1944; WAN024FCS; Start 229; Stop 253
gtagttcagtatgtcggcaatcttc

SEQ ID NO: 310188 - DNA, 25 bp, Artificial
  probe
  misc_feature (1)..(25): SEQ ID NO: 1944; WAN024FCS; Start 199; Stop 223
gtctactatggtctctacatcctac

SEQ ID NO: 310189 - DNA, 25 bp, Artificial
  probe
  misc_feature (1)..(25): SEQ ID NO: 1944; WAN024FCS; Start 197; Stop 221
tggtctactatggtctctacatcct

SEQ ID NO: 310190 - DNA, 25 bp, Artificial
  probe
  misc_feature (1)..(25): SEQ ID NO: 1944; WAN024FCS; Start 195; Stop 219
gctggtctactatggtctctacatc

SEQ ID NO: 310191 - DNA, 25 bp, Artificial
  probe
  misc_feature (1)..(25): SEQ ID NO: 1944; WAN024FCS; Start 201; Stop 225
ctactatggtctctacatcctacaa

SEQ ID NO: 310192 - DNA, 25 bp, Artificial
  probe
  misc_feature (1)..(25): SEQ ID NO: 1944; WAN024FCS; Start 233; Stop 257
ttcagtatgtcggcaatcttctctt

SEQ ID NO: 310193 - DNA, 25 bp, Artificial
  probe
  misc_feature (1)..(25): SEQ ID NO: 1944; WAN024FCS; Start 228; Stop 252
tgtagttcagtatgtcggcaatctt

SEQ ID NO: 310194 - DNA, 25 bp, Artificial
  probe
  misc_feature (1)..(25): SEQ ID NO: 1944; WAN024FCS; Start 1189; Stop 1213
agagttctcttggatgatgtggata

SEQ ID NO: 310195 - DNA, 25 bp, Artificial
  probe
  misc_feature (1)..(25): SEQ ID NO: 1944; WAN024FCS; Start 1693; Stop 1717
ggaggaacctatcacaagatgtata

SEQ ID NO: 310196 - DNA, 25 bp, Artificial
  probe
  misc_feature (1)..(25): SEQ ID NO: 1944; WAN024FCS; Start 194; Stop 218
tgctggtctactatggtctctacat

SEQ ID NO: 310197 - DNA, 25 bp, Artificial
  probe
  misc_feature (1)..(25): SEQ ID NO: 1944; WAN024FCS; Start 193; Stop 217
ttgctggtctactatggtctctaca

SEQ ID NO: 310198 - DNA, 25 bp, Artificial
  probe
  misc_feature (1)..(25): SEQ ID NO: 1944; WAN024FCS; Start 378; Stop 402
caacgataccgagacgattagtgat

SEQ ID NO: 310199 - DNA, 25 bp, Artificial
  probe
  misc_feature (1)..(25): SEQ ID NO: 1944; WAN024FCS; Start 1695; Stop 1719
aggaacctatcacaagatgtatagt

SEQ ID NO: 310200 - DNA, 25 bp, Artificial
  probe
  misc_feature (1)..(25): SEQ ID NO: 1944; WAN024FCS; Start 232; Stop 256
gttcagtatgtcggcaatcttctct

SEQ ID NO: 310201 - DNA, 25 bp, Artificial
  probe
  misc_feature (1)..(25): SEQ ID NO: 1944; WAN024FCS; Start 231; Stop 255
agttcagtatgtcggcaatcttctc

SEQ ID NO: 310202 - DNA, 25 bp, Artificial
  probe
  misc_feature (1)..(25): SEQ ID NO: 1944; WAN024FCS; Start 1694; Stop 1718
gaggaacctatcacaagatgtatag

SEQ ID NO: 310203 - DNA, 25 bp, Artificial
  probe
  misc_feature (1)..(25): SEQ ID NO: 1944; WAN024FCS; Start 1696; Stop 1720
ggaacctatcacaagatgtatagtt

SEQ ID NO: 310204 - DNA, 25 bp, Artificial
  probe
  misc_feature (1)..(25): SEQ ID NO: 1944; WAN024FCS; Start 446; Stop 470
tctttctgacaaccctttataccat

SEQ ID NO: 310205 - DNA, 25 bp, Artificial
  probe
  misc_feature (1)..(25): SEQ ID NO: 1944; WAN024FCS; Start 445; Stop 469
atctttctgacaaccctttatacca

SEQ ID NO: 310206 - DNA, 25 bp, Artificial
  probe
  misc_feature (1)..(25): SEQ ID NO: 1944; WAN024FCS; Start 384; Stop 408
taccgagacgattagtgatatgttt

SEQ ID NO: 310207 - DNA, 25 bp, Artificial
  probe
  misc_feature (1)..(25): SEQ ID NO: 1944; WAN024FCS; Start 1624; Stop 1648
aactgcatctatgtcttggataagg

SEQ ID NO: 310208 - DNA, 25 bp, Artificial
  probe
  misc_feature (1)..(25): SEQ ID NO: 1944; WAN024FCS; Start 1128; Stop 1152
aggttcagggaaatcgtctattatc

SEQ ID NO: 310209 - DNA, 25 bp, Artificial
  probe
  misc_feature (1)..(25): SEQ ID NO: 1944; WAN024FCS; Start 1127; Stop 1151
caggttcagggaaatcgtctattat

SEQ ID NO: 310210 - DNA, 25 bp, Artificial
  probe
  misc_feature (1)..(25): SEQ ID NO: 1945; WAN024D3D; Start 647; Stop 671
gcttgcctattactaccaatatctc

SEQ ID NO: 310211 - DNA, 25 bp, Artificial
  probe
  misc_feature (1)..(25): SEQ ID NO: 1945; WAN024D3D; Start 1119; Stop 1143
agaaggtatagaagttggagtatca

SEQ ID NO: 310212 - DNA, 25 bp, Artificial
  probe
  misc_feature (1)..(25): SEQ ID NO: 1945; WAN024D3D; Start 861; Stop 885
tatgacgacgattattagttccatc

SEQ ID NO: 310213 - DNA, 25 bp, Artificial
  probe
  misc_feature (1)..(25): SEQ ID NO: 1945; WAN024D3D; Start 860; Stop 884
ttatgacgacgattattagttccat

SEQ ID NO: 310214 - DNA, 25 bp, Artificial
  probe
  misc_feature (1)..(25): SEQ ID NO: 1945; WAN024D3D; Start 646; Stop 670
ggcttgcctattactaccaatatct

SEQ ID NO: 310215 - DNA, 25 bp, Artificial
  probe
  misc_feature (1)..(25): SEQ ID NO: 1945; WAN024D3D; Start 552; Stop 576
taacaaggttgtagaagtcaatgga

SEQ ID NO: 310216 - DNA, 25 bp, Artificial
  probe
  misc_feature (1)..(25): SEQ ID NO: 1945; WAN024D3D; Start 554; Stop 578
acaaggttgtagaagtcaatggatt

SEQ ID NO: 310217 - DNA, 25 bp, Artificial
  probe
  misc_feature (1)..(25): SEQ ID NO: 1945; WAN024D3D; Start 553; Stop 577
aacaaggttgtagaagtcaatggat

SEQ ID NO: 310218 - DNA, 25 bp, Artificial
  probe
  misc_feature (1)..(25): SEQ ID NO: 1945; WAN024D3D; Start 545; Stop 569
aggctattaacaaggttgtagaagt

SEQ ID NO: 310219 - DNA, 25 bp, Artificial
  probe
  misc_feature (1)..(25): SEQ ID NO: 1945; WAN024D3D; Start 546; Stop 570
ggctattaacaaggttgtagaagtc

SEQ ID NO: 310220 - DNA, 25 bp, Artificial
  probe
  misc_feature (1)..(25): SEQ ID NO: 1945; WAN024D3D; Start 543; Stop 567
agaggctattaacaaggttgtagaa

SEQ ID NO: 310221 - DNA, 25 bp, Artificial
  probe
  misc_feature (1)..(25): SEQ ID NO: 1945; WAN024D3D; Start 542; Stop 566
aagaggctattaacaaggttgtaga

SEQ ID NO: 310222 - DNA, 25 bp, Artificial
  probe
  misc_feature (1)..(25): SEQ ID NO: 1945; WAN024D3D; Start 501; Stop 525
gctagatgaggaattgtccattagt

SEQ ID NO: 310223 - DNA, 25 bp, Artificial
  probe
  misc_feature (1)..(25): SEQ ID NO: 1945; WAN024D3D; Start 500; Stop 524
tgctagatgaggaattgtccattag

SEQ ID NO: 310224 - DNA, 25 bp, Artificial
  probe
  misc_feature (1)..(25): SEQ ID NO: 1945; WAN024D3D; Start 499; Stop 523
ttgctagatgaggaattgtccatta

SEQ ID NO: 310225 - DNA, 25 bp, Artificial
  probe
  misc_feature (1)..(25): SEQ ID NO: 1945; WAN024D3D; Start 551; Stop 575
ttaacaaggttgtagaagtcaatgg

SEQ ID NO: 310226 - DNA, 25 bp, Artificial
  probe
  misc_feature (1)..(25): SEQ ID NO: 1945; WAN024D3D; Start 544; Stop 568
gaggctattaacaaggttgtagaag

SEQ ID NO: 310227 - DNA, 25 bp, Artificial
  probe
  misc_feature (1)..(25): SEQ ID NO: 1945; WAN024D3D; Start 417; Stop 441
ttacatggacgctgttaagaatgaa

SEQ ID NO: 310228 - DNA, 25 bp, Artificial
  probe
  misc_feature (1)..(25): SEQ ID NO: 1945; WAN024D3D; Start 332; Stop 356
actatgtaaccaattcaacgaatgc

SEQ ID NO: 310229 - DNA, 25 bp, Artificial
  probe
  misc_feature (1)..(25): SEQ ID NO: 1945; WAN024D3D; Start 547; Stop 571
gctattaacaaggttgtagaagtca

SEQ ID NO: 310230 - DNA, 25 bp, Artificial
  probe
  misc_feature (1)..(25): SEQ ID NO: 1945; WAN024D3D; Start 414; Stop 438
aacttacatggacgctgttaagaat

SEQ ID NO: 310231 - DNA, 25 bp, Artificial
  probe
  misc_feature (1)..(25): SEQ ID NO: 1945; WAN024D3D; Start 1120; Stop 1144
gaaggtatagaagttggagtatcaa

SEQ ID NO: 310232 - DNA, 25 bp, Artificial
  probe
  misc_feature (1)..(25): SEQ ID NO: 1945; WAN024D3D; Start 1041; Stop 1065
cttgttaggtggcttaattggcttg

SEQ ID NO: 310233 - DNA, 25 bp, Artificial
  probe
  misc_feature (1)..(25): SEQ ID NO: 1945; WAN024D3D; Start 333; Stop 357
ctatgtaaccaattcaacgaatgcc

SEQ ID NO: 310234 - DNA, 25 bp, Artificial
  probe
  misc_feature (1)..(25): SEQ ID NO: 1945; WAN024D3D; Start 121; Stop 145
tccctatctcgtcaagtcaataaag

SEQ ID NO: 310235 - DNA, 25 bp, Artificial
  probe
  misc_feature (1)..(25): SEQ ID NO: 1945; WAN024D3D; Start 76; Stop 100
attatcggtgtttcatcagttgttg

SEQ ID NO: 310236 - DNA, 25 bp, Artificial
  probe
  misc_feature (1)..(25): SEQ ID NO: 1945; WAN024D3D; Start 45; Stop 69
gatgcgttctttgcttactatgatt

SEQ ID NO: 310237 - DNA, 25 bp, Artificial
  probe
  misc_feature (1)..(25): SEQ ID NO: 1945; WAN024D3D; Start 416; Stop 440
cttacatggacgctgttaagaatga

SEQ ID NO: 310238 - DNA, 25 bp, Artificial
  probe
  misc_feature (1)..(25): SEQ ID NO: 1945; WAN024D3D; Start 46; Stop 70
atgcgttctttgcttactatgattg

SEQ ID NO: 310239 - DNA, 25 bp, Artificial
  probe
  misc_feature (1)..(25): SEQ ID NO: 1945; WAN024D3D; Start 462; Stop 486
gagagagcaagatttcaaagagttt

SEQ ID NO: 310240 - DNA, 25 bp, Artificial
  probe
  misc_feature (1)..(25): SEQ ID NO: 1945; WAN024D3D; Start 395; Stop 419
atttgacaggtggaaacagaactta

SEQ ID NO: 310241 - DNA, 25 bp, Artificial
  probe
  misc_feature (1)..(25): SEQ ID NO: 1945; WAN024D3D; Start 120; Stop 144
ttccctatctcgtcaagtcaataaa

SEQ ID NO: 310242 - DNA, 25 bp, Artificial
  probe
  misc_feature (1)..(25): SEQ ID NO: 1945; WAN024D3D; Start 69; Stop 93
tgggattattatcggtgtttcatca

SEQ ID NO: 310243 - DNA, 25 bp, Artificial
  probe
  misc_feature (1)..(25): SEQ ID NO: 1946; WAN024CW5; Start 1066; Stop 1090
cctattggatggttagttggtgatt

SEQ ID NO: 310244 - DNA, 25 bp, Artificial
  probe
  misc_feature (1)..(25): SEQ ID NO: 1946; WAN024CW5; Start 602; Stop 626
tacttatgcttcctggtgtgttctc

SEQ ID NO: 310245 - DNA, 25 bp, Artificial
  probe
  misc_feature (1)..(25): SEQ ID NO: 1946; WAN024CW5; Start 58; Stop 82
ttctgttacttgttctggactctcg

SEQ ID NO: 310246 - DNA, 25 bp, Artificial
  probe
  misc_feature (1)..(25): SEQ ID NO: 1946; WAN024CW5; Start 567; Stop 591
ggcagctagttcaggaataatagat

SEQ ID NO: 310247 - DNA, 25 bp, Artificial
  probe
  misc_feature (1)..(25): SEQ ID NO: 1946; WAN024CW5; Start 565; Stop 589
gaggcagctagttcaggaataatag

SEQ ID NO: 310248 - DNA, 25 bp, Artificial
  probe
  misc_feature (1)..(25): SEQ ID NO: 1946; WAN024CW5; Start 62; Stop 86
gttacttgttctggactctcgataa

SEQ ID NO: 310249 - DNA, 25 bp, Artificial
  probe
  misc_feature (1)..(25): SEQ ID NO: 1946; WAN024CW5; Start 566; Stop 590
aggcagctagttcaggaataataga

SEQ ID NO: 310250 - DNA, 25 bp, Artificial
  probe
  misc_feature (1)..(25): SEQ ID NO: 1946; WAN024CW5; Start 564; Stop 588
agaggcagctagttcaggaataata

SEQ ID NO: 310251 - DNA, 25 bp, Artificial
  probe
  misc_feature (1)..(25): SEQ ID NO: 1946; WAN024CW5; Start 65; Stop 89
acttgttctggactctcgataattg

SEQ ID NO: 310252 - DNA, 25 bp, Artificial
  probe
  misc_feature (1)..(25): SEQ ID NO: 1946; WAN024CW5; Start 568; Stop 592
gcagctagttcaggaataatagatg

SEQ ID NO: 310253 - DNA, 25 bp, Artificial
  probe
  misc_feature (1)..(25): SEQ ID NO: 1946; WAN024CW5; Start 64; Stop 88
tacttgttctggactctcgataatt

SEQ ID NO: 310254 - DNA, 25 bp, Artificial
  probe
  misc_feature (1)..(25): SEQ ID NO: 1946; WAN024CW5; Start 63; Stop 87
ttacttgttctggactctcgataat

SEQ ID NO: 310255 - DNA, 25 bp, Artificial
  probe
  misc_feature (1)..(25): SEQ ID NO: 1946; WAN024CW5; Start 74; Stop 98
ggactctcgataattggaataatgg

SEQ ID NO: 310256 - DNA, 25 bp, Artificial
  probe
  misc_feature (1)..(25): SEQ ID NO: 1946; WAN024CW5; Start 71; Stop 95
tctggactctcgataattggaataa

SEQ ID NO: 310257 - DNA, 25 bp, Artificial
  probe
  misc_feature (1)..(25): SEQ ID NO: 1946; WAN024CW5; Start 69; Stop 93
gttctggactctcgataattggaat

SEQ ID NO: 310258 - DNA, 25 bp, Artificial
  probe
  misc_feature (1)..(25): SEQ ID NO: 1946; WAN024CW5; Start 61; Stop 85
tgttacttgttctggactctcgata

SEQ ID NO: 310259 - DNA, 25 bp, Artificial
  probe
  misc_feature (1)..(25): SEQ ID NO: 1946; WAN024CW5; Start 1065; Stop 1089
tcctattggatggttagttggtgat

SEQ ID NO: 310260 - DNA, 25 bp, Artificial
  probe
  misc_feature (1)..(25): SEQ ID NO: 1946; WAN024CW5; Start 66; Stop 90
cttgttctggactctcgataattgg

SEQ ID NO: 310261 - DNA, 25 bp, Artificial
  probe
  misc_feature (1)..(25): SEQ ID NO: 1946; WAN024CW5; Start 70; Stop 94
ttctggactctcgataattggaata

SEQ ID NO: 310262 - DNA, 25 bp, Artificial
  probe
  misc_feature (1)..(25): SEQ ID NO: 1946; WAN024CW5; Start 1064; Stop 1088
ttcctattggatggttagttggtga

SEQ ID NO: 310263 - DNA, 25 bp, Artificial
  probe
  misc_feature (1)..(25): SEQ ID NO: 1946; WAN024CW5; Start 1035; Stop 1059
gacatttctacgcactatcctatca

SEQ ID NO: 310264 - DNA, 25 bp, Artificial
  probe
  misc_feature (1)..(25): SEQ ID NO: 1946; WAN024CW5; Start 1034; Stop 1058
tgacatttctacgcactatcctatc

SEQ ID NO: 310265 - DNA, 25 bp, Artificial
  probe
  misc_feature (1)..(25): SEQ ID NO: 1946; WAN024CW5; Start 51; Stop 75
atttgctttctgttacttgttctgg

SEQ ID NO: 310266 - DNA, 25 bp, Artificial
  probe
  misc_feature (1)..(25): SEQ ID NO: 1946; WAN024CW5; Start 1036; Stop 1060
acatttctacgcactatcctatcaa

SEQ ID NO: 310267 - DNA, 25 bp, Artificial
  probe
  misc_feature (1)..(25): SEQ ID NO: 1946; WAN024CW5; Start 57; Stop 81
tttctgttacttgttctggactctc

SEQ ID NO: 310268 - DNA, 25 bp, Artificial
  probe
  misc_feature (1)..(25): SEQ ID NO: 1946; WAN024CW5; Start 56; Stop 80
ctttctgttacttgttctggactct

SEQ ID NO: 310269 - DNA, 25 bp, Artificial
  probe
  misc_feature (1)..(25): SEQ ID NO: 1946; WAN024CW5; Start 1032; Stop 1056
gatgacatttctacgcactatccta

SEQ ID NO: 310270 - DNA, 25 bp, Artificial
  probe
  misc_feature (1)..(25): SEQ ID NO: 1946; WAN024CW5; Start 474; Stop 498
tttaacaggagtgggctttatttct

SEQ ID NO: 310271 - DNA, 25 bp, Artificial
  probe
  misc_feature (1)..(25): SEQ ID NO: 1946; WAN024CW5; Start 475; Stop 499
ttaacaggagtgggctttatttcta

SEQ ID NO: 310272 - DNA, 25 bp, Artificial
  probe
  misc_feature (1)..(25): SEQ ID NO: 1946; WAN024CW5; Start 1033; Stop 1057
atgacatttctacgcactatcctat

SEQ ID NO: 310273 - DNA, 25 bp, Artificial
  probe
  misc_feature (1)..(25): SEQ ID NO: 1946; WAN024CW5; Start 75; Stop 99
gactctcgataattggaataatggt

SEQ ID NO: 310274 - DNA, 25 bp, Artificial
  probe
  misc_feature (1)..(25): SEQ ID NO: 1946; WAN024CW5; Start 73; Stop 97
tggactctcgataattggaataatg

SEQ ID NO: 310275 - DNA, 25 bp, Artificial
  probe
  misc_feature (1)..(25): SEQ ID NO: 1946; WAN024CW5; Start 67; Stop 91
ttgttctggactctcgataattgga

SEQ ID NO: 310276 - DNA, 25 bp, Artificial
  probe
  misc_feature (1)..(25): SEQ ID NO: 1947; WAN024F3Q; Start 192; Stop 216
ccttctgatagatggtatgcttaca

SEQ ID NO: 310277 - DNA, 25 bp, Artificial
  probe
  misc_feature (1)..(25): SEQ ID NO: 1947; WAN024F3Q; Start 191; Stop 215
tccttctgatagatggtatgcttac

SEQ ID NO: 310278 - DNA, 25 bp, Artificial
  probe
  misc_feature (1)..(25): SEQ ID NO: 1947; WAN024F3Q; Start 190; Stop 214
atccttctgatagatggtatgctta

SEQ ID NO: 310279 - DNA, 25 bp, Artificial
  probe
  misc_feature (1)..(25): SEQ ID NO: 1947; WAN024F3Q; Start 189; Stop 213
gatccttctgatagatggtatgctt

SEQ ID NO: 310280 - DNA, 25 bp, Artificial
  probe
  misc_feature (1)..(25): SEQ ID NO: 1947; WAN024F3Q; Start 188; Stop 212
agatccttctgatagatggtatgct

SEQ ID NO: 310281 - DNA, 25 bp, Artificial
  probe
  misc_feature (1)..(25): SEQ ID NO: 1947; WAN024F3Q; Start 193; Stop 217
cttctgatagatggtatgcttacag

SEQ ID NO: 310282 - DNA, 25 bp, Artificial
  probe
  misc_feature (1)..(25): SEQ ID NO: 1947; WAN024F3Q; Start 70; Stop 94
gctttcaatccctgtaaacaattct

SEQ ID NO: 310283 - DNA, 25 bp, Artificial
  probe
  misc_feature (1)..(25): SEQ ID NO: 1947; WAN024F3Q; Start 69; Stop 93
tgctttcaatccctgtaaacaattc

SEQ ID NO: 310284 - DNA, 25 bp, Artificial
  probe
  misc_feature (1)..(25): SEQ ID NO: 1947; WAN024F3Q; Start 98; Stop 122
aaggttcccatatcaatcgtcaaag

SEQ ID NO: 310285 - DNA, 25 bp, Artificial
  probe
  misc_feature (1)..(25): SEQ ID NO: 1947; WAN024F3Q; Start 97; Stop 121
gaaggttcccatatcaatcgtcaaa

SEQ ID NO: 310286 - DNA, 25 bp, Artificial
  probe
  misc_feature (1)..(25): SEQ ID NO: 1947; WAN024F3Q; Start 83; Stop 107
gtaaacaattctttgaaggttccca

SEQ ID NO: 310287 - DNA, 25 bp, Artificial
  probe
  misc_feature (1)..(25): SEQ ID NO: 1947; WAN024F3Q; Start 82; Stop 106
tgtaaacaattctttgaaggttccc

SEQ ID NO: 310288 - DNA, 25 bp, Artificial
  probe
  misc_feature (1)..(25): SEQ ID NO: 1947; WAN024F3Q; Start 68; Stop 92
ttgctttcaatccctgtaaacaatt

SEQ ID NO: 310289 - DNA, 25 bp, Artificial
  probe
  misc_feature (1)..(25): SEQ ID NO: 1947; WAN024F3Q; Start 67; Stop 91
cttgctttcaatccctgtaaacaat

SEQ ID NO: 310290 - DNA, 25 bp, Artificial
  probe
  misc_feature (1)..(25): SEQ ID NO: 1947; WAN024F3Q; Start 194; Stop 218
ttctgatagatggtatgcttacagc

SEQ ID NO: 310291 - DNA, 25 bp, Artificial
  probe
  misc_feature (1)..(25): SEQ ID NO: 1947; WAN024F3Q; Start 87; Stop 111
acaattctttgaaggttcccatatc

SEQ ID NO: 310292 - DNA, 25 bp, Artificial
  probe
  misc_feature (1)..(25): SEQ ID NO: 1947; WAN024F3Q; Start 88; Stop 112
caattctttgaaggttcccatatca

SEQ ID NO: 310293 - DNA, 25 bp, Artificial
  probe
  misc_feature (1)..(25): SEQ ID NO: 1947; WAN024F3Q; Start 85; Stop 109
aaacaattctttgaaggttcccata

SEQ ID NO: 310294 - DNA, 25 bp, Artificial
  probe
  misc_feature (1)..(25): SEQ ID NO: 1947; WAN024F3Q; Start 84; Stop 108
taaacaattctttgaaggttcccat

SEQ ID NO: 310295 - DNA, 25 bp, Artificial
  probe
  misc_feature (1)..(25): SEQ ID NO: 1947; WAN024F3Q; Start 86; Stop 110
aacaattctttgaaggttcccatat

SEQ ID NO: 310296 - DNA, 25 bp, Artificial
  probe
  misc_feature (1)..(25): SEQ ID NO: 1947; WAN024F3Q; Start 81; Stop 105
ctgtaaacaattctttgaaggttcc

SEQ ID NO: 310297 - DNA, 25 bp, Artificial
  probe
  misc_feature (1)..(25): SEQ ID NO: 1947; WAN024F3Q; Start 64; Stop 88
atccttgctttcaatccctgtaaac

SEQ ID NO: 310298 - DNA, 25 bp, Artificial
  probe
  misc_feature (1)..(25): SEQ ID NO: 1947; WAN024F3Q; Start 71; Stop 95
ctttcaatccctgtaaacaattctt

SEQ ID NO: 310299 - DNA, 25 bp, Artificial
  probe
  misc_feature (1)..(25): SEQ ID NO: 1947; WAN024F3Q; Start 79; Stop 103
ccctgtaaacaattctttgaaggtt

SEQ ID NO: 310300 - DNA, 25 bp, Artificial
  probe
  misc_feature (1)..(25): SEQ ID NO: 1947; WAN024F3Q; Start 196; Stop 220
ctgatagatggtatgcttacagcct

SEQ ID NO: 310301 - DNA, 25 bp, Artificial
  probe
  misc_feature (1)..(25): SEQ ID NO: 1947; WAN024F3Q; Start 195; Stop 219
tctgatagatggtatgcttacagcc

SEQ ID NO: 310302 - DNA, 25 bp, Artificial
  probe
  misc_feature (1)..(25): SEQ ID NO: 1947; WAN024F3Q; Start 78; Stop 102
tccctgtaaacaattctttgaaggt

SEQ ID NO: 310303 - DNA, 25 bp, Artificial
  probe
  misc_feature (1)..(25): SEQ ID NO: 1947; WAN024F3Q; Start 133; Stop 157
ttgggcagaaatacgaaaggtatag

SEQ ID NO: 310304 - DNA, 25 bp, Artificial
  probe
  misc_feature (1)..(25): SEQ ID NO: 1947; WAN024F3Q; Start 132; Stop 156
cttgggcagaaatacgaaaggtata

SEQ ID NO: 310305 - DNA, 25 bp, Artificial
  probe
  misc_feature (1)..(25): SEQ ID NO: 1947; WAN024F3Q; Start 77; Stop 101
atccctgtaaacaattctttgaagg

SEQ ID NO: 310306 - DNA, 25 bp, Artificial
  probe
  misc_feature (1)..(25): SEQ ID NO: 1947; WAN024F3Q; Start 75; Stop 99
caatccctgtaaacaattctttgaa

SEQ ID NO: 310307 - DNA, 25 bp, Artificial
  probe
  misc_feature (1)..(25): SEQ ID NO: 1947; WAN024F3Q; Start 73; Stop 97
ttcaatccctgtaaacaattctttg

SEQ ID NO: 310308 - DNA, 25 bp, Artificial
  probe
  misc_feature (1)..(25): SEQ ID NO: 1947; WAN024F3Q; Start 63; Stop 87
gatccttgctttcaatccctgtaaa

SEQ ID NO: 310309 - DNA, 25 bp, Artificial
  probe
  misc_feature (1)..(25): SEQ ID NO: 1948; WAN024D45; Start 30; Stop 54
cttctggattctcattattcttgcc

SEQ ID NO: 310310 - DNA, 25 bp, Artificial
  probe
  misc_feature (1)..(25): SEQ ID NO: 1948; WAN024D45; Start 362; Stop 386
aaggttacttgaagacactgatgaa

SEQ ID NO: 310311 - DNA, 25 bp, Artificial
  probe
  misc_feature (1)..(25): SEQ ID NO: 1948; WAN024D45; Start 363; Stop 387
aggttacttgaagacactgatgaag

SEQ ID NO: 310312 - DNA, 25 bp, Artificial
  probe
  misc_feature (1)..(25): SEQ ID NO: 1948; WAN024D45; Start 29; Stop 53
tcttctggattctcattattcttgc

SEQ ID NO: 310313 - DNA, 25 bp, Artificial
  probe
  misc_feature (1)..(25): SEQ ID NO: 1948; WAN024D45; Start 36; Stop 60
gattctcattattcttgccatcgga

SEQ ID NO: 310314 - DNA, 25 bp, Artificial
  probe
  misc_feature (1)..(25): SEQ ID NO: 1948; WAN024D45; Start 519; Stop 543
tcaacatctcaacacttccatccta

SEQ ID NO: 310315 - DNA, 25 bp, Artificial
  probe
  misc_feature (1)..(25): SEQ ID NO: 1948; WAN024D45; Start 27; Stop 51
gctcttctggattctcattattctt

SEQ ID NO: 310316 - DNA, 25 bp, Artificial
  probe
  misc_feature (1)..(25): SEQ ID NO: 1948; WAN024D45; Start 366; Stop 390
ttacttgaagacactgatgaagcaa

SEQ ID NO: 310317 - DNA, 25 bp, Artificial
  probe
  misc_feature (1)..(25): SEQ ID NO: 1948; WAN024D45; Start 365; Stop 389
gttacttgaagacactgatgaagca

SEQ ID NO: 310318 - DNA, 25 bp, Artificial
  probe
  misc_feature (1)..(25): SEQ ID NO: 1948; WAN024D45; Start 520; Stop 544
caacatctcaacacttccatcctag

SEQ ID NO: 310319 - DNA, 25 bp, Artificial
  probe
  misc_feature (1)..(25): SEQ ID NO: 1948; WAN024D45; Start 315; Stop 339
attcctagtcttacttcttgtccag

SEQ ID NO: 310320 - DNA, 25 bp, Artificial
  probe
  misc_feature (1)..(25): SEQ ID NO: 1948; WAN024D45; Start 35; Stop 59
ggattctcattattcttgccatcgg

SEQ ID NO: 310321 - DNA, 25 bp, Artificial
  probe
  misc_feature (1)..(25): SEQ ID NO: 1948; WAN024D45; Start 316; Stop 340
ttcctagtcttacttcttgtccagt

SEQ ID NO: 310322 - DNA, 25 bp, Artificial
  probe
  misc_feature (1)..(25): SEQ ID NO: 1948; WAN024D45; Start 37; Stop 61
attctcattattcttgccatcggag

SEQ ID NO: 310323 - DNA, 25 bp, Artificial
  probe
  misc_feature (1)..(25): SEQ ID NO: 1948; WAN024D45; Start 364; Stop 388
ggttacttgaagacactgatgaagc

SEQ ID NO: 310324 - DNA, 25 bp, Artificial
  probe
  misc_feature (1)..(25): SEQ ID NO: 1948; WAN024D45; Start 314; Stop 338
aattcctagtcttacttcttgtcca

SEQ ID NO: 310325 - DNA, 25 bp, Artificial
  probe
  misc_feature (1)..(25): SEQ ID NO: 1948; WAN024D45; Start 317; Stop 341
tcctagtcttacttcttgtccagtc

SEQ ID NO: 310326 - DNA, 25 bp, Artificial
  probe
  misc_feature (1)..(25): SEQ ID NO: 1948; WAN024D45; Start 518; Stop 542
ttcaacatctcaacacttccatcct

SEQ ID NO: 310327 - DNA, 25 bp, Artificial
  probe
  misc_feature (1)..(25): SEQ ID NO: 1948; WAN024D45; Start 26; Stop 50
agctcttctggattctcattattct

SEQ ID NO: 310328 - DNA, 25 bp, Artificial
  probe
  misc_feature (1)..(25): SEQ ID NO: 1948; WAN024D45; Start 318; Stop 342
cctagtcttacttcttgtccagtcc

SEQ ID NO: 310329 - DNA, 25 bp, Artificial
  probe
  misc_feature (1)..(25): SEQ ID NO: 1948; WAN024D45; Start 32; Stop 56
tctggattctcattattcttgccat

SEQ ID NO: 310330 - DNA, 25 bp, Artificial
  probe
  misc_feature (1)..(25): SEQ ID NO: 1948; WAN024D45; Start 33; Stop 57
ctggattctcattattcttgccatc

SEQ ID NO: 310331 - DNA, 25 bp, Artificial
  probe
  misc_feature (1)..(25): SEQ ID NO: 1948; WAN024D45; Start 31; Stop 55
ttctggattctcattattcttgcca

SEQ ID NO: 310332 - DNA, 25 bp, Artificial
  probe
  misc_feature (1)..(25): SEQ ID NO: 1948; WAN024D45; Start 24; Stop 48
caagctcttctggattctcattatt

SEQ ID NO: 310333 - DNA, 25 bp, Artificial
  probe
  misc_feature (1)..(25): SEQ ID NO: 1948; WAN024D45; Start 28; Stop 52
ctcttctggattctcattattcttg

SEQ ID NO: 310334 - DNA, 25 bp, Artificial
  probe
  misc_feature (1)..(25): SEQ ID NO: 1948; WAN024D45; Start 25; Stop 49
aagctcttctggattctcattattc

SEQ ID NO: 310335 - DNA, 25 bp, Artificial
  probe
  misc_feature (1)..(25): SEQ ID NO: 1948; WAN024D45; Start 908; Stop 932
tgggtggcttcttattctttatctt

SEQ ID NO: 310336 - DNA, 25 bp, Artificial
  probe
  misc_feature (1)..(25): SEQ ID NO: 1948; WAN024D45; Start 521; Stop 545
aacatctcaacacttccatcctagc

SEQ ID NO: 310337 - DNA, 25 bp, Artificial
  probe
  misc_feature (1)..(25): SEQ ID NO: 1948; WAN024D45; Start 516; Stop 540
ctttcaacatctcaacacttccatc

SEQ ID NO: 310338 - DNA, 25 bp, Artificial
  probe
  misc_feature (1)..(25): SEQ ID NO: 1948; WAN024D45; Start 907; Stop 931
gtgggtggcttcttattctttatct

SEQ ID NO: 310339 - DNA, 25 bp, Artificial
  probe
  misc_feature (1)..(25): SEQ ID NO: 1948; WAN024D45; Start 34; Stop 58
tggattctcattattcttgccatcg

SEQ ID NO: 310340 - DNA, 25 bp, Artificial
  probe
  misc_feature (1)..(25): SEQ ID NO: 1948; WAN024D45; Start 227; Stop 251
gaattgaatccttctacgtcctact

SEQ ID NO: 310341 - DNA, 25 bp, Artificial
  probe
  misc_feature (1)..(25): SEQ ID NO: 1948; WAN024D45; Start 906; Stop 930
tgtgggtggcttcttattctttatc

SEQ ID NO: 310342 - DNA, 25 bp, Artificial
  probe
  misc_feature (1)..(25): SEQ ID NO: 1949; WAN024F2B; Start 218; Stop 242
ttaatggactggacaagttgttctc

SEQ ID NO: 310343 - DNA, 25 bp, Artificial
  probe
  misc_feature (1)..(25): SEQ ID NO: 1949; WAN024F2B; Start 363; Stop 387
gaaatgtaaccaagtccttctcaga

SEQ ID NO: 310344 - DNA, 25 bp, Artificial
  probe
  misc_feature (1)..(25): SEQ ID NO: 1949; WAN024F2B; Start 213; Stop 237
gttctttaatggactggacaagttg

SEQ ID NO: 310345 - DNA, 25 bp, Artificial
  probe
  misc_feature (1)..(25): SEQ ID NO: 1949; WAN024F2B; Start 212; Stop 236
agttctttaatggactggacaagtt

SEQ ID NO: 310346 - DNA, 25 bp, Artificial
  probe
  misc_feature (1)..(25): SEQ ID NO: 1949; WAN024F2B; Start 211; Stop 235
aagttctttaatggactggacaagt

SEQ ID NO: 310347 - DNA, 25 bp, Artificial
  probe
  misc_feature (1)..(25): SEQ ID NO: 1949; WAN024F2B; Start 365; Stop 389
aatgtaaccaagtccttctcagaaa

SEQ ID NO: 310348 - DNA, 25 bp, Artificial
  probe
  misc_feature (1)..(25): SEQ ID NO: 1949; WAN024F2B; Start 364; Stop 388
aaatgtaaccaagtccttctcagaa

SEQ ID NO: 310349 - DNA, 25 bp, Artificial
  probe
  misc_feature (1)..(25): SEQ ID NO: 1949; WAN024F2B; Start 366; Stop 390
atgtaaccaagtccttctcagaaag

SEQ ID NO: 310350 - DNA, 25 bp, Artificial
  probe
  misc_feature (1)..(25): SEQ ID NO: 1949; WAN024F2B; Start 368; Stop 392
gtaaccaagtccttctcagaaagtt

SEQ ID NO: 310351 - DNA, 25 bp, Artificial
  probe
  misc_feature (1)..(25): SEQ ID NO: 1949; WAN024F2B; Start 369; Stop 393
taaccaagtccttctcagaaagttg

SEQ ID NO: 310352 - DNA, 25 bp, Artificial
  probe
  misc_feature (1)..(25): SEQ ID NO: 1949; WAN024F2B; Start 210; Stop 234
taagttctttaatggactggacaag

SEQ ID NO: 310353 - DNA, 25 bp, Artificial
  probe
  misc_feature (1)..(25): SEQ ID NO: 1949; WAN024F2B; Start 132; Stop 156
gattgatttccttgagactgactcc

SEQ ID NO: 310354 - DNA, 25 bp, Artificial
  probe
  misc_feature (1)..(25): SEQ ID NO: 1949; WAN024F2B; Start 367; Stop 391
tgtaaccaagtccttctcagaaagt

SEQ ID NO: 310355 - DNA, 25 bp, Artificial
  probe
  misc_feature (1)..(25): SEQ ID NO: 1949; WAN024F2B; Start 209; Stop 233
ttaagttctttaatggactggacaa

SEQ ID NO: 310356 - DNA, 25 bp, Artificial
  probe
  misc_feature (1)..(25): SEQ ID NO: 1949; WAN024F2B; Start 208; Stop 232
tttaagttctttaatggactggaca

SEQ ID NO: 310357 - DNA, 25 bp, Artificial
  probe
  misc_feature (1)..(25): SEQ ID NO: 1949; WAN024F2B; Start 66; Stop 90
cattgatatccataacttcgcctgc

SEQ ID NO: 310358 - DNA, 25 bp, Artificial
  probe
  misc_feature (1)..(25): SEQ ID NO: 1949; WAN024F2B; Start 65; Stop 89
gcattgatatccataacttcgcctg

SEQ ID NO: 310359 - DNA, 25 bp, Artificial
  probe
  misc_feature (1)..(25): SEQ ID NO: 1949; WAN024F2B; Start 219; Stop 243
taatggactggacaagttgttctcg

SEQ ID NO: 310360 - DNA, 25 bp, Artificial
  probe
  misc_feature (1)..(25): SEQ ID NO: 1949; WAN024F2B; Start 133; Stop 157
attgatttccttgagactgactcca

SEQ ID NO: 310361 - DNA, 25 bp, Artificial
  probe
  misc_feature (1)..(25): SEQ ID NO: 1949; WAN024F2B; Start 216; Stop 240
ctttaatggactggacaagttgttc

SEQ ID NO: 310362 - DNA, 25 bp, Artificial
  probe
  misc_feature (1)..(25): SEQ ID NO: 1949; WAN024F2B; Start 217; Stop 241
tttaatggactggacaagttgttct

SEQ ID NO: 310363 - DNA, 25 bp, Artificial
  probe
  misc_feature (1)..(25): SEQ ID NO: 1949; WAN024F2B; Start 215; Stop 239
tctttaatggactggacaagttgtt

SEQ ID NO: 310364 - DNA, 25 bp, Artificial
  probe
  misc_feature (1)..(25): SEQ ID NO: 1949; WAN024F2B; Start 214; Stop 238
ttctttaatggactggacaagttgt

SEQ ID NO: 310365 - DNA, 25 bp, Artificial
  probe
  misc_feature (1)..(25): SEQ ID NO: 1949; WAN024F2B; Start 27; Stop 51
tacagagggcagaagtgatgttaaa

SEQ ID NO: 310366 - DNA, 25 bp, Artificial
  probe
  misc_feature (1)..(25): SEQ ID NO: 1949; WAN024F2B; Start 67; Stop 91
attgatatccataacttcgcctgca

SEQ ID NO: 310367 - DNA, 25 bp, Artificial
  probe
  misc_feature (1)..(25): SEQ ID NO: 1949; WAN024F2B; Start 131; Stop 155
ggattgatttccttgagactgactc

SEQ ID NO: 310368 - DNA, 25 bp, Artificial
  probe
  misc_feature (1)..(25): SEQ ID NO: 1949; WAN024F2B; Start 370; Stop 394
aaccaagtccttctcagaaagttga

SEQ ID NO: 310369 - DNA, 25 bp, Artificial
  probe
  misc_feature (1)..(25): SEQ ID NO: 1949; WAN024F2B; Start 134; Stop 158
ttgatttccttgagactgactccac

SEQ ID NO: 310370 - DNA, 25 bp, Artificial
  probe
  misc_feature (1)..(25): SEQ ID NO: 1949; WAN024F2B; Start 68; Stop 92
ttgatatccataacttcgcctgcaa

SEQ ID NO: 310371 - DNA, 25 bp, Artificial
  probe
  misc_feature (1)..(25): SEQ ID NO: 1949; WAN024F2B; Start 26; Stop 50
gtacagagggcagaagtgatgttaa

SEQ ID NO: 310372 - DNA, 25 bp, Artificial
  probe
  misc_feature (1)..(25): SEQ ID NO: 1949; WAN024F2B; Start 362; Stop 386
agaaatgtaaccaagtccttctcag

SEQ ID NO: 310373 - DNA, 25 bp, Artificial
  probe
  misc_feature (1)..(25): SEQ ID NO: 1949; WAN024F2B; Start 361; Stop 385
tagaaatgtaaccaagtccttctca

SEQ ID NO: 310374 - DNA, 25 bp, Artificial
  probe
  misc_feature (1)..(25): SEQ ID NO: 1949; WAN024F2B; Start 28; Stop 52
acagagggcagaagtgatgttaaag

SEQ ID NO: 310375 - DNA, 25 bp, Artificial
  probe
  misc_feature (1)..(25): SEQ ID NO: 1950; WAN024CN2; Start 11; Stop 35
caggaatcatcttcaactcatcaac

SEQ ID NO: 310376 - DNA, 25 bp, Artificial
  probe
  misc_feature (1)..(25): SEQ ID NO: 1950; WAN024CN2; Start 14; Stop 38
gaatcatcttcaactcatcaacgac

SEQ ID NO: 310377 - DNA, 25 bp, Artificial
  probe
  misc_feature (1)..(25): SEQ ID NO: 1950; WAN024CN2; Start 15; Stop 39
aatcatcttcaactcatcaacgacc

SEQ ID NO: 310378 - DNA, 25 bp, Artificial
  probe
  misc_feature (1)..(25): SEQ ID NO: 1950; WAN024CN2; Start 13; Stop 37
ggaatcatcttcaactcatcaacga

SEQ ID NO: 310379 - DNA, 25 bp, Artificial
  probe
  misc_feature (1)..(25): SEQ ID NO: 1950; WAN024CN2; Start 12; Stop 36
aggaatcatcttcaactcatcaacg

SEQ ID NO: 310380 - DNA, 25 bp, Artificial
  probe
  misc_feature (1)..(25): SEQ ID NO: 1950; WAN024CN2; Start 10; Stop 34
gcaggaatcatcttcaactcatcaa

SEQ ID NO: 310381 - DNA, 25 bp, Artificial
  probe
  misc_feature (1)..(25): SEQ ID NO: 1950; WAN024CN2; Start 18; Stop 42
catcttcaactcatcaacgaccaat

SEQ ID NO: 310382 - DNA, 25 bp, Artificial
  probe
  misc_feature (1)..(25): SEQ ID NO: 1950; WAN024CN2; Start 19; Stop 43
atcttcaactcatcaacgaccaatg

SEQ ID NO: 310383 - DNA, 25 bp, Artificial
  probe
  misc_feature (1)..(25): SEQ ID NO: 1950; WAN024CN2; Start 16; Stop 40
atcatcttcaactcatcaacgacca

SEQ ID NO: 310384 - DNA, 25 bp, Artificial
  probe
  misc_feature (1)..(25): SEQ ID NO: 1950; WAN024CN2; Start 17; Stop 41
tcatcttcaactcatcaacgaccaa

SEQ ID NO: 310385 - DNA, 25 bp, Artificial
  probe
  misc_feature (1)..(25): SEQ ID NO: 1950; WAN024CN2; Start 7; Stop 31
attgcaggaatcatcttcaactcat

SEQ ID NO: 310386 - DNA, 25 bp, Artificial
  probe
  misc_feature (1)..(25): SEQ ID NO: 1950; WAN024CN2; Start 8; Stop 32
ttgcaggaatcatcttcaactcatc

SEQ ID NO: 310387 - DNA, 25 bp, Artificial
  probe
  misc_feature (1)..(25): SEQ ID NO: 1950; WAN024CN2; Start 20; Stop 44
tcttcaactcatcaacgaccaatgg

SEQ ID NO: 310388 - DNA, 25 bp, Artificial
  probe
  misc_feature (1)..(25): SEQ ID NO: 1950; WAN024CN2; Start 9; Stop 33
tgcaggaatcatcttcaactcatca

SEQ ID NO: 310389 - DNA, 25 bp, Artificial
  probe
  misc_feature (1)..(25): SEQ ID NO: 1950; WAN024CN2; Start 39; Stop 63
caatggtgacaaggtggatttcaat

SEQ ID NO: 310390 - DNA, 25 bp, Artificial
  probe
  misc_feature (1)..(25): SEQ ID NO: 1950; WAN024CN2; Start 40; Stop 64
aatggtgacaaggtggatttcaatc

SEQ ID NO: 310391 - DNA, 25 bp, Artificial
  probe
  misc_feature (1)..(25): SEQ ID NO: 1950; WAN024CN2; Start 6; Stop 30
gattgcaggaatcatcttcaactca

SEQ ID NO: 310392 - DNA, 25 bp, Artificial
  probe
  misc_feature (1)..(25): SEQ ID NO: 1950; WAN024CN2; Start 75; Stop 99
tgttgatttgagaaataactttgct

SEQ ID NO: 310393 - DNA, 25 bp, Artificial
  probe
  misc_feature (1)..(25): SEQ ID NO: 1950; WAN024CN2; Start 5; Stop 29
agattgcaggaatcatcttcaactc

SEQ ID NO: 310394 - DNA, 25 bp, Artificial
  probe
  misc_feature (1)..(25): SEQ ID NO: 1950; WAN024CN2; Start 4; Stop 28
cagattgcaggaatcatcttcaact

SEQ ID NO: 310395 - DNA, 25 bp, Artificial
  probe
  misc_feature (1)..(25): SEQ ID NO: 1950; WAN024CN2; Start 83; Stop 107
tgagaaataactttgctagtctagt

SEQ ID NO: 310396 - DNA, 25 bp, Artificial
  probe
  misc_feature (1)..(25): SEQ ID NO: 1950; WAN024CN2; Start 74; Stop 98
atgttgatttgagaaataactttgc

SEQ ID NO: 310397 - DNA, 25 bp, Artificial
  probe
  misc_feature (1)..(25): SEQ ID NO: 1950; WAN024CN2; Start 78; Stop 102
tgatttgagaaataactttgctagt

SEQ ID NO: 310398 - DNA, 25 bp, Artificial
  probe
  misc_feature (1)..(25): SEQ ID NO: 1950; WAN024CN2; Start 64; Stop 88
cccacagaaaatgttgatttgagaa

SEQ ID NO: 310399 - DNA, 25 bp, Artificial
  probe
  misc_feature (1)..(25): SEQ ID NO: 1950; WAN024CN2; Start 62; Stop 86
atcccacagaaaatgttgatttgag

SEQ ID NO: 310400 - DNA, 25 bp, Artificial
  probe
  misc_feature (1)..(25): SEQ ID NO: 1950; WAN024CN2; Start 82; Stop 106
ttgagaaataactttgctagtctag

SEQ ID NO: 310401 - DNA, 25 bp, Artificial
  probe
  misc_feature (1)..(25): SEQ ID NO: 1950; WAN024CN2; Start 63; Stop 87
tcccacagaaaatgttgatttgaga

SEQ ID NO: 310402 - DNA, 25 bp, Artificial
  probe
  misc_feature (1)..(25): SEQ ID NO: 1950; WAN024CN2; Start 80; Stop 104
atttgagaaataactttgctagtct

SEQ ID NO: 310403 - DNA, 25 bp, Artificial
  probe
  misc_feature (1)..(25): SEQ ID NO: 1950; WAN024CN2; Start 21; Stop 45
cttcaactcatcaacgaccaatggt

SEQ ID NO: 310404 - DNA, 25 bp, Artificial
  probe
  misc_feature (1)..(25): SEQ ID NO: 1950; WAN024CN2; Start 79; Stop 103
gatttgagaaataactttgctagtc

SEQ ID NO: 310405 - DNA, 25 bp, Artificial
  probe
  misc_feature (1)..(25): SEQ ID NO: 1950; WAN024CN2; Start 65; Stop 89
ccacagaaaatgttgatttgagaaa

SEQ ID NO: 310406 - DNA, 25 bp, Artificial
  probe
  misc_feature (1)..(25): SEQ ID NO: 1950; WAN024CN2; Start 76; Stop 100
gttgatttgagaaataactttgcta

SEQ ID NO: 310407 - DNA, 25 bp, Artificial
  probe
  misc_feature (1)..(25): SEQ ID NO: 1950; WAN024CN2; Start 22; Stop 46
ttcaactcatcaacgaccaatggtg

SEQ ID NO: 310408 - DNA, 25 bp, Artificial
  probe
  misc_feature (1)..(25): SEQ ID NO: 1952; WAN024EXR; Start 163; Stop 187
gctacttctggttcttcatacattg

SEQ ID NO: 310409 - DNA, 25 bp, Artificial
  probe
  misc_feature (1)..(25): SEQ ID NO: 1952; WAN024EXR; Start 164; Stop 188
ctacttctggttcttcatacattgg

SEQ ID NO: 310410 - DNA, 25 bp, Artificial
  probe
  misc_feature (1)..(25): SEQ ID NO: 1952; WAN024EXR; Start 161; Stop 185
gagctacttctggttcttcatacat

SEQ ID NO: 310411 - DNA, 25 bp, Artificial
  probe
  misc_feature (1)..(25): SEQ ID NO: 1952; WAN024EXR; Start 162; Stop 186
agctacttctggttcttcatacatt

SEQ ID NO: 310412 - DNA, 25 bp, Artificial
  probe
  misc_feature (1)..(25): SEQ ID NO: 1952; WAN024EXR; Start 165; Stop 189
tacttctggttcttcatacattggg

SEQ ID NO: 310413 - DNA, 25 bp, Artificial
  probe
  misc_feature (1)..(25): SEQ ID NO: 1952; WAN024EXR; Start 160; Stop 184
ggagctacttctggttcttcataca

SEQ ID NO: 310414 - DNA, 25 bp, Artificial
  probe
  misc_feature (1)..(25): SEQ ID NO: 1952; WAN024EXR; Start 159; Stop 183
tggagctacttctggttcttcatac

SEQ ID NO: 310415 - DNA, 25 bp, Artificial
  probe
  misc_feature (1)..(25): SEQ ID NO: 1952; WAN024EXR; Start 76; Stop 100
attgtaacagattcttgcggtgctt

SEQ ID NO: 310416 - DNA, 25 bp, Artificial
  probe
  misc_feature (1)..(25): SEQ ID NO: 1952; WAN024EXR; Start 75; Stop 99
aattgtaacagattcttgcggtgct

SEQ ID NO: 310417 - DNA, 25 bp, Artificial
  probe
  misc_feature (1)..(25): SEQ ID NO: 1952; WAN024EXR; Start 74; Stop 98
aaattgtaacagattcttgcggtgc

SEQ ID NO: 310418 - DNA, 25 bp, Artificial
  probe
  misc_feature (1)..(25): SEQ ID NO: 1952; WAN024EXR; Start 77; Stop 101
ttgtaacagattcttgcggtgcttc

SEQ ID NO: 310419 - DNA, 25 bp, Artificial
  probe
  misc_feature (1)..(25): SEQ ID NO: 1952; WAN024EXR; Start 166; Stop 190
acttctggttcttcatacattgggc

SEQ ID NO: 310420 - DNA, 25 bp, Artificial
  probe
  misc_feature (1)..(25): SEQ ID NO: 1952; WAN024EXR; Start 79; Stop 103
gtaacagattcttgcggtgcttcaa

SEQ ID NO: 310421 - DNA, 25 bp, Artificial
  probe
  misc_feature (1)..(25): SEQ ID NO: 1952; WAN024EXR; Start 72; Stop 96
taaaattgtaacagattcttgcggt

SEQ ID NO: 310422 - DNA, 25 bp, Artificial
  probe
  misc_feature (1)..(25): SEQ ID NO: 1952; WAN024EXR; Start 73; Stop 97
aaaattgtaacagattcttgcggtg

SEQ ID NO: 310423 - DNA, 25 bp, Artificial
  probe
  misc_feature (1)..(25): SEQ ID NO: 1952; WAN024EXR; Start 80; Stop 104
taacagattcttgcggtgcttcaaa

SEQ ID NO: 310424 - DNA, 25 bp, Artificial
  probe
  misc_feature (1)..(25): SEQ ID NO: 1952; WAN024EXR; Start 71; Stop 95
ataaaattgtaacagattcttgcgg

SEQ ID NO: 310425 - DNA, 25 bp, Artificial
  probe
  misc_feature (1)..(25): SEQ ID NO: 1952; WAN024EXR; Start 39; Stop 63
aaggataagatattgttctcagaat

SEQ ID NO: 310426 - DNA, 25 bp, Artificial
  probe
  misc_feature (1)..(25): SEQ ID NO: 1952; WAN024EXR; Start 81; Stop 105
aacagattcttgcggtgcttcaaat

SEQ ID NO: 310427 - DNA, 25 bp, Artificial
  probe
  misc_feature (1)..(25): SEQ ID NO: 1952; WAN024EXR; Start 78; Stop 102
tgtaacagattcttgcggtgcttca

SEQ ID NO: 310428 - DNA, 25 bp, Artificial
  probe
  misc_feature (1)..(25): SEQ ID NO: 1952; WAN024EXR; Start 38; Stop 62
taaggataagatattgttctcagaa

SEQ ID NO: 310429 - DNA, 25 bp, Artificial
  probe
  misc_feature (1)..(25): SEQ ID NO: 1952; WAN024EXR; Start 82; Stop 106
acagattcttgcggtgcttcaaatc

SEQ ID NO: 310430 - DNA, 25 bp, Artificial
  probe
  misc_feature (1)..(25): SEQ ID NO: 1952; WAN024EXR; Start 70; Stop 94
tataaaattgtaacagattcttgcg

SEQ ID NO: 310431 - DNA, 25 bp, Artificial
  probe
  misc_feature (1)..(25): SEQ ID NO: 1952; WAN024EXR; Start 167; Stop 191
cttctggttcttcatacattgggcc

SEQ ID NO: 310432 - DNA, 25 bp, Artificial
  probe
  misc_feature (1)..(25): SEQ ID NO: 1952; WAN024EXR; Start 115; Stop 139
gaatcaacagtttctgtagctggtg

SEQ ID NO: 310433 - DNA, 25 bp, Artificial
  probe
  misc_feature (1)..(25): SEQ ID NO: 1952; WAN024EXR; Start 114; Stop 138
tgaatcaacagtttctgtagctggt

SEQ ID NO: 310434 - DNA, 25 bp, Artificial
  probe
  misc_feature (1)..(25): SEQ ID NO: 1952; WAN024EXR; Start 176; Stop 200
cttcatacattgggccaactggatg

SEQ ID NO: 310435 - DNA, 25 bp, Artificial
  probe
  misc_feature (1)..(25): SEQ ID NO: 1952; WAN024EXR; Start 175; Stop 199
tcttcatacattgggccaactggat

SEQ ID NO: 310436 - DNA, 25 bp, Artificial
  probe
  misc_feature (1)..(25): SEQ ID NO: 1952; WAN024EXR; Start 83; Stop 107
cagattcttgcggtgcttcaaatcc

SEQ ID NO: 310437 - DNA, 25 bp, Artificial
  probe
  misc_feature (1)..(25): SEQ ID NO: 1952; WAN024EXR; Start 117; Stop 141
atcaacagtttctgtagctggtgtt

SEQ ID NO: 310438 - DNA, 25 bp, Artificial
  probe
  misc_feature (1)..(25): SEQ ID NO: 1952; WAN024EXR; Start 116; Stop 140
aatcaacagtttctgtagctggtgt

SEQ ID NO: 310439 - DNA, 25 bp, Artificial
  probe
  misc_feature (1)..(25): SEQ ID NO: 1952; WAN024EXR; Start 173; Stop 197
gttcttcatacattgggccaactgg

SEQ ID NO: 310440 - DNA, 25 bp, Artificial
  probe
  misc_feature (1)..(25): SEQ ID NO: 1952; WAN024EXR; Start 172; Stop 196
ggttcttcatacattgggccaactg

SEQ ID NO: 310441 - DNA, 25 bp, Artificial
  probe
  misc_feature (1)..(25): SEQ ID NO: 1953; WAN024GO7; Start 1953; Stop 1977
gttgacggaagaagatacggatatt

SEQ ID NO: 310442 - DNA, 25 bp, Artificial
  probe
  misc_feature (1)..(25): SEQ ID NO: 1953; WAN024GO7; Start 1954; Stop 1978
ttgacggaagaagatacggatatta

SEQ ID NO: 310443 - DNA, 25 bp, Artificial
  probe
  misc_feature (1)..(25): SEQ ID NO: 1953; WAN024GO7; Start 1955; Stop 1979
tgacggaagaagatacggatattat

SEQ ID NO: 310444 - DNA, 25 bp, Artificial
  probe
  misc_feature (1)..(25): SEQ ID NO: 1953; WAN024GO7; Start 923; Stop 947
cctcagccaatgttatcctcaataa

SEQ ID NO: 310445 - DNA, 25 bp, Artificial
  probe
  misc_feature (1)..(25): SEQ ID NO: 1953; WAN024GO7; Start 1952; Stop 1976
tgttgacggaagaagatacggatat

SEQ ID NO: 310446 - DNA, 25 bp, Artificial
  probe
  misc_feature (1)..(25): SEQ ID NO: 1953; WAN024GO7; Start 1951; Stop 1975
ttgttgacggaagaagatacggata

SEQ ID NO: 310447 - DNA, 25 bp, Artificial
  probe
  misc_feature (1)..(25): SEQ ID NO: 1953; WAN024GO7; Start 2265; Stop 2289
aggtgatgaagacttgatgattatc

SEQ ID NO: 310448 - DNA, 25 bp, Artificial
  probe
  misc_feature (1)..(25): SEQ ID NO: 1953; WAN024GO7; Start 1956; Stop 1980
gacggaagaagatacggatattatt

SEQ ID NO: 310449 - DNA, 25 bp, Artificial
  probe
  misc_feature (1)..(25): SEQ ID NO: 1953; WAN024GO7; Start 708; Stop 732
ttctattgtccttcgttctcgtact

SEQ ID NO: 310450 - DNA, 25 bp, Artificial
  probe
  misc_feature (1)..(25): SEQ ID NO: 1953; WAN024GO7; Start 707; Stop 731
gttctattgtccttcgttctcgtac

SEQ ID NO: 310451 - DNA, 25 bp, Artificial
  probe
  misc_feature (1)..(25): SEQ ID NO: 1953; WAN024GO7; Start 706; Stop 730
ggttctattgtccttcgttctcgta

SEQ ID NO: 310452 - DNA, 25 bp, Artificial
  probe
  misc_feature (1)..(25): SEQ ID NO: 1953; WAN024GO7; Start 1790; Stop 1814
cgattatcaatgttgagtctgaacg

SEQ ID NO: 310453 - DNA, 25 bp, Artificial
  probe
  misc_feature (1)..(25): SEQ ID NO: 1953; WAN024GO7; Start 1791; Stop 1815
gattatcaatgttgagtctgaacgc

SEQ ID NO: 310454 - DNA, 25 bp, Artificial
  probe
  misc_feature (1)..(25): SEQ ID NO: 1953; WAN024GO7; Start 1789; Stop 1813
acgattatcaatgttgagtctgaac

SEQ ID NO: 310455 - DNA, 25 bp, Artificial
  probe
  misc_feature (1)..(25): SEQ ID NO: 1953; WAN024GO7; Start 2264; Stop 2288
aaggtgatgaagacttgatgattat

SEQ ID NO: 310456 - DNA, 25 bp, Artificial
  probe
  misc_feature (1)..(25): SEQ ID NO: 1953; WAN024GO7; Start 1792; Stop 1816
attatcaatgttgagtctgaacgca

SEQ ID NO: 310457 - DNA, 25 bp, Artificial
  probe
  misc_feature (1)..(25): SEQ ID NO: 1953; WAN024GO7; Start 711; Stop 735
tattgtccttcgttctcgtactgaa

SEQ ID NO: 310458 - DNA, 25 bp, Artificial
  probe
  misc_feature (1)..(25): SEQ ID NO: 1953; WAN024GO7; Start 2240; Stop 2264
ctctatcaggtctcttgactgtgaa

SEQ ID NO: 310459 - DNA, 25 bp, Artificial
  probe
  misc_feature (1)..(25): SEQ ID NO: 1953; WAN024GO7; Start 710; Stop 734
ctattgtccttcgttctcgtactga

SEQ ID NO: 310460 - DNA, 25 bp, Artificial
  probe
  misc_feature (1)..(25): SEQ ID NO: 1953; WAN024GO7; Start 709; Stop 733
tctattgtccttcgttctcgtactg

SEQ ID NO: 310461 - DNA, 25 bp, Artificial
  probe
  misc_feature (1)..(25): SEQ ID NO: 1953; WAN024GO7; Start 1783; Stop 1807
attcagacgattatcaatgttgagt

SEQ ID NO: 310462 - DNA, 25 bp, Artificial
  probe
  misc_feature (1)..(25): SEQ ID NO: 1953; WAN024GO7; Start 1788; Stop 1812
gacgattatcaatgttgagtctgaa

SEQ ID NO: 310463 - DNA, 25 bp, Artificial
  probe
  misc_feature (1)..(25): SEQ ID NO: 1953; WAN024GO7; Start 1784; Stop 1808
ttcagacgattatcaatgttgagtc

SEQ ID NO: 310464 - DNA, 25 bp, Artificial
  probe
  misc_feature (1)..(25): SEQ ID NO: 1953; WAN024GO7; Start 922; Stop 946
gcctcagccaatgttatcctcaata

SEQ ID NO: 310465 - DNA, 25 bp, Artificial
  probe
  misc_feature (1)..(25): SEQ ID NO: 1953; WAN024GO7; Start 131; Stop 155
gtcggattctctatggaatgaatga

SEQ ID NO: 310466 - DNA, 25 bp, Artificial
  probe
  misc_feature (1)..(25): SEQ ID NO: 1953; WAN024GO7; Start 132; Stop 156
tcggattctctatggaatgaatgaa

SEQ ID NO: 310467 - DNA, 25 bp, Artificial
  probe
  misc_feature (1)..(25): SEQ ID NO: 1953; WAN024GO7; Start 2092; Stop 2116
gttggtgctagtgtgattacagatc

SEQ ID NO: 310468 - DNA, 25 bp, Artificial
  probe
  misc_feature (1)..(25): SEQ ID NO: 1953; WAN024GO7; Start 1950; Stop 1974
cttgttgacggaagaagatacggat

SEQ ID NO: 310469 - DNA, 25 bp, Artificial
  probe
  misc_feature (1)..(25): SEQ ID NO: 1953; WAN024GO7; Start 1780; Stop 1804
agtattcagacgattatcaatgttg

SEQ ID NO: 310470 - DNA, 25 bp, Artificial
  probe
  misc_feature (1)..(25): SEQ ID NO: 1953; WAN024GO7; Start 133; Stop 157
cggattctctatggaatgaatgaat

SEQ ID NO: 310471 - DNA, 25 bp, Artificial
  probe
  misc_feature (1)..(25): SEQ ID NO: 1953; WAN024GO7; Start 1908; Stop 1932
caaagcactgaatctaaaggatgaa

SEQ ID NO: 310472 - DNA, 25 bp, Artificial
  probe
  misc_feature (1)..(25): SEQ ID NO: 1953; WAN024GO7; Start 1793; Stop 1817
ttatcaatgttgagtctgaacgcag

SEQ ID NO: 310473 - DNA, 25 bp, Artificial
  probe
  misc_feature (1)..(25): SEQ ID NO: 1953; WAN024GO7; Start 146; Stop 170
gaatgaatgaattgggtgttactcc

SEQ ID NO: 310474 - DNA, 25 bp, Artificial
  probe
  misc_feature (1)..(25): SEQ ID NO: 1954; WAN024GE7; Start 82; Stop 106
atatccatcctgtctgtcctcttat

SEQ ID NO: 310475 - DNA, 25 bp, Artificial
  probe
  misc_feature (1)..(25): SEQ ID NO: 1954; WAN024GE7; Start 83; Stop 107
tatccatcctgtctgtcctcttatc

SEQ ID NO: 310476 - DNA, 25 bp, Artificial
  probe
  misc_feature (1)..(25): SEQ ID NO: 1954; WAN024GE7; Start 93; Stop 117
gtctgtcctcttatccatgatgttc

SEQ ID NO: 310477 - DNA, 25 bp, Artificial
  probe
  misc_feature (1)..(25): SEQ ID NO: 1954; WAN024GE7; Start 92; Stop 116
tgtctgtcctcttatccatgatgtt

SEQ ID NO: 310478 - DNA, 25 bp, Artificial
  probe
  misc_feature (1)..(25): SEQ ID NO: 1954; WAN024GE7; Start 91; Stop 115
ctgtctgtcctcttatccatgatgt

SEQ ID NO: 310479 - DNA, 25 bp, Artificial
  probe
  misc_feature (1)..(25): SEQ ID NO: 1954; WAN024GE7; Start 461; Stop 485
tcaatcttgtcactcggatgattaa

SEQ ID NO: 310480 - DNA, 25 bp, Artificial
  probe
  misc_feature (1)..(25): SEQ ID NO: 1954; WAN024GE7; Start 631; Stop 655
cctatttccaaactatccactcact

SEQ ID NO: 310481 - DNA, 25 bp, Artificial
  probe
  misc_feature (1)..(25): SEQ ID NO: 1954; WAN024GE7; Start 84; Stop 108
atccatcctgtctgtcctcttatcc

SEQ ID NO: 310482 - DNA, 25 bp, Artificial
  probe
  misc_feature (1)..(25): SEQ ID NO: 1954; WAN024GE7; Start 404; Stop 428
aactttactaccacatcatcatccc

SEQ ID NO: 310483 - DNA, 25 bp, Artificial
  probe
  misc_feature (1)..(25): SEQ ID NO: 1954; WAN024GE7; Start 214; Stop 238
gtgctactcttcatcgtttactttg

SEQ ID NO: 310484 - DNA, 25 bp, Artificial
  probe
  misc_feature (1)..(25): SEQ ID NO: 1954; WAN024GE7; Start 457; Stop 481
gctatcaatcttgtcactcggatga

SEQ ID NO: 310485 - DNA, 25 bp, Artificial
  probe
  misc_feature (1)..(25): SEQ ID NO: 1954; WAN024GE7; Start 628; Stop 652
taccctatttccaaactatccactc

SEQ ID NO: 310486 - DNA, 25 bp, Artificial
  probe
  misc_feature (1)..(25): SEQ ID NO: 1954; WAN024GE7; Start 627; Stop 651
ctaccctatttccaaactatccact

SEQ ID NO: 310487 - DNA, 25 bp, Artificial
  probe
  misc_feature (1)..(25): SEQ ID NO: 1954; WAN024GE7; Start 403; Stop 427
caactttactaccacatcatcatcc

SEQ ID NO: 310488 - DNA, 25 bp, Artificial
  probe
  misc_feature (1)..(25): SEQ ID NO: 1954; WAN024GE7; Start 340; Stop 364
gctatcacttctctccctaaacatc

SEQ ID NO: 310489 - DNA, 25 bp, Artificial
  probe
  misc_feature (1)..(25): SEQ ID NO: 1954; WAN024GE7; Start 218; Stop 242
tactcttcatcgtttactttggctt

SEQ ID NO: 310490 - DNA, 25 bp, Artificial
  probe
  misc_feature (1)..(25): SEQ ID NO: 1954; WAN024GE7; Start 267; Stop 291
ctcaggtgagacttcagctattatc

SEQ ID NO: 310491 - DNA, 25 bp, Artificial
  probe
  misc_feature (1)..(25): SEQ ID NO: 1954; WAN024GE7; Start 88; Stop 112
atcctgtctgtcctcttatccatga

SEQ ID NO: 310492 - DNA, 25 bp, Artificial
  probe
  misc_feature (1)..(25): SEQ ID NO: 1954; WAN024GE7; Start 637; Stop 661
tccaaactatccactcacttagaaa

SEQ ID NO: 310493 - DNA, 25 bp, Artificial
  probe
  misc_feature (1)..(25): SEQ ID NO: 1954; WAN024GE7; Start 635; Stop 659
tttccaaactatccactcacttaga

SEQ ID NO: 310494 - DNA, 25 bp, Artificial
  probe
  misc_feature (1)..(25): SEQ ID NO: 1954; WAN024GE7; Start 342; Stop 366
tatcacttctctccctaaacatcag

SEQ ID NO: 310495 - DNA, 25 bp, Artificial
  probe
  misc_feature (1)..(25): SEQ ID NO: 1954; WAN024GE7; Start 341; Stop 365
ctatcacttctctccctaaacatca

SEQ ID NO: 310496 - DNA, 25 bp, Artificial
  probe
  misc_feature (1)..(25): SEQ ID NO: 1954; WAN024GE7; Start 217; Stop 241
ctactcttcatcgtttactttggct

SEQ ID NO: 310497 - DNA, 25 bp, Artificial
  probe
  misc_feature (1)..(25): SEQ ID NO: 1954; WAN024GE7; Start 90; Stop 114
cctgtctgtcctcttatccatgatg

SEQ ID NO: 310498 - DNA, 25 bp, Artificial
  probe
  misc_feature (1)..(25): SEQ ID NO: 1954; WAN024GE7; Start 89; Stop 113
tcctgtctgtcctcttatccatgat

SEQ ID NO: 310499 - DNA, 25 bp, Artificial
  probe
  misc_feature (1)..(25): SEQ ID NO: 1954; WAN024GE7; Start 630; Stop 654
ccctatttccaaactatccactcac

SEQ ID NO: 310500 - DNA, 25 bp, Artificial
  probe
  misc_feature (1)..(25): SEQ ID NO: 1954; WAN024GE7; Start 626; Stop 650
gctaccctatttccaaactatccac

SEQ ID NO: 310501 - DNA, 25 bp, Artificial
  probe
  misc_feature (1)..(25): SEQ ID NO: 1954; WAN024GE7; Start 406; Stop 430
ctttactaccacatcatcatcccac

SEQ ID NO: 310502 - DNA, 25 bp, Artificial
  probe
  misc_feature (1)..(25): SEQ ID NO: 1954; WAN024GE7; Start 87; Stop 111
catcctgtctgtcctcttatccatg

SEQ ID NO: 310503 - DNA, 25 bp, Artificial
  probe
  misc_feature (1)..(25): SEQ ID NO: 1954; WAN024GE7; Start 629; Stop 653
accctatttccaaactatccactca

SEQ ID NO: 310504 - DNA, 25 bp, Artificial
  probe
  misc_feature (1)..(25): SEQ ID NO: 1954; WAN024GE7; Start 215; Stop 239
tgctactcttcatcgtttactttgg

SEQ ID NO: 310505 - DNA, 25 bp, Artificial
  probe
  misc_feature (1)..(25): SEQ ID NO: 1954; WAN024GE7; Start 213; Stop 237
ggtgctactcttcatcgtttacttt

SEQ ID NO: 310506 - DNA, 25 bp, Artificial
  probe
  misc_feature (1)..(25): SEQ ID NO: 1954; WAN024GE7; Start 400; Stop 424
gttcaactttactaccacatcatca

SEQ ID NO: 310507 - DNA, 25 bp, Artificial
  probe
  misc_feature (1)..(25): SEQ ID NO: 1955; WAN024C7P; Start 121; Stop 145
cataaccgcacctgttccataacta

SEQ ID NO: 310508 - DNA, 25 bp, Artificial
  probe
  misc_feature (1)..(25): SEQ ID NO: 1955; WAN024C7P; Start 122; Stop 146
ataaccgcacctgttccataactag

SEQ ID NO: 310509 - DNA, 25 bp, Artificial
  probe
  misc_feature (1)..(25): SEQ ID NO: 1955; WAN024C7P; Start 272; Stop 296
ctggcttggtgtttatagtctgcta

SEQ ID NO: 310510 - DNA, 25 bp, Artificial
  probe
  misc_feature (1)..(25): SEQ ID NO: 1955; WAN024C7P; Start 266; Stop 290
ttaaggctggcttggtgtttatagt

SEQ ID NO: 310511 - DNA, 25 bp, Artificial
  probe
  misc_feature (1)..(25): SEQ ID NO: 1955; WAN024C7P; Start 275; Stop 299
gcttggtgtttatagtctgctacag

SEQ ID NO: 310512 - DNA, 25 bp, Artificial
  probe
  misc_feature (1)..(25): SEQ ID NO: 1955; WAN024C7P; Start 273; Stop 297
tggcttggtgtttatagtctgctac

SEQ ID NO: 310513 - DNA, 25 bp, Artificial
  probe
  misc_feature (1)..(25): SEQ ID NO: 1955; WAN024C7P; Start 267; Stop 291
taaggctggcttggtgtttatagtc

SEQ ID NO: 310514 - DNA, 25 bp, Artificial
  probe
  misc_feature (1)..(25): SEQ ID NO: 1955; WAN024C7P; Start 276; Stop 300
cttggtgtttatagtctgctacagc

SEQ ID NO: 310515 - DNA, 25 bp, Artificial
  probe
  misc_feature (1)..(25): SEQ ID NO: 1955; WAN024C7P; Start 284; Stop 308
ttatagtctgctacagcttctgctt

SEQ ID NO: 310516 - DNA, 25 bp, Artificial
  probe
  misc_feature (1)..(25): SEQ ID NO: 1955; WAN024C7P; Start 168; Stop 192
agattggcatttccttaccattgac

SEQ ID NO: 310517 - DNA, 25 bp, Artificial
  probe
  misc_feature (1)..(25): SEQ ID NO: 1955; WAN024C7P; Start 167; Stop 191
cagattggcatttccttaccattga

SEQ ID NO: 310518 - DNA, 25 bp, Artificial
  probe
  misc_feature (1)..(25): SEQ ID NO: 1955; WAN024C7P; Start 281; Stop 305
tgtttatagtctgctacagcttctg

SEQ ID NO: 310519 - DNA, 25 bp, Artificial
  probe
  misc_feature (1)..(25): SEQ ID NO: 1955; WAN024C7P; Start 280; Stop 304
gtgtttatagtctgctacagcttct

SEQ ID NO: 310520 - DNA, 25 bp, Artificial
  probe
  misc_feature (1)..(25): SEQ ID NO: 1955; WAN024C7P; Start 274; Stop 298
ggcttggtgtttatagtctgctaca

SEQ ID NO: 310521 - DNA, 25 bp, Artificial
  probe
  misc_feature (1)..(25): SEQ ID NO: 1955; WAN024C7P; Start 170; Stop 194
attggcatttccttaccattgacag

SEQ ID NO: 310522 - DNA, 25 bp, Artificial
  probe
  misc_feature (1)..(25): SEQ ID NO: 1955; WAN024C7P; Start 169; Stop 193
gattggcatttccttaccattgaca

SEQ ID NO: 310523 - DNA, 25 bp, Artificial
  probe
  misc_feature (1)..(25): SEQ ID NO: 1955; WAN024C7P; Start 30; Stop 54
cttcgacatttccaccttcaagtac

SEQ ID NO: 310524 - DNA, 25 bp, Artificial
  probe
  misc_feature (1)..(25): SEQ ID NO: 1955; WAN024C7P; Start 285; Stop 309
tatagtctgctacagcttctgcttg

SEQ ID NO: 310525 - DNA, 25 bp, Artificial
  probe
  misc_feature (1)..(25): SEQ ID NO: 1955; WAN024C7P; Start 57; Stop 81
cgacgattggaaggtcaaattgttt

SEQ ID NO: 310526 - DNA, 25 bp, Artificial
  probe
  misc_feature (1)..(25): SEQ ID NO: 1955; WAN024C7P; Start 29; Stop 53
tcttcgacatttccaccttcaagta

SEQ ID NO: 310527 - DNA, 25 bp, Artificial
  probe
  misc_feature (1)..(25): SEQ ID NO: 1955; WAN024C7P; Start 279; Stop 303
ggtgtttatagtctgctacagcttc

SEQ ID NO: 310528 - DNA, 25 bp, Artificial
  probe
  misc_feature (1)..(25): SEQ ID NO: 1955; WAN024C7P; Start 175; Stop 199
catttccttaccattgacagggttg

SEQ ID NO: 310529 - DNA, 25 bp, Artificial
  probe
  misc_feature (1)..(25): SEQ ID NO: 1955; WAN024C7P; Start 177; Stop 201
tttccttaccattgacagggttgat

SEQ ID NO: 310530 - DNA, 25 bp, Artificial
  probe
  misc_feature (1)..(25): SEQ ID NO: 1955; WAN024C7P; Start 176; Stop 200
atttccttaccattgacagggttga

SEQ ID NO: 310531 - DNA, 25 bp, Artificial
  probe
  misc_feature (1)..(25): SEQ ID NO: 1955; WAN024C7P; Start 66; Stop 90
gaaggtcaaattgtttggcaaattc

SEQ ID NO: 310532 - DNA, 25 bp, Artificial
  probe
  misc_feature (1)..(25): SEQ ID NO: 1955; WAN024C7P; Start 27; Stop 51
cttcttcgacatttccaccttcaag

SEQ ID NO: 310533 - DNA, 25 bp, Artificial
  probe
  misc_feature (1)..(25): SEQ ID NO: 1955; WAN024C7P; Start 282; Stop 306
gtttatagtctgctacagcttctgc

SEQ ID NO: 310534 - DNA, 25 bp, Artificial
  probe
  misc_feature (1)..(25): SEQ ID NO: 1955; WAN024C7P; Start 164; Stop 188
atccagattggcatttccttaccat

SEQ ID NO: 310535 - DNA, 25 bp, Artificial
  probe
  misc_feature (1)..(25): SEQ ID NO: 1955; WAN024C7P; Start 278; Stop 302
tggtgtttatagtctgctacagctt

SEQ ID NO: 310536 - DNA, 25 bp, Artificial
  probe
  misc_feature (1)..(25): SEQ ID NO: 1955; WAN024C7P; Start 277; Stop 301
ttggtgtttatagtctgctacagct

SEQ ID NO: 310537 - DNA, 25 bp, Artificial
  probe
  misc_feature (1)..(25): SEQ ID NO: 1955; WAN024C7P; Start 166; Stop 190
ccagattggcatttccttaccattg

SEQ ID NO: 310538 - DNA, 25 bp, Artificial
  probe
  misc_feature (1)..(25): SEQ ID NO: 1955; WAN024C7P; Start 165; Stop 189
tccagattggcatttccttaccatt

SEQ ID NO: 310539 - DNA, 25 bp, Artificial
  probe
  misc_feature (1)..(25): SEQ ID NO: 1955; WAN024C7P; Start 163; Stop 187
aatccagattggcatttccttacca

SEQ ID NO: 310540 - DNA, 25 bp, Artificial
  probe
  misc_feature (1)..(25): SEQ ID NO: 1956; WAN024DZY; Start 3; Stop 27
gcagggtactttactggtaaataaa

SEQ ID NO: 310541 - DNA, 25 bp, Artificial
  probe
  misc_feature (1)..(25): SEQ ID NO: 1956; WAN024DZY; Start 2; Stop 26
tgcagggtactttactggtaaataa

SEQ ID NO: 310542 - DNA, 25 bp, Artificial
  probe
  misc_feature (1)..(25): SEQ ID NO: 1956; WAN024DZY; Start 1; Stop 25
atgcagggtactttactggtaaata

SEQ ID NO: 310543 - DNA, 25 bp, Artificial
  probe
  misc_feature (1)..(25): SEQ ID NO: 1956; WAN024DZY; Start 4; Stop 28
cagggtactttactggtaaataaaa

SEQ ID NO: 310544 - DNA, 25 bp, Artificial
  probe
  misc_feature (1)..(25): SEQ ID NO: 1957; WAN024FWQ; Start 601; Stop 625
aagaattgcttgattggaggaatac

SEQ ID NO: 310545 - DNA, 25 bp, Artificial
  probe
  misc_feature (1)..(25): SEQ ID NO: 1957; WAN024FWQ; Start 294; Stop 318
aattagtgttacaggaggaaccatc

SEQ ID NO: 310546 - DNA, 25 bp, Artificial
  probe
  misc_feature (1)..(25): SEQ ID NO: 1957; WAN024FWQ; Start 88; Stop 112
attcaccttccaatacttgtagcat

SEQ ID NO: 310547 - DNA, 25 bp, Artificial
  probe
  misc_feature (1)..(25): SEQ ID NO: 1957; WAN024FWQ; Start 89; Stop 113
ttcaccttccaatacttgtagcata

SEQ ID NO: 310548 - DNA, 25 bp, Artificial
  probe
  misc_feature (1)..(25): SEQ ID NO: 1957; WAN024FWQ; Start 602; Stop 626
agaattgcttgattggaggaatacc

SEQ ID NO: 310549 - DNA, 25 bp, Artificial
  probe
  misc_feature (1)..(25): SEQ ID NO: 1957; WAN024FWQ; Start 293; Stop 317
caattagtgttacaggaggaaccat

SEQ ID NO: 310550 - DNA, 25 bp, Artificial
  probe
  misc_feature (1)..(25): SEQ ID NO: 1957; WAN024FWQ; Start 90; Stop 114
tcaccttccaatacttgtagcatat

SEQ ID NO: 310551 - DNA, 25 bp, Artificial
  probe
  misc_feature (1)..(25): SEQ ID NO: 1957; WAN024FWQ; Start 86; Stop 110
caattcaccttccaatacttgtagc

SEQ ID NO: 310552 - DNA, 25 bp, Artificial
  probe
  misc_feature (1)..(25): SEQ ID NO: 1957; WAN024FWQ; Start 85; Stop 109
gcaattcaccttccaatacttgtag

SEQ ID NO: 310553 - DNA, 25 bp, Artificial
  probe
  misc_feature (1)..(25): SEQ ID NO: 1957; WAN024FWQ; Start 87; Stop 111
aattcaccttccaatacttgtagca

SEQ ID NO: 310554 - DNA, 25 bp, Artificial
  probe
  misc_feature (1)..(25): SEQ ID NO: 1957; WAN024FWQ; Start 367; Stop 391
actgataggctcattgttggtaata

SEQ ID NO: 310555 - DNA, 25 bp, Artificial
  probe
  misc_feature (1)..(25): SEQ ID NO: 1957; WAN024FWQ; Start 366; Stop 390
tactgataggctcattgttggtaat

SEQ ID NO: 310556 - DNA, 25 bp, Artificial
  probe
  misc_feature (1)..(25): SEQ ID NO: 1957; WAN024FWQ; Start 297; Stop 321
tagtgttacaggaggaaccatcatt

SEQ ID NO: 310557 - DNA, 25 bp, Artificial
  probe
  misc_feature (1)..(25): SEQ ID NO: 1957; WAN024FWQ; Start 296; Stop 320
ttagtgttacaggaggaaccatcat

SEQ ID NO: 310558 - DNA, 25 bp, Artificial
  probe
  misc_feature (1)..(25): SEQ ID NO: 1957; WAN024FWQ; Start 295; Stop 319
attagtgttacaggaggaaccatca

SEQ ID NO: 310559 - DNA, 25 bp, Artificial
  probe
  misc_feature (1)..(25): SEQ ID NO: 1957; WAN024FWQ; Start 84; Stop 108
ggcaattcaccttccaatacttgta

SEQ ID NO: 310560 - DNA, 25 bp, Artificial
  probe
  misc_feature (1)..(25): SEQ ID NO: 1957; WAN024FWQ; Start 368; Stop 392
ctgataggctcattgttggtaataa

SEQ ID NO: 310561 - DNA, 25 bp, Artificial
  probe
  misc_feature (1)..(25): SEQ ID NO: 1957; WAN024FWQ; Start 365; Stop 389
gtactgataggctcattgttggtaa

SEQ ID NO: 310562 - DNA, 25 bp, Artificial
  probe
  misc_feature (1)..(25): SEQ ID NO: 1957; WAN024FWQ; Start 91; Stop 115
caccttccaatacttgtagcatata

SEQ ID NO: 310563 - DNA, 25 bp, Artificial
  probe
  misc_feature (1)..(25): SEQ ID NO: 1957; WAN024FWQ; Start 78; Stop 102
taatcaggcaattcaccttccaata

SEQ ID NO: 310564 - DNA, 25 bp, Artificial
  probe
  misc_feature (1)..(25): SEQ ID NO: 1957; WAN024FWQ; Start 361; Stop 385
tcatgtactgataggctcattgttg

SEQ ID NO: 310565 - DNA, 25 bp, Artificial
  probe
  misc_feature (1)..(25): SEQ ID NO: 1957; WAN024FWQ; Start 364; Stop 388
tgtactgataggctcattgttggta

SEQ ID NO: 310566 - DNA, 25 bp, Artificial
  probe
  misc_feature (1)..(25): SEQ ID NO: 1957; WAN024FWQ; Start 292; Stop 316
acaattagtgttacaggaggaacca

SEQ ID NO: 310567 - DNA, 25 bp, Artificial
  probe
  misc_feature (1)..(25): SEQ ID NO: 1957; WAN024FWQ; Start 77; Stop 101
ttaatcaggcaattcaccttccaat

SEQ ID NO: 310568 - DNA, 25 bp, Artificial
  probe
  misc_feature (1)..(25): SEQ ID NO: 1957; WAN024FWQ; Start 603; Stop 627
gaattgcttgattggaggaatacct

SEQ ID NO: 310569 - DNA, 25 bp, Artificial
  probe
  misc_feature (1)..(25): SEQ ID NO: 1957; WAN024FWQ; Start 369; Stop 393
tgataggctcattgttggtaataat

SEQ ID NO: 310570 - DNA, 25 bp, Artificial
  probe
  misc_feature (1)..(25): SEQ ID NO: 1957; WAN024FWQ; Start 434; Stop 458
gtcatacactaagctacgatggtaa

SEQ ID NO: 310571 - DNA, 25 bp, Artificial
  probe
  misc_feature (1)..(25): SEQ ID NO: 1957; WAN024FWQ; Start 436; Stop 460
catacactaagctacgatggtaaga

SEQ ID NO: 310572 - DNA, 25 bp, Artificial
  probe
  misc_feature (1)..(25): SEQ ID NO: 1957; WAN024FWQ; Start 435; Stop 459
tcatacactaagctacgatggtaag

SEQ ID NO: 310573 - DNA, 25 bp, Artificial
  probe
  misc_feature (1)..(25): SEQ ID NO: 1957; WAN024FWQ; Start 604; Stop 628
aattgcttgattggaggaatacctg

SEQ ID NO: 310574 - DNA, 25 bp, Artificial
  probe
  misc_feature (1)..(25): SEQ ID NO: 1957; WAN024FWQ; Start 291; Stop 315
cacaattagtgttacaggaggaacc

SEQ ID NO: 310575 - DNA, 25 bp, Artificial
  probe
  misc_feature (1)..(25): SEQ ID NO: 1957; WAN024FWQ; Start 437; Stop 461
atacactaagctacgatggtaagaa

SEQ ID NO: 310576 - DNA, 25 bp, Artificial
  probe
  misc_feature (1)..(25): SEQ ID NO: 1957; WAN024FWQ; Start 363; Stop 387
atgtactgataggctcattgttggt

SEQ ID NO: 310577 - DNA, 25 bp, Artificial
  probe
  misc_feature (1)..(25): SEQ ID NO: 1958; WAN024CSK; Start 899; Stop 923
gtatgaaggctatcaatgctgttac

SEQ ID NO: 310578 - DNA, 25 bp, Artificial
  probe
  misc_feature (1)..(25): SEQ ID NO: 1958; WAN024CSK; Start 898; Stop 922
agtatgaaggctatcaatgctgtta

SEQ ID NO: 310579 - DNA, 25 bp, Artificial
  probe
  misc_feature (1)..(25): SEQ ID NO: 1958; WAN024CSK; Start 897; Stop 921
aagtatgaaggctatcaatgctgtt

SEQ ID NO: 310580 - DNA, 25 bp, Artificial
  probe
  misc_feature (1)..(25): SEQ ID NO: 1958; WAN024CSK; Start 900; Stop 924
tatgaaggctatcaatgctgttacc

SEQ ID NO: 310581 - DNA, 25 bp, Artificial
  probe
  misc_feature (1)..(25): SEQ ID NO: 1958; WAN024CSK; Start 903; Stop 927
gaaggctatcaatgctgttaccaac

SEQ ID NO: 310582 - DNA, 25 bp, Artificial
  probe
  misc_feature (1)..(25): SEQ ID NO: 1958; WAN024CSK; Start 901; Stop 925
atgaaggctatcaatgctgttacca

SEQ ID NO: 310583 - DNA, 25 bp, Artificial
  probe
  misc_feature (1)..(25): SEQ ID NO: 1958; WAN024CSK; Start 902; Stop 926
tgaaggctatcaatgctgttaccaa

SEQ ID NO: 310584 - DNA, 25 bp, Artificial
  probe
  misc_feature (1)..(25): SEQ ID NO: 1958; WAN024CSK; Start 739; Stop 763
attcaagaggaaatcaaagccaaag

SEQ ID NO: 310585 - DNA, 25 bp, Artificial
  probe
  misc_feature (1)..(25): SEQ ID NO: 1958; WAN024CSK; Start 1104; Stop 1128
tatggatgttgaaggcttggttgag

SEQ ID NO: 310586 - DNA, 25 bp, Artificial
  probe
  misc_feature (1)..(25): SEQ ID NO: 1958; WAN024CSK; Start 957; Stop 981
ggacaagttggaaatcattgacatc

SEQ ID NO: 310587 - DNA, 25 bp, Artificial
  probe
  misc_feature (1)..(25): SEQ ID NO: 1958; WAN024CSK; Start 895; Stop 919
gaaagtatgaaggctatcaatgctg

SEQ ID NO: 310588 - DNA, 25 bp, Artificial
  probe
  misc_feature (1)..(25): SEQ ID NO: 1958; WAN024CSK; Start 894; Stop 918
tgaaagtatgaaggctatcaatgct

SEQ ID NO: 310589 - DNA, 25 bp, Artificial
  probe
  misc_feature (1)..(25): SEQ ID NO: 1958; WAN024CSK; Start 896; Stop 920
aaagtatgaaggctatcaatgctgt

SEQ ID NO: 310590 - DNA, 25 bp, Artificial
  probe
  misc_feature (1)..(25): SEQ ID NO: 1958; WAN024CSK; Start 1103; Stop 1127
gtatggatgttgaaggcttggttga

SEQ ID NO: 310591 - DNA, 25 bp, Artificial
  probe
  misc_feature (1)..(25): SEQ ID NO: 1958; WAN024CSK; Start 8; Stop 32
attcagaaattatgattcgctacgg

SEQ ID NO: 310592 - DNA, 25 bp, Artificial
  probe
  misc_feature (1)..(25): SEQ ID NO: 1958; WAN024CSK; Start 958; Stop 982
gacaagttggaaatcattgacatcg

SEQ ID NO: 310593 - DNA, 25 bp, Artificial
  probe
  misc_feature (1)..(25): SEQ ID NO: 1958; WAN024CSK; Start 956; Stop 980
tggacaagttggaaatcattgacat

SEQ ID NO: 310594 - DNA, 25 bp, Artificial
  probe
  misc_feature (1)..(25): SEQ ID NO: 1958; WAN024CSK; Start 955; Stop 979
atggacaagttggaaatcattgaca

SEQ ID NO: 310595 - DNA, 25 bp, Artificial
  probe
  misc_feature (1)..(25): SEQ ID NO: 1958; WAN024CSK; Start 3; Stop 27
gcagtattcagaaattatgattcgc

SEQ ID NO: 310596 - DNA, 25 bp, Artificial
  probe
  misc_feature (1)..(25): SEQ ID NO: 1958; WAN024CSK; Start 811; Stop 835
attactgaccgtattcgtgaggtac

SEQ ID NO: 310597 - DNA, 25 bp, Artificial
  probe
  misc_feature (1)..(25): SEQ ID NO: 1958; WAN024CSK; Start 1192; Stop 1216
gacttgattgacaatctgctctaac

SEQ ID NO: 310598 - DNA, 25 bp, Artificial
  probe
  misc_feature (1)..(25): SEQ ID NO: 1958; WAN024CSK; Start 1190; Stop 1214
atgacttgattgacaatctgctcta

SEQ ID NO: 310599 - DNA, 25 bp, Artificial
  probe
  misc_feature (1)..(25): SEQ ID NO: 1958; WAN024CSK; Start 1193; Stop 1217
acttgattgacaatctgctctaact

SEQ ID NO: 310600 - DNA, 25 bp, Artificial
  probe
  misc_feature (1)..(25): SEQ ID NO: 1958; WAN024CSK; Start 1191; Stop 1215
tgacttgattgacaatctgctctaa

SEQ ID NO: 310601 - DNA, 25 bp, Artificial
  probe
  misc_feature (1)..(25): SEQ ID NO: 1958; WAN024CSK; Start 1185; Stop 1209
agttgatgacttgattgacaatctg

SEQ ID NO: 310602 - DNA, 25 bp, Artificial
  probe
  misc_feature (1)..(25): SEQ ID NO: 1958; WAN024CSK; Start 1180; Stop 1204
gatgaagttgatgacttgattgaca

SEQ ID NO: 310603 - DNA, 25 bp, Artificial
  probe
  misc_feature (1)..(25): SEQ ID NO: 1958; WAN024CSK; Start 1179; Stop 1203
agatgaagttgatgacttgattgac

SEQ ID NO: 310604 - DNA, 25 bp, Artificial
  probe
  misc_feature (1)..(25): SEQ ID NO: 1958; WAN024CSK; Start 1187; Stop 1211
ttgatgacttgattgacaatctgct

SEQ ID NO: 310605 - DNA, 25 bp, Artificial
  probe
  misc_feature (1)..(25): SEQ ID NO: 1958; WAN024CSK; Start 1186; Stop 1210
gttgatgacttgattgacaatctgc

SEQ ID NO: 310606 - DNA, 25 bp, Artificial
  probe
  misc_feature (1)..(25): SEQ ID NO: 1958; WAN024CSK; Start 1182; Stop 1206
tgaagttgatgacttgattgacaat

SEQ ID NO: 310607 - DNA, 25 bp, Artificial
  probe
  misc_feature (1)..(25): SEQ ID NO: 1958; WAN024CSK; Start 1181; Stop 1205
atgaagttgatgacttgattgacaa

SEQ ID NO: 310608 - DNA, 25 bp, Artificial
  probe
  misc_feature (1)..(25): SEQ ID NO: 1958; WAN024CSK; Start 1189; Stop 1213
gatgacttgattgacaatctgctct

SEQ ID NO: 310609 - DNA, 25 bp, Artificial
  probe
  misc_feature (1)..(25): SEQ ID NO: 1958; WAN024CSK; Start 954; Stop 978
catggacaagttggaaatcattgac

SEQ ID NO: 310610 - DNA, 25 bp, Artificial
  probe
  misc_feature (1)..(25): SEQ ID NO: 1959; WAN024D69; Start 231; Stop 255
tgatttgattggtttcttgaaagca

SEQ ID NO: 310611 - DNA, 25 bp, Artificial
  probe
  misc_feature (1)..(25): SEQ ID NO: 1959; WAN024D69; Start 232; Stop 256
gatttgattggtttcttgaaagcag

SEQ ID NO: 310612 - DNA, 25 bp, Artificial
  probe
  misc_feature (1)..(25): SEQ ID NO: 1959; WAN024D69; Start 230; Stop 254
ctgatttgattggtttcttgaaagc

SEQ ID NO: 310613 - DNA, 25 bp, Artificial
  probe
  misc_feature (1)..(25): SEQ ID NO: 1959; WAN024D69; Start 233; Stop 257
atttgattggtttcttgaaagcagg

SEQ ID NO: 310614 - DNA, 25 bp, Artificial
  probe
  misc_feature (1)..(25): SEQ ID NO: 1959; WAN024D69; Start 228; Stop 252
tcctgatttgattggtttcttgaaa

SEQ ID NO: 310615 - DNA, 25 bp, Artificial
  probe
  misc_feature (1)..(25): SEQ ID NO: 1959; WAN024D69; Start 229; Stop 253
cctgatttgattggtttcttgaaag

SEQ ID NO: 310616 - DNA, 25 bp, Artificial
  probe
  misc_feature (1)..(25): SEQ ID NO: 1959; WAN024D69; Start 243; Stop 267
tttcttgaaagcagggcaaagtatt

SEQ ID NO: 310617 - DNA, 25 bp, Artificial
  probe
  misc_feature (1)..(25): SEQ ID NO: 1959; WAN024D69; Start 324; Stop 348
taaggcagctattgaggaagaaatt

SEQ ID NO: 310618 - DNA, 25 bp, Artificial
  probe
  misc_feature (1)..(25): SEQ ID NO: 1959; WAN024D69; Start 323; Stop 347
ttaaggcagctattgaggaagaaat

SEQ ID NO: 310619 - DNA, 25 bp, Artificial
  probe
  misc_feature (1)..(25): SEQ ID NO: 1959; WAN024D69; Start 244; Stop 268
ttcttgaaagcagggcaaagtattg

SEQ ID NO: 310620 - DNA, 25 bp, Artificial
  probe
  misc_feature (1)..(25): SEQ ID NO: 1959; WAN024D69; Start 322; Stop 346
gttaaggcagctattgaggaagaaa

SEQ ID NO: 310621 - DNA, 25 bp, Artificial
  probe
  misc_feature (1)..(25): SEQ ID NO: 1959; WAN024D69; Start 332; Stop 356
ctattgaggaagaaattgcagttgt

SEQ ID NO: 310622 - DNA, 25 bp, Artificial
  probe
  misc_feature (1)..(25): SEQ ID NO: 1959; WAN024D69; Start 234; Stop 258
tttgattggtttcttgaaagcaggg

SEQ ID NO: 310623 - DNA, 25 bp, Artificial
  probe
  misc_feature (1)..(25): SEQ ID NO: 1959; WAN024D69; Start 242; Stop 266
gtttcttgaaagcagggcaaagtat

SEQ ID NO: 310624 - DNA, 25 bp, Artificial
  probe
  misc_feature (1)..(25): SEQ ID NO: 1959; WAN024D69; Start 325; Stop 349
aaggcagctattgaggaagaaattg

SEQ ID NO: 310625 - DNA, 25 bp, Artificial
  probe
  misc_feature (1)..(25): SEQ ID NO: 1959; WAN024D69; Start 331; Stop 355
gctattgaggaagaaattgcagttg

SEQ ID NO: 310626 - DNA, 25 bp, Artificial
  probe
  misc_feature (1)..(25): SEQ ID NO: 1959; WAN024D69; Start 330; Stop 354
agctattgaggaagaaattgcagtt

SEQ ID NO: 310627 - DNA, 25 bp, Artificial
  probe
  misc_feature (1)..(25): SEQ ID NO: 1959; WAN024D69; Start 329; Stop 353
cagctattgaggaagaaattgcagt

SEQ ID NO: 310628 - DNA, 25 bp, Artificial
  probe
  misc_feature (1)..(25): SEQ ID NO: 1959; WAN024D69; Start 588; Stop 612
cagggaattgaccaaaatctatgaa

SEQ ID NO: 310629 - DNA, 25 bp, Artificial
  probe
  misc_feature (1)..(25): SEQ ID NO: 1959; WAN024D69; Start 176; Stop 200
acatttccaccaagcagatcagttt

SEQ ID NO: 310630 - DNA, 25 bp, Artificial
  probe
  misc_feature (1)..(25): SEQ ID NO: 1959; WAN024D69; Start 589; Stop 613
agggaattgaccaaaatctatgaag

SEQ ID NO: 310631 - DNA, 25 bp, Artificial
  probe
  misc_feature (1)..(25): SEQ ID NO: 1959; WAN024D69; Start 587; Stop 611
tcagggaattgaccaaaatctatga

SEQ ID NO: 310632 - DNA, 25 bp, Artificial
  probe
  misc_feature (1)..(25): SEQ ID NO: 1959; WAN024D69; Start 590; Stop 614
gggaattgaccaaaatctatgaaga

SEQ ID NO: 310633 - DNA, 25 bp, Artificial
  probe
  misc_feature (1)..(25): SEQ ID NO: 1959; WAN024D69; Start 172; Stop 196
tttgacatttccaccaagcagatca

SEQ ID NO: 310634 - DNA, 25 bp, Artificial
  probe
  misc_feature (1)..(25): SEQ ID NO: 1959; WAN024D69; Start 175; Stop 199
gacatttccaccaagcagatcagtt

SEQ ID NO: 310635 - DNA, 25 bp, Artificial
  probe
  misc_feature (1)..(25): SEQ ID NO: 1959; WAN024D69; Start 170; Stop 194
attttgacatttccaccaagcagat

SEQ ID NO: 310636 - DNA, 25 bp, Artificial
  probe
  misc_feature (1)..(25): SEQ ID NO: 1959; WAN024D69; Start 165; Stop 189
caagcattttgacatttccaccaag

SEQ ID NO: 310637 - DNA, 25 bp, Artificial
  probe
  misc_feature (1)..(25): SEQ ID NO: 1959; WAN024D69; Start 596; Stop 620
tgaccaaaatctatgaagaatacca

SEQ ID NO: 310638 - DNA, 25 bp, Artificial
  probe
  misc_feature (1)..(25): SEQ ID NO: 1959; WAN024D69; Start 173; Stop 197
ttgacatttccaccaagcagatcag

SEQ ID NO: 310639 - DNA, 25 bp, Artificial
  probe
  misc_feature (1)..(25): SEQ ID NO: 1959; WAN024D69; Start 178; Stop 202
atttccaccaagcagatcagttttc

SEQ ID NO: 310640 - DNA, 25 bp, Artificial
  probe
  misc_feature (1)..(25): SEQ ID NO: 1959; WAN024D69; Start 177; Stop 201
catttccaccaagcagatcagtttt

SEQ ID NO: 310641 - DNA, 25 bp, Artificial
  probe
  misc_feature (1)..(25): SEQ ID NO: 1959; WAN024D69; Start 591; Stop 615
ggaattgaccaaaatctatgaagaa

SEQ ID NO: 310642 - DNA, 25 bp, Artificial
  probe
  misc_feature (1)..(25): SEQ ID NO: 1959; WAN024D69; Start 241; Stop 265
ggtttcttgaaagcagggcaaagta

SEQ ID NO: 310643 - DNA, 25 bp, Artificial
  probe
  misc_feature (1)..(25): SEQ ID NO: 1960; WAN024FQ4; Start 49; Stop 73
tgtgttggagttgttctacttcata

SEQ ID NO: 310644 - DNA, 25 bp, Artificial
  probe
  misc_feature (1)..(25): SEQ ID NO: 1960; WAN024FQ4; Start 50; Stop 74
gtgttggagttgttctacttcatac

SEQ ID NO: 310645 - DNA, 25 bp, Artificial
  probe
  misc_feature (1)..(25): SEQ ID NO: 1960; WAN024FQ4; Start 48; Stop 72
atgtgttggagttgttctacttcat

SEQ ID NO: 310646 - DNA, 25 bp, Artificial
  probe
  misc_feature (1)..(25): SEQ ID NO: 1960; WAN024FQ4; Start 51; Stop 75
tgttggagttgttctacttcataca

SEQ ID NO: 310647 - DNA, 25 bp, Artificial
  probe
  misc_feature (1)..(25): SEQ ID NO: 1960; WAN024FQ4; Start 47; Stop 71
catgtgttggagttgttctacttca

SEQ ID NO: 310648 - DNA, 25 bp, Artificial
  probe
  misc_feature (1)..(25): SEQ ID NO: 1960; WAN024FQ4; Start 237; Stop 261
tctaataacagtgttgtcatggacc

SEQ ID NO: 310649 - DNA, 25 bp, Artificial
  probe
  misc_feature (1)..(25): SEQ ID NO: 1960; WAN024FQ4; Start 236; Stop 260
ttctaataacagtgttgtcatggac

SEQ ID NO: 310650 - DNA, 25 bp, Artificial
  probe
  misc_feature (1)..(25): SEQ ID NO: 1960; WAN024FQ4; Start 676; Stop 700
atagcgaagactgcataccataatc

SEQ ID NO: 310651 - DNA, 25 bp, Artificial
  probe
  misc_feature (1)..(25): SEQ ID NO: 1960; WAN024FQ4; Start 675; Stop 699
catagcgaagactgcataccataat

SEQ ID NO: 310652 - DNA, 25 bp, Artificial
  probe
  misc_feature (1)..(25): SEQ ID NO: 1960; WAN024FQ4; Start 797; Stop 821
gcgaatgtattgtttccctttctaa

SEQ ID NO: 310653 - DNA, 25 bp, Artificial
  probe
  misc_feature (1)..(25): SEQ ID NO: 1960; WAN024FQ4; Start 796; Stop 820
agcgaatgtattgtttccctttcta

SEQ ID NO: 310654 - DNA, 25 bp, Artificial
  probe
  misc_feature (1)..(25): SEQ ID NO: 1960; WAN024FQ4; Start 232; Stop 256
tggattctaataacagtgttgtcat

SEQ ID NO: 310655 - DNA, 25 bp, Artificial
  probe
  misc_feature (1)..(25): SEQ ID NO: 1960; WAN024FQ4; Start 231; Stop 255
atggattctaataacagtgttgtca

SEQ ID NO: 310656 - DNA, 25 bp, Artificial
  probe
  misc_feature (1)..(25): SEQ ID NO: 1960; WAN024FQ4; Start 235; Stop 259
attctaataacagtgttgtcatgga

SEQ ID NO: 310657 - DNA, 25 bp, Artificial
  probe
  misc_feature (1)..(25): SEQ ID NO: 1960; WAN024FQ4; Start 234; Stop 258
gattctaataacagtgttgtcatgg

SEQ ID NO: 310658 - DNA, 25 bp, Artificial
  probe
  misc_feature (1)..(25): SEQ ID NO: 1960; WAN024FQ4; Start 233; Stop 257
ggattctaataacagtgttgtcatg

SEQ ID NO: 310659 - DNA, 25 bp, Artificial
  probe
  misc_feature (1)..(25): SEQ ID NO: 1960; WAN024FQ4; Start 526; Stop 550
acatttagattatggacttggcttt

SEQ ID NO: 310660 - DNA, 25 bp, Artificial
  probe
  misc_feature (1)..(25): SEQ ID NO: 1960; WAN024FQ4; Start 525; Stop 549
aacatttagattatggacttggctt

SEQ ID NO: 310661 - DNA, 25 bp, Artificial
  probe
  misc_feature (1)..(25): SEQ ID NO: 1960; WAN024FQ4; Start 524; Stop 548
aaacatttagattatggacttggct

SEQ ID NO: 310662 - DNA, 25 bp, Artificial
  probe
  misc_feature (1)..(25): SEQ ID NO: 1960; WAN024FQ4; Start 674; Stop 698
tcatagcgaagactgcataccataa

SEQ ID NO: 310663 - DNA, 25 bp, Artificial
  probe
  misc_feature (1)..(25): SEQ ID NO: 1960; WAN024FQ4; Start 46; Stop 70
gcatgtgttggagttgttctacttc

SEQ ID NO: 310664 - DNA, 25 bp, Artificial
  probe
  misc_feature (1)..(25): SEQ ID NO: 1960; WAN024FQ4; Start 677; Stop 701
tagcgaagactgcataccataatct

SEQ ID NO: 310665 - DNA, 25 bp, Artificial
  probe
  misc_feature (1)..(25): SEQ ID NO: 1960; WAN024FQ4; Start 61; Stop 85
gttctacttcatacaacgatgggtg

SEQ ID NO: 310666 - DNA, 25 bp, Artificial
  probe
  misc_feature (1)..(25): SEQ ID NO: 1960; WAN024FQ4; Start 673; Stop 697
ttcatagcgaagactgcataccata

SEQ ID NO: 310667 - DNA, 25 bp, Artificial
  probe
  misc_feature (1)..(25): SEQ ID NO: 1960; WAN024FQ4; Start 523; Stop 547
caaacatttagattatggacttggc

SEQ ID NO: 310668 - DNA, 25 bp, Artificial
  probe
  misc_feature (1)..(25): SEQ ID NO: 1960; WAN024FQ4; Start 795; Stop 819
gagcgaatgtattgtttccctttct

SEQ ID NO: 310669 - DNA, 25 bp, Artificial
  probe
  misc_feature (1)..(25): SEQ ID NO: 1960; WAN024FQ4; Start 230; Stop 254
aatggattctaataacagtgttgtc

SEQ ID NO: 310670 - DNA, 25 bp, Artificial
  probe
  misc_feature (1)..(25): SEQ ID NO: 1960; WAN024FQ4; Start 85; Stop 109
gggtttaaagagataggttcatgga

SEQ ID NO: 310671 - DNA, 25 bp, Artificial
  probe
  misc_feature (1)..(25): SEQ ID NO: 1960; WAN024FQ4; Start 84; Stop 108
tgggtttaaagagataggttcatgg

SEQ ID NO: 310672 - DNA, 25 bp, Artificial
  probe
  misc_feature (1)..(25): SEQ ID NO: 1960; WAN024FQ4; Start 82; Stop 106
ggtgggtttaaagagataggttcat

SEQ ID NO: 310673 - DNA, 25 bp, Artificial
  probe
  misc_feature (1)..(25): SEQ ID NO: 1960; WAN024FQ4; Start 43; Stop 67
cttgcatgtgttggagttgttctac

SEQ ID NO: 310674 - DNA, 25 bp, Artificial
  probe
  misc_feature (1)..(25): SEQ ID NO: 1960; WAN024FQ4; Start 798; Stop 822
cgaatgtattgtttccctttctaat

SEQ ID NO: 310675 - DNA, 25 bp, Artificial
  probe
  misc_feature (1)..(25): SEQ ID NO: 1960; WAN024FQ4; Start 62; Stop 86
ttctacttcatacaacgatgggtgg

SEQ ID NO: 310676 - DNA, 25 bp, Artificial
  probe
  misc_feature (1)..(25): SEQ ID NO: 1961; WAN024FQ5; Start 235; Stop 259
attctaataacagtgctgtcatgga

SEQ ID NO: 310677 - DNA, 25 bp, Artificial
  probe
  misc_feature (1)..(25): SEQ ID NO: 1961; WAN024FQ5; Start 605; Stop 629
atgggtttaagagatggatgaaagt

SEQ ID NO: 310678 - DNA, 25 bp, Artificial
  probe
  misc_feature (1)..(25): SEQ ID NO: 1961; WAN024FQ5; Start 236; Stop 260
ttctaataacagtgctgtcatggac

SEQ ID NO: 310679 - DNA, 25 bp, Artificial
  probe
  misc_feature (1)..(25): SEQ ID NO: 1961; WAN024FQ5; Start 606; Stop 630
tgggtttaagagatggatgaaagta

SEQ ID NO: 310680 - DNA, 25 bp, Artificial
  probe
  misc_feature (1)..(25): SEQ ID NO: 1961; WAN024FQ5; Start 604; Stop 628
aatgggtttaagagatggatgaaag

SEQ ID NO: 310681 - DNA, 25 bp, Artificial
  probe
  misc_feature (1)..(25): SEQ ID NO: 1961; WAN024FQ5; Start 603; Stop 627
aaatgggtttaagagatggatgaaa

SEQ ID NO: 310682 - DNA, 25 bp, Artificial
  probe
  misc_feature (1)..(25): SEQ ID NO: 1961; WAN024FQ5; Start 39; Stop 63
agtaattgcatgtgttggagttgtt

SEQ ID NO: 310683 - DNA, 25 bp, Artificial
  probe
  misc_feature (1)..(25): SEQ ID NO: 1961; WAN024FQ5; Start 38; Stop 62
aagtaattgcatgtgttggagttgt

SEQ ID NO: 310684 - DNA, 25 bp, Artificial
  probe
  misc_feature (1)..(25): SEQ ID NO: 1961; WAN024FQ5; Start 607; Stop 631
gggtttaagagatggatgaaagtaa

SEQ ID NO: 310685 - DNA, 25 bp, Artificial
  probe
  misc_feature (1)..(25): SEQ ID NO: 1961; WAN024FQ5; Start 180; Stop 204
attgttagggaagaaagagattacc

SEQ ID NO: 310686 - DNA, 25 bp, Artificial
  probe
  misc_feature (1)..(25): SEQ ID NO: 1961; WAN024FQ5; Start 237; Stop 261
tctaataacagtgctgtcatggacc

SEQ ID NO: 310687 - DNA, 25 bp, Artificial
  probe
  misc_feature (1)..(25): SEQ ID NO: 1961; WAN024FQ5; Start 181; Stop 205
ttgttagggaagaaagagattacct

SEQ ID NO: 310688 - DNA, 25 bp, Artificial
  probe
  misc_feature (1)..(25): SEQ ID NO: 1961; WAN024FQ5; Start 89; Stop 113
ttaaagagacaggttcatggaattt

SEQ ID NO: 310689 - DNA, 25 bp, Artificial
  probe
  misc_feature (1)..(25): SEQ ID NO: 1961; WAN024FQ5; Start 85; Stop 109
ggatttaaagagacaggttcatgga

SEQ ID NO: 310690 - DNA, 25 bp, Artificial
  probe
  misc_feature (1)..(25): SEQ ID NO: 1961; WAN024FQ5; Start 611; Stop 635
ttaagagatggatgaaagtaattgc

SEQ ID NO: 310691 - DNA, 25 bp, Artificial
  probe
  misc_feature (1)..(25): SEQ ID NO: 1961; WAN024FQ5; Start 86; Stop 110
gatttaaagagacaggttcatggaa

SEQ ID NO: 310692 - DNA, 25 bp, Artificial
  probe
  misc_feature (1)..(25): SEQ ID NO: 1961; WAN024FQ5; Start 84; Stop 108
gggatttaaagagacaggttcatgg

SEQ ID NO: 310693 - DNA, 25 bp, Artificial
  probe
  misc_feature (1)..(25): SEQ ID NO: 1961; WAN024FQ5; Start 614; Stop 638
agagatggatgaaagtaattgcagt

SEQ ID NO: 310694 - DNA, 25 bp, Artificial
  probe
  misc_feature (1)..(25): SEQ ID NO: 1961; WAN024FQ5; Start 613; Stop 637
aagagatggatgaaagtaattgcag

SEQ ID NO: 310695 - DNA, 25 bp, Artificial
  probe
  misc_feature (1)..(25): SEQ ID NO: 1961; WAN024FQ5; Start 37; Stop 61
aaagtaattgcatgtgttggagttg

SEQ ID NO: 310696 - DNA, 25 bp, Artificial
  probe
  misc_feature (1)..(25): SEQ ID NO: 1961; WAN024FQ5; Start 616; Stop 640
agatggatgaaagtaattgcagtac

SEQ ID NO: 310697 - DNA, 25 bp, Artificial
  probe
  misc_feature (1)..(25): SEQ ID NO: 1961; WAN024FQ5; Start 88; Stop 112
tttaaagagacaggttcatggaatt

SEQ ID NO: 310698 - DNA, 25 bp, Artificial
  probe
  misc_feature (1)..(25): SEQ ID NO: 1961; WAN024FQ5; Start 40; Stop 64
gtaattgcatgtgttggagttgttt

SEQ ID NO: 310699 - DNA, 25 bp, Artificial
  probe
  misc_feature (1)..(25): SEQ ID NO: 1961; WAN024FQ5; Start 615; Stop 639
gagatggatgaaagtaattgcagta

SEQ ID NO: 310700 - DNA, 25 bp, Artificial
  probe
  misc_feature (1)..(25): SEQ ID NO: 1961; WAN024FQ5; Start 87; Stop 111
atttaaagagacaggttcatggaat

SEQ ID NO: 310701 - DNA, 25 bp, Artificial
  probe
  misc_feature (1)..(25): SEQ ID NO: 1961; WAN024FQ5; Start 442; Stop 466
ttatctgtattgctagttattggtt

SEQ ID NO: 310702 - DNA, 25 bp, Artificial
  probe
  misc_feature (1)..(25): SEQ ID NO: 1961; WAN024FQ5; Start 310; Stop 334
aaacttataggatcattggtgcaaa

SEQ ID NO: 310703 - DNA, 25 bp, Artificial
  probe
  misc_feature (1)..(25): SEQ ID NO: 1961; WAN024FQ5; Start 128; Stop 152
actacttaggaacctattctatccc

SEQ ID NO: 310704 - DNA, 25 bp, Artificial
  probe
  misc_feature (1)..(25): SEQ ID NO: 1961; WAN024FQ5; Start 612; Stop 636
taagagatggatgaaagtaattgca

SEQ ID NO: 310705 - DNA, 25 bp, Artificial
  probe
  misc_feature (1)..(25): SEQ ID NO: 1961; WAN024FQ5; Start 608; Stop 632
ggtttaagagatggatgaaagtaat

SEQ ID NO: 310706 - DNA, 25 bp, Artificial
  probe
  misc_feature (1)..(25): SEQ ID NO: 1961; WAN024FQ5; Start 129; Stop 153
ctacttaggaacctattctatccct

SEQ ID NO: 310707 - DNA, 25 bp, Artificial
  probe
  misc_feature (1)..(25): SEQ ID NO: 1961; WAN024FQ5; Start 190; Stop 214
aagaaagagattacctattcctaca

SEQ ID NO: 310708 - DNA, 25 bp, Artificial
  probe
  misc_feature (1)..(25): SEQ ID NO: 1961; WAN024FQ5; Start 526; Stop 550
acttttagattatggacttggcttt

SEQ ID NO: 310709 - DNA, 25 bp, Artificial
  probe
  misc_feature (1)..(25): SEQ ID NO: 1962; WAN024CZ9; Start 433; Stop 457
aggactaatatcacggaaggtaatg

SEQ ID NO: 310710 - DNA, 25 bp, Artificial
  probe
  misc_feature (1)..(25): SEQ ID NO: 1962; WAN024CZ9; Start 432; Stop 456
aaggactaatatcacggaaggtaat

SEQ ID NO: 310711 - DNA, 25 bp, Artificial
  probe
  misc_feature (1)..(25): SEQ ID NO: 1962; WAN024CZ9; Start 435; Stop 459
gactaatatcacggaaggtaatgcc

SEQ ID NO: 310712 - DNA, 25 bp, Artificial
  probe
  misc_feature (1)..(25): SEQ ID NO: 1962; WAN024CZ9; Start 434; Stop 458
ggactaatatcacggaaggtaatgc

SEQ ID NO: 310713 - DNA, 25 bp, Artificial
  probe
  misc_feature (1)..(25): SEQ ID NO: 1962; WAN024CZ9; Start 45; Stop 69
cgttcaattcatccaattcaacaag

SEQ ID NO: 310714 - DNA, 25 bp, Artificial
  probe
  misc_feature (1)..(25): SEQ ID NO: 1962; WAN024CZ9; Start 46; Stop 70
gttcaattcatccaattcaacaagg

SEQ ID NO: 310715 - DNA, 25 bp, Artificial
  probe
  misc_feature (1)..(25): SEQ ID NO: 1962; WAN024CZ9; Start 44; Stop 68
ccgttcaattcatccaattcaacaa

SEQ ID NO: 310716 - DNA, 25 bp, Artificial
  probe
  misc_feature (1)..(25): SEQ ID NO: 1962; WAN024CZ9; Start 50; Stop 74
aattcatccaattcaacaaggaagg

SEQ ID NO: 310717 - DNA, 25 bp, Artificial
  probe
  misc_feature (1)..(25): SEQ ID NO: 1962; WAN024CZ9; Start 48; Stop 72
tcaattcatccaattcaacaaggaa

SEQ ID NO: 310718 - DNA, 25 bp, Artificial
  probe
  misc_feature (1)..(25): SEQ ID NO: 1962; WAN024CZ9; Start 47; Stop 71
ttcaattcatccaattcaacaagga

SEQ ID NO: 310719 - DNA, 25 bp, Artificial
  probe
  misc_feature (1)..(25): SEQ ID NO: 1962; WAN024CZ9; Start 436; Stop 460
actaatatcacggaaggtaatgcct

SEQ ID NO: 310720 - DNA, 25 bp, Artificial
  probe
  misc_feature (1)..(25): SEQ ID NO: 1962; WAN024CZ9; Start 49; Stop 73
caattcatccaattcaacaaggaag

SEQ ID NO: 310721 - DNA, 25 bp, Artificial
  probe
  misc_feature (1)..(25): SEQ ID NO: 1962; WAN024CZ9; Start 106; Stop 130
aatcatctcgatagttgccttaaca

SEQ ID NO: 310722 - DNA, 25 bp, Artificial
  probe
  misc_feature (1)..(25): SEQ ID NO: 1962; WAN024CZ9; Start 107; Stop 131
atcatctcgatagttgccttaacag

SEQ ID NO: 310723 - DNA, 25 bp, Artificial
  probe
  misc_feature (1)..(25): SEQ ID NO: 1962; WAN024CZ9; Start 115; Stop 139
gatagttgccttaacagttccacct

SEQ ID NO: 310724 - DNA, 25 bp, Artificial
  probe
  misc_feature (1)..(25): SEQ ID NO: 1962; WAN024CZ9; Start 105; Stop 129
caatcatctcgatagttgccttaac

SEQ ID NO: 310725 - DNA, 25 bp, Artificial
  probe
  misc_feature (1)..(25): SEQ ID NO: 1962; WAN024CZ9; Start 104; Stop 128
tcaatcatctcgatagttgccttaa

SEQ ID NO: 310726 - DNA, 25 bp, Artificial
  probe
  misc_feature (1)..(25): SEQ ID NO: 1962; WAN024CZ9; Start 103; Stop 127
ttcaatcatctcgatagttgcctta

SEQ ID NO: 310727 - DNA, 25 bp, Artificial
  probe
  misc_feature (1)..(25): SEQ ID NO: 1962; WAN024CZ9; Start 110; Stop 134
atctcgatagttgccttaacagttc

SEQ ID NO: 310728 - DNA, 25 bp, Artificial
  probe
  misc_feature (1)..(25): SEQ ID NO: 1962; WAN024CZ9; Start 430; Stop 454
caaaggactaatatcacggaaggta

SEQ ID NO: 310729 - DNA, 25 bp, Artificial
  probe
  misc_feature (1)..(25): SEQ ID NO: 1962; WAN024CZ9; Start 428; Stop 452
atcaaaggactaatatcacggaagg

SEQ ID NO: 310730 - DNA, 25 bp, Artificial
  probe
  misc_feature (1)..(25): SEQ ID NO: 1962; WAN024CZ9; Start 426; Stop 450
ccatcaaaggactaatatcacggaa

SEQ ID NO: 310731 - DNA, 25 bp, Artificial
  probe
  misc_feature (1)..(25): SEQ ID NO: 1962; WAN024CZ9; Start 422; Stop 446
tcagccatcaaaggactaatatcac

SEQ ID NO: 310732 - DNA, 25 bp, Artificial
  probe
  misc_feature (1)..(25): SEQ ID NO: 1962; WAN024CZ9; Start 419; Stop 443
ccatcagccatcaaaggactaatat

SEQ ID NO: 310733 - DNA, 25 bp, Artificial
  probe
  misc_feature (1)..(25): SEQ ID NO: 1962; WAN024CZ9; Start 109; Stop 133
catctcgatagttgccttaacagtt

SEQ ID NO: 310734 - DNA, 25 bp, Artificial
  probe
  misc_feature (1)..(25): SEQ ID NO: 1962; WAN024CZ9; Start 421; Stop 445
atcagccatcaaaggactaatatca

SEQ ID NO: 310735 - DNA, 25 bp, Artificial
  probe
  misc_feature (1)..(25): SEQ ID NO: 1962; WAN024CZ9; Start 408; Stop 432
tataagcatttccatcagccatcaa

SEQ ID NO: 310736 - DNA, 25 bp, Artificial
  probe
  misc_feature (1)..(25): SEQ ID NO: 1962; WAN024CZ9; Start 427; Stop 451
catcaaaggactaatatcacggaag

SEQ ID NO: 310737 - DNA, 25 bp, Artificial
  probe
  misc_feature (1)..(25): SEQ ID NO: 1962; WAN024CZ9; Start 420; Stop 444
catcagccatcaaaggactaatatc

SEQ ID NO: 310738 - DNA, 25 bp, Artificial
  probe
  misc_feature (1)..(25): SEQ ID NO: 1962; WAN024CZ9; Start 431; Stop 455
aaaggactaatatcacggaaggtaa

SEQ ID NO: 310739 - DNA, 25 bp, Artificial
  probe
  misc_feature (1)..(25): SEQ ID NO: 1962; WAN024CZ9; Start 149; Stop 173
aggtcatctacaataagaacacgtt

SEQ ID NO: 310740 - DNA, 25 bp, Artificial
  probe
  misc_feature (1)..(25): SEQ ID NO: 1962; WAN024CZ9; Start 148; Stop 172
aaggtcatctacaataagaacacgt

SEQ ID NO: 310741 - DNA, 25 bp, Artificial
  probe
  misc_feature (1)..(25): SEQ ID NO: 1962; WAN024CZ9; Start 407; Stop 431
ctataagcatttccatcagccatca

SEQ ID NO: 310742 - DNA, 25 bp, Artificial
  probe
  misc_feature (1)..(25): SEQ ID NO: 1963; WAN024GF9; Start 884; Stop 908
cgactatggagattatcaaggactt

SEQ ID NO: 310743 - DNA, 25 bp, Artificial
  probe
  misc_feature (1)..(25): SEQ ID NO: 1963; WAN024GF9; Start 792; Stop 816
tatcaagagtcagttacgagcagat

SEQ ID NO: 310744 - DNA, 25 bp, Artificial
  probe
  misc_feature (1)..(25): SEQ ID NO: 1963; WAN024GF9; Start 1682; Stop 1706
cagtgagaggcttgtatgaattaag

SEQ ID NO: 310745 - DNA, 25 bp, Artificial
  probe
  misc_feature (1)..(25): SEQ ID NO: 1963; WAN024GF9; Start 1681; Stop 1705
gcagtgagaggcttgtatgaattaa

SEQ ID NO: 310746 - DNA, 25 bp, Artificial
  probe
  misc_feature (1)..(25): SEQ ID NO: 1963; WAN024GF9; Start 880; Stop 904
attgcgactatggagattatcaagg

SEQ ID NO: 310747 - DNA, 25 bp, Artificial
  probe
  misc_feature (1)..(25): SEQ ID NO: 1963; WAN024GF9; Start 1316; Stop 1340
agtctggagagatagaacttagtcg

SEQ ID NO: 310748 - DNA, 25 bp, Artificial
  probe
  misc_feature (1)..(25): SEQ ID NO: 1963; WAN024GF9; Start 879; Stop 903
aattgcgactatggagattatcaag

SEQ ID NO: 310749 - DNA, 25 bp, Artificial
  probe
  misc_feature (1)..(25): SEQ ID NO: 1963; WAN024GF9; Start 791; Stop 815
ctatcaagagtcagttacgagcaga

SEQ ID NO: 310750 - DNA, 25 bp, Artificial
  probe
  misc_feature (1)..(25): SEQ ID NO: 1963; WAN024GF9; Start 883; Stop 907
gcgactatggagattatcaaggact

SEQ ID NO: 310751 - DNA, 25 bp, Artificial
  probe
  misc_feature (1)..(25): SEQ ID NO: 1963; WAN024GF9; Start 881; Stop 905
ttgcgactatggagattatcaagga

SEQ ID NO: 310752 - DNA, 25 bp, Artificial
  probe
  misc_feature (1)..(25): SEQ ID NO: 1963; WAN024GF9; Start 977; Stop 1001
ttaatgttgctatccgaactattca

SEQ ID NO: 310753 - DNA, 25 bp, Artificial
  probe
  misc_feature (1)..(25): SEQ ID NO: 1963; WAN024GF9; Start 882; Stop 906
tgcgactatggagattatcaaggac

SEQ ID NO: 310754 - DNA, 25 bp, Artificial
  probe
  misc_feature (1)..(25): SEQ ID NO: 1963; WAN024GF9; Start 1476; Stop 1500
ttaccacaataagtcaggagaactg

SEQ ID NO: 310755 - DNA, 25 bp, Artificial
  probe
  misc_feature (1)..(25): SEQ ID NO: 1963; WAN024GF9; Start 1310; Stop 1334
tcagtaagtctggagagatagaact

SEQ ID NO: 310756 - DNA, 25 bp, Artificial
  probe
  misc_feature (1)..(25): SEQ ID NO: 1963; WAN024GF9; Start 978; Stop 1002
taatgttgctatccgaactattcaa

SEQ ID NO: 310757 - DNA, 25 bp, Artificial
  probe
  misc_feature (1)..(25): SEQ ID NO: 1963; WAN024GF9; Start 1309; Stop 1333
ctcagtaagtctggagagatagaac

SEQ ID NO: 310758 - DNA, 25 bp, Artificial
  probe
  misc_feature (1)..(25): SEQ ID NO: 1963; WAN024GF9; Start 886; Stop 910
actatggagattatcaaggacttgg

SEQ ID NO: 310759 - DNA, 25 bp, Artificial
  probe
  misc_feature (1)..(25): SEQ ID NO: 1963; WAN024GF9; Start 1482; Stop 1506
caataagtcaggagaactgcttgaa

SEQ ID NO: 310760 - DNA, 25 bp, Artificial
  probe
  misc_feature (1)..(25): SEQ ID NO: 1963; WAN024GF9; Start 888; Stop 912
tatggagattatcaaggacttggag

SEQ ID NO: 310761 - DNA, 25 bp, Artificial
  probe
  misc_feature (1)..(25): SEQ ID NO: 1963; WAN024GF9; Start 887; Stop 911
ctatggagattatcaaggacttgga

SEQ ID NO: 310762 - DNA, 25 bp, Artificial
  probe
  misc_feature (1)..(25): SEQ ID NO: 1963; WAN024GF9; Start 498; Stop 522
ggaacatgacgatatggcagtaatt

SEQ ID NO: 310763 - DNA, 25 bp, Artificial
  probe
  misc_feature (1)..(25): SEQ ID NO: 1963; WAN024GF9; Start 790; Stop 814
actatcaagagtcagttacgagcag

SEQ ID NO: 310764 - DNA, 25 bp, Artificial
  probe
  misc_feature (1)..(25): SEQ ID NO: 1963; WAN024GF9; Start 1692; Stop 1716
cttgtatgaattaagcctagaggaa

SEQ ID NO: 310765 - DNA, 25 bp, Artificial
  probe
  misc_feature (1)..(25): SEQ ID NO: 1963; WAN024GF9; Start 793; Stop 817
atcaagagtcagttacgagcagatg

SEQ ID NO: 310766 - DNA, 25 bp, Artificial
  probe
  misc_feature (1)..(25): SEQ ID NO: 1963; WAN024GF9; Start 1021; Stop 1045
atctatggagttggcggaggtatta

SEQ ID NO: 310767 - DNA, 25 bp, Artificial
  probe
  misc_feature (1)..(25): SEQ ID NO: 1963; WAN024GF9; Start 885; Stop 909
gactatggagattatcaaggacttg

SEQ ID NO: 310768 - DNA, 25 bp, Artificial
  probe
  misc_feature (1)..(25): SEQ ID NO: 1963; WAN024GF9; Start 1480; Stop 1504
cacaataagtcaggagaactgcttg

SEQ ID NO: 310769 - DNA, 25 bp, Artificial
  probe
  misc_feature (1)..(25): SEQ ID NO: 1963; WAN024GF9; Start 799; Stop 823
agtcagttacgagcagatgttgatt

SEQ ID NO: 310770 - DNA, 25 bp, Artificial
  probe
  misc_feature (1)..(25): SEQ ID NO: 1963; WAN024GF9; Start 1317; Stop 1341
gtctggagagatagaacttagtcga

SEQ ID NO: 310771 - DNA, 25 bp, Artificial
  probe
  misc_feature (1)..(25): SEQ ID NO: 1963; WAN024GF9; Start 1607; Stop 1631
aaacaggacaagtagaagagaaagt

SEQ ID NO: 310772 - DNA, 25 bp, Artificial
  probe
  misc_feature (1)..(25): SEQ ID NO: 1963; WAN024GF9; Start 1481; Stop 1505
acaataagtcaggagaactgcttga

SEQ ID NO: 310773 - DNA, 25 bp, Artificial
  probe
  misc_feature (1)..(25): SEQ ID NO: 1963; WAN024GF9; Start 802; Stop 826
cagttacgagcagatgttgatttag

SEQ ID NO: 310774 - DNA, 25 bp, Artificial
  probe
  misc_feature (1)..(25): SEQ ID NO: 1963; WAN024GF9; Start 796; Stop 820
aagagtcagttacgagcagatgttg

SEQ ID NO: 310775 - DNA, 25 bp, Artificial
  probe
  misc_feature (1)..(25): SEQ ID NO: 1964; WAN024GFB; Start 884; Stop 908
cgacaatggagattatcaaggactt

SEQ ID NO: 310776 - DNA, 25 bp, Artificial
  probe
  misc_feature (1)..(25): SEQ ID NO: 1964; WAN024GFB; Start 130; Stop 154
caagagcaaggttattatgtggtgg

SEQ ID NO: 310777 - DNA, 25 bp, Artificial
  probe
  misc_feature (1)..(25): SEQ ID NO: 1964; WAN024GFB; Start 888; Stop 912
aatggagattatcaaggacttggag

SEQ ID NO: 310778 - DNA, 25 bp, Artificial
  probe
  misc_feature (1)..(25): SEQ ID NO: 1964; WAN024GFB; Start 887; Stop 911
caatggagattatcaaggacttgga

SEQ ID NO: 310779 - DNA, 25 bp, Artificial
  probe
  misc_feature (1)..(25): SEQ ID NO: 1964; WAN024GFB; Start 886; Stop 910
acaatggagattatcaaggacttgg

SEQ ID NO: 310780 - DNA, 25 bp, Artificial
  probe
  misc_feature (1)..(25): SEQ ID NO: 1964; WAN024GFB; Start 885; Stop 909
gacaatggagattatcaaggacttg

SEQ ID NO: 310781 - DNA, 25 bp, Artificial
  probe
  misc_feature (1)..(25): SEQ ID NO: 1964; WAN024GFB; Start 746; Stop 770
tgtgtcaggtagagcagtattcaac

SEQ ID NO: 310782 - DNA, 25 bp, Artificial
  probe
  misc_feature (1)..(25): SEQ ID NO: 1964; WAN024GFB; Start 986; Stop 1010
ccattcgtaccattcaacttcacaa

SEQ ID NO: 310783 - DNA, 25 bp, Artificial
  probe
  misc_feature (1)..(25): SEQ ID NO: 1964; WAN024GFB; Start 747; Stop 771
gtgtcaggtagagcagtattcaact

SEQ ID NO: 310784 - DNA, 25 bp, Artificial
  probe
  misc_feature (1)..(25): SEQ ID NO: 1964; WAN024GFB; Start 881; Stop 905
ttgcgacaatggagattatcaagga

SEQ ID NO: 310785 - DNA, 25 bp, Artificial
  probe
  misc_feature (1)..(25): SEQ ID NO: 1964; WAN024GFB; Start 127; Stop 151
taccaagagcaaggttattatgtgg

SEQ ID NO: 310786 - DNA, 25 bp, Artificial
  probe
  misc_feature (1)..(25): SEQ ID NO: 1964; WAN024GFB; Start 126; Stop 150
ctaccaagagcaaggttattatgtg

SEQ ID NO: 310787 - DNA, 25 bp, Artificial
  probe
  misc_feature (1)..(25): SEQ ID NO: 1964; WAN024GFB; Start 883; Stop 907
gcgacaatggagattatcaaggact

SEQ ID NO: 310788 - DNA, 25 bp, Artificial
  probe
  misc_feature (1)..(25): SEQ ID NO: 1964; WAN024GFB; Start 1604; Stop 1628
tagaaacaggacaggtagaagagaa

SEQ ID NO: 310789 - DNA, 25 bp, Artificial
  probe
  misc_feature (1)..(25): SEQ ID NO: 1964; WAN024GFB; Start 282; Stop 306
gacttatgaggatattgatttgccc

SEQ ID NO: 310790 - DNA, 25 bp, Artificial
  probe
  misc_feature (1)..(25): SEQ ID NO: 1964; WAN024GFB; Start 745; Stop 769
ctgtgtcaggtagagcagtattcaa

SEQ ID NO: 310791 - DNA, 25 bp, Artificial
  probe
  misc_feature (1)..(25): SEQ ID NO: 1964; WAN024GFB; Start 1606; Stop 1630
gaaacaggacaggtagaagagaaag

SEQ ID NO: 310792 - DNA, 25 bp, Artificial
  probe
  misc_feature (1)..(25): SEQ ID NO: 1964; WAN024GFB; Start 882; Stop 906
tgcgacaatggagattatcaaggac

SEQ ID NO: 310793 - DNA, 25 bp, Artificial
  probe
  misc_feature (1)..(25): SEQ ID NO: 1964; WAN024GFB; Start 1605; Stop 1629
agaaacaggacaggtagaagagaaa

SEQ ID NO: 310794 - DNA, 25 bp, Artificial
  probe
  misc_feature (1)..(25): SEQ ID NO: 1964; WAN024GFB; Start 879; Stop 903
aattgcgacaatggagattatcaag

SEQ ID NO: 310795 - DNA, 25 bp, Artificial
  probe
  misc_feature (1)..(25): SEQ ID NO: 1964; WAN024GFB; Start 695; Stop 719
gcaatgatatgaaccgtatttctga

SEQ ID NO: 310796 - DNA, 25 bp, Artificial
  probe
  misc_feature (1)..(25): SEQ ID NO: 1964; WAN024GFB; Start 694; Stop 718
cgcaatgatatgaaccgtatttctg

SEQ ID NO: 310797 - DNA, 25 bp, Artificial
  probe
  misc_feature (1)..(25): SEQ ID NO: 1964; WAN024GFB; Start 281; Stop 305
tgacttatgaggatattgatttgcc

SEQ ID NO: 310798 - DNA, 25 bp, Artificial
  probe
  misc_feature (1)..(25): SEQ ID NO: 1964; WAN024GFB; Start 1607; Stop 1631
aaacaggacaggtagaagagaaagt

SEQ ID NO: 310799 - DNA, 25 bp, Artificial
  probe
  misc_feature (1)..(25): SEQ ID NO: 1964; WAN024GFB; Start 1003; Stop 1027
cttcacaaaggtcaagccatttatg

SEQ ID NO: 310800 - DNA, 25 bp, Artificial
  probe
  misc_feature (1)..(25): SEQ ID NO: 1964; WAN024GFB; Start 702; Stop 726
tatgaaccgtatttctgaagttggg

SEQ ID NO: 310801 - DNA, 25 bp, Artificial
  probe
  misc_feature (1)..(25): SEQ ID NO: 1964; WAN024GFB; Start 701; Stop 725
atatgaaccgtatttctgaagttgg

SEQ ID NO: 310802 - DNA, 25 bp, Artificial
  probe
  misc_feature (1)..(25): SEQ ID NO: 1964; WAN024GFB; Start 1603; Stop 1627
ctagaaacaggacaggtagaagaga

SEQ ID NO: 310803 - DNA, 25 bp, Artificial
  probe
  misc_feature (1)..(25): SEQ ID NO: 1964; WAN024GFB; Start 1002; Stop 1026
acttcacaaaggtcaagccatttat

SEQ ID NO: 310804 - DNA, 25 bp, Artificial
  probe
  misc_feature (1)..(25): SEQ ID NO: 1964; WAN024GFB; Start 743; Stop 767
gtctgtgtcaggtagagcagtattc

SEQ ID NO: 310805 - DNA, 25 bp, Artificial
  probe
  misc_feature (1)..(25): SEQ ID NO: 1964; WAN024GFB; Start 1001; Stop 1025
aacttcacaaaggtcaagccattta

SEQ ID NO: 310806 - DNA, 25 bp, Artificial
  probe
  misc_feature (1)..(25): SEQ ID NO: 1964; WAN024GFB; Start 987; Stop 1011
cattcgtaccattcaacttcacaaa

SEQ ID NO: 310807 - DNA, 25 bp, Artificial
  probe
  misc_feature (1)..(25): SEQ ID NO: 1964; WAN024GFB; Start 129; Stop 153
ccaagagcaaggttattatgtggtg

SEQ ID NO: 310808 - DNA, 25 bp, Artificial
  probe
  misc_feature (1)..(25): SEQ ID NO: 1965; WAN024F2W; Start 171; Stop 195
gcttgtatctactcttctatttgcc

SEQ ID NO: 310809 - DNA, 25 bp, Artificial
  probe
  misc_feature (1)..(25): SEQ ID NO: 1965; WAN024F2W; Start 170; Stop 194
tgcttgtatctactcttctatttgc

SEQ ID NO: 310810 - DNA, 25 bp, Artificial
  probe
  misc_feature (1)..(25): SEQ ID NO: 1965; WAN024F2W; Start 181; Stop 205
actcttctatttgcctattcacaag

SEQ ID NO: 310811 - DNA, 25 bp, Artificial
  probe
  misc_feature (1)..(25): SEQ ID NO: 1965; WAN024F2W; Start 179; Stop 203
ctactcttctatttgcctattcaca

SEQ ID NO: 310812 - DNA, 25 bp, Artificial
  probe
  misc_feature (1)..(25): SEQ ID NO: 1965; WAN024F2W; Start 31; Stop 55
actttaccactagaaatcagttcct

SEQ ID NO: 310813 - DNA, 25 bp, Artificial
  probe
  misc_feature (1)..(25): SEQ ID NO: 1965; WAN024F2W; Start 178; Stop 202
tctactcttctatttgcctattcac

SEQ ID NO: 310814 - DNA, 25 bp, Artificial
  probe
  misc_feature (1)..(25): SEQ ID NO: 1965; WAN024F2W; Start 172; Stop 196
cttgtatctactcttctatttgcct

SEQ ID NO: 310815 - DNA, 25 bp, Artificial
  probe
  misc_feature (1)..(25): SEQ ID NO: 1965; WAN024F2W; Start 186; Stop 210
tctatttgcctattcacaagggatt

SEQ ID NO: 310816 - DNA, 25 bp, Artificial
  probe
  misc_feature (1)..(25): SEQ ID NO: 1965; WAN024F2W; Start 185; Stop 209
ttctatttgcctattcacaagggat

SEQ ID NO: 310817 - DNA, 25 bp, Artificial
  probe
  misc_feature (1)..(25): SEQ ID NO: 1965; WAN024F2W; Start 184; Stop 208
cttctatttgcctattcacaaggga

SEQ ID NO: 310818 - DNA, 25 bp, Artificial
  probe
  misc_feature (1)..(25): SEQ ID NO: 1965; WAN024F2W; Start 183; Stop 207
tcttctatttgcctattcacaaggg

SEQ ID NO: 310819 - DNA, 25 bp, Artificial
  probe
  misc_feature (1)..(25): SEQ ID NO: 1965; WAN024F2W; Start 182; Stop 206
ctcttctatttgcctattcacaagg

SEQ ID NO: 310820 - DNA, 25 bp, Artificial
  probe
  misc_feature (1)..(25): SEQ ID NO: 1965; WAN024F2W; Start 187; Stop 211
ctatttgcctattcacaagggattt

SEQ ID NO: 310821 - DNA, 25 bp, Artificial
  probe
  misc_feature (1)..(25): SEQ ID NO: 1965; WAN024F2W; Start 33; Stop 57
tttaccactagaaatcagttccttc

SEQ ID NO: 310822 - DNA, 25 bp, Artificial
  probe
  misc_feature (1)..(25): SEQ ID NO: 1965; WAN024F2W; Start 32; Stop 56
ctttaccactagaaatcagttcctt

SEQ ID NO: 310823 - DNA, 25 bp, Artificial
  probe
  misc_feature (1)..(25): SEQ ID NO: 1965; WAN024F2W; Start 180; Stop 204
tactcttctatttgcctattcacaa

SEQ ID NO: 310824 - DNA, 25 bp, Artificial
  probe
  misc_feature (1)..(25): SEQ ID NO: 1965; WAN024F2W; Start 177; Stop 201
atctactcttctatttgcctattca

SEQ ID NO: 310825 - DNA, 25 bp, Artificial
  probe
  misc_feature (1)..(25): SEQ ID NO: 1965; WAN024F2W; Start 173; Stop 197
ttgtatctactcttctatttgccta

SEQ ID NO: 310826 - DNA, 25 bp, Artificial
  probe
  misc_feature (1)..(25): SEQ ID NO: 1965; WAN024F2W; Start 35; Stop 59
taccactagaaatcagttccttctt

SEQ ID NO: 310827 - DNA, 25 bp, Artificial
  probe
  misc_feature (1)..(25): SEQ ID NO: 1965; WAN024F2W; Start 34; Stop 58
ttaccactagaaatcagttccttct

SEQ ID NO: 310828 - DNA, 25 bp, Artificial
  probe
  misc_feature (1)..(25): SEQ ID NO: 1965; WAN024F2W; Start 196; Stop 220
tattcacaagggattttctctggtc

SEQ ID NO: 310829 - DNA, 25 bp, Artificial
  probe
  misc_feature (1)..(25): SEQ ID NO: 1965; WAN024F2W; Start 195; Stop 219
ctattcacaagggattttctctggt

SEQ ID NO: 310830 - DNA, 25 bp, Artificial
  probe
  misc_feature (1)..(25): SEQ ID NO: 1965; WAN024F2W; Start 174; Stop 198
tgtatctactcttctatttgcctat

SEQ ID NO: 310831 - DNA, 25 bp, Artificial
  probe
  misc_feature (1)..(25): SEQ ID NO: 1965; WAN024F2W; Start 169; Stop 193
atgcttgtatctactcttctatttg

SEQ ID NO: 310832 - DNA, 25 bp, Artificial
  probe
  misc_feature (1)..(25): SEQ ID NO: 1965; WAN024F2W; Start 30; Stop 54
aactttaccactagaaatcagttcc

SEQ ID NO: 310833 - DNA, 25 bp, Artificial
  probe
  misc_feature (1)..(25): SEQ ID NO: 1965; WAN024F2W; Start 189; Stop 213
atttgcctattcacaagggattttc

SEQ ID NO: 310834 - DNA, 25 bp, Artificial
  probe
  misc_feature (1)..(25): SEQ ID NO: 1965; WAN024F2W; Start 190; Stop 214
tttgcctattcacaagggattttct

SEQ ID NO: 310835 - DNA, 25 bp, Artificial
  probe
  misc_feature (1)..(25): SEQ ID NO: 1965; WAN024F2W; Start 194; Stop 218
cctattcacaagggattttctctgg

SEQ ID NO: 310836 - DNA, 25 bp, Artificial
  probe
  misc_feature (1)..(25): SEQ ID NO: 1965; WAN024F2W; Start 188; Stop 212
tatttgcctattcacaagggatttt

SEQ ID NO: 310837 - DNA, 25 bp, Artificial
  probe
  misc_feature (1)..(25): SEQ ID NO: 1965; WAN024F2W; Start 191; Stop 215
ttgcctattcacaagggattttctc

SEQ ID NO: 310838 - DNA, 25 bp, Artificial
  probe
  misc_feature (1)..(25): SEQ ID NO: 1965; WAN024F2W; Start 168; Stop 192
aatgcttgtatctactcttctattt

SEQ ID NO: 310839 - DNA, 25 bp, Artificial
  probe
  misc_feature (1)..(25): SEQ ID NO: 1965; WAN024F2W; Start 167; Stop 191
aaatgcttgtatctactcttctatt

SEQ ID NO: 310840 - DNA, 25 bp, Artificial
  probe
  misc_feature (1)..(25): SEQ ID NO: 1965; WAN024F2W; Start 193; Stop 217
gcctattcacaagggattttctctg

SEQ ID NO: 310841 - DNA, 25 bp, Artificial
  probe
  misc_feature (1)..(25): SEQ ID NO: 1966; WAN024GAA; Start 5; Stop 29
atattgaacatcttagccactggag

SEQ ID NO: 310842 - DNA, 25 bp, Artificial
  probe
  misc_feature (1)..(25): SEQ ID NO: 1966; WAN024GAA; Start 4; Stop 28
catattgaacatcttagccactgga

SEQ ID NO: 310843 - DNA, 25 bp, Artificial
  probe
  misc_feature (1)..(25): SEQ ID NO: 1966; WAN024GAA; Start 6; Stop 30
tattgaacatcttagccactggagt

SEQ ID NO: 310844 - DNA, 25 bp, Artificial
  probe
  misc_feature (1)..(25): SEQ ID NO: 1966; WAN024GAA; Start 3; Stop 27
gcatattgaacatcttagccactgg

SEQ ID NO: 310845 - DNA, 25 bp, Artificial
  probe
  misc_feature (1)..(25): SEQ ID NO: 1966; WAN024GAA; Start 107; Stop 131
gtggtagtcacaacgaatactatga

SEQ ID NO: 310846 - DNA, 25 bp, Artificial
  probe
  misc_feature (1)..(25): SEQ ID NO: 1966; WAN024GAA; Start 108; Stop 132
tggtagtcacaacgaatactatgat

SEQ ID NO: 310847 - DNA, 25 bp, Artificial
  probe
  misc_feature (1)..(25): SEQ ID NO: 1966; WAN024GAA; Start 106; Stop 130
ggtggtagtcacaacgaatactatg

SEQ ID NO: 310848 - DNA, 25 bp, Artificial
  probe
  misc_feature (1)..(25): SEQ ID NO: 1966; WAN024GAA; Start 105; Stop 129
aggtggtagtcacaacgaatactat

SEQ ID NO: 310849 - DNA, 25 bp, Artificial
  probe
  misc_feature (1)..(25): SEQ ID NO: 1966; WAN024GAA; Start 109; Stop 133
ggtagtcacaacgaatactatgatt

SEQ ID NO: 310850 - DNA, 25 bp, Artificial
  probe
  misc_feature (1)..(25): SEQ ID NO: 1966; WAN024GAA; Start 177; Stop 201
tgtccagttctttaccctatctagt

SEQ ID NO: 310851 - DNA, 25 bp, Artificial
  probe
  misc_feature (1)..(25): SEQ ID NO: 1966; WAN024GAA; Start 2; Stop 26
tgcatattgaacatcttagccactg

SEQ ID NO: 310852 - DNA, 25 bp, Artificial
  probe
  misc_feature (1)..(25): SEQ ID NO: 1966; WAN024GAA; Start 104; Stop 128
caggtggtagtcacaacgaatacta

SEQ ID NO: 310853 - DNA, 25 bp, Artificial
  probe
  misc_feature (1)..(25): SEQ ID NO: 1966; WAN024GAA; Start 102; Stop 126
atcaggtggtagtcacaacgaatac

SEQ ID NO: 310854 - DNA, 25 bp, Artificial
  probe
  misc_feature (1)..(25): SEQ ID NO: 1966; WAN024GAA; Start 101; Stop 125
catcaggtggtagtcacaacgaata

SEQ ID NO: 310855 - DNA, 25 bp, Artificial
  probe
  misc_feature (1)..(25): SEQ ID NO: 1966; WAN024GAA; Start 45; Stop 69
tgaaatgtaccttaaccgttatgga

SEQ ID NO: 310856 - DNA, 25 bp, Artificial
  probe
  misc_feature (1)..(25): SEQ ID NO: 1966; WAN024GAA; Start 44; Stop 68
gtgaaatgtaccttaaccgttatgg

SEQ ID NO: 310857 - DNA, 25 bp, Artificial
  probe
  misc_feature (1)..(25): SEQ ID NO: 1966; WAN024GAA; Start 46; Stop 70
gaaatgtaccttaaccgttatggac

SEQ ID NO: 310858 - DNA, 25 bp, Artificial
  probe
  misc_feature (1)..(25): SEQ ID NO: 1966; WAN024GAA; Start 43; Stop 67
cgtgaaatgtaccttaaccgttatg

SEQ ID NO: 310859 - DNA, 25 bp, Artificial
  probe
  misc_feature (1)..(25): SEQ ID NO: 1966; WAN024GAA; Start 50; Stop 74
tgtaccttaaccgttatggacatgg

SEQ ID NO: 310860 - DNA, 25 bp, Artificial
  probe
  misc_feature (1)..(25): SEQ ID NO: 1966; WAN024GAA; Start 42; Stop 66
ccgtgaaatgtaccttaaccgttat

SEQ ID NO: 310861 - DNA, 25 bp, Artificial
  probe
  misc_feature (1)..(25): SEQ ID NO: 1966; WAN024GAA; Start 48; Stop 72
aatgtaccttaaccgttatggacat

SEQ ID NO: 310862 - DNA, 25 bp, Artificial
  probe
  misc_feature (1)..(25): SEQ ID NO: 1966; WAN024GAA; Start 141; Stop 165
gattgatgcctgtgcttcctttatc

SEQ ID NO: 310863 - DNA, 25 bp, Artificial
  probe
  misc_feature (1)..(25): SEQ ID NO: 1966; WAN024GAA; Start 47; Stop 71
aaatgtaccttaaccgttatggaca

SEQ ID NO: 310864 - DNA, 25 bp, Artificial
  probe
  misc_feature (1)..(25): SEQ ID NO: 1966; WAN024GAA; Start 49; Stop 73
atgtaccttaaccgttatggacatg

SEQ ID NO: 310865 - DNA, 25 bp, Artificial
  probe
  misc_feature (1)..(25): SEQ ID NO: 1966; WAN024GAA; Start 52; Stop 76
taccttaaccgttatggacatggtg

SEQ ID NO: 310866 - DNA, 25 bp, Artificial
  probe
  misc_feature (1)..(25): SEQ ID NO: 1966; WAN024GAA; Start 51; Stop 75
gtaccttaaccgttatggacatggt

SEQ ID NO: 310867 - DNA, 25 bp, Artificial
  probe
  misc_feature (1)..(25): SEQ ID NO: 1966; WAN024GAA; Start 103; Stop 127
tcaggtggtagtcacaacgaatact

SEQ ID NO: 310868 - DNA, 25 bp, Artificial
  probe
  misc_feature (1)..(25): SEQ ID NO: 1966; WAN024GAA; Start 140; Stop 164
tgattgatgcctgtgcttcctttat

SEQ ID NO: 310869 - DNA, 25 bp, Artificial
  probe
  misc_feature (1)..(25): SEQ ID NO: 1966; WAN024GAA; Start 139; Stop 163
atgattgatgcctgtgcttccttta

SEQ ID NO: 310870 - DNA, 25 bp, Artificial
  probe
  misc_feature (1)..(25): SEQ ID NO: 1966; WAN024GAA; Start 41; Stop 65
accgtgaaatgtaccttaaccgtta

SEQ ID NO: 310871 - DNA, 25 bp, Artificial
  probe
  misc_feature (1)..(25): SEQ ID NO: 1966; WAN024GAA; Start 39; Stop 63
taaccgtgaaatgtaccttaaccgt

SEQ ID NO: 310872 - DNA, 25 bp, Artificial
  probe
  misc_feature (1)..(25): SEQ ID NO: 1966; WAN024GAA; Start 7; Stop 31
attgaacatcttagccactggagtg

SEQ ID NO: 310873 - DNA, 25 bp, Artificial
  probe
  misc_feature (1)..(25): SEQ ID NO: 1966; WAN024GAA; Start 276; Stop 300
ttatgtgattgaggaggccattctt

SEQ ID NO: 310874 - DNA, 25 bp, Artificial
  probe
  misc_feature (1)..(25): SEQ ID NO: 1967; WAN024G7I; Start 787; Stop 811
attggcttcgtaggtcttatagttc

SEQ ID NO: 310875 - DNA, 25 bp, Artificial
  probe
  misc_feature (1)..(25): SEQ ID NO: 1967; WAN024G7I; Start 308; Stop 332
caggagcaagtcttagtgtagtaat

SEQ ID NO: 310876 - DNA, 25 bp, Artificial
  probe
  misc_feature (1)..(25): SEQ ID NO: 1967; WAN024G7I; Start 786; Stop 810
tattggcttcgtaggtcttatagtt

SEQ ID NO: 310877 - DNA, 25 bp, Artificial
  probe
  misc_feature (1)..(25): SEQ ID NO: 1967; WAN024G7I; Start 692; Stop 716
ctgttggtcttggagttaatgttaa

SEQ ID NO: 310878 - DNA, 25 bp, Artificial
  probe
  misc_feature (1)..(25): SEQ ID NO: 1967; WAN024G7I; Start 309; Stop 333
aggagcaagtcttagtgtagtaatt

SEQ ID NO: 310879 - DNA, 25 bp, Artificial
  probe
  misc_feature (1)..(25): SEQ ID NO: 1967; WAN024G7I; Start 691; Stop 715
gctgttggtcttggagttaatgtta

SEQ ID NO: 310880 - DNA, 25 bp, Artificial
  probe
  misc_feature (1)..(25): SEQ ID NO: 1967; WAN024G7I; Start 312; Stop 336
agcaagtcttagtgtagtaattggt

SEQ ID NO: 310881 - DNA, 25 bp, Artificial
  probe
  misc_feature (1)..(25): SEQ ID NO: 1967; WAN024G7I; Start 693; Stop 717
tgttggtcttggagttaatgttaat

SEQ ID NO: 310882 - DNA, 25 bp, Artificial
  probe
  misc_feature (1)..(25): SEQ ID NO: 1967; WAN024G7I; Start 470; Stop 494
tatcaggaacttgtgttagtatggc

SEQ ID NO: 310883 - DNA, 25 bp, Artificial
  probe
  misc_feature (1)..(25): SEQ ID NO: 1967; WAN024G7I; Start 313; Stop 337
gcaagtcttagtgtagtaattggtc

SEQ ID NO: 310884 - DNA, 25 bp, Artificial
  probe
  misc_feature (1)..(25): SEQ ID NO: 1967; WAN024G7I; Start 355; Stop 379
tcatcaagcataagccatataagtt

SEQ ID NO: 310885 - DNA, 25 bp, Artificial
  probe
  misc_feature (1)..(25): SEQ ID NO: 1967; WAN024G7I; Start 354; Stop 378
ttcatcaagcataagccatataagt

SEQ ID NO: 310886 - DNA, 25 bp, Artificial
  probe
  misc_feature (1)..(25): SEQ ID NO: 1967; WAN024G7I; Start 311; Stop 335
gagcaagtcttagtgtagtaattgg

SEQ ID NO: 310887 - DNA, 25 bp, Artificial
  probe
  misc_feature (1)..(25): SEQ ID NO: 1967; WAN024G7I; Start 310; Stop 334
ggagcaagtcttagtgtagtaattg

SEQ ID NO: 310888 - DNA, 25 bp, Artificial
  probe
  misc_feature (1)..(25): SEQ ID NO: 1967; WAN024G7I; Start 788; Stop 812
ttggcttcgtaggtcttatagttcc

SEQ ID NO: 310889 - DNA, 25 bp, Artificial
  probe
  misc_feature (1)..(25): SEQ ID NO: 1967; WAN024G7I; Start 696; Stop 720
tggtcttggagttaatgttaatagg

SEQ ID NO: 310890 - DNA, 25 bp, Artificial
  probe
  misc_feature (1)..(25): SEQ ID NO: 1967; WAN024G7I; Start 785; Stop 809
ctattggcttcgtaggtcttatagt

SEQ ID NO: 310891 - DNA, 25 bp, Artificial
  probe
  misc_feature (1)..(25): SEQ ID NO: 1967; WAN024G7I; Start 307; Stop 331
acaggagcaagtcttagtgtagtaa

SEQ ID NO: 310892 - DNA, 25 bp, Artificial
  probe
  misc_feature (1)..(25): SEQ ID NO: 1967; WAN024G7I; Start 697; Stop 721
ggtcttggagttaatgttaatagga

SEQ ID NO: 310893 - DNA, 25 bp, Artificial
  probe
  misc_feature (1)..(25): SEQ ID NO: 1967; WAN024G7I; Start 792; Stop 816
cttcgtaggtcttatagttcctcac

SEQ ID NO: 310894 - DNA, 25 bp, Artificial
  probe
  misc_feature (1)..(25): SEQ ID NO: 1967; WAN024G7I; Start 794; Stop 818
tcgtaggtcttatagttcctcactt

SEQ ID NO: 310895 - DNA, 25 bp, Artificial
  probe
  misc_feature (1)..(25): SEQ ID NO: 1967; WAN024G7I; Start 793; Stop 817
ttcgtaggtcttatagttcctcact

SEQ ID NO: 310896 - DNA, 25 bp, Artificial
  probe
  misc_feature (1)..(25): SEQ ID NO: 1967; WAN024G7I; Start 466; Stop 490
gccttatcaggaacttgtgttagta

SEQ ID NO: 310897 - DNA, 25 bp, Artificial
  probe
  misc_feature (1)..(25): SEQ ID NO: 1967; WAN024G7I; Start 471; Stop 495
atcaggaacttgtgttagtatggct

SEQ ID NO: 310898 - DNA, 25 bp, Artificial
  probe
  misc_feature (1)..(25): SEQ ID NO: 1967; WAN024G7I; Start 469; Stop 493
ttatcaggaacttgtgttagtatgg

SEQ ID NO: 310899 - DNA, 25 bp, Artificial
  probe
  misc_feature (1)..(25): SEQ ID NO: 1967; WAN024G7I; Start 472; Stop 496
tcaggaacttgtgttagtatggctt

SEQ ID NO: 310900 - DNA, 25 bp, Artificial
  probe
  misc_feature (1)..(25): SEQ ID NO: 1967; WAN024G7I; Start 574; Stop 598
cttggagcagctacattatcttcta

SEQ ID NO: 310901 - DNA, 25 bp, Artificial
  probe
  misc_feature (1)..(25): SEQ ID NO: 1967; WAN024G7I; Start 314; Stop 338
caagtcttagtgtagtaattggtct

SEQ ID NO: 310902 - DNA, 25 bp, Artificial
  probe
  misc_feature (1)..(25): SEQ ID NO: 1967; WAN024G7I; Start 575; Stop 599
ttggagcagctacattatcttctat

SEQ ID NO: 310903 - DNA, 25 bp, Artificial
  probe
  misc_feature (1)..(25): SEQ ID NO: 1967; WAN024G7I; Start 791; Stop 815
gcttcgtaggtcttatagttcctca

SEQ ID NO: 310904 - DNA, 25 bp, Artificial
  probe
  misc_feature (1)..(25): SEQ ID NO: 1967; WAN024G7I; Start 687; Stop 711
aatggctgttggtcttggagttaat

SEQ ID NO: 310905 - DNA, 25 bp, Artificial
  probe
  misc_feature (1)..(25): SEQ ID NO: 1967; WAN024G7I; Start 306; Stop 330
cacaggagcaagtcttagtgtagta

SEQ ID NO: 310906 - DNA, 25 bp, Artificial
  probe
  misc_feature (1)..(25): SEQ ID NO: 1967; WAN024G7I; Start 576; Stop 600
tggagcagctacattatcttctata

SEQ ID NO: 310907 - DNA, 25 bp, Artificial
  probe
  misc_feature (1)..(25): SEQ ID NO: 1968; WAN0249IQ; Start 6; Stop 30
tgctcttttctaaaatgttctttct

SEQ ID NO: 310908 - DNA, 25 bp, Artificial
  probe
  misc_feature (1)..(25): SEQ ID NO: 1968; WAN0249IQ; Start 5; Stop 29
atgctcttttctaaaatgttctttc

SEQ ID NO: 310909 - DNA, 25 bp, Artificial
  probe
  misc_feature (1)..(25): SEQ ID NO: 1968; WAN0249IQ; Start 4; Stop 28
catgctcttttctaaaatgttcttt

SEQ ID NO: 310910 - DNA, 25 bp, Artificial
  probe
  misc_feature (1)..(25): SEQ ID NO: 1968; WAN0249IQ; Start 7; Stop 31
gctcttttctaaaatgttctttcta

SEQ ID NO: 310911 - DNA, 25 bp, Artificial
  probe
  misc_feature (1)..(25): SEQ ID NO: 1969; WAN024CS7; Start 43; Stop 67
aatatcggctttcccaagactaaat

SEQ ID NO: 310912 - DNA, 25 bp, Artificial
  probe
  misc_feature (1)..(25): SEQ ID NO: 1969; WAN024CS7; Start 42; Stop 66
aaatatcggctttcccaagactaaa

SEQ ID NO: 310913 - DNA, 25 bp, Artificial
  probe
  misc_feature (1)..(25): SEQ ID NO: 1969; WAN024CS7; Start 44; Stop 68
atatcggctttcccaagactaaatc

SEQ ID NO: 310914 - DNA, 25 bp, Artificial
  probe
  misc_feature (1)..(25): SEQ ID NO: 1969; WAN024CS7; Start 200; Stop 224
ttattgatatagtcactagcacccg

SEQ ID NO: 310915 - DNA, 25 bp, Artificial
  probe
  misc_feature (1)..(25): SEQ ID NO: 1969; WAN024CS7; Start 45; Stop 69
tatcggctttcccaagactaaatcc

SEQ ID NO: 310916 - DNA, 25 bp, Artificial
  probe
  misc_feature (1)..(25): SEQ ID NO: 1969; WAN024CS7; Start 199; Stop 223
attattgatatagtcactagcaccc

SEQ ID NO: 310917 - DNA, 25 bp, Artificial
  probe
  misc_feature (1)..(25): SEQ ID NO: 1969; WAN024CS7; Start 198; Stop 222
aattattgatatagtcactagcacc

SEQ ID NO: 310918 - DNA, 25 bp, Artificial
  probe
  misc_feature (1)..(25): SEQ ID NO: 1969; WAN024CS7; Start 153; Stop 177
gatccagaacagtcacttcttcctg

SEQ ID NO: 310919 - DNA, 25 bp, Artificial
  probe
  misc_feature (1)..(25): SEQ ID NO: 1969; WAN024CS7; Start 41; Stop 65
aaaatatcggctttcccaagactaa

SEQ ID NO: 310920 - DNA, 25 bp, Artificial
  probe
  misc_feature (1)..(25): SEQ ID NO: 1969; WAN024CS7; Start 103; Stop 127
ctgatagagcattatgccgtaggtt

SEQ ID NO: 310921 - DNA, 25 bp, Artificial
  probe
  misc_feature (1)..(25): SEQ ID NO: 1969; WAN024CS7; Start 40; Stop 64
caaaatatcggctttcccaagacta

SEQ ID NO: 310922 - DNA, 25 bp, Artificial
  probe
  misc_feature (1)..(25): SEQ ID NO: 1969; WAN024CS7; Start 182; Stop 206
tgctttcttgccacaaaattattga

SEQ ID NO: 310923 - DNA, 25 bp, Artificial
  probe
  misc_feature (1)..(25): SEQ ID NO: 1969; WAN024CS7; Start 181; Stop 205
atgctttcttgccacaaaattattg

SEQ ID NO: 310924 - DNA, 25 bp, Artificial
  probe
  misc_feature (1)..(25): SEQ ID NO: 1969; WAN024CS7; Start 183; Stop 207
gctttcttgccacaaaattattgat

SEQ ID NO: 310925 - DNA, 25 bp, Artificial
  probe
  misc_feature (1)..(25): SEQ ID NO: 1969; WAN024CS7; Start 100; Stop 124
ctcctgatagagcattatgccgtag

SEQ ID NO: 310926 - DNA, 25 bp, Artificial
  probe
  misc_feature (1)..(25): SEQ ID NO: 1969; WAN024CS7; Start 104; Stop 128
tgatagagcattatgccgtaggttg

SEQ ID NO: 310927 - DNA, 25 bp, Artificial
  probe
  misc_feature (1)..(25): SEQ ID NO: 1969; WAN024CS7; Start 201; Stop 225
tattgatatagtcactagcacccgg

SEQ ID NO: 310928 - DNA, 25 bp, Artificial
  probe
  misc_feature (1)..(25): SEQ ID NO: 1969; WAN024CS7; Start 180; Stop 204
catgctttcttgccacaaaattatt

SEQ ID NO: 310929 - DNA, 25 bp, Artificial
  probe
  misc_feature (1)..(25): SEQ ID NO: 1969; WAN024CS7; Start 179; Stop 203
ccatgctttcttgccacaaaattat

SEQ ID NO: 310930 - DNA, 25 bp, Artificial
  probe
  misc_feature (1)..(25): SEQ ID NO: 1969; WAN024CS7; Start 105; Stop 129
gatagagcattatgccgtaggttgg

SEQ ID NO: 310931 - DNA, 25 bp, Artificial
  probe
  misc_feature (1)..(25): SEQ ID NO: 1969; WAN024CS7; Start 106; Stop 130
atagagcattatgccgtaggttgga

SEQ ID NO: 310932 - DNA, 25 bp, Artificial
  probe
  misc_feature (1)..(25): SEQ ID NO: 1969; WAN024CS7; Start 101; Stop 125
tcctgatagagcattatgccgtagg

SEQ ID NO: 310933 - DNA, 25 bp, Artificial
  probe
  misc_feature (1)..(25): SEQ ID NO: 1969; WAN024CS7; Start 102; Stop 126
cctgatagagcattatgccgtaggt

SEQ ID NO: 310934 - DNA, 25 bp, Artificial
  probe
  misc_feature (1)..(25): SEQ ID NO: 1969; WAN024CS7; Start 154; Stop 178
atccagaacagtcacttcttcctgc

SEQ ID NO: 310935 - DNA, 25 bp, Artificial
  probe
  misc_feature (1)..(25): SEQ ID NO: 1969; WAN024CS7; Start 202; Stop 226
attgatatagtcactagcacccggt

SEQ ID NO: 310936 - DNA, 25 bp, Artificial
  probe
  misc_feature (1)..(25): SEQ ID NO: 1969; WAN024CS7; Start 107; Stop 131
tagagcattatgccgtaggttggag

SEQ ID NO: 310937 - DNA, 25 bp, Artificial
  probe
  misc_feature (1)..(25): SEQ ID NO: 1969; WAN024CS7; Start 178; Stop 202
cccatgctttcttgccacaaaatta

SEQ ID NO: 310938 - DNA, 25 bp, Artificial
  probe
  misc_feature (1)..(25): SEQ ID NO: 1969; WAN024CS7; Start 190; Stop 214
tgccacaaaattattgatatagtca

SEQ ID NO: 310939 - DNA, 25 bp, Artificial
  probe
  misc_feature (1)..(25): SEQ ID NO: 1969; WAN024CS7; Start 191; Stop 215
gccacaaaattattgatatagtcac

SEQ ID NO: 310940 - DNA, 25 bp, Artificial
  probe
  misc_feature (1)..(25): SEQ ID NO: 1969; WAN024CS7; Start 184; Stop 208
ctttcttgccacaaaattattgata

SEQ ID NO: 310941 - DNA, 25 bp, Artificial
  probe
  misc_feature (1)..(25): SEQ ID NO: 1969; WAN024CS7; Start 203; Stop 227
ttgatatagtcactagcacccggtc

SEQ ID NO: 310942 - DNA, 25 bp, Artificial
  probe
  misc_feature (1)..(25): SEQ ID NO: 1969; WAN024CS7; Start 39; Stop 63
gcaaaatatcggctttcccaagact

SEQ ID NO: 310943 - DNA, 25 bp, Artificial
  probe
  misc_feature (1)..(25): SEQ ID NO: 1969; WAN024CS7; Start 85; Stop 109
aacctgcataacctgctcctgatag

SEQ ID NO: 310944 - DNA, 25 bp, Artificial
  probe
  misc_feature (1)..(25): SEQ ID NO: 1970; WAN024FYR; Start 446; Stop 470
atgtgttgaattattggaatggtgg

SEQ ID NO: 310945 - DNA, 25 bp, Artificial
  probe
  misc_feature (1)..(25): SEQ ID NO: 1970; WAN024FYR; Start 1004; Stop 1028
ggataatgttggcttcgtattactt

SEQ ID NO: 310946 - DNA, 25 bp, Artificial
  probe
  misc_feature (1)..(25): SEQ ID NO: 1970; WAN024FYR; Start 114; Stop 138
gactctgttacttgtggtatcagtt

SEQ ID NO: 310947 - DNA, 25 bp, Artificial
  probe
  misc_feature (1)..(25): SEQ ID NO: 1970; WAN024FYR; Start 445; Stop 469
tatgtgttgaattattggaatggtg

SEQ ID NO: 310948 - DNA, 25 bp, Artificial
  probe
  misc_feature (1)..(25): SEQ ID NO: 1970; WAN024FYR; Start 163; Stop 187
atatctatgaaggcaatcaatgtga

SEQ ID NO: 310949 - DNA, 25 bp, Artificial
  probe
  misc_feature (1)..(25): SEQ ID NO: 1970; WAN024FYR; Start 5; Stop 29
atgttagattagatggtttgctgga

SEQ ID NO: 310950 - DNA, 25 bp, Artificial
  probe
  misc_feature (1)..(25): SEQ ID NO: 1970; WAN024FYR; Start 330; Stop 354
taatgaaatcgcaaatctgatacgg

SEQ ID NO: 310951 - DNA, 25 bp, Artificial
  probe
  misc_feature (1)..(25): SEQ ID NO: 1970; WAN024FYR; Start 7; Stop 31
gttagattagatggtttgctggact

SEQ ID NO: 310952 - DNA, 25 bp, Artificial
  probe
  misc_feature (1)..(25): SEQ ID NO: 1970; WAN024FYR; Start 584; Stop 608
tggtattgagccttgcattgatatt

SEQ ID NO: 310953 - DNA, 25 bp, Artificial
  probe
  misc_feature (1)..(25): SEQ ID NO: 1970; WAN024FYR; Start 583; Stop 607
ttggtattgagccttgcattgatat

SEQ ID NO: 310954 - DNA, 25 bp, Artificial
  probe
  misc_feature (1)..(25): SEQ ID NO: 1970; WAN024FYR; Start 334; Stop 358
gaaatcgcaaatctgatacggaaat

SEQ ID NO: 310955 - DNA, 25 bp, Artificial
  probe
  misc_feature (1)..(25): SEQ ID NO: 1970; WAN024FYR; Start 113; Stop 137
cgactctgttacttgtggtatcagt

SEQ ID NO: 310956 - DNA, 25 bp, Artificial
  probe
  misc_feature (1)..(25): SEQ ID NO: 1970; WAN024FYR; Start 805; Stop 829
tgggataataaatctggaactggtt

SEQ ID NO: 310957 - DNA, 25 bp, Artificial
  probe
  misc_feature (1)..(25): SEQ ID NO: 1970; WAN024FYR; Start 804; Stop 828
atgggataataaatctggaactggt

SEQ ID NO: 310958 - DNA, 25 bp, Artificial
  probe
  misc_feature (1)..(25): SEQ ID NO: 1970; WAN024FYR; Start 8; Stop 32
ttagattagatggtttgctggacta

SEQ ID NO: 310959 - DNA, 25 bp, Artificial
  probe
  misc_feature (1)..(25): SEQ ID NO: 1970; WAN024FYR; Start 6; Stop 30
tgttagattagatggtttgctggac

SEQ ID NO: 310960 - DNA, 25 bp, Artificial
  probe
  misc_feature (1)..(25): SEQ ID NO: 1970; WAN024FYR; Start 444; Stop 468
ttatgtgttgaattattggaatggt

SEQ ID NO: 310961 - DNA, 25 bp, Artificial
  probe
  misc_feature (1)..(25): SEQ ID NO: 1970; WAN024FYR; Start 816; Stop 840
atctggaactggttcagcaactata

SEQ ID NO: 310962 - DNA, 25 bp, Artificial
  probe
  misc_feature (1)..(25): SEQ ID NO: 1970; WAN024FYR; Start 737; Stop 761
caagtggtgtgaagagatatgtttc

SEQ ID NO: 310963 - DNA, 25 bp, Artificial
  probe
  misc_feature (1)..(25): SEQ ID NO: 1970; WAN024FYR; Start 335; Stop 359
aaatcgcaaatctgatacggaaatt

SEQ ID NO: 310964 - DNA, 25 bp, Artificial
  probe
  misc_feature (1)..(25): SEQ ID NO: 1970; WAN024FYR; Start 10; Stop 34
agattagatggtttgctggactata

SEQ ID NO: 310965 - DNA, 25 bp, Artificial
  probe
  misc_feature (1)..(25): SEQ ID NO: 1970; WAN024FYR; Start 9; Stop 33
tagattagatggtttgctggactat

SEQ ID NO: 310966 - DNA, 25 bp, Artificial
  probe
  misc_feature (1)..(25): SEQ ID NO: 1970; WAN024FYR; Start 738; Stop 762
aagtggtgtgaagagatatgtttct

SEQ ID NO: 310967 - DNA, 25 bp, Artificial
  probe
  misc_feature (1)..(25): SEQ ID NO: 1970; WAN024FYR; Start 439; Stop 463
acggtttatgtgttgaattattgga

SEQ ID NO: 310968 - DNA, 25 bp, Artificial
  probe
  misc_feature (1)..(25): SEQ ID NO: 1970; WAN024FYR; Start 1001; Stop 1025
gagggataatgttggcttcgtatta

SEQ ID NO: 310969 - DNA, 25 bp, Artificial
  probe
  misc_feature (1)..(25): SEQ ID NO: 1970; WAN024FYR; Start 401; Stop 425
tttggcttattggtagtgtatttca

SEQ ID NO: 310970 - DNA, 25 bp, Artificial
  probe
  misc_feature (1)..(25): SEQ ID NO: 1970; WAN024FYR; Start 1003; Stop 1027
gggataatgttggcttcgtattact

SEQ ID NO: 310971 - DNA, 25 bp, Artificial
  probe
  misc_feature (1)..(25): SEQ ID NO: 1970; WAN024FYR; Start 1002; Stop 1026
agggataatgttggcttcgtattac

SEQ ID NO: 310972 - DNA, 25 bp, Artificial
  probe
  misc_feature (1)..(25): SEQ ID NO: 1970; WAN024FYR; Start 332; Stop 356
atgaaatcgcaaatctgatacggaa

SEQ ID NO: 310973 - DNA, 25 bp, Artificial
  probe
  misc_feature (1)..(25): SEQ ID NO: 1970; WAN024FYR; Start 331; Stop 355
aatgaaatcgcaaatctgatacgga

SEQ ID NO: 310974 - DNA, 25 bp, Artificial
  probe
  misc_feature (1)..(25): SEQ ID NO: 1970; WAN024FYR; Start 739; Stop 763
agtggtgtgaagagatatgtttcta

SEQ ID NO: 310975 - DNA, 25 bp, Artificial
  probe
  misc_feature (1)..(25): SEQ ID NO: 1970; WAN024FYR; Start 324; Stop 348
tgatgttaatgaaatcgcaaatctg

SEQ ID NO: 310976 - DNA, 25 bp, Artificial
  probe
  misc_feature (1)..(25): SEQ ID NO: 1970; WAN024FYR; Start 248; Stop 272
ttaagatttctgagacaagtttcgt

SEQ ID NO: 310977 - DNA, 25 bp, Artificial
  probe
  misc_feature (1)..(25): SEQ ID NO: 1971; WAN024CRS; Start 3; Stop 27
gcattattccaagaccagcaatcaa

SEQ ID NO: 310978 - DNA, 25 bp, Artificial
  probe
  misc_feature (1)..(25): SEQ ID NO: 1971; WAN024CRS; Start 6; Stop 30
ttattccaagaccagcaatcaaatg

SEQ ID NO: 310979 - DNA, 25 bp, Artificial
  probe
  misc_feature (1)..(25): SEQ ID NO: 1971; WAN024CRS; Start 4; Stop 28
cattattccaagaccagcaatcaaa

SEQ ID NO: 310980 - DNA, 25 bp, Artificial
  probe
  misc_feature (1)..(25): SEQ ID NO: 1971; WAN024CRS; Start 61; Stop 85
ttccctcttcaatggctttatgtag

SEQ ID NO: 310981 - DNA, 25 bp, Artificial
  probe
  misc_feature (1)..(25): SEQ ID NO: 1971; WAN024CRS; Start 60; Stop 84
cttccctcttcaatggctttatgta

SEQ ID NO: 310982 - DNA, 25 bp, Artificial
  probe
  misc_feature (1)..(25): SEQ ID NO: 1971; WAN024CRS; Start 5; Stop 29
attattccaagaccagcaatcaaat

SEQ ID NO: 310983 - DNA, 25 bp, Artificial
  probe
  misc_feature (1)..(25): SEQ ID NO: 1971; WAN024CRS; Start 58; Stop 82
gacttccctcttcaatggctttatg

SEQ ID NO: 310984 - DNA, 25 bp, Artificial
  probe
  misc_feature (1)..(25): SEQ ID NO: 1971; WAN024CRS; Start 81; Stop 105
tgtagccatcttaaatgttcttcat

SEQ ID NO: 310985 - DNA, 25 bp, Artificial
  probe
  misc_feature (1)..(25): SEQ ID NO: 1971; WAN024CRS; Start 80; Stop 104
atgtagccatcttaaatgttcttca

SEQ ID NO: 310986 - DNA, 25 bp, Artificial
  probe
  misc_feature (1)..(25): SEQ ID NO: 1971; WAN024CRS; Start 59; Stop 83
acttccctcttcaatggctttatgt

SEQ ID NO: 310987 - DNA, 25 bp, Artificial
  probe
  misc_feature (1)..(25): SEQ ID NO: 1971; WAN024CRS; Start 57; Stop 81
tgacttccctcttcaatggctttat

SEQ ID NO: 310988 - DNA, 25 bp, Artificial
  probe
  misc_feature (1)..(25): SEQ ID NO: 1971; WAN024CRS; Start 56; Stop 80
gtgacttccctcttcaatggcttta

SEQ ID NO: 310989 - DNA, 25 bp, Artificial
  probe
  misc_feature (1)..(25): SEQ ID NO: 1971; WAN024CRS; Start 84; Stop 108
agccatcttaaatgttcttcataaa

SEQ ID NO: 310990 - DNA, 25 bp, Artificial
  probe
  misc_feature (1)..(25): SEQ ID NO: 1971; WAN024CRS; Start 51; Stop 75
aaacagtgacttccctcttcaatgg

SEQ ID NO: 310991 - DNA, 25 bp, Artificial
  probe
  misc_feature (1)..(25): SEQ ID NO: 1971; WAN024CRS; Start 82; Stop 106
gtagccatcttaaatgttcttcata

SEQ ID NO: 310992 - DNA, 25 bp, Artificial
  probe
  misc_feature (1)..(25): SEQ ID NO: 1971; WAN024CRS; Start 79; Stop 103
tatgtagccatcttaaatgttcttc

SEQ ID NO: 310993 - DNA, 25 bp, Artificial
  probe
  misc_feature (1)..(25): SEQ ID NO: 1971; WAN024CRS; Start 78; Stop 102
ttatgtagccatcttaaatgttctt

SEQ ID NO: 310994 - DNA, 25 bp, Artificial
  probe
  misc_feature (1)..(25): SEQ ID NO: 1971; WAN024CRS; Start 45; Stop 69
tatccaaaacagtgacttccctctt

SEQ ID NO: 310995 - DNA, 25 bp, Artificial
  probe
  misc_feature (1)..(25): SEQ ID NO: 1971; WAN024CRS; Start 77; Stop 101
tttatgtagccatcttaaatgttct

SEQ ID NO: 310996 - DNA, 25 bp, Artificial
  probe
  misc_feature (1)..(25): SEQ ID NO: 1971; WAN024CRS; Start 75; Stop 99
gctttatgtagccatcttaaatgtt

SEQ ID NO: 310997 - DNA, 25 bp, Artificial
  probe
  misc_feature (1)..(25): SEQ ID NO: 1971; WAN024CRS; Start 76; Stop 100
ctttatgtagccatcttaaatgttc

SEQ ID NO: 310998 - DNA, 25 bp, Artificial
  probe
  misc_feature (1)..(25): SEQ ID NO: 1971; WAN024CRS; Start 83; Stop 107
tagccatcttaaatgttcttcataa

SEQ ID NO: 310999 - DNA, 25 bp, Artificial
  probe
  misc_feature (1)..(25): SEQ ID NO: 1971; WAN024CRS; Start 50; Stop 74
aaaacagtgacttccctcttcaatg

SEQ ID NO: 311000 - DNA, 25 bp, Artificial
  probe
  misc_feature (1)..(25): SEQ ID NO: 1971; WAN024CRS; Start 49; Stop 73
caaaacagtgacttccctcttcaat

SEQ ID NO: 311001 - DNA, 25 bp, Artificial
  probe
  misc_feature (1)..(25): SEQ ID NO: 1971; WAN024CRS; Start 44; Stop 68
gtatccaaaacagtgacttccctct

SEQ ID NO: 311002 - DNA, 25 bp, Artificial
  probe
  misc_feature (1)..(25): SEQ ID NO: 1971; WAN024CRS; Start 62; Stop 86
tccctcttcaatggctttatgtagc

SEQ ID NO: 311003 - DNA, 25 bp, Artificial
  probe
  misc_feature (1)..(25): SEQ ID NO: 1971; WAN024CRS; Start 7; Stop 31
tattccaagaccagcaatcaaatgc

SEQ ID NO: 311004 - DNA, 25 bp, Artificial
  probe
  misc_feature (1)..(25): SEQ ID NO: 1971; WAN024CRS; Start 46; Stop 70
atccaaaacagtgacttccctcttc

SEQ ID NO: 311005 - DNA, 25 bp, Artificial
  probe
  misc_feature (1)..(25): SEQ ID NO: 1971; WAN024CRS; Start 2; Stop 26
tgcattattccaagaccagcaatca

SEQ ID NO: 311006 - DNA, 25 bp, Artificial
  probe
  misc_feature (1)..(25): SEQ ID NO: 1971; WAN024CRS; Start 55; Stop 79
agtgacttccctcttcaatggcttt

SEQ ID NO: 311007 - DNA, 25 bp, Artificial
  probe
  misc_feature (1)..(25): SEQ ID NO: 1971; WAN024CRS; Start 117; Stop 141
cgatacacgtcatcgactaactaat

SEQ ID NO: 311008 - DNA, 25 bp, Artificial
  probe
  misc_feature (1)..(25): SEQ ID NO: 1971; WAN024CRS; Start 113; Stop 137
aatacgatacacgtcatcgactaac

SEQ ID NO: 311009 - DNA, 25 bp, Artificial
  probe
  misc_feature (1)..(25): SEQ ID NO: 1971; WAN024CRS; Start 112; Stop 136
caatacgatacacgtcatcgactaa

SEQ ID NO: 311010 - DNA, 25 bp, Artificial
  probe
  misc_feature (1)..(25): SEQ ID NO: 1972; WAN024GHS; Start 58; Stop 82
agtcagaccttcatttctaaatcca

SEQ ID NO: 311011 - DNA, 25 bp, Artificial
  probe
  misc_feature (1)..(25): SEQ ID NO: 1972; WAN024GHS; Start 54; Stop 78
gacaagtcagaccttcatttctaaa

SEQ ID NO: 311012 - DNA, 25 bp, Artificial
  probe
  misc_feature (1)..(25): SEQ ID NO: 1972; WAN024GHS; Start 59; Stop 83
gtcagaccttcatttctaaatccat

SEQ ID NO: 311013 - DNA, 25 bp, Artificial
  probe
  misc_feature (1)..(25): SEQ ID NO: 1972; WAN024GHS; Start 57; Stop 81
aagtcagaccttcatttctaaatcc

SEQ ID NO: 311014 - DNA, 25 bp, Artificial
  probe
  misc_feature (1)..(25): SEQ ID NO: 1972; WAN024GHS; Start 61; Stop 85
cagaccttcatttctaaatccatgc

SEQ ID NO: 311015 - DNA, 25 bp, Artificial
  probe
  misc_feature (1)..(25): SEQ ID NO: 1972; WAN024GHS; Start 55; Stop 79
acaagtcagaccttcatttctaaat

SEQ ID NO: 311016 - DNA, 25 bp, Artificial
  probe
  misc_feature (1)..(25): SEQ ID NO: 1972; WAN024GHS; Start 60; Stop 84
tcagaccttcatttctaaatccatg

SEQ ID NO: 311017 - DNA, 25 bp, Artificial
  probe
  misc_feature (1)..(25): SEQ ID NO: 1972; WAN024GHS; Start 53; Stop 77
tgacaagtcagaccttcatttctaa

SEQ ID NO: 311018 - DNA, 25 bp, Artificial
  probe
  misc_feature (1)..(25): SEQ ID NO: 1972; WAN024GHS; Start 56; Stop 80
caagtcagaccttcatttctaaatc

SEQ ID NO: 311019 - DNA, 25 bp, Artificial
  probe
  misc_feature (1)..(25): SEQ ID NO: 1972; WAN024GHS; Start 62; Stop 86
agaccttcatttctaaatccatgcg

SEQ ID NO: 311020 - DNA, 25 bp, Artificial
  probe
  misc_feature (1)..(25): SEQ ID NO: 1972; WAN024GHS; Start 36; Stop 60
taccatccgttttcatctgacaagt

SEQ ID NO: 311021 - DNA, 25 bp, Artificial
  probe
  misc_feature (1)..(25): SEQ ID NO: 1972; WAN024GHS; Start 35; Stop 59
gtaccatccgttttcatctgacaag

SEQ ID NO: 311022 - DNA, 25 bp, Artificial
  probe
  misc_feature (1)..(25): SEQ ID NO: 1972; WAN024GHS; Start 37; Stop 61
accatccgttttcatctgacaagtc

SEQ ID NO: 311023 - DNA, 25 bp, Artificial
  probe
  misc_feature (1)..(25): SEQ ID NO: 1972; WAN024GHS; Start 52; Stop 76
ctgacaagtcagaccttcatttcta

SEQ ID NO: 311024 - DNA, 25 bp, Artificial
  probe
  misc_feature (1)..(25): SEQ ID NO: 1972; WAN024GHS; Start 63; Stop 87
gaccttcatttctaaatccatgcgc

SEQ ID NO: 311025 - DNA, 25 bp, Artificial
  probe
  misc_feature (1)..(25): SEQ ID NO: 1972; WAN024GHS; Start 38; Stop 62
ccatccgttttcatctgacaagtca

SEQ ID NO: 311026 - DNA, 25 bp, Artificial
  probe
  misc_feature (1)..(25): SEQ ID NO: 1972; WAN024GHS; Start 39; Stop 63
catccgttttcatctgacaagtcag

SEQ ID NO: 311027 - DNA, 25 bp, Artificial
  probe
  misc_feature (1)..(25): SEQ ID NO: 1972; WAN024GHS; Start 34; Stop 58
ggtaccatccgttttcatctgacaa

SEQ ID NO: 311028 - DNA, 25 bp, Artificial
  probe
  misc_feature (1)..(25): SEQ ID NO: 1972; WAN024GHS; Start 33; Stop 57
cggtaccatccgttttcatctgaca

SEQ ID NO: 311029 - DNA, 25 bp, Artificial
  probe
  misc_feature (1)..(25): SEQ ID NO: 1973; WAN024DCT; Start 143; Stop 167
ctatggtgcattcaggagattacaa

SEQ ID NO: 311030 - DNA, 25 bp, Artificial
  probe
  misc_feature (1)..(25): SEQ ID NO: 1973; WAN024DCT; Start 182; Stop 206
tgcttactcgcttgaaataactaat

SEQ ID NO: 311031 - DNA, 25 bp, Artificial
  probe
  misc_feature (1)..(25): SEQ ID NO: 1973; WAN024DCT; Start 181; Stop 205
atgcttactcgcttgaaataactaa

SEQ ID NO: 311032 - DNA, 25 bp, Artificial
  probe
  misc_feature (1)..(25): SEQ ID NO: 1973; WAN024DCT; Start 180; Stop 204
aatgcttactcgcttgaaataacta

SEQ ID NO: 311033 - DNA, 25 bp, Artificial
  probe
  misc_feature (1)..(25): SEQ ID NO: 1973; WAN024DCT; Start 126; Stop 150
tcatcttcgtaaagcatctatggtg

SEQ ID NO: 311034 - DNA, 25 bp, Artificial
  probe
  misc_feature (1)..(25): SEQ ID NO: 1973; WAN024DCT; Start 125; Stop 149
gtcatcttcgtaaagcatctatggt

SEQ ID NO: 311035 - DNA, 25 bp, Artificial
  probe
  misc_feature (1)..(25): SEQ ID NO: 1973; WAN024DCT; Start 123; Stop 147
tcgtcatcttcgtaaagcatctatg

SEQ ID NO: 311036 - DNA, 25 bp, Artificial
  probe
  misc_feature (1)..(25): SEQ ID NO: 1973; WAN024DCT; Start 122; Stop 146
gtcgtcatcttcgtaaagcatctat

SEQ ID NO: 311037 - DNA, 25 bp, Artificial
  probe
  misc_feature (1)..(25): SEQ ID NO: 1973; WAN024DCT; Start 179; Stop 203
caatgcttactcgcttgaaataact

SEQ ID NO: 311038 - DNA, 25 bp, Artificial
  probe
  misc_feature (1)..(25): SEQ ID NO: 1973; WAN024DCT; Start 142; Stop 166
tctatggtgcattcaggagattaca

SEQ ID NO: 311039 - DNA, 25 bp, Artificial
  probe
  misc_feature (1)..(25): SEQ ID NO: 1973; WAN024DCT; Start 124; Stop 148
cgtcatcttcgtaaagcatctatgg

SEQ ID NO: 311040 - DNA, 25 bp, Artificial
  probe
  misc_feature (1)..(25): SEQ ID NO: 1973; WAN024DCT; Start 178; Stop 202
gcaatgcttactcgcttgaaataac

SEQ ID NO: 311041 - DNA, 25 bp, Artificial
  probe
  misc_feature (1)..(25): SEQ ID NO: 1973; WAN024DCT; Start 141; Stop 165
atctatggtgcattcaggagattac

SEQ ID NO: 311042 - DNA, 25 bp, Artificial
  probe
  misc_feature (1)..(25): SEQ ID NO: 1973; WAN024DCT; Start 140; Stop 164
catctatggtgcattcaggagatta

SEQ ID NO: 311043 - DNA, 25 bp, Artificial
  probe
  misc_feature (1)..(25): SEQ ID NO: 1973; WAN024DCT; Start 160; Stop 184
gattacaaacgtatcaaagcaatgc

SEQ ID NO: 311044 - DNA, 25 bp, Artificial
  probe
  misc_feature (1)..(25): SEQ ID NO: 1973; WAN024DCT; Start 157; Stop 181
ggagattacaaacgtatcaaagcaa

SEQ ID NO: 311045 - DNA, 25 bp, Artificial
  probe
  misc_feature (1)..(25): SEQ ID NO: 1973; WAN024DCT; Start 150; Stop 174
gcattcaggagattacaaacgtatc

SEQ ID NO: 311046 - DNA, 25 bp, Artificial
  probe
  misc_feature (1)..(25): SEQ ID NO: 1973; WAN024DCT; Start 155; Stop 179
caggagattacaaacgtatcaaagc

SEQ ID NO: 311047 - DNA, 25 bp, Artificial
  probe
  misc_feature (1)..(25): SEQ ID NO: 1973; WAN024DCT; Start 156; Stop 180
aggagattacaaacgtatcaaagca

SEQ ID NO: 311048 - DNA, 25 bp, Artificial
  probe
  misc_feature (1)..(25): SEQ ID NO: 1973; WAN024DCT; Start 149; Stop 173
tgcattcaggagattacaaacgtat

SEQ ID NO: 311049 - DNA, 25 bp, Artificial
  probe
  misc_feature (1)..(25): SEQ ID NO: 1973; WAN024DCT; Start 144; Stop 168
tatggtgcattcaggagattacaaa

SEQ ID NO: 311050 - DNA, 25 bp, Artificial
  probe
  misc_feature (1)..(25): SEQ ID NO: 1973; WAN024DCT; Start 121; Stop 145
cgtcgtcatcttcgtaaagcatcta

SEQ ID NO: 311051 - DNA, 25 bp, Artificial
  probe
  misc_feature (1)..(25): SEQ ID NO: 1973; WAN024DCT; Start 151; Stop 175
cattcaggagattacaaacgtatca

SEQ ID NO: 311052 - DNA, 25 bp, Artificial
  probe
  misc_feature (1)..(25): SEQ ID NO: 1973; WAN024DCT; Start 154; Stop 178
tcaggagattacaaacgtatcaaag

SEQ ID NO: 311053 - DNA, 25 bp, Artificial
  probe
  misc_feature (1)..(25): SEQ ID NO: 1973; WAN024DCT; Start 148; Stop 172
gtgcattcaggagattacaaacgta

SEQ ID NO: 311054 - DNA, 25 bp, Artificial
  probe
  misc_feature (1)..(25): SEQ ID NO: 1973; WAN024DCT; Start 107; Stop 131
aaactaagaaacaacgtcgtcatct

SEQ ID NO: 311055 - DNA, 25 bp, Artificial
  probe
  misc_feature (1)..(25): SEQ ID NO: 1973; WAN024DCT; Start 159; Stop 183
agattacaaacgtatcaaagcaatg

SEQ ID NO: 311056 - DNA, 25 bp, Artificial
  probe
  misc_feature (1)..(25): SEQ ID NO: 1973; WAN024DCT; Start 153; Stop 177
ttcaggagattacaaacgtatcaaa

SEQ ID NO: 311057 - DNA, 25 bp, Artificial
  probe
  misc_feature (1)..(25): SEQ ID NO: 1973; WAN024DCT; Start 158; Stop 182
gagattacaaacgtatcaaagcaat

SEQ ID NO: 311058 - DNA, 25 bp, Artificial
  probe
  misc_feature (1)..(25): SEQ ID NO: 1973; WAN024DCT; Start 152; Stop 176
attcaggagattacaaacgtatcaa

SEQ ID NO: 311059 - DNA, 25 bp, Artificial
  probe
  misc_feature (1)..(25): SEQ ID NO: 1973; WAN024DCT; Start 145; Stop 169
atggtgcattcaggagattacaaac

SEQ ID NO: 311060 - DNA, 25 bp, Artificial
  probe
  misc_feature (1)..(25): SEQ ID NO: 1973; WAN024DCT; Start 161; Stop 185
attacaaacgtatcaaagcaatgct

SEQ ID NO: 311061 - DNA, 25 bp, Artificial
  probe
  misc_feature (1)..(25): SEQ ID NO: 1973; WAN024DCT; Start 44; Stop 68
aacgtacaggttctggtggacttaa

SEQ ID NO: 311062 - DNA, 25 bp, Artificial
  probe
  misc_feature (1)..(25): SEQ ID NO: 1974; WAN024GGU; Start 166; Stop 190
aataggaccacacatatagacggtt

SEQ ID NO: 311063 - DNA, 25 bp, Artificial
  probe
  misc_feature (1)..(25): SEQ ID NO: 1974; WAN024GGU; Start 11; Stop 35
tccatcgttcctgtcttatttcatt

SEQ ID NO: 311064 - DNA, 25 bp, Artificial
  probe
  misc_feature (1)..(25): SEQ ID NO: 1974; WAN024GGU; Start 10; Stop 34
ttccatcgttcctgtcttatttcat

SEQ ID NO: 311065 - DNA, 25 bp, Artificial
  probe
  misc_feature (1)..(25): SEQ ID NO: 1974; WAN024GGU; Start 9; Stop 33
attccatcgttcctgtcttatttca

SEQ ID NO: 311066 - DNA, 25 bp, Artificial
  probe
  misc_feature (1)..(25): SEQ ID NO: 1974; WAN024GGU; Start 163; Stop 187
agaaataggaccacacatatagacg

SEQ ID NO: 311067 - DNA, 25 bp, Artificial
  probe
  misc_feature (1)..(25): SEQ ID NO: 1974; WAN024GGU; Start 14; Stop 38
atcgttcctgtcttatttcatttgg

SEQ ID NO: 311068 - DNA, 25 bp, Artificial
  probe
  misc_feature (1)..(25): SEQ ID NO: 1974; WAN024GGU; Start 12; Stop 36
ccatcgttcctgtcttatttcattt

SEQ ID NO: 311069 - DNA, 25 bp, Artificial
  probe
  misc_feature (1)..(25): SEQ ID NO: 1974; WAN024GGU; Start 164; Stop 188
gaaataggaccacacatatagacgg

SEQ ID NO: 311070 - DNA, 25 bp, Artificial
  probe
  misc_feature (1)..(25): SEQ ID NO: 1974; WAN024GGU; Start 156; Stop 180
tcatcatagaaataggaccacacat

SEQ ID NO: 311071 - DNA, 25 bp, Artificial
  probe
  misc_feature (1)..(25): SEQ ID NO: 1974; WAN024GGU; Start 17; Stop 41
gttcctgtcttatttcatttggcta

SEQ ID NO: 311072 - DNA, 25 bp, Artificial
  probe
  misc_feature (1)..(25): SEQ ID NO: 1974; WAN024GGU; Start 8; Stop 32
aattccatcgttcctgtcttatttc

SEQ ID NO: 311073 - DNA, 25 bp, Artificial
  probe
  misc_feature (1)..(25): SEQ ID NO: 1974; WAN024GGU; Start 128; Stop 152
tgtttcttaatctgtttggcaagtg

SEQ ID NO: 311074 - DNA, 25 bp, Artificial
  probe
  misc_feature (1)..(25): SEQ ID NO: 1974; WAN024GGU; Start 155; Stop 179
ttcatcatagaaataggaccacaca

SEQ ID NO: 311075 - DNA, 25 bp, Artificial
  probe
  misc_feature (1)..(25): SEQ ID NO: 1974; WAN024GGU; Start 13; Stop 37
catcgttcctgtcttatttcatttg

SEQ ID NO: 311076 - DNA, 25 bp, Artificial
  probe
  misc_feature (1)..(25): SEQ ID NO: 1974; WAN024GGU; Start 127; Stop 151
ttgtttcttaatctgtttggcaagt

SEQ ID NO: 311077 - DNA, 25 bp, Artificial
  probe
  misc_feature (1)..(25): SEQ ID NO: 1974; WAN024GGU; Start 167; Stop 191
ataggaccacacatatagacggttg

SEQ ID NO: 311078 - DNA, 25 bp, Artificial
  probe
  misc_feature (1)..(25): SEQ ID NO: 1974; WAN024GGU; Start 154; Stop 178
cttcatcatagaaataggaccacac

SEQ ID NO: 311079 - DNA, 25 bp, Artificial
  probe
  misc_feature (1)..(25): SEQ ID NO: 1974; WAN024GGU; Start 80; Stop 104
acttatttgaacttgaatccttcgt

SEQ ID NO: 311080 - DNA, 25 bp, Artificial
  probe
  misc_feature (1)..(25): SEQ ID NO: 1974; WAN024GGU; Start 18; Stop 42
ttcctgtcttatttcatttggctat

SEQ ID NO: 311081 - DNA, 25 bp, Artificial
  probe
  misc_feature (1)..(25): SEQ ID NO: 1974; WAN024GGU; Start 126; Stop 150
tttgtttcttaatctgtttggcaag

SEQ ID NO: 311082 - DNA, 25 bp, Artificial
  probe
  misc_feature (1)..(25): SEQ ID NO: 1974; WAN024GGU; Start 88; Stop 112
gaacttgaatccttcgtaaataagc

SEQ ID NO: 311083 - DNA, 25 bp, Artificial
  probe
  misc_feature (1)..(25): SEQ ID NO: 1974; WAN024GGU; Start 146; Stop 170
gcaagtgccttcatcatagaaatag

SEQ ID NO: 311084 - DNA, 25 bp, Artificial
  probe
  misc_feature (1)..(25): SEQ ID NO: 1974; WAN024GGU; Start 16; Stop 40
cgttcctgtcttatttcatttggct

SEQ ID NO: 311085 - DNA, 25 bp, Artificial
  probe
  misc_feature (1)..(25): SEQ ID NO: 1974; WAN024GGU; Start 15; Stop 39
tcgttcctgtcttatttcatttggc

SEQ ID NO: 311086 - DNA, 25 bp, Artificial
  probe
  misc_feature (1)..(25): SEQ ID NO: 1974; WAN024GGU; Start 157; Stop 181
catcatagaaataggaccacacata

SEQ ID NO: 311087 - DNA, 25 bp, Artificial
  probe
  misc_feature (1)..(25): SEQ ID NO: 1974; WAN024GGU; Start 7; Stop 31
aaattccatcgttcctgtcttattt

SEQ ID NO: 311088 - DNA, 25 bp, Artificial
  probe
  misc_feature (1)..(25): SEQ ID NO: 1974; WAN024GGU; Start 149; Stop 173
agtgccttcatcatagaaataggac

SEQ ID NO: 311089 - DNA, 25 bp, Artificial
  probe
  misc_feature (1)..(25): SEQ ID NO: 1974; WAN024GGU; Start 153; Stop 177
ccttcatcatagaaataggaccaca

SEQ ID NO: 311090 - DNA, 25 bp, Artificial
  probe
  misc_feature (1)..(25): SEQ ID NO: 1974; WAN024GGU; Start 148; Stop 172
aagtgccttcatcatagaaatagga

SEQ ID NO: 311091 - DNA, 25 bp, Artificial
  probe
  misc_feature (1)..(25): SEQ ID NO: 1974; WAN024GGU; Start 147; Stop 171
caagtgccttcatcatagaaatagg

SEQ ID NO: 311092 - DNA, 25 bp, Artificial
  probe
  misc_feature (1)..(25): SEQ ID NO: 1974; WAN024GGU; Start 19; Stop 43
tcctgtcttatttcatttggctata

SEQ ID NO: 311093 - DNA, 25 bp, Artificial
  probe
  misc_feature (1)..(25): SEQ ID NO: 1974; WAN024GGU; Start 129; Stop 153
gtttcttaatctgtttggcaagtgc

SEQ ID NO: 311094 - DNA, 25 bp, Artificial
  probe
  misc_feature (1)..(25): SEQ ID NO: 1974; WAN024GGU; Start 152; Stop 176
gccttcatcatagaaataggaccac

SEQ ID NO: 311095 - DNA, 25 bp, Artificial
  probe
  misc_feature (1)..(25): SEQ ID NO: 1975; WAN024E2P; Start 1010; Stop 1034
acttagtagaataccatcatccacg

SEQ ID NO: 311096 - DNA, 25 bp, Artificial
  probe
  misc_feature (1)..(25): SEQ ID NO: 1975; WAN024E2P; Start 1008; Stop 1032
acacttagtagaataccatcatcca

SEQ ID NO: 311097 - DNA, 25 bp, Artificial
  probe
  misc_feature (1)..(25): SEQ ID NO: 1975; WAN024E2P; Start 1009; Stop 1033
cacttagtagaataccatcatccac

SEQ ID NO: 311098 - DNA, 25 bp, Artificial
  probe
  misc_feature (1)..(25): SEQ ID NO: 1975; WAN024E2P; Start 989; Stop 1013
acacttatcctcaagatcaacactt

SEQ ID NO: 311099 - DNA, 25 bp, Artificial
  probe
  misc_feature (1)..(25): SEQ ID NO: 1975; WAN024E2P; Start 881; Stop 905
ggtctaacttcatggcttctactaa

SEQ ID NO: 311100 - DNA, 25 bp, Artificial
  probe
  misc_feature (1)..(25): SEQ ID NO: 1975; WAN024E2P; Start 875; Stop 899
atatctggtctaacttcatggcttc

SEQ ID NO: 311101 - DNA, 25 bp, Artificial
  probe
  misc_feature (1)..(25): SEQ ID NO: 1975; WAN024E2P; Start 988; Stop 1012
tacacttatcctcaagatcaacact

SEQ ID NO: 311102 - DNA, 25 bp, Artificial
  probe
  misc_feature (1)..(25): SEQ ID NO: 1975; WAN024E2P; Start 987; Stop 1011
gtacacttatcctcaagatcaacac

SEQ ID NO: 311103 - DNA, 25 bp, Artificial
  probe
  misc_feature (1)..(25): SEQ ID NO: 1975; WAN024E2P; Start 986; Stop 1010
agtacacttatcctcaagatcaaca

SEQ ID NO: 311104 - DNA, 25 bp, Artificial
  probe
  misc_feature (1)..(25): SEQ ID NO: 1975; WAN024E2P; Start 880; Stop 904
tggtctaacttcatggcttctacta

SEQ ID NO: 311105 - DNA, 25 bp, Artificial
  probe
  misc_feature (1)..(25): SEQ ID NO: 1975; WAN024E2P; Start 877; Stop 901
atctggtctaacttcatggcttcta

SEQ ID NO: 311106 - DNA, 25 bp, Artificial
  probe
  misc_feature (1)..(25): SEQ ID NO: 1975; WAN024E2P; Start 876; Stop 900
tatctggtctaacttcatggcttct

SEQ ID NO: 311107 - DNA, 25 bp, Artificial
  probe
  misc_feature (1)..(25): SEQ ID NO: 1975; WAN024E2P; Start 996; Stop 1020
tcctcaagatcaacacttagtagaa

SEQ ID NO: 311108 - DNA, 25 bp, Artificial
  probe
  misc_feature (1)..(25): SEQ ID NO: 1975; WAN024E2P; Start 995; Stop 1019
atcctcaagatcaacacttagtaga

SEQ ID NO: 311109 - DNA, 25 bp, Artificial
  probe
  misc_feature (1)..(25): SEQ ID NO: 1975; WAN024E2P; Start 1007; Stop 1031
aacacttagtagaataccatcatcc

SEQ ID NO: 311110 - DNA, 25 bp, Artificial
  probe
  misc_feature (1)..(25): SEQ ID NO: 1975; WAN024E2P; Start 315; Stop 339
tgctatcaacgaactagactattac

SEQ ID NO: 311111 - DNA, 25 bp, Artificial
  probe
  misc_feature (1)..(25): SEQ ID NO: 1975; WAN024E2P; Start 132; Stop 156
caactgtggtacttggattaagaca

SEQ ID NO: 311112 - DNA, 25 bp, Artificial
  probe
  misc_feature (1)..(25): SEQ ID NO: 1975; WAN024E2P; Start 990; Stop 1014
cacttatcctcaagatcaacactta

SEQ ID NO: 311113 - DNA, 25 bp, Artificial
  probe
  misc_feature (1)..(25): SEQ ID NO: 1975; WAN024E2P; Start 985; Stop 1009
aagtacacttatcctcaagatcaac

SEQ ID NO: 311114 - DNA, 25 bp, Artificial
  probe
  misc_feature (1)..(25): SEQ ID NO: 1975; WAN024E2P; Start 316; Stop 340
gctatcaacgaactagactattact

SEQ ID NO: 311115 - DNA, 25 bp, Artificial
  probe
  misc_feature (1)..(25): SEQ ID NO: 1975; WAN024E2P; Start 128; Stop 152
taggcaactgtggtacttggattaa

SEQ ID NO: 311116 - DNA, 25 bp, Artificial
  probe
  misc_feature (1)..(25): SEQ ID NO: 1975; WAN024E2P; Start 879; Stop 903
ctggtctaacttcatggcttctact

SEQ ID NO: 311117 - DNA, 25 bp, Artificial
  probe
  misc_feature (1)..(25): SEQ ID NO: 1975; WAN024E2P; Start 878; Stop 902
tctggtctaacttcatggcttctac

SEQ ID NO: 311118 - DNA, 25 bp, Artificial
  probe
  misc_feature (1)..(25): SEQ ID NO: 1975; WAN024E2P; Start 997; Stop 1021
cctcaagatcaacacttagtagaat

SEQ ID NO: 311119 - DNA, 25 bp, Artificial
  probe
  misc_feature (1)..(25): SEQ ID NO: 1975; WAN024E2P; Start 992; Stop 1016
cttatcctcaagatcaacacttagt

SEQ ID NO: 311120 - DNA, 25 bp, Artificial
  probe
  misc_feature (1)..(25): SEQ ID NO: 1975; WAN024E2P; Start 991; Stop 1015
acttatcctcaagatcaacacttag

SEQ ID NO: 311121 - DNA, 25 bp, Artificial
  probe
  misc_feature (1)..(25): SEQ ID NO: 1975; WAN024E2P; Start 882; Stop 906
gtctaacttcatggcttctactaat

SEQ ID NO: 311122 - DNA, 25 bp, Artificial
  probe
  misc_feature (1)..(25): SEQ ID NO: 1975; WAN024E2P; Start 133; Stop 157
aactgtggtacttggattaagacac

SEQ ID NO: 311123 - DNA, 25 bp, Artificial
  probe
  misc_feature (1)..(25): SEQ ID NO: 1975; WAN024E2P; Start 131; Stop 155
gcaactgtggtacttggattaagac

SEQ ID NO: 311124 - DNA, 25 bp, Artificial
  probe
  misc_feature (1)..(25): SEQ ID NO: 1975; WAN024E2P; Start 883; Stop 907
tctaacttcatggcttctactaatg

SEQ ID NO: 311125 - DNA, 25 bp, Artificial
  probe
  misc_feature (1)..(25): SEQ ID NO: 1975; WAN024E2P; Start 1011; Stop 1035
cttagtagaataccatcatccacgt

SEQ ID NO: 311126 - DNA, 25 bp, Artificial
  probe
  misc_feature (1)..(25): SEQ ID NO: 1975; WAN024E2P; Start 981; Stop 1005
cggtaagtacacttatcctcaagat

SEQ ID NO: 311127 - DNA, 25 bp, Artificial
  probe
  misc_feature (1)..(25): SEQ ID NO: 1975; WAN024E2P; Start 127; Stop 151
ctaggcaactgtggtacttggatta

SEQ ID NO: 311128 - DNA, 25 bp, Artificial
  probe
  misc_feature (1)..(25): SEQ ID NO: 1976; WAN024FO3; Start 263; Stop 287
cagttattcatcaaggtcaagacaa

SEQ ID NO: 311129 - DNA, 25 bp, Artificial
  probe
  misc_feature (1)..(25): SEQ ID NO: 1976; WAN024FO3; Start 262; Stop 286
ccagttattcatcaaggtcaagaca

SEQ ID NO: 311130 - DNA, 25 bp, Artificial
  probe
  misc_feature (1)..(25): SEQ ID NO: 1976; WAN024FO3; Start 265; Stop 289
gttattcatcaaggtcaagacaacg

SEQ ID NO: 311131 - DNA, 25 bp, Artificial
  probe
  misc_feature (1)..(25): SEQ ID NO: 1976; WAN024FO3; Start 264; Stop 288
agttattcatcaaggtcaagacaac

SEQ ID NO: 311132 - DNA, 25 bp, Artificial
  probe
  misc_feature (1)..(25): SEQ ID NO: 1976; WAN024FO3; Start 266; Stop 290
ttattcatcaaggtcaagacaacgg

SEQ ID NO: 311133 - DNA, 25 bp, Artificial
  probe
  misc_feature (1)..(25): SEQ ID NO: 1976; WAN024FO3; Start 107; Stop 131
tgactgataatggcaggaatgatag

SEQ ID NO: 311134 - DNA, 25 bp, Artificial
  probe
  misc_feature (1)..(25): SEQ ID NO: 1976; WAN024FO3; Start 106; Stop 130
ttgactgataatggcaggaatgata

SEQ ID NO: 311135 - DNA, 25 bp, Artificial
  probe
  misc_feature (1)..(25): SEQ ID NO: 1976; WAN024FO3; Start 108; Stop 132
gactgataatggcaggaatgatagc

SEQ ID NO: 311136 - DNA, 25 bp, Artificial
  probe
  misc_feature (1)..(25): SEQ ID NO: 1976; WAN024FO3; Start 260; Stop 284
aaccagttattcatcaaggtcaaga

SEQ ID NO: 311137 - DNA, 25 bp, Artificial
  probe
  misc_feature (1)..(25): SEQ ID NO: 1976; WAN024FO3; Start 236; Stop 260
tggatgacaataatcagatagccaa

SEQ ID NO: 311138 - DNA, 25 bp, Artificial
  probe
  misc_feature (1)..(25): SEQ ID NO: 1976; WAN024FO3; Start 235; Stop 259
ttggatgacaataatcagatagcca

SEQ ID NO: 311139 - DNA, 25 bp, Artificial
  probe
  misc_feature (1)..(25): SEQ ID NO: 1976; WAN024FO3; Start 261; Stop 285
accagttattcatcaaggtcaagac

SEQ ID NO: 311140 - DNA, 25 bp, Artificial
  probe
  misc_feature (1)..(25): SEQ ID NO: 1976; WAN024FO3; Start 242; Stop 266
acaataatcagatagccaaaccagt

SEQ ID NO: 311141 - DNA, 25 bp, Artificial
  probe
  misc_feature (1)..(25): SEQ ID NO: 1976; WAN024FO3; Start 241; Stop 265
gacaataatcagatagccaaaccag

SEQ ID NO: 311142 - DNA, 25 bp, Artificial
  probe
  misc_feature (1)..(25): SEQ ID NO: 1976; WAN024FO3; Start 249; Stop 273
tcagatagccaaaccagttattcat

SEQ ID NO: 311143 - DNA, 25 bp, Artificial
  probe
  misc_feature (1)..(25): SEQ ID NO: 1976; WAN024FO3; Start 248; Stop 272
atcagatagccaaaccagttattca

SEQ ID NO: 311144 - DNA, 25 bp, Artificial
  probe
  misc_feature (1)..(25): SEQ ID NO: 1976; WAN024FO3; Start 251; Stop 275
agatagccaaaccagttattcatca

SEQ ID NO: 311145 - DNA, 25 bp, Artificial
  probe
  misc_feature (1)..(25): SEQ ID NO: 1976; WAN024FO3; Start 250; Stop 274
cagatagccaaaccagttattcatc

SEQ ID NO: 311146 - DNA, 25 bp, Artificial
  probe
  misc_feature (1)..(25): SEQ ID NO: 1976; WAN024FO3; Start 253; Stop 277
atagccaaaccagttattcatcaag

SEQ ID NO: 311147 - DNA, 25 bp, Artificial
  probe
  misc_feature (1)..(25): SEQ ID NO: 1976; WAN024FO3; Start 243; Stop 267
caataatcagatagccaaaccagtt

SEQ ID NO: 311148 - DNA, 25 bp, Artificial
  probe
  misc_feature (1)..(25): SEQ ID NO: 1976; WAN024FO3; Start 252; Stop 276
gatagccaaaccagttattcatcaa

SEQ ID NO: 311149 - DNA, 25 bp, Artificial
  probe
  misc_feature (1)..(25): SEQ ID NO: 1976; WAN024FO3; Start 247; Stop 271
aatcagatagccaaaccagttattc

SEQ ID NO: 311150 - DNA, 25 bp, Artificial
  probe
  misc_feature (1)..(25): SEQ ID NO: 1976; WAN024FO3; Start 254; Stop 278
tagccaaaccagttattcatcaagg

SEQ ID NO: 311151 - DNA, 25 bp, Artificial
  probe
  misc_feature (1)..(25): SEQ ID NO: 1976; WAN024FO3; Start 240; Stop 264
tgacaataatcagatagccaaacca

SEQ ID NO: 311152 - DNA, 25 bp, Artificial
  probe
  misc_feature (1)..(25): SEQ ID NO: 1976; WAN024FO3; Start 234; Stop 258
attggatgacaataatcagatagcc

SEQ ID NO: 311153 - DNA, 25 bp, Artificial
  probe
  misc_feature (1)..(25): SEQ ID NO: 1976; WAN024FO3; Start 239; Stop 263
atgacaataatcagatagccaaacc

SEQ ID NO: 311154 - DNA, 25 bp, Artificial
  probe
  misc_feature (1)..(25): SEQ ID NO: 1976; WAN024FO3; Start 237; Stop 261
ggatgacaataatcagatagccaaa

SEQ ID NO: 311155 - DNA, 25 bp, Artificial
  probe
  misc_feature (1)..(25): SEQ ID NO: 1976; WAN024FO3; Start 246; Stop 270
taatcagatagccaaaccagttatt

SEQ ID NO: 311156 - DNA, 25 bp, Artificial
  probe
  misc_feature (1)..(25): SEQ ID NO: 1976; WAN024FO3; Start 244; Stop 268
aataatcagatagccaaaccagtta

SEQ ID NO: 311157 - DNA, 25 bp, Artificial
  probe
  misc_feature (1)..(25): SEQ ID NO: 1976; WAN024FO3; Start 105; Stop 129
tttgactgataatggcaggaatgat

SEQ ID NO: 311158 - DNA, 25 bp, Artificial
  probe
  misc_feature (1)..(25): SEQ ID NO: 1976; WAN024FO3; Start 233; Stop 257
cattggatgacaataatcagatagc

SEQ ID NO: 311159 - DNA, 25 bp, Artificial
  probe
  misc_feature (1)..(25): SEQ ID NO: 1976; WAN024FO3; Start 238; Stop 262
gatgacaataatcagatagccaaac

SEQ ID NO: 311160 - DNA, 25 bp, Artificial
  probe
  misc_feature (1)..(25): SEQ ID NO: 1976; WAN024FO3; Start 104; Stop 128
gtttgactgataatggcaggaatga

SEQ ID NO: 311161 - DNA, 25 bp, Artificial
  probe
  misc_feature (1)..(25): SEQ ID NO: 1977; WAN024FWE; Start 406; Stop 430
gccactatgattgatactatgcgta

SEQ ID NO: 311162 - DNA, 25 bp, Artificial
  probe
  misc_feature (1)..(25): SEQ ID NO: 1977; WAN024FWE; Start 471; Stop 495
gatggtcattgatgctgctattatc

SEQ ID NO: 311163 - DNA, 25 bp, Artificial
  probe
  misc_feature (1)..(25): SEQ ID NO: 1977; WAN024FWE; Start 209; Stop 233
tggatgcggatattcgtaattctat

SEQ ID NO: 311164 - DNA, 25 bp, Artificial
  probe
  misc_feature (1)..(25): SEQ ID NO: 1977; WAN024FWE; Start 208; Stop 232
gtggatgcggatattcgtaattcta

SEQ ID NO: 311165 - DNA, 25 bp, Artificial
  probe
  misc_feature (1)..(25): SEQ ID NO: 1977; WAN024FWE; Start 404; Stop 428
ttgccactatgattgatactatgcg

SEQ ID NO: 311166 - DNA, 25 bp, Artificial
  probe
  misc_feature (1)..(25): SEQ ID NO: 1977; WAN024FWE; Start 470; Stop 494
ggatggtcattgatgctgctattat

SEQ ID NO: 311167 - DNA, 25 bp, Artificial
  probe
  misc_feature (1)..(25): SEQ ID NO: 1977; WAN024FWE; Start 570; Stop 594
ggaacagttagaacagacaggagta

SEQ ID NO: 311168 - DNA, 25 bp, Artificial
  probe
  misc_feature (1)..(25): SEQ ID NO: 1977; WAN024FWE; Start 407; Stop 431
ccactatgattgatactatgcgtaa

SEQ ID NO: 311169 - DNA, 25 bp, Artificial
  probe
  misc_feature (1)..(25): SEQ ID NO: 1977; WAN024FWE; Start 571; Stop 595
gaacagttagaacagacaggagtac

SEQ ID NO: 311170 - DNA, 25 bp, Artificial
  probe
  misc_feature (1)..(25): SEQ ID NO: 1977; WAN024FWE; Start 223; Stop 247
cgtaattctatcatgtcaggagtct

SEQ ID NO: 311171 - DNA, 25 bp, Artificial
  probe
  misc_feature (1)..(25): SEQ ID NO: 1977; WAN024FWE; Start 222; Stop 246
tcgtaattctatcatgtcaggagtc

SEQ ID NO: 311172 - DNA, 25 bp, Artificial
  probe
  misc_feature (1)..(25): SEQ ID NO: 1977; WAN024FWE; Start 405; Stop 429
tgccactatgattgatactatgcgt

SEQ ID NO: 311173 - DNA, 25 bp, Artificial
  probe
  misc_feature (1)..(25): SEQ ID NO: 1977; WAN024FWE; Start 203; Stop 227
tattggtggatgcggatattcgtaa

SEQ ID NO: 311174 - DNA, 25 bp, Artificial
  probe
  misc_feature (1)..(25): SEQ ID NO: 1977; WAN024FWE; Start 202; Stop 226
ttattggtggatgcggatattcgta

SEQ ID NO: 311175 - DNA, 25 bp, Artificial
  probe
  misc_feature (1)..(25): SEQ ID NO: 1977; WAN024FWE; Start 210; Stop 234
ggatgcggatattcgtaattctatc

SEQ ID NO: 311176 - DNA, 25 bp, Artificial
  probe
  misc_feature (1)..(25): SEQ ID NO: 1977; WAN024FWE; Start 568; Stop 592
aaggaacagttagaacagacaggag

SEQ ID NO: 311177 - DNA, 25 bp, Artificial
  probe
  misc_feature (1)..(25): SEQ ID NO: 1977; WAN024FWE; Start 221; Stop 245
ttcgtaattctatcatgtcaggagt

SEQ ID NO: 311178 - DNA, 25 bp, Artificial
  probe
  misc_feature (1)..(25): SEQ ID NO: 1977; WAN024FWE; Start 211; Stop 235
gatgcggatattcgtaattctatca

SEQ ID NO: 311179 - DNA, 25 bp, Artificial
  probe
  misc_feature (1)..(25): SEQ ID NO: 1977; WAN024FWE; Start 572; Stop 596
aacagttagaacagacaggagtacc

SEQ ID NO: 311180 - DNA, 25 bp, Artificial
  probe
  misc_feature (1)..(25): SEQ ID NO: 1977; WAN024FWE; Start 220; Stop 244
attcgtaattctatcatgtcaggag

SEQ ID NO: 311181 - DNA, 25 bp, Artificial
  probe
  misc_feature (1)..(25): SEQ ID NO: 1977; WAN024FWE; Start 204; Stop 228
attggtggatgcggatattcgtaat

SEQ ID NO: 311182 - DNA, 25 bp, Artificial
  probe
  misc_feature (1)..(25): SEQ ID NO: 1977; WAN024FWE; Start 212; Stop 236
atgcggatattcgtaattctatcat

SEQ ID NO: 311183 - DNA, 25 bp, Artificial
  probe
  misc_feature (1)..(25): SEQ ID NO: 1977; WAN024FWE; Start 214; Stop 238
gcggatattcgtaattctatcatgt

SEQ ID NO: 311184 - DNA, 25 bp, Artificial
  probe
  misc_feature (1)..(25): SEQ ID NO: 1977; WAN024FWE; Start 213; Stop 237
tgcggatattcgtaattctatcatg

SEQ ID NO: 311185 - DNA, 25 bp, Artificial
  probe
  misc_feature (1)..(25): SEQ ID NO: 1977; WAN024FWE; Start 408; Stop 432
cactatgattgatactatgcgtaag

SEQ ID NO: 311186 - DNA, 25 bp, Artificial
  probe
  misc_feature (1)..(25): SEQ ID NO: 1977; WAN024FWE; Start 205; Stop 229
ttggtggatgcggatattcgtaatt

SEQ ID NO: 311187 - DNA, 25 bp, Artificial
  probe
  misc_feature (1)..(25): SEQ ID NO: 1977; WAN024FWE; Start 224; Stop 248
gtaattctatcatgtcaggagtctt

SEQ ID NO: 311188 - DNA, 25 bp, Artificial
  probe
  misc_feature (1)..(25): SEQ ID NO: 1977; WAN024FWE; Start 338; Stop 362
atttatttgttattcaggcaggacc

SEQ ID NO: 311189 - DNA, 25 bp, Artificial
  probe
  misc_feature (1)..(25): SEQ ID NO: 1977; WAN024FWE; Start 569; Stop 593
aggaacagttagaacagacaggagt

SEQ ID NO: 311190 - DNA, 25 bp, Artificial
  probe
  misc_feature (1)..(25): SEQ ID NO: 1977; WAN024FWE; Start 108; Stop 132
agttctttccatctcgtctgttaaa

SEQ ID NO: 311191 - DNA, 25 bp, Artificial
  probe
  misc_feature (1)..(25): SEQ ID NO: 1977; WAN024FWE; Start 561; Stop 585
gaaagcaaaggaacagttagaacag

SEQ ID NO: 311192 - DNA, 25 bp, Artificial
  probe
  misc_feature (1)..(25): SEQ ID NO: 1977; WAN024FWE; Start 403; Stop 427
tttgccactatgattgatactatgc

SEQ ID NO: 311193 - DNA, 25 bp, Artificial
  probe
  misc_feature (1)..(25): SEQ ID NO: 1977; WAN024FWE; Start 574; Stop 598
cagttagaacagacaggagtacctt

SEQ ID NO: 311194 - DNA, 25 bp, Artificial
  probe
  misc_feature (1)..(25): SEQ ID NO: 1978; WAN024BI5; Start 206; Stop 230
taattgatgcggatattcgtaactc

SEQ ID NO: 311195 - DNA, 25 bp, Artificial
  probe
  misc_feature (1)..(25): SEQ ID NO: 1978; WAN024BI5; Start 111; Stop 135
catctctattacttcagttaagccg

SEQ ID NO: 311196 - DNA, 25 bp, Artificial
  probe
  misc_feature (1)..(25): SEQ ID NO: 1978; WAN024BI5; Start 205; Stop 229
ttaattgatgcggatattcgtaact

SEQ ID NO: 311197 - DNA, 25 bp, Artificial
  probe
  misc_feature (1)..(25): SEQ ID NO: 1978; WAN024BI5; Start 255; Stop 279
tagtgagaagattactggcttaaca

SEQ ID NO: 311198 - DNA, 25 bp, Artificial
  probe
  misc_feature (1)..(25): SEQ ID NO: 1978; WAN024BI5; Start 207; Stop 231
aattgatgcggatattcgtaactcg

SEQ ID NO: 311199 - DNA, 25 bp, Artificial
  probe
  misc_feature (1)..(25): SEQ ID NO: 1978; WAN024BI5; Start 259; Stop 283
gagaagattactggcttaacagagt

SEQ ID NO: 311200 - DNA, 25 bp, Artificial
  probe
  misc_feature (1)..(25): SEQ ID NO: 1978; WAN024BI5; Start 258; Stop 282
tgagaagattactggcttaacagag

SEQ ID NO: 311201 - DNA, 25 bp, Artificial
  probe
  misc_feature (1)..(25): SEQ ID NO: 1978; WAN024BI5; Start 438; Stop 462
tgactatatcattgtggatactgct

SEQ ID NO: 311202 - DNA, 25 bp, Artificial
  probe
  misc_feature (1)..(25): SEQ ID NO: 1978; WAN024BI5; Start 257; Stop 281
gtgagaagattactggcttaacaga

SEQ ID NO: 311203 - DNA, 25 bp, Artificial
  probe
  misc_feature (1)..(25): SEQ ID NO: 1978; WAN024BI5; Start 256; Stop 280
agtgagaagattactggcttaacag

SEQ ID NO: 311204 - DNA, 25 bp, Artificial
  probe
  misc_feature (1)..(25): SEQ ID NO: 1978; WAN024BI5; Start 260; Stop 284
agaagattactggcttaacagagtt

SEQ ID NO: 311205 - DNA, 25 bp, Artificial
  probe
  misc_feature (1)..(25): SEQ ID NO: 1978; WAN024BI5; Start 217; Stop 241
gatattcgtaactcggtcatgtcag

SEQ ID NO: 311206 - DNA, 25 bp, Artificial
  probe
  misc_feature (1)..(25): SEQ ID NO: 1978; WAN024BI5; Start 254; Stop 278
ctagtgagaagattactggcttaac

SEQ ID NO: 311207 - DNA, 25 bp, Artificial
  probe
  misc_feature (1)..(25): SEQ ID NO: 1978; WAN024BI5; Start 253; Stop 277
tctagtgagaagattactggcttaa

SEQ ID NO: 311208 - DNA, 25 bp, Artificial
  probe
  misc_feature (1)..(25): SEQ ID NO: 1978; WAN024BI5; Start 439; Stop 463
gactatatcattgtggatactgctc

SEQ ID NO: 311209 - DNA, 25 bp, Artificial
  probe
  misc_feature (1)..(25): SEQ ID NO: 1978; WAN024BI5; Start 201; Stop 225
cctattaattgatgcggatattcgt

SEQ ID NO: 311210 - DNA, 25 bp, Artificial
  probe
  misc_feature (1)..(25): SEQ ID NO: 1978; WAN024BI5; Start 110; Stop 134
tcatctctattacttcagttaagcc

SEQ ID NO: 311211 - DNA, 25 bp, Artificial
  probe
  misc_feature (1)..(25): SEQ ID NO: 1978; WAN024BI5; Start 437; Stop 461
ttgactatatcattgtggatactgc

SEQ ID NO: 311212 - DNA, 25 bp, Artificial
  probe
  misc_feature (1)..(25): SEQ ID NO: 1978; WAN024BI5; Start 440; Stop 464
actatatcattgtggatactgctcc

SEQ ID NO: 311213 - DNA, 25 bp, Artificial
  probe
  misc_feature (1)..(25): SEQ ID NO: 1978; WAN024BI5; Start 309; Stop 333
acaaggtctatgtgataccaatgtt

SEQ ID NO: 311214 - DNA, 25 bp, Artificial
  probe
  misc_feature (1)..(25): SEQ ID NO: 1978; WAN024BI5; Start 312; Stop 336
aggtctatgtgataccaatgttgaa

SEQ ID NO: 311215 - DNA, 25 bp, Artificial
  probe
  misc_feature (1)..(25): SEQ ID NO: 1978; WAN024BI5; Start 311; Stop 335
aaggtctatgtgataccaatgttga

SEQ ID NO: 311216 - DNA, 25 bp, Artificial
  probe
  misc_feature (1)..(25): SEQ ID NO: 1978; WAN024BI5; Start 310; Stop 334
caaggtctatgtgataccaatgttg

SEQ ID NO: 311217 - DNA, 25 bp, Artificial
  probe
  misc_feature (1)..(25): SEQ ID NO: 1978; WAN024BI5; Start 471; Stop 495
tatcgtgattgatgcagttattgtg

SEQ ID NO: 311218 - DNA, 25 bp, Artificial
  probe
  misc_feature (1)..(25): SEQ ID NO: 1978; WAN024BI5; Start 470; Stop 494
gtatcgtgattgatgcagttattgt

SEQ ID NO: 311219 - DNA, 25 bp, Artificial
  probe
  misc_feature (1)..(25): SEQ ID NO: 1978; WAN024BI5; Start 467; Stop 491
taggtatcgtgattgatgcagttat

SEQ ID NO: 311220 - DNA, 25 bp, Artificial
  probe
  misc_feature (1)..(25): SEQ ID NO: 1978; WAN024BI5; Start 466; Stop 490
ataggtatcgtgattgatgcagtta

SEQ ID NO: 311221 - DNA, 25 bp, Artificial
  probe
  misc_feature (1)..(25): SEQ ID NO: 1978; WAN024BI5; Start 469; Stop 493
ggtatcgtgattgatgcagttattg

SEQ ID NO: 311222 - DNA, 25 bp, Artificial
  probe
  misc_feature (1)..(25): SEQ ID NO: 1978; WAN024BI5; Start 468; Stop 492
aggtatcgtgattgatgcagttatt

SEQ ID NO: 311223 - DNA, 25 bp, Artificial
  probe
  misc_feature (1)..(25): SEQ ID NO: 1978; WAN024BI5; Start 410; Stop 434
cgatgatagataccctgcgtaaata

SEQ ID NO: 311224 - DNA, 25 bp, Artificial
  probe
  misc_feature (1)..(25): SEQ ID NO: 1978; WAN024BI5; Start 218; Stop 242
atattcgtaactcggtcatgtcagg

SEQ ID NO: 311225 - DNA, 25 bp, Artificial
  probe
  misc_feature (1)..(25): SEQ ID NO: 1978; WAN024BI5; Start 216; Stop 240
ggatattcgtaactcggtcatgtca

SEQ ID NO: 311226 - DNA, 25 bp, Artificial
  probe
  misc_feature (1)..(25): SEQ ID NO: 1978; WAN024BI5; Start 204; Stop 228
attaattgatgcggatattcgtaac

SEQ ID NO: 311227 - DNA, 25 bp, Artificial
  probe
  misc_feature (1)..(25): SEQ ID NO: 1979; WAN024BI6; Start 596; Stop 620
cgtgtttaggagttgtgttgaataa

SEQ ID NO: 311228 - DNA, 25 bp, Artificial
  probe
  misc_feature (1)..(25): SEQ ID NO: 1979; WAN024BI6; Start 437; Stop 461
ttgactatatcgtcgtagacactgc

SEQ ID NO: 311229 - DNA, 25 bp, Artificial
  probe
  misc_feature (1)..(25): SEQ ID NO: 1979; WAN024BI6; Start 436; Stop 460
tttgactatatcgtcgtagacactg

SEQ ID NO: 311230 - DNA, 25 bp, Artificial
  probe
  misc_feature (1)..(25): SEQ ID NO: 1979; WAN024BI6; Start 597; Stop 621
gtgtttaggagttgtgttgaataaa

SEQ ID NO: 311231 - DNA, 25 bp, Artificial
  probe
  misc_feature (1)..(25): SEQ ID NO: 1979; WAN024BI6; Start 505; Stop 529
tgtgatgcttctattttagtgacga

SEQ ID NO: 311232 - DNA, 25 bp, Artificial
  probe
  misc_feature (1)..(25): SEQ ID NO: 1979; WAN024BI6; Start 504; Stop 528
atgtgatgcttctattttagtgacg

SEQ ID NO: 311233 - DNA, 25 bp, Artificial
  probe
  misc_feature (1)..(25): SEQ ID NO: 1979; WAN024BI6; Start 506; Stop 530
gtgatgcttctattttagtgacgaa

SEQ ID NO: 311234 - DNA, 25 bp, Artificial
  probe
  misc_feature (1)..(25): SEQ ID NO: 1979; WAN024BI6; Start 435; Stop 459
ttttgactatatcgtcgtagacact

SEQ ID NO: 311235 - DNA, 25 bp, Artificial
  probe
  misc_feature (1)..(25): SEQ ID NO: 1979; WAN024BI6; Start 503; Stop 527
aatgtgatgcttctattttagtgac

SEQ ID NO: 311236 - DNA, 25 bp, Artificial
  probe
  misc_feature (1)..(25): SEQ ID NO: 1979; WAN024BI6; Start 434; Stop 458
attttgactatatcgtcgtagacac

SEQ ID NO: 311237 - DNA, 25 bp, Artificial
  probe
  misc_feature (1)..(25): SEQ ID NO: 1979; WAN024BI6; Start 433; Stop 457
tattttgactatatcgtcgtagaca

SEQ ID NO: 311238 - DNA, 25 bp, Artificial
  probe
  misc_feature (1)..(25): SEQ ID NO: 1979; WAN024BI6; Start 502; Stop 526
aaatgtgatgcttctattttagtga

SEQ ID NO: 311239 - DNA, 25 bp, Artificial
  probe
  misc_feature (1)..(25): SEQ ID NO: 1979; WAN024BI6; Start 501; Stop 525
gaaatgtgatgcttctattttagtg

SEQ ID NO: 311240 - DNA, 25 bp, Artificial
  probe
  misc_feature (1)..(25): SEQ ID NO: 1979; WAN024BI6; Start 508; Stop 532
gatgcttctattttagtgacgaagg

SEQ ID NO: 311241 - DNA, 25 bp, Artificial
  probe
  misc_feature (1)..(25): SEQ ID NO: 1979; WAN024BI6; Start 507; Stop 531
tgatgcttctattttagtgacgaag

SEQ ID NO: 311242 - DNA, 25 bp, Artificial
  probe
  misc_feature (1)..(25): SEQ ID NO: 1979; WAN024BI6; Start 512; Stop 536
cttctattttagtgacgaaggcagg

SEQ ID NO: 311243 - DNA, 25 bp, Artificial
  probe
  misc_feature (1)..(25): SEQ ID NO: 1979; WAN024BI6; Start 509; Stop 533
atgcttctattttagtgacgaaggc

SEQ ID NO: 311244 - DNA, 25 bp, Artificial
  probe
  misc_feature (1)..(25): SEQ ID NO: 1979; WAN024BI6; Start 498; Stop 522
gcagaaatgtgatgcttctatttta

SEQ ID NO: 311245 - DNA, 25 bp, Artificial
  probe
  misc_feature (1)..(25): SEQ ID NO: 1979; WAN024BI6; Start 511; Stop 535
gcttctattttagtgacgaaggcag

SEQ ID NO: 311246 - DNA, 25 bp, Artificial
  probe
  misc_feature (1)..(25): SEQ ID NO: 1979; WAN024BI6; Start 432; Stop 456
atattttgactatatcgtcgtagac

SEQ ID NO: 311247 - DNA, 25 bp, Artificial
  probe
  misc_feature (1)..(25): SEQ ID NO: 1979; WAN024BI6; Start 510; Stop 534
tgcttctattttagtgacgaaggca

SEQ ID NO: 311248 - DNA, 25 bp, Artificial
  probe
  misc_feature (1)..(25): SEQ ID NO: 1979; WAN024BI6; Start 500; Stop 524
agaaatgtgatgcttctattttagt

SEQ ID NO: 311249 - DNA, 25 bp, Artificial
  probe
  misc_feature (1)..(25): SEQ ID NO: 1979; WAN024BI6; Start 499; Stop 523
cagaaatgtgatgcttctattttag

SEQ ID NO: 311250 - DNA, 25 bp, Artificial
  probe
  misc_feature (1)..(25): SEQ ID NO: 1979; WAN024BI6; Start 425; Stop 449
tgcgtaaatattttgactatatcgt

SEQ ID NO: 311251 - DNA, 25 bp, Artificial
  probe
  misc_feature (1)..(25): SEQ ID NO: 1979; WAN024BI6; Start 431; Stop 455
aatattttgactatatcgtcgtaga

SEQ ID NO: 311252 - DNA, 25 bp, Artificial
  probe
  misc_feature (1)..(25): SEQ ID NO: 1979; WAN024BI6; Start 426; Stop 450
gcgtaaatattttgactatatcgtc

SEQ ID NO: 311253 - DNA, 25 bp, Artificial
  probe
  misc_feature (1)..(25): SEQ ID NO: 1979; WAN024BI6; Start 427; Stop 451
cgtaaatattttgactatatcgtcg

SEQ ID NO: 311254 - DNA, 25 bp, Artificial
  probe
  misc_feature (1)..(25): SEQ ID NO: 1979; WAN024BI6; Start 428; Stop 452
gtaaatattttgactatatcgtcgt

SEQ ID NO: 311255 - DNA, 25 bp, Artificial
  probe
  misc_feature (1)..(25): SEQ ID NO: 1979; WAN024BI6; Start 430; Stop 454
aaatattttgactatatcgtcgtag

SEQ ID NO: 311256 - DNA, 25 bp, Artificial
  probe
  misc_feature (1)..(25): SEQ ID NO: 1980; WAN024CDJ; Start 147; Stop 171
aaagaaagccagaatgacagtcaaa

SEQ ID NO: 311257 - DNA, 25 bp, Artificial
  probe
  misc_feature (1)..(25): SEQ ID NO: 1980; WAN024CDJ; Start 148; Stop 172
aagaaagccagaatgacagtcaaag

SEQ ID NO: 311258 - DNA, 25 bp, Artificial
  probe
  misc_feature (1)..(25): SEQ ID NO: 1980; WAN024CDJ; Start 29; Stop 53
cgatagccagtaaaccagaaccaaa

SEQ ID NO: 311259 - DNA, 25 bp, Artificial
  probe
  misc_feature (1)..(25): SEQ ID NO: 1980; WAN024CDJ; Start 146; Stop 170
caaagaaagccagaatgacagtcaa

SEQ ID NO: 311260 - DNA, 25 bp, Artificial
  probe
  misc_feature (1)..(25): SEQ ID NO: 1980; WAN024CDJ; Start 243; Stop 267
gagggctaacaaggcgatatgtaaa

SEQ ID NO: 311261 - DNA, 25 bp, Artificial
  probe
  misc_feature (1)..(25): SEQ ID NO: 1980; WAN024CDJ; Start 55; Stop 79
atcaagataaaggctgatttggctt

SEQ ID NO: 311262 - DNA, 25 bp, Artificial
  probe
  misc_feature (1)..(25): SEQ ID NO: 1980; WAN024CDJ; Start 30; Stop 54
gatagccagtaaaccagaaccaaaa

SEQ ID NO: 311263 - DNA, 25 bp, Artificial
  probe
  misc_feature (1)..(25): SEQ ID NO: 1980; WAN024CDJ; Start 58; Stop 82
aagataaaggctgatttggcttggg

SEQ ID NO: 311264 - DNA, 25 bp, Artificial
  probe
  misc_feature (1)..(25): SEQ ID NO: 1980; WAN024CDJ; Start 19; Stop 43
gaagaagcaccgatagccagtaaac

SEQ ID NO: 311265 - DNA, 25 bp, Artificial
  probe
  misc_feature (1)..(25): SEQ ID NO: 1980; WAN024CDJ; Start 246; Stop 270
ggctaacaaggcgatatgtaaaatt

SEQ ID NO: 311266 - DNA, 25 bp, Artificial
  probe
  misc_feature (1)..(25): SEQ ID NO: 1980; WAN024CDJ; Start 245; Stop 269
gggctaacaaggcgatatgtaaaat

SEQ ID NO: 311267 - DNA, 25 bp, Artificial
  probe
  misc_feature (1)..(25): SEQ ID NO: 1980; WAN024CDJ; Start 139; Stop 163
gaaactgcaaagaaagccagaatga

SEQ ID NO: 311268 - DNA, 25 bp, Artificial
  probe
  misc_feature (1)..(25): SEQ ID NO: 1980; WAN024CDJ; Start 84; Stop 108
gaggacagtgaaactttcaactaaa

SEQ ID NO: 311269 - DNA, 25 bp, Artificial
  probe
  misc_feature (1)..(25): SEQ ID NO: 1980; WAN024CDJ; Start 1; Stop 25
atgccaagtaaaactagcgaagaag

SEQ ID NO: 311270 - DNA, 25 bp, Artificial
  probe
  misc_feature (1)..(25): SEQ ID NO: 1980; WAN024CDJ; Start 9; Stop 33
taaaactagcgaagaagcaccgata

SEQ ID NO: 311271 - DNA, 25 bp, Artificial
  probe
  misc_feature (1)..(25): SEQ ID NO: 1980; WAN024CDJ; Start 83; Stop 107
cgaggacagtgaaactttcaactaa

SEQ ID NO: 311272 - DNA, 25 bp, Artificial
  probe
  misc_feature (1)..(25): SEQ ID NO: 1980; WAN024CDJ; Start 140; Stop 164
aaactgcaaagaaagccagaatgac

SEQ ID NO: 311273 - DNA, 25 bp, Artificial
  probe
  misc_feature (1)..(25): SEQ ID NO: 1980; WAN024CDJ; Start 108; Stop 132
aaataggaatccgccgatgataccc

SEQ ID NO: 311274 - DNA, 25 bp, Artificial
  probe
  misc_feature (1)..(25): SEQ ID NO: 1980; WAN024CDJ; Start 244; Stop 268
agggctaacaaggcgatatgtaaaa

SEQ ID NO: 311275 - DNA, 25 bp, Artificial
  probe
  misc_feature (1)..(25): SEQ ID NO: 1980; WAN024CDJ; Start 149; Stop 173
agaaagccagaatgacagtcaaagc

SEQ ID NO: 311276 - DNA, 25 bp, Artificial
  probe
  misc_feature (1)..(25): SEQ ID NO: 1980; WAN024CDJ; Start 56; Stop 80
tcaagataaaggctgatttggcttg

SEQ ID NO: 311277 - DNA, 25 bp, Artificial
  probe
  misc_feature (1)..(25): SEQ ID NO: 1980; WAN024CDJ; Start 5; Stop 29
caagtaaaactagcgaagaagcacc

SEQ ID NO: 311278 - DNA, 25 bp, Artificial
  probe
  misc_feature (1)..(25): SEQ ID NO: 1980; WAN024CDJ; Start 4; Stop 28
ccaagtaaaactagcgaagaagcac

SEQ ID NO: 311279 - DNA, 25 bp, Artificial
  probe
  misc_feature (1)..(25): SEQ ID NO: 1980; WAN024CDJ; Start 242; Stop 266
ggagggctaacaaggcgatatgtaa

SEQ ID NO: 311280 - DNA, 25 bp, Artificial
  probe
  misc_feature (1)..(25): SEQ ID NO: 1980; WAN024CDJ; Start 107; Stop 131
aaaataggaatccgccgatgatacc

SEQ ID NO: 311281 - DNA, 25 bp, Artificial
  probe
  misc_feature (1)..(25): SEQ ID NO: 1980; WAN024CDJ; Start 28; Stop 52
ccgatagccagtaaaccagaaccaa

SEQ ID NO: 311282 - DNA, 25 bp, Artificial
  probe
  misc_feature (1)..(25): SEQ ID NO: 1980; WAN024CDJ; Start 134; Stop 158
gtatggaaactgcaaagaaagccag

SEQ ID NO: 311283 - DNA, 25 bp, Artificial
  probe
  misc_feature (1)..(25): SEQ ID NO: 1980; WAN024CDJ; Start 145; Stop 169
gcaaagaaagccagaatgacagtca

SEQ ID NO: 311284 - DNA, 25 bp, Artificial
  probe
  misc_feature (1)..(25): SEQ ID NO: 1980; WAN024CDJ; Start 135; Stop 159
tatggaaactgcaaagaaagccaga

SEQ ID NO: 311285 - DNA, 25 bp, Artificial
  probe
  misc_feature (1)..(25): SEQ ID NO: 1980; WAN024CDJ; Start 138; Stop 162
ggaaactgcaaagaaagccagaatg

SEQ ID NO: 311286 - DNA, 25 bp, Artificial
  probe
  misc_feature (1)..(25): SEQ ID NO: 1980; WAN024CDJ; Start 10; Stop 34
aaaactagcgaagaagcaccgatag

SEQ ID NO: 311287 - DNA, 25 bp, Artificial
  probe
  misc_feature (1)..(25): SEQ ID NO: 1980; WAN024CDJ; Start 133; Stop 157
agtatggaaactgcaaagaaagcca

SEQ ID NO: 311288 - DNA, 25 bp, Artificial
  probe
  misc_feature (1)..(25): SEQ ID NO: 1980; WAN024CDJ; Start 144; Stop 168
tgcaaagaaagccagaatgacagtc

SEQ ID NO: 311289 - DNA, 25 bp, Artificial
  probe
  misc_feature (1)..(25): SEQ ID NO: 1981; WAN024D4N; Start 854; Stop 878
atgcttacaactatactgccatcat

SEQ ID NO: 311290 - DNA, 25 bp, Artificial
  probe
  misc_feature (1)..(25): SEQ ID NO: 1981; WAN024D4N; Start 1163; Stop 1187
gtattacagaccttccatcaactct

SEQ ID NO: 311291 - DNA, 25 bp, Artificial
  probe
  misc_feature (1)..(25): SEQ ID NO: 1981; WAN024D4N; Start 1165; Stop 1189
attacagaccttccatcaactcttc

SEQ ID NO: 311292 - DNA, 25 bp, Artificial
  probe
  misc_feature (1)..(25): SEQ ID NO: 1981; WAN024D4N; Start 1164; Stop 1188
tattacagaccttccatcaactctt

SEQ ID NO: 311293 - DNA, 25 bp, Artificial
  probe
  misc_feature (1)..(25): SEQ ID NO: 1981; WAN024D4N; Start 115; Stop 139
acagatgaacagttagataaggtct

SEQ ID NO: 311294 - DNA, 25 bp, Artificial
  probe
  misc_feature (1)..(25): SEQ ID NO: 1981; WAN024D4N; Start 1166; Stop 1190
ttacagaccttccatcaactcttca

SEQ ID NO: 311295 - DNA, 25 bp, Artificial
  probe
  misc_feature (1)..(25): SEQ ID NO: 1981; WAN024D4N; Start 120; Stop 144
tgaacagttagataaggtcttgtcg

SEQ ID NO: 311296 - DNA, 25 bp, Artificial
  probe
  misc_feature (1)..(25): SEQ ID NO: 1981; WAN024D4N; Start 855; Stop 879
tgcttacaactatactgccatcatg

SEQ ID NO: 311297 - DNA, 25 bp, Artificial
  probe
  misc_feature (1)..(25): SEQ ID NO: 1981; WAN024D4N; Start 193; Stop 217
aatgagtcggatatgtacttgtacc

SEQ ID NO: 311298 - DNA, 25 bp, Artificial
  probe
  misc_feature (1)..(25): SEQ ID NO: 1981; WAN024D4N; Start 18; Stop 42
agatattcgtcgtgaagtcaaggaa

SEQ ID NO: 311299 - DNA, 25 bp, Artificial
  probe
  misc_feature (1)..(25): SEQ ID NO: 1981; WAN024D4N; Start 512; Stop 536
gtgagattgtgaatgtcttgaccaa

SEQ ID NO: 311300 - DNA, 25 bp, Artificial
  probe
  misc_feature (1)..(25): SEQ ID NO: 1981; WAN024D4N; Start 190; Stop 214
atcaatgagtcggatatgtacttgt

SEQ ID NO: 311301 - DNA, 25 bp, Artificial
  probe
  misc_feature (1)..(25): SEQ ID NO: 1981; WAN024D4N; Start 1167; Stop 1191
tacagaccttccatcaactcttcac

SEQ ID NO: 311302 - DNA, 25 bp, Artificial
  probe
  misc_feature (1)..(25): SEQ ID NO: 1981; WAN024D4N; Start 853; Stop 877
catgcttacaactatactgccatca

SEQ ID NO: 311303 - DNA, 25 bp, Artificial
  probe
  misc_feature (1)..(25): SEQ ID NO: 1981; WAN024D4N; Start 117; Stop 141
agatgaacagttagataaggtcttg

SEQ ID NO: 311304 - DNA, 25 bp, Artificial
  probe
  misc_feature (1)..(25): SEQ ID NO: 1981; WAN024D4N; Start 116; Stop 140
cagatgaacagttagataaggtctt

SEQ ID NO: 311305 - DNA, 25 bp, Artificial
  probe
  misc_feature (1)..(25): SEQ ID NO: 1981; WAN024D4N; Start 192; Stop 216
caatgagtcggatatgtacttgtac

SEQ ID NO: 311306 - DNA, 25 bp, Artificial
  probe
  misc_feature (1)..(25): SEQ ID NO: 1981; WAN024D4N; Start 191; Stop 215
tcaatgagtcggatatgtacttgta

SEQ ID NO: 311307 - DNA, 25 bp, Artificial
  probe
  misc_feature (1)..(25): SEQ ID NO: 1981; WAN024D4N; Start 613; Stop 637
gttctccgtgcttgtgataagattc

SEQ ID NO: 311308 - DNA, 25 bp, Artificial
  probe
  misc_feature (1)..(25): SEQ ID NO: 1981; WAN024D4N; Start 187; Stop 211
cgtatcaatgagtcggatatgtact

SEQ ID NO: 311309 - DNA, 25 bp, Artificial
  probe
  misc_feature (1)..(25): SEQ ID NO: 1981; WAN024D4N; Start 114; Stop 138
tacagatgaacagttagataaggtc

SEQ ID NO: 311310 - DNA, 25 bp, Artificial
  probe
  misc_feature (1)..(25): SEQ ID NO: 1981; WAN024D4N; Start 612; Stop 636
agttctccgtgcttgtgataagatt

SEQ ID NO: 311311 - DNA, 25 bp, Artificial
  probe
  misc_feature (1)..(25): SEQ ID NO: 1981; WAN024D4N; Start 611; Stop 635
aagttctccgtgcttgtgataagat

SEQ ID NO: 311312 - DNA, 25 bp, Artificial
  probe
  misc_feature (1)..(25): SEQ ID NO: 1981; WAN024D4N; Start 119; Stop 143
atgaacagttagataaggtcttgtc

SEQ ID NO: 311313 - DNA, 25 bp, Artificial
  probe
  misc_feature (1)..(25): SEQ ID NO: 1981; WAN024D4N; Start 118; Stop 142
gatgaacagttagataaggtcttgt

SEQ ID NO: 311314 - DNA, 25 bp, Artificial
  probe
  misc_feature (1)..(25): SEQ ID NO: 1981; WAN024D4N; Start 353; Stop 377
gtcacatggaagaagttggattcaa

SEQ ID NO: 311315 - DNA, 25 bp, Artificial
  probe
  misc_feature (1)..(25): SEQ ID NO: 1981; WAN024D4N; Start 17; Stop 41
cagatattcgtcgtgaagtcaagga

SEQ ID NO: 311316 - DNA, 25 bp, Artificial
  probe
  misc_feature (1)..(25): SEQ ID NO: 1981; WAN024D4N; Start 615; Stop 639
tctccgtgcttgtgataagattcaa

SEQ ID NO: 311317 - DNA, 25 bp, Artificial
  probe
  misc_feature (1)..(25): SEQ ID NO: 1981; WAN024D4N; Start 614; Stop 638
ttctccgtgcttgtgataagattca

SEQ ID NO: 311318 - DNA, 25 bp, Artificial
  probe
  misc_feature (1)..(25): SEQ ID NO: 1981; WAN024D4N; Start 608; Stop 632
atgaagttctccgtgcttgtgataa

SEQ ID NO: 311319 - DNA, 25 bp, Artificial
  probe
  misc_feature (1)..(25): SEQ ID NO: 1981; WAN024D4N; Start 1162; Stop 1186
ggtattacagaccttccatcaactc

SEQ ID NO: 311320 - DNA, 25 bp, Artificial
  probe
  misc_feature (1)..(25): SEQ ID NO: 1981; WAN024D4N; Start 1160; Stop 1184
ctggtattacagaccttccatcaac

SEQ ID NO: 311321 - DNA, 25 bp, Artificial
  probe
  misc_feature (1)..(25): SEQ ID NO: 1981; WAN024D4N; Start 1064; Stop 1088
tggaagttggtttgtatggtattga

SEQ ID NO: 311322 - DNA, 25 bp, Artificial
  probe
  misc_feature (1)..(25): SEQ ID NO: 1982; WAN024EVE; Start 41; Stop 65
tcctgactcaaatgtctactgatat

SEQ ID NO: 311323 - DNA, 25 bp, Artificial
  probe
  misc_feature (1)..(25): SEQ ID NO: 1982; WAN024EVE; Start 40; Stop 64
atcctgactcaaatgtctactgata

SEQ ID NO: 311324 - DNA, 25 bp, Artificial
  probe
  misc_feature (1)..(25): SEQ ID NO: 1982; WAN024EVE; Start 39; Stop 63
tatcctgactcaaatgtctactgat

SEQ ID NO: 311325 - DNA, 25 bp, Artificial
  probe
  misc_feature (1)..(25): SEQ ID NO: 1982; WAN024EVE; Start 38; Stop 62
atatcctgactcaaatgtctactga

SEQ ID NO: 311326 - DNA, 25 bp, Artificial
  probe
  misc_feature (1)..(25): SEQ ID NO: 1982; WAN024EVE; Start 31; Stop 55
ttccataatatcctgactcaaatgt

SEQ ID NO: 311327 - DNA, 25 bp, Artificial
  probe
  misc_feature (1)..(25): SEQ ID NO: 1982; WAN024EVE; Start 32; Stop 56
tccataatatcctgactcaaatgtc

SEQ ID NO: 311328 - DNA, 25 bp, Artificial
  probe
  misc_feature (1)..(25): SEQ ID NO: 1982; WAN024EVE; Start 37; Stop 61
aatatcctgactcaaatgtctactg

SEQ ID NO: 311329 - DNA, 25 bp, Artificial
  probe
  misc_feature (1)..(25): SEQ ID NO: 1982; WAN024EVE; Start 33; Stop 57
ccataatatcctgactcaaatgtct

SEQ ID NO: 311330 - DNA, 25 bp, Artificial
  probe
  misc_feature (1)..(25): SEQ ID NO: 1982; WAN024EVE; Start 30; Stop 54
tttccataatatcctgactcaaatg

SEQ ID NO: 311331 - DNA, 25 bp, Artificial
  probe
  misc_feature (1)..(25): SEQ ID NO: 1982; WAN024EVE; Start 42; Stop 66
cctgactcaaatgtctactgatatc

SEQ ID NO: 311332 - DNA, 25 bp, Artificial
  probe
  misc_feature (1)..(25): SEQ ID NO: 1982; WAN024EVE; Start 36; Stop 60
taatatcctgactcaaatgtctact

SEQ ID NO: 311333 - DNA, 25 bp, Artificial
  probe
  misc_feature (1)..(25): SEQ ID NO: 1982; WAN024EVE; Start 47; Stop 71
ctcaaatgtctactgatatctctca

SEQ ID NO: 311334 - DNA, 25 bp, Artificial
  probe
  misc_feature (1)..(25): SEQ ID NO: 1982; WAN024EVE; Start 46; Stop 70
actcaaatgtctactgatatctctc

SEQ ID NO: 311335 - DNA, 25 bp, Artificial
  probe
  misc_feature (1)..(25): SEQ ID NO: 1982; WAN024EVE; Start 44; Stop 68
tgactcaaatgtctactgatatctc

SEQ ID NO: 311336 - DNA, 25 bp, Artificial
  probe
  misc_feature (1)..(25): SEQ ID NO: 1982; WAN024EVE; Start 43; Stop 67
ctgactcaaatgtctactgatatct

SEQ ID NO: 311337 - DNA, 25 bp, Artificial
  probe
  misc_feature (1)..(25): SEQ ID NO: 1982; WAN024EVE; Start 45; Stop 69
gactcaaatgtctactgatatctct

SEQ ID NO: 311338 - DNA, 25 bp, Artificial
  probe
  misc_feature (1)..(25): SEQ ID NO: 1982; WAN024EVE; Start 26; Stop 50
tcattttccataatatcctgactca

SEQ ID NO: 311339 - DNA, 25 bp, Artificial
  probe
  misc_feature (1)..(25): SEQ ID NO: 1982; WAN024EVE; Start 35; Stop 59
ataatatcctgactcaaatgtctac

SEQ ID NO: 311340 - DNA, 25 bp, Artificial
  probe
  misc_feature (1)..(25): SEQ ID NO: 1982; WAN024EVE; Start 34; Stop 58
cataatatcctgactcaaatgtcta

SEQ ID NO: 311341 - DNA, 25 bp, Artificial
  probe
  misc_feature (1)..(25): SEQ ID NO: 1982; WAN024EVE; Start 48; Stop 72
tcaaatgtctactgatatctctcat

SEQ ID NO: 311342 - DNA, 25 bp, Artificial
  probe
  misc_feature (1)..(25): SEQ ID NO: 1982; WAN024EVE; Start 27; Stop 51
cattttccataatatcctgactcaa

SEQ ID NO: 311343 - DNA, 25 bp, Artificial
  probe
  misc_feature (1)..(25): SEQ ID NO: 1982; WAN024EVE; Start 49; Stop 73
caaatgtctactgatatctctcatc

SEQ ID NO: 311344 - DNA, 25 bp, Artificial
  probe
  misc_feature (1)..(25): SEQ ID NO: 1982; WAN024EVE; Start 29; Stop 53
ttttccataatatcctgactcaaat

SEQ ID NO: 311345 - DNA, 25 bp, Artificial
  probe
  misc_feature (1)..(25): SEQ ID NO: 1982; WAN024EVE; Start 28; Stop 52
attttccataatatcctgactcaaa

SEQ ID NO: 311346 - DNA, 25 bp, Artificial
  probe
  misc_feature (1)..(25): SEQ ID NO: 1982; WAN024EVE; Start 25; Stop 49
atcattttccataatatcctgactc

SEQ ID NO: 311347 - DNA, 25 bp, Artificial
  probe
  misc_feature (1)..(25): SEQ ID NO: 1982; WAN024EVE; Start 50; Stop 74
aaatgtctactgatatctctcatca

SEQ ID NO: 311348 - DNA, 25 bp, Artificial
  probe
  misc_feature (1)..(25): SEQ ID NO: 1982; WAN024EVE; Start 24; Stop 48
tatcattttccataatatcctgact

SEQ ID NO: 311349 - DNA, 25 bp, Artificial
  probe
  misc_feature (1)..(25): SEQ ID NO: 1983; WAN024D3Z; Start 61; Stop 85
tccaagcagtcctataagtatgatt

SEQ ID NO: 311350 - DNA, 25 bp, Artificial
  probe
  misc_feature (1)..(25): SEQ ID NO: 1983; WAN024D3Z; Start 60; Stop 84
ttccaagcagtcctataagtatgat

SEQ ID NO: 311351 - DNA, 25 bp, Artificial
  probe
  misc_feature (1)..(25): SEQ ID NO: 1983; WAN024D3Z; Start 59; Stop 83
attccaagcagtcctataagtatga

SEQ ID NO: 311352 - DNA, 25 bp, Artificial
  probe
  misc_feature (1)..(25): SEQ ID NO: 1983; WAN024D3Z; Start 55; Stop 79
gtcaattccaagcagtcctataagt

SEQ ID NO: 311353 - DNA, 25 bp, Artificial
  probe
  misc_feature (1)..(25): SEQ ID NO: 1983; WAN024D3Z; Start 54; Stop 78
tgtcaattccaagcagtcctataag

SEQ ID NO: 311354 - DNA, 25 bp, Artificial
  probe
  misc_feature (1)..(25): SEQ ID NO: 1983; WAN024D3Z; Start 56; Stop 80
tcaattccaagcagtcctataagta

SEQ ID NO: 311355 - DNA, 25 bp, Artificial
  probe
  misc_feature (1)..(25): SEQ ID NO: 1983; WAN024D3Z; Start 58; Stop 82
aattccaagcagtcctataagtatg

SEQ ID NO: 311356 - DNA, 25 bp, Artificial
  probe
  misc_feature (1)..(25): SEQ ID NO: 1983; WAN024D3Z; Start 57; Stop 81
caattccaagcagtcctataagtat

SEQ ID NO: 311357 - DNA, 25 bp, Artificial
  probe
  misc_feature (1)..(25): SEQ ID NO: 1983; WAN024D3Z; Start 53; Stop 77
ctgtcaattccaagcagtcctataa

SEQ ID NO: 311358 - DNA, 25 bp, Artificial
  probe
  misc_feature (1)..(25): SEQ ID NO: 1983; WAN024D3Z; Start 52; Stop 76
tctgtcaattccaagcagtcctata

SEQ ID NO: 311359 - DNA, 25 bp, Artificial
  probe
  misc_feature (1)..(25): SEQ ID NO: 1983; WAN024D3Z; Start 293; Stop 317
agccagagattctatacctagactc

SEQ ID NO: 311360 - DNA, 25 bp, Artificial
  probe
  misc_feature (1)..(25): SEQ ID NO: 1983; WAN024D3Z; Start 292; Stop 316
aagccagagattctatacctagact

SEQ ID NO: 311361 - DNA, 25 bp, Artificial
  probe
  misc_feature (1)..(25): SEQ ID NO: 1983; WAN024D3Z; Start 613; Stop 637
ccatccttatcagctcaagtcttac

SEQ ID NO: 311362 - DNA, 25 bp, Artificial
  probe
  misc_feature (1)..(25): SEQ ID NO: 1983; WAN024D3Z; Start 612; Stop 636
tccatccttatcagctcaagtctta

SEQ ID NO: 311363 - DNA, 25 bp, Artificial
  probe
  misc_feature (1)..(25): SEQ ID NO: 1983; WAN024D3Z; Start 614; Stop 638
catccttatcagctcaagtcttacg

SEQ ID NO: 311364 - DNA, 25 bp, Artificial
  probe
  misc_feature (1)..(25): SEQ ID NO: 1983; WAN024D3Z; Start 611; Stop 635
ttccatccttatcagctcaagtctt

SEQ ID NO: 311365 - DNA, 25 bp, Artificial
  probe
  misc_feature (1)..(25): SEQ ID NO: 1983; WAN024D3Z; Start 618; Stop 642
cttatcagctcaagtcttacgtgaa

SEQ ID NO: 311366 - DNA, 25 bp, Artificial
  probe
  misc_feature (1)..(25): SEQ ID NO: 1983; WAN024D3Z; Start 615; Stop 639
atccttatcagctcaagtcttacgt

SEQ ID NO: 311367 - DNA, 25 bp, Artificial
  probe
  misc_feature (1)..(25): SEQ ID NO: 1983; WAN024D3Z; Start 619; Stop 643
ttatcagctcaagtcttacgtgaac

SEQ ID NO: 311368 - DNA, 25 bp, Artificial
  probe
  misc_feature (1)..(25): SEQ ID NO: 1983; WAN024D3Z; Start 64; Stop 88
aagcagtcctataagtatgatttgg

SEQ ID NO: 311369 - DNA, 25 bp, Artificial
  probe
  misc_feature (1)..(25): SEQ ID NO: 1983; WAN024D3Z; Start 62; Stop 86
ccaagcagtcctataagtatgattt

SEQ ID NO: 311370 - DNA, 25 bp, Artificial
  probe
  misc_feature (1)..(25): SEQ ID NO: 1983; WAN024D3Z; Start 51; Stop 75
gtctgtcaattccaagcagtcctat

SEQ ID NO: 311371 - DNA, 25 bp, Artificial
  probe
  misc_feature (1)..(25): SEQ ID NO: 1983; WAN024D3Z; Start 620; Stop 644
tatcagctcaagtcttacgtgaaca

SEQ ID NO: 311372 - DNA, 25 bp, Artificial
  probe
  misc_feature (1)..(25): SEQ ID NO: 1983; WAN024D3Z; Start 616; Stop 640
tccttatcagctcaagtcttacgtg

SEQ ID NO: 311373 - DNA, 25 bp, Artificial
  probe
  misc_feature (1)..(25): SEQ ID NO: 1983; WAN024D3Z; Start 637; Stop 661
cgtgaacagtttattctaagacaaa

SEQ ID NO: 311374 - DNA, 25 bp, Artificial
  probe
  misc_feature (1)..(25): SEQ ID NO: 1983; WAN024D3Z; Start 617; Stop 641
ccttatcagctcaagtcttacgtga

SEQ ID NO: 311375 - DNA, 25 bp, Artificial
  probe
  misc_feature (1)..(25): SEQ ID NO: 1983; WAN024D3Z; Start 496; Stop 520
ctttcagaattggaacccttgatgg

SEQ ID NO: 311376 - DNA, 25 bp, Artificial
  probe
  misc_feature (1)..(25): SEQ ID NO: 1983; WAN024D3Z; Start 68; Stop 92
agtcctataagtatgatttggagca

SEQ ID NO: 311377 - DNA, 25 bp, Artificial
  probe
  misc_feature (1)..(25): SEQ ID NO: 1983; WAN024D3Z; Start 65; Stop 89
agcagtcctataagtatgatttgga

SEQ ID NO: 311378 - DNA, 25 bp, Artificial
  probe
  misc_feature (1)..(25): SEQ ID NO: 1983; WAN024D3Z; Start 291; Stop 315
aaagccagagattctatacctagac

SEQ ID NO: 311379 - DNA, 25 bp, Artificial
  probe
  misc_feature (1)..(25): SEQ ID NO: 1983; WAN024D3Z; Start 67; Stop 91
cagtcctataagtatgatttggagc

SEQ ID NO: 311380 - DNA, 25 bp, Artificial
  probe
  misc_feature (1)..(25): SEQ ID NO: 1983; WAN024D3Z; Start 66; Stop 90
gcagtcctataagtatgatttggag

SEQ ID NO: 311381 - DNA, 25 bp, Artificial
  probe
  misc_feature (1)..(25): SEQ ID NO: 1983; WAN024D3Z; Start 63; Stop 87
caagcagtcctataagtatgatttg

SEQ ID NO: 311382 - DNA, 25 bp, Artificial
  probe
  misc_feature (1)..(25): SEQ ID NO: 1984; WAN024CCK; Start 109; Stop 133
aagcgagagaagaagattatggatt

SEQ ID NO: 311383 - DNA, 25 bp, Artificial
  probe
  misc_feature (1)..(25): SEQ ID NO: 1984; WAN024CCK; Start 108; Stop 132
caagcgagagaagaagattatggat

SEQ ID NO: 311384 - DNA, 25 bp, Artificial
  probe
  misc_feature (1)..(25): SEQ ID NO: 1984; WAN024CCK; Start 200; Stop 224
ccactacagaattaaccacaatcac

SEQ ID NO: 311385 - DNA, 25 bp, Artificial
  probe
  misc_feature (1)..(25): SEQ ID NO: 1984; WAN024CCK; Start 199; Stop 223
accactacagaattaaccacaatca

SEQ ID NO: 311386 - DNA, 25 bp, Artificial
  probe
  misc_feature (1)..(25): SEQ ID NO: 1984; WAN024CCK; Start 197; Stop 221
agaccactacagaattaaccacaat

SEQ ID NO: 311387 - DNA, 25 bp, Artificial
  probe
  misc_feature (1)..(25): SEQ ID NO: 1984; WAN024CCK; Start 196; Stop 220
aagaccactacagaattaaccacaa

SEQ ID NO: 311388 - DNA, 25 bp, Artificial
  probe
  misc_feature (1)..(25): SEQ ID NO: 1984; WAN024CCK; Start 198; Stop 222
gaccactacagaattaaccacaatc

SEQ ID NO: 311389 - DNA, 25 bp, Artificial
  probe
  misc_feature (1)..(25): SEQ ID NO: 1984; WAN024CCK; Start 206; Stop 230
cagaattaaccacaatcactcacac

SEQ ID NO: 311390 - DNA, 25 bp, Artificial
  probe
  misc_feature (1)..(25): SEQ ID NO: 1984; WAN024CCK; Start 205; Stop 229
acagaattaaccacaatcactcaca

SEQ ID NO: 311391 - DNA, 25 bp, Artificial
  probe
  misc_feature (1)..(25): SEQ ID NO: 1984; WAN024CCK; Start 106; Stop 130
gacaagcgagagaagaagattatgg

SEQ ID NO: 311392 - DNA, 25 bp, Artificial
  probe
  misc_feature (1)..(25): SEQ ID NO: 1984; WAN024CCK; Start 105; Stop 129
ggacaagcgagagaagaagattatg

SEQ ID NO: 311393 - DNA, 25 bp, Artificial
  probe
  misc_feature (1)..(25): SEQ ID NO: 1984; WAN024CCK; Start 204; Stop 228
tacagaattaaccacaatcactcac

SEQ ID NO: 311394 - DNA, 25 bp, Artificial
  probe
  misc_feature (1)..(25): SEQ ID NO: 1984; WAN024CCK; Start 201; Stop 225
cactacagaattaaccacaatcact

SEQ ID NO: 311395 - DNA, 25 bp, Artificial
  probe
  misc_feature (1)..(25): SEQ ID NO: 1984; WAN024CCK; Start 203; Stop 227
ctacagaattaaccacaatcactca

SEQ ID NO: 311396 - DNA, 25 bp, Artificial
  probe
  misc_feature (1)..(25): SEQ ID NO: 1984; WAN024CCK; Start 202; Stop 226
actacagaattaaccacaatcactc

SEQ ID NO: 311397 - DNA, 25 bp, Artificial
  probe
  misc_feature (1)..(25): SEQ ID NO: 1984; WAN024CCK; Start 107; Stop 131
acaagcgagagaagaagattatgga

SEQ ID NO: 311398 - DNA, 25 bp, Artificial
  probe
  misc_feature (1)..(25): SEQ ID NO: 1984; WAN024CCK; Start 207; Stop 231
agaattaaccacaatcactcacacg

SEQ ID NO: 311399 - DNA, 25 bp, Artificial
  probe
  misc_feature (1)..(25): SEQ ID NO: 1984; WAN024CCK; Start 104; Stop 128
cggacaagcgagagaagaagattat

SEQ ID NO: 311400 - DNA, 25 bp, Artificial
  probe
  misc_feature (1)..(25): SEQ ID NO: 1984; WAN024CCK; Start 208; Stop 232
gaattaaccacaatcactcacacgg

SEQ ID NO: 311401 - DNA, 25 bp, Artificial
  probe
  misc_feature (1)..(25): SEQ ID NO: 1984; WAN024CCK; Start 112; Stop 136
cgagagaagaagattatggatttgc

SEQ ID NO: 311402 - DNA, 25 bp, Artificial
  probe
  misc_feature (1)..(25): SEQ ID NO: 1984; WAN024CCK; Start 111; Stop 135
gcgagagaagaagattatggatttg

SEQ ID NO: 311403 - DNA, 25 bp, Artificial
  probe
  misc_feature (1)..(25): SEQ ID NO: 1984; WAN024CCK; Start 110; Stop 134
agcgagagaagaagattatggattt

SEQ ID NO: 311404 - DNA, 25 bp, Artificial
  probe
  misc_feature (1)..(25): SEQ ID NO: 1984; WAN024CCK; Start 195; Stop 219
aaagaccactacagaattaaccaca

SEQ ID NO: 311405 - DNA, 25 bp, Artificial
  probe
  misc_feature (1)..(25): SEQ ID NO: 1984; WAN024CCK; Start 88; Stop 112
tatcttatcaagacttcggacaagc

SEQ ID NO: 311406 - DNA, 25 bp, Artificial
  probe
  misc_feature (1)..(25): SEQ ID NO: 1984; WAN024CCK; Start 87; Stop 111
atatcttatcaagacttcggacaag

SEQ ID NO: 311407 - DNA, 25 bp, Artificial
  probe
  misc_feature (1)..(25): SEQ ID NO: 1984; WAN024CCK; Start 117; Stop 141
gaagaagattatggatttgcacgag

SEQ ID NO: 311408 - DNA, 25 bp, Artificial
  probe
  misc_feature (1)..(25): SEQ ID NO: 1984; WAN024CCK; Start 115; Stop 139
gagaagaagattatggatttgcacg

SEQ ID NO: 311409 - DNA, 25 bp, Artificial
  probe
  misc_feature (1)..(25): SEQ ID NO: 1984; WAN024CCK; Start 116; Stop 140
agaagaagattatggatttgcacga

SEQ ID NO: 311410 - DNA, 25 bp, Artificial
  probe
  misc_feature (1)..(25): SEQ ID NO: 1984; WAN024CCK; Start 114; Stop 138
agagaagaagattatggatttgcac

SEQ ID NO: 311411 - DNA, 25 bp, Artificial
  probe
  misc_feature (1)..(25): SEQ ID NO: 1984; WAN024CCK; Start 113; Stop 137
gagagaagaagattatggatttgca

SEQ ID NO: 311412 - DNA, 25 bp, Artificial
  probe
  misc_feature (1)..(25): SEQ ID NO: 1984; WAN024CCK; Start 85; Stop 109
cgatatcttatcaagacttcggaca

SEQ ID NO: 311413 - DNA, 25 bp, Artificial
  probe
  misc_feature (1)..(25): SEQ ID NO: 1984; WAN024CCK; Start 84; Stop 108
tcgatatcttatcaagacttcggac

SEQ ID NO: 311414 - DNA, 25 bp, Artificial
  probe
  misc_feature (1)..(25): SEQ ID NO: 1984; WAN024CCK; Start 83; Stop 107
ttcgatatcttatcaagacttcgga

SEQ ID NO: 311415 - DNA, 25 bp, Artificial
  probe
  misc_feature (1)..(25): SEQ ID NO: 1985; WAN024FDH; Start 831; Stop 855
cttgactgttatcgcctatgaagat

SEQ ID NO: 311416 - DNA, 25 bp, Artificial
  probe
  misc_feature (1)..(25): SEQ ID NO: 1985; WAN024FDH; Start 1114; Stop 1138
tatctctatccacacaactatcctg

SEQ ID NO: 311417 - DNA, 25 bp, Artificial
  probe
  misc_feature (1)..(25): SEQ ID NO: 1985; WAN024FDH; Start 1112; Stop 1136
actatctctatccacacaactatcc

SEQ ID NO: 311418 - DNA, 25 bp, Artificial
  probe
  misc_feature (1)..(25): SEQ ID NO: 1985; WAN024FDH; Start 1108; Stop 1132
caagactatctctatccacacaact

SEQ ID NO: 311419 - DNA, 25 bp, Artificial
  probe
  misc_feature (1)..(25): SEQ ID NO: 1985; WAN024FDH; Start 1107; Stop 1131
ccaagactatctctatccacacaac

SEQ ID NO: 311420 - DNA, 25 bp, Artificial
  probe
  misc_feature (1)..(25): SEQ ID NO: 1985; WAN024FDH; Start 308; Stop 332
tagataagaccaagcaagacttcct

SEQ ID NO: 311421 - DNA, 25 bp, Artificial
  probe
  misc_feature (1)..(25): SEQ ID NO: 1985; WAN024FDH; Start 1113; Stop 1137
ctatctctatccacacaactatcct

SEQ ID NO: 311422 - DNA, 25 bp, Artificial
  probe
  misc_feature (1)..(25): SEQ ID NO: 1985; WAN024FDH; Start 306; Stop 330
actagataagaccaagcaagacttc

SEQ ID NO: 311423 - DNA, 25 bp, Artificial
  probe
  misc_feature (1)..(25): SEQ ID NO: 1985; WAN024FDH; Start 305; Stop 329
gactagataagaccaagcaagactt

SEQ ID NO: 311424 - DNA, 25 bp, Artificial
  probe
  misc_feature (1)..(25): SEQ ID NO: 1985; WAN024FDH; Start 707; Stop 731
gagacggtcactatgatgttctatc

SEQ ID NO: 311425 - DNA, 25 bp, Artificial
  probe
  misc_feature (1)..(25): SEQ ID NO: 1985; WAN024FDH; Start 307; Stop 331
ctagataagaccaagcaagacttcc

SEQ ID NO: 311426 - DNA, 25 bp, Artificial
  probe
  misc_feature (1)..(25): SEQ ID NO: 1985; WAN024FDH; Start 709; Stop 733
gacggtcactatgatgttctatctg

SEQ ID NO: 311427 - DNA, 25 bp, Artificial
  probe
  misc_feature (1)..(25): SEQ ID NO: 1985; WAN024FDH; Start 708; Stop 732
agacggtcactatgatgttctatct

SEQ ID NO: 311428 - DNA, 25 bp, Artificial
  probe
  misc_feature (1)..(25): SEQ ID NO: 1985; WAN024FDH; Start 832; Stop 856
ttgactgttatcgcctatgaagata

SEQ ID NO: 311429 - DNA, 25 bp, Artificial
  probe
  misc_feature (1)..(25): SEQ ID NO: 1985; WAN024FDH; Start 833; Stop 857
tgactgttatcgcctatgaagatat

SEQ ID NO: 311430 - DNA, 25 bp, Artificial
  probe
  misc_feature (1)..(25): SEQ ID NO: 1985; WAN024FDH; Start 1111; Stop 1135
gactatctctatccacacaactatc

SEQ ID NO: 311431 - DNA, 25 bp, Artificial
  probe
  misc_feature (1)..(25): SEQ ID NO: 1985; WAN024FDH; Start 1109; Stop 1133
aagactatctctatccacacaacta

SEQ ID NO: 311432 - DNA, 25 bp, Artificial
  probe
  misc_feature (1)..(25): SEQ ID NO: 1985; WAN024FDH; Start 706; Stop 730
ggagacggtcactatgatgttctat

SEQ ID NO: 311433 - DNA, 25 bp, Artificial
  probe
  misc_feature (1)..(25): SEQ ID NO: 1985; WAN024FDH; Start 309; Stop 333
agataagaccaagcaagacttcctc

SEQ ID NO: 311434 - DNA, 25 bp, Artificial
  probe
  misc_feature (1)..(25): SEQ ID NO: 1985; WAN024FDH; Start 304; Stop 328
cgactagataagaccaagcaagact

SEQ ID NO: 311435 - DNA, 25 bp, Artificial
  probe
  misc_feature (1)..(25): SEQ ID NO: 1985; WAN024FDH; Start 1110; Stop 1134
agactatctctatccacacaactat

SEQ ID NO: 311436 - DNA, 25 bp, Artificial
  probe
  misc_feature (1)..(25): SEQ ID NO: 1985; WAN024FDH; Start 310; Stop 334
gataagaccaagcaagacttcctct

SEQ ID NO: 311437 - DNA, 25 bp, Artificial
  probe
  misc_feature (1)..(25): SEQ ID NO: 1985; WAN024FDH; Start 515; Stop 539
ttccaatagaactagatgaggatgc

SEQ ID NO: 311438 - DNA, 25 bp, Artificial
  probe
  misc_feature (1)..(25): SEQ ID NO: 1985; WAN024FDH; Start 298; Stop 322
attcatcgactagataagaccaagc

SEQ ID NO: 311439 - DNA, 25 bp, Artificial
  probe
  misc_feature (1)..(25): SEQ ID NO: 1985; WAN024FDH; Start 710; Stop 734
acggtcactatgatgttctatctgc

SEQ ID NO: 311440 - DNA, 25 bp, Artificial
  probe
  misc_feature (1)..(25): SEQ ID NO: 1985; WAN024FDH; Start 678; Stop 702
gagaagctacatcactatggacaag

SEQ ID NO: 311441 - DNA, 25 bp, Artificial
  probe
  misc_feature (1)..(25): SEQ ID NO: 1985; WAN024FDH; Start 674; Stop 698
ttcagagaagctacatcactatgga

SEQ ID NO: 311442 - DNA, 25 bp, Artificial
  probe
  misc_feature (1)..(25): SEQ ID NO: 1985; WAN024FDH; Start 677; Stop 701
agagaagctacatcactatggacaa

SEQ ID NO: 311443 - DNA, 25 bp, Artificial
  probe
  misc_feature (1)..(25): SEQ ID NO: 1985; WAN024FDH; Start 302; Stop 326
atcgactagataagaccaagcaaga

SEQ ID NO: 311444 - DNA, 25 bp, Artificial
  probe
  misc_feature (1)..(25): SEQ ID NO: 1985; WAN024FDH; Start 301; Stop 325
catcgactagataagaccaagcaag

SEQ ID NO: 311445 - DNA, 25 bp, Artificial
  probe
  misc_feature (1)..(25): SEQ ID NO: 1985; WAN024FDH; Start 1177; Stop 1201
cgtaatcatcactatttccaagcag

SEQ ID NO: 311446 - DNA, 25 bp, Artificial
  probe
  misc_feature (1)..(25): SEQ ID NO: 1985; WAN024FDH; Start 1176; Stop 1200
tcgtaatcatcactatttccaagca

SEQ ID NO: 311447 - DNA, 25 bp, Artificial
  probe
  misc_feature (1)..(25): SEQ ID NO: 1985; WAN024FDH; Start 1115; Stop 1139
atctctatccacacaactatcctgg

SEQ ID NO: 311448 - DNA, 25 bp, Artificial
  probe
  misc_feature (1)..(25): SEQ ID NO: 1986; WAN024CAT; Start 117; Stop 141
ggaagtgccagttattattgatgat

SEQ ID NO: 311449 - DNA, 25 bp, Artificial
  probe
  misc_feature (1)..(25): SEQ ID NO: 1986; WAN024CAT; Start 119; Stop 143
aagtgccagttattattgatgattg

SEQ ID NO: 311450 - DNA, 25 bp, Artificial
  probe
  misc_feature (1)..(25): SEQ ID NO: 1986; WAN024CAT; Start 118; Stop 142
gaagtgccagttattattgatgatt

SEQ ID NO: 311451 - DNA, 25 bp, Artificial
  probe
  misc_feature (1)..(25): SEQ ID NO: 1986; WAN024CAT; Start 122; Stop 146
tgccagttattattgatgattggtg

SEQ ID NO: 311452 - DNA, 25 bp, Artificial
  probe
  misc_feature (1)..(25): SEQ ID NO: 1986; WAN024CAT; Start 121; Stop 145
gtgccagttattattgatgattggt

SEQ ID NO: 311453 - DNA, 25 bp, Artificial
  probe
  misc_feature (1)..(25): SEQ ID NO: 1986; WAN024CAT; Start 120; Stop 144
agtgccagttattattgatgattgg

SEQ ID NO: 311454 - DNA, 25 bp, Artificial
  probe
  misc_feature (1)..(25): SEQ ID NO: 1986; WAN024CAT; Start 123; Stop 147
gccagttattattgatgattggtgc

SEQ ID NO: 311455 - DNA, 25 bp, Artificial
  probe
  misc_feature (1)..(25): SEQ ID NO: 1986; WAN024CAT; Start 160; Stop 184
aacgaggatgaaacggaaatactat

SEQ ID NO: 311456 - DNA, 25 bp, Artificial
  probe
  misc_feature (1)..(25): SEQ ID NO: 1986; WAN024CAT; Start 157; Stop 181
ctaaacgaggatgaaacggaaatac

SEQ ID NO: 311457 - DNA, 25 bp, Artificial
  probe
  misc_feature (1)..(25): SEQ ID NO: 1986; WAN024CAT; Start 159; Stop 183
aaacgaggatgaaacggaaatacta

SEQ ID NO: 311458 - DNA, 25 bp, Artificial
  probe
  misc_feature (1)..(25): SEQ ID NO: 1986; WAN024CAT; Start 158; Stop 182
taaacgaggatgaaacggaaatact

SEQ ID NO: 311459 - DNA, 25 bp, Artificial
  probe
  misc_feature (1)..(25): SEQ ID NO: 1986; WAN024CAT; Start 2; Stop 26
tgccagagtttattattgttgaagg

SEQ ID NO: 311460 - DNA, 25 bp, Artificial
  probe
  misc_feature (1)..(25): SEQ ID NO: 1986; WAN024CAT; Start 161; Stop 185
acgaggatgaaacggaaatactata

SEQ ID NO: 311461 - DNA, 25 bp, Artificial
  probe
  misc_feature (1)..(25): SEQ ID NO: 1986; WAN024CAT; Start 3; Stop 27
gccagagtttattattgttgaagga

SEQ ID NO: 311462 - DNA, 25 bp, Artificial
  probe
  misc_feature (1)..(25): SEQ ID NO: 1986; WAN024CAT; Start 162; Stop 186
cgaggatgaaacggaaatactatac

SEQ ID NO: 311463 - DNA, 25 bp, Artificial
  probe
  misc_feature (1)..(25): SEQ ID NO: 1986; WAN024CAT; Start 116; Stop 140
gggaagtgccagttattattgatga

SEQ ID NO: 311464 - DNA, 25 bp, Artificial
  probe
  misc_feature (1)..(25): SEQ ID NO: 1986; WAN024CAT; Start 163; Stop 187
gaggatgaaacggaaatactatact

SEQ ID NO: 311465 - DNA, 25 bp, Artificial
  probe
  misc_feature (1)..(25): SEQ ID NO: 1986; WAN024CAT; Start 125; Stop 149
cagttattattgatgattggtgcaa

SEQ ID NO: 311466 - DNA, 25 bp, Artificial
  probe
  misc_feature (1)..(25): SEQ ID NO: 1986; WAN024CAT; Start 1; Stop 25
atgccagagtttattattgttgaag

SEQ ID NO: 311467 - DNA, 25 bp, Artificial
  probe
  misc_feature (1)..(25): SEQ ID NO: 1986; WAN024CAT; Start 124; Stop 148
ccagttattattgatgattggtgca

SEQ ID NO: 311468 - DNA, 25 bp, Artificial
  probe
  misc_feature (1)..(25): SEQ ID NO: 1986; WAN024CAT; Start 253; Stop 277
acatcgaacaagatctatgcaacta

SEQ ID NO: 311469 - DNA, 25 bp, Artificial
  probe
  misc_feature (1)..(25): SEQ ID NO: 1986; WAN024CAT; Start 252; Stop 276
tacatcgaacaagatctatgcaact

SEQ ID NO: 311470 - DNA, 25 bp, Artificial
  probe
  misc_feature (1)..(25): SEQ ID NO: 1986; WAN024CAT; Start 156; Stop 180
cctaaacgaggatgaaacggaaata

SEQ ID NO: 311471 - DNA, 25 bp, Artificial
  probe
  misc_feature (1)..(25): SEQ ID NO: 1986; WAN024CAT; Start 61; Stop 85
ggcgagctatttagtgataatgaac

SEQ ID NO: 311472 - DNA, 25 bp, Artificial
  probe
  misc_feature (1)..(25): SEQ ID NO: 1986; WAN024CAT; Start 60; Stop 84
tggcgagctatttagtgataatgaa

SEQ ID NO: 311473 - DNA, 25 bp, Artificial
  probe
  misc_feature (1)..(25): SEQ ID NO: 1986; WAN024CAT; Start 59; Stop 83
atggcgagctatttagtgataatga

SEQ ID NO: 311474 - DNA, 25 bp, Artificial
  probe
  misc_feature (1)..(25): SEQ ID NO: 1986; WAN024CAT; Start 58; Stop 82
gatggcgagctatttagtgataatg

SEQ ID NO: 311475 - DNA, 25 bp, Artificial
  probe
  misc_feature (1)..(25): SEQ ID NO: 1986; WAN024CAT; Start 57; Stop 81
agatggcgagctatttagtgataat

SEQ ID NO: 311476 - DNA, 25 bp, Artificial
  probe
  misc_feature (1)..(25): SEQ ID NO: 1986; WAN024CAT; Start 251; Stop 275
atacatcgaacaagatctatgcaac

SEQ ID NO: 311477 - DNA, 25 bp, Artificial
  probe
  misc_feature (1)..(25): SEQ ID NO: 1986; WAN024CAT; Start 164; Stop 188
aggatgaaacggaaatactatactt

SEQ ID NO: 311478 - DNA, 25 bp, Artificial
  probe
  misc_feature (1)..(25): SEQ ID NO: 1986; WAN024CAT; Start 254; Stop 278
catcgaacaagatctatgcaactat

SEQ ID NO: 311479 - DNA, 25 bp, Artificial
  probe
  misc_feature (1)..(25): SEQ ID NO: 1986; WAN024CAT; Start 56; Stop 80
tagatggcgagctatttagtgataa

SEQ ID NO: 311480 - DNA, 25 bp, Artificial
  probe
  misc_feature (1)..(25): SEQ ID NO: 1986; WAN024CAT; Start 4; Stop 28
ccagagtttattattgttgaaggaa

SEQ ID NO: 311481 - DNA, 25 bp, Artificial
  probe
  misc_feature (1)..(25): SEQ ID NO: 1987; WAN024FJ6; Start 131; Stop 155
ccagacgaaggaagttagatgaaat

SEQ ID NO: 311482 - DNA, 25 bp, Artificial
  probe
  misc_feature (1)..(25): SEQ ID NO: 1987; WAN024FJ6; Start 132; Stop 156
cagacgaaggaagttagatgaaatc

SEQ ID NO: 311483 - DNA, 25 bp, Artificial
  probe
  misc_feature (1)..(25): SEQ ID NO: 1987; WAN024FJ6; Start 415; Stop 439
atttccttaatcacgatattgggca

SEQ ID NO: 311484 - DNA, 25 bp, Artificial
  probe
  misc_feature (1)..(25): SEQ ID NO: 1987; WAN024FJ6; Start 134; Stop 158
gacgaaggaagttagatgaaatcac

SEQ ID NO: 311485 - DNA, 25 bp, Artificial
  probe
  misc_feature (1)..(25): SEQ ID NO: 1987; WAN024FJ6; Start 414; Stop 438
aatttccttaatcacgatattgggc

SEQ ID NO: 311486 - DNA, 25 bp, Artificial
  probe
  misc_feature (1)..(25): SEQ ID NO: 1987; WAN024FJ6; Start 410; Stop 434
gcccaatttccttaatcacgatatt

SEQ ID NO: 311487 - DNA, 25 bp, Artificial
  probe
  misc_feature (1)..(25): SEQ ID NO: 1987; WAN024FJ6; Start 133; Stop 157
agacgaaggaagttagatgaaatca

SEQ ID NO: 311488 - DNA, 25 bp, Artificial
  probe
  misc_feature (1)..(25): SEQ ID NO: 1987; WAN024FJ6; Start 417; Stop 441
ttccttaatcacgatattgggcaaa

SEQ ID NO: 311489 - DNA, 25 bp, Artificial
  probe
  misc_feature (1)..(25): SEQ ID NO: 1987; WAN024FJ6; Start 416; Stop 440
tttccttaatcacgatattgggcaa

SEQ ID NO: 311490 - DNA, 25 bp, Artificial
  probe
  misc_feature (1)..(25): SEQ ID NO: 1987; WAN024FJ6; Start 163; Stop 187
gaaacttgcttacaaagacctacaa

SEQ ID NO: 311491 - DNA, 25 bp, Artificial
  probe
  misc_feature (1)..(25): SEQ ID NO: 1987; WAN024FJ6; Start 82; Stop 106
atcaactcgtccacaatcaaatctc

SEQ ID NO: 311492 - DNA, 25 bp, Artificial
  probe
  misc_feature (1)..(25): SEQ ID NO: 1987; WAN024FJ6; Start 135; Stop 159
acgaaggaagttagatgaaatcacg

SEQ ID NO: 311493 - DNA, 25 bp, Artificial
  probe
  misc_feature (1)..(25): SEQ ID NO: 1987; WAN024FJ6; Start 164; Stop 188
aaacttgcttacaaagacctacaaa

SEQ ID NO: 311494 - DNA, 25 bp, Artificial
  probe
  misc_feature (1)..(25): SEQ ID NO: 1987; WAN024FJ6; Start 259; Stop 283
atattcaccaagacagtgtcgataa

SEQ ID NO: 311495 - DNA, 25 bp, Artificial
  probe
  misc_feature (1)..(25): SEQ ID NO: 1987; WAN024FJ6; Start 258; Stop 282
aatattcaccaagacagtgtcgata

SEQ ID NO: 311496 - DNA, 25 bp, Artificial
  probe
  misc_feature (1)..(25): SEQ ID NO: 1987; WAN024FJ6; Start 255; Stop 279
ttcaatattcaccaagacagtgtcg

SEQ ID NO: 311497 - DNA, 25 bp, Artificial
  probe
  misc_feature (1)..(25): SEQ ID NO: 1987; WAN024FJ6; Start 81; Stop 105
catcaactcgtccacaatcaaatct

SEQ ID NO: 311498 - DNA, 25 bp, Artificial
  probe
  misc_feature (1)..(25): SEQ ID NO: 1987; WAN024FJ6; Start 409; Stop 433
cgcccaatttccttaatcacgatat

SEQ ID NO: 311499 - DNA, 25 bp, Artificial
  probe
  misc_feature (1)..(25): SEQ ID NO: 1987; WAN024FJ6; Start 318; Stop 342
gtggttgctatctgtaaagtgttcc

SEQ ID NO: 311500 - DNA, 25 bp, Artificial
  probe
  misc_feature (1)..(25): SEQ ID NO: 1987; WAN024FJ6; Start 38; Stop 62
tttactgctactgtgaaactcattt

SEQ ID NO: 311501 - DNA, 25 bp, Artificial
  probe
  misc_feature (1)..(25): SEQ ID NO: 1987; WAN024FJ6; Start 321; Stop 345
gttgctatctgtaaagtgttccgtc

SEQ ID NO: 311502 - DNA, 25 bp, Artificial
  probe
  misc_feature (1)..(25): SEQ ID NO: 1987; WAN024FJ6; Start 257; Stop 281
caatattcaccaagacagtgtcgat

SEQ ID NO: 311503 - DNA, 25 bp, Artificial
  probe
  misc_feature (1)..(25): SEQ ID NO: 1987; WAN024FJ6; Start 162; Stop 186
cgaaacttgcttacaaagacctaca

SEQ ID NO: 311504 - DNA, 25 bp, Artificial
  probe
  misc_feature (1)..(25): SEQ ID NO: 1987; WAN024FJ6; Start 322; Stop 346
ttgctatctgtaaagtgttccgtct

SEQ ID NO: 311505 - DNA, 25 bp, Artificial
  probe
  misc_feature (1)..(25): SEQ ID NO: 1987; WAN024FJ6; Start 317; Stop 341
cgtggttgctatctgtaaagtgttc

SEQ ID NO: 311506 - DNA, 25 bp, Artificial
  probe
  misc_feature (1)..(25): SEQ ID NO: 1987; WAN024FJ6; Start 323; Stop 347
tgctatctgtaaagtgttccgtctc

SEQ ID NO: 311507 - DNA, 25 bp, Artificial
  probe
  misc_feature (1)..(25): SEQ ID NO: 1987; WAN024FJ6; Start 230; Stop 254
aattcatgtattcctgaggcacttt

SEQ ID NO: 311508 - DNA, 25 bp, Artificial
  probe
  misc_feature (1)..(25): SEQ ID NO: 1987; WAN024FJ6; Start 325; Stop 349
ctatctgtaaagtgttccgtctccc

SEQ ID NO: 311509 - DNA, 25 bp, Artificial
  probe
  misc_feature (1)..(25): SEQ ID NO: 1987; WAN024FJ6; Start 136; Stop 160
cgaaggaagttagatgaaatcacgc

SEQ ID NO: 311510 - DNA, 25 bp, Artificial
  probe
  misc_feature (1)..(25): SEQ ID NO: 1987; WAN024FJ6; Start 85; Stop 109
aactcgtccacaatcaaatctccat

SEQ ID NO: 311511 - DNA, 25 bp, Artificial
  probe
  misc_feature (1)..(25): SEQ ID NO: 1987; WAN024FJ6; Start 256; Stop 280
tcaatattcaccaagacagtgtcga

SEQ ID NO: 311512 - DNA, 25 bp, Artificial
  probe
  misc_feature (1)..(25): SEQ ID NO: 1987; WAN024FJ6; Start 130; Stop 154
tccagacgaaggaagttagatgaaa

SEQ ID NO: 311513 - DNA, 25 bp, Artificial
  probe
  misc_feature (1)..(25): SEQ ID NO: 1987; WAN024FJ6; Start 86; Stop 110
actcgtccacaatcaaatctccatc

SEQ ID NO: 311514 - DNA, 25 bp, Artificial
  probe
  misc_feature (1)..(25): SEQ ID NO: 1988; WAN024FNC; Start 163; Stop 187
cttgatacctacactaagatgctca

SEQ ID NO: 311515 - DNA, 25 bp, Artificial
  probe
  misc_feature (1)..(25): SEQ ID NO: 1988; WAN024FNC; Start 250; Stop 274
gcttggatgattgacaattctctca

SEQ ID NO: 311516 - DNA, 25 bp, Artificial
  probe
  misc_feature (1)..(25): SEQ ID NO: 1988; WAN024FNC; Start 58; Stop 82
gatccatcaacttatctcaatcctt

SEQ ID NO: 311517 - DNA, 25 bp, Artificial
  probe
  misc_feature (1)..(25): SEQ ID NO: 1988; WAN024FNC; Start 274; Stop 298
attatgtcagctatgtcaagtggtg

SEQ ID NO: 311518 - DNA, 25 bp, Artificial
  probe
  misc_feature (1)..(25): SEQ ID NO: 1988; WAN024FNC; Start 271; Stop 295
ctcattatgtcagctatgtcaagtg

SEQ ID NO: 311519 - DNA, 25 bp, Artificial
  probe
  misc_feature (1)..(25): SEQ ID NO: 1988; WAN024FNC; Start 249; Stop 273
ggcttggatgattgacaattctctc

SEQ ID NO: 311520 - DNA, 25 bp, Artificial
  probe
  misc_feature (1)..(25): SEQ ID NO: 1988; WAN024FNC; Start 270; Stop 294
tctcattatgtcagctatgtcaagt

SEQ ID NO: 311521 - DNA, 25 bp, Artificial
  probe
  misc_feature (1)..(25): SEQ ID NO: 1988; WAN024FNC; Start 272; Stop 296
tcattatgtcagctatgtcaagtgg

SEQ ID NO: 311522 - DNA, 25 bp, Artificial
  probe
  misc_feature (1)..(25): SEQ ID NO: 1988; WAN024FNC; Start 268; Stop 292
tctctcattatgtcagctatgtcaa

SEQ ID NO: 311523 - DNA, 25 bp, Artificial
  probe
  misc_feature (1)..(25): SEQ ID NO: 1988; WAN024FNC; Start 267; Stop 291
ttctctcattatgtcagctatgtca

SEQ ID NO: 311524 - DNA, 25 bp, Artificial
  probe
  misc_feature (1)..(25): SEQ ID NO: 1988; WAN024FNC; Start 273; Stop 297
cattatgtcagctatgtcaagtggt

SEQ ID NO: 311525 - DNA, 25 bp, Artificial
  probe
  misc_feature (1)..(25): SEQ ID NO: 1988; WAN024FNC; Start 269; Stop 293
ctctcattatgtcagctatgtcaag

SEQ ID NO: 311526 - DNA, 25 bp, Artificial
  probe
  misc_feature (1)..(25): SEQ ID NO: 1988; WAN024FNC; Start 169; Stop 193
acctacactaagatgctcaaagatg

SEQ ID NO: 311527 - DNA, 25 bp, Artificial
  probe
  misc_feature (1)..(25): SEQ ID NO: 1988; WAN024FNC; Start 311; Stop 335
taaccaaagtgatgccatttacaag

SEQ ID NO: 311528 - DNA, 25 bp, Artificial
  probe
  misc_feature (1)..(25): SEQ ID NO: 1988; WAN024FNC; Start 248; Stop 272
aggcttggatgattgacaattctct

SEQ ID NO: 311529 - DNA, 25 bp, Artificial
  probe
  misc_feature (1)..(25): SEQ ID NO: 1988; WAN024FNC; Start 247; Stop 271
caggcttggatgattgacaattctc

SEQ ID NO: 311530 - DNA, 25 bp, Artificial
  probe
  misc_feature (1)..(25): SEQ ID NO: 1988; WAN024FNC; Start 307; Stop 331
tctgtaaccaaagtgatgccattta

SEQ ID NO: 311531 - DNA, 25 bp, Artificial
  probe
  misc_feature (1)..(25): SEQ ID NO: 1988; WAN024FNC; Start 168; Stop 192
tacctacactaagatgctcaaagat

SEQ ID NO: 311532 - DNA, 25 bp, Artificial
  probe
  misc_feature (1)..(25): SEQ ID NO: 1988; WAN024FNC; Start 167; Stop 191
atacctacactaagatgctcaaaga

SEQ ID NO: 311533 - DNA, 25 bp, Artificial
  probe
  misc_feature (1)..(25): SEQ ID NO: 1988; WAN024FNC; Start 166; Stop 190
gatacctacactaagatgctcaaag

SEQ ID NO: 311534 - DNA, 25 bp, Artificial
  probe
  misc_feature (1)..(25): SEQ ID NO: 1988; WAN024FNC; Start 65; Stop 89
caacttatctcaatcctttcaatgc

SEQ ID NO: 311535 - DNA, 25 bp, Artificial
  probe
  misc_feature (1)..(25): SEQ ID NO: 1988; WAN024FNC; Start 61; Stop 85
ccatcaacttatctcaatcctttca

SEQ ID NO: 311536 - DNA, 25 bp, Artificial
  probe
  misc_feature (1)..(25): SEQ ID NO: 1988; WAN024FNC; Start 266; Stop 290
attctctcattatgtcagctatgtc

SEQ ID NO: 311537 - DNA, 25 bp, Artificial
  probe
  misc_feature (1)..(25): SEQ ID NO: 1988; WAN024FNC; Start 312; Stop 336
aaccaaagtgatgccatttacaaga

SEQ ID NO: 311538 - DNA, 25 bp, Artificial
  probe
  misc_feature (1)..(25): SEQ ID NO: 1988; WAN024FNC; Start 306; Stop 330
atctgtaaccaaagtgatgccattt

SEQ ID NO: 311539 - DNA, 25 bp, Artificial
  probe
  misc_feature (1)..(25): SEQ ID NO: 1988; WAN024FNC; Start 60; Stop 84
tccatcaacttatctcaatcctttc

SEQ ID NO: 311540 - DNA, 25 bp, Artificial
  probe
  misc_feature (1)..(25): SEQ ID NO: 1988; WAN024FNC; Start 245; Stop 269
cacaggcttggatgattgacaattc

SEQ ID NO: 311541 - DNA, 25 bp, Artificial
  probe
  misc_feature (1)..(25): SEQ ID NO: 1988; WAN024FNC; Start 170; Stop 194
cctacactaagatgctcaaagatgc

SEQ ID NO: 311542 - DNA, 25 bp, Artificial
  probe
  misc_feature (1)..(25): SEQ ID NO: 1988; WAN024FNC; Start 161; Stop 185
gtcttgatacctacactaagatgct

SEQ ID NO: 311543 - DNA, 25 bp, Artificial
  probe
  misc_feature (1)..(25): SEQ ID NO: 1988; WAN024FNC; Start 160; Stop 184
ggtcttgatacctacactaagatgc

SEQ ID NO: 311544 - DNA, 25 bp, Artificial
  probe
  misc_feature (1)..(25): SEQ ID NO: 1988; WAN024FNC; Start 246; Stop 270
acaggcttggatgattgacaattct

SEQ ID NO: 311545 - DNA, 25 bp, Artificial
  probe
  misc_feature (1)..(25): SEQ ID NO: 1988; WAN024FNC; Start 162; Stop 186
tcttgatacctacactaagatgctc

SEQ ID NO: 311546 - DNA, 25 bp, Artificial
  probe
  misc_feature (1)..(25): SEQ ID NO: 1988; WAN024FNC; Start 165; Stop 189
tgatacctacactaagatgctcaaa

SEQ ID NO: 311547 - DNA, 25 bp, Artificial
  probe
  misc_feature (1)..(25): SEQ ID NO: 1989; WAN024AWU; Start 273; Stop 297
aatcatagacaaggcaactggtaag

SEQ ID NO: 311548 - DNA, 25 bp, Artificial
  probe
  misc_feature (1)..(25): SEQ ID NO: 1989; WAN024AWU; Start 575; Stop 599
cggattggttgtctatgattgataa

SEQ ID NO: 311549 - DNA, 25 bp, Artificial
  probe
  misc_feature (1)..(25): SEQ ID NO: 1989; WAN024AWU; Start 272; Stop 296
caatcatagacaaggcaactggtaa

SEQ ID NO: 311550 - DNA, 25 bp, Artificial
  probe
  misc_feature (1)..(25): SEQ ID NO: 1989; WAN024AWU; Start 567; Stop 591
aagagatacggattggttgtctatg

SEQ ID NO: 311551 - DNA, 25 bp, Artificial
  probe
  misc_feature (1)..(25): SEQ ID NO: 1989; WAN024AWU; Start 331; Stop 355
cagaataaccgagtaatagaagtgg

SEQ ID NO: 311552 - DNA, 25 bp, Artificial
  probe
  misc_feature (1)..(25): SEQ ID NO: 1989; WAN024AWU; Start 566; Stop 590
caagagatacggattggttgtctat

SEQ ID NO: 311553 - DNA, 25 bp, Artificial
  probe
  misc_feature (1)..(25): SEQ ID NO: 1989; WAN024AWU; Start 410; Stop 434
agtatctcttggcttgctatgtctt

SEQ ID NO: 311554 - DNA, 25 bp, Artificial
  probe
  misc_feature (1)..(25): SEQ ID NO: 1989; WAN024AWU; Start 330; Stop 354
tcagaataaccgagtaatagaagtg

SEQ ID NO: 311555 - DNA, 25 bp, Artificial
  probe
  misc_feature (1)..(25): SEQ ID NO: 1989; WAN024AWU; Start 443; Stop 467
ttaactatcgtcgctatgagtggaa

SEQ ID NO: 311556 - DNA, 25 bp, Artificial
  probe
  misc_feature (1)..(25): SEQ ID NO: 1989; WAN024AWU; Start 583; Stop 607
ttgtctatgattgataaggactggc

SEQ ID NO: 311557 - DNA, 25 bp, Artificial
  probe
  misc_feature (1)..(25): SEQ ID NO: 1989; WAN024AWU; Start 409; Stop 433
cagtatctcttggcttgctatgtct

SEQ ID NO: 311558 - DNA, 25 bp, Artificial
  probe
  misc_feature (1)..(25): SEQ ID NO: 1989; WAN024AWU; Start 580; Stop 604
tggttgtctatgattgataaggact

SEQ ID NO: 311559 - DNA, 25 bp, Artificial
  probe
  misc_feature (1)..(25): SEQ ID NO: 1989; WAN024AWU; Start 582; Stop 606
gttgtctatgattgataaggactgg

SEQ ID NO: 311560 - DNA, 25 bp, Artificial
  probe
  misc_feature (1)..(25): SEQ ID NO: 1989; WAN024AWU; Start 581; Stop 605
ggttgtctatgattgataaggactg

SEQ ID NO: 311561 - DNA, 25 bp, Artificial
  probe
  misc_feature (1)..(25): SEQ ID NO: 1989; WAN024AWU; Start 578; Stop 602
attggttgtctatgattgataagga

SEQ ID NO: 311562 - DNA, 25 bp, Artificial
  probe
  misc_feature (1)..(25): SEQ ID NO: 1989; WAN024AWU; Start 274; Stop 298
atcatagacaaggcaactggtaagg

SEQ ID NO: 311563 - DNA, 25 bp, Artificial
  probe
  misc_feature (1)..(25): SEQ ID NO: 1989; WAN024AWU; Start 442; Stop 466
cttaactatcgtcgctatgagtgga

SEQ ID NO: 311564 - DNA, 25 bp, Artificial
  probe
  misc_feature (1)..(25): SEQ ID NO: 1989; WAN024AWU; Start 577; Stop 601
gattggttgtctatgattgataagg

SEQ ID NO: 311565 - DNA, 25 bp, Artificial
  probe
  misc_feature (1)..(25): SEQ ID NO: 1989; WAN024AWU; Start 576; Stop 600
ggattggttgtctatgattgataag

SEQ ID NO: 311566 - DNA, 25 bp, Artificial
  probe
  misc_feature (1)..(25): SEQ ID NO: 1989; WAN024AWU; Start 579; Stop 603
ttggttgtctatgattgataaggac

SEQ ID NO: 311567 - DNA, 25 bp, Artificial
  probe
  misc_feature (1)..(25): SEQ ID NO: 1989; WAN024AWU; Start 47; Stop 71
cttatactccaggtgaattgccttc

SEQ ID NO: 311568 - DNA, 25 bp, Artificial
  probe
  misc_feature (1)..(25): SEQ ID NO: 1989; WAN024AWU; Start 49; Stop 73
tatactccaggtgaattgccttctt

SEQ ID NO: 311569 - DNA, 25 bp, Artificial
  probe
  misc_feature (1)..(25): SEQ ID NO: 1989; WAN024AWU; Start 48; Stop 72
ttatactccaggtgaattgccttct

SEQ ID NO: 311570 - DNA, 25 bp, Artificial
  probe
  misc_feature (1)..(25): SEQ ID NO: 1989; WAN024AWU; Start 675; Stop 699
caagagcttgagagaacttctaact

SEQ ID NO: 311571 - DNA, 25 bp, Artificial
  probe
  misc_feature (1)..(25): SEQ ID NO: 1989; WAN024AWU; Start 674; Stop 698
acaagagcttgagagaacttctaac

SEQ ID NO: 311572 - DNA, 25 bp, Artificial
  probe
  misc_feature (1)..(25): SEQ ID NO: 1989; WAN024AWU; Start 673; Stop 697
cacaagagcttgagagaacttctaa

SEQ ID NO: 311573 - DNA, 25 bp, Artificial
  probe
  misc_feature (1)..(25): SEQ ID NO: 1989; WAN024AWU; Start 334; Stop 358
aataaccgagtaatagaagtgggag

SEQ ID NO: 311574 - DNA, 25 bp, Artificial
  probe
  misc_feature (1)..(25): SEQ ID NO: 1989; WAN024AWU; Start 333; Stop 357
gaataaccgagtaatagaagtggga

SEQ ID NO: 311575 - DNA, 25 bp, Artificial
  probe
  misc_feature (1)..(25): SEQ ID NO: 1989; WAN024AWU; Start 332; Stop 356
agaataaccgagtaatagaagtggg

SEQ ID NO: 311576 - DNA, 25 bp, Artificial
  probe
  misc_feature (1)..(25): SEQ ID NO: 1989; WAN024AWU; Start 677; Stop 701
agagcttgagagaacttctaactaa

SEQ ID NO: 311577 - DNA, 25 bp, Artificial
  probe
  misc_feature (1)..(25): SEQ ID NO: 1989; WAN024AWU; Start 676; Stop 700
aagagcttgagagaacttctaacta

SEQ ID NO: 311578 - DNA, 25 bp, Artificial
  probe
  misc_feature (1)..(25): SEQ ID NO: 1989; WAN024AWU; Start 329; Stop 353
atcagaataaccgagtaatagaagt

SEQ ID NO: 311579 - DNA, 25 bp, Artificial
  probe
  misc_feature (1)..(25): SEQ ID NO: 1989; WAN024AWU; Start 412; Stop 436
tatctcttggcttgctatgtctttg

SEQ ID NO: 311580 - DNA, 25 bp, Artificial
  probe
  misc_feature (1)..(25): SEQ ID NO: 1990; WAN024AWV; Start 329; Stop 353
accagaataaccgagtaatagaagt

SEQ ID NO: 311581 - DNA, 25 bp, Artificial
  probe
  misc_feature (1)..(25): SEQ ID NO: 1990; WAN024AWV; Start 327; Stop 351
tgaccagaataaccgagtaatagaa

SEQ ID NO: 311582 - DNA, 25 bp, Artificial
  probe
  misc_feature (1)..(25): SEQ ID NO: 1990; WAN024AWV; Start 326; Stop 350
ttgaccagaataaccgagtaataga

SEQ ID NO: 311583 - DNA, 25 bp, Artificial
  probe
  misc_feature (1)..(25): SEQ ID NO: 1990; WAN024AWV; Start 323; Stop 347
gcattgaccagaataaccgagtaat

SEQ ID NO: 311584 - DNA, 25 bp, Artificial
  probe
  misc_feature (1)..(25): SEQ ID NO: 1990; WAN024AWV; Start 567; Stop 591
gagagatacggattggttgtctatg

SEQ ID NO: 311585 - DNA, 25 bp, Artificial
  probe
  misc_feature (1)..(25): SEQ ID NO: 1990; WAN024AWV; Start 330; Stop 354
ccagaataaccgagtaatagaagtc

SEQ ID NO: 311586 - DNA, 25 bp, Artificial
  probe
  misc_feature (1)..(25): SEQ ID NO: 1990; WAN024AWV; Start 328; Stop 352
gaccagaataaccgagtaatagaag

SEQ ID NO: 311587 - DNA, 25 bp, Artificial
  probe
  misc_feature (1)..(25): SEQ ID NO: 1990; WAN024AWV; Start 324; Stop 348
cattgaccagaataaccgagtaata

SEQ ID NO: 311588 - DNA, 25 bp, Artificial
  probe
  misc_feature (1)..(25): SEQ ID NO: 1990; WAN024AWV; Start 325; Stop 349
attgaccagaataaccgagtaatag

SEQ ID NO: 311589 - DNA, 25 bp, Artificial
  probe
  misc_feature (1)..(25): SEQ ID NO: 1990; WAN024AWV; Start 566; Stop 590
cgagagatacggattggttgtctat

SEQ ID NO: 311590 - DNA, 25 bp, Artificial
  probe
  misc_feature (1)..(25): SEQ ID NO: 1990; WAN024AWV; Start 273; Stop 297
aatcatagacaaggcgactggtaag

SEQ ID NO: 311591 - DNA, 25 bp, Artificial
  probe
  misc_feature (1)..(25): SEQ ID NO: 1990; WAN024AWV; Start 341; Stop 365
gagtaatagaagtcggagcagtcac

SEQ ID NO: 311592 - DNA, 25 bp, Artificial
  probe
  misc_feature (1)..(25): SEQ ID NO: 1990; WAN024AWV; Start 272; Stop 296
caatcatagacaaggcgactggtaa

SEQ ID NO: 311593 - DNA, 25 bp, Artificial
  probe
  misc_feature (1)..(25): SEQ ID NO: 1990; WAN024AWV; Start 565; Stop 589
acgagagatacggattggttgtcta

SEQ ID NO: 311594 - DNA, 25 bp, Artificial
  probe
  misc_feature (1)..(25): SEQ ID NO: 1990; WAN024AWV; Start 564; Stop 588
tacgagagatacggattggttgtct

SEQ ID NO: 311595 - DNA, 25 bp, Artificial
  probe
  misc_feature (1)..(25): SEQ ID NO: 1990; WAN024AWV; Start 342; Stop 366
agtaatagaagtcggagcagtcact

SEQ ID NO: 311596 - DNA, 25 bp, Artificial
  probe
  misc_feature (1)..(25): SEQ ID NO: 1990; WAN024AWV; Start 322; Stop 346
cgcattgaccagaataaccgagtaa

SEQ ID NO: 311597 - DNA, 25 bp, Artificial
  probe
  misc_feature (1)..(25): SEQ ID NO: 1990; WAN024AWV; Start 563; Stop 587
gtacgagagatacggattggttgtc

SEQ ID NO: 311598 - DNA, 25 bp, Artificial
  probe
  misc_feature (1)..(25): SEQ ID NO: 1990; WAN024AWV; Start 73; Stop 97
attgatttcttagaagggcgttatg

SEQ ID NO: 311599 - DNA, 25 bp, Artificial
  probe
  misc_feature (1)..(25): SEQ ID NO: 1990; WAN024AWV; Start 331; Stop 355
cagaataaccgagtaatagaagtcg

SEQ ID NO: 311600 - DNA, 25 bp, Artificial
  probe
  misc_feature (1)..(25): SEQ ID NO: 1990; WAN024AWV; Start 71; Stop 95
ctattgatttcttagaagggcgtta

SEQ ID NO: 311601 - DNA, 25 bp, Artificial
  probe
  misc_feature (1)..(25): SEQ ID NO: 1990; WAN024AWV; Start 72; Stop 96
tattgatttcttagaagggcgttat

SEQ ID NO: 311602 - DNA, 25 bp, Artificial
  probe
  misc_feature (1)..(25): SEQ ID NO: 1990; WAN024AWV; Start 274; Stop 298
atcatagacaaggcgactggtaagg

SEQ ID NO: 311603 - DNA, 25 bp, Artificial
  probe
  misc_feature (1)..(25): SEQ ID NO: 1990; WAN024AWV; Start 70; Stop 94
tctattgatttcttagaagggcgtt

SEQ ID NO: 311604 - DNA, 25 bp, Artificial
  probe
  misc_feature (1)..(25): SEQ ID NO: 1990; WAN024AWV; Start 669; Stop 693
gcagtacaagagcttgagagaactt

SEQ ID NO: 311605 - DNA, 25 bp, Artificial
  probe
  misc_feature (1)..(25): SEQ ID NO: 1990; WAN024AWV; Start 671; Stop 695
agtacaagagcttgagagaacttta

SEQ ID NO: 311606 - DNA, 25 bp, Artificial
  probe
  misc_feature (1)..(25): SEQ ID NO: 1990; WAN024AWV; Start 670; Stop 694
cagtacaagagcttgagagaacttt

SEQ ID NO: 311607 - DNA, 25 bp, Artificial
  probe
  misc_feature (1)..(25): SEQ ID NO: 1990; WAN024AWV; Start 460; Stop 484
gagtggaaatgcgatgccttaaatc

SEQ ID NO: 311608 - DNA, 25 bp, Artificial
  probe
  misc_feature (1)..(25): SEQ ID NO: 1990; WAN024AWV; Start 672; Stop 696
gtacaagagcttgagagaactttaa

SEQ ID NO: 311609 - DNA, 25 bp, Artificial
  probe
  misc_feature (1)..(25): SEQ ID NO: 1990; WAN024AWV; Start 343; Stop 367
gtaatagaagtcggagcagtcactt

SEQ ID NO: 311610 - DNA, 25 bp, Artificial
  probe
  misc_feature (1)..(25): SEQ ID NO: 1990; WAN024AWV; Start 462; Stop 486
gtggaaatgcgatgccttaaatctg

SEQ ID NO: 311611 - DNA, 25 bp, Artificial
  probe
  misc_feature (1)..(25): SEQ ID NO: 1990; WAN024AWV; Start 461; Stop 485
agtggaaatgcgatgccttaaatct

SEQ ID NO: 311612 - DNA, 25 bp, Artificial
  probe
  misc_feature (1)..(25): SEQ ID NO: 1990; WAN024AWV; Start 610; Stop 634
caagtcaaagatcgtttggaaacat

SEQ ID NO: 311613 - DNA, 25 bp, Artificial
  probe
  misc_feature (1)..(25): SEQ ID NO: 1991; WAN024G2J-5; Start 948; Stop 972
aatctacaactggtcttatgctgat

SEQ ID NO: 311614 - DNA, 25 bp, Artificial
  probe
  misc_feature (1)..(25): SEQ ID NO: 1991; WAN024G2J-5; Start 949; Stop 973
atctacaactggtcttatgctgatg

SEQ ID NO: 311615 - DNA, 25 bp, Artificial
  probe
  misc_feature (1)..(25): SEQ ID NO: 1991; WAN024G2J-5; Start 951; Stop 975
ctacaactggtcttatgctgatgag

SEQ ID NO: 311616 - DNA, 25 bp, Artificial
  probe
  misc_feature (1)..(25): SEQ ID NO: 1991; WAN024G2J-5; Start 950; Stop 974
tctacaactggtcttatgctgatga

SEQ ID NO: 311617 - DNA, 25 bp, Artificial
  probe
  misc_feature (1)..(25): SEQ ID NO: 1991; WAN024G2J-5; Start 74; Stop 98
gtaatgaaggctggattaagattgg

SEQ ID NO: 311618 - DNA, 25 bp, Artificial
  probe
  misc_feature (1)..(25): SEQ ID NO: 1991; WAN024G2J-5; Start 1252; Stop 1276
ctccgtaatgaactcaagcatactt

SEQ ID NO: 311619 - DNA, 25 bp, Artificial
  probe
  misc_feature (1)..(25): SEQ ID NO: 1991; WAN024G2J-5; Start 1249; Stop 1273
gaactccgtaatgaactcaagcata

SEQ ID NO: 311620 - DNA, 25 bp, Artificial
  probe
  misc_feature (1)..(25): SEQ ID NO: 1991; WAN024G2J-5; Start 1250; Stop 1274
aactccgtaatgaactcaagcatac

SEQ ID NO: 311621 - DNA, 25 bp, Artificial
  probe
  misc_feature (1)..(25): SEQ ID NO: 1991; WAN024G2J-5; Start 73; Stop 97
agtaatgaaggctggattaagattg

SEQ ID NO: 311622 - DNA, 25 bp, Artificial
  probe
  misc_feature (1)..(25): SEQ ID NO: 1991; WAN024G2J-5; Start 1506; Stop 1530
tgaatggacaggtgtattgatgtta

SEQ ID NO: 311623 - DNA, 25 bp, Artificial
  probe
  misc_feature (1)..(25): SEQ ID NO: 1991; WAN024G2J-5; Start 984; Stop 1008
taagtattcgtggtctcttgagcaa

SEQ ID NO: 311624 - DNA, 25 bp, Artificial
  probe
  misc_feature (1)..(25): SEQ ID NO: 1991; WAN024G2J-5; Start 1251; Stop 1275
actccgtaatgaactcaagcatact

SEQ ID NO: 311625 - DNA, 25 bp, Artificial
  probe
  misc_feature (1)..(25): SEQ ID NO: 1991; WAN024G2J-5; Start 1508; Stop 1532
aatggacaggtgtattgatgttatc

SEQ ID NO: 311626 - DNA, 25 bp, Artificial
  probe
  misc_feature (1)..(25): SEQ ID NO: 1991; WAN024G2J-5; Start 1507; Stop 1531
gaatggacaggtgtattgatgttat

SEQ ID NO: 311627 - DNA, 25 bp, Artificial
  probe
  misc_feature (1)..(25): SEQ ID NO: 1991; WAN024G2J-5; Start 159; Stop 183
tacagatgtcttatggactggtgat

SEQ ID NO: 311628 - DNA, 25 bp, Artificial
  probe
  misc_feature (1)..(25): SEQ ID NO: 1991; WAN024G2J-5; Start 1505; Stop 1529
ctgaatggacaggtgtattgatgtt

SEQ ID NO: 311629 - DNA, 25 bp, Artificial
  probe
  misc_feature (1)..(25): SEQ ID NO: 1991; WAN024G2J-5; Start 980; Stop 1004
ctgctaagtattcgtggtctcttga

SEQ ID NO: 311630 - DNA, 25 bp, Artificial
  probe
  misc_feature (1)..(25): SEQ ID NO: 1991; WAN024G2J-5; Start 72; Stop 96
cagtaatgaaggctggattaagatt

SEQ ID NO: 311631 - DNA, 25 bp, Artificial
  probe
  misc_feature (1)..(25): SEQ ID NO: 1991; WAN024G2J-5; Start 983; Stop 1007
ctaagtattcgtggtctcttgagca

SEQ ID NO: 311632 - DNA, 25 bp, Artificial
  probe
  misc_feature (1)..(25): SEQ ID NO: 1991; WAN024G2J-5; Start 981; Stop 1005
tgctaagtattcgtggtctcttgag

SEQ ID NO: 311633 - DNA, 25 bp, Artificial
  probe
  misc_feature (1)..(25): SEQ ID NO: 1991; WAN024G2J-5; Start 158; Stop 182
ctacagatgtcttatggactggtga

SEQ ID NO: 311634 - DNA, 25 bp, Artificial
  probe
  misc_feature (1)..(25): SEQ ID NO: 1991; WAN024G2J-5; Start 1248; Stop 1272
agaactccgtaatgaactcaagcat

SEQ ID NO: 311635 - DNA, 25 bp, Artificial
  probe
  misc_feature (1)..(25): SEQ ID NO: 1991; WAN024G2J-5; Start 1247; Stop 1271
aagaactccgtaatgaactcaagca

SEQ ID NO: 311636 - DNA, 25 bp, Artificial
  probe
  misc_feature (1)..(25): SEQ ID NO: 1991; WAN024G2J-5; Start 58; Stop 82
acaccgacagtaaccagtaatgaag

SEQ ID NO: 311637 - DNA, 25 bp, Artificial
  probe
  misc_feature (1)..(25): SEQ ID NO: 1991; WAN024G2J-5; Start 57; Stop 81
cacaccgacagtaaccagtaatgaa

SEQ ID NO: 311638 - DNA, 25 bp, Artificial
  probe
  misc_feature (1)..(25): SEQ ID NO: 1991; WAN024G2J-5; Start 947; Stop 971
aaatctacaactggtcttatgctga

SEQ ID NO: 311639 - DNA, 25 bp, Artificial
  probe
  misc_feature (1)..(25): SEQ ID NO: 1991; WAN024G2J-5; Start 946; Stop 970
caaatctacaactggtcttatgctg

SEQ ID NO: 311640 - DNA, 25 bp, Artificial
  probe
  misc_feature (1)..(25): SEQ ID NO: 1991; WAN024G2J-5; Start 945; Stop 969
acaaatctacaactggtcttatgct

SEQ ID NO: 311641 - DNA, 25 bp, Artificial
  probe
  misc_feature (1)..(25): SEQ ID NO: 1991; WAN024G2J-5; Start 766; Stop 790
cacgataaactcaaatgggtaactg

SEQ ID NO: 311642 - DNA, 25 bp, Artificial
  probe
  misc_feature (1)..(25): SEQ ID NO: 1991; WAN024G2J-5; Start 231; Stop 255
tgatttccaccatttcctttctttc

SEQ ID NO: 311643 - DNA, 25 bp, Artificial
  probe
  misc_feature (1)..(25): SEQ ID NO: 1991; WAN024G2J-5; Start 944; Stop 968
aacaaatctacaactggtcttatgc

SEQ ID NO: 311644 - DNA, 25 bp, Artificial
  probe
  misc_feature (1)..(25): SEQ ID NO: 1991; WAN024G2J-5; Start 941; Stop 965
aggaacaaatctacaactggtctta

SEQ ID NO: 311645 - DNA, 25 bp, Artificial
  probe
  misc_feature (1)..(25): SEQ ID NO: 1991; WAN024G2J-5; Start 232; Stop 256
gatttccaccatttcctttctttcc

SEQ ID NO: 311646 - DNA, 25 bp, Artificial
  probe
  misc_feature (1)..(25): SEQ ID NO: 1992; WAN024FEW; Start 217; Stop 241
ctcgcttctgctaagtcttgtaatt

SEQ ID NO: 311647 - DNA, 25 bp, Artificial
  probe
  misc_feature (1)..(25): SEQ ID NO: 1992; WAN024FEW; Start 216; Stop 240
cctcgcttctgctaagtcttgtaat

SEQ ID NO: 311648 - DNA, 25 bp, Artificial
  probe
  misc_feature (1)..(25): SEQ ID NO: 1992; WAN024FEW; Start 83; Stop 107
cttcttgtctttcttgctcagttaa

SEQ ID NO: 311649 - DNA, 25 bp, Artificial
  probe
  misc_feature (1)..(25): SEQ ID NO: 1992; WAN024FEW; Start 84; Stop 108
ttcttgtctttcttgctcagttaaa

SEQ ID NO: 311650 - DNA, 25 bp, Artificial
  probe
  misc_feature (1)..(25): SEQ ID NO: 1992; WAN024FEW; Start 220; Stop 244
gcttctgctaagtcttgtaatttca

SEQ ID NO: 311651 - DNA, 25 bp, Artificial
  probe
  misc_feature (1)..(25): SEQ ID NO: 1992; WAN024FEW; Start 219; Stop 243
cgcttctgctaagtcttgtaatttc

SEQ ID NO: 311652 - DNA, 25 bp, Artificial
  probe
  misc_feature (1)..(25): SEQ ID NO: 1992; WAN024FEW; Start 218; Stop 242
tcgcttctgctaagtcttgtaattt

SEQ ID NO: 311653 - DNA, 25 bp, Artificial
  probe
  misc_feature (1)..(25): SEQ ID NO: 1992; WAN024FEW; Start 82; Stop 106
acttcttgtctttcttgctcagtta

SEQ ID NO: 311654 - DNA, 25 bp, Artificial
  probe
  misc_feature (1)..(25): SEQ ID NO: 1992; WAN024FEW; Start 76; Stop 100
atgtcaacttcttgtctttcttgct

SEQ ID NO: 311655 - DNA, 25 bp, Artificial
  probe
  misc_feature (1)..(25): SEQ ID NO: 1992; WAN024FEW; Start 79; Stop 103
tcaacttcttgtctttcttgctcag

SEQ ID NO: 311656 - DNA, 25 bp, Artificial
  probe
  misc_feature (1)..(25): SEQ ID NO: 1992; WAN024FEW; Start 78; Stop 102
gtcaacttcttgtctttcttgctca

SEQ ID NO: 311657 - DNA, 25 bp, Artificial
  probe
  misc_feature (1)..(25): SEQ ID NO: 1992; WAN024FEW; Start 77; Stop 101
tgtcaacttcttgtctttcttgctc

SEQ ID NO: 311658 - DNA, 25 bp, Artificial
  probe
  misc_feature (1)..(25): SEQ ID NO: 1992; WAN024FEW; Start 80; Stop 104
caacttcttgtctttcttgctcagt

SEQ ID NO: 311659 - DNA, 25 bp, Artificial
  probe
  misc_feature (1)..(25): SEQ ID NO: 1992; WAN024FEW; Start 74; Stop 98
ccatgtcaacttcttgtctttcttg

SEQ ID NO: 311660 - DNA, 25 bp, Artificial
  probe
  misc_feature (1)..(25): SEQ ID NO: 1992; WAN024FEW; Start 168; Stop 192
caattccttgagtaagagtccttta

SEQ ID NO: 311661 - DNA, 25 bp, Artificial
  probe
  misc_feature (1)..(25): SEQ ID NO: 1992; WAN024FEW; Start 73; Stop 97
accatgtcaacttcttgtctttctt

SEQ ID NO: 311662 - DNA, 25 bp, Artificial
  probe
  misc_feature (1)..(25): SEQ ID NO: 1992; WAN024FEW; Start 75; Stop 99
catgtcaacttcttgtctttcttgc

SEQ ID NO: 311663 - DNA, 25 bp, Artificial
  probe
  misc_feature (1)..(25): SEQ ID NO: 1992; WAN024FEW; Start 221; Stop 245
cttctgctaagtcttgtaatttcaa

SEQ ID NO: 311664 - DNA, 25 bp, Artificial
  probe
  misc_feature (1)..(25): SEQ ID NO: 1992; WAN024FEW; Start 72; Stop 96
gaccatgtcaacttcttgtctttct

SEQ ID NO: 311665 - DNA, 25 bp, Artificial
  probe
  misc_feature (1)..(25): SEQ ID NO: 1992; WAN024FEW; Start 169; Stop 193
aattccttgagtaagagtcctttac

SEQ ID NO: 311666 - DNA, 25 bp, Artificial
  probe
  misc_feature (1)..(25): SEQ ID NO: 1992; WAN024FEW; Start 85; Stop 109
tcttgtctttcttgctcagttaaaa

SEQ ID NO: 311667 - DNA, 25 bp, Artificial
  probe
  misc_feature (1)..(25): SEQ ID NO: 1992; WAN024FEW; Start 167; Stop 191
tcaattccttgagtaagagtccttt

SEQ ID NO: 311668 - DNA, 25 bp, Artificial
  probe
  misc_feature (1)..(25): SEQ ID NO: 1992; WAN024FEW; Start 81; Stop 105
aacttcttgtctttcttgctcagtt

SEQ ID NO: 311669 - DNA, 25 bp, Artificial
  probe
  misc_feature (1)..(25): SEQ ID NO: 1992; WAN024FEW; Start 86; Stop 110
cttgtctttcttgctcagttaaaat

SEQ ID NO: 311670 - DNA, 25 bp, Artificial
  probe
  misc_feature (1)..(25): SEQ ID NO: 1992; WAN024FEW; Start 69; Stop 93
aatgaccatgtcaacttcttgtctt

SEQ ID NO: 311671 - DNA, 25 bp, Artificial
  probe
  misc_feature (1)..(25): SEQ ID NO: 1992; WAN024FEW; Start 104; Stop 128
ttaaaatagagtcactagcactggc

SEQ ID NO: 311672 - DNA, 25 bp, Artificial
  probe
  misc_feature (1)..(25): SEQ ID NO: 1992; WAN024FEW; Start 103; Stop 127
gttaaaatagagtcactagcactgg

SEQ ID NO: 311673 - DNA, 25 bp, Artificial
  probe
  misc_feature (1)..(25): SEQ ID NO: 1992; WAN024FEW; Start 95; Stop 119
cttgctcagttaaaatagagtcact

SEQ ID NO: 311674 - DNA, 25 bp, Artificial
  probe
  misc_feature (1)..(25): SEQ ID NO: 1992; WAN024FEW; Start 94; Stop 118
tcttgctcagttaaaatagagtcac

SEQ ID NO: 311675 - DNA, 25 bp, Artificial
  probe
  misc_feature (1)..(25): SEQ ID NO: 1992; WAN024FEW; Start 68; Stop 92
caatgaccatgtcaacttcttgtct

SEQ ID NO: 311676 - DNA, 25 bp, Artificial
  probe
  misc_feature (1)..(25): SEQ ID NO: 1992; WAN024FEW; Start 102; Stop 126
agttaaaatagagtcactagcactg

SEQ ID NO: 311677 - DNA, 25 bp, Artificial
  probe
  misc_feature (1)..(25): SEQ ID NO: 1992; WAN024FEW; Start 101; Stop 125
cagttaaaatagagtcactagcact

SEQ ID NO: 311678 - DNA, 25 bp, Artificial
  probe
  misc_feature (1)..(25): SEQ ID NO: 1992; WAN024FEW; Start 100; Stop 124
tcagttaaaatagagtcactagcac

SEQ ID NO: 311679 - DNA, 25 bp, Artificial
  probe
  misc_feature (1)..(25): SEQ ID NO: 1993; WAN024B5N; Start 144; Stop 168
gatgataacgacaacttctcctctt

SEQ ID NO: 311680 - DNA, 25 bp, Artificial
  probe
  misc_feature (1)..(25): SEQ ID NO: 1993; WAN024B5N; Start 27; Stop 51
caggtcattcttcttgtccgtaata

SEQ ID NO: 311681 - DNA, 25 bp, Artificial
  probe
  misc_feature (1)..(25): SEQ ID NO: 1993; WAN024B5N; Start 30; Stop 54
gtcattcttcttgtccgtaatatcg

SEQ ID NO: 311682 - DNA, 25 bp, Artificial
  probe
  misc_feature (1)..(25): SEQ ID NO: 1993; WAN024B5N; Start 28; Stop 52
aggtcattcttcttgtccgtaatat

SEQ ID NO: 311683 - DNA, 25 bp, Artificial
  probe
  misc_feature (1)..(25): SEQ ID NO: 1993; WAN024B5N; Start 29; Stop 53
ggtcattcttcttgtccgtaatatc

SEQ ID NO: 311684 - DNA, 25 bp, Artificial
  probe
  misc_feature (1)..(25): SEQ ID NO: 1993; WAN024B5N; Start 99; Stop 123
attcatagagcgaagcaaggtagat

SEQ ID NO: 311685 - DNA, 25 bp, Artificial
  probe
  misc_feature (1)..(25): SEQ ID NO: 1993; WAN024B5N; Start 100; Stop 124
ttcatagagcgaagcaaggtagatt

SEQ ID NO: 311686 - DNA, 25 bp, Artificial
  probe
  misc_feature (1)..(25): SEQ ID NO: 1993; WAN024B5N; Start 98; Stop 122
aattcatagagcgaagcaaggtaga

SEQ ID NO: 311687 - DNA, 25 bp, Artificial
  probe
  misc_feature (1)..(25): SEQ ID NO: 1993; WAN024B5N; Start 143; Stop 167
cgatgataacgacaacttctcctct

SEQ ID NO: 311688 - DNA, 25 bp, Artificial
  probe
  misc_feature (1)..(25): SEQ ID NO: 1993; WAN024B5N; Start 31; Stop 55
tcattcttcttgtccgtaatatcga

SEQ ID NO: 311689 - DNA, 25 bp, Artificial
  probe
  misc_feature (1)..(25): SEQ ID NO: 1993; WAN024B5N; Start 26; Stop 50
acaggtcattcttcttgtccgtaat

SEQ ID NO: 311690 - DNA, 25 bp, Artificial
  probe
  misc_feature (1)..(25): SEQ ID NO: 1993; WAN024B5N; Start 145; Stop 169
atgataacgacaacttctcctcttt

SEQ ID NO: 311691 - DNA, 25 bp, Artificial
  probe
  misc_feature (1)..(25): SEQ ID NO: 1993; WAN024B5N; Start 25; Stop 49
aacaggtcattcttcttgtccgtaa

SEQ ID NO: 311692 - DNA, 25 bp, Artificial
  probe
  misc_feature (1)..(25): SEQ ID NO: 1993; WAN024B5N; Start 187; Stop 211
cccttcaatacttcattctttccaa

SEQ ID NO: 311693 - DNA, 25 bp, Artificial
  probe
  misc_feature (1)..(25): SEQ ID NO: 1993; WAN024B5N; Start 137; Stop 161
aaggaccgatgataacgacaacttc

SEQ ID NO: 311694 - DNA, 25 bp, Artificial
  probe
  misc_feature (1)..(25): SEQ ID NO: 1993; WAN024B5N; Start 136; Stop 160
gaaggaccgatgataacgacaactt

SEQ ID NO: 311695 - DNA, 25 bp, Artificial
  probe
  misc_feature (1)..(25): SEQ ID NO: 1993; WAN024B5N; Start 184; Stop 208
atgcccttcaatacttcattctttc

SEQ ID NO: 311696 - DNA, 25 bp, Artificial
  probe
  misc_feature (1)..(25): SEQ ID NO: 1993; WAN024B5N; Start 183; Stop 207
gatgcccttcaatacttcattcttt

SEQ ID NO: 311697 - DNA, 25 bp, Artificial
  probe
  misc_feature (1)..(25): SEQ ID NO: 1993; WAN024B5N; Start 142; Stop 166
ccgatgataacgacaacttctcctc

SEQ ID NO: 311698 - DNA, 25 bp, Artificial
  probe
  misc_feature (1)..(25): SEQ ID NO: 1993; WAN024B5N; Start 186; Stop 210
gcccttcaatacttcattctttcca

SEQ ID NO: 311699 - DNA, 25 bp, Artificial
  probe
  misc_feature (1)..(25): SEQ ID NO: 1993; WAN024B5N; Start 185; Stop 209
tgcccttcaatacttcattctttcc

SEQ ID NO: 311700 - DNA, 25 bp, Artificial
  probe
  misc_feature (1)..(25): SEQ ID NO: 1993; WAN024B5N; Start 34; Stop 58
ttcttcttgtccgtaatatcgactc

SEQ ID NO: 311701 - DNA, 25 bp, Artificial
  probe
  misc_feature (1)..(25): SEQ ID NO: 1993; WAN024B5N; Start 33; Stop 57
attcttcttgtccgtaatatcgact

SEQ ID NO: 311702 - DNA, 25 bp, Artificial
  probe
  misc_feature (1)..(25): SEQ ID NO: 1993; WAN024B5N; Start 32; Stop 56
cattcttcttgtccgtaatatcgac

SEQ ID NO: 311703 - DNA, 25 bp, Artificial
  probe
  misc_feature (1)..(25): SEQ ID NO: 1993; WAN024B5N; Start 182; Stop 206
tgatgcccttcaatacttcattctt

SEQ ID NO: 311704 - DNA, 25 bp, Artificial
  probe
  misc_feature (1)..(25): SEQ ID NO: 1993; WAN024B5N; Start 140; Stop 164
gaccgatgataacgacaacttctcc

SEQ ID NO: 311705 - DNA, 25 bp, Artificial
  probe
  misc_feature (1)..(25): SEQ ID NO: 1993; WAN024B5N; Start 139; Stop 163
ggaccgatgataacgacaacttctc

SEQ ID NO: 311706 - DNA, 25 bp, Artificial
  probe
  misc_feature (1)..(25): SEQ ID NO: 1993; WAN024B5N; Start 252; Stop 276
cattatttcttatctccttgtccca

SEQ ID NO: 311707 - DNA, 25 bp, Artificial
  probe
  misc_feature (1)..(25): SEQ ID NO: 1993; WAN024B5N; Start 97; Stop 121
aaattcatagagcgaagcaaggtag

SEQ ID NO: 311708 - DNA, 25 bp, Artificial
  probe
  misc_feature (1)..(25): SEQ ID NO: 1993; WAN024B5N; Start 93; Stop 117
caacaaattcatagagcgaagcaag

SEQ ID NO: 311709 - DNA, 25 bp, Artificial
  probe
  misc_feature (1)..(25): SEQ ID NO: 1993; WAN024B5N; Start 101; Stop 125
tcatagagcgaagcaaggtagattt

SEQ ID NO: 311710 - DNA, 25 bp, Artificial
  probe
  misc_feature (1)..(25): SEQ ID NO: 1993; WAN024B5N; Start 96; Stop 120
caaattcatagagcgaagcaaggta

SEQ ID NO: 311711 - DNA, 25 bp, Artificial
  probe
  misc_feature (1)..(25): SEQ ID NO: 1993; WAN024B5N; Start 102; Stop 126
catagagcgaagcaaggtagatttc

SEQ ID NO: 311712 - DNA, 25 bp, Artificial
  probe
  misc_feature (1)..(25): SEQ ID NO: 1994; WAN024D5N; Start 261; Stop 285
aaaggcaataaaggaaatcgctgta

SEQ ID NO: 311713 - DNA, 25 bp, Artificial
  probe
  misc_feature (1)..(25): SEQ ID NO: 1994; WAN024D5N; Start 41; Stop 65
aaatcaagaacttcacgggaatcat

SEQ ID NO: 311714 - DNA, 25 bp, Artificial
  probe
  misc_feature (1)..(25): SEQ ID NO: 1994; WAN024D5N; Start 8; Stop 32
aaattgatgaagagagcctgacttt

SEQ ID NO: 311715 - DNA, 25 bp, Artificial
  probe
  misc_feature (1)..(25): SEQ ID NO: 1994; WAN024D5N; Start 109; Stop 133
cagcatctcacaagaaatctcattg

SEQ ID NO: 311716 - DNA, 25 bp, Artificial
  probe
  misc_feature (1)..(25): SEQ ID NO: 1994; WAN024D5N; Start 266; Stop 290
caataaaggaaatcgctgtaccaat

SEQ ID NO: 311717 - DNA, 25 bp, Artificial
  probe
  misc_feature (1)..(25): SEQ ID NO: 1994; WAN024D5N; Start 42; Stop 66
aatcaagaacttcacgggaatcatc

SEQ ID NO: 311718 - DNA, 25 bp, Artificial
  probe
  misc_feature (1)..(25): SEQ ID NO: 1994; WAN024D5N; Start 267; Stop 291
aataaaggaaatcgctgtaccaatc

SEQ ID NO: 311719 - DNA, 25 bp, Artificial
  probe
  misc_feature (1)..(25): SEQ ID NO: 1994; WAN024D5N; Start 268; Stop 292
ataaaggaaatcgctgtaccaatca

SEQ ID NO: 311720 - DNA, 25 bp, Artificial
  probe
  misc_feature (1)..(25): SEQ ID NO: 1994; WAN024D5N; Start 108; Stop 132
ccagcatctcacaagaaatctcatt

SEQ ID NO: 311721 - DNA, 25 bp, Artificial
  probe
  misc_feature (1)..(25): SEQ ID NO: 1994; WAN024D5N; Start 269; Stop 293
taaaggaaatcgctgtaccaatcaa

SEQ ID NO: 311722 - DNA, 25 bp, Artificial
  probe
  misc_feature (1)..(25): SEQ ID NO: 1994; WAN024D5N; Start 112; Stop 136
catctcacaagaaatctcattggta

SEQ ID NO: 311723 - DNA, 25 bp, Artificial
  probe
  misc_feature (1)..(25): SEQ ID NO: 1994; WAN024D5N; Start 9; Stop 33
aattgatgaagagagcctgactttg

SEQ ID NO: 311724 - DNA, 25 bp, Artificial
  probe
  misc_feature (1)..(25): SEQ ID NO: 1994; WAN024D5N; Start 7; Stop 31
caaattgatgaagagagcctgactt

SEQ ID NO: 311725 - DNA, 25 bp, Artificial
  probe
  misc_feature (1)..(25): SEQ ID NO: 1994; WAN024D5N; Start 110; Stop 134
agcatctcacaagaaatctcattgg

SEQ ID NO: 311726 - DNA, 25 bp, Artificial
  probe
  misc_feature (1)..(25): SEQ ID NO: 1994; WAN024D5N; Start 111; Stop 135
gcatctcacaagaaatctcattggt

SEQ ID NO: 311727 - DNA, 25 bp, Artificial
  probe
  misc_feature (1)..(25): SEQ ID NO: 1994; WAN024D5N; Start 114; Stop 138
tctcacaagaaatctcattggtaat

SEQ ID NO: 311728 - DNA, 25 bp, Artificial
  probe
  misc_feature (1)..(25): SEQ ID NO: 1994; WAN024D5N; Start 113; Stop 137
atctcacaagaaatctcattggtaa

SEQ ID NO: 311729 - DNA, 25 bp, Artificial
  probe
  misc_feature (1)..(25): SEQ ID NO: 1994; WAN024D5N; Start 260; Stop 284
gaaaggcaataaaggaaatcgctgt

SEQ ID NO: 311730 - DNA, 25 bp, Artificial
  probe
  misc_feature (1)..(25): SEQ ID NO: 1994; WAN024D5N; Start 43; Stop 67
atcaagaacttcacgggaatcatct

SEQ ID NO: 311731 - DNA, 25 bp, Artificial
  probe
  misc_feature (1)..(25): SEQ ID NO: 1994; WAN024D5N; Start 270; Stop 294
aaaggaaatcgctgtaccaatcaag

SEQ ID NO: 311732 - DNA, 25 bp, Artificial
  probe
  misc_feature (1)..(25): SEQ ID NO: 1994; WAN024D5N; Start 262; Stop 286
aaggcaataaaggaaatcgctgtac

SEQ ID NO: 311733 - DNA, 25 bp, Artificial
  probe
  misc_feature (1)..(25): SEQ ID NO: 1994; WAN024D5N; Start 142; Stop 166
gtgaatgagggaactagagcctata

SEQ ID NO: 311734 - DNA, 25 bp, Artificial
  probe
  misc_feature (1)..(25): SEQ ID NO: 1994; WAN024D5N; Start 124; Stop 148
aatctcattggtaatgcagtgaatg

SEQ ID NO: 311735 - DNA, 25 bp, Artificial
  probe
  misc_feature (1)..(25): SEQ ID NO: 1994; WAN024D5N; Start 265; Stop 289
gcaataaaggaaatcgctgtaccaa

SEQ ID NO: 311736 - DNA, 25 bp, Artificial
  probe
  misc_feature (1)..(25): SEQ ID NO: 1994; WAN024D5N; Start 255; Stop 279
aaatcgaaaggcaataaaggaaatc

SEQ ID NO: 311737 - DNA, 25 bp, Artificial
  probe
  misc_feature (1)..(25): SEQ ID NO: 1994; WAN024D5N; Start 6; Stop 30
ccaaattgatgaagagagcctgact

SEQ ID NO: 311738 - DNA, 25 bp, Artificial
  probe
  misc_feature (1)..(25): SEQ ID NO: 1994; WAN024D5N; Start 205; Stop 229
tcactaaagaaatatccctgcactt

SEQ ID NO: 311739 - DNA, 25 bp, Artificial
  probe
  misc_feature (1)..(25): SEQ ID NO: 1994; WAN024D5N; Start 204; Stop 228
ttcactaaagaaatatccctgcact

SEQ ID NO: 311740 - DNA, 25 bp, Artificial
  probe
  misc_feature (1)..(25): SEQ ID NO: 1994; WAN024D5N; Start 116; Stop 140
tcacaagaaatctcattggtaatgc

SEQ ID NO: 311741 - DNA, 25 bp, Artificial
  probe
  misc_feature (1)..(25): SEQ ID NO: 1994; WAN024D5N; Start 201; Stop 225
cctttcactaaagaaatatccctgc

SEQ ID NO: 311742 - DNA, 25 bp, Artificial
  probe
  misc_feature (1)..(25): SEQ ID NO: 1994; WAN024D5N; Start 44; Stop 68
tcaagaacttcacgggaatcatctg

SEQ ID NO: 311743 - DNA, 25 bp, Artificial
  probe
  misc_feature (1)..(25): SEQ ID NO: 1994; WAN024D5N; Start 189; Stop 213
gcatcagtctatcctttcactaaag

SEQ ID NO: 311744 - DNA, 25 bp, Artificial
  probe
  misc_feature (1)..(25): SEQ ID NO: 1994; WAN024D5N; Start 188; Stop 212
tgcatcagtctatcctttcactaaa

SEQ ID NO: 311745 - DNA, 25 bp, Artificial
  probe
  misc_feature (1)..(25): SEQ ID NO: 1995; WAN024G2X; Start 470; Stop 494
acattgatcttcattccttcttcca

SEQ ID NO: 311746 - DNA, 25 bp, Artificial
  probe
  misc_feature (1)..(25): SEQ ID NO: 1995; WAN024G2X; Start 469; Stop 493
cacattgatcttcattccttcttcc

SEQ ID NO: 311747 - DNA, 25 bp, Artificial
  probe
  misc_feature (1)..(25): SEQ ID NO: 1995; WAN024G2X; Start 471; Stop 495
cattgatcttcattccttcttccag

SEQ ID NO: 311748 - DNA, 25 bp, Artificial
  probe
  misc_feature (1)..(25): SEQ ID NO: 1995; WAN024G2X; Start 468; Stop 492
tcacattgatcttcattccttcttc

SEQ ID NO: 311749 - DNA, 25 bp, Artificial
  probe
  misc_feature (1)..(25): SEQ ID NO: 1995; WAN024G2X; Start 245; Stop 269
ataatatctcgaataacggctccac

SEQ ID NO: 311750 - DNA, 25 bp, Artificial
  probe
  misc_feature (1)..(25): SEQ ID NO: 1995; WAN024G2X; Start 244; Stop 268
gataatatctcgaataacggctcca

SEQ ID NO: 311751 - DNA, 25 bp, Artificial
  probe
  misc_feature (1)..(25): SEQ ID NO: 1995; WAN024G2X; Start 243; Stop 267
tgataatatctcgaataacggctcc

SEQ ID NO: 311752 - DNA, 25 bp, Artificial
  probe
  misc_feature (1)..(25): SEQ ID NO: 1995; WAN024G2X; Start 472; Stop 496
attgatcttcattccttcttccagg

SEQ ID NO: 311753 - DNA, 25 bp, Artificial
  probe
  misc_feature (1)..(25): SEQ ID NO: 1995; WAN024G2X; Start 242; Stop 266
gtgataatatctcgaataacggctc

SEQ ID NO: 311754 - DNA, 25 bp, Artificial
  probe
  misc_feature (1)..(25): SEQ ID NO: 1995; WAN024G2X; Start 476; Stop 500
atcttcattccttcttccaggtcaa

SEQ ID NO: 311755 - DNA, 25 bp, Artificial
  probe
  misc_feature (1)..(25): SEQ ID NO: 1995; WAN024G2X; Start 247; Stop 271
aatatctcgaataacggctccacta

SEQ ID NO: 311756 - DNA, 25 bp, Artificial
  probe
  misc_feature (1)..(25): SEQ ID NO: 1995; WAN024G2X; Start 246; Stop 270
taatatctcgaataacggctccact

SEQ ID NO: 311757 - DNA, 25 bp, Artificial
  probe
  misc_feature (1)..(25): SEQ ID NO: 1995; WAN024G2X; Start 106; Stop 130
aataatgagcaaatccaaatcgtcc

SEQ ID NO: 311758 - DNA, 25 bp, Artificial
  probe
  misc_feature (1)..(25): SEQ ID NO: 1995; WAN024G2X; Start 104; Stop 128
ccaataatgagcaaatccaaatcgt

SEQ ID NO: 311759 - DNA, 25 bp, Artificial
  probe
  misc_feature (1)..(25): SEQ ID NO: 1995; WAN024G2X; Start 103; Stop 127
accaataatgagcaaatccaaatcg

SEQ ID NO: 311760 - DNA, 25 bp, Artificial
  probe
  misc_feature (1)..(25): SEQ ID NO: 1995; WAN024G2X; Start 101; Stop 125
cgaccaataatgagcaaatccaaat

SEQ ID NO: 311761 - DNA, 25 bp, Artificial
  probe
  misc_feature (1)..(25): SEQ ID NO: 1995; WAN024G2X; Start 12; Stop 36
tagagataactggcaaacgagattc

SEQ ID NO: 311762 - DNA, 25 bp, Artificial
  probe
  misc_feature (1)..(25): SEQ ID NO: 1995; WAN024G2X; Start 105; Stop 129
caataatgagcaaatccaaatcgtc

SEQ ID NO: 311763 - DNA, 25 bp, Artificial
  probe
  misc_feature (1)..(25): SEQ ID NO: 1995; WAN024G2X; Start 74; Stop 98
cagagatcctcaatagaaccacctc

SEQ ID NO: 311764 - DNA, 25 bp, Artificial
  probe
  misc_feature (1)..(25): SEQ ID NO: 1995; WAN024G2X; Start 102; Stop 126
gaccaataatgagcaaatccaaatc

SEQ ID NO: 311765 - DNA, 25 bp, Artificial
  probe
  misc_feature (1)..(25): SEQ ID NO: 1995; WAN024G2X; Start 15; Stop 39
agataactggcaaacgagattcaaa

SEQ ID NO: 311766 - DNA, 25 bp, Artificial
  probe
  misc_feature (1)..(25): SEQ ID NO: 1995; WAN024G2X; Start 473; Stop 497
ttgatcttcattccttcttccaggt

SEQ ID NO: 311767 - DNA, 25 bp, Artificial
  probe
  misc_feature (1)..(25): SEQ ID NO: 1995; WAN024G2X; Start 248; Stop 272
atatctcgaataacggctccactac

SEQ ID NO: 311768 - DNA, 25 bp, Artificial
  probe
  misc_feature (1)..(25): SEQ ID NO: 1995; WAN024G2X; Start 11; Stop 35
ctagagataactggcaaacgagatt

SEQ ID NO: 311769 - DNA, 25 bp, Artificial
  probe
  misc_feature (1)..(25): SEQ ID NO: 1995; WAN024G2X; Start 14; Stop 38
gagataactggcaaacgagattcaa

SEQ ID NO: 311770 - DNA, 25 bp, Artificial
  probe
  misc_feature (1)..(25): SEQ ID NO: 1995; WAN024G2X; Start 100; Stop 124
acgaccaataatgagcaaatccaaa

SEQ ID NO: 311771 - DNA, 25 bp, Artificial
  probe
  misc_feature (1)..(25): SEQ ID NO: 1995; WAN024G2X; Start 87; Stop 111
tagaaccacctccacgaccaataat

SEQ ID NO: 311772 - DNA, 25 bp, Artificial
  probe
  misc_feature (1)..(25): SEQ ID NO: 1995; WAN024G2X; Start 86; Stop 110
atagaaccacctccacgaccaataa

SEQ ID NO: 311773 - DNA, 25 bp, Artificial
  probe
  misc_feature (1)..(25): SEQ ID NO: 1995; WAN024G2X; Start 85; Stop 109
aatagaaccacctccacgaccaata

SEQ ID NO: 311774 - DNA, 25 bp, Artificial
  probe
  misc_feature (1)..(25): SEQ ID NO: 1995; WAN024G2X; Start 45; Stop 69
ctcgtaccacaatttcttcgttaaa

SEQ ID NO: 311775 - DNA, 25 bp, Artificial
  probe
  misc_feature (1)..(25): SEQ ID NO: 1995; WAN024G2X; Start 475; Stop 499
gatcttcattccttcttccaggtca

SEQ ID NO: 311776 - DNA, 25 bp, Artificial
  probe
  misc_feature (1)..(25): SEQ ID NO: 1995; WAN024G2X; Start 474; Stop 498
tgatcttcattccttcttccaggtc

SEQ ID NO: 311777 - DNA, 25 bp, Artificial
  probe
  misc_feature (1)..(25): SEQ ID NO: 1995; WAN024G2X; Start 107; Stop 131
ataatgagcaaatccaaatcgtccc

SEQ ID NO: 311778 - DNA, 25 bp, Artificial
  probe
  misc_feature (1)..(25): SEQ ID NO: 1996; WAN024FNV; Start 23; Stop 47
attactggaatactaaccgcttctt

SEQ ID NO: 311779 - DNA, 25 bp, Artificial
  probe
  misc_feature (1)..(25): SEQ ID NO: 1996; WAN024FNV; Start 22; Stop 46
cattactggaatactaaccgcttct

SEQ ID NO: 311780 - DNA, 25 bp, Artificial
  probe
  misc_feature (1)..(25): SEQ ID NO: 1996; WAN024FNV; Start 24; Stop 48
ttactggaatactaaccgcttcttg

SEQ ID NO: 311781 - DNA, 25 bp, Artificial
  probe
  misc_feature (1)..(25): SEQ ID NO: 1996; WAN024FNV; Start 28; Stop 52
tggaatactaaccgcttcttggatt

SEQ ID NO: 311782 - DNA, 25 bp, Artificial
  probe
  misc_feature (1)..(25): SEQ ID NO: 1996; WAN024FNV; Start 25; Stop 49
tactggaatactaaccgcttcttgg

SEQ ID NO: 311783 - DNA, 25 bp, Artificial
  probe
  misc_feature (1)..(25): SEQ ID NO: 1996; WAN024FNV; Start 27; Stop 51
ctggaatactaaccgcttcttggat

SEQ ID NO: 311784 - DNA, 25 bp, Artificial
  probe
  misc_feature (1)..(25): SEQ ID NO: 1996; WAN024FNV; Start 17; Stop 41
ttagccattactggaatactaaccg

SEQ ID NO: 311785 - DNA, 25 bp, Artificial
  probe
  misc_feature (1)..(25): SEQ ID NO: 1996; WAN024FNV; Start 13; Stop 37
gaccttagccattactggaatacta

SEQ ID NO: 311786 - DNA, 25 bp, Artificial
  probe
  misc_feature (1)..(25): SEQ ID NO: 1996; WAN024FNV; Start 11; Stop 35
ctgaccttagccattactggaatac

SEQ ID NO: 311787 - DNA, 25 bp, Artificial
  probe
  misc_feature (1)..(25): SEQ ID NO: 1996; WAN024FNV; Start 10; Stop 34
tctgaccttagccattactggaata

SEQ ID NO: 311788 - DNA, 25 bp, Artificial
  probe
  misc_feature (1)..(25): SEQ ID NO: 1996; WAN024FNV; Start 12; Stop 36
tgaccttagccattactggaatact

SEQ ID NO: 311789 - DNA, 25 bp, Artificial
  probe
  misc_feature (1)..(25): SEQ ID NO: 1996; WAN024FNV; Start 178; Stop 202
attctgcacatccataataacacca

SEQ ID NO: 311790 - DNA, 25 bp, Artificial
  probe
  misc_feature (1)..(25): SEQ ID NO: 1996; WAN024FNV; Start 177; Stop 201
gattctgcacatccataataacacc

SEQ ID NO: 311791 - DNA, 25 bp, Artificial
  probe
  misc_feature (1)..(25): SEQ ID NO: 1996; WAN024FNV; Start 14; Stop 38
accttagccattactggaatactaa

SEQ ID NO: 311792 - DNA, 25 bp, Artificial
  probe
  misc_feature (1)..(25): SEQ ID NO: 1996; WAN024FNV; Start 21; Stop 45
ccattactggaatactaaccgcttc

SEQ ID NO: 311793 - DNA, 25 bp, Artificial
  probe
  misc_feature (1)..(25): SEQ ID NO: 1996; WAN024FNV; Start 16; Stop 40
cttagccattactggaatactaacc

SEQ ID NO: 311794 - DNA, 25 bp, Artificial
  probe
  misc_feature (1)..(25): SEQ ID NO: 1996; WAN024FNV; Start 15; Stop 39
ccttagccattactggaatactaac

SEQ ID NO: 311795 - DNA, 25 bp, Artificial
  probe
  misc_feature (1)..(25): SEQ ID NO: 1996; WAN024FNV; Start 30; Stop 54
gaatactaaccgcttcttggatttc

SEQ ID NO: 311796 - DNA, 25 bp, Artificial
  probe
  misc_feature (1)..(25): SEQ ID NO: 1996; WAN024FNV; Start 9; Stop 33
ttctgaccttagccattactggaat

SEQ ID NO: 311797 - DNA, 25 bp, Artificial
  probe
  misc_feature (1)..(25): SEQ ID NO: 1996; WAN024FNV; Start 8; Stop 32
attctgaccttagccattactggaa

SEQ ID NO: 311798 - DNA, 25 bp, Artificial
  probe
  misc_feature (1)..(25): SEQ ID NO: 1996; WAN024FNV; Start 186; Stop 210
catccataataacaccacccttgag

SEQ ID NO: 311799 - DNA, 25 bp, Artificial
  probe
  misc_feature (1)..(25): SEQ ID NO: 1996; WAN024FNV; Start 5; Stop 29
ccgattctgaccttagccattactg

SEQ ID NO: 311800 - DNA, 25 bp, Artificial
  probe
  misc_feature (1)..(25): SEQ ID NO: 1996; WAN024FNV; Start 179; Stop 203
ttctgcacatccataataacaccac

SEQ ID NO: 311801 - DNA, 25 bp, Artificial
  probe
  misc_feature (1)..(25): SEQ ID NO: 1996; WAN024FNV; Start 36; Stop 60
taaccgcttcttggatttccttaat

SEQ ID NO: 311802 - DNA, 25 bp, Artificial
  probe
  misc_feature (1)..(25): SEQ ID NO: 1996; WAN024FNV; Start 29; Stop 53
ggaatactaaccgcttcttggattt

SEQ ID NO: 311803 - DNA, 25 bp, Artificial
  probe
  misc_feature (1)..(25): SEQ ID NO: 1996; WAN024FNV; Start 35; Stop 59
ctaaccgcttcttggatttccttaa

SEQ ID NO: 311804 - DNA, 25 bp, Artificial
  probe
  misc_feature (1)..(25): SEQ ID NO: 1996; WAN024FNV; Start 7; Stop 31
gattctgaccttagccattactgga

SEQ ID NO: 311805 - DNA, 25 bp, Artificial
  probe
  misc_feature (1)..(25): SEQ ID NO: 1996; WAN024FNV; Start 31; Stop 55
aatactaaccgcttcttggatttcc

SEQ ID NO: 311806 - DNA, 25 bp, Artificial
  probe
  misc_feature (1)..(25): SEQ ID NO: 1996; WAN024FNV; Start 185; Stop 209
acatccataataacaccacccttga

SEQ ID NO: 311807 - DNA, 25 bp, Artificial
  probe
  misc_feature (1)..(25): SEQ ID NO: 1996; WAN024FNV; Start 184; Stop 208
cacatccataataacaccacccttg

SEQ ID NO: 311808 - DNA, 25 bp, Artificial
  probe
  misc_feature (1)..(25): SEQ ID NO: 1996; WAN024FNV; Start 191; Stop 215
ataataacaccacccttgagcatct

SEQ ID NO: 311809 - DNA, 25 bp, Artificial
  probe
  misc_feature (1)..(25): SEQ ID NO: 1996; WAN024FNV; Start 190; Stop 214
cataataacaccacccttgagcatc

SEQ ID NO: 311810 - DNA, 25 bp, Artificial
  probe
  misc_feature (1)..(25): SEQ ID NO: 1996; WAN024FNV; Start 50; Stop 74
atttccttaatcatctttgggtcgc

SEQ ID NO: 311811 - DNA, 25 bp, Artificial
  probe
  misc_feature (1)..(25): SEQ ID NO: 1997; WAN024DEX; Start 23; Stop 47
cctatgaggtagactatcaagaaga

SEQ ID NO: 311812 - DNA, 25 bp, Artificial
  probe
  misc_feature (1)..(25): SEQ ID NO: 1997; WAN024DEX; Start 22; Stop 46
tcctatgaggtagactatcaagaag

SEQ ID NO: 311813 - DNA, 25 bp, Artificial
  probe
  misc_feature (1)..(25): SEQ ID NO: 1997; WAN024DEX; Start 18; Stop 42
acaatcctatgaggtagactatcaa

SEQ ID NO: 311814 - DNA, 25 bp, Artificial
  probe
  misc_feature (1)..(25): SEQ ID NO: 1997; WAN024DEX; Start 37; Stop 61
tatcaagaagaattaaaccagcagc

SEQ ID NO: 311815 - DNA, 25 bp, Artificial
  probe
  misc_feature (1)..(25): SEQ ID NO: 1997; WAN024DEX; Start 250; Stop 274
gttcaacggtctattatcaaacgaa

SEQ ID NO: 311816 - DNA, 25 bp, Artificial
  probe
  misc_feature (1)..(25): SEQ ID NO: 1997; WAN024DEX; Start 249; Stop 273
agttcaacggtctattatcaaacga

SEQ ID NO: 311817 - DNA, 25 bp, Artificial
  probe
  misc_feature (1)..(25): SEQ ID NO: 1997; WAN024DEX; Start 248; Stop 272
aagttcaacggtctattatcaaacg

SEQ ID NO: 311818 - DNA, 25 bp, Artificial
  probe
  misc_feature (1)..(25): SEQ ID NO: 1997; WAN024DEX; Start 251; Stop 275
ttcaacggtctattatcaaacgaaa

SEQ ID NO: 311819 - DNA, 25 bp, Artificial
  probe
  misc_feature (1)..(25): SEQ ID NO: 1997; WAN024DEX; Start 19; Stop 43
caatcctatgaggtagactatcaag

SEQ ID NO: 311820 - DNA, 25 bp, Artificial
  probe
  misc_feature (1)..(25): SEQ ID NO: 1997; WAN024DEX; Start 190; Stop 214
aaattatcaactgctcttgcctttg

SEQ ID NO: 311821 - DNA, 25 bp, Artificial
  probe
  misc_feature (1)..(25): SEQ ID NO: 1997; WAN024DEX; Start 21; Stop 45
atcctatgaggtagactatcaagaa

SEQ ID NO: 311822 - DNA, 25 bp, Artificial
  probe
  misc_feature (1)..(25): SEQ ID NO: 1997; WAN024DEX; Start 20; Stop 44
aatcctatgaggtagactatcaaga

SEQ ID NO: 311823 - DNA, 25 bp, Artificial
  probe
  misc_feature (1)..(25): SEQ ID NO: 1997; WAN024DEX; Start 95; Stop 119
aatctgatgccaatctcaaggaaat

SEQ ID NO: 311824 - DNA, 25 bp, Artificial
  probe
  misc_feature (1)..(25): SEQ ID NO: 1997; WAN024DEX; Start 35; Stop 59
actatcaagaagaattaaaccagca

SEQ ID NO: 311825 - DNA, 25 bp, Artificial
  probe
  misc_feature (1)..(25): SEQ ID NO: 1997; WAN024DEX; Start 96; Stop 120
atctgatgccaatctcaaggaaatc

SEQ ID NO: 311826 - DNA, 25 bp, Artificial
  probe
  misc_feature (1)..(25): SEQ ID NO: 1997; WAN024DEX; Start 17; Stop 41
tacaatcctatgaggtagactatca

SEQ ID NO: 311827 - DNA, 25 bp, Artificial
  probe
  misc_feature (1)..(25): SEQ ID NO: 1997; WAN024DEX; Start 26; Stop 50
atgaggtagactatcaagaagaatt

SEQ ID NO: 311828 - DNA, 25 bp, Artificial
  probe
  misc_feature (1)..(25): SEQ ID NO: 1997; WAN024DEX; Start 24; Stop 48
ctatgaggtagactatcaagaagaa

SEQ ID NO: 311829 - DNA, 25 bp, Artificial
  probe
  misc_feature (1)..(25): SEQ ID NO: 1997; WAN024DEX; Start 94; Stop 118
caatctgatgccaatctcaaggaaa

SEQ ID NO: 311830 - DNA, 25 bp, Artificial
  probe
  misc_feature (1)..(25): SEQ ID NO: 1997; WAN024DEX; Start 36; Stop 60
ctatcaagaagaattaaaccagcag

SEQ ID NO: 311831 - DNA, 25 bp, Artificial
  probe
  misc_feature (1)..(25): SEQ ID NO: 1997; WAN024DEX; Start 34; Stop 58
gactatcaagaagaattaaaccagc

SEQ ID NO: 311832 - DNA, 25 bp, Artificial
  probe
  misc_feature (1)..(25): SEQ ID NO: 1997; WAN024DEX; Start 247; Stop 271
aaagttcaacggtctattatcaaac

SEQ ID NO: 311833 - DNA, 25 bp, Artificial
  probe
  misc_feature (1)..(25): SEQ ID NO: 1997; WAN024DEX; Start 47; Stop 71
aattaaaccagcagcttcctcatta

SEQ ID NO: 311834 - DNA, 25 bp, Artificial
  probe
  misc_feature (1)..(25): SEQ ID NO: 1997; WAN024DEX; Start 38; Stop 62
atcaagaagaattaaaccagcagct

SEQ ID NO: 311835 - DNA, 25 bp, Artificial
  probe
  misc_feature (1)..(25): SEQ ID NO: 1997; WAN024DEX; Start 48; Stop 72
attaaaccagcagcttcctcattac

SEQ ID NO: 311836 - DNA, 25 bp, Artificial
  probe
  misc_feature (1)..(25): SEQ ID NO: 1997; WAN024DEX; Start 27; Stop 51
tgaggtagactatcaagaagaatta

SEQ ID NO: 311837 - DNA, 25 bp, Artificial
  probe
  misc_feature (1)..(25): SEQ ID NO: 1997; WAN024DEX; Start 39; Stop 63
tcaagaagaattaaaccagcagctt

SEQ ID NO: 311838 - DNA, 25 bp, Artificial
  probe
  misc_feature (1)..(25): SEQ ID NO: 1997; WAN024DEX; Start 16; Stop 40
ttacaatcctatgaggtagactatc

SEQ ID NO: 311839 - DNA, 25 bp, Artificial
  probe
  misc_feature (1)..(25): SEQ ID NO: 1997; WAN024DEX; Start 101; Stop 125
atgccaatctcaaggaaatcctatt

SEQ ID NO: 311840 - DNA, 25 bp, Artificial
  probe
  misc_feature (1)..(25): SEQ ID NO: 1997; WAN024DEX; Start 102; Stop 126
tgccaatctcaaggaaatcctattt

SEQ ID NO: 311841 - DNA, 25 bp, Artificial
  probe
  misc_feature (1)..(25): SEQ ID NO: 1997; WAN024DEX; Start 100; Stop 124
gatgccaatctcaaggaaatcctat

SEQ ID NO: 311842 - DNA, 25 bp, Artificial
  probe
  misc_feature (1)..(25): SEQ ID NO: 1997; WAN024DEX; Start 191; Stop 215
aattatcaactgctcttgcctttgc

SEQ ID NO: 311843 - DNA, 25 bp, Artificial
  probe
  misc_feature (1)..(25): SEQ ID NO: 1997; WAN024DEX; Start 25; Stop 49
tatgaggtagactatcaagaagaat

SEQ ID NO: 311844 - DNA, 25 bp, Artificial
  probe
  misc_feature (1)..(25): SEQ ID NO: 1998; WAN024CYW; Start 165; Stop 189
ggtaagcagctatactcaggttatc

SEQ ID NO: 311845 - DNA, 25 bp, Artificial
  probe
  misc_feature (1)..(25): SEQ ID NO: 1998; WAN024CYW; Start 166; Stop 190
gtaagcagctatactcaggttatcg

SEQ ID NO: 311846 - DNA, 25 bp, Artificial
  probe
  misc_feature (1)..(25): SEQ ID NO: 1998; WAN024CYW; Start 164; Stop 188
tggtaagcagctatactcaggttat

SEQ ID NO: 311847 - DNA, 25 bp, Artificial
  probe
  misc_feature (1)..(25): SEQ ID NO: 1998; WAN024CYW; Start 163; Stop 187
ttggtaagcagctatactcaggtta

SEQ ID NO: 311848 - DNA, 25 bp, Artificial
  probe
  misc_feature (1)..(25): SEQ ID NO: 1998; WAN024CYW; Start 454; Stop 478
aaatctctatctcctttcatcccac

SEQ ID NO: 311849 - DNA, 25 bp, Artificial
  probe
  misc_feature (1)..(25): SEQ ID NO: 1998; WAN024CYW; Start 74; Stop 98
ataaatcaaccattagcgacgaaac

SEQ ID NO: 311850 - DNA, 25 bp, Artificial
  probe
  misc_feature (1)..(25): SEQ ID NO: 1998; WAN024CYW; Start 456; Stop 480
atctctatctcctttcatcccactt

SEQ ID NO: 311851 - DNA, 25 bp, Artificial
  probe
  misc_feature (1)..(25): SEQ ID NO: 1998; WAN024CYW; Start 455; Stop 479
aatctctatctcctttcatcccact

SEQ ID NO: 311852 - DNA, 25 bp, Artificial
  probe
  misc_feature (1)..(25): SEQ ID NO: 1998; WAN024CYW; Start 73; Stop 97
aataaatcaaccattagcgacgaaa

SEQ ID NO: 311853 - DNA, 25 bp, Artificial
  probe
  misc_feature (1)..(25): SEQ ID NO: 1998; WAN024CYW; Start 72; Stop 96
aaataaatcaaccattagcgacgaa

SEQ ID NO: 311854 - DNA, 25 bp, Artificial
  probe
  misc_feature (1)..(25): SEQ ID NO: 1998; WAN024CYW; Start 167; Stop 191
taagcagctatactcaggttatcgg

SEQ ID NO: 311855 - DNA, 25 bp, Artificial
  probe
  misc_feature (1)..(25): SEQ ID NO: 1998; WAN024CYW; Start 696; Stop 720
atttagcaagcgattattcaagcac

SEQ ID NO: 311856 - DNA, 25 bp, Artificial
  probe
  misc_feature (1)..(25): SEQ ID NO: 1998; WAN024CYW; Start 229; Stop 253
aatcctttctttccatcggttctac

SEQ ID NO: 311857 - DNA, 25 bp, Artificial
  probe
  misc_feature (1)..(25): SEQ ID NO: 1998; WAN024CYW; Start 695; Stop 719
aatttagcaagcgattattcaagca

SEQ ID NO: 311858 - DNA, 25 bp, Artificial
  probe
  misc_feature (1)..(25): SEQ ID NO: 1998; WAN024CYW; Start 891; Stop 915
ttcccttgaaactattctccagatt

SEQ ID NO: 311859 - DNA, 25 bp, Artificial
  probe
  misc_feature (1)..(25): SEQ ID NO: 1998; WAN024CYW; Start 228; Stop 252
gaatcctttctttccatcggttcta

SEQ ID NO: 311860 - DNA, 25 bp, Artificial
  probe
  misc_feature (1)..(25): SEQ ID NO: 1998; WAN024CYW; Start 738; Stop 762
tatcatcacaaccgatagcctccta

SEQ ID NO: 311861 - DNA, 25 bp, Artificial
  probe
  misc_feature (1)..(25): SEQ ID NO: 1998; WAN024CYW; Start 297; Stop 321
gatagcaacagggaaagatgagaag

SEQ ID NO: 311862 - DNA, 25 bp, Artificial
  probe
  misc_feature (1)..(25): SEQ ID NO: 1998; WAN024CYW; Start 292; Stop 316
attcagatagcaacagggaaagatg

SEQ ID NO: 311863 - DNA, 25 bp, Artificial
  probe
  misc_feature (1)..(25): SEQ ID NO: 1998; WAN024CYW; Start 291; Stop 315
cattcagatagcaacagggaaagat

SEQ ID NO: 311864 - DNA, 25 bp, Artificial
  probe
  misc_feature (1)..(25): SEQ ID NO: 1998; WAN024CYW; Start 457; Stop 481
tctctatctcctttcatcccacttg

SEQ ID NO: 311865 - DNA, 25 bp, Artificial
  probe
  misc_feature (1)..(25): SEQ ID NO: 1998; WAN024CYW; Start 75; Stop 99
taaatcaaccattagcgacgaaaca

SEQ ID NO: 311866 - DNA, 25 bp, Artificial
  probe
  misc_feature (1)..(25): SEQ ID NO: 1998; WAN024CYW; Start 766; Stop 790
gaaggtgtttgtaactatattgcca

SEQ ID NO: 311867 - DNA, 25 bp, Artificial
  probe
  misc_feature (1)..(25): SEQ ID NO: 1998; WAN024CYW; Start 765; Stop 789
tgaaggtgtttgtaactatattgcc

SEQ ID NO: 311868 - DNA, 25 bp, Artificial
  probe
  misc_feature (1)..(25): SEQ ID NO: 1998; WAN024CYW; Start 296; Stop 320
agatagcaacagggaaagatgagaa

SEQ ID NO: 311869 - DNA, 25 bp, Artificial
  probe
  misc_feature (1)..(25): SEQ ID NO: 1998; WAN024CYW; Start 170; Stop 194
gcagctatactcaggttatcggatt

SEQ ID NO: 311870 - DNA, 25 bp, Artificial
  probe
  misc_feature (1)..(25): SEQ ID NO: 1998; WAN024CYW; Start 892; Stop 916
tcccttgaaactattctccagatta

SEQ ID NO: 311871 - DNA, 25 bp, Artificial
  probe
  misc_feature (1)..(25): SEQ ID NO: 1998; WAN024CYW; Start 459; Stop 483
tctatctcctttcatcccacttgtc

SEQ ID NO: 311872 - DNA, 25 bp, Artificial
  probe
  misc_feature (1)..(25): SEQ ID NO: 1998; WAN024CYW; Start 458; Stop 482
ctctatctcctttcatcccacttgt

SEQ ID NO: 311873 - DNA, 25 bp, Artificial
  probe
  misc_feature (1)..(25): SEQ ID NO: 1998; WAN024CYW; Start 118; Stop 142
gctatgaaggaactcaactaccacc

SEQ ID NO: 311874 - DNA, 25 bp, Artificial
  probe
  misc_feature (1)..(25): SEQ ID NO: 1998; WAN024CYW; Start 699; Stop 723
tagcaagcgattattcaagcacgat

SEQ ID NO: 311875 - DNA, 25 bp, Artificial
  probe
  misc_feature (1)..(25): SEQ ID NO: 1998; WAN024CYW; Start 708; Stop 732
attattcaagcacgatccacaaatt

SEQ ID NO: 311876 - DNA, 25 bp, Artificial
  probe
  misc_feature (1)..(25): SEQ ID NO: 1998; WAN024CYW; Start 588; Stop 612
caaagaccgtttaacaggctatgaa

SEQ ID NO: 311877 - DNA, 25 bp, Artificial
  probe
  misc_feature (1)..(25): SEQ ID NO: 1999; WAN024CNL; Start 69; Stop 93
ccattatgacaatcaaatcctcacc

SEQ ID NO: 311878 - DNA, 25 bp, Artificial
  probe
  misc_feature (1)..(25): SEQ ID NO: 1999; WAN024CNL; Start 68; Stop 92
gccattatgacaatcaaatcctcac

SEQ ID NO: 311879 - DNA, 25 bp, Artificial
  probe
  misc_feature (1)..(25): SEQ ID NO: 1999; WAN024CNL; Start 67; Stop 91
agccattatgacaatcaaatcctca

SEQ ID NO: 311880 - DNA, 25 bp, Artificial
  probe
  misc_feature (1)..(25): SEQ ID NO: 1999; WAN024CNL; Start 70; Stop 94
cattatgacaatcaaatcctcacca

SEQ ID NO: 311881 - DNA, 25 bp, Artificial
  probe
  misc_feature (1)..(25): SEQ ID NO: 1999; WAN024CNL; Start 66; Stop 90
gagccattatgacaatcaaatcctc

SEQ ID NO: 311882 - DNA, 25 bp, Artificial
  probe
  misc_feature (1)..(25): SEQ ID NO: 1999; WAN024CNL; Start 71; Stop 95
attatgacaatcaaatcctcaccag

SEQ ID NO: 311883 - DNA, 25 bp, Artificial
  probe
  misc_feature (1)..(25): SEQ ID NO: 1999; WAN024CNL; Start 65; Stop 89
cgagccattatgacaatcaaatcct

SEQ ID NO: 311884 - DNA, 25 bp, Artificial
  probe
  misc_feature (1)..(25): SEQ ID NO: 1999; WAN024CNL; Start 72; Stop 96
ttatgacaatcaaatcctcaccagg

SEQ ID NO: 311885 - DNA, 25 bp, Artificial
  probe
  misc_feature (1)..(25): SEQ ID NO: 1999; WAN024CNL; Start 63; Stop 87
gtcgagccattatgacaatcaaatc

SEQ ID NO: 311886 - DNA, 25 bp, Artificial
  probe
  misc_feature (1)..(25): SEQ ID NO: 1999; WAN024CNL; Start 64; Stop 88
tcgagccattatgacaatcaaatcc

SEQ ID NO: 311887 - DNA, 25 bp, Artificial
  probe
  misc_feature (1)..(25): SEQ ID NO: 1999; WAN024CNL; Start 33; Stop 57
tatcaatagtccacgacttaccttg

SEQ ID NO: 311888 - DNA, 25 bp, Artificial
  probe
  misc_feature (1)..(25): SEQ ID NO: 1999; WAN024CNL; Start 24; Stop 48
caagcattttatcaatagtccacga

SEQ ID NO: 311889 - DNA, 25 bp, Artificial
  probe
  misc_feature (1)..(25): SEQ ID NO: 1999; WAN024CNL; Start 32; Stop 56
ttatcaatagtccacgacttacctt

SEQ ID NO: 311890 - DNA, 25 bp, Artificial
  probe
  misc_feature (1)..(25): SEQ ID NO: 1999; WAN024CNL; Start 60; Stop 84
caggtcgagccattatgacaatcaa

SEQ ID NO: 311891 - DNA, 25 bp, Artificial
  probe
  misc_feature (1)..(25): SEQ ID NO: 1999; WAN024CNL; Start 23; Stop 47
gcaagcattttatcaatagtccacg

SEQ ID NO: 311892 - DNA, 25 bp, Artificial
  probe
  misc_feature (1)..(25): SEQ ID NO: 1999; WAN024CNL; Start 62; Stop 86
ggtcgagccattatgacaatcaaat

SEQ ID NO: 311893 - DNA, 25 bp, Artificial
  probe
  misc_feature (1)..(25): SEQ ID NO: 1999; WAN024CNL; Start 34; Stop 58
atcaatagtccacgacttaccttgt

SEQ ID NO: 311894 - DNA, 25 bp, Artificial
  probe
  misc_feature (1)..(25): SEQ ID NO: 1999; WAN024CNL; Start 35; Stop 59
tcaatagtccacgacttaccttgtc

SEQ ID NO: 311895 - DNA, 25 bp, Artificial
  probe
  misc_feature (1)..(25): SEQ ID NO: 1999; WAN024CNL; Start 25; Stop 49
aagcattttatcaatagtccacgac

SEQ ID NO: 311896 - DNA, 25 bp, Artificial
  probe
  misc_feature (1)..(25): SEQ ID NO: 1999; WAN024CNL; Start 61; Stop 85
aggtcgagccattatgacaatcaaa

SEQ ID NO: 311897 - DNA, 25 bp, Artificial
  probe
  misc_feature (1)..(25): SEQ ID NO: 1999; WAN024CNL; Start 36; Stop 60
caatagtccacgacttaccttgtcc

SEQ ID NO: 311898 - DNA, 25 bp, Artificial
  probe
  misc_feature (1)..(25): SEQ ID NO: 1999; WAN024CNL; Start 22; Stop 46
tgcaagcattttatcaatagtccac

SEQ ID NO: 311899 - DNA, 25 bp, Artificial
  probe
  misc_feature (1)..(25): SEQ ID NO: 1999; WAN024CNL; Start 31; Stop 55
tttatcaatagtccacgacttacct

SEQ ID NO: 311900 - DNA, 25 bp, Artificial
  probe
  misc_feature (1)..(25): SEQ ID NO: 1999; WAN024CNL; Start 37; Stop 61
aatagtccacgacttaccttgtcca

SEQ ID NO: 311901 - DNA, 25 bp, Artificial
  probe
  misc_feature (1)..(25): SEQ ID NO: 1999; WAN024CNL; Start 58; Stop 82
tccaggtcgagccattatgacaatc

SEQ ID NO: 311902 - DNA, 25 bp, Artificial
  probe
  misc_feature (1)..(25): SEQ ID NO: 1999; WAN024CNL; Start 78; Stop 102
caatcaaatcctcaccaggaagtaa

SEQ ID NO: 311903 - DNA, 25 bp, Artificial
  probe
  misc_feature (1)..(25): SEQ ID NO: 1999; WAN024CNL; Start 38; Stop 62
atagtccacgacttaccttgtccag

SEQ ID NO: 311904 - DNA, 25 bp, Artificial
  probe
  misc_feature (1)..(25): SEQ ID NO: 1999; WAN024CNL; Start 59; Stop 83
ccaggtcgagccattatgacaatca

SEQ ID NO: 311905 - DNA, 25 bp, Artificial
  probe
  misc_feature (1)..(25): SEQ ID NO: 1999; WAN024CNL; Start 57; Stop 81
gtccaggtcgagccattatgacaat

SEQ ID NO: 311906 - DNA, 25 bp, Artificial
  probe
  misc_feature (1)..(25): SEQ ID NO: 1999; WAN024CNL; Start 73; Stop 97
tatgacaatcaaatcctcaccagga

SEQ ID NO: 311907 - DNA, 25 bp, Artificial
  probe
  misc_feature (1)..(25): SEQ ID NO: 1999; WAN024CNL; Start 77; Stop 101
acaatcaaatcctcaccaggaagta

SEQ ID NO: 311908 - DNA, 25 bp, Artificial
  probe
  misc_feature (1)..(25): SEQ ID NO: 1999; WAN024CNL; Start 74; Stop 98
atgacaatcaaatcctcaccaggaa

SEQ ID NO: 311909 - DNA, 25 bp, Artificial
  probe
  misc_feature (1)..(25): SEQ ID NO: 1999; WAN024CNL; Start 76; Stop 100
gacaatcaaatcctcaccaggaagt

SEQ ID NO: 311910 - DNA, 25 bp, Artificial
  probe
  misc_feature (1)..(25): SEQ ID NO: 2000; WAN024CSJ; Start 234; Stop 258
ttcaactgcttctgctagtatgatg

SEQ ID NO: 311911 - DNA, 25 bp, Artificial
  probe
  misc_feature (1)..(25): SEQ ID NO: 2000; WAN024CSJ; Start 236; Stop 260
caactgcttctgctagtatgatgac

SEQ ID NO: 311912 - DNA, 25 bp, Artificial
  probe
  misc_feature (1)..(25): SEQ ID NO: 2000; WAN024CSJ; Start 235; Stop 259
tcaactgcttctgctagtatgatga

SEQ ID NO: 311913 - DNA, 25 bp, Artificial
  probe
  misc_feature (1)..(25): SEQ ID NO: 2000; WAN024CSJ; Start 237; Stop 261
aactgcttctgctagtatgatgaca

SEQ ID NO: 311914 - DNA, 25 bp, Artificial
  probe
  misc_feature (1)..(25): SEQ ID NO: 2000; WAN024CSJ; Start 238; Stop 262
actgcttctgctagtatgatgacag

SEQ ID NO: 311915 - DNA, 25 bp, Artificial
  probe
  misc_feature (1)..(25): SEQ ID NO: 2000; WAN024CSJ; Start 231; Stop 255
gatttcaactgcttctgctagtatg

SEQ ID NO: 311916 - DNA, 25 bp, Artificial
  probe
  misc_feature (1)..(25): SEQ ID NO: 2000; WAN024CSJ; Start 233; Stop 257
tttcaactgcttctgctagtatgat

SEQ ID NO: 311917 - DNA, 25 bp, Artificial
  probe
  misc_feature (1)..(25): SEQ ID NO: 2000; WAN024CSJ; Start 232; Stop 256
atttcaactgcttctgctagtatga

SEQ ID NO: 311918 - DNA, 25 bp, Artificial
  probe
  misc_feature (1)..(25): SEQ ID NO: 2000; WAN024CSJ; Start 230; Stop 254
cgatttcaactgcttctgctagtat

SEQ ID NO: 311919 - DNA, 25 bp, Artificial
  probe
  misc_feature (1)..(25): SEQ ID NO: 2000; WAN024CSJ; Start 92; Stop 116
cacatcaccaagggaagttagaaga

SEQ ID NO: 311920 - DNA, 25 bp, Artificial
  probe
  misc_feature (1)..(25): SEQ ID NO: 2000; WAN024CSJ; Start 391; Stop 415
aaattccctcaaagaatcaagtgtg

SEQ ID NO: 311921 - DNA, 25 bp, Artificial
  probe
  misc_feature (1)..(25): SEQ ID NO: 2000; WAN024CSJ; Start 390; Stop 414
caaattccctcaaagaatcaagtgt

SEQ ID NO: 311922 - DNA, 25 bp, Artificial
  probe
  misc_feature (1)..(25): SEQ ID NO: 2000; WAN024CSJ; Start 389; Stop 413
ccaaattccctcaaagaatcaagtg

SEQ ID NO: 311923 - DNA, 25 bp, Artificial
  probe
  misc_feature (1)..(25): SEQ ID NO: 2000; WAN024CSJ; Start 34; Stop 58
gcactttctaaactagatagccttt

SEQ ID NO: 311924 - DNA, 25 bp, Artificial
  probe
  misc_feature (1)..(25): SEQ ID NO: 2000; WAN024CSJ; Start 30; Stop 54
aatggcactttctaaactagatagc

SEQ ID NO: 311925 - DNA, 25 bp, Artificial
  probe
  misc_feature (1)..(25): SEQ ID NO: 2000; WAN024CSJ; Start 372; Stop 396
attcttgtcaggtgttgccaaattc

SEQ ID NO: 311926 - DNA, 25 bp, Artificial
  probe
  misc_feature (1)..(25): SEQ ID NO: 2000; WAN024CSJ; Start 188; Stop 212
aggaccgtttggaagatattgcttt

SEQ ID NO: 311927 - DNA, 25 bp, Artificial
  probe
  misc_feature (1)..(25): SEQ ID NO: 2000; WAN024CSJ; Start 26; Stop 50
tttcaatggcactttctaaactaga

SEQ ID NO: 311928 - DNA, 25 bp, Artificial
  probe
  misc_feature (1)..(25): SEQ ID NO: 2000; WAN024CSJ; Start 54; Stop 78
cctttatatggcagtggtagcagac

SEQ ID NO: 311929 - DNA, 25 bp, Artificial
  probe
  misc_feature (1)..(25): SEQ ID NO: 2000; WAN024CSJ; Start 229; Stop 253
acgatttcaactgcttctgctagta

SEQ ID NO: 311930 - DNA, 25 bp, Artificial
  probe
  misc_feature (1)..(25): SEQ ID NO: 2000; WAN024CSJ; Start 27; Stop 51
ttcaatggcactttctaaactagat

SEQ ID NO: 311931 - DNA, 25 bp, Artificial
  probe
  misc_feature (1)..(25): SEQ ID NO: 2000; WAN024CSJ; Start 91; Stop 115
ccacatcaccaagggaagttagaag

SEQ ID NO: 311932 - DNA, 25 bp, Artificial
  probe
  misc_feature (1)..(25): SEQ ID NO: 2000; WAN024CSJ; Start 371; Stop 395
cattcttgtcaggtgttgccaaatt

SEQ ID NO: 311933 - DNA, 25 bp, Artificial
  probe
  misc_feature (1)..(25): SEQ ID NO: 2000; WAN024CSJ; Start 386; Stop 410
ttgccaaattccctcaaagaatcaa

SEQ ID NO: 311934 - DNA, 25 bp, Artificial
  probe
  misc_feature (1)..(25): SEQ ID NO: 2000; WAN024CSJ; Start 187; Stop 211
gaggaccgtttggaagatattgctt

SEQ ID NO: 311935 - DNA, 25 bp, Artificial
  probe
  misc_feature (1)..(25): SEQ ID NO: 2000; WAN024CSJ; Start 87; Stop 111
aaatccacatcaccaagggaagtta

SEQ ID NO: 311936 - DNA, 25 bp, Artificial
  probe
  misc_feature (1)..(25): SEQ ID NO: 2000; WAN024CSJ; Start 388; Stop 412
gccaaattccctcaaagaatcaagt

SEQ ID NO: 311937 - DNA, 25 bp, Artificial
  probe
  misc_feature (1)..(25): SEQ ID NO: 2000; WAN024CSJ; Start 387; Stop 411
tgccaaattccctcaaagaatcaag

SEQ ID NO: 311938 - DNA, 25 bp, Artificial
  probe
  misc_feature (1)..(25): SEQ ID NO: 2000; WAN024CSJ; Start 214; Stop 238
ctaaattcaggatgcacgatttcaa

SEQ ID NO: 311939 - DNA, 25 bp, Artificial
  probe
  misc_feature (1)..(25): SEQ ID NO: 2000; WAN024CSJ; Start 212; Stop 236
ttctaaattcaggatgcacgatttc

SEQ ID NO: 311940 - DNA, 25 bp, Artificial
  probe
  misc_feature (1)..(25): SEQ ID NO: 2000; WAN024CSJ; Start 215; Stop 239
taaattcaggatgcacgatttcaac

SEQ ID NO: 311941 - DNA, 25 bp, Artificial
  probe
  misc_feature (1)..(25): SEQ ID NO: 2000; WAN024CSJ; Start 211; Stop 235
tttctaaattcaggatgcacgattt

SEQ ID NO: 311942 - DNA, 25 bp, Artificial
  probe
  misc_feature (1)..(25): SEQ ID NO: 2000; WAN024CSJ; Start 392; Stop 416
aattccctcaaagaatcaagtgtgc

SEQ ID NO: 311943 - DNA, 25 bp, Artificial
  probe
  misc_feature (1)..(25): SEQ ID NO: 2001; WAN024BDY; Start 59; Stop 83
aagacatctacttgaatcacaccgt

SEQ ID NO: 311944 - DNA, 25 bp, Artificial
  probe
  misc_feature (1)..(25): SEQ ID NO: 2001; WAN024BDY; Start 64; Stop 88
atctacttgaatcacaccgtcagtc

SEQ ID NO: 311945 - DNA, 25 bp, Artificial
  probe
  misc_feature (1)..(25): SEQ ID NO: 2001; WAN024BDY; Start 63; Stop 87
catctacttgaatcacaccgtcagt

SEQ ID NO: 311946 - DNA, 25 bp, Artificial
  probe
  misc_feature (1)..(25): SEQ ID NO: 2001; WAN024BDY; Start 62; Stop 86
acatctacttgaatcacaccgtcag

SEQ ID NO: 311947 - DNA, 25 bp, Artificial
  probe
  misc_feature (1)..(25): SEQ ID NO: 2001; WAN024BDY; Start 60; Stop 84
agacatctacttgaatcacaccgtc

SEQ ID NO: 311948 - DNA, 25 bp, Artificial
  probe
  misc_feature (1)..(25): SEQ ID NO: 2001; WAN024BDY; Start 7; Stop 31
ttgtttactgaggttatcaagcaac

SEQ ID NO: 311949 - DNA, 25 bp, Artificial
  probe
  misc_feature (1)..(25): SEQ ID NO: 2001; WAN024BDY; Start 85; Stop 109
agtcacaactggatacttaggattt

SEQ ID NO: 311950 - DNA, 25 bp, Artificial
  probe
  misc_feature (1)..(25): SEQ ID NO: 2001; WAN024BDY; Start 61; Stop 85
gacatctacttgaatcacaccgtca

SEQ ID NO: 311951 - DNA, 25 bp, Artificial
  probe
  misc_feature (1)..(25): SEQ ID NO: 2001; WAN024BDY; Start 66; Stop 90
ctacttgaatcacaccgtcagtcac

SEQ ID NO: 311952 - DNA, 25 bp, Artificial
  probe
  misc_feature (1)..(25): SEQ ID NO: 2001; WAN024BDY; Start 65; Stop 89
tctacttgaatcacaccgtcagtca

SEQ ID NO: 311953 - DNA, 25 bp, Artificial
  probe
  misc_feature (1)..(25): SEQ ID NO: 2001; WAN024BDY; Start 1; Stop 25
atgcccttgtttactgaggttatca

SEQ ID NO: 311954 - DNA, 25 bp, Artificial
  probe
  misc_feature (1)..(25): SEQ ID NO: 2001; WAN024BDY; Start 55; Stop 79
ttccaagacatctacttgaatcaca

SEQ ID NO: 311955 - DNA, 25 bp, Artificial
  probe
  misc_feature (1)..(25): SEQ ID NO: 2001; WAN024BDY; Start 56; Stop 80
tccaagacatctacttgaatcacac

SEQ ID NO: 311956 - DNA, 25 bp, Artificial
  probe
  misc_feature (1)..(25): SEQ ID NO: 2001; WAN024BDY; Start 2; Stop 26
tgcccttgtttactgaggttatcaa

SEQ ID NO: 311957 - DNA, 25 bp, Artificial
  probe
  misc_feature (1)..(25): SEQ ID NO: 2001; WAN024BDY; Start 67; Stop 91
tacttgaatcacaccgtcagtcaca

SEQ ID NO: 311958 - DNA, 25 bp, Artificial
  probe
  misc_feature (1)..(25): SEQ ID NO: 2001; WAN024BDY; Start 54; Stop 78
attccaagacatctacttgaatcac

SEQ ID NO: 311959 - DNA, 25 bp, Artificial
  probe
  misc_feature (1)..(25): SEQ ID NO: 2001; WAN024BDY; Start 57; Stop 81
ccaagacatctacttgaatcacacc

SEQ ID NO: 311960 - DNA, 25 bp, Artificial
  probe
  misc_feature (1)..(25): SEQ ID NO: 2001; WAN024BDY; Start 183; Stop 207
aaatcccttggctacgaagtttgag

SEQ ID NO: 311961 - DNA, 25 bp, Artificial
  probe
  misc_feature (1)..(25): SEQ ID NO: 2001; WAN024BDY; Start 160; Stop 184
tcgtttgacttgcttcatctggaaa

SEQ ID NO: 311962 - DNA, 25 bp, Artificial
  probe
  misc_feature (1)..(25): SEQ ID NO: 2001; WAN024BDY; Start 20; Stop 44
ttatcaagcaaccactcttcgctac

SEQ ID NO: 311963 - DNA, 25 bp, Artificial
  probe
  misc_feature (1)..(25): SEQ ID NO: 2001; WAN024BDY; Start 19; Stop 43
gttatcaagcaaccactcttcgcta

SEQ ID NO: 311964 - DNA, 25 bp, Artificial
  probe
  misc_feature (1)..(25): SEQ ID NO: 2001; WAN024BDY; Start 58; Stop 82
caagacatctacttgaatcacaccg

SEQ ID NO: 311965 - DNA, 25 bp, Artificial
  probe
  misc_feature (1)..(25): SEQ ID NO: 2001; WAN024BDY; Start 51; Stop 75
tcgattccaagacatctacttgaat

SEQ ID NO: 311966 - DNA, 25 bp, Artificial
  probe
  misc_feature (1)..(25): SEQ ID NO: 2001; WAN024BDY; Start 69; Stop 93
cttgaatcacaccgtcagtcacaac

SEQ ID NO: 311967 - DNA, 25 bp, Artificial
  probe
  misc_feature (1)..(25): SEQ ID NO: 2001; WAN024BDY; Start 88; Stop 112
cacaactggatacttaggattttca

SEQ ID NO: 311968 - DNA, 25 bp, Artificial
  probe
  misc_feature (1)..(25): SEQ ID NO: 2001; WAN024BDY; Start 86; Stop 110
gtcacaactggatacttaggatttt

SEQ ID NO: 311969 - DNA, 25 bp, Artificial
  probe
  misc_feature (1)..(25): SEQ ID NO: 2001; WAN024BDY; Start 87; Stop 111
tcacaactggatacttaggattttc

SEQ ID NO: 311970 - DNA, 25 bp, Artificial
  probe
  misc_feature (1)..(25): SEQ ID NO: 2001; WAN024BDY; Start 163; Stop 187
tttgacttgcttcatctggaaaatc

SEQ ID NO: 311971 - DNA, 25 bp, Artificial
  probe
  misc_feature (1)..(25): SEQ ID NO: 2001; WAN024BDY; Start 162; Stop 186
gtttgacttgcttcatctggaaaat

SEQ ID NO: 311972 - DNA, 25 bp, Artificial
  probe
  misc_feature (1)..(25): SEQ ID NO: 2001; WAN024BDY; Start 84; Stop 108
cagtcacaactggatacttaggatt

SEQ ID NO: 311973 - DNA, 25 bp, Artificial
  probe
  misc_feature (1)..(25): SEQ ID NO: 2001; WAN024BDY; Start 83; Stop 107
tcagtcacaactggatacttaggat

SEQ ID NO: 311974 - DNA, 25 bp, Artificial
  probe
  misc_feature (1)..(25): SEQ ID NO: 2001; WAN024BDY; Start 159; Stop 183
ctcgtttgacttgcttcatctggaa

SEQ ID NO: 311975 - DNA, 25 bp, Artificial
  probe
  misc_feature (1)..(25): SEQ ID NO: 2001; WAN024BDY; Start 70; Stop 94
ttgaatcacaccgtcagtcacaact

SEQ ID NO: 311976 - DNA, 25 bp, Artificial
  probe
  misc_feature (1)..(25): SEQ ID NO: 2002; WAN024EWO; Start 75; Stop 99
gttgcacaatatccacatcgagatt

SEQ ID NO: 311977 - DNA, 25 bp, Artificial
  probe
  misc_feature (1)..(25): SEQ ID NO: 2002; WAN024EWO; Start 19; Stop 43
ctcatctgtcaacaccgaaatcatc

SEQ ID NO: 311978 - DNA, 25 bp, Artificial
  probe
  misc_feature (1)..(25): SEQ ID NO: 2002; WAN024EWO; Start 21; Stop 45
catctgtcaacaccgaaatcatcac

SEQ ID NO: 311979 - DNA, 25 bp, Artificial
  probe
  misc_feature (1)..(25): SEQ ID NO: 2002; WAN024EWO; Start 22; Stop 46
atctgtcaacaccgaaatcatcact

SEQ ID NO: 311980 - DNA, 25 bp, Artificial
  probe
  misc_feature (1)..(25): SEQ ID NO: 2002; WAN024EWO; Start 20; Stop 44
tcatctgtcaacaccgaaatcatca

SEQ ID NO: 311981 - DNA, 25 bp, Artificial
  probe
  misc_feature (1)..(25): SEQ ID NO: 2002; WAN024EWO; Start 78; Stop 102
gcacaatatccacatcgagattgat

SEQ ID NO: 311982 - DNA, 25 bp, Artificial
  probe
  misc_feature (1)..(25): SEQ ID NO: 2002; WAN024EWO; Start 79; Stop 103
cacaatatccacatcgagattgata

SEQ ID NO: 311983 - DNA, 25 bp, Artificial
  probe
  misc_feature (1)..(25): SEQ ID NO: 2002; WAN024EWO; Start 15; Stop 39
aaacctcatctgtcaacaccgaaat

SEQ ID NO: 311984 - DNA, 25 bp, Artificial
  probe
  misc_feature (1)..(25): SEQ ID NO: 2002; WAN024EWO; Start 74; Stop 98
tgttgcacaatatccacatcgagat

SEQ ID NO: 311985 - DNA, 25 bp, Artificial
  probe
  misc_feature (1)..(25): SEQ ID NO: 2002; WAN024EWO; Start 76; Stop 100
ttgcacaatatccacatcgagattg

SEQ ID NO: 311986 - DNA, 25 bp, Artificial
  probe
  misc_feature (1)..(25): SEQ ID NO: 2002; WAN024EWO; Start 18; Stop 42
cctcatctgtcaacaccgaaatcat

SEQ ID NO: 311987 - DNA, 25 bp, Artificial
  probe
  misc_feature (1)..(25): SEQ ID NO: 2002; WAN024EWO; Start 23; Stop 47
tctgtcaacaccgaaatcatcactg

SEQ ID NO: 311988 - DNA, 25 bp, Artificial
  probe
  misc_feature (1)..(25): SEQ ID NO: 2002; WAN024EWO; Start 16; Stop 40
aacctcatctgtcaacaccgaaatc

SEQ ID NO: 311989 - DNA, 25 bp, Artificial
  probe
  misc_feature (1)..(25): SEQ ID NO: 2002; WAN024EWO; Start 73; Stop 97
ctgttgcacaatatccacatcgaga

SEQ ID NO: 311990 - DNA, 25 bp, Artificial
  probe
  misc_feature (1)..(25): SEQ ID NO: 2002; WAN024EWO; Start 77; Stop 101
tgcacaatatccacatcgagattga

SEQ ID NO: 311991 - DNA, 25 bp, Artificial
  probe
  misc_feature (1)..(25): SEQ ID NO: 2002; WAN024EWO; Start 9; Stop 33
taaagaaaacctcatctgtcaacac

SEQ ID NO: 311992 - DNA, 25 bp, Artificial
  probe
  misc_feature (1)..(25): SEQ ID NO: 2002; WAN024EWO; Start 40; Stop 64
catcactgctccgttttcttcataa

SEQ ID NO: 311993 - DNA, 25 bp, Artificial
  probe
  misc_feature (1)..(25): SEQ ID NO: 2002; WAN024EWO; Start 41; Stop 65
atcactgctccgttttcttcataag

SEQ ID NO: 311994 - DNA, 25 bp, Artificial
  probe
  misc_feature (1)..(25): SEQ ID NO: 2002; WAN024EWO; Start 8; Stop 32
ttaaagaaaacctcatctgtcaaca

SEQ ID NO: 311995 - DNA, 25 bp, Artificial
  probe
  misc_feature (1)..(25): SEQ ID NO: 2002; WAN024EWO; Start 80; Stop 104
acaatatccacatcgagattgatat

SEQ ID NO: 311996 - DNA, 25 bp, Artificial
  probe
  misc_feature (1)..(25): SEQ ID NO: 2002; WAN024EWO; Start 10; Stop 34
aaagaaaacctcatctgtcaacacc

SEQ ID NO: 311997 - DNA, 25 bp, Artificial
  probe
  misc_feature (1)..(25): SEQ ID NO: 2002; WAN024EWO; Start 45; Stop 69
ctgctccgttttcttcataagtctg

SEQ ID NO: 311998 - DNA, 25 bp, Artificial
  probe
  misc_feature (1)..(25): SEQ ID NO: 2002; WAN024EWO; Start 36; Stop 60
aaatcatcactgctccgttttcttc

SEQ ID NO: 311999 - DNA, 25 bp, Artificial
  probe
  misc_feature (1)..(25): SEQ ID NO: 2002; WAN024EWO; Start 123; Stop 147
ctttcttgacctcagcgattacctg

SEQ ID NO: 312000 - DNA, 25 bp, Artificial
  probe
  misc_feature (1)..(25): SEQ ID NO: 2002; WAN024EWO; Start 39; Stop 63
tcatcactgctccgttttcttcata

SEQ ID NO: 312001 - DNA, 25 bp, Artificial
  probe
  misc_feature (1)..(25): SEQ ID NO: 2002; WAN024EWO; Start 17; Stop 41
acctcatctgtcaacaccgaaatca

SEQ ID NO: 312002 - DNA, 25 bp, Artificial
  probe
  misc_feature (1)..(25): SEQ ID NO: 2002; WAN024EWO; Start 43; Stop 67
cactgctccgttttcttcataagtc

SEQ ID NO: 312003 - DNA, 25 bp, Artificial
  probe
  misc_feature (1)..(25): SEQ ID NO: 2002; WAN024EWO; Start 72; Stop 96
cctgttgcacaatatccacatcgag

SEQ ID NO: 312004 - DNA, 25 bp, Artificial
  probe
  misc_feature (1)..(25): SEQ ID NO: 2002; WAN024EWO; Start 44; Stop 68
actgctccgttttcttcataagtct

SEQ ID NO: 312005 - DNA, 25 bp, Artificial
  probe
  misc_feature (1)..(25): SEQ ID NO: 2002; WAN024EWO; Start 26; Stop 50
gtcaacaccgaaatcatcactgctc

SEQ ID NO: 312006 - DNA, 25 bp, Artificial
  probe
  misc_feature (1)..(25): SEQ ID NO: 2002; WAN024EWO; Start 38; Stop 62
atcatcactgctccgttttcttcat

SEQ ID NO: 312007 - DNA, 25 bp, Artificial
  probe
  misc_feature (1)..(25): SEQ ID NO: 2002; WAN024EWO; Start 97; Stop 121
attgatatctcccaaactagggcta

SEQ ID NO: 312008 - DNA, 25 bp, Artificial
  probe
  misc_feature (1)..(25): SEQ ID NO: 2002; WAN024EWO; Start 42; Stop 66
tcactgctccgttttcttcataagt

SEQ ID NO: 312009 - DNA, 25 bp, Artificial
  probe
  misc_feature (1)..(25): SEQ ID NO: 2004; WAN024BDZ; Start 194; Stop 218
ctagagaggtgagtagtgtagtgag

SEQ ID NO: 312010 - DNA, 25 bp, Artificial
  probe
  misc_feature (1)..(25): SEQ ID NO: 2004; WAN024BDZ; Start 195; Stop 219
tagagaggtgagtagtgtagtgagg

SEQ ID NO: 312011 - DNA, 25 bp, Artificial
  probe
  misc_feature (1)..(25): SEQ ID NO: 2004; WAN024BDZ; Start 211; Stop 235
gtagtgaggagagaggcaaggataa

SEQ ID NO: 312012 - DNA, 25 bp, Artificial
  probe
  misc_feature (1)..(25): SEQ ID NO: 2004; WAN024BDZ; Start 202; Stop 226
gtgagtagtgtagtgaggagagagg

SEQ ID NO: 312013 - DNA, 25 bp, Artificial
  probe
  misc_feature (1)..(25): SEQ ID NO: 2004; WAN024BDZ; Start 201; Stop 225
ggtgagtagtgtagtgaggagagag

SEQ ID NO: 312014 - DNA, 25 bp, Artificial
  probe
  misc_feature (1)..(25): SEQ ID NO: 2004; WAN024BDZ; Start 199; Stop 223
gaggtgagtagtgtagtgaggagag

SEQ ID NO: 312015 - DNA, 25 bp, Artificial
  probe
  misc_feature (1)..(25): SEQ ID NO: 2004; WAN024BDZ; Start 197; Stop 221
gagaggtgagtagtgtagtgaggag

SEQ ID NO: 312016 - DNA, 25 bp, Artificial
  probe
  misc_feature (1)..(25): SEQ ID NO: 2004; WAN024BDZ; Start 172; Stop 196
gtaaagaaactactggacacaccta

SEQ ID NO: 312017 - DNA, 25 bp, Artificial
  probe
  misc_feature (1)..(25): SEQ ID NO: 2004; WAN024BDZ; Start 193; Stop 217
cctagagaggtgagtagtgtagtga

SEQ ID NO: 312018 - DNA, 25 bp, Artificial
  probe
  misc_feature (1)..(25): SEQ ID NO: 2004; WAN024BDZ; Start 216; Stop 240
gaggagagaggcaaggataaagtaa

SEQ ID NO: 312019 - DNA, 25 bp, Artificial
  probe
  misc_feature (1)..(25): SEQ ID NO: 2004; WAN024BDZ; Start 173; Stop 197
taaagaaactactggacacacctag

SEQ ID NO: 312020 - DNA, 25 bp, Artificial
  probe
  misc_feature (1)..(25): SEQ ID NO: 2004; WAN024BDZ; Start 200; Stop 224
aggtgagtagtgtagtgaggagaga

SEQ ID NO: 312021 - DNA, 25 bp, Artificial
  probe
  misc_feature (1)..(25): SEQ ID NO: 2004; WAN024BDZ; Start 198; Stop 222
agaggtgagtagtgtagtgaggaga

SEQ ID NO: 312022 - DNA, 25 bp, Artificial
  probe
  misc_feature (1)..(25): SEQ ID NO: 2004; WAN024BDZ; Start 196; Stop 220
agagaggtgagtagtgtagtgagga

SEQ ID NO: 312023 - DNA, 25 bp, Artificial
  probe
  misc_feature (1)..(25): SEQ ID NO: 2004; WAN024BDZ; Start 174; Stop 198
aaagaaactactggacacacctaga

SEQ ID NO: 312024 - DNA, 25 bp, Artificial
  probe
  misc_feature (1)..(25): SEQ ID NO: 2004; WAN024BDZ; Start 175; Stop 199
aagaaactactggacacacctagag

SEQ ID NO: 312025 - DNA, 25 bp, Artificial
  probe
  misc_feature (1)..(25): SEQ ID NO: 2004; WAN024BDZ; Start 133; Stop 157
gccatgacaataaggaatttagaga

SEQ ID NO: 312026 - DNA, 25 bp, Artificial
  probe
  misc_feature (1)..(25): SEQ ID NO: 2004; WAN024BDZ; Start 215; Stop 239
tgaggagagaggcaaggataaagta

SEQ ID NO: 312027 - DNA, 25 bp, Artificial
  probe
  misc_feature (1)..(25): SEQ ID NO: 2004; WAN024BDZ; Start 212; Stop 236
tagtgaggagagaggcaaggataaa

SEQ ID NO: 312028 - DNA, 25 bp, Artificial
  probe
  misc_feature (1)..(25): SEQ ID NO: 2004; WAN024BDZ; Start 177; Stop 201
gaaactactggacacacctagagag

SEQ ID NO: 312029 - DNA, 25 bp, Artificial
  probe
  misc_feature (1)..(25): SEQ ID NO: 2004; WAN024BDZ; Start 206; Stop 230
gtagtgtagtgaggagagaggcaag

SEQ ID NO: 312030 - DNA, 25 bp, Artificial
  probe
  misc_feature (1)..(25): SEQ ID NO: 2004; WAN024BDZ; Start 210; Stop 234
tgtagtgaggagagaggcaaggata

SEQ ID NO: 312031 - DNA, 25 bp, Artificial
  probe
  misc_feature (1)..(25): SEQ ID NO: 2004; WAN024BDZ; Start 176; Stop 200
agaaactactggacacacctagaga

SEQ ID NO: 312032 - DNA, 25 bp, Artificial
  probe
  misc_feature (1)..(25): SEQ ID NO: 2004; WAN024BDZ; Start 205; Stop 229
agtagtgtagtgaggagagaggcaa

SEQ ID NO: 312033 - DNA, 25 bp, Artificial
  probe
  misc_feature (1)..(25): SEQ ID NO: 2004; WAN024BDZ; Start 204; Stop 228
gagtagtgtagtgaggagagaggca

SEQ ID NO: 312034 - DNA, 25 bp, Artificial
  probe
  misc_feature (1)..(25): SEQ ID NO: 2004; WAN024BDZ; Start 203; Stop 227
tgagtagtgtagtgaggagagaggc

SEQ ID NO: 312035 - DNA, 25 bp, Artificial
  probe
  misc_feature (1)..(25): SEQ ID NO: 2004; WAN024BDZ; Start 134; Stop 158
ccatgacaataaggaatttagagag

SEQ ID NO: 312036 - DNA, 25 bp, Artificial
  probe
  misc_feature (1)..(25): SEQ ID NO: 2004; WAN024BDZ; Start 213; Stop 237
agtgaggagagaggcaaggataaag

SEQ ID NO: 312037 - DNA, 25 bp, Artificial
  probe
  misc_feature (1)..(25): SEQ ID NO: 2004; WAN024BDZ; Start 214; Stop 238
gtgaggagagaggcaaggataaagt

SEQ ID NO: 312038 - DNA, 25 bp, Artificial
  probe
  misc_feature (1)..(25): SEQ ID NO: 2004; WAN024BDZ; Start 207; Stop 231
tagtgtagtgaggagagaggcaagg

SEQ ID NO: 312039 - DNA, 25 bp, Artificial
  probe
  misc_feature (1)..(25): SEQ ID NO: 2004; WAN024BDZ; Start 24; Stop 48
aagagtggtgaggatgatggcaatc

SEQ ID NO: 312040 - DNA, 25 bp, Artificial
  probe
  misc_feature (1)..(25): SEQ ID NO: 2004; WAN024BDZ; Start 132; Stop 156
ggccatgacaataaggaatttagag

SEQ ID NO: 312041 - DNA, 25 bp, Artificial
  probe
  misc_feature (1)..(25): SEQ ID NO: 2004; WAN024BDZ; Start 84; Stop 108
ggatttgaccatagcgaccagattg

SEQ ID NO: 312042 - DNA, 25 bp, Artificial
  probe
  misc_feature (1)..(25): SEQ ID NO: 2005; WAN024CQ4; Start 132; Stop 156
ctggttgatgcagattcagaagctg

SEQ ID NO: 312043 - DNA, 25 bp, Artificial
  probe
  misc_feature (1)..(25): SEQ ID NO: 2005; WAN024CQ4; Start 135; Stop 159
gttgatgcagattcagaagctgatg

SEQ ID NO: 312044 - DNA, 25 bp, Artificial
  probe
  misc_feature (1)..(25): SEQ ID NO: 2005; WAN024CQ4; Start 130; Stop 154
cactggttgatgcagattcagaagc

SEQ ID NO: 312045 - DNA, 25 bp, Artificial
  probe
  misc_feature (1)..(25): SEQ ID NO: 2005; WAN024CQ4; Start 136; Stop 160
ttgatgcagattcagaagctgatgt

SEQ ID NO: 312046 - DNA, 25 bp, Artificial
  probe
  misc_feature (1)..(25): SEQ ID NO: 2005; WAN024CQ4; Start 131; Stop 155
actggttgatgcagattcagaagct

SEQ ID NO: 312047 - DNA, 25 bp, Artificial
  probe
  misc_feature (1)..(25): SEQ ID NO: 2005; WAN024CQ4; Start 137; Stop 161
tgatgcagattcagaagctgatgtg

SEQ ID NO: 312048 - DNA, 25 bp, Artificial
  probe
  misc_feature (1)..(25): SEQ ID NO: 2005; WAN024CQ4; Start 134; Stop 158
ggttgatgcagattcagaagctgat

SEQ ID NO: 312049 - DNA, 25 bp, Artificial
  probe
  misc_feature (1)..(25): SEQ ID NO: 2005; WAN024CQ4; Start 129; Stop 153
gcactggttgatgcagattcagaag

SEQ ID NO: 312050 - DNA, 25 bp, Artificial
  probe
  misc_feature (1)..(25): SEQ ID NO: 2005; WAN024CQ4; Start 138; Stop 162
gatgcagattcagaagctgatgtgc

SEQ ID NO: 312051 - DNA, 25 bp, Artificial
  probe
  misc_feature (1)..(25): SEQ ID NO: 2005; WAN024CQ4; Start 133; Stop 157
tggttgatgcagattcagaagctga

SEQ ID NO: 312052 - DNA, 25 bp, Artificial
  probe
  misc_feature (1)..(25): SEQ ID NO: 2005; WAN024CQ4; Start 139; Stop 163
atgcagattcagaagctgatgtgct

SEQ ID NO: 312053 - DNA, 25 bp, Artificial
  probe
  misc_feature (1)..(25): SEQ ID NO: 2005; WAN024CQ4; Start 144; Stop 168
gattcagaagctgatgtgcttgctg

SEQ ID NO: 312054 - DNA, 25 bp, Artificial
  probe
  misc_feature (1)..(25): SEQ ID NO: 2005; WAN024CQ4; Start 142; Stop 166
cagattcagaagctgatgtgcttgc

SEQ ID NO: 312055 - DNA, 25 bp, Artificial
  probe
  misc_feature (1)..(25): SEQ ID NO: 2005; WAN024CQ4; Start 141; Stop 165
gcagattcagaagctgatgtgcttg

SEQ ID NO: 312056 - DNA, 25 bp, Artificial
  probe
  misc_feature (1)..(25): SEQ ID NO: 2005; WAN024CQ4; Start 143; Stop 167
agattcagaagctgatgtgcttgct

SEQ ID NO: 312057 - DNA, 25 bp, Artificial
  probe
  misc_feature (1)..(25): SEQ ID NO: 2005; WAN024CQ4; Start 145; Stop 169
attcagaagctgatgtgcttgctga

SEQ ID NO: 312058 - DNA, 25 bp, Artificial
  probe
  misc_feature (1)..(25): SEQ ID NO: 2005; WAN024CQ4; Start 140; Stop 164
tgcagattcagaagctgatgtgctt

SEQ ID NO: 312059 - DNA, 25 bp, Artificial
  probe
  misc_feature (1)..(25): SEQ ID NO: 2006; WAN024D75; Start 477; Stop 501
gatggacagtaagctatcaggtatt

SEQ ID NO: 312060 - DNA, 25 bp, Artificial
  probe
  misc_feature (1)..(25): SEQ ID NO: 2006; WAN024D75; Start 476; Stop 500
agatggacagtaagctatcaggtat

SEQ ID NO: 312061 - DNA, 25 bp, Artificial
  probe
  misc_feature (1)..(25): SEQ ID NO: 2006; WAN024D75; Start 470; Stop 494
aataccagatggacagtaagctatc

SEQ ID NO: 312062 - DNA, 25 bp, Artificial
  probe
  misc_feature (1)..(25): SEQ ID NO: 2006; WAN024D75; Start 471; Stop 495
ataccagatggacagtaagctatca

SEQ ID NO: 312063 - DNA, 25 bp, Artificial
  probe
  misc_feature (1)..(25): SEQ ID NO: 2006; WAN024D75; Start 245; Stop 269
cagagcacatggagaccttctataa

SEQ ID NO: 312064 - DNA, 25 bp, Artificial
  probe
  misc_feature (1)..(25): SEQ ID NO: 2006; WAN024D75; Start 475; Stop 499
cagatggacagtaagctatcaggta

SEQ ID NO: 312065 - DNA, 25 bp, Artificial
  probe
  misc_feature (1)..(25): SEQ ID NO: 2006; WAN024D75; Start 472; Stop 496
taccagatggacagtaagctatcag

SEQ ID NO: 312066 - DNA, 25 bp, Artificial
  probe
  misc_feature (1)..(25): SEQ ID NO: 2006; WAN024D75; Start 328; Stop 352
gttgagcatttaccatttgaggaag

SEQ ID NO: 312067 - DNA, 25 bp, Artificial
  probe
  misc_feature (1)..(25): SEQ ID NO: 2006; WAN024D75; Start 350; Stop 374
aagtggactattgggaggaatttag

SEQ ID NO: 312068 - DNA, 25 bp, Artificial
  probe
  misc_feature (1)..(25): SEQ ID NO: 2006; WAN024D75; Start 349; Stop 373
gaagtggactattgggaggaattta

SEQ ID NO: 312069 - DNA, 25 bp, Artificial
  probe
  misc_feature (1)..(25): SEQ ID NO: 2006; WAN024D75; Start 329; Stop 353
ttgagcatttaccatttgaggaagt

SEQ ID NO: 312070 - DNA, 25 bp, Artificial
  probe
  misc_feature (1)..(25): SEQ ID NO: 2006; WAN024D75; Start 327; Stop 351
agttgagcatttaccatttgaggaa

SEQ ID NO: 312071 - DNA, 25 bp, Artificial
  probe
  misc_feature (1)..(25): SEQ ID NO: 2006; WAN024D75; Start 358; Stop 382
tattgggaggaatttagacagatgc

SEQ ID NO: 312072 - DNA, 25 bp, Artificial
  probe
  misc_feature (1)..(25): SEQ ID NO: 2006; WAN024D75; Start 354; Stop 378
ggactattgggaggaatttagacag

SEQ ID NO: 312073 - DNA, 25 bp, Artificial
  probe
  misc_feature (1)..(25): SEQ ID NO: 2006; WAN024D75; Start 355; Stop 379
gactattgggaggaatttagacaga

SEQ ID NO: 312074 - DNA, 25 bp, Artificial
  probe
  misc_feature (1)..(25): SEQ ID NO: 2006; WAN024D75; Start 364; Stop 388
gaggaatttagacagatgcttgagt

SEQ ID NO: 312075 - DNA, 25 bp, Artificial
  probe
  misc_feature (1)..(25): SEQ ID NO: 2006; WAN024D75; Start 352; Stop 376
gtggactattgggaggaatttagac

SEQ ID NO: 312076 - DNA, 25 bp, Artificial
  probe
  misc_feature (1)..(25): SEQ ID NO: 2006; WAN024D75; Start 351; Stop 375
agtggactattgggaggaatttaga

SEQ ID NO: 312077 - DNA, 25 bp, Artificial
  probe
  misc_feature (1)..(25): SEQ ID NO: 2006; WAN024D75; Start 365; Stop 389
aggaatttagacagatgcttgagtg

SEQ ID NO: 312078 - DNA, 25 bp, Artificial
  probe
  misc_feature (1)..(25): SEQ ID NO: 2006; WAN024D75; Start 244; Stop 268
tcagagcacatggagaccttctata

SEQ ID NO: 312079 - DNA, 25 bp, Artificial
  probe
  misc_feature (1)..(25): SEQ ID NO: 2006; WAN024D75; Start 353; Stop 377
tggactattgggaggaatttagaca

SEQ ID NO: 312080 - DNA, 25 bp, Artificial
  probe
  misc_feature (1)..(25): SEQ ID NO: 2006; WAN024D75; Start 367; Stop 391
gaatttagacagatgcttgagtggt

SEQ ID NO: 312081 - DNA, 25 bp, Artificial
  probe
  misc_feature (1)..(25): SEQ ID NO: 2006; WAN024D75; Start 356; Stop 380
actattgggaggaatttagacagat

SEQ ID NO: 312082 - DNA, 25 bp, Artificial
  probe
  misc_feature (1)..(25): SEQ ID NO: 2006; WAN024D75; Start 363; Stop 387
ggaggaatttagacagatgcttgag

SEQ ID NO: 312083 - DNA, 25 bp, Artificial
  probe
  misc_feature (1)..(25): SEQ ID NO: 2006; WAN024D75; Start 330; Stop 354
tgagcatttaccatttgaggaagtg

SEQ ID NO: 312084 - DNA, 25 bp, Artificial
  probe
  misc_feature (1)..(25): SEQ ID NO: 2006; WAN024D75; Start 326; Stop 350
cagttgagcatttaccatttgagga

SEQ ID NO: 312085 - DNA, 25 bp, Artificial
  probe
  misc_feature (1)..(25): SEQ ID NO: 2006; WAN024D75; Start 324; Stop 348
tccagttgagcatttaccatttgag

SEQ ID NO: 312086 - DNA, 25 bp, Artificial
  probe
  misc_feature (1)..(25): SEQ ID NO: 2006; WAN024D75; Start 357; Stop 381
ctattgggaggaatttagacagatg

SEQ ID NO: 312087 - DNA, 25 bp, Artificial
  probe
  misc_feature (1)..(25): SEQ ID NO: 2006; WAN024D75; Start 366; Stop 390
ggaatttagacagatgcttgagtgg

SEQ ID NO: 312088 - DNA, 25 bp, Artificial
  probe
  misc_feature (1)..(25): SEQ ID NO: 2006; WAN024D75; Start 359; Stop 383
attgggaggaatttagacagatgct

SEQ ID NO: 312089 - DNA, 25 bp, Artificial
  probe
  misc_feature (1)..(25): SEQ ID NO: 2006; WAN024D75; Start 817; Stop 841
ccttgtctttgttggtcttcatctg

SEQ ID NO: 312090 - DNA, 25 bp, Artificial
  probe
  misc_feature (1)..(25): SEQ ID NO: 2006; WAN024D75; Start 360; Stop 384
ttgggaggaatttagacagatgctt

SEQ ID NO: 312091 - DNA, 25 bp, Artificial
  probe
  misc_feature (1)..(25): SEQ ID NO: 2006; WAN024D75; Start 209; Stop 233
tctatatggagagccaccgttctaa

SEQ ID NO: 312092 - DNA, 25 bp, Artificial
  probe
  misc_feature (1)..(25): SEQ ID NO: 2007; WAN024FUW; Start 929; Stop 953
attccttcttgatgagtaatgctgg

SEQ ID NO: 312093 - DNA, 25 bp, Artificial
  probe
  misc_feature (1)..(25): SEQ ID NO: 2007; WAN024FUW; Start 928; Stop 952
tattccttcttgatgagtaatgctg

SEQ ID NO: 312094 - DNA, 25 bp, Artificial
  probe
  misc_feature (1)..(25): SEQ ID NO: 2007; WAN024FUW; Start 927; Stop 951
ttattccttcttgatgagtaatgct

SEQ ID NO: 312095 - DNA, 25 bp, Artificial
  probe
  misc_feature (1)..(25): SEQ ID NO: 2007; WAN024FUW; Start 1030; Stop 1054
ttattagcttggtctatgtatgcgg

SEQ ID NO: 312096 - DNA, 25 bp, Artificial
  probe
  misc_feature (1)..(25): SEQ ID NO: 2007; WAN024FUW; Start 684; Stop 708
tgaacttagatggataggatactca

SEQ ID NO: 312097 - DNA, 25 bp, Artificial
  probe
  misc_feature (1)..(25): SEQ ID NO: 2007; WAN024FUW; Start 296; Stop 320
tgttgattggtacgattcattatga

SEQ ID NO: 312098 - DNA, 25 bp, Artificial
  probe
  misc_feature (1)..(25): SEQ ID NO: 2007; WAN024FUW; Start 1038; Stop 1062
ttggtctatgtatgcggtaacagaa

SEQ ID NO: 312099 - DNA, 25 bp, Artificial
  probe
  misc_feature (1)..(25): SEQ ID NO: 2007; WAN024FUW; Start 1029; Stop 1053
attattagcttggtctatgtatgcg

SEQ ID NO: 312100 - DNA, 25 bp, Artificial
  probe
  misc_feature (1)..(25): SEQ ID NO: 2007; WAN024FUW; Start 1032; Stop 1056
attagcttggtctatgtatgcggta

SEQ ID NO: 312101 - DNA, 25 bp, Artificial
  probe
  misc_feature (1)..(25): SEQ ID NO: 2007; WAN024FUW; Start 1031; Stop 1055
tattagcttggtctatgtatgcggt

SEQ ID NO: 312102 - DNA, 25 bp, Artificial
  probe
  misc_feature (1)..(25): SEQ ID NO: 2007; WAN024FUW; Start 281; Stop 305
ttacgagttggtttatgttgattgg

SEQ ID NO: 312103 - DNA, 25 bp, Artificial
  probe
  misc_feature (1)..(25): SEQ ID NO: 2007; WAN024FUW; Start 1037; Stop 1061
cttggtctatgtatgcggtaacaga

SEQ ID NO: 312104 - DNA, 25 bp, Artificial
  probe
  misc_feature (1)..(25): SEQ ID NO: 2007; WAN024FUW; Start 283; Stop 307
acgagttggtttatgttgattggta

SEQ ID NO: 312105 - DNA, 25 bp, Artificial
  probe
  misc_feature (1)..(25): SEQ ID NO: 2007; WAN024FUW; Start 282; Stop 306
tacgagttggtttatgttgattggt

SEQ ID NO: 312106 - DNA, 25 bp, Artificial
  probe
  misc_feature (1)..(25): SEQ ID NO: 2007; WAN024FUW; Start 1033; Stop 1057
ttagcttggtctatgtatgcggtaa

SEQ ID NO: 312107 - DNA, 25 bp, Artificial
  probe
  misc_feature (1)..(25): SEQ ID NO: 2007; WAN024FUW; Start 683; Stop 707
ttgaacttagatggataggatactc

SEQ ID NO: 312108 - DNA, 25 bp, Artificial
  probe
  misc_feature (1)..(25): SEQ ID NO: 2007; WAN024FUW; Start 682; Stop 706
cttgaacttagatggataggatact

SEQ ID NO: 312109 - DNA, 25 bp, Artificial
  probe
  misc_feature (1)..(25): SEQ ID NO: 2007; WAN024FUW; Start 433; Stop 457
aatatccgaagaaacgaaactgtca

SEQ ID NO: 312110 - DNA, 25 bp, Artificial
  probe
  misc_feature (1)..(25): SEQ ID NO: 2007; WAN024FUW; Start 432; Stop 456
taatatccgaagaaacgaaactgtc

SEQ ID NO: 312111 - DNA, 25 bp, Artificial
  probe
  misc_feature (1)..(25): SEQ ID NO: 2007; WAN024FUW; Start 930; Stop 954
ttccttcttgatgagtaatgctggc

SEQ ID NO: 312112 - DNA, 25 bp, Artificial
  probe
  misc_feature (1)..(25): SEQ ID NO: 2007; WAN024FUW; Start 295; Stop 319
atgttgattggtacgattcattatg

SEQ ID NO: 312113 - DNA, 25 bp, Artificial
  probe
  misc_feature (1)..(25): SEQ ID NO: 2007; WAN024FUW; Start 443; Stop 467
gaaacgaaactgtcagagcatttac

SEQ ID NO: 312114 - DNA, 25 bp, Artificial
  probe
  misc_feature (1)..(25): SEQ ID NO: 2007; WAN024FUW; Start 442; Stop 466
agaaacgaaactgtcagagcattta

SEQ ID NO: 312115 - DNA, 25 bp, Artificial
  probe
  misc_feature (1)..(25): SEQ ID NO: 2007; WAN024FUW; Start 681; Stop 705
tcttgaacttagatggataggatac

SEQ ID NO: 312116 - DNA, 25 bp, Artificial
  probe
  misc_feature (1)..(25): SEQ ID NO: 2007; WAN024FUW; Start 431; Stop 455
ttaatatccgaagaaacgaaactgt

SEQ ID NO: 312117 - DNA, 25 bp, Artificial
  probe
  misc_feature (1)..(25): SEQ ID NO: 2007; WAN024FUW; Start 782; Stop 806
ttattgataatatcctgactggacg

SEQ ID NO: 312118 - DNA, 25 bp, Artificial
  probe
  misc_feature (1)..(25): SEQ ID NO: 2007; WAN024FUW; Start 297; Stop 321
gttgattggtacgattcattatgat

SEQ ID NO: 312119 - DNA, 25 bp, Artificial
  probe
  misc_feature (1)..(25): SEQ ID NO: 2007; WAN024FUW; Start 434; Stop 458
atatccgaagaaacgaaactgtcag

SEQ ID NO: 312120 - DNA, 25 bp, Artificial
  probe
  misc_feature (1)..(25): SEQ ID NO: 2007; WAN024FUW; Start 287; Stop 311
gttggtttatgttgattggtacgat

SEQ ID NO: 312121 - DNA, 25 bp, Artificial
  probe
  misc_feature (1)..(25): SEQ ID NO: 2007; WAN024FUW; Start 280; Stop 304
tttacgagttggtttatgttgattg

SEQ ID NO: 312122 - DNA, 25 bp, Artificial
  probe
  misc_feature (1)..(25): SEQ ID NO: 2007; WAN024FUW; Start 687; Stop 711
acttagatggataggatactcattc

SEQ ID NO: 312123 - DNA, 25 bp, Artificial
  probe
  misc_feature (1)..(25): SEQ ID NO: 2007; WAN024FUW; Start 685; Stop 709
gaacttagatggataggatactcat

SEQ ID NO: 312124 - DNA, 25 bp, Artificial
  probe
  misc_feature (1)..(25): SEQ ID NO: 2007; WAN024FUW; Start 289; Stop 313
tggtttatgttgattggtacgattc

SEQ ID NO: 312125 - DNA, 25 bp, Artificial
  probe
  misc_feature (1)..(25): SEQ ID NO: 2008; WAN024FYQ-5; Start 35; Stop 59
tgattggttctggtccgattattat

SEQ ID NO: 312126 - DNA, 25 bp, Artificial
  probe
  misc_feature (1)..(25): SEQ ID NO: 2008; WAN024FYQ-5; Start 192; Stop 216
ttacattgaaccgattacacttgag

SEQ ID NO: 312127 - DNA, 25 bp, Artificial
  probe
  misc_feature (1)..(25): SEQ ID NO: 2008; WAN024FYQ-5; Start 41; Stop 65
gttctggtccgattattattggtca

SEQ ID NO: 312128 - DNA, 25 bp, Artificial
  probe
  misc_feature (1)..(25): SEQ ID NO: 2008; WAN024FYQ-5; Start 34; Stop 58
gtgattggttctggtccgattatta

SEQ ID NO: 312129 - DNA, 25 bp, Artificial
  probe
  misc_feature (1)..(25): SEQ ID NO: 2008; WAN024FYQ-5; Start 193; Stop 217
tacattgaaccgattacacttgagt

SEQ ID NO: 312130 - DNA, 25 bp, Artificial
  probe
  misc_feature (1)..(25): SEQ ID NO: 2008; WAN024FYQ-5; Start 825; Stop 849
caagattgaaggtggatgtaatgtt

SEQ ID NO: 312131 - DNA, 25 bp, Artificial
  probe
  misc_feature (1)..(25): SEQ ID NO: 2008; WAN024FYQ-5; Start 38; Stop 62
ttggttctggtccgattattattgg

SEQ ID NO: 312132 - DNA, 25 bp, Artificial
  probe
  misc_feature (1)..(25): SEQ ID NO: 2008; WAN024FYQ-5; Start 37; Stop 61
attggttctggtccgattattattg

SEQ ID NO: 312133 - DNA, 25 bp, Artificial
  probe
  misc_feature (1)..(25): SEQ ID NO: 2008; WAN024FYQ-5; Start 36; Stop 60
gattggttctggtccgattattatt

SEQ ID NO: 312134 - DNA, 25 bp, Artificial
  probe
  misc_feature (1)..(25): SEQ ID NO: 2008; WAN024FYQ-5; Start 826; Stop 850
aagattgaaggtggatgtaatgttc

SEQ ID NO: 312135 - DNA, 25 bp, Artificial
  probe
  misc_feature (1)..(25): SEQ ID NO: 2008; WAN024FYQ-5; Start 40; Stop 64
ggttctggtccgattattattggtc

SEQ ID NO: 312136 - DNA, 25 bp, Artificial
  probe
  misc_feature (1)..(25): SEQ ID NO: 2008; WAN024FYQ-5; Start 194; Stop 218
acattgaaccgattacacttgagtt

SEQ ID NO: 312137 - DNA, 25 bp, Artificial
  probe
  misc_feature (1)..(25): SEQ ID NO: 2008; WAN024FYQ-5; Start 39; Stop 63
tggttctggtccgattattattggt

SEQ ID NO: 312138 - DNA, 25 bp, Artificial
  probe
  misc_feature (1)..(25): SEQ ID NO: 2008; WAN024FYQ-5; Start 824; Stop 848
tcaagattgaaggtggatgtaatgt

SEQ ID NO: 312139 - DNA, 25 bp, Artificial
  probe
  misc_feature (1)..(25): SEQ ID NO: 2008; WAN024FYQ-5; Start 42; Stop 66
ttctggtccgattattattggtcag

SEQ ID NO: 312140 - DNA, 25 bp, Artificial
  probe
  misc_feature (1)..(25): SEQ ID NO: 2008; WAN024FYQ-5; Start 823; Stop 847
ctcaagattgaaggtggatgtaatg

SEQ ID NO: 312141 - DNA, 25 bp, Artificial
  probe
  misc_feature (1)..(25): SEQ ID NO: 2008; WAN024FYQ-5; Start 822; Stop 846
cctcaagattgaaggtggatgtaat

SEQ ID NO: 312142 - DNA, 25 bp, Artificial
  probe
  misc_feature (1)..(25): SEQ ID NO: 2008; WAN024FYQ-5; Start 43; Stop 67
tctggtccgattattattggtcagg

SEQ ID NO: 312143 - DNA, 25 bp, Artificial
  probe
  misc_feature (1)..(25): SEQ ID NO: 2008; WAN024FYQ-5; Start 33; Stop 57
ggtgattggttctggtccgattatt

SEQ ID NO: 312144 - DNA, 25 bp, Artificial
  probe
  misc_feature (1)..(25): SEQ ID NO: 2008; WAN024FYQ-5; Start 112; Stop 136
aaagaggaaggttatgaggttgttt

SEQ ID NO: 312145 - DNA, 25 bp, Artificial
  probe
  misc_feature (1)..(25): SEQ ID NO: 2008; WAN024FYQ-5; Start 832; Stop 856
gaaggtggatgtaatgttcagctag

SEQ ID NO: 312146 - DNA, 25 bp, Artificial
  probe
  misc_feature (1)..(25): SEQ ID NO: 2008; WAN024FYQ-5; Start 111; Stop 135
gaaagaggaaggttatgaggttgtt

SEQ ID NO: 312147 - DNA, 25 bp, Artificial
  probe
  misc_feature (1)..(25): SEQ ID NO: 2008; WAN024FYQ-5; Start 109; Stop 133
ttgaaagaggaaggttatgaggttg

SEQ ID NO: 312148 - DNA, 25 bp, Artificial
  probe
  misc_feature (1)..(25): SEQ ID NO: 2008; WAN024FYQ-5; Start 108; Stop 132
gttgaaagaggaaggttatgaggtt

SEQ ID NO: 312149 - DNA, 25 bp, Artificial
  probe
  misc_feature (1)..(25): SEQ ID NO: 2008; WAN024FYQ-5; Start 1161; Stop 1185
taacatcgaggaatctcttctcaag

SEQ ID NO: 312150 - DNA, 25 bp, Artificial
  probe
  misc_feature (1)..(25): SEQ ID NO: 2008; WAN024FYQ-5; Start 1160; Stop 1184
gtaacatcgaggaatctcttctcaa

SEQ ID NO: 312151 - DNA, 25 bp, Artificial
  probe
  misc_feature (1)..(25): SEQ ID NO: 2008; WAN024FYQ-5; Start 640; Stop 664
aaggaaattgaatacgaagtgatgc

SEQ ID NO: 312152 - DNA, 25 bp, Artificial
  probe
  misc_feature (1)..(25): SEQ ID NO: 2008; WAN024FYQ-5; Start 191; Stop 215
tttacattgaaccgattacacttga

SEQ ID NO: 312153 - DNA, 25 bp, Artificial
  probe
  misc_feature (1)..(25): SEQ ID NO: 2008; WAN024FYQ-5; Start 196; Stop 220
attgaaccgattacacttgagtttg

SEQ ID NO: 312154 - DNA, 25 bp, Artificial
  probe
  misc_feature (1)..(25): SEQ ID NO: 2008; WAN024FYQ-5; Start 195; Stop 219
cattgaaccgattacacttgagttt

SEQ ID NO: 312155 - DNA, 25 bp, Artificial
  probe
  misc_feature (1)..(25): SEQ ID NO: 2008; WAN024FYQ-5; Start 27; Stop 51
aattatggtgattggttctggtccg

SEQ ID NO: 312156 - DNA, 25 bp, Artificial
  probe
  misc_feature (1)..(25): SEQ ID NO: 2008; WAN024FYQ-5; Start 1213; Stop 1237
caccacaatgaaatacctgaacttg

SEQ ID NO: 312157 - DNA, 25 bp, Artificial
  probe
  misc_feature (1)..(25): SEQ ID NO: 2008; WAN024FYQ-5; Start 26; Stop 50
aaattatggtgattggttctggtcc

SEQ ID NO: 312158 - DNA, 25 bp, Artificial
  probe
  misc_feature (1)..(25): SEQ ID NO: 2009; WAN024DZX; Start 835; Stop 859
ggattggaagacggagattatatgt

SEQ ID NO: 312159 - DNA, 25 bp, Artificial
  probe
  misc_feature (1)..(25): SEQ ID NO: 2009; WAN024DZX; Start 155; Stop 179
caggtcttgtggatactcatattca

SEQ ID NO: 312160 - DNA, 25 bp, Artificial
  probe
  misc_feature (1)..(25): SEQ ID NO: 2009; WAN024DZX; Start 838; Stop 862
ttggaagacggagattatatgttgg

SEQ ID NO: 312161 - DNA, 25 bp, Artificial
  probe
  misc_feature (1)..(25): SEQ ID NO: 2009; WAN024DZX; Start 156; Stop 180
aggtcttgtggatactcatattcat

SEQ ID NO: 312162 - DNA, 25 bp, Artificial
  probe
  misc_feature (1)..(25): SEQ ID NO: 2009; WAN024DZX; Start 120; Stop 144
tgaggtgattgactatacaggttat

SEQ ID NO: 312163 - DNA, 25 bp, Artificial
  probe
  misc_feature (1)..(25): SEQ ID NO: 2009; WAN024DZX; Start 837; Stop 861
attggaagacggagattatatgttg

SEQ ID NO: 312164 - DNA, 25 bp, Artificial
  probe
  misc_feature (1)..(25): SEQ ID NO: 2009; WAN024DZX; Start 836; Stop 860
gattggaagacggagattatatgtt

SEQ ID NO: 312165 - DNA, 25 bp, Artificial
  probe
  misc_feature (1)..(25): SEQ ID NO: 2009; WAN024DZX; Start 199; Stop 223
gtgatggacaacaacattgaaggta

SEQ ID NO: 312166 - DNA, 25 bp, Artificial
  probe
  misc_feature (1)..(25): SEQ ID NO: 2009; WAN024DZX; Start 204; Stop 228
ggacaacaacattgaaggtacattg

SEQ ID NO: 312167 - DNA, 25 bp, Artificial
  probe
  misc_feature (1)..(25): SEQ ID NO: 2009; WAN024DZX; Start 228; Stop 252
gcatactatgagtgaaggacttctt

SEQ ID NO: 312168 - DNA, 25 bp, Artificial
  probe
  misc_feature (1)..(25): SEQ ID NO: 2009; WAN024DZX; Start 202; Stop 226
atggacaacaacattgaaggtacat

SEQ ID NO: 312169 - DNA, 25 bp, Artificial
  probe
  misc_feature (1)..(25): SEQ ID NO: 2009; WAN024DZX; Start 119; Stop 143
ctgaggtgattgactatacaggtta

SEQ ID NO: 312170 - DNA, 25 bp, Artificial
  probe
  misc_feature (1)..(25): SEQ ID NO: 2009; WAN024DZX; Start 158; Stop 182
gtcttgtggatactcatattcatgg

SEQ ID NO: 312171 - DNA, 25 bp, Artificial
  probe
  misc_feature (1)..(25): SEQ ID NO: 2009; WAN024DZX; Start 157; Stop 181
ggtcttgtggatactcatattcatg

SEQ ID NO: 312172 - DNA, 25 bp, Artificial
  probe
  misc_feature (1)..(25): SEQ ID NO: 2009; WAN024DZX; Start 203; Stop 227
tggacaacaacattgaaggtacatt

SEQ ID NO: 312173 - DNA, 25 bp, Artificial
  probe
  misc_feature (1)..(25): SEQ ID NO: 2009; WAN024DZX; Start 159; Stop 183
tcttgtggatactcatattcatgga

SEQ ID NO: 312174 - DNA, 25 bp, Artificial
  probe
  misc_feature (1)..(25): SEQ ID NO: 2009; WAN024DZX; Start 234; Stop 258
tatgagtgaaggacttcttagtacc

SEQ ID NO: 312175 - DNA, 25 bp, Artificial
  probe
  misc_feature (1)..(25): SEQ ID NO: 2009; WAN024DZX; Start 205; Stop 229
gacaacaacattgaaggtacattgc

SEQ ID NO: 312176 - DNA, 25 bp, Artificial
  probe
  misc_feature (1)..(25): SEQ ID NO: 2009; WAN024DZX; Start 201; Stop 225
gatggacaacaacattgaaggtaca

SEQ ID NO: 312177 - DNA, 25 bp, Artificial
  probe
  misc_feature (1)..(25): SEQ ID NO: 2009; WAN024DZX; Start 200; Stop 224
tgatggacaacaacattgaaggtac

SEQ ID NO: 312178 - DNA, 25 bp, Artificial
  probe
  misc_feature (1)..(25): SEQ ID NO: 2009; WAN024DZX; Start 154; Stop 178
ccaggtcttgtggatactcatattc

SEQ ID NO: 312179 - DNA, 25 bp, Artificial
  probe
  misc_feature (1)..(25): SEQ ID NO: 2009; WAN024DZX; Start 235; Stop 259
atgagtgaaggacttcttagtaccg

SEQ ID NO: 312180 - DNA, 25 bp, Artificial
  probe
  misc_feature (1)..(25): SEQ ID NO: 2009; WAN024DZX; Start 160; Stop 184
cttgtggatactcatattcatggat

SEQ ID NO: 312181 - DNA, 25 bp, Artificial
  probe
  misc_feature (1)..(25): SEQ ID NO: 2009; WAN024DZX; Start 121; Stop 145
gaggtgattgactatacaggttata

SEQ ID NO: 312182 - DNA, 25 bp, Artificial
  probe
  misc_feature (1)..(25): SEQ ID NO: 2009; WAN024DZX; Start 844; Stop 868
gacggagattatatgttgggagaat

SEQ ID NO: 312183 - DNA, 25 bp, Artificial
  probe
  misc_feature (1)..(25): SEQ ID NO: 2009; WAN024DZX; Start 420; Stop 444
aaatccaacttatatgagagacccg

SEQ ID NO: 312184 - DNA, 25 bp, Artificial
  probe
  misc_feature (1)..(25): SEQ ID NO: 2009; WAN024DZX; Start 841; Stop 865
gaagacggagattatatgttgggag

SEQ ID NO: 312185 - DNA, 25 bp, Artificial
  probe
  misc_feature (1)..(25): SEQ ID NO: 2009; WAN024DZX; Start 834; Stop 858
gggattggaagacggagattatatg

SEQ ID NO: 312186 - DNA, 25 bp, Artificial
  probe
  misc_feature (1)..(25): SEQ ID NO: 2009; WAN024DZX; Start 802; Stop 826
atcgctcttatcacagactgtatga

SEQ ID NO: 312187 - DNA, 25 bp, Artificial
  probe
  misc_feature (1)..(25): SEQ ID NO: 2009; WAN024DZX; Start 801; Stop 825
catcgctcttatcacagactgtatg

SEQ ID NO: 312188 - DNA, 25 bp, Artificial
  probe
  misc_feature (1)..(25): SEQ ID NO: 2009; WAN024DZX; Start 279; Stop 303
cacaactttaacagccacttatgag

SEQ ID NO: 312189 - DNA, 25 bp, Artificial
  probe
  misc_feature (1)..(25): SEQ ID NO: 2009; WAN024DZX; Start 843; Stop 867
agacggagattatatgttgggagaa

SEQ ID NO: 312190 - DNA, 25 bp, Artificial
  probe
  misc_feature (1)..(25): SEQ ID NO: 2009; WAN024DZX; Start 842; Stop 866
aagacggagattatatgttgggaga

SEQ ID NO: 312191 - DNA, 25 bp, Artificial
  probe
  misc_feature (1)..(25): SEQ ID NO: 2010; WAN024ES8; Start 209; Stop 233
aagaggaagcagataactacgatgg

SEQ ID NO: 312192 - DNA, 25 bp, Artificial
  probe
  misc_feature (1)..(25): SEQ ID NO: 2010; WAN024ES8; Start 614; Stop 638
ctatcatctcggcttatgctggtat

SEQ ID NO: 312193 - DNA, 25 bp, Artificial
  probe
  misc_feature (1)..(25): SEQ ID NO: 2010; WAN024ES8; Start 218; Stop 242
cagataactacgatggagtggtgat

SEQ ID NO: 312194 - DNA, 25 bp, Artificial
  probe
  misc_feature (1)..(25): SEQ ID NO: 2010; WAN024ES8; Start 615; Stop 639
tatcatctcggcttatgctggtatg

SEQ ID NO: 312195 - DNA, 25 bp, Artificial
  probe
  misc_feature (1)..(25): SEQ ID NO: 2010; WAN024ES8; Start 211; Stop 235
gaggaagcagataactacgatggag

SEQ ID NO: 312196 - DNA, 25 bp, Artificial
  probe
  misc_feature (1)..(25): SEQ ID NO: 2010; WAN024ES8; Start 219; Stop 243
agataactacgatggagtggtgatc

SEQ ID NO: 312197 - DNA, 25 bp, Artificial
  probe
  misc_feature (1)..(25): SEQ ID NO: 2010; WAN024ES8; Start 68; Stop 92
ctgttgtgacgagttcagataatcc

SEQ ID NO: 312198 - DNA, 25 bp, Artificial
  probe
  misc_feature (1)..(25): SEQ ID NO: 2010; WAN024ES8; Start 210; Stop 234
agaggaagcagataactacgatgga

SEQ ID NO: 312199 - DNA, 25 bp, Artificial
  probe
  misc_feature (1)..(25): SEQ ID NO: 2010; WAN024ES8; Start 656; Stop 680
atatgctggatttagaacacttgga

SEQ ID NO: 312200 - DNA, 25 bp, Artificial
  probe
  misc_feature (1)..(25): SEQ ID NO: 2010; WAN024ES8; Start 269; Stop 293
aaacagcctatttccttgataccat

SEQ ID NO: 312201 - DNA, 25 bp, Artificial
  probe
  misc_feature (1)..(25): SEQ ID NO: 2010; WAN024ES8; Start 655; Stop 679
gatatgctggatttagaacacttgg

SEQ ID NO: 312202 - DNA, 25 bp, Artificial
  probe
  misc_feature (1)..(25): SEQ ID NO: 2010; WAN024ES8; Start 208; Stop 232
aaagaggaagcagataactacgatg

SEQ ID NO: 312203 - DNA, 25 bp, Artificial
  probe
  misc_feature (1)..(25): SEQ ID NO: 2010; WAN024ES8; Start 606; Stop 630
tttagtccctatcatctcggcttat

SEQ ID NO: 312204 - DNA, 25 bp, Artificial
  probe
  misc_feature (1)..(25): SEQ ID NO: 2010; WAN024ES8; Start 67; Stop 91
gctgttgtgacgagttcagataatc

SEQ ID NO: 312205 - DNA, 25 bp, Artificial
  probe
  misc_feature (1)..(25): SEQ ID NO: 2010; WAN024ES8; Start 778; Stop 802
gtatcacgatgctttaacggtattg

SEQ ID NO: 312206 - DNA, 25 bp, Artificial
  probe
  misc_feature (1)..(25): SEQ ID NO: 2010; WAN024ES8; Start 657; Stop 681
tatgctggatttagaacacttggac

SEQ ID NO: 312207 - DNA, 25 bp, Artificial
  probe
  misc_feature (1)..(25): SEQ ID NO: 2010; WAN024ES8; Start 648; Stop 672
gctgattgatatgctggatttagaa

SEQ ID NO: 312208 - DNA, 25 bp, Artificial
  probe
  misc_feature (1)..(25): SEQ ID NO: 2010; WAN024ES8; Start 207; Stop 231
taaagaggaagcagataactacgat

SEQ ID NO: 312209 - DNA, 25 bp, Artificial
  probe
  misc_feature (1)..(25): SEQ ID NO: 2010; WAN024ES8; Start 250; Stop 274
ggaaccgatactttagaggaaacag

SEQ ID NO: 312210 - DNA, 25 bp, Artificial
  probe
  misc_feature (1)..(25): SEQ ID NO: 2010; WAN024ES8; Start 206; Stop 230
ttaaagaggaagcagataactacga

SEQ ID NO: 312211 - DNA, 25 bp, Artificial
  probe
  misc_feature (1)..(25): SEQ ID NO: 2010; WAN024ES8; Start 654; Stop 678
tgatatgctggatttagaacacttg

SEQ ID NO: 312212 - DNA, 25 bp, Artificial
  probe
  misc_feature (1)..(25): SEQ ID NO: 2010; WAN024ES8; Start 941; Stop 965
tgaaagactatatggaaggctaact

SEQ ID NO: 312213 - DNA, 25 bp, Artificial
  probe
  misc_feature (1)..(25): SEQ ID NO: 2010; WAN024ES8; Start 305; Stop 329
atatgcctatcgttctaacaggagc

SEQ ID NO: 312214 - DNA, 25 bp, Artificial
  probe
  misc_feature (1)..(25): SEQ ID NO: 2010; WAN024ES8; Start 668; Stop 692
tagaacacttggacggtttgattat

SEQ ID NO: 312215 - DNA, 25 bp, Artificial
  probe
  misc_feature (1)..(25): SEQ ID NO: 2010; WAN024ES8; Start 370; Stop 394
aattacctaagtgctttacgagtgg

SEQ ID NO: 312216 - DNA, 25 bp, Artificial
  probe
  misc_feature (1)..(25): SEQ ID NO: 2010; WAN024ES8; Start 667; Stop 691
ttagaacacttggacggtttgatta

SEQ ID NO: 312217 - DNA, 25 bp, Artificial
  probe
  misc_feature (1)..(25): SEQ ID NO: 2010; WAN024ES8; Start 634; Stop 658
ggtatgacagatgagctgattgata

SEQ ID NO: 312218 - DNA, 25 bp, Artificial
  probe
  misc_feature (1)..(25): SEQ ID NO: 2010; WAN024ES8; Start 214; Stop 238
gaagcagataactacgatggagtgg

SEQ ID NO: 312219 - DNA, 25 bp, Artificial
  probe
  misc_feature (1)..(25): SEQ ID NO: 2010; WAN024ES8; Start 213; Stop 237
ggaagcagataactacgatggagtg

SEQ ID NO: 312220 - DNA, 25 bp, Artificial
  probe
  misc_feature (1)..(25): SEQ ID NO: 2010; WAN024ES8; Start 605; Stop 629
gtttagtccctatcatctcggctta

SEQ ID NO: 312221 - DNA, 25 bp, Artificial
  probe
  misc_feature (1)..(25): SEQ ID NO: 2010; WAN024ES8; Start 251; Stop 275
gaaccgatactttagaggaaacagc

SEQ ID NO: 312222 - DNA, 25 bp, Artificial
  probe
  misc_feature (1)..(25): SEQ ID NO: 2010; WAN024ES8; Start 777; Stop 801
ggtatcacgatgctttaacggtatt

SEQ ID NO: 312223 - DNA, 25 bp, Artificial
  probe
  misc_feature (1)..(25): SEQ ID NO: 2010; WAN024ES8; Start 665; Stop 689
atttagaacacttggacggtttgat

SEQ ID NO: 312224 - DNA, 25 bp, Artificial
  probe
  misc_feature (1)..(25): SEQ ID NO: 2011; WAN024AZN; Start 276; Stop 300
aacagagattccactggtcatcatg

SEQ ID NO: 312225 - DNA, 25 bp, Artificial
  probe
  misc_feature (1)..(25): SEQ ID NO: 2011; WAN024AZN; Start 243; Stop 267
ccaggctttagttgaaaccttgaaa

SEQ ID NO: 312226 - DNA, 25 bp, Artificial
  probe
  misc_feature (1)..(25): SEQ ID NO: 2011; WAN024AZN; Start 275; Stop 299
aaacagagattccactggtcatcat

SEQ ID NO: 312227 - DNA, 25 bp, Artificial
  probe
  misc_feature (1)..(25): SEQ ID NO: 2011; WAN024AZN; Start 187; Stop 211
gatggacctgttatcgaagaagctg

SEQ ID NO: 312228 - DNA, 25 bp, Artificial
  probe
  misc_feature (1)..(25): SEQ ID NO: 2011; WAN024AZN; Start 237; Stop 261
ctctacccaggctttagttgaaacc

SEQ ID NO: 312229 - DNA, 25 bp, Artificial
  probe
  misc_feature (1)..(25): SEQ ID NO: 2011; WAN024AZN; Start 186; Stop 210
agatggacctgttatcgaagaagct

SEQ ID NO: 312230 - DNA, 25 bp, Artificial
  probe
  misc_feature (1)..(25): SEQ ID NO: 2011; WAN024AZN; Start 669; Stop 693
caatgcggtgtcagatggtgttatc

SEQ ID NO: 312231 - DNA, 25 bp, Artificial
  probe
  misc_feature (1)..(25): SEQ ID NO: 2011; WAN024AZN; Start 457; Stop 481
ttagtaagcttgaccacaggaattg

SEQ ID NO: 312232 - DNA, 25 bp, Artificial
  probe
  misc_feature (1)..(25): SEQ ID NO: 2011; WAN024AZN; Start 239; Stop 263
ctacccaggctttagttgaaacctt

SEQ ID NO: 312233 - DNA, 25 bp, Artificial
  probe
  misc_feature (1)..(25): SEQ ID NO: 2011; WAN024AZN; Start 185; Stop 209
cagatggacctgttatcgaagaagc

SEQ ID NO: 312234 - DNA, 25 bp, Artificial
  probe
  misc_feature (1)..(25): SEQ ID NO: 2011; WAN024AZN; Start 184; Stop 208
gcagatggacctgttatcgaagaag

SEQ ID NO: 312235 - DNA, 25 bp, Artificial
  probe
  misc_feature (1)..(25): SEQ ID NO: 2011; WAN024AZN; Start 668; Stop 692
tcaatgcggtgtcagatggtgttat

SEQ ID NO: 312236 - DNA, 25 bp, Artificial
  probe
  misc_feature (1)..(25): SEQ ID NO: 2011; WAN024AZN; Start 247; Stop 271
gctttagttgaaaccttgaaaacca

SEQ ID NO: 312237 - DNA, 25 bp, Artificial
  probe
  misc_feature (1)..(25): SEQ ID NO: 2011; WAN024AZN; Start 677; Stop 701
tgtcagatggtgttatcgtcggttc

SEQ ID NO: 312238 - DNA, 25 bp, Artificial
  probe
  misc_feature (1)..(25): SEQ ID NO: 2011; WAN024AZN; Start 458; Stop 482
tagtaagcttgaccacaggaattga

SEQ ID NO: 312239 - DNA, 25 bp, Artificial
  probe
  misc_feature (1)..(25): SEQ ID NO: 2011; WAN024AZN; Start 240; Stop 264
tacccaggctttagttgaaaccttg

SEQ ID NO: 312240 - DNA, 25 bp, Artificial
  probe
  misc_feature (1)..(25): SEQ ID NO: 2011; WAN024AZN; Start 246; Stop 270
ggctttagttgaaaccttgaaaacc

SEQ ID NO: 312241 - DNA, 25 bp, Artificial
  probe
  misc_feature (1)..(25): SEQ ID NO: 2011; WAN024AZN; Start 236; Stop 260
cctctacccaggctttagttgaaac

SEQ ID NO: 312242 - DNA, 25 bp, Artificial
  probe
  misc_feature (1)..(25): SEQ ID NO: 2011; WAN024AZN; Start 667; Stop 691
ttcaatgcggtgtcagatggtgtta

SEQ ID NO: 312243 - DNA, 25 bp, Artificial
  probe
  misc_feature (1)..(25): SEQ ID NO: 2011; WAN024AZN; Start 248; Stop 272
ctttagttgaaaccttgaaaaccat

SEQ ID NO: 312244 - DNA, 25 bp, Artificial
  probe
  misc_feature (1)..(25): SEQ ID NO: 2011; WAN024AZN; Start 622; Stop 646
gtcttgacaggttttggtgtatcta

SEQ ID NO: 312245 - DNA, 25 bp, Artificial
  probe
  misc_feature (1)..(25): SEQ ID NO: 2011; WAN024AZN; Start 623; Stop 647
tcttgacaggttttggtgtatctag

SEQ ID NO: 312246 - DNA, 25 bp, Artificial
  probe
  misc_feature (1)..(25): SEQ ID NO: 2011; WAN024AZN; Start 628; Stop 652
acaggttttggtgtatctagtcaag

SEQ ID NO: 312247 - DNA, 25 bp, Artificial
  probe
  misc_feature (1)..(25): SEQ ID NO: 2011; WAN024AZN; Start 624; Stop 648
cttgacaggttttggtgtatctagt

SEQ ID NO: 312248 - DNA, 25 bp, Artificial
  probe
  misc_feature (1)..(25): SEQ ID NO: 2011; WAN024AZN; Start 676; Stop 700
gtgtcagatggtgttatcgtcggtt

SEQ ID NO: 312249 - DNA, 25 bp, Artificial
  probe
  misc_feature (1)..(25): SEQ ID NO: 2011; WAN024AZN; Start 242; Stop 266
cccaggctttagttgaaaccttgaa

SEQ ID NO: 312250 - DNA, 25 bp, Artificial
  probe
  misc_feature (1)..(25): SEQ ID NO: 2011; WAN024AZN; Start 238; Stop 262
tctacccaggctttagttgaaacct

SEQ ID NO: 312251 - DNA, 25 bp, Artificial
  probe
  misc_feature (1)..(25): SEQ ID NO: 2011; WAN024AZN; Start 235; Stop 259
acctctacccaggctttagttgaaa

SEQ ID NO: 312252 - DNA, 25 bp, Artificial
  probe
  misc_feature (1)..(25): SEQ ID NO: 2011; WAN024AZN; Start 181; Stop 205
gttgcagatggacctgttatcgaag

SEQ ID NO: 312253 - DNA, 25 bp, Artificial
  probe
  misc_feature (1)..(25): SEQ ID NO: 2011; WAN024AZN; Start 627; Stop 651
gacaggttttggtgtatctagtcaa

SEQ ID NO: 312254 - DNA, 25 bp, Artificial
  probe
  misc_feature (1)..(25): SEQ ID NO: 2011; WAN024AZN; Start 625; Stop 649
ttgacaggttttggtgtatctagtc

SEQ ID NO: 312255 - DNA, 25 bp, Artificial
  probe
  misc_feature (1)..(25): SEQ ID NO: 2011; WAN024AZN; Start 249; Stop 273
tttagttgaaaccttgaaaaccatt

SEQ ID NO: 312256 - DNA, 25 bp, Artificial
  probe
  misc_feature (1)..(25): SEQ ID NO: 2011; WAN024AZN; Start 245; Stop 269
aggctttagttgaaaccttgaaaac

SEQ ID NO: 312257 - DNA, 25 bp, Artificial
  probe
  misc_feature (1)..(25): SEQ ID NO: 2012; WAN024C7A; Start 217; Stop 241
cttatcgaagttactgcctacatcc

SEQ ID NO: 312258 - DNA, 25 bp, Artificial
  probe
  misc_feature (1)..(25): SEQ ID NO: 2012; WAN024C7A; Start 216; Stop 240
ccttatcgaagttactgcctacatc

SEQ ID NO: 312259 - DNA, 25 bp, Artificial
  probe
  misc_feature (1)..(25): SEQ ID NO: 2012; WAN024C7A; Start 208; Stop 232
ttgagcaaccttatcgaagttactg

SEQ ID NO: 312260 - DNA, 25 bp, Artificial
  probe
  misc_feature (1)..(25): SEQ ID NO: 2012; WAN024C7A; Start 215; Stop 239
accttatcgaagttactgcctacat

SEQ ID NO: 312261 - DNA, 25 bp, Artificial
  probe
  misc_feature (1)..(25): SEQ ID NO: 2012; WAN024C7A; Start 213; Stop 237
caaccttatcgaagttactgcctac

SEQ ID NO: 312262 - DNA, 25 bp, Artificial
  probe
  misc_feature (1)..(25): SEQ ID NO: 2012; WAN024C7A; Start 214; Stop 238
aaccttatcgaagttactgcctaca

SEQ ID NO: 312263 - DNA, 25 bp, Artificial
  probe
  misc_feature (1)..(25): SEQ ID NO: 2012; WAN024C7A; Start 169; Stop 193
aaacctaactcagcccttcgtaaat

SEQ ID NO: 312264 - DNA, 25 bp, Artificial
  probe
  misc_feature (1)..(25): SEQ ID NO: 2012; WAN024C7A; Start 170; Stop 194
aacctaactcagcccttcgtaaatt

SEQ ID NO: 312265 - DNA, 25 bp, Artificial
  probe
  misc_feature (1)..(25): SEQ ID NO: 2012; WAN024C7A; Start 171; Stop 195
acctaactcagcccttcgtaaattc

SEQ ID NO: 312266 - DNA, 25 bp, Artificial
  probe
  misc_feature (1)..(25): SEQ ID NO: 2012; WAN024C7A; Start 207; Stop 231
tttgagcaaccttatcgaagttact

SEQ ID NO: 312267 - DNA, 25 bp, Artificial
  probe
  misc_feature (1)..(25): SEQ ID NO: 2012; WAN024C7A; Start 206; Stop 230
gtttgagcaaccttatcgaagttac

SEQ ID NO: 312268 - DNA, 25 bp, Artificial
  probe
  misc_feature (1)..(25): SEQ ID NO: 2012; WAN024C7A; Start 52; Stop 76
aaatctaaatcaccagctttgaacg

SEQ ID NO: 312269 - DNA, 25 bp, Artificial
  probe
  misc_feature (1)..(25): SEQ ID NO: 2012; WAN024C7A; Start 205; Stop 229
cgtttgagcaaccttatcgaagtta

SEQ ID NO: 312270 - DNA, 25 bp, Artificial
  probe
  misc_feature (1)..(25): SEQ ID NO: 2012; WAN024C7A; Start 218; Stop 242
ttatcgaagttactgcctacatccc

SEQ ID NO: 312271 - DNA, 25 bp, Artificial
  probe
  misc_feature (1)..(25): SEQ ID NO: 2012; WAN024C7A; Start 53; Stop 77
aatctaaatcaccagctttgaacgt

SEQ ID NO: 312272 - DNA, 25 bp, Artificial
  probe
  misc_feature (1)..(25): SEQ ID NO: 2012; WAN024C7A; Start 172; Stop 196
cctaactcagcccttcgtaaattcg

SEQ ID NO: 312273 - DNA, 25 bp, Artificial
  probe
  misc_feature (1)..(25): SEQ ID NO: 2012; WAN024C7A; Start 224; Stop 248
aagttactgcctacatcccaggtat

SEQ ID NO: 312274 - DNA, 25 bp, Artificial
  probe
  misc_feature (1)..(25): SEQ ID NO: 2012; WAN024C7A; Start 202; Stop 226
gtacgtttgagcaaccttatcgaag

SEQ ID NO: 312275 - DNA, 25 bp, Artificial
  probe
  misc_feature (1)..(25): SEQ ID NO: 2012; WAN024C7A; Start 219; Stop 243
tatcgaagttactgcctacatccca

SEQ ID NO: 312276 - DNA, 25 bp, Artificial
  probe
  misc_feature (1)..(25): SEQ ID NO: 2012; WAN024C7A; Start 365; Stop 389
atcgtaaacaaggccgttctaaata

SEQ ID NO: 312277 - DNA, 25 bp, Artificial
  probe
  misc_feature (1)..(25): SEQ ID NO: 2012; WAN024C7A; Start 225; Stop 249
agttactgcctacatcccaggtatc

SEQ ID NO: 312278 - DNA, 25 bp, Artificial
  probe
  misc_feature (1)..(25): SEQ ID NO: 2012; WAN024C7A; Start 203; Stop 227
tacgtttgagcaaccttatcgaagt

SEQ ID NO: 312279 - DNA, 25 bp, Artificial
  probe
  misc_feature (1)..(25): SEQ ID NO: 2012; WAN024C7A; Start 212; Stop 236
gcaaccttatcgaagttactgccta

SEQ ID NO: 312280 - DNA, 25 bp, Artificial
  probe
  misc_feature (1)..(25): SEQ ID NO: 2012; WAN024C7A; Start 366; Stop 390
tcgtaaacaaggccgttctaaatac

SEQ ID NO: 312281 - DNA, 25 bp, Artificial
  probe
  misc_feature (1)..(25): SEQ ID NO: 2012; WAN024C7A; Start 201; Stop 225
tgtacgtttgagcaaccttatcgaa

SEQ ID NO: 312282 - DNA, 25 bp, Artificial
  probe
  misc_feature (1)..(25): SEQ ID NO: 2012; WAN024C7A; Start 223; Stop 247
gaagttactgcctacatcccaggta

SEQ ID NO: 312283 - DNA, 25 bp, Artificial
  probe
  misc_feature (1)..(25): SEQ ID NO: 2012; WAN024C7A; Start 173; Stop 197
ctaactcagcccttcgtaaattcgc

SEQ ID NO: 312284 - DNA, 25 bp, Artificial
  probe
  misc_feature (1)..(25): SEQ ID NO: 2012; WAN024C7A; Start 168; Stop 192
aaaacctaactcagcccttcgtaaa

SEQ ID NO: 312285 - DNA, 25 bp, Artificial
  probe
  misc_feature (1)..(25): SEQ ID NO: 2012; WAN024C7A; Start 364; Stop 388
gatcgtaaacaaggccgttctaaat

SEQ ID NO: 312286 - DNA, 25 bp, Artificial
  probe
  misc_feature (1)..(25): SEQ ID NO: 2012; WAN024C7A; Start 71; Stop 95
tgaacgttggttacaatagtcataa

SEQ ID NO: 312287 - DNA, 25 bp, Artificial
  probe
  misc_feature (1)..(25): SEQ ID NO: 2012; WAN024C7A; Start 70; Stop 94
ttgaacgttggttacaatagtcata

SEQ ID NO: 312288 - DNA, 25 bp, Artificial
  probe
  misc_feature (1)..(25): SEQ ID NO: 2012; WAN024C7A; Start 188; Stop 212
gtaaattcgctcgtgtacgtttgag

SEQ ID NO: 312289 - DNA, 25 bp, Artificial
  probe
  misc_feature (1)..(25): SEQ ID NO: 2012; WAN024C7A; Start 382; Stop 406
tctaaatacggtactaaacgtccaa

SEQ ID NO: 312290 - DNA, 25 bp, Artificial
  probe
  misc_feature (1)..(25): SEQ ID NO: 2013; WAN024B5M; Start 178; Stop 202
gccatctcaacttcaactgttattc

SEQ ID NO: 312291 - DNA, 25 bp, Artificial
  probe
  misc_feature (1)..(25): SEQ ID NO: 2013; WAN024B5M; Start 148; Stop 172
aattctatgaccgatattgcccatc

SEQ ID NO: 312292 - DNA, 25 bp, Artificial
  probe
  misc_feature (1)..(25): SEQ ID NO: 2013; WAN024B5M; Start 149; Stop 173
attctatgaccgatattgcccatca

SEQ ID NO: 312293 - DNA, 25 bp, Artificial
  probe
  misc_feature (1)..(25): SEQ ID NO: 2013; WAN024B5M; Start 150; Stop 174
ttctatgaccgatattgcccatcag

SEQ ID NO: 312294 - DNA, 25 bp, Artificial
  probe
  misc_feature (1)..(25): SEQ ID NO: 2013; WAN024B5M; Start 177; Stop 201
ggccatctcaacttcaactgttatt

SEQ ID NO: 312295 - DNA, 25 bp, Artificial
  probe
  misc_feature (1)..(25): SEQ ID NO: 2013; WAN024B5M; Start 147; Stop 171
gaattctatgaccgatattgcccat

SEQ ID NO: 312296 - DNA, 25 bp, Artificial
  probe
  misc_feature (1)..(25): SEQ ID NO: 2013; WAN024B5M; Start 151; Stop 175
tctatgaccgatattgcccatcagc

SEQ ID NO: 312297 - DNA, 25 bp, Artificial
  probe
  misc_feature (1)..(25): SEQ ID NO: 2013; WAN024B5M; Start 32; Stop 56
gctttaagtgctatcactgttcaaa

SEQ ID NO: 312298 - DNA, 25 bp, Artificial
  probe
  misc_feature (1)..(25): SEQ ID NO: 2013; WAN024B5M; Start 31; Stop 55
cgctttaagtgctatcactgttcaa

SEQ ID NO: 312299 - DNA, 25 bp, Artificial
  probe
  misc_feature (1)..(25): SEQ ID NO: 2013; WAN024B5M; Start 152; Stop 176
ctatgaccgatattgcccatcagct

SEQ ID NO: 312300 - DNA, 25 bp, Artificial
  probe
  misc_feature (1)..(25): SEQ ID NO: 2013; WAN024B5M; Start 29; Stop 53
gtcgctttaagtgctatcactgttc

SEQ ID NO: 312301 - DNA, 25 bp, Artificial
  probe
  misc_feature (1)..(25): SEQ ID NO: 2013; WAN024B5M; Start 30; Stop 54
tcgctttaagtgctatcactgttca

SEQ ID NO: 312302 - DNA, 25 bp, Artificial
  probe
  misc_feature (1)..(25): SEQ ID NO: 2013; WAN024B5M; Start 127; Stop 151
gcgcaaaagttaattgaaaagaatt

SEQ ID NO: 312303 - DNA, 25 bp, Artificial
  probe
  misc_feature (1)..(25): SEQ ID NO: 2013; WAN024B5M; Start 28; Stop 52
cgtcgctttaagtgctatcactgtt

SEQ ID NO: 312304 - DNA, 25 bp, Artificial
  probe
  misc_feature (1)..(25): SEQ ID NO: 2013; WAN024B5M; Start 128; Stop 152
cgcaaaagttaattgaaaagaattc

SEQ ID NO: 312305 - DNA, 25 bp, Artificial
  probe
  misc_feature (1)..(25): SEQ ID NO: 2013; WAN024B5M; Start 33; Stop 57
ctttaagtgctatcactgttcaaaa

SEQ ID NO: 312306 - DNA, 25 bp, Artificial
  probe
  misc_feature (1)..(25): SEQ ID NO: 2013; WAN024B5M; Start 11; Stop 35
gaattctccttagaaagcgtcgctt

SEQ ID NO: 312307 - DNA, 25 bp, Artificial
  probe
  misc_feature (1)..(25): SEQ ID NO: 2013; WAN024B5M; Start 25; Stop 49
aagcgtcgctttaagtgctatcact

SEQ ID NO: 312308 - DNA, 25 bp, Artificial
  probe
  misc_feature (1)..(25): SEQ ID NO: 2014; WAN024CNV; Start 39; Stop 63
gcttgtgcagttcgacttaaattta

SEQ ID NO: 312309 - DNA, 25 bp, Artificial
  probe
  misc_feature (1)..(25): SEQ ID NO: 2014; WAN024CNV; Start 42; Stop 66
tgtgcagttcgacttaaatttagaa

SEQ ID NO: 312310 - DNA, 25 bp, Artificial
  probe
  misc_feature (1)..(25): SEQ ID NO: 2014; WAN024CNV; Start 41; Stop 65
ttgtgcagttcgacttaaatttaga

SEQ ID NO: 312311 - DNA, 25 bp, Artificial
  probe
  misc_feature (1)..(25): SEQ ID NO: 2014; WAN024CNV; Start 40; Stop 64
cttgtgcagttcgacttaaatttag

SEQ ID NO: 312312 - DNA, 25 bp, Artificial
  probe
  misc_feature (1)..(25): SEQ ID NO: 2014; WAN024CNV; Start 5; Stop 29
ctattcaactccaggcggaaagatg

SEQ ID NO: 312313 - DNA, 25 bp, Artificial
  probe
  misc_feature (1)..(25): SEQ ID NO: 2014; WAN024CNV; Start 43; Stop 67
gtgcagttcgacttaaatttagaaa

SEQ ID NO: 312314 - DNA, 25 bp, Artificial
  probe
  misc_feature (1)..(25): SEQ ID NO: 2014; WAN024CNV; Start 37; Stop 61
atgcttgtgcagttcgacttaaatt

SEQ ID NO: 312315 - DNA, 25 bp, Artificial
  probe
  misc_feature (1)..(25): SEQ ID NO: 2014; WAN024CNV; Start 6; Stop 30
tattcaactccaggcggaaagatgt

SEQ ID NO: 312316 - DNA, 25 bp, Artificial
  probe
  misc_feature (1)..(25): SEQ ID NO: 2014; WAN024CNV; Start 38; Stop 62
tgcttgtgcagttcgacttaaattt

SEQ ID NO: 312317 - DNA, 25 bp, Artificial
  probe
  misc_feature (1)..(25): SEQ ID NO: 2014; WAN024CNV; Start 36; Stop 60
catgcttgtgcagttcgacttaaat

SEQ ID NO: 312318 - DNA, 25 bp, Artificial
  probe
  misc_feature (1)..(25): SEQ ID NO: 2014; WAN024CNV; Start 4; Stop 28
cctattcaactccaggcggaaagat

SEQ ID NO: 312319 - DNA, 25 bp, Artificial
  probe
  misc_feature (1)..(25): SEQ ID NO: 2014; WAN024CNV; Start 51; Stop 75
cgacttaaatttagaaaaggtgact

SEQ ID NO: 312320 - DNA, 25 bp, Artificial
  probe
  misc_feature (1)..(25): SEQ ID NO: 2014; WAN024CNV; Start 50; Stop 74
tcgacttaaatttagaaaaggtgac

SEQ ID NO: 312321 - DNA, 25 bp, Artificial
  probe
  misc_feature (1)..(25): SEQ ID NO: 2014; WAN024CNV; Start 44; Stop 68
tgcagttcgacttaaatttagaaaa

SEQ ID NO: 312322 - DNA, 25 bp, Artificial
  probe
  misc_feature (1)..(25): SEQ ID NO: 2014; WAN024CNV; Start 45; Stop 69
gcagttcgacttaaatttagaaaag

SEQ ID NO: 312323 - DNA, 25 bp, Artificial
  probe
  misc_feature (1)..(25): SEQ ID NO: 2014; WAN024CNV; Start 48; Stop 72
gttcgacttaaatttagaaaaggtg

SEQ ID NO: 312324 - DNA, 25 bp, Artificial
  probe
  misc_feature (1)..(25): SEQ ID NO: 2014; WAN024CNV; Start 49; Stop 73
ttcgacttaaatttagaaaaggtga

SEQ ID NO: 312325 - DNA, 25 bp, Artificial
  probe
  misc_feature (1)..(25): SEQ ID NO: 2014; WAN024CNV; Start 47; Stop 71
agttcgacttaaatttagaaaaggt

SEQ ID NO: 312326 - DNA, 25 bp, Artificial
  probe
  misc_feature (1)..(25): SEQ ID NO: 2014; WAN024CNV; Start 46; Stop 70
cagttcgacttaaatttagaaaagg

SEQ ID NO: 312327 - DNA, 25 bp, Artificial
  probe
  misc_feature (1)..(25): SEQ ID NO: 2014; WAN024CNV; Start 78; Stop 102
cttgacgaaaacggtgcatcattga

SEQ ID NO: 312328 - DNA, 25 bp, Artificial
  probe
  misc_feature (1)..(25): SEQ ID NO: 2014; WAN024CNV; Start 54; Stop 78
cttaaatttagaaaaggtgactacc

SEQ ID NO: 312329 - DNA, 25 bp, Artificial
  probe
  misc_feature (1)..(25): SEQ ID NO: 2014; WAN024CNV; Start 75; Stop 99
taccttgacgaaaacggtgcatcat

SEQ ID NO: 312330 - DNA, 25 bp, Artificial
  probe
  misc_feature (1)..(25): SEQ ID NO: 2014; WAN024CNV; Start 53; Stop 77
acttaaatttagaaaaggtgactac

SEQ ID NO: 312331 - DNA, 25 bp, Artificial
  probe
  misc_feature (1)..(25): SEQ ID NO: 2014; WAN024CNV; Start 52; Stop 76
gacttaaatttagaaaaggtgacta

SEQ ID NO: 312332 - DNA, 25 bp, Artificial
  probe
  misc_feature (1)..(25): SEQ ID NO: 2014; WAN024CNV; Start 55; Stop 79
ttaaatttagaaaaggtgactacct

SEQ ID NO: 312333 - DNA, 25 bp, Artificial
  probe
  misc_feature (1)..(25): SEQ ID NO: 2015; WAN024G4E; Start 47; Stop 71
tgctcatgctccatcgtaataagaa

SEQ ID NO: 312334 - DNA, 25 bp, Artificial
  probe
  misc_feature (1)..(25): SEQ ID NO: 2015; WAN024G4E; Start 56; Stop 80
tccatcgtaataagaaacccaatga

SEQ ID NO: 312335 - DNA, 25 bp, Artificial
  probe
  misc_feature (1)..(25): SEQ ID NO: 2015; WAN024G4E; Start 55; Stop 79
ctccatcgtaataagaaacccaatg

SEQ ID NO: 312336 - DNA, 25 bp, Artificial
  probe
  misc_feature (1)..(25): SEQ ID NO: 2015; WAN024G4E; Start 54; Stop 78
gctccatcgtaataagaaacccaat

SEQ ID NO: 312337 - DNA, 25 bp, Artificial
  probe
  misc_feature (1)..(25): SEQ ID NO: 2015; WAN024G4E; Start 57; Stop 81
ccatcgtaataagaaacccaatgat

SEQ ID NO: 312338 - DNA, 25 bp, Artificial
  probe
  misc_feature (1)..(25): SEQ ID NO: 2015; WAN024G4E; Start 44; Stop 68
aactgctcatgctccatcgtaataa

SEQ ID NO: 312339 - DNA, 25 bp, Artificial
  probe
  misc_feature (1)..(25): SEQ ID NO: 2015; WAN024G4E; Start 29; Stop 53
ttgataatgggaaagaactgctcat

SEQ ID NO: 312340 - DNA, 25 bp, Artificial
  probe
  misc_feature (1)..(25): SEQ ID NO: 2015; WAN024G4E; Start 28; Stop 52
attgataatgggaaagaactgctca

SEQ ID NO: 312341 - DNA, 25 bp, Artificial
  probe
  misc_feature (1)..(25): SEQ ID NO: 2015; WAN024G4E; Start 46; Stop 70
ctgctcatgctccatcgtaataaga

SEQ ID NO: 312342 - DNA, 25 bp, Artificial
  probe
  misc_feature (1)..(25): SEQ ID NO: 2015; WAN024G4E; Start 438; Stop 462
ggatacccaagttgatttctatgaa

SEQ ID NO: 312343 - DNA, 25 bp, Artificial
  probe
  misc_feature (1)..(25): SEQ ID NO: 2015; WAN024G4E; Start 45; Stop 69
actgctcatgctccatcgtaataag

SEQ ID NO: 312344 - DNA, 25 bp, Artificial
  probe
  misc_feature (1)..(25): SEQ ID NO: 2015; WAN024G4E; Start 43; Stop 67
gaactgctcatgctccatcgtaata

SEQ ID NO: 312345 - DNA, 25 bp, Artificial
  probe
  misc_feature (1)..(25): SEQ ID NO: 2015; WAN024G4E; Start 49; Stop 73
ctcatgctccatcgtaataagaaac

SEQ ID NO: 312346 - DNA, 25 bp, Artificial
  probe
  misc_feature (1)..(25): SEQ ID NO: 2015; WAN024G4E; Start 53; Stop 77
tgctccatcgtaataagaaacccaa

SEQ ID NO: 312347 - DNA, 25 bp, Artificial
  probe
  misc_feature (1)..(25): SEQ ID NO: 2015; WAN024G4E; Start 52; Stop 76
atgctccatcgtaataagaaaccca

SEQ ID NO: 312348 - DNA, 25 bp, Artificial
  probe
  misc_feature (1)..(25): SEQ ID NO: 2015; WAN024G4E; Start 50; Stop 74
tcatgctccatcgtaataagaaacc

SEQ ID NO: 312349 - DNA, 25 bp, Artificial
  probe
  misc_feature (1)..(25): SEQ ID NO: 2015; WAN024G4E; Start 48; Stop 72
gctcatgctccatcgtaataagaaa

SEQ ID NO: 312350 - DNA, 25 bp, Artificial
  probe
  misc_feature (1)..(25): SEQ ID NO: 2015; WAN024G4E; Start 230; Stop 254
cagatttagactggtacacctatgt

SEQ ID NO: 312351 - DNA, 25 bp, Artificial
  probe
  misc_feature (1)..(25): SEQ ID NO: 2015; WAN024G4E; Start 30; Stop 54
tgataatgggaaagaactgctcatg

SEQ ID NO: 312352 - DNA, 25 bp, Artificial
  probe
  misc_feature (1)..(25): SEQ ID NO: 2015; WAN024G4E; Start 217; Stop 241
cctgaatttacaccagatttagact

SEQ ID NO: 312353 - DNA, 25 bp, Artificial
  probe
  misc_feature (1)..(25): SEQ ID NO: 2015; WAN024G4E; Start 216; Stop 240
tcctgaatttacaccagatttagac

SEQ ID NO: 312354 - DNA, 25 bp, Artificial
  probe
  misc_feature (1)..(25): SEQ ID NO: 2015; WAN024G4E; Start 110; Stop 134
gtggtaagctagagagaggagagac

SEQ ID NO: 312355 - DNA, 25 bp, Artificial
  probe
  misc_feature (1)..(25): SEQ ID NO: 2015; WAN024G4E; Start 231; Stop 255
agatttagactggtacacctatgtt

SEQ ID NO: 312356 - DNA, 25 bp, Artificial
  probe
  misc_feature (1)..(25): SEQ ID NO: 2015; WAN024G4E; Start 401; Stop 425
tttcagccaagtttgtttatgatgg

SEQ ID NO: 312357 - DNA, 25 bp, Artificial
  probe
  misc_feature (1)..(25): SEQ ID NO: 2015; WAN024G4E; Start 437; Stop 461
tggatacccaagttgatttctatga

SEQ ID NO: 312358 - DNA, 25 bp, Artificial
  probe
  misc_feature (1)..(25): SEQ ID NO: 2015; WAN024G4E; Start 51; Stop 75
catgctccatcgtaataagaaaccc

SEQ ID NO: 312359 - DNA, 25 bp, Artificial
  probe
  misc_feature (1)..(25): SEQ ID NO: 2015; WAN024G4E; Start 232; Stop 256
gatttagactggtacacctatgttt

SEQ ID NO: 312360 - DNA, 25 bp, Artificial
  probe
  misc_feature (1)..(25): SEQ ID NO: 2015; WAN024G4E; Start 442; Stop 466
acccaagttgatttctatgaataac

SEQ ID NO: 312361 - DNA, 25 bp, Artificial
  probe
  misc_feature (1)..(25): SEQ ID NO: 2015; WAN024G4E; Start 215; Stop 239
ttcctgaatttacaccagatttaga

SEQ ID NO: 312362 - DNA, 25 bp, Artificial
  probe
  misc_feature (1)..(25): SEQ ID NO: 2015; WAN024G4E; Start 31; Stop 55
gataatgggaaagaactgctcatgc

SEQ ID NO: 312363 - DNA, 25 bp, Artificial
  probe
  misc_feature (1)..(25): SEQ ID NO: 2015; WAN024G4E; Start 27; Stop 51
cattgataatgggaaagaactgctc

SEQ ID NO: 312364 - DNA, 25 bp, Artificial
  probe
  misc_feature (1)..(25): SEQ ID NO: 2015; WAN024G4E; Start 25; Stop 49
tacattgataatgggaaagaactgc

SEQ ID NO: 312365 - DNA, 25 bp, Artificial
  probe
  misc_feature (1)..(25): SEQ ID NO: 2015; WAN024G4E; Start 26; Stop 50
acattgataatgggaaagaactgct

SEQ ID NO: 312366 - DNA, 25 bp, Artificial
  probe
  misc_feature (1)..(25): SEQ ID NO: 2016; WAN024EZH; Start 136; Stop 160
cctagtcagattatcgagtcaatgg

SEQ ID NO: 312367 - DNA, 25 bp, Artificial
  probe
  misc_feature (1)..(25): SEQ ID NO: 2016; WAN024EZH; Start 131; Stop 155
aattgcctagtcagattatcgagtc

SEQ ID NO: 312368 - DNA, 25 bp, Artificial
  probe
  misc_feature (1)..(25): SEQ ID NO: 2016; WAN024EZH; Start 130; Stop 154
gaattgcctagtcagattatcgagt

SEQ ID NO: 312369 - DNA, 25 bp, Artificial
  probe
  misc_feature (1)..(25): SEQ ID NO: 2016; WAN024EZH; Start 135; Stop 159
gcctagtcagattatcgagtcaatg

SEQ ID NO: 312370 - DNA, 25 bp, Artificial
  probe
  misc_feature (1)..(25): SEQ ID NO: 2016; WAN024EZH; Start 129; Stop 153
ggaattgcctagtcagattatcgag

SEQ ID NO: 312371 - DNA, 25 bp, Artificial
  probe
  misc_feature (1)..(25): SEQ ID NO: 2016; WAN024EZH; Start 134; Stop 158
tgcctagtcagattatcgagtcaat

SEQ ID NO: 312372 - DNA, 25 bp, Artificial
  probe
  misc_feature (1)..(25): SEQ ID NO: 2016; WAN024EZH; Start 132; Stop 156
attgcctagtcagattatcgagtca

SEQ ID NO: 312373 - DNA, 25 bp, Artificial
  probe
  misc_feature (1)..(25): SEQ ID NO: 2016; WAN024EZH; Start 97; Stop 121
atgattaagacggatttggaagagt

SEQ ID NO: 312374 - DNA, 25 bp, Artificial
  probe
  misc_feature (1)..(25): SEQ ID NO: 2016; WAN024EZH; Start 98; Stop 122
tgattaagacggatttggaagagtt

SEQ ID NO: 312375 - DNA, 25 bp, Artificial
  probe
  misc_feature (1)..(25): SEQ ID NO: 2016; WAN024EZH; Start 95; Stop 119
agatgattaagacggatttggaaga

SEQ ID NO: 312376 - DNA, 25 bp, Artificial
  probe
  misc_feature (1)..(25): SEQ ID NO: 2016; WAN024EZH; Start 96; Stop 120
gatgattaagacggatttggaagag

SEQ ID NO: 312377 - DNA, 25 bp, Artificial
  probe
  misc_feature (1)..(25): SEQ ID NO: 2016; WAN024EZH; Start 99; Stop 123
gattaagacggatttggaagagttt

SEQ ID NO: 312378 - DNA, 25 bp, Artificial
  probe
  misc_feature (1)..(25): SEQ ID NO: 2016; WAN024EZH; Start 462; Stop 486
aaagcctatcaaatcccatctccta

SEQ ID NO: 312379 - DNA, 25 bp, Artificial
  probe
  misc_feature (1)..(25): SEQ ID NO: 2016; WAN024EZH; Start 101; Stop 125
ttaagacggatttggaagagtttca

SEQ ID NO: 312380 - DNA, 25 bp, Artificial
  probe
  misc_feature (1)..(25): SEQ ID NO: 2016; WAN024EZH; Start 94; Stop 118
aagatgattaagacggatttggaag

SEQ ID NO: 312381 - DNA, 25 bp, Artificial
  probe
  misc_feature (1)..(25): SEQ ID NO: 2016; WAN024EZH; Start 133; Stop 157
ttgcctagtcagattatcgagtcaa

SEQ ID NO: 312382 - DNA, 25 bp, Artificial
  probe
  misc_feature (1)..(25): SEQ ID NO: 2016; WAN024EZH; Start 100; Stop 124
attaagacggatttggaagagtttc

SEQ ID NO: 312383 - DNA, 25 bp, Artificial
  probe
  misc_feature (1)..(25): SEQ ID NO: 2016; WAN024EZH; Start 408; Stop 432
aagcgaacaagactttgatttacag

SEQ ID NO: 312384 - DNA, 25 bp, Artificial
  probe
  misc_feature (1)..(25): SEQ ID NO: 2016; WAN024EZH; Start 102; Stop 126
taagacggatttggaagagtttcaa

SEQ ID NO: 312385 - DNA, 25 bp, Artificial
  probe
  misc_feature (1)..(25): SEQ ID NO: 2016; WAN024EZH; Start 407; Stop 431
caagcgaacaagactttgatttaca

SEQ ID NO: 312386 - DNA, 25 bp, Artificial
  probe
  misc_feature (1)..(25): SEQ ID NO: 2016; WAN024EZH; Start 93; Stop 117
caagatgattaagacggatttggaa

SEQ ID NO: 312387 - DNA, 25 bp, Artificial
  probe
  misc_feature (1)..(25): SEQ ID NO: 2016; WAN024EZH; Start 406; Stop 430
ccaagcgaacaagactttgatttac

SEQ ID NO: 312388 - DNA, 25 bp, Artificial
  probe
  misc_feature (1)..(25): SEQ ID NO: 2016; WAN024EZH; Start 468; Stop 492
tatcaaatcccatctcctagaccag

SEQ ID NO: 312389 - DNA, 25 bp, Artificial
  probe
  misc_feature (1)..(25): SEQ ID NO: 2016; WAN024EZH; Start 467; Stop 491
ctatcaaatcccatctcctagacca

SEQ ID NO: 312390 - DNA, 25 bp, Artificial
  probe
  misc_feature (1)..(25): SEQ ID NO: 2016; WAN024EZH; Start 463; Stop 487
aagcctatcaaatcccatctcctag

SEQ ID NO: 312391 - DNA, 25 bp, Artificial
  probe
  misc_feature (1)..(25): SEQ ID NO: 2016; WAN024EZH; Start 658; Stop 682
attcggacttataccaatgcctttg

SEQ ID NO: 312392 - DNA, 25 bp, Artificial
  probe
  misc_feature (1)..(25): SEQ ID NO: 2016; WAN024EZH; Start 405; Stop 429
accaagcgaacaagactttgattta

SEQ ID NO: 312393 - DNA, 25 bp, Artificial
  probe
  misc_feature (1)..(25): SEQ ID NO: 2016; WAN024EZH; Start 411; Stop 435
cgaacaagactttgatttacaggtc

SEQ ID NO: 312394 - DNA, 25 bp, Artificial
  probe
  misc_feature (1)..(25): SEQ ID NO: 2016; WAN024EZH; Start 466; Stop 490
cctatcaaatcccatctcctagacc

SEQ ID NO: 312395 - DNA, 25 bp, Artificial
  probe
  misc_feature (1)..(25): SEQ ID NO: 2016; WAN024EZH; Start 409; Stop 433
agcgaacaagactttgatttacagg

SEQ ID NO: 312396 - DNA, 25 bp, Artificial
  probe
  misc_feature (1)..(25): SEQ ID NO: 2016; WAN024EZH; Start 126; Stop 150
aagggaattgcctagtcagattatc

SEQ ID NO: 312397 - DNA, 25 bp, Artificial
  probe
  misc_feature (1)..(25): SEQ ID NO: 2016; WAN024EZH; Start 410; Stop 434
gcgaacaagactttgatttacaggt

SEQ ID NO: 312398 - DNA, 25 bp, Artificial
  probe
  misc_feature (1)..(25): SEQ ID NO: 2016; WAN024EZH; Start 125; Stop 149
aaagggaattgcctagtcagattat

SEQ ID NO: 312399 - DNA, 25 bp, Artificial
  probe
  misc_feature (1)..(25): SEQ ID NO: 2017; WAN024FD2; Start 118; Stop 142
atgattatttccttactttacgccc

SEQ ID NO: 312400 - DNA, 25 bp, Artificial
  probe
  misc_feature (1)..(25): SEQ ID NO: 2017; WAN024FD2; Start 21; Stop 45
gctccctctctctaaaccaattata

SEQ ID NO: 312401 - DNA, 25 bp, Artificial
  probe
  misc_feature (1)..(25): SEQ ID NO: 2017; WAN024FD2; Start 20; Stop 44
tgctccctctctctaaaccaattat

SEQ ID NO: 312402 - DNA, 25 bp, Artificial
  probe
  misc_feature (1)..(25): SEQ ID NO: 2017; WAN024FD2; Start 36; Stop 60
accaattatactaccaatgactact

SEQ ID NO: 312403 - DNA, 25 bp, Artificial
  probe
  misc_feature (1)..(25): SEQ ID NO: 2017; WAN024FD2; Start 37; Stop 61
ccaattatactaccaatgactactg

SEQ ID NO: 312404 - DNA, 25 bp, Artificial
  probe
  misc_feature (1)..(25): SEQ ID NO: 2017; WAN024FD2; Start 19; Stop 43
ttgctccctctctctaaaccaatta

SEQ ID NO: 312405 - DNA, 25 bp, Artificial
  probe
  misc_feature (1)..(25): SEQ ID NO: 2017; WAN024FD2; Start 23; Stop 47
tccctctctctaaaccaattatact

SEQ ID NO: 312406 - DNA, 25 bp, Artificial
  probe
  misc_feature (1)..(25): SEQ ID NO: 2017; WAN024FD2; Start 17; Stop 41
atttgctccctctctctaaaccaat

SEQ ID NO: 312407 - DNA, 25 bp, Artificial
  probe
  misc_feature (1)..(25): SEQ ID NO: 2017; WAN024FD2; Start 22; Stop 46
ctccctctctctaaaccaattatac

SEQ ID NO: 312408 - DNA, 25 bp, Artificial
  probe
  misc_feature (1)..(25): SEQ ID NO: 2017; WAN024FD2; Start 18; Stop 42
tttgctccctctctctaaaccaatt

SEQ ID NO: 312409 - DNA, 25 bp, Artificial
  probe
  misc_feature (1)..(25): SEQ ID NO: 2017; WAN024FD2; Start 35; Stop 59
aaccaattatactaccaatgactac

SEQ ID NO: 312410 - DNA, 25 bp, Artificial
  probe
  misc_feature (1)..(25): SEQ ID NO: 2017; WAN024FD2; Start 117; Stop 141
catgattatttccttactttacgcc

SEQ ID NO: 312411 - DNA, 25 bp, Artificial
  probe
  misc_feature (1)..(25): SEQ ID NO: 2017; WAN024FD2; Start 16; Stop 40
gatttgctccctctctctaaaccaa

SEQ ID NO: 312412 - DNA, 25 bp, Artificial
  probe
  misc_feature (1)..(25): SEQ ID NO: 2017; WAN024FD2; Start 65; Stop 89
aaacaatcctgacaactatttcaat

SEQ ID NO: 312413 - DNA, 25 bp, Artificial
  probe
  misc_feature (1)..(25): SEQ ID NO: 2017; WAN024FD2; Start 38; Stop 62
caattatactaccaatgactactga

SEQ ID NO: 312414 - DNA, 25 bp, Artificial
  probe
  misc_feature (1)..(25): SEQ ID NO: 2017; WAN024FD2; Start 102; Stop 126
aagactagtggctgtcatgattatt

SEQ ID NO: 312415 - DNA, 25 bp, Artificial
  probe
  misc_feature (1)..(25): SEQ ID NO: 2017; WAN024FD2; Start 24; Stop 48
ccctctctctaaaccaattatacta

SEQ ID NO: 312416 - DNA, 25 bp, Artificial
  probe
  misc_feature (1)..(25): SEQ ID NO: 2017; WAN024FD2; Start 101; Stop 125
caagactagtggctgtcatgattat

SEQ ID NO: 312417 - DNA, 25 bp, Artificial
  probe
  misc_feature (1)..(25): SEQ ID NO: 2017; WAN024FD2; Start 119; Stop 143
tgattatttccttactttacgcccc

SEQ ID NO: 312418 - DNA, 25 bp, Artificial
  probe
  misc_feature (1)..(25): SEQ ID NO: 2017; WAN024FD2; Start 66; Stop 90
aacaatcctgacaactatttcaata

SEQ ID NO: 312419 - DNA, 25 bp, Artificial
  probe
  misc_feature (1)..(25): SEQ ID NO: 2017; WAN024FD2; Start 54; Stop 78
gactactgataaaacaatcctgaca

SEQ ID NO: 312420 - DNA, 25 bp, Artificial
  probe
  misc_feature (1)..(25): SEQ ID NO: 2017; WAN024FD2; Start 53; Stop 77
tgactactgataaaacaatcctgac

SEQ ID NO: 312421 - DNA, 25 bp, Artificial
  probe
  misc_feature (1)..(25): SEQ ID NO: 2017; WAN024FD2; Start 27; Stop 51
tctctctaaaccaattatactacca

SEQ ID NO: 312422 - DNA, 25 bp, Artificial
  probe
  misc_feature (1)..(25): SEQ ID NO: 2017; WAN024FD2; Start 120; Stop 144
gattatttccttactttacgccccg

SEQ ID NO: 312423 - DNA, 25 bp, Artificial
  probe
  misc_feature (1)..(25): SEQ ID NO: 2017; WAN024FD2; Start 67; Stop 91
acaatcctgacaactatttcaatat

SEQ ID NO: 312424 - DNA, 25 bp, Artificial
  probe
  misc_feature (1)..(25): SEQ ID NO: 2017; WAN024FD2; Start 58; Stop 82
actgataaaacaatcctgacaacta

SEQ ID NO: 312425 - DNA, 25 bp, Artificial
  probe
  misc_feature (1)..(25): SEQ ID NO: 2017; WAN024FD2; Start 57; Stop 81
tactgataaaacaatcctgacaact

SEQ ID NO: 312426 - DNA, 25 bp, Artificial
  probe
  misc_feature (1)..(25): SEQ ID NO: 2017; WAN024FD2; Start 55; Stop 79
actactgataaaacaatcctgacaa

SEQ ID NO: 312427 - DNA, 25 bp, Artificial
  probe
  misc_feature (1)..(25): SEQ ID NO: 2017; WAN024FD2; Start 56; Stop 80
ctactgataaaacaatcctgacaac

SEQ ID NO: 312428 - DNA, 25 bp, Artificial
  probe
  misc_feature (1)..(25): SEQ ID NO: 2017; WAN024FD2; Start 49; Stop 73
ccaatgactactgataaaacaatcc

SEQ ID NO: 312429 - DNA, 25 bp, Artificial
  probe
  misc_feature (1)..(25): SEQ ID NO: 2017; WAN024FD2; Start 110; Stop 134
tggctgtcatgattatttccttact

SEQ ID NO: 312430 - DNA, 25 bp, Artificial
  probe
  misc_feature (1)..(25): SEQ ID NO: 2017; WAN024FD2; Start 109; Stop 133
gtggctgtcatgattatttccttac

SEQ ID NO: 312431 - DNA, 25 bp, Artificial
  probe
  misc_feature (1)..(25): SEQ ID NO: 2017; WAN024FD2; Start 108; Stop 132
agtggctgtcatgattatttcctta

SEQ ID NO: 312432 - DNA, 25 bp, Artificial
  probe
  misc_feature (1)..(25): SEQ ID NO: 2018; WAN024FGV; Start 207; Stop 231
cattacatcgcttcctctctatctt

SEQ ID NO: 312433 - DNA, 25 bp, Artificial
  probe
  misc_feature (1)..(25): SEQ ID NO: 2018; WAN024FGV; Start 208; Stop 232
attacatcgcttcctctctatcttc

SEQ ID NO: 312434 - DNA, 25 bp, Artificial
  probe
  misc_feature (1)..(25): SEQ ID NO: 2018; WAN024FGV; Start 209; Stop 233
ttacatcgcttcctctctatcttcc

SEQ ID NO: 312435 - DNA, 25 bp, Artificial
  probe
  misc_feature (1)..(25): SEQ ID NO: 2018; WAN024FGV; Start 206; Stop 230
ccattacatcgcttcctctctatct

SEQ ID NO: 312436 - DNA, 25 bp, Artificial
  probe
  misc_feature (1)..(25): SEQ ID NO: 2018; WAN024FGV; Start 210; Stop 234
tacatcgcttcctctctatcttcca

SEQ ID NO: 312437 - DNA, 25 bp, Artificial
  probe
  misc_feature (1)..(25): SEQ ID NO: 2018; WAN024FGV; Start 212; Stop 236
catcgcttcctctctatcttccaag

SEQ ID NO: 312438 - DNA, 25 bp, Artificial
  probe
  misc_feature (1)..(25): SEQ ID NO: 2018; WAN024FGV; Start 49; Stop 73
gctgctgcatcaatatcaacaataa

SEQ ID NO: 312439 - DNA, 25 bp, Artificial
  probe
  misc_feature (1)..(25): SEQ ID NO: 2018; WAN024FGV; Start 236; Stop 260
gtttcgcacttcgtattattccata

SEQ ID NO: 312440 - DNA, 25 bp, Artificial
  probe
  misc_feature (1)..(25): SEQ ID NO: 2018; WAN024FGV; Start 205; Stop 229
gccattacatcgcttcctctctatc

SEQ ID NO: 312441 - DNA, 25 bp, Artificial
  probe
  misc_feature (1)..(25): SEQ ID NO: 2018; WAN024FGV; Start 120; Stop 144
atttaattcaccatttctctgctcg

SEQ ID NO: 312442 - DNA, 25 bp, Artificial
  probe
  misc_feature (1)..(25): SEQ ID NO: 2018; WAN024FGV; Start 100; Stop 124
gcattactcacgccaattacattta

SEQ ID NO: 312443 - DNA, 25 bp, Artificial
  probe
  misc_feature (1)..(25): SEQ ID NO: 2018; WAN024FGV; Start 158; Stop 182
tgacagagcttgttccaatatctag

SEQ ID NO: 312444 - DNA, 25 bp, Artificial
  probe
  misc_feature (1)..(25): SEQ ID NO: 2018; WAN024FGV; Start 213; Stop 237
atcgcttcctctctatcttccaagt

SEQ ID NO: 312445 - DNA, 25 bp, Artificial
  probe
  misc_feature (1)..(25): SEQ ID NO: 2018; WAN024FGV; Start 157; Stop 181
ttgacagagcttgttccaatatcta

SEQ ID NO: 312446 - DNA, 25 bp, Artificial
  probe
  misc_feature (1)..(25): SEQ ID NO: 2018; WAN024FGV; Start 211; Stop 235
acatcgcttcctctctatcttccaa

SEQ ID NO: 312447 - DNA, 25 bp, Artificial
  probe
  misc_feature (1)..(25): SEQ ID NO: 2018; WAN024FGV; Start 217; Stop 241
cttcctctctatcttccaagtttcg

SEQ ID NO: 312448 - DNA, 25 bp, Artificial
  probe
  misc_feature (1)..(25): SEQ ID NO: 2018; WAN024FGV; Start 118; Stop 142
acatttaattcaccatttctctgct

SEQ ID NO: 312449 - DNA, 25 bp, Artificial
  probe
  misc_feature (1)..(25): SEQ ID NO: 2018; WAN024FGV; Start 156; Stop 180
cttgacagagcttgttccaatatct

SEQ ID NO: 312450 - DNA, 25 bp, Artificial
  probe
  misc_feature (1)..(25): SEQ ID NO: 2018; WAN024FGV; Start 216; Stop 240
gcttcctctctatcttccaagtttc

SEQ ID NO: 312451 - DNA, 25 bp, Artificial
  probe
  misc_feature (1)..(25): SEQ ID NO: 2018; WAN024FGV; Start 214; Stop 238
tcgcttcctctctatcttccaagtt

SEQ ID NO: 312452 - DNA, 25 bp, Artificial
  probe
  misc_feature (1)..(25): SEQ ID NO: 2018; WAN024FGV; Start 119; Stop 143
catttaattcaccatttctctgctc

SEQ ID NO: 312453 - DNA, 25 bp, Artificial
  probe
  misc_feature (1)..(25): SEQ ID NO: 2018; WAN024FGV; Start 50; Stop 74
ctgctgcatcaatatcaacaataat

SEQ ID NO: 312454 - DNA, 25 bp, Artificial
  probe
  misc_feature (1)..(25): SEQ ID NO: 2018; WAN024FGV; Start 73; Stop 97
attccatcctttacacctttacttt

SEQ ID NO: 312455 - DNA, 25 bp, Artificial
  probe
  misc_feature (1)..(25): SEQ ID NO: 2018; WAN024FGV; Start 235; Stop 259
agtttcgcacttcgtattattccat

SEQ ID NO: 312456 - DNA, 25 bp, Artificial
  probe
  misc_feature (1)..(25): SEQ ID NO: 2018; WAN024FGV; Start 121; Stop 145
tttaattcaccatttctctgctcgg

SEQ ID NO: 312457 - DNA, 25 bp, Artificial
  probe
  misc_feature (1)..(25): SEQ ID NO: 2018; WAN024FGV; Start 67; Stop 91
acaataattccatcctttacacctt

SEQ ID NO: 312458 - DNA, 25 bp, Artificial
  probe
  misc_feature (1)..(25): SEQ ID NO: 2018; WAN024FGV; Start 66; Stop 90
aacaataattccatcctttacacct

SEQ ID NO: 312459 - DNA, 25 bp, Artificial
  probe
  misc_feature (1)..(25): SEQ ID NO: 2018; WAN024FGV; Start 65; Stop 89
caacaataattccatcctttacacc

SEQ ID NO: 312460 - DNA, 25 bp, Artificial
  probe
  misc_feature (1)..(25): SEQ ID NO: 2018; WAN024FGV; Start 155; Stop 179
ccttgacagagcttgttccaatatc

SEQ ID NO: 312461 - DNA, 25 bp, Artificial
  probe
  misc_feature (1)..(25): SEQ ID NO: 2018; WAN024FGV; Start 72; Stop 96
aattccatcctttacacctttactt

SEQ ID NO: 312462 - DNA, 25 bp, Artificial
  probe
  misc_feature (1)..(25): SEQ ID NO: 2018; WAN024FGV; Start 101; Stop 125
cattactcacgccaattacatttaa

SEQ ID NO: 312463 - DNA, 25 bp, Artificial
  probe
  misc_feature (1)..(25): SEQ ID NO: 2018; WAN024FGV; Start 51; Stop 75
tgctgcatcaatatcaacaataatt

SEQ ID NO: 312464 - DNA, 25 bp, Artificial
  probe
  misc_feature (1)..(25): SEQ ID NO: 2018; WAN024FGV; Start 117; Stop 141
tacatttaattcaccatttctctgc

SEQ ID NO: 312465 - DNA, 25 bp, Artificial
  probe
  misc_feature (1)..(25): SEQ ID NO: 2019; WAN024FHG; Start 13; Stop 37
atagaaggaacgacactcaagactt

SEQ ID NO: 312466 - DNA, 25 bp, Artificial
  probe
  misc_feature (1)..(25): SEQ ID NO: 2019; WAN024FHG; Start 12; Stop 36
gatagaaggaacgacactcaagact

SEQ ID NO: 312467 - DNA, 25 bp, Artificial
  probe
  misc_feature (1)..(25): SEQ ID NO: 2019; WAN024FHG; Start 162; Stop 186
agttaccataggatactccaatctt

SEQ ID NO: 312468 - DNA, 25 bp, Artificial
  probe
  misc_feature (1)..(25): SEQ ID NO: 2019; WAN024FHG; Start 161; Stop 185
aagttaccataggatactccaatct

SEQ ID NO: 312469 - DNA, 25 bp, Artificial
  probe
  misc_feature (1)..(25): SEQ ID NO: 2019; WAN024FHG; Start 11; Stop 35
cgatagaaggaacgacactcaagac

SEQ ID NO: 312470 - DNA, 25 bp, Artificial
  probe
  misc_feature (1)..(25): SEQ ID NO: 2019; WAN024FHG; Start 115; Stop 139
ccgacttgtagttgtttacctgtaa

SEQ ID NO: 312471 - DNA, 25 bp, Artificial
  probe
  misc_feature (1)..(25): SEQ ID NO: 2019; WAN024FHG; Start 14; Stop 38
tagaaggaacgacactcaagacttt

SEQ ID NO: 312472 - DNA, 25 bp, Artificial
  probe
  misc_feature (1)..(25): SEQ ID NO: 2019; WAN024FHG; Start 118; Stop 142
acttgtagttgtttacctgtaaagc

SEQ ID NO: 312473 - DNA, 25 bp, Artificial
  probe
  misc_feature (1)..(25): SEQ ID NO: 2019; WAN024FHG; Start 116; Stop 140
cgacttgtagttgtttacctgtaaa

SEQ ID NO: 312474 - DNA, 25 bp, Artificial
  probe
  misc_feature (1)..(25): SEQ ID NO: 2019; WAN024FHG; Start 122; Stop 146
gtagttgtttacctgtaaagctcac

SEQ ID NO: 312475 - DNA, 25 bp, Artificial
  probe
  misc_feature (1)..(25): SEQ ID NO: 2019; WAN024FHG; Start 121; Stop 145
tgtagttgtttacctgtaaagctca

SEQ ID NO: 312476 - DNA, 25 bp, Artificial
  probe
  misc_feature (1)..(25): SEQ ID NO: 2019; WAN024FHG; Start 120; Stop 144
ttgtagttgtttacctgtaaagctc

SEQ ID NO: 312477 - DNA, 25 bp, Artificial
  probe
  misc_feature (1)..(25): SEQ ID NO: 2019; WAN024FHG; Start 119; Stop 143
cttgtagttgtttacctgtaaagct

SEQ ID NO: 312478 - DNA, 25 bp, Artificial
  probe
  misc_feature (1)..(25): SEQ ID NO: 2019; WAN024FHG; Start 123; Stop 147
tagttgtttacctgtaaagctcaca

SEQ ID NO: 312479 - DNA, 25 bp, Artificial
  probe
  misc_feature (1)..(25): SEQ ID NO: 2019; WAN024FHG; Start 114; Stop 138
gccgacttgtagttgtttacctgta

SEQ ID NO: 312480 - DNA, 25 bp, Artificial
  probe
  misc_feature (1)..(25): SEQ ID NO: 2019; WAN024FHG; Start 117; Stop 141
gacttgtagttgtttacctgtaaag

SEQ ID NO: 312481 - DNA, 25 bp, Artificial
  probe
  misc_feature (1)..(25): SEQ ID NO: 2019; WAN024FHG; Start 163; Stop 187
gttaccataggatactccaatcttt

SEQ ID NO: 312482 - DNA, 25 bp, Artificial
  probe
  misc_feature (1)..(25): SEQ ID NO: 2019; WAN024FHG; Start 160; Stop 184
aaagttaccataggatactccaatc

SEQ ID NO: 312483 - DNA, 25 bp, Artificial
  probe
  misc_feature (1)..(25): SEQ ID NO: 2019; WAN024FHG; Start 154; Stop 178
ccgagaaaagttaccataggatact

SEQ ID NO: 312484 - DNA, 25 bp, Artificial
  probe
  misc_feature (1)..(25): SEQ ID NO: 2019; WAN024FHG; Start 10; Stop 34
tcgatagaaggaacgacactcaaga

SEQ ID NO: 312485 - DNA, 25 bp, Artificial
  probe
  misc_feature (1)..(25): SEQ ID NO: 2019; WAN024FHG; Start 155; Stop 179
cgagaaaagttaccataggatactc

SEQ ID NO: 312486 - DNA, 25 bp, Artificial
  probe
  misc_feature (1)..(25): SEQ ID NO: 2019; WAN024FHG; Start 136; Stop 160
gtaaagctcacaggatttccgagaa

SEQ ID NO: 312487 - DNA, 25 bp, Artificial
  probe
  misc_feature (1)..(25): SEQ ID NO: 2019; WAN024FHG; Start 153; Stop 177
tccgagaaaagttaccataggatac

SEQ ID NO: 312488 - DNA, 25 bp, Artificial
  probe
  misc_feature (1)..(25): SEQ ID NO: 2019; WAN024FHG; Start 15; Stop 39
agaaggaacgacactcaagactttt

SEQ ID NO: 312489 - DNA, 25 bp, Artificial
  probe
  misc_feature (1)..(25): SEQ ID NO: 2019; WAN024FHG; Start 152; Stop 176
ttccgagaaaagttaccataggata

SEQ ID NO: 312490 - DNA, 25 bp, Artificial
  probe
  misc_feature (1)..(25): SEQ ID NO: 2019; WAN024FHG; Start 137; Stop 161
taaagctcacaggatttccgagaaa

SEQ ID NO: 312491 - DNA, 25 bp, Artificial
  probe
  misc_feature (1)..(25): SEQ ID NO: 2019; WAN024FHG; Start 157; Stop 181
agaaaagttaccataggatactcca

SEQ ID NO: 312492 - DNA, 25 bp, Artificial
  probe
  misc_feature (1)..(25): SEQ ID NO: 2019; WAN024FHG; Start 151; Stop 175
tttccgagaaaagttaccataggat

SEQ ID NO: 312493 - DNA, 25 bp, Artificial
  probe
  misc_feature (1)..(25): SEQ ID NO: 2019; WAN024FHG; Start 150; Stop 174
atttccgagaaaagttaccatagga

SEQ ID NO: 312494 - DNA, 25 bp, Artificial
  probe
  misc_feature (1)..(25): SEQ ID NO: 2019; WAN024FHG; Start 147; Stop 171
aggatttccgagaaaagttaccata

SEQ ID NO: 312495 - DNA, 25 bp, Artificial
  probe
  misc_feature (1)..(25): SEQ ID NO: 2019; WAN024FHG; Start 156; Stop 180
gagaaaagttaccataggatactcc

SEQ ID NO: 312496 - DNA, 25 bp, Artificial
  probe
  misc_feature (1)..(25): SEQ ID NO: 2019; WAN024FHG; Start 149; Stop 173
gatttccgagaaaagttaccatagg

SEQ ID NO: 312497 - DNA, 25 bp, Artificial
  probe
  misc_feature (1)..(25): SEQ ID NO: 2019; WAN024FHG; Start 148; Stop 172
ggatttccgagaaaagttaccatag

SEQ ID NO: 312498 - DNA, 25 bp, Artificial
  probe
  misc_feature (1)..(25): SEQ ID NO: 2020; WAN024C8Q; Start 189; Stop 213
tcaaccactcaacattatttacctg

SEQ ID NO: 312499 - DNA, 25 bp, Artificial
  probe
  misc_feature (1)..(25): SEQ ID NO: 2020; WAN024C8Q; Start 188; Stop 212
atcaaccactcaacattatttacct

SEQ ID NO: 312500 - DNA, 25 bp, Artificial
  probe
  misc_feature (1)..(25): SEQ ID NO: 2020; WAN024C8Q; Start 250; Stop 274
aacggatacctttacctttatatgg

SEQ ID NO: 312501 - DNA, 25 bp, Artificial
  probe
  misc_feature (1)..(25): SEQ ID NO: 2020; WAN024C8Q; Start 190; Stop 214
caaccactcaacattatttacctgt

SEQ ID NO: 312502 - DNA, 25 bp, Artificial
  probe
  misc_feature (1)..(25): SEQ ID NO: 2020; WAN024C8Q; Start 187; Stop 211
gatcaaccactcaacattatttacc

SEQ ID NO: 312503 - DNA, 25 bp, Artificial
  probe
  misc_feature (1)..(25): SEQ ID NO: 2020; WAN024C8Q; Start 237; Stop 261
aattcaccaacgtaacggatacctt

SEQ ID NO: 312504 - DNA, 25 bp, Artificial
  probe
  misc_feature (1)..(25): SEQ ID NO: 2020; WAN024C8Q; Start 257; Stop 281
acctttacctttatatggttctggt

SEQ ID NO: 312505 - DNA, 25 bp, Artificial
  probe
  misc_feature (1)..(25): SEQ ID NO: 2020; WAN024C8Q; Start 258; Stop 282
cctttacctttatatggttctggtg

SEQ ID NO: 312506 - DNA, 25 bp, Artificial
  probe
  misc_feature (1)..(25): SEQ ID NO: 2020; WAN024C8Q; Start 251; Stop 275
acggatacctttacctttatatggt

SEQ ID NO: 312507 - DNA, 25 bp, Artificial
  probe
  misc_feature (1)..(25): SEQ ID NO: 2020; WAN024C8Q; Start 259; Stop 283
ctttacctttatatggttctggtga

SEQ ID NO: 312508 - DNA, 25 bp, Artificial
  probe
  misc_feature (1)..(25): SEQ ID NO: 2020; WAN024C8Q; Start 252; Stop 276
cggatacctttacctttatatggtt

SEQ ID NO: 312509 - DNA, 25 bp, Artificial
  probe
  misc_feature (1)..(25): SEQ ID NO: 2020; WAN024C8Q; Start 183; Stop 207
tgatgatcaaccactcaacattatt

SEQ ID NO: 312510 - DNA, 25 bp, Artificial
  probe
  misc_feature (1)..(25): SEQ ID NO: 2020; WAN024C8Q; Start 247; Stop 271
cgtaacggatacctttacctttata

SEQ ID NO: 312511 - DNA, 25 bp, Artificial
  probe
  misc_feature (1)..(25): SEQ ID NO: 2020; WAN024C8Q; Start 260; Stop 284
tttacctttatatggttctggtgaa

SEQ ID NO: 312512 - DNA, 25 bp, Artificial
  probe
  misc_feature (1)..(25): SEQ ID NO: 2020; WAN024C8Q; Start 256; Stop 280
tacctttacctttatatggttctgg

SEQ ID NO: 312513 - DNA, 25 bp, Artificial
  probe
  misc_feature (1)..(25): SEQ ID NO: 2020; WAN024C8Q; Start 239; Stop 263
ttcaccaacgtaacggataccttta

SEQ ID NO: 312514 - DNA, 25 bp, Artificial
  probe
  misc_feature (1)..(25): SEQ ID NO: 2020; WAN024C8Q; Start 236; Stop 260
gaattcaccaacgtaacggatacct

SEQ ID NO: 312515 - DNA, 25 bp, Artificial
  probe
  misc_feature (1)..(25): SEQ ID NO: 2020; WAN024C8Q; Start 116; Stop 140
tcacagttttcacctctttagtttt

SEQ ID NO: 312516 - DNA, 25 bp, Artificial
  probe
  misc_feature (1)..(25): SEQ ID NO: 2020; WAN024C8Q; Start 245; Stop 269
aacgtaacggatacctttaccttta

SEQ ID NO: 312517 - DNA, 25 bp, Artificial
  probe
  misc_feature (1)..(25): SEQ ID NO: 2020; WAN024C8Q; Start 246; Stop 270
acgtaacggatacctttacctttat

SEQ ID NO: 312518 - DNA, 25 bp, Artificial
  probe
  misc_feature (1)..(25): SEQ ID NO: 2020; WAN024C8Q; Start 165; Stop 189
ggaaaataggttggtggttgatgat

SEQ ID NO: 312519 - DNA, 25 bp, Artificial
  probe
  misc_feature (1)..(25): SEQ ID NO: 2020; WAN024C8Q; Start 159; Stop 183
aaagttggaaaataggttggtggtt

SEQ ID NO: 312520 - DNA, 25 bp, Artificial
  probe
  misc_feature (1)..(25): SEQ ID NO: 2020; WAN024C8Q; Start 115; Stop 139
atcacagttttcacctctttagttt

SEQ ID NO: 312521 - DNA, 25 bp, Artificial
  probe
  misc_feature (1)..(25): SEQ ID NO: 2020; WAN024C8Q; Start 114; Stop 138
aatcacagttttcacctctttagtt

SEQ ID NO: 312522 - DNA, 25 bp, Artificial
  probe
  misc_feature (1)..(25): SEQ ID NO: 2020; WAN024C8Q; Start 113; Stop 137
aaatcacagttttcacctctttagt

SEQ ID NO: 312523 - DNA, 25 bp, Artificial
  probe
  misc_feature (1)..(25): SEQ ID NO: 2020; WAN024C8Q; Start 307; Stop 331
ctgtttgaccaactacttcttttga

SEQ ID NO: 312524 - DNA, 25 bp, Artificial
  probe
  misc_feature (1)..(25): SEQ ID NO: 2020; WAN024C8Q; Start 316; Stop 340
caactacttcttttgaaattccgct

SEQ ID NO: 312525 - DNA, 25 bp, Artificial
  probe
  misc_feature (1)..(25): SEQ ID NO: 2020; WAN024C8Q; Start 314; Stop 338
accaactacttcttttgaaattccg

SEQ ID NO: 312526 - DNA, 25 bp, Artificial
  probe
  misc_feature (1)..(25): SEQ ID NO: 2020; WAN024C8Q; Start 308; Stop 332
tgtttgaccaactacttcttttgaa

SEQ ID NO: 312527 - DNA, 25 bp, Artificial
  probe
  misc_feature (1)..(25): SEQ ID NO: 2020; WAN024C8Q; Start 318; Stop 342
actacttcttttgaaattccgctaa

SEQ ID NO: 312528 - DNA, 25 bp, Artificial
  probe
  misc_feature (1)..(25): SEQ ID NO: 2020; WAN024C8Q; Start 317; Stop 341
aactacttcttttgaaattccgcta

SEQ ID NO: 312529 - DNA, 25 bp, Artificial
  probe
  misc_feature (1)..(25): SEQ ID NO: 2020; WAN024C8Q; Start 244; Stop 268
caacgtaacggatacctttaccttt

SEQ ID NO: 312530 - DNA, 25 bp, Artificial
  probe
  misc_feature (1)..(25): SEQ ID NO: 2020; WAN024C8Q; Start 166; Stop 190
gaaaataggttggtggttgatgatc

SEQ ID NO: 312531 - DNA, 25 bp, Artificial
  probe
  misc_feature (1)..(25): SEQ ID NO: 2021; WAN024G7V; Start 557; Stop 581
ataatcttcttgctgtcgctcctaa

SEQ ID NO: 312532 - DNA, 25 bp, Artificial
  probe
  misc_feature (1)..(25): SEQ ID NO: 2021; WAN024G7V; Start 209; Stop 233
ccttcttcaatcatattacagacga

SEQ ID NO: 312533 - DNA, 25 bp, Artificial
  probe
  misc_feature (1)..(25): SEQ ID NO: 2021; WAN024G7V; Start 161; Stop 185
atgtgtattcagatgaagccaagac

SEQ ID NO: 312534 - DNA, 25 bp, Artificial
  probe
  misc_feature (1)..(25): SEQ ID NO: 2021; WAN024G7V; Start 556; Stop 580
gataatcttcttgctgtcgctccta

SEQ ID NO: 312535 - DNA, 25 bp, Artificial
  probe
  misc_feature (1)..(25): SEQ ID NO: 2021; WAN024G7V; Start 160; Stop 184
catgtgtattcagatgaagccaaga

SEQ ID NO: 312536 - DNA, 25 bp, Artificial
  probe
  misc_feature (1)..(25): SEQ ID NO: 2021; WAN024G7V; Start 558; Stop 582
taatcttcttgctgtcgctcctaag

SEQ ID NO: 312537 - DNA, 25 bp, Artificial
  probe
  misc_feature (1)..(25): SEQ ID NO: 2021; WAN024G7V; Start 162; Stop 186
tgtgtattcagatgaagccaagact

SEQ ID NO: 312538 - DNA, 25 bp, Artificial
  probe
  misc_feature (1)..(25): SEQ ID NO: 2021; WAN024G7V; Start 396; Stop 420
cggaggagaagttgataatccaatc

SEQ ID NO: 312539 - DNA, 25 bp, Artificial
  probe
  misc_feature (1)..(25): SEQ ID NO: 2021; WAN024G7V; Start 395; Stop 419
tcggaggagaagttgataatccaat

SEQ ID NO: 312540 - DNA, 25 bp, Artificial
  probe
  misc_feature (1)..(25): SEQ ID NO: 2021; WAN024G7V; Start 163; Stop 187
gtgtattcagatgaagccaagactg

SEQ ID NO: 312541 - DNA, 25 bp, Artificial
  probe
  misc_feature (1)..(25): SEQ ID NO: 2021; WAN024G7V; Start 717; Stop 741
attgtcacctgagaaattggctaat

SEQ ID NO: 312542 - DNA, 25 bp, Artificial
  probe
  misc_feature (1)..(25): SEQ ID NO: 2021; WAN024G7V; Start 53; Stop 77
aagccattattcaccagttcagtcc

SEQ ID NO: 312543 - DNA, 25 bp, Artificial
  probe
  misc_feature (1)..(25): SEQ ID NO: 2021; WAN024G7V; Start 394; Stop 418
ctcggaggagaagttgataatccaa

SEQ ID NO: 312544 - DNA, 25 bp, Artificial
  probe
  misc_feature (1)..(25): SEQ ID NO: 2021; WAN024G7V; Start 48; Stop 72
taagaaagccattattcaccagttc

SEQ ID NO: 312545 - DNA, 25 bp, Artificial
  probe
  misc_feature (1)..(25): SEQ ID NO: 2021; WAN024G7V; Start 693; Stop 717
caacaacctagaagaaagcaatgaa

SEQ ID NO: 312546 - DNA, 25 bp, Artificial
  probe
  misc_feature (1)..(25): SEQ ID NO: 2021; WAN024G7V; Start 49; Stop 73
aagaaagccattattcaccagttca

SEQ ID NO: 312547 - DNA, 25 bp, Artificial
  probe
  misc_feature (1)..(25): SEQ ID NO: 2021; WAN024G7V; Start 570; Stop 594
tgtcgctcctaagatttctcctaaa

SEQ ID NO: 312548 - DNA, 25 bp, Artificial
  probe
  misc_feature (1)..(25): SEQ ID NO: 2021; WAN024G7V; Start 208; Stop 232
cccttcttcaatcatattacagacg

SEQ ID NO: 312549 - DNA, 25 bp, Artificial
  probe
  misc_feature (1)..(25): SEQ ID NO: 2021; WAN024G7V; Start 724; Stop 748
cctgagaaattggctaatgaccttt

SEQ ID NO: 312550 - DNA, 25 bp, Artificial
  probe
  misc_feature (1)..(25): SEQ ID NO: 2021; WAN024G7V; Start 52; Stop 76
aaagccattattcaccagttcagtc

SEQ ID NO: 312551 - DNA, 25 bp, Artificial
  probe
  misc_feature (1)..(25): SEQ ID NO: 2021; WAN024G7V; Start 47; Stop 71
ttaagaaagccattattcaccagtt

SEQ ID NO: 312552 - DNA, 25 bp, Artificial
  probe
  misc_feature (1)..(25): SEQ ID NO: 2021; WAN024G7V; Start 691; Stop 715
ttcaacaacctagaagaaagcaatg

SEQ ID NO: 312553 - DNA, 25 bp, Artificial
  probe
  misc_feature (1)..(25): SEQ ID NO: 2021; WAN024G7V; Start 695; Stop 719
acaacctagaagaaagcaatgaatt

SEQ ID NO: 312554 - DNA, 25 bp, Artificial
  probe
  misc_feature (1)..(25): SEQ ID NO: 2021; WAN024G7V; Start 694; Stop 718
aacaacctagaagaaagcaatgaat

SEQ ID NO: 312555 - DNA, 25 bp, Artificial
  probe
  misc_feature (1)..(25): SEQ ID NO: 2021; WAN024G7V; Start 50; Stop 74
agaaagccattattcaccagttcag

SEQ ID NO: 312556 - DNA, 25 bp, Artificial
  probe
  misc_feature (1)..(25): SEQ ID NO: 2021; WAN024G7V; Start 552; Stop 576
ttcagataatcttcttgctgtcgct

SEQ ID NO: 312557 - DNA, 25 bp, Artificial
  probe
  misc_feature (1)..(25): SEQ ID NO: 2021; WAN024G7V; Start 46; Stop 70
attaagaaagccattattcaccagt

SEQ ID NO: 312558 - DNA, 25 bp, Artificial
  probe
  misc_feature (1)..(25): SEQ ID NO: 2021; WAN024G7V; Start 569; Stop 593
ctgtcgctcctaagatttctcctaa

SEQ ID NO: 312559 - DNA, 25 bp, Artificial
  probe
  misc_feature (1)..(25): SEQ ID NO: 2021; WAN024G7V; Start 718; Stop 742
ttgtcacctgagaaattggctaatg

SEQ ID NO: 312560 - DNA, 25 bp, Artificial
  probe
  misc_feature (1)..(25): SEQ ID NO: 2021; WAN024G7V; Start 51; Stop 75
gaaagccattattcaccagttcagt

SEQ ID NO: 312561 - DNA, 25 bp, Artificial
  probe
  misc_feature (1)..(25): SEQ ID NO: 2021; WAN024G7V; Start 698; Stop 722
acctagaagaaagcaatgaattgtc

SEQ ID NO: 312562 - DNA, 25 bp, Artificial
  probe
  misc_feature (1)..(25): SEQ ID NO: 2021; WAN024G7V; Start 956; Stop 980
atggaacctactctatcttaatcaa

SEQ ID NO: 312563 - DNA, 25 bp, Artificial
  probe
  misc_feature (1)..(25): SEQ ID NO: 2021; WAN024G7V; Start 955; Stop 979
aatggaacctactctatcttaatca

SEQ ID NO: 312564 - DNA, 25 bp, Artificial
  probe
  misc_feature (1)..(25): SEQ ID NO: 2022; WAN024FCM; Start 201; Stop 225
ggaatctaccttgaggatgttatca

SEQ ID NO: 312565 - DNA, 25 bp, Artificial
  probe
  misc_feature (1)..(25): SEQ ID NO: 2022; WAN024FCM; Start 200; Stop 224
aggaatctaccttgaggatgttatc

SEQ ID NO: 312566 - DNA, 25 bp, Artificial
  probe
  misc_feature (1)..(25): SEQ ID NO: 2022; WAN024FCM; Start 98; Stop 122
cttcaatggttacgaccttggtaat

SEQ ID NO: 312567 - DNA, 25 bp, Artificial
  probe
  misc_feature (1)..(25): SEQ ID NO: 2022; WAN024FCM; Start 4; Stop 28
ccttcgttcatggtgatgttcttag

SEQ ID NO: 312568 - DNA, 25 bp, Artificial
  probe
  misc_feature (1)..(25): SEQ ID NO: 2022; WAN024FCM; Start 99; Stop 123
ttcaatggttacgaccttggtaatg

SEQ ID NO: 312569 - DNA, 25 bp, Artificial
  probe
  misc_feature (1)..(25): SEQ ID NO: 2022; WAN024FCM; Start 150; Stop 174
aaccttaccaatctctcgcatcaag

SEQ ID NO: 312570 - DNA, 25 bp, Artificial
  probe
  misc_feature (1)..(25): SEQ ID NO: 2022; WAN024FCM; Start 5; Stop 29
cttcgttcatggtgatgttcttagc

SEQ ID NO: 312571 - DNA, 25 bp, Artificial
  probe
  misc_feature (1)..(25): SEQ ID NO: 2022; WAN024FCM; Start 154; Stop 178
ttaccaatctctcgcatcaagctaa

SEQ ID NO: 312572 - DNA, 25 bp, Artificial
  probe
  misc_feature (1)..(25): SEQ ID NO: 2022; WAN024FCM; Start 153; Stop 177
cttaccaatctctcgcatcaagcta

SEQ ID NO: 312573 - DNA, 25 bp, Artificial
  probe
  misc_feature (1)..(25): SEQ ID NO: 2022; WAN024FCM; Start 174; Stop 198
gctaaagtcaacttggtgggttaaa

SEQ ID NO: 312574 - DNA, 25 bp, Artificial
  probe
  misc_feature (1)..(25): SEQ ID NO: 2022; WAN024FCM; Start 7; Stop 31
tcgttcatggtgatgttcttagctt

SEQ ID NO: 312575 - DNA, 25 bp, Artificial
  probe
  misc_feature (1)..(25): SEQ ID NO: 2022; WAN024FCM; Start 6; Stop 30
ttcgttcatggtgatgttcttagct

SEQ ID NO: 312576 - DNA, 25 bp, Artificial
  probe
  misc_feature (1)..(25): SEQ ID NO: 2022; WAN024FCM; Start 149; Stop 173
aaaccttaccaatctctcgcatcaa

SEQ ID NO: 312577 - DNA, 25 bp, Artificial
  probe
  misc_feature (1)..(25): SEQ ID NO: 2022; WAN024FCM; Start 3; Stop 27
gccttcgttcatggtgatgttctta

SEQ ID NO: 312578 - DNA, 25 bp, Artificial
  probe
  misc_feature (1)..(25): SEQ ID NO: 2022; WAN024FCM; Start 106; Stop 130
gttacgaccttggtaatgccagtag

SEQ ID NO: 312579 - DNA, 25 bp, Artificial
  probe
  misc_feature (1)..(25): SEQ ID NO: 2022; WAN024FCM; Start 97; Stop 121
gcttcaatggttacgaccttggtaa

SEQ ID NO: 312580 - DNA, 25 bp, Artificial
  probe
  misc_feature (1)..(25): SEQ ID NO: 2022; WAN024FCM; Start 158; Stop 182
caatctctcgcatcaagctaaagtc

SEQ ID NO: 312581 - DNA, 25 bp, Artificial
  probe
  misc_feature (1)..(25): SEQ ID NO: 2022; WAN024FCM; Start 100; Stop 124
tcaatggttacgaccttggtaatgc

SEQ ID NO: 312582 - DNA, 25 bp, Artificial
  probe
  misc_feature (1)..(25): SEQ ID NO: 2022; WAN024FCM; Start 155; Stop 179
taccaatctctcgcatcaagctaaa

SEQ ID NO: 312583 - DNA, 25 bp, Artificial
  probe
  misc_feature (1)..(25): SEQ ID NO: 2022; WAN024FCM; Start 8; Stop 32
cgttcatggtgatgttcttagcttt

SEQ ID NO: 312584 - DNA, 25 bp, Artificial
  probe
  misc_feature (1)..(25): SEQ ID NO: 2022; WAN024FCM; Start 160; Stop 184
atctctcgcatcaagctaaagtcaa

SEQ ID NO: 312585 - DNA, 25 bp, Artificial
  probe
  misc_feature (1)..(25): SEQ ID NO: 2022; WAN024FCM; Start 159; Stop 183
aatctctcgcatcaagctaaagtca

SEQ ID NO: 312586 - DNA, 25 bp, Artificial
  probe
  misc_feature (1)..(25): SEQ ID NO: 2022; WAN024FCM; Start 173; Stop 197
agctaaagtcaacttggtgggttaa

SEQ ID NO: 312587 - DNA, 25 bp, Artificial
  probe
  misc_feature (1)..(25): SEQ ID NO: 2022; WAN024FCM; Start 172; Stop 196
aagctaaagtcaacttggtgggtta

SEQ ID NO: 312588 - DNA, 25 bp, Artificial
  probe
  misc_feature (1)..(25): SEQ ID NO: 2022; WAN024FCM; Start 244; Stop 268
ttgaggatgcgctcttctaataatt

SEQ ID NO: 312589 - DNA, 25 bp, Artificial
  probe
  misc_feature (1)..(25): SEQ ID NO: 2022; WAN024FCM; Start 243; Stop 267
cttgaggatgcgctcttctaataat

SEQ ID NO: 312590 - DNA, 25 bp, Artificial
  probe
  misc_feature (1)..(25): SEQ ID NO: 2022; WAN024FCM; Start 199; Stop 223
aaggaatctaccttgaggatgttat

SEQ ID NO: 312591 - DNA, 25 bp, Artificial
  probe
  misc_feature (1)..(25): SEQ ID NO: 2022; WAN024FCM; Start 163; Stop 187
tctcgcatcaagctaaagtcaactt

SEQ ID NO: 312592 - DNA, 25 bp, Artificial
  probe
  misc_feature (1)..(25): SEQ ID NO: 2022; WAN024FCM; Start 175; Stop 199
ctaaagtcaacttggtgggttaaaa

SEQ ID NO: 312593 - DNA, 25 bp, Artificial
  probe
  misc_feature (1)..(25): SEQ ID NO: 2022; WAN024FCM; Start 162; Stop 186
ctctcgcatcaagctaaagtcaact

SEQ ID NO: 312594 - DNA, 25 bp, Artificial
  probe
  misc_feature (1)..(25): SEQ ID NO: 2022; WAN024FCM; Start 161; Stop 185
tctctcgcatcaagctaaagtcaac

SEQ ID NO: 312595 - DNA, 25 bp, Artificial
  probe
  misc_feature (1)..(25): SEQ ID NO: 2022; WAN024FCM; Start 157; Stop 181
ccaatctctcgcatcaagctaaagt

SEQ ID NO: 312596 - DNA, 25 bp, Artificial
  probe
  misc_feature (1)..(25): SEQ ID NO: 2022; WAN024FCM; Start 156; Stop 180
accaatctctcgcatcaagctaaag

SEQ ID NO: 312597 - DNA, 25 bp, Artificial
  probe
  misc_feature (1)..(25): SEQ ID NO: 2023; WAN024CDN; Start 98; Stop 122
gacttcctcctctaactgagtattt

SEQ ID NO: 312598 - DNA, 25 bp, Artificial
  probe
  misc_feature (1)..(25): SEQ ID NO: 2023; WAN024CDN; Start 128; Stop 152
aattggtgtatcgagatcggctatc

SEQ ID NO: 312599 - DNA, 25 bp, Artificial
  probe
  misc_feature (1)..(25): SEQ ID NO: 2023; WAN024CDN; Start 225; Stop 249
tcattactttcaaaccattcttgtt

SEQ ID NO: 312600 - DNA, 25 bp, Artificial
  probe
  misc_feature (1)..(25): SEQ ID NO: 2023; WAN024CDN; Start 188; Stop 212
ctcttcaggcttgttcttgcttgtt

SEQ ID NO: 312601 - DNA, 25 bp, Artificial
  probe
  misc_feature (1)..(25): SEQ ID NO: 2023; WAN024CDN; Start 191; Stop 215
ttcaggcttgttcttgcttgttgtt

SEQ ID NO: 312602 - DNA, 25 bp, Artificial
  probe
  misc_feature (1)..(25): SEQ ID NO: 2023; WAN024CDN; Start 224; Stop 248
atcattactttcaaaccattcttgt

SEQ ID NO: 312603 - DNA, 25 bp, Artificial
  probe
  misc_feature (1)..(25): SEQ ID NO: 2023; WAN024CDN; Start 189; Stop 213
tcttcaggcttgttcttgcttgttg

SEQ ID NO: 312604 - DNA, 25 bp, Artificial
  probe
  misc_feature (1)..(25): SEQ ID NO: 2023; WAN024CDN; Start 190; Stop 214
cttcaggcttgttcttgcttgttgt

SEQ ID NO: 312605 - DNA, 25 bp, Artificial
  probe
  misc_feature (1)..(25): SEQ ID NO: 2023; WAN024CDN; Start 127; Stop 151
caattggtgtatcgagatcggctat

SEQ ID NO: 312606 - DNA, 25 bp, Artificial
  probe
  misc_feature (1)..(25): SEQ ID NO: 2023; WAN024CDN; Start 230; Stop 254
actttcaaaccattcttgtttcatg

SEQ ID NO: 312607 - DNA, 25 bp, Artificial
  probe
  misc_feature (1)..(25): SEQ ID NO: 2023; WAN024CDN; Start 223; Stop 247
aatcattactttcaaaccattcttg

SEQ ID NO: 312608 - DNA, 25 bp, Artificial
  probe
  misc_feature (1)..(25): SEQ ID NO: 2023; WAN024CDN; Start 72; Stop 96
ctttccaattcgacttcagcttgag

SEQ ID NO: 312609 - DNA, 25 bp, Artificial
  probe
  misc_feature (1)..(25): SEQ ID NO: 2023; WAN024CDN; Start 52; Stop 76
caattttctcttcttgctggctttc

SEQ ID NO: 312610 - DNA, 25 bp, Artificial
  probe
  misc_feature (1)..(25): SEQ ID NO: 2023; WAN024CDN; Start 228; Stop 252
ttactttcaaaccattcttgtttca

SEQ ID NO: 312611 - DNA, 25 bp, Artificial
  probe
  misc_feature (1)..(25): SEQ ID NO: 2023; WAN024CDN; Start 99; Stop 123
acttcctcctctaactgagtatttt

SEQ ID NO: 312612 - DNA, 25 bp, Artificial
  probe
  misc_feature (1)..(25): SEQ ID NO: 2023; WAN024CDN; Start 51; Stop 75
tcaattttctcttcttgctggcttt

SEQ ID NO: 312613 - DNA, 25 bp, Artificial
  probe
  misc_feature (1)..(25): SEQ ID NO: 2023; WAN024CDN; Start 50; Stop 74
ttcaattttctcttcttgctggctt

SEQ ID NO: 312614 - DNA, 25 bp, Artificial
  probe
  misc_feature (1)..(25): SEQ ID NO: 2023; WAN024CDN; Start 229; Stop 253
tactttcaaaccattcttgtttcat

SEQ ID NO: 312615 - DNA, 25 bp, Artificial
  probe
  misc_feature (1)..(25): SEQ ID NO: 2023; WAN024CDN; Start 192; Stop 216
tcaggcttgttcttgcttgttgttt

SEQ ID NO: 312616 - DNA, 25 bp, Artificial
  probe
  misc_feature (1)..(25): SEQ ID NO: 2023; WAN024CDN; Start 57; Stop 81
ttctcttcttgctggctttccaatt

SEQ ID NO: 312617 - DNA, 25 bp, Artificial
  probe
  misc_feature (1)..(25): SEQ ID NO: 2023; WAN024CDN; Start 56; Stop 80
tttctcttcttgctggctttccaat

SEQ ID NO: 312618 - DNA, 25 bp, Artificial
  probe
  misc_feature (1)..(25): SEQ ID NO: 2023; WAN024CDN; Start 53; Stop 77
aattttctcttcttgctggctttcc

SEQ ID NO: 312619 - DNA, 25 bp, Artificial
  probe
  misc_feature (1)..(25): SEQ ID NO: 2023; WAN024CDN; Start 222; Stop 246
aaatcattactttcaaaccattctt

SEQ ID NO: 312620 - DNA, 25 bp, Artificial
  probe
  misc_feature (1)..(25): SEQ ID NO: 2023; WAN024CDN; Start 126; Stop 150
tcaattggtgtatcgagatcggcta

SEQ ID NO: 312621 - DNA, 25 bp, Artificial
  probe
  misc_feature (1)..(25): SEQ ID NO: 2023; WAN024CDN; Start 58; Stop 82
tctcttcttgctggctttccaattc

SEQ ID NO: 312622 - DNA, 25 bp, Artificial
  probe
  misc_feature (1)..(25): SEQ ID NO: 2023; WAN024CDN; Start 136; Stop 160
tatcgagatcggctatcgtttcttc

SEQ ID NO: 312623 - DNA, 25 bp, Artificial
  probe
  misc_feature (1)..(25): SEQ ID NO: 2023; WAN024CDN; Start 226; Stop 250
cattactttcaaaccattcttgttt

SEQ ID NO: 312624 - DNA, 25 bp, Artificial
  probe
  misc_feature (1)..(25): SEQ ID NO: 2023; WAN024CDN; Start 148; Stop 172
ctatcgtttcttcagccttgtctgc

SEQ ID NO: 312625 - DNA, 25 bp, Artificial
  probe
  misc_feature (1)..(25): SEQ ID NO: 2023; WAN024CDN; Start 135; Stop 159
gtatcgagatcggctatcgtttctt

SEQ ID NO: 312626 - DNA, 25 bp, Artificial
  probe
  misc_feature (1)..(25): SEQ ID NO: 2023; WAN024CDN; Start 231; Stop 255
ctttcaaaccattcttgtttcatgg

SEQ ID NO: 312627 - DNA, 25 bp, Artificial
  probe
  misc_feature (1)..(25): SEQ ID NO: 2023; WAN024CDN; Start 227; Stop 251
attactttcaaaccattcttgtttc

SEQ ID NO: 312628 - DNA, 25 bp, Artificial
  probe
  misc_feature (1)..(25): SEQ ID NO: 2023; WAN024CDN; Start 24; Stop 48
gttctcgcttcactgtcttcaggag

SEQ ID NO: 312629 - DNA, 25 bp, Artificial
  probe
  misc_feature (1)..(25): SEQ ID NO: 2023; WAN024CDN; Start 193; Stop 217
caggcttgttcttgcttgttgtttt

SEQ ID NO: 312630 - DNA, 25 bp, Artificial
  probe
  misc_feature (1)..(25): SEQ ID NO: 2024; WAN024C6O; Start 767; Stop 791
gtgattatgagtcggacattaggaa

SEQ ID NO: 312631 - DNA, 25 bp, Artificial
  probe
  misc_feature (1)..(25): SEQ ID NO: 2024; WAN024C6O; Start 768; Stop 792
tgattatgagtcggacattaggaat

SEQ ID NO: 312632 - DNA, 25 bp, Artificial
  probe
  misc_feature (1)..(25): SEQ ID NO: 2024; WAN024C6O; Start 764; Stop 788
gtggtgattatgagtcggacattag

SEQ ID NO: 312633 - DNA, 25 bp, Artificial
  probe
  misc_feature (1)..(25): SEQ ID NO: 2024; WAN024C6O; Start 769; Stop 793
gattatgagtcggacattaggaatt

SEQ ID NO: 312634 - DNA, 25 bp, Artificial
  probe
  misc_feature (1)..(25): SEQ ID NO: 2024; WAN024C6O; Start 766; Stop 790
ggtgattatgagtcggacattagga

SEQ ID NO: 312635 - DNA, 25 bp, Artificial
  probe
  misc_feature (1)..(25): SEQ ID NO: 2024; WAN024C6O; Start 10; Stop 34
ttatccttaactacatcagcatggc

SEQ ID NO: 312636 - DNA, 25 bp, Artificial
  probe
  misc_feature (1)..(25): SEQ ID NO: 2024; WAN024C6O; Start 765; Stop 789
tggtgattatgagtcggacattagg

SEQ ID NO: 312637 - DNA, 25 bp, Artificial
  probe
  misc_feature (1)..(25): SEQ ID NO: 2024; WAN024C6O; Start 763; Stop 787
tgtggtgattatgagtcggacatta

SEQ ID NO: 312638 - DNA, 25 bp, Artificial
  probe
  misc_feature (1)..(25): SEQ ID NO: 2024; WAN024C6O; Start 429; Stop 453
caacagctaaccagtctcagattaa

SEQ ID NO: 312639 - DNA, 25 bp, Artificial
  probe
  misc_feature (1)..(25): SEQ ID NO: 2024; WAN024C6O; Start 752; Stop 776
ttgttggctcttgtggtgattatga

SEQ ID NO: 312640 - DNA, 25 bp, Artificial
  probe
  misc_feature (1)..(25): SEQ ID NO: 2024; WAN024C6O; Start 428; Stop 452
acaacagctaaccagtctcagatta

SEQ ID NO: 312641 - DNA, 25 bp, Artificial
  probe
  misc_feature (1)..(25): SEQ ID NO: 2024; WAN024C6O; Start 733; Stop 757
taatgggattgctttctgtttgttg

SEQ ID NO: 312642 - DNA, 25 bp, Artificial
  probe
  misc_feature (1)..(25): SEQ ID NO: 2024; WAN024C6O; Start 727; Stop 751
gattgttaatgggattgctttctgt

SEQ ID NO: 312643 - DNA, 25 bp, Artificial
  probe
  misc_feature (1)..(25): SEQ ID NO: 2024; WAN024C6O; Start 726; Stop 750
tgattgttaatgggattgctttctg

SEQ ID NO: 312644 - DNA, 25 bp, Artificial
  probe
  misc_feature (1)..(25): SEQ ID NO: 2024; WAN024C6O; Start 732; Stop 756
ttaatgggattgctttctgtttgtt

SEQ ID NO: 312645 - DNA, 25 bp, Artificial
  probe
  misc_feature (1)..(25): SEQ ID NO: 2024; WAN024C6O; Start 729; Stop 753
ttgttaatgggattgctttctgttt

SEQ ID NO: 312646 - DNA, 25 bp, Artificial
  probe
  misc_feature (1)..(25): SEQ ID NO: 2024; WAN024C6O; Start 728; Stop 752
attgttaatgggattgctttctgtt

SEQ ID NO: 312647 - DNA, 25 bp, Artificial
  probe
  misc_feature (1)..(25): SEQ ID NO: 2024; WAN024C6O; Start 731; Stop 755
gttaatgggattgctttctgtttgt

SEQ ID NO: 312648 - DNA, 25 bp, Artificial
  probe
  misc_feature (1)..(25): SEQ ID NO: 2024; WAN024C6O; Start 730; Stop 754
tgttaatgggattgctttctgtttg

SEQ ID NO: 312649 - DNA, 25 bp, Artificial
  probe
  misc_feature (1)..(25): SEQ ID NO: 2024; WAN024C6O; Start 762; Stop 786
ttgtggtgattatgagtcggacatt

SEQ ID NO: 312650 - DNA, 25 bp, Artificial
  probe
  misc_feature (1)..(25): SEQ ID NO: 2024; WAN024C6O; Start 82; Stop 106
aaggagataggtgatgaaagagaaa

SEQ ID NO: 312651 - DNA, 25 bp, Artificial
  probe
  misc_feature (1)..(25): SEQ ID NO: 2024; WAN024C6O; Start 81; Stop 105
aaaggagataggtgatgaaagagaa

SEQ ID NO: 312652 - DNA, 25 bp, Artificial
  probe
  misc_feature (1)..(25): SEQ ID NO: 2024; WAN024C6O; Start 110; Stop 134
atgtggaaagaattgttgaatcgtg

SEQ ID NO: 312653 - DNA, 25 bp, Artificial
  probe
  misc_feature (1)..(25): SEQ ID NO: 2024; WAN024C6O; Start 109; Stop 133
tatgtggaaagaattgttgaatcgt

SEQ ID NO: 312654 - DNA, 25 bp, Artificial
  probe
  misc_feature (1)..(25): SEQ ID NO: 2024; WAN024C6O; Start 773; Stop 797
atgagtcggacattaggaatttctg

SEQ ID NO: 312655 - DNA, 25 bp, Artificial
  probe
  misc_feature (1)..(25): SEQ ID NO: 2024; WAN024C6O; Start 772; Stop 796
tatgagtcggacattaggaatttct

SEQ ID NO: 312656 - DNA, 25 bp, Artificial
  probe
  misc_feature (1)..(25): SEQ ID NO: 2024; WAN024C6O; Start 761; Stop 785
cttgtggtgattatgagtcggacat

SEQ ID NO: 312657 - DNA, 25 bp, Artificial
  probe
  misc_feature (1)..(25): SEQ ID NO: 2024; WAN024C6O; Start 755; Stop 779
ttggctcttgtggtgattatgagtc

SEQ ID NO: 312658 - DNA, 25 bp, Artificial
  probe
  misc_feature (1)..(25): SEQ ID NO: 2024; WAN024C6O; Start 771; Stop 795
ttatgagtcggacattaggaatttc

SEQ ID NO: 312659 - DNA, 25 bp, Artificial
  probe
  misc_feature (1)..(25): SEQ ID NO: 2024; WAN024C6O; Start 759; Stop 783
ctcttgtggtgattatgagtcggac

SEQ ID NO: 312660 - DNA, 25 bp, Artificial
  probe
  misc_feature (1)..(25): SEQ ID NO: 2024; WAN024C6O; Start 108; Stop 132
atatgtggaaagaattgttgaatcg

SEQ ID NO: 312661 - DNA, 25 bp, Artificial
  probe
  misc_feature (1)..(25): SEQ ID NO: 2024; WAN024C6O; Start 754; Stop 778
gttggctcttgtggtgattatgagt

SEQ ID NO: 312662 - DNA, 25 bp, Artificial
  probe
  misc_feature (1)..(25): SEQ ID NO: 2024; WAN024C6O; Start 753; Stop 777
tgttggctcttgtggtgattatgag

SEQ ID NO: 312663 - DNA, 25 bp, Artificial
  probe
  misc_feature (1)..(25): SEQ ID NO: 2025; WAN024CCF; Start 405; Stop 429
gaatgaccaagtcgaataccagatt

SEQ ID NO: 312664 - DNA, 25 bp, Artificial
  probe
  misc_feature (1)..(25): SEQ ID NO: 2025; WAN024CCF; Start 406; Stop 430
aatgaccaagtcgaataccagattg

SEQ ID NO: 312665 - DNA, 25 bp, Artificial
  probe
  misc_feature (1)..(25): SEQ ID NO: 2025; WAN024CCF; Start 404; Stop 428
ggaatgaccaagtcgaataccagat

SEQ ID NO: 312666 - DNA, 25 bp, Artificial
  probe
  misc_feature (1)..(25): SEQ ID NO: 2025; WAN024CCF; Start 407; Stop 431
atgaccaagtcgaataccagattgc

SEQ ID NO: 312667 - DNA, 25 bp, Artificial
  probe
  misc_feature (1)..(25): SEQ ID NO: 2025; WAN024CCF; Start 399; Stop 423
taaggggaatgaccaagtcgaatac

SEQ ID NO: 312668 - DNA, 25 bp, Artificial
  probe
  misc_feature (1)..(25): SEQ ID NO: 2025; WAN024CCF; Start 398; Stop 422
gtaaggggaatgaccaagtcgaata

SEQ ID NO: 312669 - DNA, 25 bp, Artificial
  probe
  misc_feature (1)..(25): SEQ ID NO: 2025; WAN024CCF; Start 403; Stop 427
gggaatgaccaagtcgaataccaga

SEQ ID NO: 312670 - DNA, 25 bp, Artificial
  probe
  misc_feature (1)..(25): SEQ ID NO: 2025; WAN024CCF; Start 400; Stop 424
aaggggaatgaccaagtcgaatacc

SEQ ID NO: 312671 - DNA, 25 bp, Artificial
  probe
  misc_feature (1)..(25): SEQ ID NO: 2025; WAN024CCF; Start 397; Stop 421
ggtaaggggaatgaccaagtcgaat

SEQ ID NO: 312672 - DNA, 25 bp, Artificial
  probe
  misc_feature (1)..(25): SEQ ID NO: 2025; WAN024CCF; Start 402; Stop 426
ggggaatgaccaagtcgaataccag

SEQ ID NO: 312673 - DNA, 25 bp, Artificial
  probe
  misc_feature (1)..(25): SEQ ID NO: 2025; WAN024CCF; Start 1; Stop 25
atgcctttaaagcatccattgaaaa

SEQ ID NO: 312674 - DNA, 25 bp, Artificial
  probe
  misc_feature (1)..(25): SEQ ID NO: 2026; WAN024BDM; Start 94; Stop 118
ctgtcaattctatccacaacctcaa

SEQ ID NO: 312675 - DNA, 25 bp, Artificial
  probe
  misc_feature (1)..(25): SEQ ID NO: 2026; WAN024BDM; Start 92; Stop 116
ctctgtcaattctatccacaacctc

SEQ ID NO: 312676 - DNA, 25 bp, Artificial
  probe
  misc_feature (1)..(25): SEQ ID NO: 2026; WAN024BDM; Start 93; Stop 117
tctgtcaattctatccacaacctca

SEQ ID NO: 312677 - DNA, 25 bp, Artificial
  probe
  misc_feature (1)..(25): SEQ ID NO: 2026; WAN024BDM; Start 95; Stop 119
tgtcaattctatccacaacctcaaa

SEQ ID NO: 312678 - DNA, 25 bp, Artificial
  probe
  misc_feature (1)..(25): SEQ ID NO: 2026; WAN024BDM; Start 66; Stop 90
gccttaccgtaggtatatgatactg

SEQ ID NO: 312679 - DNA, 25 bp, Artificial
  probe
  misc_feature (1)..(25): SEQ ID NO: 2026; WAN024BDM; Start 65; Stop 89
cgccttaccgtaggtatatgatact

SEQ ID NO: 312680 - DNA, 25 bp, Artificial
  probe
  misc_feature (1)..(25): SEQ ID NO: 2026; WAN024BDM; Start 64; Stop 88
tcgccttaccgtaggtatatgatac

SEQ ID NO: 312681 - DNA, 25 bp, Artificial
  probe
  misc_feature (1)..(25): SEQ ID NO: 2026; WAN024BDM; Start 63; Stop 87
gtcgccttaccgtaggtatatgata

SEQ ID NO: 312682 - DNA, 25 bp, Artificial
  probe
  misc_feature (1)..(25): SEQ ID NO: 2026; WAN024BDM; Start 100; Stop 124
attctatccacaacctcaaaacagt

SEQ ID NO: 312683 - DNA, 25 bp, Artificial
  probe
  misc_feature (1)..(25): SEQ ID NO: 2026; WAN024BDM; Start 129; Stop 153
tgaggttgtggatagcttcctagtt

SEQ ID NO: 312684 - DNA, 25 bp, Artificial
  probe
  misc_feature (1)..(25): SEQ ID NO: 2026; WAN024BDM; Start 128; Stop 152
ttgaggttgtggatagcttcctagt

SEQ ID NO: 312685 - DNA, 25 bp, Artificial
  probe
  misc_feature (1)..(25): SEQ ID NO: 2026; WAN024BDM; Start 98; Stop 122
caattctatccacaacctcaaaaca

SEQ ID NO: 312686 - DNA, 25 bp, Artificial
  probe
  misc_feature (1)..(25): SEQ ID NO: 2026; WAN024BDM; Start 99; Stop 123
aattctatccacaacctcaaaacag

SEQ ID NO: 312687 - DNA, 25 bp, Artificial
  probe
  misc_feature (1)..(25): SEQ ID NO: 2026; WAN024BDM; Start 97; Stop 121
tcaattctatccacaacctcaaaac

SEQ ID NO: 312688 - DNA, 25 bp, Artificial
  probe
  misc_feature (1)..(25): SEQ ID NO: 2026; WAN024BDM; Start 96; Stop 120
gtcaattctatccacaacctcaaaa

SEQ ID NO: 312689 - DNA, 25 bp, Artificial
  probe
  misc_feature (1)..(25): SEQ ID NO: 2026; WAN024BDM; Start 140; Stop 164
atagcttcctagtttgctctttgat

SEQ ID NO: 312690 - DNA, 25 bp, Artificial
  probe
  misc_feature (1)..(25): SEQ ID NO: 2026; WAN024BDM; Start 139; Stop 163
gatagcttcctagtttgctctttga

SEQ ID NO: 312691 - DNA, 25 bp, Artificial
  probe
  misc_feature (1)..(25): SEQ ID NO: 2026; WAN024BDM; Start 130; Stop 154
gaggttgtggatagcttcctagttt

SEQ ID NO: 312692 - DNA, 25 bp, Artificial
  probe
  misc_feature (1)..(25): SEQ ID NO: 2026; WAN024BDM; Start 127; Stop 151
tttgaggttgtggatagcttcctag

SEQ ID NO: 312693 - DNA, 25 bp, Artificial
  probe
  misc_feature (1)..(25): SEQ ID NO: 2026; WAN024BDM; Start 131; Stop 155
aggttgtggatagcttcctagtttg

SEQ ID NO: 312694 - DNA, 25 bp, Artificial
  probe
  misc_feature (1)..(25): SEQ ID NO: 2026; WAN024BDM; Start 138; Stop 162
ggatagcttcctagtttgctctttg

SEQ ID NO: 312695 - DNA, 25 bp, Artificial
  probe
  misc_feature (1)..(25): SEQ ID NO: 2026; WAN024BDM; Start 137; Stop 161
tggatagcttcctagtttgctcttt

SEQ ID NO: 312696 - DNA, 25 bp, Artificial
  probe
  misc_feature (1)..(25): SEQ ID NO: 2026; WAN024BDM; Start 136; Stop 160
gtggatagcttcctagtttgctctt

SEQ ID NO: 312697 - DNA, 25 bp, Artificial
  probe
  misc_feature (1)..(25): SEQ ID NO: 2026; WAN024BDM; Start 153; Stop 177
ttgctctttgattttcattctaact

SEQ ID NO: 312698 - DNA, 25 bp, Artificial
  probe
  misc_feature (1)..(25): SEQ ID NO: 2026; WAN024BDM; Start 150; Stop 174
agtttgctctttgattttcattcta

SEQ ID NO: 312699 - DNA, 25 bp, Artificial
  probe
  misc_feature (1)..(25): SEQ ID NO: 2026; WAN024BDM; Start 149; Stop 173
tagtttgctctttgattttcattct

SEQ ID NO: 312700 - DNA, 25 bp, Artificial
  probe
  misc_feature (1)..(25): SEQ ID NO: 2026; WAN024BDM; Start 134; Stop 158
ttgtggatagcttcctagtttgctc

SEQ ID NO: 312701 - DNA, 25 bp, Artificial
  probe
  misc_feature (1)..(25): SEQ ID NO: 2026; WAN024BDM; Start 62; Stop 86
cgtcgccttaccgtaggtatatgat

SEQ ID NO: 312702 - DNA, 25 bp, Artificial
  probe
  misc_feature (1)..(25): SEQ ID NO: 2026; WAN024BDM; Start 148; Stop 172
ctagtttgctctttgattttcattc

SEQ ID NO: 312703 - DNA, 25 bp, Artificial
  probe
  misc_feature (1)..(25): SEQ ID NO: 2026; WAN024BDM; Start 133; Stop 157
gttgtggatagcttcctagtttgct

SEQ ID NO: 312704 - DNA, 25 bp, Artificial
  probe
  misc_feature (1)..(25): SEQ ID NO: 2026; WAN024BDM; Start 123; Stop 147
gtgttttgaggttgtggatagcttc

SEQ ID NO: 312705 - DNA, 25 bp, Artificial
  probe
  misc_feature (1)..(25): SEQ ID NO: 2026; WAN024BDM; Start 152; Stop 176
tttgctctttgattttcattctaac

SEQ ID NO: 312706 - DNA, 25 bp, Artificial
  probe
  misc_feature (1)..(25): SEQ ID NO: 2026; WAN024BDM; Start 151; Stop 175
gtttgctctttgattttcattctaa

SEQ ID NO: 312707 - DNA, 25 bp, Artificial
  probe
  misc_feature (1)..(25): SEQ ID NO: 2027; WAN024COS; Start 67; Stop 91
aacgagtcaagaaataaggaacatc

SEQ ID NO: 312708 - DNA, 25 bp, Artificial
  probe
  misc_feature (1)..(25): SEQ ID NO: 2027; WAN024COS; Start 66; Stop 90
gaacgagtcaagaaataaggaacat

SEQ ID NO: 312709 - DNA, 25 bp, Artificial
  probe
  misc_feature (1)..(25): SEQ ID NO: 2027; WAN024COS; Start 68; Stop 92
acgagtcaagaaataaggaacatct

SEQ ID NO: 312710 - DNA, 25 bp, Artificial
  probe
  misc_feature (1)..(25): SEQ ID NO: 2027; WAN024COS; Start 41; Stop 65
actttcagcgtcactttcataacat

SEQ ID NO: 312711 - DNA, 25 bp, Artificial
  probe
  misc_feature (1)..(25): SEQ ID NO: 2027; WAN024COS; Start 39; Stop 63
caactttcagcgtcactttcataac

SEQ ID NO: 312712 - DNA, 25 bp, Artificial
  probe
  misc_feature (1)..(25): SEQ ID NO: 2027; WAN024COS; Start 40; Stop 64
aactttcagcgtcactttcataaca

SEQ ID NO: 312713 - DNA, 25 bp, Artificial
  probe
  misc_feature (1)..(25): SEQ ID NO: 2027; WAN024COS; Start 38; Stop 62
acaactttcagcgtcactttcataa

SEQ ID NO: 312714 - DNA, 25 bp, Artificial
  probe
  misc_feature (1)..(25): SEQ ID NO: 2027; WAN024COS; Start 65; Stop 89
tgaacgagtcaagaaataaggaaca

SEQ ID NO: 312715 - DNA, 25 bp, Artificial
  probe
  misc_feature (1)..(25): SEQ ID NO: 2027; WAN024COS; Start 64; Stop 88
atgaacgagtcaagaaataaggaac

SEQ ID NO: 312716 - DNA, 25 bp, Artificial
  probe
  misc_feature (1)..(25): SEQ ID NO: 2027; WAN024COS; Start 69; Stop 93
cgagtcaagaaataaggaacatcta

SEQ ID NO: 312717 - DNA, 25 bp, Artificial
  probe
  misc_feature (1)..(25): SEQ ID NO: 2027; WAN024COS; Start 37; Stop 61
cacaactttcagcgtcactttcata

SEQ ID NO: 312718 - DNA, 25 bp, Artificial
  probe
  misc_feature (1)..(25): SEQ ID NO: 2027; WAN024COS; Start 42; Stop 66
ctttcagcgtcactttcataacatg

SEQ ID NO: 312719 - DNA, 25 bp, Artificial
  probe
  misc_feature (1)..(25): SEQ ID NO: 2027; WAN024COS; Start 62; Stop 86
acatgaacgagtcaagaaataagga

SEQ ID NO: 312720 - DNA, 25 bp, Artificial
  probe
  misc_feature (1)..(25): SEQ ID NO: 2027; WAN024COS; Start 61; Stop 85
aacatgaacgagtcaagaaataagg

SEQ ID NO: 312721 - DNA, 25 bp, Artificial
  probe
  misc_feature (1)..(25): SEQ ID NO: 2027; WAN024COS; Start 63; Stop 87
catgaacgagtcaagaaataaggaa

SEQ ID NO: 312722 - DNA, 25 bp, Artificial
  probe
  misc_feature (1)..(25): SEQ ID NO: 2027; WAN024COS; Start 58; Stop 82
cataacatgaacgagtcaagaaata

SEQ ID NO: 312723 - DNA, 25 bp, Artificial
  probe
  misc_feature (1)..(25): SEQ ID NO: 2027; WAN024COS; Start 60; Stop 84
taacatgaacgagtcaagaaataag

SEQ ID NO: 312724 - DNA, 25 bp, Artificial
  probe
  misc_feature (1)..(25): SEQ ID NO: 2027; WAN024COS; Start 70; Stop 94
gagtcaagaaataaggaacatctaa

SEQ ID NO: 312725 - DNA, 25 bp, Artificial
  probe
  misc_feature (1)..(25): SEQ ID NO: 2027; WAN024COS; Start 57; Stop 81
tcataacatgaacgagtcaagaaat

SEQ ID NO: 312726 - DNA, 25 bp, Artificial
  probe
  misc_feature (1)..(25): SEQ ID NO: 2027; WAN024COS; Start 43; Stop 67
tttcagcgtcactttcataacatga

SEQ ID NO: 312727 - DNA, 25 bp, Artificial
  probe
  misc_feature (1)..(25): SEQ ID NO: 2027; WAN024COS; Start 59; Stop 83
ataacatgaacgagtcaagaaataa

SEQ ID NO: 312728 - DNA, 25 bp, Artificial
  probe
  misc_feature (1)..(25): SEQ ID NO: 2027; WAN024COS; Start 71; Stop 95
agtcaagaaataaggaacatctaaa

SEQ ID NO: 312729 - DNA, 25 bp, Artificial
  probe
  misc_feature (1)..(25): SEQ ID NO: 2027; WAN024COS; Start 34; Stop 58
ttccacaactttcagcgtcactttc

SEQ ID NO: 312730 - DNA, 25 bp, Artificial
  probe
  misc_feature (1)..(25): SEQ ID NO: 2027; WAN024COS; Start 36; Stop 60
ccacaactttcagcgtcactttcat

SEQ ID NO: 312731 - DNA, 25 bp, Artificial
  probe
  misc_feature (1)..(25): SEQ ID NO: 2027; WAN024COS; Start 85; Stop 109
gaacatctaaatcaattccccattt

SEQ ID NO: 312732 - DNA, 25 bp, Artificial
  probe
  misc_feature (1)..(25): SEQ ID NO: 2027; WAN024COS; Start 33; Stop 57
gttccacaactttcagcgtcacttt

SEQ ID NO: 312733 - DNA, 25 bp, Artificial
  probe
  misc_feature (1)..(25): SEQ ID NO: 2027; WAN024COS; Start 74; Stop 98
caagaaataaggaacatctaaatca

SEQ ID NO: 312734 - DNA, 25 bp, Artificial
  probe
  misc_feature (1)..(25): SEQ ID NO: 2027; WAN024COS; Start 72; Stop 96
gtcaagaaataaggaacatctaaat

SEQ ID NO: 312735 - DNA, 25 bp, Artificial
  probe
  misc_feature (1)..(25): SEQ ID NO: 2027; WAN024COS; Start 35; Stop 59
tccacaactttcagcgtcactttca

SEQ ID NO: 312736 - DNA, 25 bp, Artificial
  probe
  misc_feature (1)..(25): SEQ ID NO: 2027; WAN024COS; Start 73; Stop 97
tcaagaaataaggaacatctaaatc

SEQ ID NO: 312737 - DNA, 25 bp, Artificial
  probe
  misc_feature (1)..(25): SEQ ID NO: 2027; WAN024COS; Start 52; Stop 76
cactttcataacatgaacgagtcaa

SEQ ID NO: 312738 - DNA, 25 bp, Artificial
  probe
  misc_feature (1)..(25): SEQ ID NO: 2027; WAN024COS; Start 53; Stop 77
actttcataacatgaacgagtcaag

SEQ ID NO: 312739 - DNA, 25 bp, Artificial
  probe
  misc_feature (1)..(25): SEQ ID NO: 2027; WAN024COS; Start 50; Stop 74
gtcactttcataacatgaacgagtc

SEQ ID NO: 312740 - DNA, 25 bp, Artificial
  probe
  misc_feature (1)..(25): SEQ ID NO: 2028; WAN024GCT; Start 296; Stop 320
agtattgtagttatggttgtgccta

SEQ ID NO: 312741 - DNA, 25 bp, Artificial
  probe
  misc_feature (1)..(25): SEQ ID NO: 2028; WAN024GCT; Start 295; Stop 319
gagtattgtagttatggttgtgcct

SEQ ID NO: 312742 - DNA, 25 bp, Artificial
  probe
  misc_feature (1)..(25): SEQ ID NO: 2028; WAN024GCT; Start 294; Stop 318
agagtattgtagttatggttgtgcc

SEQ ID NO: 312743 - DNA, 25 bp, Artificial
  probe
  misc_feature (1)..(25): SEQ ID NO: 2028; WAN024GCT; Start 297; Stop 321
gtattgtagttatggttgtgcctat

SEQ ID NO: 312744 - DNA, 25 bp, Artificial
  probe
  misc_feature (1)..(25): SEQ ID NO: 2028; WAN024GCT; Start 293; Stop 317
tagagtattgtagttatggttgtgc

SEQ ID NO: 312745 - DNA, 25 bp, Artificial
  probe
  misc_feature (1)..(25): SEQ ID NO: 2028; WAN024GCT; Start 231; Stop 255
ttacaaggatgaccgaacagaagaa

SEQ ID NO: 312746 - DNA, 25 bp, Artificial
  probe
  misc_feature (1)..(25): SEQ ID NO: 2028; WAN024GCT; Start 298; Stop 322
tattgtagttatggttgtgcctatt

SEQ ID NO: 312747 - DNA, 25 bp, Artificial
  probe
  misc_feature (1)..(25): SEQ ID NO: 2028; WAN024GCT; Start 299; Stop 323
attgtagttatggttgtgcctattt

SEQ ID NO: 312748 - DNA, 25 bp, Artificial
  probe
  misc_feature (1)..(25): SEQ ID NO: 2028; WAN024GCT; Start 345; Stop 369
taagcgagcatcatttgacaagaaa

SEQ ID NO: 312749 - DNA, 25 bp, Artificial
  probe
  misc_feature (1)..(25): SEQ ID NO: 2028; WAN024GCT; Start 232; Stop 256
tacaaggatgaccgaacagaagaaa

SEQ ID NO: 312750 - DNA, 25 bp, Artificial
  probe
  misc_feature (1)..(25): SEQ ID NO: 2028; WAN024GCT; Start 230; Stop 254
tttacaaggatgaccgaacagaaga

SEQ ID NO: 312751 - DNA, 25 bp, Artificial
  probe
  misc_feature (1)..(25): SEQ ID NO: 2028; WAN024GCT; Start 344; Stop 368
ctaagcgagcatcatttgacaagaa

SEQ ID NO: 312752 - DNA, 25 bp, Artificial
  probe
  misc_feature (1)..(25): SEQ ID NO: 2028; WAN024GCT; Start 292; Stop 316
ttagagtattgtagttatggttgtg

SEQ ID NO: 312753 - DNA, 25 bp, Artificial
  probe
  misc_feature (1)..(25): SEQ ID NO: 2028; WAN024GCT; Start 16; Stop 40
gcacctgaattatacaactataaca

SEQ ID NO: 312754 - DNA, 25 bp, Artificial
  probe
  misc_feature (1)..(25): SEQ ID NO: 2028; WAN024GCT; Start 468; Stop 492
gaaagaccagcattctcagaaagag

SEQ ID NO: 312755 - DNA, 25 bp, Artificial
  probe
  misc_feature (1)..(25): SEQ ID NO: 2028; WAN024GCT; Start 170; Stop 194
taaccaagtttgattatatcgtggg

SEQ ID NO: 312756 - DNA, 25 bp, Artificial
  probe
  misc_feature (1)..(25): SEQ ID NO: 2028; WAN024GCT; Start 399; Stop 423
tagaaaaggaaagaaaccgactcaa

SEQ ID NO: 312757 - DNA, 25 bp, Artificial
  probe
  misc_feature (1)..(25): SEQ ID NO: 2028; WAN024GCT; Start 305; Stop 329
gttatggttgtgcctattttgtctt

SEQ ID NO: 312758 - DNA, 25 bp, Artificial
  probe
  misc_feature (1)..(25): SEQ ID NO: 2028; WAN024GCT; Start 302; Stop 326
gtagttatggttgtgcctattttgt

SEQ ID NO: 312759 - DNA, 25 bp, Artificial
  probe
  misc_feature (1)..(25): SEQ ID NO: 2028; WAN024GCT; Start 301; Stop 325
tgtagttatggttgtgcctattttg

SEQ ID NO: 312760 - DNA, 25 bp, Artificial
  probe
  misc_feature (1)..(25): SEQ ID NO: 2028; WAN024GCT; Start 310; Stop 334
ggttgtgcctattttgtcttagaaa

SEQ ID NO: 312761 - DNA, 25 bp, Artificial
  probe
  misc_feature (1)..(25): SEQ ID NO: 2028; WAN024GCT; Start 304; Stop 328
agttatggttgtgcctattttgtct

SEQ ID NO: 312762 - DNA, 25 bp, Artificial
  probe
  misc_feature (1)..(25): SEQ ID NO: 2028; WAN024GCT; Start 308; Stop 332
atggttgtgcctattttgtcttaga

SEQ ID NO: 312763 - DNA, 25 bp, Artificial
  probe
  misc_feature (1)..(25): SEQ ID NO: 2028; WAN024GCT; Start 303; Stop 327
tagttatggttgtgcctattttgtc

SEQ ID NO: 312764 - DNA, 25 bp, Artificial
  probe
  misc_feature (1)..(25): SEQ ID NO: 2028; WAN024GCT; Start 469; Stop 493
aaagaccagcattctcagaaagagg

SEQ ID NO: 312765 - DNA, 25 bp, Artificial
  probe
  misc_feature (1)..(25): SEQ ID NO: 2028; WAN024GCT; Start 309; Stop 333
tggttgtgcctattttgtcttagaa

SEQ ID NO: 312766 - DNA, 25 bp, Artificial
  probe
  misc_feature (1)..(25): SEQ ID NO: 2028; WAN024GCT; Start 307; Stop 331
tatggttgtgcctattttgtcttag

SEQ ID NO: 312767 - DNA, 25 bp, Artificial
  probe
  misc_feature (1)..(25): SEQ ID NO: 2028; WAN024GCT; Start 401; Stop 425
gaaaaggaaagaaaccgactcaaac

SEQ ID NO: 312768 - DNA, 25 bp, Artificial
  probe
  misc_feature (1)..(25): SEQ ID NO: 2028; WAN024GCT; Start 400; Stop 424
agaaaaggaaagaaaccgactcaaa

SEQ ID NO: 312769 - DNA, 25 bp, Artificial
  probe
  misc_feature (1)..(25): SEQ ID NO: 2028; WAN024GCT; Start 322; Stop 346
tttgtcttagaaaatgaagccccta

SEQ ID NO: 312770 - DNA, 25 bp, Artificial
  probe
  misc_feature (1)..(25): SEQ ID NO: 2028; WAN024GCT; Start 343; Stop 367
cctaagcgagcatcatttgacaaga

SEQ ID NO: 312771 - DNA, 25 bp, Artificial
  probe
  misc_feature (1)..(25): SEQ ID NO: 2028; WAN024GCT; Start 300; Stop 324
ttgtagttatggttgtgcctatttt

SEQ ID NO: 312772 - DNA, 25 bp, Artificial
  probe
  misc_feature (1)..(25): SEQ ID NO: 2028; WAN024GCT; Start 229; Stop 253
ttttacaaggatgaccgaacagaag

SEQ ID NO: 312773 - DNA, 25 bp, Artificial
  probe
  misc_feature (1)..(25): SEQ ID NO: 2029; WAN024CUO; Start 404; Stop 428
cgagtatggtcaagtatctggttag

SEQ ID NO: 312774 - DNA, 25 bp, Artificial
  probe
  misc_feature (1)..(25): SEQ ID NO: 2029; WAN024CUO; Start 328; Stop 352
attccagtcatccatacctatcaca

SEQ ID NO: 312775 - DNA, 25 bp, Artificial
  probe
  misc_feature (1)..(25): SEQ ID NO: 2029; WAN024CUO; Start 327; Stop 351
aattccagtcatccatacctatcac

SEQ ID NO: 312776 - DNA, 25 bp, Artificial
  probe
  misc_feature (1)..(25): SEQ ID NO: 2029; WAN024CUO; Start 408; Stop 432
tatggtcaagtatctggttagaggt

SEQ ID NO: 312777 - DNA, 25 bp, Artificial
  probe
  misc_feature (1)..(25): SEQ ID NO: 2029; WAN024CUO; Start 407; Stop 431
gtatggtcaagtatctggttagagg

SEQ ID NO: 312778 - DNA, 25 bp, Artificial
  probe
  misc_feature (1)..(25): SEQ ID NO: 2029; WAN024CUO; Start 409; Stop 433
atggtcaagtatctggttagaggtt

SEQ ID NO: 312779 - DNA, 25 bp, Artificial
  probe
  misc_feature (1)..(25): SEQ ID NO: 2029; WAN024CUO; Start 406; Stop 430
agtatggtcaagtatctggttagag

SEQ ID NO: 312780 - DNA, 25 bp, Artificial
  probe
  misc_feature (1)..(25): SEQ ID NO: 2029; WAN024CUO; Start 405; Stop 429
gagtatggtcaagtatctggttaga

SEQ ID NO: 312781 - DNA, 25 bp, Artificial
  probe
  misc_feature (1)..(25): SEQ ID NO: 2029; WAN024CUO; Start 329; Stop 353
ttccagtcatccatacctatcacac

SEQ ID NO: 312782 - DNA, 25 bp, Artificial
  probe
  misc_feature (1)..(25): SEQ ID NO: 2029; WAN024CUO; Start 772; Stop 796
cagaacctagagattcaagactcag

SEQ ID NO: 312783 - DNA, 25 bp, Artificial
  probe
  misc_feature (1)..(25): SEQ ID NO: 2029; WAN024CUO; Start 773; Stop 797
agaacctagagattcaagactcagt

SEQ ID NO: 312784 - DNA, 25 bp, Artificial
  probe
  misc_feature (1)..(25): SEQ ID NO: 2029; WAN024CUO; Start 475; Stop 499
gtccgtgacttgctatctgattata

SEQ ID NO: 312785 - DNA, 25 bp, Artificial
  probe
  misc_feature (1)..(25): SEQ ID NO: 2029; WAN024CUO; Start 476; Stop 500
tccgtgacttgctatctgattataa

SEQ ID NO: 312786 - DNA, 25 bp, Artificial
  probe
  misc_feature (1)..(25): SEQ ID NO: 2029; WAN024CUO; Start 478; Stop 502
cgtgacttgctatctgattataagg

SEQ ID NO: 312787 - DNA, 25 bp, Artificial
  probe
  misc_feature (1)..(25): SEQ ID NO: 2029; WAN024CUO; Start 477; Stop 501
ccgtgacttgctatctgattataag

SEQ ID NO: 312788 - DNA, 25 bp, Artificial
  probe
  misc_feature (1)..(25): SEQ ID NO: 2029; WAN024CUO; Start 474; Stop 498
tgtccgtgacttgctatctgattat

SEQ ID NO: 312789 - DNA, 25 bp, Artificial
  probe
  misc_feature (1)..(25): SEQ ID NO: 2029; WAN024CUO; Start 485; Stop 509
tgctatctgattataaggtcaaggt

SEQ ID NO: 312790 - DNA, 25 bp, Artificial
  probe
  misc_feature (1)..(25): SEQ ID NO: 2029; WAN024CUO; Start 473; Stop 497
ttgtccgtgacttgctatctgatta

SEQ ID NO: 312791 - DNA, 25 bp, Artificial
  probe
  misc_feature (1)..(25): SEQ ID NO: 2029; WAN024CUO; Start 1160; Stop 1184
aagatttggctaaagatgatacggt

SEQ ID NO: 312792 - DNA, 25 bp, Artificial
  probe
  misc_feature (1)..(25): SEQ ID NO: 2029; WAN024CUO; Start 479; Stop 503
gtgacttgctatctgattataaggt

SEQ ID NO: 312793 - DNA, 25 bp, Artificial
  probe
  misc_feature (1)..(25): SEQ ID NO: 2029; WAN024CUO; Start 156; Stop 180
aattatccgcattccaagtgttcct

SEQ ID NO: 312794 - DNA, 25 bp, Artificial
  probe
  misc_feature (1)..(25): SEQ ID NO: 2029; WAN024CUO; Start 698; Stop 722
tgaaagaggaagacaaggttaaact

SEQ ID NO: 312795 - DNA, 25 bp, Artificial
  probe
  misc_feature (1)..(25): SEQ ID NO: 2029; WAN024CUO; Start 157; Stop 181
attatccgcattccaagtgttcctt

SEQ ID NO: 312796 - DNA, 25 bp, Artificial
  probe
  misc_feature (1)..(25): SEQ ID NO: 2029; WAN024CUO; Start 1159; Stop 1183
aaagatttggctaaagatgatacgg

SEQ ID NO: 312797 - DNA, 25 bp, Artificial
  probe
  misc_feature (1)..(25): SEQ ID NO: 2029; WAN024CUO; Start 699; Stop 723
gaaagaggaagacaaggttaaactg

SEQ ID NO: 312798 - DNA, 25 bp, Artificial
  probe
  misc_feature (1)..(25): SEQ ID NO: 2029; WAN024CUO; Start 697; Stop 721
ctgaaagaggaagacaaggttaaac

SEQ ID NO: 312799 - DNA, 25 bp, Artificial
  probe
  misc_feature (1)..(25): SEQ ID NO: 2029; WAN024CUO; Start 1161; Stop 1185
agatttggctaaagatgatacggtc

SEQ ID NO: 312800 - DNA, 25 bp, Artificial
  probe
  misc_feature (1)..(25): SEQ ID NO: 2029; WAN024CUO; Start 703; Stop 727
gaggaagacaaggttaaactggtag

SEQ ID NO: 312801 - DNA, 25 bp, Artificial
  probe
  misc_feature (1)..(25): SEQ ID NO: 2029; WAN024CUO; Start 700; Stop 724
aaagaggaagacaaggttaaactgg

SEQ ID NO: 312802 - DNA, 25 bp, Artificial
  probe
  misc_feature (1)..(25): SEQ ID NO: 2029; WAN024CUO; Start 486; Stop 510
gctatctgattataaggtcaaggtt

SEQ ID NO: 312803 - DNA, 25 bp, Artificial
  probe
  misc_feature (1)..(25): SEQ ID NO: 2029; WAN024CUO; Start 484; Stop 508
ttgctatctgattataaggtcaagg

SEQ ID NO: 312804 - DNA, 25 bp, Artificial
  probe
  misc_feature (1)..(25): SEQ ID NO: 2029; WAN024CUO; Start 702; Stop 726
agaggaagacaaggttaaactggta

SEQ ID NO: 312805 - DNA, 25 bp, Artificial
  probe
  misc_feature (1)..(25): SEQ ID NO: 2029; WAN024CUO; Start 326; Stop 350
aaattccagtcatccatacctatca

SEQ ID NO: 312806 - DNA, 25 bp, Artificial
  probe
  misc_feature (1)..(25): SEQ ID NO: 2030; WAN024GB8; Start 196; Stop 220
aatagcatcataaccgaagatccac

SEQ ID NO: 312807 - DNA, 25 bp, Artificial
  probe
  misc_feature (1)..(25): SEQ ID NO: 2030; WAN024GB8; Start 198; Stop 222
tagcatcataaccgaagatccacat

SEQ ID NO: 312808 - DNA, 25 bp, Artificial
  probe
  misc_feature (1)..(25): SEQ ID NO: 2030; WAN024GB8; Start 197; Stop 221
atagcatcataaccgaagatccaca

SEQ ID NO: 312809 - DNA, 25 bp, Artificial
  probe
  misc_feature (1)..(25): SEQ ID NO: 2030; WAN024GB8; Start 205; Stop 229
ataaccgaagatccacatgacaatg

SEQ ID NO: 312810 - DNA, 25 bp, Artificial
  probe
  misc_feature (1)..(25): SEQ ID NO: 2030; WAN024GB8; Start 204; Stop 228
cataaccgaagatccacatgacaat

SEQ ID NO: 312811 - DNA, 25 bp, Artificial
  probe
  misc_feature (1)..(25): SEQ ID NO: 2030; WAN024GB8; Start 192; Stop 216
cccaaatagcatcataaccgaagat

SEQ ID NO: 312812 - DNA, 25 bp, Artificial
  probe
  misc_feature (1)..(25): SEQ ID NO: 2030; WAN024GB8; Start 167; Stop 191
gctgtatagaacaattcttcgtagc

SEQ ID NO: 312813 - DNA, 25 bp, Artificial
  probe
  misc_feature (1)..(25): SEQ ID NO: 2030; WAN024GB8; Start 164; Stop 188
aaggctgtatagaacaattcttcgt

SEQ ID NO: 312814 - DNA, 25 bp, Artificial
  probe
  misc_feature (1)..(25): SEQ ID NO: 2030; WAN024GB8; Start 165; Stop 189
aggctgtatagaacaattcttcgta

SEQ ID NO: 312815 - DNA, 25 bp, Artificial
  probe
  misc_feature (1)..(25): SEQ ID NO: 2030; WAN024GB8; Start 168; Stop 192
ctgtatagaacaattcttcgtagcc

SEQ ID NO: 312816 - DNA, 25 bp, Artificial
  probe
  misc_feature (1)..(25): SEQ ID NO: 2030; WAN024GB8; Start 166; Stop 190
ggctgtatagaacaattcttcgtag

SEQ ID NO: 312817 - DNA, 25 bp, Artificial
  probe
  misc_feature (1)..(25): SEQ ID NO: 2030; WAN024GB8; Start 195; Stop 219
aaatagcatcataaccgaagatcca

SEQ ID NO: 312818 - DNA, 25 bp, Artificial
  probe
  misc_feature (1)..(25): SEQ ID NO: 2030; WAN024GB8; Start 194; Stop 218
caaatagcatcataaccgaagatcc

SEQ ID NO: 312819 - DNA, 25 bp, Artificial
  probe
  misc_feature (1)..(25): SEQ ID NO: 2030; WAN024GB8; Start 193; Stop 217
ccaaatagcatcataaccgaagatc

SEQ ID NO: 312820 - DNA, 25 bp, Artificial
  probe
  misc_feature (1)..(25): SEQ ID NO: 2030; WAN024GB8; Start 199; Stop 223
agcatcataaccgaagatccacatg

SEQ ID NO: 312821 - DNA, 25 bp, Artificial
  probe
  misc_feature (1)..(25): SEQ ID NO: 2030; WAN024GB8; Start 201; Stop 225
catcataaccgaagatccacatgac

SEQ ID NO: 312822 - DNA, 25 bp, Artificial
  probe
  misc_feature (1)..(25): SEQ ID NO: 2030; WAN024GB8; Start 202; Stop 226
atcataaccgaagatccacatgaca

SEQ ID NO: 312823 - DNA, 25 bp, Artificial
  probe
  misc_feature (1)..(25): SEQ ID NO: 2030; WAN024GB8; Start 95; Stop 119
aaaccaagaccaatcaagaccagag

SEQ ID NO: 312824 - DNA, 25 bp, Artificial
  probe
  misc_feature (1)..(25): SEQ ID NO: 2030; WAN024GB8; Start 203; Stop 227
tcataaccgaagatccacatgacaa

SEQ ID NO: 312825 - DNA, 25 bp, Artificial
  probe
  misc_feature (1)..(25): SEQ ID NO: 2030; WAN024GB8; Start 206; Stop 230
taaccgaagatccacatgacaatgg

SEQ ID NO: 312826 - DNA, 25 bp, Artificial
  probe
  misc_feature (1)..(25): SEQ ID NO: 2030; WAN024GB8; Start 124; Stop 148
catagcacggaagatttctccaatc

SEQ ID NO: 312827 - DNA, 25 bp, Artificial
  probe
  misc_feature (1)..(25): SEQ ID NO: 2030; WAN024GB8; Start 169; Stop 193
tgtatagaacaattcttcgtagccc

SEQ ID NO: 312828 - DNA, 25 bp, Artificial
  probe
  misc_feature (1)..(25): SEQ ID NO: 2030; WAN024GB8; Start 163; Stop 187
aaaggctgtatagaacaattcttcg

SEQ ID NO: 312829 - DNA, 25 bp, Artificial
  probe
  misc_feature (1)..(25): SEQ ID NO: 2030; WAN024GB8; Start 161; Stop 185
ccaaaggctgtatagaacaattctt

SEQ ID NO: 312830 - DNA, 25 bp, Artificial
  probe
  misc_feature (1)..(25): SEQ ID NO: 2030; WAN024GB8; Start 96; Stop 120
aaccaagaccaatcaagaccagagg

SEQ ID NO: 312831 - DNA, 25 bp, Artificial
  probe
  misc_feature (1)..(25): SEQ ID NO: 2030; WAN024GB8; Start 200; Stop 224
gcatcataaccgaagatccacatga

SEQ ID NO: 312832 - DNA, 25 bp, Artificial
  probe
  misc_feature (1)..(25): SEQ ID NO: 2030; WAN024GB8; Start 162; Stop 186
caaaggctgtatagaacaattcttc

SEQ ID NO: 312833 - DNA, 25 bp, Artificial
  probe
  misc_feature (1)..(25): SEQ ID NO: 2030; WAN024GB8; Start 176; Stop 200
aacaattcttcgtagccccaaatag

SEQ ID NO: 312834 - DNA, 25 bp, Artificial
  probe
  misc_feature (1)..(25): SEQ ID NO: 2030; WAN024GB8; Start 125; Stop 149
atagcacggaagatttctccaatcc

SEQ ID NO: 312835 - DNA, 25 bp, Artificial
  probe
  misc_feature (1)..(25): SEQ ID NO: 2030; WAN024GB8; Start 175; Stop 199
gaacaattcttcgtagccccaaata

SEQ ID NO: 312836 - DNA, 25 bp, Artificial
  probe
  misc_feature (1)..(25): SEQ ID NO: 2030; WAN024GB8; Start 123; Stop 147
ccatagcacggaagatttctccaat

SEQ ID NO: 312837 - DNA, 25 bp, Artificial
  probe
  misc_feature (1)..(25): SEQ ID NO: 2030; WAN024GB8; Start 99; Stop 123
caagaccaatcaagaccagaggacc

SEQ ID NO: 312838 - DNA, 25 bp, Artificial
  probe
  misc_feature (1)..(25): SEQ ID NO: 2030; WAN024GB8; Start 98; Stop 122
ccaagaccaatcaagaccagaggac

SEQ ID NO: 312839 - DNA, 25 bp, Artificial
  probe
  misc_feature (1)..(25): SEQ ID NO: 2031; WAN024G96; Start 223; Stop 247
cagccctttcctttctttatcattc

SEQ ID NO: 312840 - DNA, 25 bp, Artificial
  probe
  misc_feature (1)..(25): SEQ ID NO: 2031; WAN024G96; Start 224; Stop 248
agccctttcctttctttatcattca

SEQ ID NO: 312841 - DNA, 25 bp, Artificial
  probe
  misc_feature (1)..(25): SEQ ID NO: 2031; WAN024G96; Start 225; Stop 249
gccctttcctttctttatcattcat

SEQ ID NO: 312842 - DNA, 25 bp, Artificial
  probe
  misc_feature (1)..(25): SEQ ID NO: 2031; WAN024G96; Start 222; Stop 246
acagccctttcctttctttatcatt

SEQ ID NO: 312843 - DNA, 25 bp, Artificial
  probe
  misc_feature (1)..(25): SEQ ID NO: 2031; WAN024G96; Start 221; Stop 245
aacagccctttcctttctttatcat

SEQ ID NO: 312844 - DNA, 25 bp, Artificial
  probe
  misc_feature (1)..(25): SEQ ID NO: 2031; WAN024G96; Start 220; Stop 244
aaacagccctttcctttctttatca

SEQ ID NO: 312845 - DNA, 25 bp, Artificial
  probe
  misc_feature (1)..(25): SEQ ID NO: 2031; WAN024G96; Start 226; Stop 250
ccctttcctttctttatcattcatt

SEQ ID NO: 312846 - DNA, 25 bp, Artificial
  probe
  misc_feature (1)..(25): SEQ ID NO: 2031; WAN024G96; Start 219; Stop 243
aaaacagccctttcctttctttatc

SEQ ID NO: 312847 - DNA, 25 bp, Artificial
  probe
  misc_feature (1)..(25): SEQ ID NO: 2031; WAN024G96; Start 216; Stop 240
cataaaacagccctttcctttcttt

SEQ ID NO: 312848 - DNA, 25 bp, Artificial
  probe
  misc_feature (1)..(25): SEQ ID NO: 2031; WAN024G96; Start 108; Stop 132
ttcctctaccaggctcttgagattt

SEQ ID NO: 312849 - DNA, 25 bp, Artificial
  probe
  misc_feature (1)..(25): SEQ ID NO: 2031; WAN024G96; Start 107; Stop 131
tttcctctaccaggctcttgagatt

SEQ ID NO: 312850 - DNA, 25 bp, Artificial
  probe
  misc_feature (1)..(25): SEQ ID NO: 2031; WAN024G96; Start 215; Stop 239
ccataaaacagccctttcctttctt

SEQ ID NO: 312851 - DNA, 25 bp, Artificial
  probe
  misc_feature (1)..(25): SEQ ID NO: 2031; WAN024G96; Start 218; Stop 242
taaaacagccctttcctttctttat

SEQ ID NO: 312852 - DNA, 25 bp, Artificial
  probe
  misc_feature (1)..(25): SEQ ID NO: 2031; WAN024G96; Start 217; Stop 241
ataaaacagccctttcctttcttta

SEQ ID NO: 312853 - DNA, 25 bp, Artificial
  probe
  misc_feature (1)..(25): SEQ ID NO: 2031; WAN024G96; Start 227; Stop 251
cctttcctttctttatcattcattt

SEQ ID NO: 312854 - DNA, 25 bp, Artificial
  probe
  misc_feature (1)..(25): SEQ ID NO: 2031; WAN024G96; Start 214; Stop 238
tccataaaacagccctttcctttct

SEQ ID NO: 312855 - DNA, 25 bp, Artificial
  probe
  misc_feature (1)..(25): SEQ ID NO: 2031; WAN024G96; Start 213; Stop 237
gtccataaaacagccctttcctttc

SEQ ID NO: 312856 - DNA, 25 bp, Artificial
  probe
  misc_feature (1)..(25): SEQ ID NO: 2031; WAN024G96; Start 104; Stop 128
tattttcctctaccaggctcttgag

SEQ ID NO: 312857 - DNA, 25 bp, Artificial
  probe
  misc_feature (1)..(25): SEQ ID NO: 2031; WAN024G96; Start 101; Stop 125
ctgtattttcctctaccaggctctt

SEQ ID NO: 312858 - DNA, 25 bp, Artificial
  probe
  misc_feature (1)..(25): SEQ ID NO: 2031; WAN024G96; Start 103; Stop 127
gtattttcctctaccaggctcttga

SEQ ID NO: 312859 - DNA, 25 bp, Artificial
  probe
  misc_feature (1)..(25): SEQ ID NO: 2031; WAN024G96; Start 102; Stop 126
tgtattttcctctaccaggctcttg

SEQ ID NO: 312860 - DNA, 25 bp, Artificial
  probe
  misc_feature (1)..(25): SEQ ID NO: 2031; WAN024G96; Start 209; Stop 233
ttttgtccataaaacagccctttcc

SEQ ID NO: 312861 - DNA, 25 bp, Artificial
  probe
  misc_feature (1)..(25): SEQ ID NO: 2031; WAN024G96; Start 212; Stop 236
tgtccataaaacagccctttccttt

SEQ ID NO: 312862 - DNA, 25 bp, Artificial
  probe
  misc_feature (1)..(25): SEQ ID NO: 2031; WAN024G96; Start 211; Stop 235
ttgtccataaaacagccctttcctt

SEQ ID NO: 312863 - DNA, 25 bp, Artificial
  probe
  misc_feature (1)..(25): SEQ ID NO: 2031; WAN024G96; Start 210; Stop 234
tttgtccataaaacagccctttcct

SEQ ID NO: 312864 - DNA, 25 bp, Artificial
  probe
  misc_feature (1)..(25): SEQ ID NO: 2031; WAN024G96; Start 181; Stop 205
aaatcatccagcgcgtcaaataatt

SEQ ID NO: 312865 - DNA, 25 bp, Artificial
  probe
  misc_feature (1)..(25): SEQ ID NO: 2031; WAN024G96; Start 182; Stop 206
aatcatccagcgcgtcaaataattc

SEQ ID NO: 312866 - DNA, 25 bp, Artificial
  probe
  misc_feature (1)..(25): SEQ ID NO: 2031; WAN024G96; Start 109; Stop 133
tcctctaccaggctcttgagatttt

SEQ ID NO: 312867 - DNA, 25 bp, Artificial
  probe
  misc_feature (1)..(25): SEQ ID NO: 2031; WAN024G96; Start 106; Stop 130
ttttcctctaccaggctcttgagat

SEQ ID NO: 312868 - DNA, 25 bp, Artificial
  probe
  misc_feature (1)..(25): SEQ ID NO: 2031; WAN024G96; Start 105; Stop 129
attttcctctaccaggctcttgaga

SEQ ID NO: 312869 - DNA, 25 bp, Artificial
  probe
  misc_feature (1)..(25): SEQ ID NO: 2031; WAN024G96; Start 185; Stop 209
catccagcgcgtcaaataattcttt

SEQ ID NO: 312870 - DNA, 25 bp, Artificial
  probe
  misc_feature (1)..(25): SEQ ID NO: 2031; WAN024G96; Start 183; Stop 207
atcatccagcgcgtcaaataattct

SEQ ID NO: 312871 - DNA, 25 bp, Artificial
  probe
  misc_feature (1)..(25): SEQ ID NO: 2031; WAN024G96; Start 95; Stop 119
gaagagctgtattttcctctaccag

SEQ ID NO: 312872 - DNA, 25 bp, Artificial
  probe
  misc_feature (1)..(25): SEQ ID NO: 2032; WAN024GEC; Start 197; Stop 221
acattcctaatacagtcaagtcagc

SEQ ID NO: 312873 - DNA, 25 bp, Artificial
  probe
  misc_feature (1)..(25): SEQ ID NO: 2032; WAN024GEC; Start 683; Stop 707
ggacacaggactggaattaactaat

SEQ ID NO: 312874 - DNA, 25 bp, Artificial
  probe
  misc_feature (1)..(25): SEQ ID NO: 2032; WAN024GEC; Start 198; Stop 222
cattcctaatacagtcaagtcagcc

SEQ ID NO: 312875 - DNA, 25 bp, Artificial
  probe
  misc_feature (1)..(25): SEQ ID NO: 2032; WAN024GEC; Start 200; Stop 224
ttcctaatacagtcaagtcagccat

SEQ ID NO: 312876 - DNA, 25 bp, Artificial
  probe
  misc_feature (1)..(25): SEQ ID NO: 2032; WAN024GEC; Start 199; Stop 223
attcctaatacagtcaagtcagcca

SEQ ID NO: 312877 - DNA, 25 bp, Artificial
  probe
  misc_feature (1)..(25): SEQ ID NO: 2032; WAN024GEC; Start 681; Stop 705
atggacacaggactggaattaacta

SEQ ID NO: 312878 - DNA, 25 bp, Artificial
  probe
  misc_feature (1)..(25): SEQ ID NO: 2032; WAN024GEC; Start 682; Stop 706
tggacacaggactggaattaactaa

SEQ ID NO: 312879 - DNA, 25 bp, Artificial
  probe
  misc_feature (1)..(25): SEQ ID NO: 2032; WAN024GEC; Start 679; Stop 703
gaatggacacaggactggaattaac

SEQ ID NO: 312880 - DNA, 25 bp, Artificial
  probe
  misc_feature (1)..(25): SEQ ID NO: 2032; WAN024GEC; Start 677; Stop 701
atgaatggacacaggactggaatta

SEQ ID NO: 312881 - DNA, 25 bp, Artificial
  probe
  misc_feature (1)..(25): SEQ ID NO: 2032; WAN024GEC; Start 680; Stop 704
aatggacacaggactggaattaact

SEQ ID NO: 312882 - DNA, 25 bp, Artificial
  probe
  misc_feature (1)..(25): SEQ ID NO: 2032; WAN024GEC; Start 678; Stop 702
tgaatggacacaggactggaattaa

SEQ ID NO: 312883 - DNA, 25 bp, Artificial
  probe
  misc_feature (1)..(25): SEQ ID NO: 2032; WAN024GEC; Start 196; Stop 220
gacattcctaatacagtcaagtcag

SEQ ID NO: 312884 - DNA, 25 bp, Artificial
  probe
  misc_feature (1)..(25): SEQ ID NO: 2032; WAN024GEC; Start 204; Stop 228
taatacagtcaagtcagccatgaag

SEQ ID NO: 312885 - DNA, 25 bp, Artificial
  probe
  misc_feature (1)..(25): SEQ ID NO: 2032; WAN024GEC; Start 203; Stop 227
ctaatacagtcaagtcagccatgaa

SEQ ID NO: 312886 - DNA, 25 bp, Artificial
  probe
  misc_feature (1)..(25): SEQ ID NO: 2032; WAN024GEC; Start 201; Stop 225
tcctaatacagtcaagtcagccatg

SEQ ID NO: 312887 - DNA, 25 bp, Artificial
  probe
  misc_feature (1)..(25): SEQ ID NO: 2032; WAN024GEC; Start 676; Stop 700
gatgaatggacacaggactggaatt

SEQ ID NO: 312888 - DNA, 25 bp, Artificial
  probe
  misc_feature (1)..(25): SEQ ID NO: 2032; WAN024GEC; Start 475; Stop 499
gaagtacaagtcatcaagcaggcta

SEQ ID NO: 312889 - DNA, 25 bp, Artificial
  probe
  misc_feature (1)..(25): SEQ ID NO: 2032; WAN024GEC; Start 471; Stop 495
tcaggaagtacaagtcatcaagcag

SEQ ID NO: 312890 - DNA, 25 bp, Artificial
  probe
  misc_feature (1)..(25): SEQ ID NO: 2032; WAN024GEC; Start 470; Stop 494
ctcaggaagtacaagtcatcaagca

SEQ ID NO: 312891 - DNA, 25 bp, Artificial
  probe
  misc_feature (1)..(25): SEQ ID NO: 2032; WAN024GEC; Start 202; Stop 226
cctaatacagtcaagtcagccatga

SEQ ID NO: 312892 - DNA, 25 bp, Artificial
  probe
  misc_feature (1)..(25): SEQ ID NO: 2032; WAN024GEC; Start 595; Stop 619
caaatcggcagtgactatatcgtag

SEQ ID NO: 312893 - DNA, 25 bp, Artificial
  probe
  misc_feature (1)..(25): SEQ ID NO: 2032; WAN024GEC; Start 590; Stop 614
cctatcaaatcggcagtgactatat

SEQ ID NO: 312894 - DNA, 25 bp, Artificial
  probe
  misc_feature (1)..(25): SEQ ID NO: 2032; WAN024GEC; Start 592; Stop 616
tatcaaatcggcagtgactatatcg

SEQ ID NO: 312895 - DNA, 25 bp, Artificial
  probe
  misc_feature (1)..(25): SEQ ID NO: 2032; WAN024GEC; Start 476; Stop 500
aagtacaagtcatcaagcaggctac

SEQ ID NO: 312896 - DNA, 25 bp, Artificial
  probe
  misc_feature (1)..(25): SEQ ID NO: 2032; WAN024GEC; Start 591; Stop 615
ctatcaaatcggcagtgactatatc

SEQ ID NO: 312897 - DNA, 25 bp, Artificial
  probe
  misc_feature (1)..(25): SEQ ID NO: 2032; WAN024GEC; Start 597; Stop 621
aatcggcagtgactatatcgtagtg

SEQ ID NO: 312898 - DNA, 25 bp, Artificial
  probe
  misc_feature (1)..(25): SEQ ID NO: 2032; WAN024GEC; Start 78; Stop 102
agcagaagaaagcctttatctcaag

SEQ ID NO: 312899 - DNA, 25 bp, Artificial
  probe
  misc_feature (1)..(25): SEQ ID NO: 2032; WAN024GEC; Start 468; Stop 492
ggctcaggaagtacaagtcatcaag

SEQ ID NO: 312900 - DNA, 25 bp, Artificial
  probe
  misc_feature (1)..(25): SEQ ID NO: 2032; WAN024GEC; Start 594; Stop 618
tcaaatcggcagtgactatatcgta

SEQ ID NO: 312901 - DNA, 25 bp, Artificial
  probe
  misc_feature (1)..(25): SEQ ID NO: 2032; WAN024GEC; Start 77; Stop 101
cagcagaagaaagcctttatctcaa

SEQ ID NO: 312902 - DNA, 25 bp, Artificial
  probe
  misc_feature (1)..(25): SEQ ID NO: 2032; WAN024GEC; Start 472; Stop 496
caggaagtacaagtcatcaagcagg

SEQ ID NO: 312903 - DNA, 25 bp, Artificial
  probe
  misc_feature (1)..(25): SEQ ID NO: 2032; WAN024GEC; Start 670; Stop 694
atcaaggatgaatggacacaggact

SEQ ID NO: 312904 - DNA, 25 bp, Artificial
  probe
  misc_feature (1)..(25): SEQ ID NO: 2032; WAN024GEC; Start 593; Stop 617
atcaaatcggcagtgactatatcgt

SEQ ID NO: 312905 - DNA, 25 bp, Artificial
  probe
  misc_feature (1)..(25): SEQ ID NO: 2033; WAN024G42; Start 5; Stop 29
gcaatcacaatcacttcttcattga

SEQ ID NO: 312906 - DNA, 25 bp, Artificial
  probe
  misc_feature (1)..(25): SEQ ID NO: 2033; WAN024G42; Start 208; Stop 232
gatagtttccttgatttggctgatc

SEQ ID NO: 312907 - DNA, 25 bp, Artificial
  probe
  misc_feature (1)..(25): SEQ ID NO: 2033; WAN024G42; Start 4; Stop 28
cgcaatcacaatcacttcttcattg

SEQ ID NO: 312908 - DNA, 25 bp, Artificial
  probe
  misc_feature (1)..(25): SEQ ID NO: 2033; WAN024G42; Start 135; Stop 159
tgccttcaaagatagtgataaacat

SEQ ID NO: 312909 - DNA, 25 bp, Artificial
  probe
  misc_feature (1)..(25): SEQ ID NO: 2033; WAN024G42; Start 134; Stop 158
atgccttcaaagatagtgataaaca

SEQ ID NO: 312910 - DNA, 25 bp, Artificial
  probe
  misc_feature (1)..(25): SEQ ID NO: 2033; WAN024G42; Start 163; Stop 187
tgtaacttctttcagacctgcttct

SEQ ID NO: 312911 - DNA, 25 bp, Artificial
  probe
  misc_feature (1)..(25): SEQ ID NO: 2033; WAN024G42; Start 131; Stop 155
tccatgccttcaaagatagtgataa

SEQ ID NO: 312912 - DNA, 25 bp, Artificial
  probe
  misc_feature (1)..(25): SEQ ID NO: 2033; WAN024G42; Start 130; Stop 154
ttccatgccttcaaagatagtgata

SEQ ID NO: 312913 - DNA, 25 bp, Artificial
  probe
  misc_feature (1)..(25): SEQ ID NO: 2033; WAN024G42; Start 129; Stop 153
cttccatgccttcaaagatagtgat

SEQ ID NO: 312914 - DNA, 25 bp, Artificial
  probe
  misc_feature (1)..(25): SEQ ID NO: 2033; WAN024G42; Start 132; Stop 156
ccatgccttcaaagatagtgataaa

SEQ ID NO: 312915 - DNA, 25 bp, Artificial
  probe
  misc_feature (1)..(25): SEQ ID NO: 2033; WAN024G42; Start 162; Stop 186
ctgtaacttctttcagacctgcttc

SEQ ID NO: 312916 - DNA, 25 bp, Artificial
  probe
  misc_feature (1)..(25): SEQ ID NO: 2033; WAN024G42; Start 207; Stop 231
ggatagtttccttgatttggctgat

SEQ ID NO: 312917 - DNA, 25 bp, Artificial
  probe
  misc_feature (1)..(25): SEQ ID NO: 2033; WAN024G42; Start 6; Stop 30
caatcacaatcacttcttcattgat

SEQ ID NO: 312918 - DNA, 25 bp, Artificial
  probe
  misc_feature (1)..(25): SEQ ID NO: 2033; WAN024G42; Start 9; Stop 33
tcacaatcacttcttcattgataga

SEQ ID NO: 312919 - DNA, 25 bp, Artificial
  probe
  misc_feature (1)..(25): SEQ ID NO: 2033; WAN024G42; Start 52; Stop 76
tttaccaagaaggtttgccaataca

SEQ ID NO: 312920 - DNA, 25 bp, Artificial
  probe
  misc_feature (1)..(25): SEQ ID NO: 2033; WAN024G42; Start 133; Stop 157
catgccttcaaagatagtgataaac

SEQ ID NO: 312921 - DNA, 25 bp, Artificial
  probe
  misc_feature (1)..(25): SEQ ID NO: 2033; WAN024G42; Start 53; Stop 77
ttaccaagaaggtttgccaatacac

SEQ ID NO: 312922 - DNA, 25 bp, Artificial
  probe
  misc_feature (1)..(25): SEQ ID NO: 2033; WAN024G42; Start 190; Stop 214
attcactttcttcgcacggatagtt

SEQ ID NO: 312923 - DNA, 25 bp, Artificial
  probe
  misc_feature (1)..(25): SEQ ID NO: 2033; WAN024G42; Start 10; Stop 34
cacaatcacttcttcattgatagaa

SEQ ID NO: 312924 - DNA, 25 bp, Artificial
  probe
  misc_feature (1)..(25): SEQ ID NO: 2033; WAN024G42; Start 191; Stop 215
ttcactttcttcgcacggatagttt

SEQ ID NO: 312925 - DNA, 25 bp, Artificial
  probe
  misc_feature (1)..(25): SEQ ID NO: 2033; WAN024G42; Start 8; Stop 32
atcacaatcacttcttcattgatag

SEQ ID NO: 312926 - DNA, 25 bp, Artificial
  probe
  misc_feature (1)..(25): SEQ ID NO: 2033; WAN024G42; Start 136; Stop 160
gccttcaaagatagtgataaacata

SEQ ID NO: 312927 - DNA, 25 bp, Artificial
  probe
  misc_feature (1)..(25): SEQ ID NO: 2033; WAN024G42; Start 125; Stop 149
ttgtcttccatgccttcaaagatag

SEQ ID NO: 312928 - DNA, 25 bp, Artificial
  probe
  misc_feature (1)..(25): SEQ ID NO: 2033; WAN024G42; Start 108; Stop 132
gttcttgcatgtatgggttgtcttc

SEQ ID NO: 312929 - DNA, 25 bp, Artificial
  probe
  misc_feature (1)..(25): SEQ ID NO: 2033; WAN024G42; Start 124; Stop 148
gttgtcttccatgccttcaaagata

SEQ ID NO: 312930 - DNA, 25 bp, Artificial
  probe
  misc_feature (1)..(25): SEQ ID NO: 2033; WAN024G42; Start 192; Stop 216
tcactttcttcgcacggatagtttc

SEQ ID NO: 312931 - DNA, 25 bp, Artificial
  probe
  misc_feature (1)..(25): SEQ ID NO: 2033; WAN024G42; Start 7; Stop 31
aatcacaatcacttcttcattgata

SEQ ID NO: 312932 - DNA, 25 bp, Artificial
  probe
  misc_feature (1)..(25): SEQ ID NO: 2033; WAN024G42; Start 189; Stop 213
cattcactttcttcgcacggatagt

SEQ ID NO: 312933 - DNA, 25 bp, Artificial
  probe
  misc_feature (1)..(25): SEQ ID NO: 2033; WAN024G42; Start 127; Stop 151
gtcttccatgccttcaaagatagtg

SEQ ID NO: 312934 - DNA, 25 bp, Artificial
  probe
  misc_feature (1)..(25): SEQ ID NO: 2033; WAN024G42; Start 128; Stop 152
tcttccatgccttcaaagatagtga

SEQ ID NO: 312935 - DNA, 25 bp, Artificial
  probe
  misc_feature (1)..(25): SEQ ID NO: 2033; WAN024G42; Start 200; Stop 224
ttcgcacggatagtttccttgattt

SEQ ID NO: 312936 - DNA, 25 bp, Artificial
  probe
  misc_feature (1)..(25): SEQ ID NO: 2033; WAN024G42; Start 126; Stop 150
tgtcttccatgccttcaaagatagt

SEQ ID NO: 312937 - DNA, 25 bp, Artificial
  probe
  misc_feature (1)..(25): SEQ ID NO: 2033; WAN024G42; Start 206; Stop 230
cggatagtttccttgatttggctga

SEQ ID NO: 312938 - DNA, 25 bp, Artificial
  probe
  misc_feature (1)..(25): SEQ ID NO: 2034; WAN024D57; Start 195; Stop 219
ctacctgctctactatctggacttg

SEQ ID NO: 312939 - DNA, 25 bp, Artificial
  probe
  misc_feature (1)..(25): SEQ ID NO: 2034; WAN024D57; Start 194; Stop 218
tctacctgctctactatctggactt

SEQ ID NO: 312940 - DNA, 25 bp, Artificial
  probe
  misc_feature (1)..(25): SEQ ID NO: 2034; WAN024D57; Start 193; Stop 217
ttctacctgctctactatctggact

SEQ ID NO: 312941 - DNA, 25 bp, Artificial
  probe
  misc_feature (1)..(25): SEQ ID NO: 2034; WAN024D57; Start 192; Stop 216
gttctacctgctctactatctggac

SEQ ID NO: 312942 - DNA, 25 bp, Artificial
  probe
  misc_feature (1)..(25): SEQ ID NO: 2034; WAN024D57; Start 204; Stop 228
ctactatctggacttggctgaagaa

SEQ ID NO: 312943 - DNA, 25 bp, Artificial
  probe
  misc_feature (1)..(25): SEQ ID NO: 2034; WAN024D57; Start 190; Stop 214
gagttctacctgctctactatctgg

SEQ ID NO: 312944 - DNA, 25 bp, Artificial
  probe
  misc_feature (1)..(25): SEQ ID NO: 2034; WAN024D57; Start 202; Stop 226
ctctactatctggacttggctgaag

SEQ ID NO: 312945 - DNA, 25 bp, Artificial
  probe
  misc_feature (1)..(25): SEQ ID NO: 2034; WAN024D57; Start 191; Stop 215
agttctacctgctctactatctgga

SEQ ID NO: 312946 - DNA, 25 bp, Artificial
  probe
  misc_feature (1)..(25): SEQ ID NO: 2034; WAN024D57; Start 203; Stop 227
tctactatctggacttggctgaaga

SEQ ID NO: 312947 - DNA, 25 bp, Artificial
  probe
  misc_feature (1)..(25): SEQ ID NO: 2034; WAN024D57; Start 196; Stop 220
tacctgctctactatctggacttgg

SEQ ID NO: 312948 - DNA, 25 bp, Artificial
  probe
  misc_feature (1)..(25): SEQ ID NO: 2034; WAN024D57; Start 73; Stop 97
ggagacactatgacctatttggaaa

SEQ ID NO: 312949 - DNA, 25 bp, Artificial
  probe
  misc_feature (1)..(25): SEQ ID NO: 2034; WAN024D57; Start 438; Stop 462
agcaggtttggatttcttgatttaa

SEQ ID NO: 312950 - DNA, 25 bp, Artificial
  probe
  misc_feature (1)..(25): SEQ ID NO: 2034; WAN024D57; Start 436; Stop 460
gaagcaggtttggatttcttgattt

SEQ ID NO: 312951 - DNA, 25 bp, Artificial
  probe
  misc_feature (1)..(25): SEQ ID NO: 2034; WAN024D57; Start 31; Stop 55
cccgttaatggactttcttctattt

SEQ ID NO: 312952 - DNA, 25 bp, Artificial
  probe
  misc_feature (1)..(25): SEQ ID NO: 2034; WAN024D57; Start 437; Stop 461
aagcaggtttggatttcttgattta

SEQ ID NO: 312953 - DNA, 25 bp, Artificial
  probe
  misc_feature (1)..(25): SEQ ID NO: 2034; WAN024D57; Start 30; Stop 54
gcccgttaatggactttcttctatt

SEQ ID NO: 312954 - DNA, 25 bp, Artificial
  probe
  misc_feature (1)..(25): SEQ ID NO: 2034; WAN024D57; Start 439; Stop 463
gcaggtttggatttcttgatttaac

SEQ ID NO: 312955 - DNA, 25 bp, Artificial
  probe
  misc_feature (1)..(25): SEQ ID NO: 2034; WAN024D57; Start 174; Stop 198
aagtctgaccttgaaagagttctac

SEQ ID NO: 312956 - DNA, 25 bp, Artificial
  probe
  misc_feature (1)..(25): SEQ ID NO: 2034; WAN024D57; Start 173; Stop 197
aaagtctgaccttgaaagagttcta

SEQ ID NO: 312957 - DNA, 25 bp, Artificial
  probe
  misc_feature (1)..(25): SEQ ID NO: 2034; WAN024D57; Start 205; Stop 229
tactatctggacttggctgaagaaa

SEQ ID NO: 312958 - DNA, 25 bp, Artificial
  probe
  misc_feature (1)..(25): SEQ ID NO: 2034; WAN024D57; Start 118; Stop 142
cgtcagaaagaaattgaaagtctct

SEQ ID NO: 312959 - DNA, 25 bp, Artificial
  probe
  misc_feature (1)..(25): SEQ ID NO: 2034; WAN024D57; Start 172; Stop 196
caaagtctgaccttgaaagagttct

SEQ ID NO: 312960 - DNA, 25 bp, Artificial
  probe
  misc_feature (1)..(25): SEQ ID NO: 2034; WAN024D57; Start 117; Stop 141
gcgtcagaaagaaattgaaagtctc

SEQ ID NO: 312961 - DNA, 25 bp, Artificial
  probe
  misc_feature (1)..(25): SEQ ID NO: 2034; WAN024D57; Start 177; Stop 201
tctgaccttgaaagagttctacctg

SEQ ID NO: 312962 - DNA, 25 bp, Artificial
  probe
  misc_feature (1)..(25): SEQ ID NO: 2034; WAN024D57; Start 29; Stop 53
tgcccgttaatggactttcttctat

SEQ ID NO: 312963 - DNA, 25 bp, Artificial
  probe
  misc_feature (1)..(25): SEQ ID NO: 2034; WAN024D57; Start 176; Stop 200
gtctgaccttgaaagagttctacct

SEQ ID NO: 312964 - DNA, 25 bp, Artificial
  probe
  misc_feature (1)..(25): SEQ ID NO: 2034; WAN024D57; Start 175; Stop 199
agtctgaccttgaaagagttctacc

SEQ ID NO: 312965 - DNA, 25 bp, Artificial
  probe
  misc_feature (1)..(25): SEQ ID NO: 2034; WAN024D57; Start 70; Stop 94
aaaggagacactatgacctatttgg

SEQ ID NO: 312966 - DNA, 25 bp, Artificial
  probe
  misc_feature (1)..(25): SEQ ID NO: 2034; WAN024D57; Start 201; Stop 225
gctctactatctggacttggctgaa

SEQ ID NO: 312967 - DNA, 25 bp, Artificial
  probe
  misc_feature (1)..(25): SEQ ID NO: 2034; WAN024D57; Start 440; Stop 464
caggtttggatttcttgatttaact

SEQ ID NO: 312968 - DNA, 25 bp, Artificial
  probe
  misc_feature (1)..(25): SEQ ID NO: 2034; WAN024D57; Start 72; Stop 96
aggagacactatgacctatttggaa

SEQ ID NO: 312969 - DNA, 25 bp, Artificial
  probe
  misc_feature (1)..(25): SEQ ID NO: 2034; WAN024D57; Start 71; Stop 95
aaggagacactatgacctatttgga

SEQ ID NO: 312970 - DNA, 25 bp, Artificial
  probe
  misc_feature (1)..(25): SEQ ID NO: 2034; WAN024D57; Start 69; Stop 93
gaaaggagacactatgacctatttg

SEQ ID NO: 312971 - DNA, 25 bp, Artificial
  probe
  misc_feature (1)..(25): SEQ ID NO: 2035; WAN024DZT; Start 973; Stop 997
cttcttgctgtattactgactctga

SEQ ID NO: 312972 - DNA, 25 bp, Artificial
  probe
  misc_feature (1)..(25): SEQ ID NO: 2035; WAN024DZT; Start 972; Stop 996
tcttcttgctgtattactgactctg

SEQ ID NO: 312973 - DNA, 25 bp, Artificial
  probe
  misc_feature (1)..(25): SEQ ID NO: 2035; WAN024DZT; Start 975; Stop 999
tcttgctgtattactgactctgatt

SEQ ID NO: 312974 - DNA, 25 bp, Artificial
  probe
  misc_feature (1)..(25): SEQ ID NO: 2035; WAN024DZT; Start 974; Stop 998
ttcttgctgtattactgactctgat

SEQ ID NO: 312975 - DNA, 25 bp, Artificial
  probe
  misc_feature (1)..(25): SEQ ID NO: 2035; WAN024DZT; Start 971; Stop 995
atcttcttgctgtattactgactct

SEQ ID NO: 312976 - DNA, 25 bp, Artificial
  probe
  misc_feature (1)..(25): SEQ ID NO: 2035; WAN024DZT; Start 1610; Stop 1634
atatgagagaattggcagagaagac

SEQ ID NO: 312977 - DNA, 25 bp, Artificial
  probe
  misc_feature (1)..(25): SEQ ID NO: 2035; WAN024DZT; Start 1607; Stop 1631
cctatatgagagaattggcagagaa

SEQ ID NO: 312978 - DNA, 25 bp, Artificial
  probe
  misc_feature (1)..(25): SEQ ID NO: 2035; WAN024DZT; Start 970; Stop 994
aatcttcttgctgtattactgactc

SEQ ID NO: 312979 - DNA, 25 bp, Artificial
  probe
  misc_feature (1)..(25): SEQ ID NO: 2035; WAN024DZT; Start 1611; Stop 1635
tatgagagaattggcagagaagaca

SEQ ID NO: 312980 - DNA, 25 bp, Artificial
  probe
  misc_feature (1)..(25): SEQ ID NO: 2035; WAN024DZT; Start 1609; Stop 1633
tatatgagagaattggcagagaaga

SEQ ID NO: 312981 - DNA, 25 bp, Artificial
  probe
  misc_feature (1)..(25): SEQ ID NO: 2035; WAN024DZT; Start 1608; Stop 1632
ctatatgagagaattggcagagaag

SEQ ID NO: 312982 - DNA, 25 bp, Artificial
  probe
  misc_feature (1)..(25): SEQ ID NO: 2035; WAN024DZT; Start 1616; Stop 1640
gagaattggcagagaagacacctta

SEQ ID NO: 312983 - DNA, 25 bp, Artificial
  probe
  misc_feature (1)..(25): SEQ ID NO: 2035; WAN024DZT; Start 1612; Stop 1636
atgagagaattggcagagaagacac

SEQ ID NO: 312984 - DNA, 25 bp, Artificial
  probe
  misc_feature (1)..(25): SEQ ID NO: 2035; WAN024DZT; Start 991; Stop 1015
actctgatttgttcttatggctttg

SEQ ID NO: 312985 - DNA, 25 bp, Artificial
  probe
  misc_feature (1)..(25): SEQ ID NO: 2035; WAN024DZT; Start 978; Stop 1002
tgctgtattactgactctgatttgt

SEQ ID NO: 312986 - DNA, 25 bp, Artificial
  probe
  misc_feature (1)..(25): SEQ ID NO: 2035; WAN024DZT; Start 990; Stop 1014
gactctgatttgttcttatggcttt

SEQ ID NO: 312987 - DNA, 25 bp, Artificial
  probe
  misc_feature (1)..(25): SEQ ID NO: 2035; WAN024DZT; Start 989; Stop 1013
tgactctgatttgttcttatggctt

SEQ ID NO: 312988 - DNA, 25 bp, Artificial
  probe
  misc_feature (1)..(25): SEQ ID NO: 2035; WAN024DZT; Start 988; Stop 1012
ctgactctgatttgttcttatggct

SEQ ID NO: 312989 - DNA, 25 bp, Artificial
  probe
  misc_feature (1)..(25): SEQ ID NO: 2035; WAN024DZT; Start 317; Stop 341
taggctttatgaccaacttctatga

SEQ ID NO: 312990 - DNA, 25 bp, Artificial
  probe
  misc_feature (1)..(25): SEQ ID NO: 2035; WAN024DZT; Start 314; Stop 338
tcttaggctttatgaccaacttcta

SEQ ID NO: 312991 - DNA, 25 bp, Artificial
  probe
  misc_feature (1)..(25): SEQ ID NO: 2035; WAN024DZT; Start 992; Stop 1016
ctctgatttgttcttatggctttgc

SEQ ID NO: 312992 - DNA, 25 bp, Artificial
  probe
  misc_feature (1)..(25): SEQ ID NO: 2035; WAN024DZT; Start 979; Stop 1003
gctgtattactgactctgatttgtt

SEQ ID NO: 312993 - DNA, 25 bp, Artificial
  probe
  misc_feature (1)..(25): SEQ ID NO: 2035; WAN024DZT; Start 977; Stop 1001
ttgctgtattactgactctgatttg

SEQ ID NO: 312994 - DNA, 25 bp, Artificial
  probe
  misc_feature (1)..(25): SEQ ID NO: 2035; WAN024DZT; Start 319; Stop 343
ggctttatgaccaacttctatgaac

SEQ ID NO: 312995 - DNA, 25 bp, Artificial
  probe
  misc_feature (1)..(25): SEQ ID NO: 2035; WAN024DZT; Start 318; Stop 342
aggctttatgaccaacttctatgaa

SEQ ID NO: 312996 - DNA, 25 bp, Artificial
  probe
  misc_feature (1)..(25): SEQ ID NO: 2035; WAN024DZT; Start 987; Stop 1011
actgactctgatttgttcttatggc

SEQ ID NO: 312997 - DNA, 25 bp, Artificial
  probe
  misc_feature (1)..(25): SEQ ID NO: 2035; WAN024DZT; Start 976; Stop 1000
cttgctgtattactgactctgattt

SEQ ID NO: 312998 - DNA, 25 bp, Artificial
  probe
  misc_feature (1)..(25): SEQ ID NO: 2035; WAN024DZT; Start 320; Stop 344
gctttatgaccaacttctatgaact

SEQ ID NO: 312999 - DNA, 25 bp, Artificial
  probe
  misc_feature (1)..(25): SEQ ID NO: 2035; WAN024DZT; Start 316; Stop 340
ttaggctttatgaccaacttctatg

SEQ ID NO: 313000 - DNA, 25 bp, Artificial
  probe
  misc_feature (1)..(25): SEQ ID NO: 2035; WAN024DZT; Start 986; Stop 1010
tactgactctgatttgttcttatgg

SEQ ID NO: 313001 - DNA, 25 bp, Artificial
  probe
  misc_feature (1)..(25): SEQ ID NO: 2035; WAN024DZT; Start 315; Stop 339
cttaggctttatgaccaacttctat

SEQ ID NO: 313002 - DNA, 25 bp, Artificial
  probe
  misc_feature (1)..(25): SEQ ID NO: 2035; WAN024DZT; Start 969; Stop 993
aaatcttcttgctgtattactgact

SEQ ID NO: 313003 - DNA, 25 bp, Artificial
  probe
  misc_feature (1)..(25): SEQ ID NO: 2035; WAN024DZT; Start 1600; Stop 1624
gctgctgcctatatgagagaattgg

SEQ ID NO: 313004 - DNA, 25 bp, Artificial
  probe
  misc_feature (1)..(25): SEQ ID NO: 2036; WAN024FER; Start 99; Stop 123
catggtatcttctacacgatggatt

SEQ ID NO: 313005 - DNA, 25 bp, Artificial
  probe
  misc_feature (1)..(25): SEQ ID NO: 2036; WAN024FER; Start 96; Stop 120
aatcatggtatcttctacacgatgg

SEQ ID NO: 313006 - DNA, 25 bp, Artificial
  probe
  misc_feature (1)..(25): SEQ ID NO: 2036; WAN024FER; Start 94; Stop 118
cgaatcatggtatcttctacacgat

SEQ ID NO: 313007 - DNA, 25 bp, Artificial
  probe
  misc_feature (1)..(25): SEQ ID NO: 2036; WAN024FER; Start 95; Stop 119
gaatcatggtatcttctacacgatg

SEQ ID NO: 313008 - DNA, 25 bp, Artificial
  probe
  misc_feature (1)..(25): SEQ ID NO: 2036; WAN024FER; Start 98; Stop 122
tcatggtatcttctacacgatggat

SEQ ID NO: 313009 - DNA, 25 bp, Artificial
  probe
  misc_feature (1)..(25): SEQ ID NO: 2036; WAN024FER; Start 97; Stop 121
atcatggtatcttctacacgatgga

SEQ ID NO: 313010 - DNA, 25 bp, Artificial
  probe
  misc_feature (1)..(25): SEQ ID NO: 2036; WAN024FER; Start 155; Stop 179
ctagcataatcacatcaatgacggc

SEQ ID NO: 313011 - DNA, 25 bp, Artificial
  probe
  misc_feature (1)..(25): SEQ ID NO: 2036; WAN024FER; Start 105; Stop 129
atcttctacacgatggatttctgag

SEQ ID NO: 313012 - DNA, 25 bp, Artificial
  probe
  misc_feature (1)..(25): SEQ ID NO: 2036; WAN024FER; Start 102; Stop 126
ggtatcttctacacgatggatttct

SEQ ID NO: 313013 - DNA, 25 bp, Artificial
  probe
  misc_feature (1)..(25): SEQ ID NO: 2036; WAN024FER; Start 101; Stop 125
tggtatcttctacacgatggatttc

SEQ ID NO: 313014 - DNA, 25 bp, Artificial
  probe
  misc_feature (1)..(25): SEQ ID NO: 2036; WAN024FER; Start 100; Stop 124
atggtatcttctacacgatggattt

SEQ ID NO: 313015 - DNA, 25 bp, Artificial
  probe
  misc_feature (1)..(25): SEQ ID NO: 2036; WAN024FER; Start 104; Stop 128
tatcttctacacgatggatttctga

SEQ ID NO: 313016 - DNA, 25 bp, Artificial
  probe
  misc_feature (1)..(25): SEQ ID NO: 2036; WAN024FER; Start 103; Stop 127
gtatcttctacacgatggatttctg

SEQ ID NO: 313017 - DNA, 25 bp, Artificial
  probe
  misc_feature (1)..(25): SEQ ID NO: 2036; WAN024FER; Start 219; Stop 243
tcaactccctctattctatcacaaa

SEQ ID NO: 313018 - DNA, 25 bp, Artificial
  probe
  misc_feature (1)..(25): SEQ ID NO: 2036; WAN024FER; Start 156; Stop 180
tagcataatcacatcaatgacggca

SEQ ID NO: 313019 - DNA, 25 bp, Artificial
  probe
  misc_feature (1)..(25): SEQ ID NO: 2036; WAN024FER; Start 218; Stop 242
atcaactccctctattctatcacaa

SEQ ID NO: 313020 - DNA, 25 bp, Artificial
  probe
  misc_feature (1)..(25): SEQ ID NO: 2036; WAN024FER; Start 220; Stop 244
caactccctctattctatcacaaat

SEQ ID NO: 313021 - DNA, 25 bp, Artificial
  probe
  misc_feature (1)..(25): SEQ ID NO: 2036; WAN024FER; Start 217; Stop 241
tatcaactccctctattctatcaca

SEQ ID NO: 313022 - DNA, 25 bp, Artificial
  probe
  misc_feature (1)..(25): SEQ ID NO: 2036; WAN024FER; Start 221; Stop 245
aactccctctattctatcacaaatc

SEQ ID NO: 313023 - DNA, 25 bp, Artificial
  probe
  misc_feature (1)..(25): SEQ ID NO: 2036; WAN024FER; Start 157; Stop 181
agcataatcacatcaatgacggcat

SEQ ID NO: 313024 - DNA, 25 bp, Artificial
  probe
  misc_feature (1)..(25): SEQ ID NO: 2036; WAN024FER; Start 106; Stop 130
tcttctacacgatggatttctgagc

SEQ ID NO: 313025 - DNA, 25 bp, Artificial
  probe
  misc_feature (1)..(25): SEQ ID NO: 2036; WAN024FER; Start 158; Stop 182
gcataatcacatcaatgacggcatt

SEQ ID NO: 313026 - DNA, 25 bp, Artificial
  probe
  misc_feature (1)..(25): SEQ ID NO: 2036; WAN024FER; Start 93; Stop 117
tcgaatcatggtatcttctacacga

SEQ ID NO: 313027 - DNA, 25 bp, Artificial
  probe
  misc_feature (1)..(25): SEQ ID NO: 2036; WAN024FER; Start 216; Stop 240
ttatcaactccctctattctatcac

SEQ ID NO: 313028 - DNA, 25 bp, Artificial
  probe
  misc_feature (1)..(25): SEQ ID NO: 2036; WAN024FER; Start 166; Stop 190
acatcaatgacggcatttaattctt

SEQ ID NO: 313029 - DNA, 25 bp, Artificial
  probe
  misc_feature (1)..(25): SEQ ID NO: 2036; WAN024FER; Start 163; Stop 187
atcacatcaatgacggcatttaatt

SEQ ID NO: 313030 - DNA, 25 bp, Artificial
  probe
  misc_feature (1)..(25): SEQ ID NO: 2036; WAN024FER; Start 162; Stop 186
aatcacatcaatgacggcatttaat

SEQ ID NO: 313031 - DNA, 25 bp, Artificial
  probe
  misc_feature (1)..(25): SEQ ID NO: 2036; WAN024FER; Start 192; Stop 216
tgattcttccatgctttcctccttt

SEQ ID NO: 313032 - DNA, 25 bp, Artificial
  probe
  misc_feature (1)..(25): SEQ ID NO: 2036; WAN024FER; Start 191; Stop 215
ttgattcttccatgctttcctcctt

SEQ ID NO: 313033 - DNA, 25 bp, Artificial
  probe
  misc_feature (1)..(25): SEQ ID NO: 2036; WAN024FER; Start 190; Stop 214
tttgattcttccatgctttcctcct

SEQ ID NO: 313034 - DNA, 25 bp, Artificial
  probe
  misc_feature (1)..(25): SEQ ID NO: 2036; WAN024FER; Start 165; Stop 189
cacatcaatgacggcatttaattct

SEQ ID NO: 313035 - DNA, 25 bp, Artificial
  probe
  misc_feature (1)..(25): SEQ ID NO: 2036; WAN024FER; Start 164; Stop 188
tcacatcaatgacggcatttaattc

SEQ ID NO: 313036 - DNA, 25 bp, Artificial
  probe
  misc_feature (1)..(25): SEQ ID NO: 2036; WAN024FER; Start 159; Stop 183
cataatcacatcaatgacggcattt

SEQ ID NO: 313037 - DNA, 25 bp, Artificial
  probe
  misc_feature (1)..(25): SEQ ID NO: 2037; WAN024FSS; Start 654; Stop 678
tcttgactggtctaactggaatatc

SEQ ID NO: 313038 - DNA, 25 bp, Artificial
  probe
  misc_feature (1)..(25): SEQ ID NO: 2037; WAN024FSS; Start 653; Stop 677
ctcttgactggtctaactggaatat

SEQ ID NO: 313039 - DNA, 25 bp, Artificial
  probe
  misc_feature (1)..(25): SEQ ID NO: 2037; WAN024FSS; Start 652; Stop 676
gctcttgactggtctaactggaata

SEQ ID NO: 313040 - DNA, 25 bp, Artificial
  probe
  misc_feature (1)..(25): SEQ ID NO: 2037; WAN024FSS; Start 696; Stop 720
catctctatcttccgtcaagcagaa

SEQ ID NO: 313041 - DNA, 25 bp, Artificial
  probe
  misc_feature (1)..(25): SEQ ID NO: 2037; WAN024FSS; Start 843; Stop 867
taagttcggaagctatctacacaag

SEQ ID NO: 313042 - DNA, 25 bp, Artificial
  probe
  misc_feature (1)..(25): SEQ ID NO: 2037; WAN024FSS; Start 655; Stop 679
cttgactggtctaactggaatatcc

SEQ ID NO: 313043 - DNA, 25 bp, Artificial
  probe
  misc_feature (1)..(25): SEQ ID NO: 2037; WAN024FSS; Start 842; Stop 866
gtaagttcggaagctatctacacaa

SEQ ID NO: 313044 - DNA, 25 bp, Artificial
  probe
  misc_feature (1)..(25): SEQ ID NO: 2037; WAN024FSS; Start 526; Stop 550
gagacagtggttcatgttgttattc

SEQ ID NO: 313045 - DNA, 25 bp, Artificial
  probe
  misc_feature (1)..(25): SEQ ID NO: 2037; WAN024FSS; Start 656; Stop 680
ttgactggtctaactggaatatcct

SEQ ID NO: 313046 - DNA, 25 bp, Artificial
  probe
  misc_feature (1)..(25): SEQ ID NO: 2037; WAN024FSS; Start 659; Stop 683
actggtctaactggaatatcctcag

SEQ ID NO: 313047 - DNA, 25 bp, Artificial
  probe
  misc_feature (1)..(25): SEQ ID NO: 2037; WAN024FSS; Start 658; Stop 682
gactggtctaactggaatatcctca

SEQ ID NO: 313048 - DNA, 25 bp, Artificial
  probe
  misc_feature (1)..(25): SEQ ID NO: 2037; WAN024FSS; Start 657; Stop 681
tgactggtctaactggaatatcctc

SEQ ID NO: 313049 - DNA, 25 bp, Artificial
  probe
  misc_feature (1)..(25): SEQ ID NO: 2037; WAN024FSS; Start 527; Stop 551
agacagtggttcatgttgttattcc

SEQ ID NO: 313050 - DNA, 25 bp, Artificial
  probe
  misc_feature (1)..(25): SEQ ID NO: 2037; WAN024FSS; Start 525; Stop 549
ggagacagtggttcatgttgttatt

SEQ ID NO: 313051 - DNA, 25 bp, Artificial
  probe
  misc_feature (1)..(25): SEQ ID NO: 2037; WAN024FSS; Start 250; Stop 274
gggatttacttggctgaatatgcta

SEQ ID NO: 313052 - DNA, 25 bp, Artificial
  probe
  misc_feature (1)..(25): SEQ ID NO: 2037; WAN024FSS; Start 251; Stop 275
ggatttacttggctgaatatgctaa

SEQ ID NO: 313053 - DNA, 25 bp, Artificial
  probe
  misc_feature (1)..(25): SEQ ID NO: 2037; WAN024FSS; Start 839; Stop 863
ctcgtaagttcggaagctatctaca

SEQ ID NO: 313054 - DNA, 25 bp, Artificial
  probe
  misc_feature (1)..(25): SEQ ID NO: 2037; WAN024FSS; Start 865; Stop 889
aagaaattaaccgctgcctaactaa

SEQ ID NO: 313055 - DNA, 25 bp, Artificial
  probe
  misc_feature (1)..(25): SEQ ID NO: 2037; WAN024FSS; Start 845; Stop 869
agttcggaagctatctacacaagaa

SEQ ID NO: 313056 - DNA, 25 bp, Artificial
  probe
  misc_feature (1)..(25): SEQ ID NO: 2037; WAN024FSS; Start 844; Stop 868
aagttcggaagctatctacacaaga

SEQ ID NO: 313057 - DNA, 25 bp, Artificial
  probe
  misc_feature (1)..(25): SEQ ID NO: 2037; WAN024FSS; Start 854; Stop 878
gctatctacacaagaaattaaccgc

SEQ ID NO: 313058 - DNA, 25 bp, Artificial
  probe
  misc_feature (1)..(25): SEQ ID NO: 2037; WAN024FSS; Start 866; Stop 890
agaaattaaccgctgcctaactaat

SEQ ID NO: 313059 - DNA, 25 bp, Artificial
  probe
  misc_feature (1)..(25): SEQ ID NO: 2037; WAN024FSS; Start 364; Stop 388
atctttgtagtccagtttgagtatg

SEQ ID NO: 313060 - DNA, 25 bp, Artificial
  probe
  misc_feature (1)..(25): SEQ ID NO: 2037; WAN024FSS; Start 840; Stop 864
tcgtaagttcggaagctatctacac

SEQ ID NO: 313061 - DNA, 25 bp, Artificial
  probe
  misc_feature (1)..(25): SEQ ID NO: 2037; WAN024FSS; Start 735; Stop 759
tatctggaaagtcaatagtgaaggc

SEQ ID NO: 313062 - DNA, 25 bp, Artificial
  probe
  misc_feature (1)..(25): SEQ ID NO: 2037; WAN024FSS; Start 856; Stop 880
tatctacacaagaaattaaccgctg

SEQ ID NO: 313063 - DNA, 25 bp, Artificial
  probe
  misc_feature (1)..(25): SEQ ID NO: 2037; WAN024FSS; Start 361; Stop 385
ttgatctttgtagtccagtttgagt

SEQ ID NO: 313064 - DNA, 25 bp, Artificial
  probe
  misc_feature (1)..(25): SEQ ID NO: 2037; WAN024FSS; Start 346; Stop 370
ggtctctttggttacttgatctttg

SEQ ID NO: 313065 - DNA, 25 bp, Artificial
  probe
  misc_feature (1)..(25): SEQ ID NO: 2037; WAN024FSS; Start 864; Stop 888
caagaaattaaccgctgcctaacta

SEQ ID NO: 313066 - DNA, 25 bp, Artificial
  probe
  misc_feature (1)..(25): SEQ ID NO: 2037; WAN024FSS; Start 855; Stop 879
ctatctacacaagaaattaaccgct

SEQ ID NO: 313067 - DNA, 25 bp, Artificial
  probe
  misc_feature (1)..(25): SEQ ID NO: 2037; WAN024FSS; Start 360; Stop 384
cttgatctttgtagtccagtttgag

SEQ ID NO: 313068 - DNA, 25 bp, Artificial
  probe
  misc_feature (1)..(25): SEQ ID NO: 2037; WAN024FSS; Start 362; Stop 386
tgatctttgtagtccagtttgagta

SEQ ID NO: 313069 - DNA, 25 bp, Artificial
  probe
  misc_feature (1)..(25): SEQ ID NO: 2037; WAN024FSS; Start 841; Stop 865
cgtaagttcggaagctatctacaca

SEQ ID NO: 313070 - DNA, 25 bp, Artificial
  probe
  misc_feature (1)..(25): SEQ ID NO: 2038; WAN024CYJ; Start 38; Stop 62
gtgaacgcttgtaccttacttctaa

SEQ ID NO: 313071 - DNA, 25 bp, Artificial
  probe
  misc_feature (1)..(25): SEQ ID NO: 2038; WAN024CYJ; Start 14; Stop 38
ttacacttgaacacaaagaatctgg

SEQ ID NO: 313072 - DNA, 25 bp, Artificial
  probe
  misc_feature (1)..(25): SEQ ID NO: 2038; WAN024CYJ; Start 15; Stop 39
tacacttgaacacaaagaatctggt

SEQ ID NO: 313073 - DNA, 25 bp, Artificial
  probe
  misc_feature (1)..(25): SEQ ID NO: 2038; WAN024CYJ; Start 39; Stop 63
tgaacgcttgtaccttacttctaaa

SEQ ID NO: 313074 - DNA, 25 bp, Artificial
  probe
  misc_feature (1)..(25): SEQ ID NO: 2038; WAN024CYJ; Start 37; Stop 61
ggtgaacgcttgtaccttacttcta

SEQ ID NO: 313075 - DNA, 25 bp, Artificial
  probe
  misc_feature (1)..(25): SEQ ID NO: 2038; WAN024CYJ; Start 19; Stop 43
cttgaacacaaagaatctggtgaac

SEQ ID NO: 313076 - DNA, 25 bp, Artificial
  probe
  misc_feature (1)..(25): SEQ ID NO: 2038; WAN024CYJ; Start 13; Stop 37
attacacttgaacacaaagaatctg

SEQ ID NO: 313077 - DNA, 25 bp, Artificial
  probe
  misc_feature (1)..(25): SEQ ID NO: 2038; WAN024CYJ; Start 18; Stop 42
acttgaacacaaagaatctggtgaa

SEQ ID NO: 313078 - DNA, 25 bp, Artificial
  probe
  misc_feature (1)..(25): SEQ ID NO: 2038; WAN024CYJ; Start 17; Stop 41
cacttgaacacaaagaatctggtga

SEQ ID NO: 313079 - DNA, 25 bp, Artificial
  probe
  misc_feature (1)..(25): SEQ ID NO: 2038; WAN024CYJ; Start 31; Stop 55
gaatctggtgaacgcttgtacctta

SEQ ID NO: 313080 - DNA, 25 bp, Artificial
  probe
  misc_feature (1)..(25): SEQ ID NO: 2038; WAN024CYJ; Start 16; Stop 40
acacttgaacacaaagaatctggtg

SEQ ID NO: 313081 - DNA, 25 bp, Artificial
  probe
  misc_feature (1)..(25): SEQ ID NO: 2038; WAN024CYJ; Start 32; Stop 56
aatctggtgaacgcttgtaccttac

SEQ ID NO: 313082 - DNA, 25 bp, Artificial
  probe
  misc_feature (1)..(25): SEQ ID NO: 2038; WAN024CYJ; Start 20; Stop 44
ttgaacacaaagaatctggtgaacg

SEQ ID NO: 313083 - DNA, 25 bp, Artificial
  probe
  misc_feature (1)..(25): SEQ ID NO: 2038; WAN024CYJ; Start 27; Stop 51
caaagaatctggtgaacgcttgtac

SEQ ID NO: 313084 - DNA, 25 bp, Artificial
  probe
  misc_feature (1)..(25): SEQ ID NO: 2038; WAN024CYJ; Start 5; Stop 29
gcgtaaatattacacttgaacacaa

SEQ ID NO: 313085 - DNA, 25 bp, Artificial
  probe
  misc_feature (1)..(25): SEQ ID NO: 2038; WAN024CYJ; Start 100; Stop 124
aaatactcaccaaaacttcgcaaac

SEQ ID NO: 313086 - DNA, 25 bp, Artificial
  probe
  misc_feature (1)..(25): SEQ ID NO: 2038; WAN024CYJ; Start 99; Stop 123
gaaatactcaccaaaacttcgcaaa

SEQ ID NO: 313087 - DNA, 25 bp, Artificial
  probe
  misc_feature (1)..(25): SEQ ID NO: 2038; WAN024CYJ; Start 35; Stop 59
ctggtgaacgcttgtaccttacttc

SEQ ID NO: 313088 - DNA, 25 bp, Artificial
  probe
  misc_feature (1)..(25): SEQ ID NO: 2038; WAN024CYJ; Start 12; Stop 36
tattacacttgaacacaaagaatct

SEQ ID NO: 313089 - DNA, 25 bp, Artificial
  probe
  misc_feature (1)..(25): SEQ ID NO: 2038; WAN024CYJ; Start 98; Stop 122
agaaatactcaccaaaacttcgcaa

SEQ ID NO: 313090 - DNA, 25 bp, Artificial
  probe
  misc_feature (1)..(25): SEQ ID NO: 2038; WAN024CYJ; Start 97; Stop 121
aagaaatactcaccaaaacttcgca

SEQ ID NO: 313091 - DNA, 25 bp, Artificial
  probe
  misc_feature (1)..(25): SEQ ID NO: 2038; WAN024CYJ; Start 33; Stop 57
atctggtgaacgcttgtaccttact

SEQ ID NO: 313092 - DNA, 25 bp, Artificial
  probe
  misc_feature (1)..(25): SEQ ID NO: 2038; WAN024CYJ; Start 101; Stop 125
aatactcaccaaaacttcgcaaaca

SEQ ID NO: 313093 - DNA, 25 bp, Artificial
  probe
  misc_feature (1)..(25): SEQ ID NO: 2038; WAN024CYJ; Start 40; Stop 64
gaacgcttgtaccttacttctaaaa

SEQ ID NO: 313094 - DNA, 25 bp, Artificial
  probe
  misc_feature (1)..(25): SEQ ID NO: 2038; WAN024CYJ; Start 36; Stop 60
tggtgaacgcttgtaccttacttct

SEQ ID NO: 313095 - DNA, 25 bp, Artificial
  probe
  misc_feature (1)..(25): SEQ ID NO: 2038; WAN024CYJ; Start 34; Stop 58
tctggtgaacgcttgtaccttactt

SEQ ID NO: 313096 - DNA, 25 bp, Artificial
  probe
  misc_feature (1)..(25): SEQ ID NO: 2038; WAN024CYJ; Start 71; Stop 95
gtaacactccagaccgccttcaatt

SEQ ID NO: 313097 - DNA, 25 bp, Artificial
  probe
  misc_feature (1)..(25): SEQ ID NO: 2038; WAN024CYJ; Start 30; Stop 54
agaatctggtgaacgcttgtacctt

SEQ ID NO: 313098 - DNA, 25 bp, Artificial
  probe
  misc_feature (1)..(25): SEQ ID NO: 2038; WAN024CYJ; Start 29; Stop 53
aagaatctggtgaacgcttgtacct

SEQ ID NO: 313099 - DNA, 25 bp, Artificial
  probe
  misc_feature (1)..(25): SEQ ID NO: 2038; WAN024CYJ; Start 102; Stop 126
atactcaccaaaacttcgcaaacac

SEQ ID NO: 313100 - DNA, 25 bp, Artificial
  probe
  misc_feature (1)..(25): SEQ ID NO: 2038; WAN024CYJ; Start 23; Stop 47
aacacaaagaatctggtgaacgctt

SEQ ID NO: 313101 - DNA, 25 bp, Artificial
  probe
  misc_feature (1)..(25): SEQ ID NO: 2038; WAN024CYJ; Start 11; Stop 35
atattacacttgaacacaaagaatc

SEQ ID NO: 313102 - DNA, 25 bp, Artificial
  probe
  misc_feature (1)..(25): SEQ ID NO: 2038; WAN024CYJ; Start 28; Stop 52
aaagaatctggtgaacgcttgtacc

SEQ ID NO: 313103 - DNA, 25 bp, Artificial
  probe
  misc_feature (1)..(25): SEQ ID NO: 2039; WAN024B8M; Start 10; Stop 34
gcgtggtcatcaatagcgataatat

SEQ ID NO: 313104 - DNA, 25 bp, Artificial
  probe
  misc_feature (1)..(25): SEQ ID NO: 2039; WAN024B8M; Start 9; Stop 33
tgcgtggtcatcaatagcgataata

SEQ ID NO: 313105 - DNA, 25 bp, Artificial
  probe
  misc_feature (1)..(25): SEQ ID NO: 2039; WAN024B8M; Start 11; Stop 35
cgtggtcatcaatagcgataatatt

SEQ ID NO: 313106 - DNA, 25 bp, Artificial
  probe
  misc_feature (1)..(25): SEQ ID NO: 2039; WAN024B8M; Start 26; Stop 50
cgataatattcatatcctgcttggc

SEQ ID NO: 313107 - DNA, 25 bp, Artificial
  probe
  misc_feature (1)..(25): SEQ ID NO: 2039; WAN024B8M; Start 25; Stop 49
gcgataatattcatatcctgcttgg

SEQ ID NO: 313108 - DNA, 25 bp, Artificial
  probe
  misc_feature (1)..(25): SEQ ID NO: 2039; WAN024B8M; Start 221; Stop 245
ccaattcgtcccataaacataagtg

SEQ ID NO: 313109 - DNA, 25 bp, Artificial
  probe
  misc_feature (1)..(25): SEQ ID NO: 2039; WAN024B8M; Start 29; Stop 53
taatattcatatcctgcttggctag

SEQ ID NO: 313110 - DNA, 25 bp, Artificial
  probe
  misc_feature (1)..(25): SEQ ID NO: 2039; WAN024B8M; Start 220; Stop 244
accaattcgtcccataaacataagt

SEQ ID NO: 313111 - DNA, 25 bp, Artificial
  probe
  misc_feature (1)..(25): SEQ ID NO: 2039; WAN024B8M; Start 116; Stop 140
tgctctttcctttcttaaccaatac

SEQ ID NO: 313112 - DNA, 25 bp, Artificial
  probe
  misc_feature (1)..(25): SEQ ID NO: 2039; WAN024B8M; Start 30; Stop 54
aatattcatatcctgcttggctagg

SEQ ID NO: 313113 - DNA, 25 bp, Artificial
  probe
  misc_feature (1)..(25): SEQ ID NO: 2039; WAN024B8M; Start 117; Stop 141
gctctttcctttcttaaccaatact

SEQ ID NO: 313114 - DNA, 25 bp, Artificial
  probe
  misc_feature (1)..(25): SEQ ID NO: 2039; WAN024B8M; Start 27; Stop 51
gataatattcatatcctgcttggct

SEQ ID NO: 313115 - DNA, 25 bp, Artificial
  probe
  misc_feature (1)..(25): SEQ ID NO: 2039; WAN024B8M; Start 248; Stop 272
atgataacactgagagccaatttcc

SEQ ID NO: 313116 - DNA, 25 bp, Artificial
  probe
  misc_feature (1)..(25): SEQ ID NO: 2039; WAN024B8M; Start 13; Stop 37
tggtcatcaatagcgataatattca

SEQ ID NO: 313117 - DNA, 25 bp, Artificial
  probe
  misc_feature (1)..(25): SEQ ID NO: 2039; WAN024B8M; Start 12; Stop 36
gtggtcatcaatagcgataatattc

SEQ ID NO: 313118 - DNA, 25 bp, Artificial
  probe
  misc_feature (1)..(25): SEQ ID NO: 2039; WAN024B8M; Start 115; Stop 139
atgctctttcctttcttaaccaata

SEQ ID NO: 313119 - DNA, 25 bp, Artificial
  probe
  misc_feature (1)..(25): SEQ ID NO: 2039; WAN024B8M; Start 247; Stop 271
catgataacactgagagccaatttc

SEQ ID NO: 313120 - DNA, 25 bp, Artificial
  probe
  misc_feature (1)..(25): SEQ ID NO: 2039; WAN024B8M; Start 114; Stop 138
catgctctttcctttcttaaccaat

SEQ ID NO: 313121 - DNA, 25 bp, Artificial
  probe
  misc_feature (1)..(25): SEQ ID NO: 2039; WAN024B8M; Start 110; Stop 134
ctgacatgctctttcctttcttaac

SEQ ID NO: 313122 - DNA, 25 bp, Artificial
  probe
  misc_feature (1)..(25): SEQ ID NO: 2039; WAN024B8M; Start 109; Stop 133
tctgacatgctctttcctttcttaa

SEQ ID NO: 313123 - DNA, 25 bp, Artificial
  probe
  misc_feature (1)..(25): SEQ ID NO: 2039; WAN024B8M; Start 108; Stop 132
atctgacatgctctttcctttctta

SEQ ID NO: 313124 - DNA, 25 bp, Artificial
  probe
  misc_feature (1)..(25): SEQ ID NO: 2039; WAN024B8M; Start 8; Stop 32
ctgcgtggtcatcaatagcgataat

SEQ ID NO: 313125 - DNA, 25 bp, Artificial
  probe
  misc_feature (1)..(25): SEQ ID NO: 2039; WAN024B8M; Start 28; Stop 52
ataatattcatatcctgcttggcta

SEQ ID NO: 313126 - DNA, 25 bp, Artificial
  probe
  misc_feature (1)..(25): SEQ ID NO: 2039; WAN024B8M; Start 113; Stop 137
acatgctctttcctttcttaaccaa

SEQ ID NO: 313127 - DNA, 25 bp, Artificial
  probe
  misc_feature (1)..(25): SEQ ID NO: 2039; WAN024B8M; Start 219; Stop 243
gaccaattcgtcccataaacataag

SEQ ID NO: 313128 - DNA, 25 bp, Artificial
  probe
  misc_feature (1)..(25): SEQ ID NO: 2039; WAN024B8M; Start 107; Stop 131
gatctgacatgctctttcctttctt

SEQ ID NO: 313129 - DNA, 25 bp, Artificial
  probe
  misc_feature (1)..(25): SEQ ID NO: 2039; WAN024B8M; Start 112; Stop 136
gacatgctctttcctttcttaacca

SEQ ID NO: 313130 - DNA, 25 bp, Artificial
  probe
  misc_feature (1)..(25): SEQ ID NO: 2039; WAN024B8M; Start 111; Stop 135
tgacatgctctttcctttcttaacc

SEQ ID NO: 313131 - DNA, 25 bp, Artificial
  probe
  misc_feature (1)..(25): SEQ ID NO: 2039; WAN024B8M; Start 24; Stop 48
agcgataatattcatatcctgcttg

SEQ ID NO: 313132 - DNA, 25 bp, Artificial
  probe
  misc_feature (1)..(25): SEQ ID NO: 2039; WAN024B8M; Start 297; Stop 321
ttacaccaactgtactaagagctga

SEQ ID NO: 313133 - DNA, 25 bp, Artificial
  probe
  misc_feature (1)..(25): SEQ ID NO: 2039; WAN024B8M; Start 296; Stop 320
gttacaccaactgtactaagagctg

SEQ ID NO: 313134 - DNA, 25 bp, Artificial
  probe
  misc_feature (1)..(25): SEQ ID NO: 2039; WAN024B8M; Start 251; Stop 275
ataacactgagagccaatttcccaa

SEQ ID NO: 313135 - DNA, 25 bp, Artificial
  probe
  misc_feature (1)..(25): SEQ ID NO: 2039; WAN024B8M; Start 187; Stop 211
gtaatctgccaagctaacaaacaag

SEQ ID NO: 313136 - DNA, 25 bp, Artificial
  probe
  misc_feature (1)..(25): SEQ ID NO: 2040; WAN024D3M; Start 196; Stop 220
gataaggtgataagcgaagaggaat

SEQ ID NO: 313137 - DNA, 25 bp, Artificial
  probe
  misc_feature (1)..(25): SEQ ID NO: 2040; WAN024D3M; Start 192; Stop 216
gagagataaggtgataagcgaagag

SEQ ID NO: 313138 - DNA, 25 bp, Artificial
  probe
  misc_feature (1)..(25): SEQ ID NO: 2040; WAN024D3M; Start 197; Stop 221
ataaggtgataagcgaagaggaatt

SEQ ID NO: 313139 - DNA, 25 bp, Artificial
  probe
  misc_feature (1)..(25): SEQ ID NO: 2040; WAN024D3M; Start 195; Stop 219
agataaggtgataagcgaagaggaa

SEQ ID NO: 313140 - DNA, 25 bp, Artificial
  probe
  misc_feature (1)..(25): SEQ ID NO: 2040; WAN024D3M; Start 198; Stop 222
taaggtgataagcgaagaggaattg

SEQ ID NO: 313141 - DNA, 25 bp, Artificial
  probe
  misc_feature (1)..(25): SEQ ID NO: 2040; WAN024D3M; Start 194; Stop 218
gagataaggtgataagcgaagagga

SEQ ID NO: 313142 - DNA, 25 bp, Artificial
  probe
  misc_feature (1)..(25): SEQ ID NO: 2040; WAN024D3M; Start 193; Stop 217
agagataaggtgataagcgaagagg

SEQ ID NO: 313143 - DNA, 25 bp, Artificial
  probe
  misc_feature (1)..(25): SEQ ID NO: 2040; WAN024D3M; Start 191; Stop 215
cgagagataaggtgataagcgaaga

SEQ ID NO: 313144 - DNA, 25 bp, Artificial
  probe
  misc_feature (1)..(25): SEQ ID NO: 2040; WAN024D3M; Start 200; Stop 224
aggtgataagcgaagaggaattgaa

SEQ ID NO: 313145 - DNA, 25 bp, Artificial
  probe
  misc_feature (1)..(25): SEQ ID NO: 2040; WAN024D3M; Start 199; Stop 223
aaggtgataagcgaagaggaattga

SEQ ID NO: 313146 - DNA, 25 bp, Artificial
  probe
  misc_feature (1)..(25): SEQ ID NO: 2040; WAN024D3M; Start 760; Stop 784
aagtatgaaggatacgaactgaagc

SEQ ID NO: 313147 - DNA, 25 bp, Artificial
  probe
  misc_feature (1)..(25): SEQ ID NO: 2040; WAN024D3M; Start 762; Stop 786
gtatgaaggatacgaactgaagcag

SEQ ID NO: 313148 - DNA, 25 bp, Artificial
  probe
  misc_feature (1)..(25): SEQ ID NO: 2040; WAN024D3M; Start 613; Stop 637
aagattatccagaacttgactaaca

SEQ ID NO: 313149 - DNA, 25 bp, Artificial
  probe
  misc_feature (1)..(25): SEQ ID NO: 2040; WAN024D3M; Start 761; Stop 785
agtatgaaggatacgaactgaagca

SEQ ID NO: 313150 - DNA, 25 bp, Artificial
  probe
  misc_feature (1)..(25): SEQ ID NO: 2040; WAN024D3M; Start 614; Stop 638
agattatccagaacttgactaacaa

SEQ ID NO: 313151 - DNA, 25 bp, Artificial
  probe
  misc_feature (1)..(25): SEQ ID NO: 2040; WAN024D3M; Start 137; Stop 161
ataatggcgacaaatgctatatcac

SEQ ID NO: 313152 - DNA, 25 bp, Artificial
  probe
  misc_feature (1)..(25): SEQ ID NO: 2040; WAN024D3M; Start 27; Stop 51
ttgtttcactttcagattcataccc

SEQ ID NO: 313153 - DNA, 25 bp, Artificial
  probe
  misc_feature (1)..(25): SEQ ID NO: 2040; WAN024D3M; Start 206; Stop 230
taagcgaagaggaattgaaagagat

SEQ ID NO: 313154 - DNA, 25 bp, Artificial
  probe
  misc_feature (1)..(25): SEQ ID NO: 2040; WAN024D3M; Start 205; Stop 229
ataagcgaagaggaattgaaagaga

SEQ ID NO: 313155 - DNA, 25 bp, Artificial
  probe
  misc_feature (1)..(25): SEQ ID NO: 2040; WAN024D3M; Start 204; Stop 228
gataagcgaagaggaattgaaagag

SEQ ID NO: 313156 - DNA, 25 bp, Artificial
  probe
  misc_feature (1)..(25): SEQ ID NO: 2040; WAN024D3M; Start 203; Stop 227
tgataagcgaagaggaattgaaaga

SEQ ID NO: 313157 - DNA, 25 bp, Artificial
  probe
  misc_feature (1)..(25): SEQ ID NO: 2040; WAN024D3M; Start 202; Stop 226
gtgataagcgaagaggaattgaaag

SEQ ID NO: 313158 - DNA, 25 bp, Artificial
  probe
  misc_feature (1)..(25): SEQ ID NO: 2040; WAN024D3M; Start 207; Stop 231
aagcgaagaggaattgaaagagatt

SEQ ID NO: 313159 - DNA, 25 bp, Artificial
  probe
  misc_feature (1)..(25): SEQ ID NO: 2040; WAN024D3M; Start 628; Stop 652
ttgactaacaagggcttctcttatt

SEQ ID NO: 313160 - DNA, 25 bp, Artificial
  probe
  misc_feature (1)..(25): SEQ ID NO: 2040; WAN024D3M; Start 138; Stop 162
taatggcgacaaatgctatatcacc

SEQ ID NO: 313161 - DNA, 25 bp, Artificial
  probe
  misc_feature (1)..(25): SEQ ID NO: 2040; WAN024D3M; Start 133; Stop 157
cttgataatggcgacaaatgctata

SEQ ID NO: 313162 - DNA, 25 bp, Artificial
  probe
  misc_feature (1)..(25): SEQ ID NO: 2040; WAN024D3M; Start 201; Stop 225
ggtgataagcgaagaggaattgaaa

SEQ ID NO: 313163 - DNA, 25 bp, Artificial
  probe
  misc_feature (1)..(25): SEQ ID NO: 2040; WAN024D3M; Start 134; Stop 158
ttgataatggcgacaaatgctatat

SEQ ID NO: 313164 - DNA, 25 bp, Artificial
  probe
  misc_feature (1)..(25): SEQ ID NO: 2040; WAN024D3M; Start 225; Stop 249
agagattcaagactttgctcaattt

SEQ ID NO: 313165 - DNA, 25 bp, Artificial
  probe
  misc_feature (1)..(25): SEQ ID NO: 2040; WAN024D3M; Start 224; Stop 248
aagagattcaagactttgctcaatt

SEQ ID NO: 313166 - DNA, 25 bp, Artificial
  probe
  misc_feature (1)..(25): SEQ ID NO: 2040; WAN024D3M; Start 763; Stop 787
tatgaaggatacgaactgaagcagc

SEQ ID NO: 313167 - DNA, 25 bp, Artificial
  probe
  misc_feature (1)..(25): SEQ ID NO: 2040; WAN024D3M; Start 136; Stop 160
gataatggcgacaaatgctatatca

SEQ ID NO: 313168 - DNA, 25 bp, Artificial
  probe
  misc_feature (1)..(25): SEQ ID NO: 2040; WAN024D3M; Start 135; Stop 159
tgataatggcgacaaatgctatatc

SEQ ID NO: 313169 - DNA, 25 bp, Artificial
  probe
  misc_feature (1)..(25): SEQ ID NO: 2041; WAN024DN6; Start 36; Stop 60
tgctacaaggatattatttacagtg

SEQ ID NO: 313170 - DNA, 25 bp, Artificial
  probe
  misc_feature (1)..(25): SEQ ID NO: 2041; WAN024DN6; Start 37; Stop 61
gctacaaggatattatttacagtga

SEQ ID NO: 313171 - DNA, 25 bp, Artificial
  probe
  misc_feature (1)..(25): SEQ ID NO: 2041; WAN024DN6; Start 40; Stop 64
acaaggatattatttacagtgacaa

SEQ ID NO: 313172 - DNA, 25 bp, Artificial
  probe
  misc_feature (1)..(25): SEQ ID NO: 2041; WAN024DN6; Start 29; Stop 53
aattgcttgctacaaggatattatt

SEQ ID NO: 313173 - DNA, 25 bp, Artificial
  probe
  misc_feature (1)..(25): SEQ ID NO: 2041; WAN024DN6; Start 35; Stop 59
ttgctacaaggatattatttacagt

SEQ ID NO: 313174 - DNA, 25 bp, Artificial
  probe
  misc_feature (1)..(25): SEQ ID NO: 2041; WAN024DN6; Start 39; Stop 63
tacaaggatattatttacagtgaca

SEQ ID NO: 313175 - DNA, 25 bp, Artificial
  probe
  misc_feature (1)..(25): SEQ ID NO: 2041; WAN024DN6; Start 41; Stop 65
caaggatattatttacagtgacaat

SEQ ID NO: 313176 - DNA, 25 bp, Artificial
  probe
  misc_feature (1)..(25): SEQ ID NO: 2041; WAN024DN6; Start 38; Stop 62
ctacaaggatattatttacagtgac

SEQ ID NO: 313177 - DNA, 25 bp, Artificial
  probe
  misc_feature (1)..(25): SEQ ID NO: 2041; WAN024DN6; Start 33; Stop 57
gcttgctacaaggatattatttaca

SEQ ID NO: 313178 - DNA, 25 bp, Artificial
  probe
  misc_feature (1)..(25): SEQ ID NO: 2041; WAN024DN6; Start 32; Stop 56
tgcttgctacaaggatattatttac

SEQ ID NO: 313179 - DNA, 25 bp, Artificial
  probe
  misc_feature (1)..(25): SEQ ID NO: 2041; WAN024DN6; Start 30; Stop 54
attgcttgctacaaggatattattt

SEQ ID NO: 313180 - DNA, 25 bp, Artificial
  probe
  misc_feature (1)..(25): SEQ ID NO: 2041; WAN024DN6; Start 28; Stop 52
aaattgcttgctacaaggatattat

SEQ ID NO: 313181 - DNA, 25 bp, Artificial
  probe
  misc_feature (1)..(25): SEQ ID NO: 2041; WAN024DN6; Start 31; Stop 55
ttgcttgctacaaggatattattta

SEQ ID NO: 313182 - DNA, 25 bp, Artificial
  probe
  misc_feature (1)..(25): SEQ ID NO: 2041; WAN024DN6; Start 27; Stop 51
aaaattgcttgctacaaggatatta

SEQ ID NO: 313183 - DNA, 25 bp, Artificial
  probe
  misc_feature (1)..(25): SEQ ID NO: 2041; WAN024DN6; Start 34; Stop 58
cttgctacaaggatattatttacag

SEQ ID NO: 313184 - DNA, 25 bp, Artificial
  probe
  misc_feature (1)..(25): SEQ ID NO: 2042; WAN024C89; Start 343; Stop 367
caagccaagttcttcaaggataatt

SEQ ID NO: 313185 - DNA, 25 bp, Artificial
  probe
  misc_feature (1)..(25): SEQ ID NO: 2042; WAN024C89; Start 344; Stop 368
aagccaagttcttcaaggataattc

SEQ ID NO: 313186 - DNA, 25 bp, Artificial
  probe
  misc_feature (1)..(25): SEQ ID NO: 2042; WAN024C89; Start 342; Stop 366
gcaagccaagttcttcaaggataat

SEQ ID NO: 313187 - DNA, 25 bp, Artificial
  probe
  misc_feature (1)..(25): SEQ ID NO: 2042; WAN024C89; Start 345; Stop 369
agccaagttcttcaaggataattcc

SEQ ID NO: 313188 - DNA, 25 bp, Artificial
  probe
  misc_feature (1)..(25): SEQ ID NO: 2042; WAN024C89; Start 70; Stop 94
gttacctccaccttgatcttccatt

SEQ ID NO: 313189 - DNA, 25 bp, Artificial
  probe
  misc_feature (1)..(25): SEQ ID NO: 2042; WAN024C89; Start 188; Stop 212
tcagccagttcagcataagacaatt

SEQ ID NO: 313190 - DNA, 25 bp, Artificial
  probe
  misc_feature (1)..(25): SEQ ID NO: 2042; WAN024C89; Start 231; Stop 255
taaagatacgaggaataatgcccat

SEQ ID NO: 313191 - DNA, 25 bp, Artificial
  probe
  misc_feature (1)..(25): SEQ ID NO: 2042; WAN024C89; Start 230; Stop 254
ttaaagatacgaggaataatgccca

SEQ ID NO: 313192 - DNA, 25 bp, Artificial
  probe
  misc_feature (1)..(25): SEQ ID NO: 2042; WAN024C89; Start 28; Stop 52
aacaatggttccaatagtcattcca

SEQ ID NO: 313193 - DNA, 25 bp, Artificial
  probe
  misc_feature (1)..(25): SEQ ID NO: 2042; WAN024C89; Start 187; Stop 211
ctcagccagttcagcataagacaat

SEQ ID NO: 313194 - DNA, 25 bp, Artificial
  probe
  misc_feature (1)..(25): SEQ ID NO: 2042; WAN024C89; Start 287; Stop 311
ctaccgaaacaccattctctgatac

SEQ ID NO: 313195 - DNA, 25 bp, Artificial
  probe
  misc_feature (1)..(25): SEQ ID NO: 2042; WAN024C89; Start 286; Stop 310
actaccgaaacaccattctctgata

SEQ ID NO: 313196 - DNA, 25 bp, Artificial
  probe
  misc_feature (1)..(25): SEQ ID NO: 2042; WAN024C89; Start 229; Stop 253
attaaagatacgaggaataatgccc

SEQ ID NO: 313197 - DNA, 25 bp, Artificial
  probe
  misc_feature (1)..(25): SEQ ID NO: 2042; WAN024C89; Start 75; Stop 99
ctccaccttgatcttccatttcttt

SEQ ID NO: 313198 - DNA, 25 bp, Artificial
  probe
  misc_feature (1)..(25): SEQ ID NO: 2042; WAN024C89; Start 235; Stop 259
gatacgaggaataatgcccatgaaa

SEQ ID NO: 313199 - DNA, 25 bp, Artificial
  probe
  misc_feature (1)..(25): SEQ ID NO: 2042; WAN024C89; Start 232; Stop 256
aaagatacgaggaataatgcccatg

SEQ ID NO: 313200 - DNA, 25 bp, Artificial
  probe
  misc_feature (1)..(25): SEQ ID NO: 2042; WAN024C89; Start 285; Stop 309
aactaccgaaacaccattctctgat

SEQ ID NO: 313201 - DNA, 25 bp, Artificial
  probe
  misc_feature (1)..(25): SEQ ID NO: 2042; WAN024C89; Start 71; Stop 95
ttacctccaccttgatcttccattt

SEQ ID NO: 313202 - DNA, 25 bp, Artificial
  probe
  misc_feature (1)..(25): SEQ ID NO: 2042; WAN024C89; Start 294; Stop 318
aacaccattctctgatacgcttgtc

SEQ ID NO: 313203 - DNA, 25 bp, Artificial
  probe
  misc_feature (1)..(25): SEQ ID NO: 2042; WAN024C89; Start 284; Stop 308
aaactaccgaaacaccattctctga

SEQ ID NO: 313204 - DNA, 25 bp, Artificial
  probe
  misc_feature (1)..(25): SEQ ID NO: 2042; WAN024C89; Start 23; Stop 47
agataaacaatggttccaatagtca

SEQ ID NO: 313205 - DNA, 25 bp, Artificial
  probe
  misc_feature (1)..(25): SEQ ID NO: 2042; WAN024C89; Start 21; Stop 45
tcagataaacaatggttccaatagt

SEQ ID NO: 313206 - DNA, 25 bp, Artificial
  probe
  misc_feature (1)..(25): SEQ ID NO: 2042; WAN024C89; Start 292; Stop 316
gaaacaccattctctgatacgcttg

SEQ ID NO: 313207 - DNA, 25 bp, Artificial
  probe
  misc_feature (1)..(25): SEQ ID NO: 2042; WAN024C89; Start 234; Stop 258
agatacgaggaataatgcccatgaa

SEQ ID NO: 313208 - DNA, 25 bp, Artificial
  probe
  misc_feature (1)..(25): SEQ ID NO: 2042; WAN024C89; Start 233; Stop 257
aagatacgaggaataatgcccatga

SEQ ID NO: 313209 - DNA, 25 bp, Artificial
  probe
  misc_feature (1)..(25): SEQ ID NO: 2042; WAN024C89; Start 222; Stop 246
ggtccacattaaagatacgaggaat

SEQ ID NO: 313210 - DNA, 25 bp, Artificial
  probe
  misc_feature (1)..(25): SEQ ID NO: 2042; WAN024C89; Start 347; Stop 371
ccaagttcttcaaggataattccca

SEQ ID NO: 313211 - DNA, 25 bp, Artificial
  probe
  misc_feature (1)..(25): SEQ ID NO: 2042; WAN024C89; Start 22; Stop 46
cagataaacaatggttccaatagtc

SEQ ID NO: 313212 - DNA, 25 bp, Artificial
  probe
  misc_feature (1)..(25): SEQ ID NO: 2042; WAN024C89; Start 72; Stop 96
tacctccaccttgatcttccatttc

SEQ ID NO: 313213 - DNA, 25 bp, Artificial
  probe
  misc_feature (1)..(25): SEQ ID NO: 2042; WAN024C89; Start 297; Stop 321
accattctctgatacgcttgtccat

SEQ ID NO: 313214 - DNA, 25 bp, Artificial
  probe
  misc_feature (1)..(25): SEQ ID NO: 2042; WAN024C89; Start 288; Stop 312
taccgaaacaccattctctgatacg

SEQ ID NO: 313215 - DNA, 25 bp, Artificial
  probe
  misc_feature (1)..(25): SEQ ID NO: 2042; WAN024C89; Start 348; Stop 372
caagttcttcaaggataattcccat

SEQ ID NO: 313216 - DNA, 25 bp, Artificial
  probe
  misc_feature (1)..(25): SEQ ID NO: 2042; WAN024C89; Start 383; Stop 407
gtacgaccagaatcactcgaataag

SEQ ID NO: 313217 - DNA, 25 bp, Artificial
  probe
  misc_feature (1)..(25): SEQ ID NO: 2043; WAN024DHY; Start 57; Stop 81
gtttgtcactggaggtagttctttc

SEQ ID NO: 313218 - DNA, 25 bp, Artificial
  probe
  misc_feature (1)..(25): SEQ ID NO: 2043; WAN024DHY; Start 58; Stop 82
tttgtcactggaggtagttctttca

SEQ ID NO: 313219 - DNA, 25 bp, Artificial
  probe
  misc_feature (1)..(25): SEQ ID NO: 2043; WAN024DHY; Start 56; Stop 80
agtttgtcactggaggtagttcttt

SEQ ID NO: 313220 - DNA, 25 bp, Artificial
  probe
  misc_feature (1)..(25): SEQ ID NO: 2043; WAN024DHY; Start 55; Stop 79
aagtttgtcactggaggtagttctt

SEQ ID NO: 313221 - DNA, 25 bp, Artificial
  probe
  misc_feature (1)..(25): SEQ ID NO: 2043; WAN024DHY; Start 54; Stop 78
aaagtttgtcactggaggtagttct

SEQ ID NO: 313222 - DNA, 25 bp, Artificial
  probe
  misc_feature (1)..(25): SEQ ID NO: 2043; WAN024DHY; Start 53; Stop 77
caaagtttgtcactggaggtagttc

SEQ ID NO: 313223 - DNA, 25 bp, Artificial
  probe
  misc_feature (1)..(25): SEQ ID NO: 2043; WAN024DHY; Start 49; Stop 73
ttctcaaagtttgtcactggaggta

SEQ ID NO: 313224 - DNA, 25 bp, Artificial
  probe
  misc_feature (1)..(25): SEQ ID NO: 2043; WAN024DHY; Start 52; Stop 76
tcaaagtttgtcactggaggtagtt

SEQ ID NO: 313225 - DNA, 25 bp, Artificial
  probe
  misc_feature (1)..(25): SEQ ID NO: 2043; WAN024DHY; Start 59; Stop 83
ttgtcactggaggtagttctttcag

SEQ ID NO: 313226 - DNA, 25 bp, Artificial
  probe
  misc_feature (1)..(25): SEQ ID NO: 2043; WAN024DHY; Start 50; Stop 74
tctcaaagtttgtcactggaggtag

SEQ ID NO: 313227 - DNA, 25 bp, Artificial
  probe
  misc_feature (1)..(25): SEQ ID NO: 2043; WAN024DHY; Start 51; Stop 75
ctcaaagtttgtcactggaggtagt

SEQ ID NO: 313228 - DNA, 25 bp, Artificial
  probe
  misc_feature (1)..(25): SEQ ID NO: 2043; WAN024DHY; Start 48; Stop 72
tttctcaaagtttgtcactggaggt

SEQ ID NO: 313229 - DNA, 25 bp, Artificial
  probe
  misc_feature (1)..(25): SEQ ID NO: 2043; WAN024DHY; Start 6; Stop 30
gatgcttcctattttgcttctcttt

SEQ ID NO: 313230 - DNA, 25 bp, Artificial
  probe
  misc_feature (1)..(25): SEQ ID NO: 2043; WAN024DHY; Start 7; Stop 31
atgcttcctattttgcttctctttt

SEQ ID NO: 313231 - DNA, 25 bp, Artificial
  probe
  misc_feature (1)..(25): SEQ ID NO: 2043; WAN024DHY; Start 162; Stop 186
gagattgagtcaaaagtggaaagaa

SEQ ID NO: 313232 - DNA, 25 bp, Artificial
  probe
  misc_feature (1)..(25): SEQ ID NO: 2043; WAN024DHY; Start 159; Stop 183
ttggagattgagtcaaaagtggaaa

SEQ ID NO: 313233 - DNA, 25 bp, Artificial
  probe
  misc_feature (1)..(25): SEQ ID NO: 2043; WAN024DHY; Start 161; Stop 185
ggagattgagtcaaaagtggaaaga

SEQ ID NO: 313234 - DNA, 25 bp, Artificial
  probe
  misc_feature (1)..(25): SEQ ID NO: 2043; WAN024DHY; Start 160; Stop 184
tggagattgagtcaaaagtggaaag

SEQ ID NO: 313235 - DNA, 25 bp, Artificial
  probe
  misc_feature (1)..(25): SEQ ID NO: 2043; WAN024DHY; Start 163; Stop 187
agattgagtcaaaagtggaaagaat

SEQ ID NO: 313236 - DNA, 25 bp, Artificial
  probe
  misc_feature (1)..(25): SEQ ID NO: 2043; WAN024DHY; Start 167; Stop 191
tgagtcaaaagtggaaagaattatc

SEQ ID NO: 313237 - DNA, 25 bp, Artificial
  probe
  misc_feature (1)..(25): SEQ ID NO: 2043; WAN024DHY; Start 164; Stop 188
gattgagtcaaaagtggaaagaatt

SEQ ID NO: 313238 - DNA, 25 bp, Artificial
  probe
  misc_feature (1)..(25): SEQ ID NO: 2043; WAN024DHY; Start 47; Stop 71
ttttctcaaagtttgtcactggagg

SEQ ID NO: 313239 - DNA, 25 bp, Artificial
  probe
  misc_feature (1)..(25): SEQ ID NO: 2043; WAN024DHY; Start 5; Stop 29
ggatgcttcctattttgcttctctt

SEQ ID NO: 313240 - DNA, 25 bp, Artificial
  probe
  misc_feature (1)..(25): SEQ ID NO: 2043; WAN024DHY; Start 133; Stop 157
tttgcgattcagatttcttatattt

SEQ ID NO: 313241 - DNA, 25 bp, Artificial
  probe
  misc_feature (1)..(25): SEQ ID NO: 2043; WAN024DHY; Start 168; Stop 192
gagtcaaaagtggaaagaattatct

SEQ ID NO: 313242 - DNA, 25 bp, Artificial
  probe
  misc_feature (1)..(25): SEQ ID NO: 2043; WAN024DHY; Start 158; Stop 182
tttggagattgagtcaaaagtggaa

SEQ ID NO: 313243 - DNA, 25 bp, Artificial
  probe
  misc_feature (1)..(25): SEQ ID NO: 2043; WAN024DHY; Start 166; Stop 190
ttgagtcaaaagtggaaagaattat

SEQ ID NO: 313244 - DNA, 25 bp, Artificial
  probe
  misc_feature (1)..(25): SEQ ID NO: 2043; WAN024DHY; Start 165; Stop 189
attgagtcaaaagtggaaagaatta

SEQ ID NO: 313245 - DNA, 25 bp, Artificial
  probe
  misc_feature (1)..(25): SEQ ID NO: 2043; WAN024DHY; Start 62; Stop 86
tcactggaggtagttctttcagttg

SEQ ID NO: 313246 - DNA, 25 bp, Artificial
  probe
  misc_feature (1)..(25): SEQ ID NO: 2043; WAN024DHY; Start 61; Stop 85
gtcactggaggtagttctttcagtt

SEQ ID NO: 313247 - DNA, 25 bp, Artificial
  probe
  misc_feature (1)..(25): SEQ ID NO: 2043; WAN024DHY; Start 4; Stop 28
cggatgcttcctattttgcttctct

SEQ ID NO: 313248 - DNA, 25 bp, Artificial
  probe
  misc_feature (1)..(25): SEQ ID NO: 2043; WAN024DHY; Start 169; Stop 193
agtcaaaagtggaaagaattatcta

SEQ ID NO: 313249 - DNA, 25 bp, Artificial
  probe
  misc_feature (1)..(25): SEQ ID NO: 2043; WAN024DHY; Start 134; Stop 158
ttgcgattcagatttcttatatttt

SEQ ID NO: 313250 - DNA, 25 bp, Artificial
  probe
  misc_feature (1)..(25): SEQ ID NO: 2044; WAN024F2I; Start 243; Stop 267
aactgttgtaagcaagaccttatgt

SEQ ID NO: 313251 - DNA, 25 bp, Artificial
  probe
  misc_feature (1)..(25): SEQ ID NO: 2044; WAN024F2I; Start 244; Stop 268
actgttgtaagcaagaccttatgtc

SEQ ID NO: 313252 - DNA, 25 bp, Artificial
  probe
  misc_feature (1)..(25): SEQ ID NO: 2044; WAN024F2I; Start 242; Stop 266
caactgttgtaagcaagaccttatg

SEQ ID NO: 313253 - DNA, 25 bp, Artificial
  probe
  misc_feature (1)..(25): SEQ ID NO: 2044; WAN024F2I; Start 241; Stop 265
ccaactgttgtaagcaagaccttat

SEQ ID NO: 313254 - DNA, 25 bp, Artificial
  probe
  misc_feature (1)..(25): SEQ ID NO: 2044; WAN024F2I; Start 213; Stop 237
tggcatgatatcgttgaagagaatt

SEQ ID NO: 313255 - DNA, 25 bp, Artificial
  probe
  misc_feature (1)..(25): SEQ ID NO: 2044; WAN024F2I; Start 212; Stop 236
ctggcatgatatcgttgaagagaat

SEQ ID NO: 313256 - DNA, 25 bp, Artificial
  probe
  misc_feature (1)..(25): SEQ ID NO: 2044; WAN024F2I; Start 239; Stop 263
taccaactgttgtaagcaagacctt

SEQ ID NO: 313257 - DNA, 25 bp, Artificial
  probe
  misc_feature (1)..(25): SEQ ID NO: 2044; WAN024F2I; Start 262; Stop 286
ttatgtctttgctcttctgtccaag

SEQ ID NO: 313258 - DNA, 25 bp, Artificial
  probe
  misc_feature (1)..(25): SEQ ID NO: 2044; WAN024F2I; Start 261; Stop 285
cttatgtctttgctcttctgtccaa

SEQ ID NO: 313259 - DNA, 25 bp, Artificial
  probe
  misc_feature (1)..(25): SEQ ID NO: 2044; WAN024F2I; Start 240; Stop 264
accaactgttgtaagcaagacctta

SEQ ID NO: 313260 - DNA, 25 bp, Artificial
  probe
  misc_feature (1)..(25): SEQ ID NO: 2044; WAN024F2I; Start 211; Stop 235
tctggcatgatatcgttgaagagaa

SEQ ID NO: 313261 - DNA, 25 bp, Artificial
  probe
  misc_feature (1)..(25): SEQ ID NO: 2044; WAN024F2I; Start 238; Stop 262
ttaccaactgttgtaagcaagacct

SEQ ID NO: 313262 - DNA, 25 bp, Artificial
  probe
  misc_feature (1)..(25): SEQ ID NO: 2044; WAN024F2I; Start 258; Stop 282
gaccttatgtctttgctcttctgtc

SEQ ID NO: 313263 - DNA, 25 bp, Artificial
  probe
  misc_feature (1)..(25): SEQ ID NO: 2044; WAN024F2I; Start 102; Stop 126
aagattgctgatagcttccttgata

SEQ ID NO: 313264 - DNA, 25 bp, Artificial
  probe
  misc_feature (1)..(25): SEQ ID NO: 2044; WAN024F2I; Start 260; Stop 284
ccttatgtctttgctcttctgtcca

SEQ ID NO: 313265 - DNA, 25 bp, Artificial
  probe
  misc_feature (1)..(25): SEQ ID NO: 2044; WAN024F2I; Start 259; Stop 283
accttatgtctttgctcttctgtcc

SEQ ID NO: 313266 - DNA, 25 bp, Artificial
  probe
  misc_feature (1)..(25): SEQ ID NO: 2044; WAN024F2I; Start 141; Stop 165
caagaagtatttagctggaacacct

SEQ ID NO: 313267 - DNA, 25 bp, Artificial
  probe
  misc_feature (1)..(25): SEQ ID NO: 2044; WAN024F2I; Start 142; Stop 166
aagaagtatttagctggaacacctt

SEQ ID NO: 313268 - DNA, 25 bp, Artificial
  probe
  misc_feature (1)..(25): SEQ ID NO: 2044; WAN024F2I; Start 145; Stop 169
aagtatttagctggaacaccttctg

SEQ ID NO: 313269 - DNA, 25 bp, Artificial
  probe
  misc_feature (1)..(25): SEQ ID NO: 2044; WAN024F2I; Start 263; Stop 287
tatgtctttgctcttctgtccaagg

SEQ ID NO: 313270 - DNA, 25 bp, Artificial
  probe
  misc_feature (1)..(25): SEQ ID NO: 2044; WAN024F2I; Start 214; Stop 238
ggcatgatatcgttgaagagaattt

SEQ ID NO: 313271 - DNA, 25 bp, Artificial
  probe
  misc_feature (1)..(25): SEQ ID NO: 2044; WAN024F2I; Start 169; Stop 193
gtcaagttggcattgtttggttctt

SEQ ID NO: 313272 - DNA, 25 bp, Artificial
  probe
  misc_feature (1)..(25): SEQ ID NO: 2044; WAN024F2I; Start 140; Stop 164
gcaagaagtatttagctggaacacc

SEQ ID NO: 313273 - DNA, 25 bp, Artificial
  probe
  misc_feature (1)..(25): SEQ ID NO: 2044; WAN024F2I; Start 139; Stop 163
ggcaagaagtatttagctggaacac

SEQ ID NO: 313274 - DNA, 25 bp, Artificial
  probe
  misc_feature (1)..(25): SEQ ID NO: 2044; WAN024F2I; Start 137; Stop 161
gtggcaagaagtatttagctggaac

SEQ ID NO: 313275 - DNA, 25 bp, Artificial
  probe
  misc_feature (1)..(25): SEQ ID NO: 2044; WAN024F2I; Start 136; Stop 160
agtggcaagaagtatttagctggaa

SEQ ID NO: 313276 - DNA, 25 bp, Artificial
  probe
  misc_feature (1)..(25): SEQ ID NO: 2044; WAN024F2I; Start 135; Stop 159
aagtggcaagaagtatttagctgga

SEQ ID NO: 313277 - DNA, 25 bp, Artificial
  probe
  misc_feature (1)..(25): SEQ ID NO: 2044; WAN024F2I; Start 134; Stop 158
caagtggcaagaagtatttagctgg

SEQ ID NO: 313278 - DNA, 25 bp, Artificial
  probe
  misc_feature (1)..(25): SEQ ID NO: 2044; WAN024F2I; Start 133; Stop 157
ccaagtggcaagaagtatttagctg

SEQ ID NO: 313279 - DNA, 25 bp, Artificial
  probe
  misc_feature (1)..(25): SEQ ID NO: 2044; WAN024F2I; Start 147; Stop 171
gtatttagctggaacaccttctgtc

SEQ ID NO: 313280 - DNA, 25 bp, Artificial
  probe
  misc_feature (1)..(25): SEQ ID NO: 2044; WAN024F2I; Start 161; Stop 185
caccttctgtcaagttggcattgtt

SEQ ID NO: 313281 - DNA, 25 bp, Artificial
  probe
  misc_feature (1)..(25): SEQ ID NO: 2044; WAN024F2I; Start 131; Stop 155
caccaagtggcaagaagtatttagc

SEQ ID NO: 313282 - DNA, 25 bp, Artificial
  probe
  misc_feature (1)..(25): SEQ ID NO: 2044; WAN024F2I; Start 237; Stop 261
tttaccaactgttgtaagcaagacc

SEQ ID NO: 313283 - DNA, 25 bp, Artificial
  probe
  misc_feature (1)..(25): SEQ ID NO: 2045; WAN024DWB; Start 195; Stop 219
ctctcagaatgctactctccataat

SEQ ID NO: 313284 - DNA, 25 bp, Artificial
  probe
  misc_feature (1)..(25): SEQ ID NO: 2045; WAN024DWB; Start 194; Stop 218
cctctcagaatgctactctccataa

SEQ ID NO: 313285 - DNA, 25 bp, Artificial
  probe
  misc_feature (1)..(25): SEQ ID NO: 2045; WAN024DWB; Start 196; Stop 220
tctcagaatgctactctccataatt

SEQ ID NO: 313286 - DNA, 25 bp, Artificial
  probe
  misc_feature (1)..(25): SEQ ID NO: 2045; WAN024DWB; Start 189; Stop 213
taacacctctcagaatgctactctc

SEQ ID NO: 313287 - DNA, 25 bp, Artificial
  probe
  misc_feature (1)..(25): SEQ ID NO: 2045; WAN024DWB; Start 188; Stop 212
ctaacacctctcagaatgctactct

SEQ ID NO: 313288 - DNA, 25 bp, Artificial
  probe
  misc_feature (1)..(25): SEQ ID NO: 2045; WAN024DWB; Start 193; Stop 217
acctctcagaatgctactctccata

SEQ ID NO: 313289 - DNA, 25 bp, Artificial
  probe
  misc_feature (1)..(25): SEQ ID NO: 2045; WAN024DWB; Start 187; Stop 211
gctaacacctctcagaatgctactc

SEQ ID NO: 313290 - DNA, 25 bp, Artificial
  probe
  misc_feature (1)..(25): SEQ ID NO: 2045; WAN024DWB; Start 218; Stop 242
attattctcaggcttctttcaggtc

SEQ ID NO: 313291 - DNA, 25 bp, Artificial
  probe
  misc_feature (1)..(25): SEQ ID NO: 2045; WAN024DWB; Start 217; Stop 241
aattattctcaggcttctttcaggt

SEQ ID NO: 313292 - DNA, 25 bp, Artificial
  probe
  misc_feature (1)..(25): SEQ ID NO: 2045; WAN024DWB; Start 250; Stop 274
gaagaccattcactatccagacttt

SEQ ID NO: 313293 - DNA, 25 bp, Artificial
  probe
  misc_feature (1)..(25): SEQ ID NO: 2045; WAN024DWB; Start 220; Stop 244
tattctcaggcttctttcaggtcat

SEQ ID NO: 313294 - DNA, 25 bp, Artificial
  probe
  misc_feature (1)..(25): SEQ ID NO: 2045; WAN024DWB; Start 177; Stop 201
atatggttctgctaacacctctcag

SEQ ID NO: 313295 - DNA, 25 bp, Artificial
  probe
  misc_feature (1)..(25): SEQ ID NO: 2045; WAN024DWB; Start 197; Stop 221
ctcagaatgctactctccataatta

SEQ ID NO: 313296 - DNA, 25 bp, Artificial
  probe
  misc_feature (1)..(25): SEQ ID NO: 2045; WAN024DWB; Start 219; Stop 243
ttattctcaggcttctttcaggtca

SEQ ID NO: 313297 - DNA, 25 bp, Artificial
  probe
  misc_feature (1)..(25): SEQ ID NO: 2045; WAN024DWB; Start 186; Stop 210
tgctaacacctctcagaatgctact

SEQ ID NO: 313298 - DNA, 25 bp, Artificial
  probe
  misc_feature (1)..(25): SEQ ID NO: 2045; WAN024DWB; Start 192; Stop 216
cacctctcagaatgctactctccat

SEQ ID NO: 313299 - DNA, 25 bp, Artificial
  probe
  misc_feature (1)..(25): SEQ ID NO: 2045; WAN024DWB; Start 221; Stop 245
attctcaggcttctttcaggtcatt

SEQ ID NO: 313300 - DNA, 25 bp, Artificial
  probe
  misc_feature (1)..(25): SEQ ID NO: 2045; WAN024DWB; Start 185; Stop 209
ctgctaacacctctcagaatgctac

SEQ ID NO: 313301 - DNA, 25 bp, Artificial
  probe
  misc_feature (1)..(25): SEQ ID NO: 2045; WAN024DWB; Start 208; Stop 232
actctccataattattctcaggctt

SEQ ID NO: 313302 - DNA, 25 bp, Artificial
  probe
  misc_feature (1)..(25): SEQ ID NO: 2045; WAN024DWB; Start 210; Stop 234
tctccataattattctcaggcttct

SEQ ID NO: 313303 - DNA, 25 bp, Artificial
  probe
  misc_feature (1)..(25): SEQ ID NO: 2045; WAN024DWB; Start 190; Stop 214
aacacctctcagaatgctactctcc

SEQ ID NO: 313304 - DNA, 25 bp, Artificial
  probe
  misc_feature (1)..(25): SEQ ID NO: 2045; WAN024DWB; Start 209; Stop 233
ctctccataattattctcaggcttc

SEQ ID NO: 313305 - DNA, 25 bp, Artificial
  probe
  misc_feature (1)..(25): SEQ ID NO: 2045; WAN024DWB; Start 249; Stop 273
tgaagaccattcactatccagactt

SEQ ID NO: 313306 - DNA, 25 bp, Artificial
  probe
  misc_feature (1)..(25): SEQ ID NO: 2045; WAN024DWB; Start 216; Stop 240
taattattctcaggcttctttcagg

SEQ ID NO: 313307 - DNA, 25 bp, Artificial
  probe
  misc_feature (1)..(25): SEQ ID NO: 2045; WAN024DWB; Start 170; Stop 194
ctctgtcatatggttctgctaacac

SEQ ID NO: 313308 - DNA, 25 bp, Artificial
  probe
  misc_feature (1)..(25): SEQ ID NO: 2045; WAN024DWB; Start 207; Stop 231
tactctccataattattctcaggct

SEQ ID NO: 313309 - DNA, 25 bp, Artificial
  probe
  misc_feature (1)..(25): SEQ ID NO: 2045; WAN024DWB; Start 211; Stop 235
ctccataattattctcaggcttctt

SEQ ID NO: 313310 - DNA, 25 bp, Artificial
  probe
  misc_feature (1)..(25): SEQ ID NO: 2045; WAN024DWB; Start 206; Stop 230
ctactctccataattattctcaggc

SEQ ID NO: 313311 - DNA, 25 bp, Artificial
  probe
  misc_feature (1)..(25): SEQ ID NO: 2045; WAN024DWB; Start 205; Stop 229
gctactctccataattattctcagg

SEQ ID NO: 313312 - DNA, 25 bp, Artificial
  probe
  misc_feature (1)..(25): SEQ ID NO: 2045; WAN024DWB; Start 15; Stop 39
tcttcatcgttatatatctccttct

SEQ ID NO: 313313 - DNA, 25 bp, Artificial
  probe
  misc_feature (1)..(25): SEQ ID NO: 2045; WAN024DWB; Start 222; Stop 246
ttctcaggcttctttcaggtcattg

SEQ ID NO: 313314 - DNA, 25 bp, Artificial
  probe
  misc_feature (1)..(25): SEQ ID NO: 2045; WAN024DWB; Start 204; Stop 228
tgctactctccataattattctcag

SEQ ID NO: 313315 - DNA, 25 bp, Artificial
  probe
  misc_feature (1)..(25): SEQ ID NO: 2045; WAN024DWB; Start 175; Stop 199
tcatatggttctgctaacacctctc

SEQ ID NO: 313316 - DNA, 25 bp, Artificial
  probe
  misc_feature (1)..(25): SEQ ID NO: 2046; WAN024CFD; Start 174; Stop 198
tgaccttgtatcgttacttcatgtt

SEQ ID NO: 313317 - DNA, 25 bp, Artificial
  probe
  misc_feature (1)..(25): SEQ ID NO: 2046; WAN024CFD; Start 245; Stop 269
cccgacgattacagatagagaaata

SEQ ID NO: 313318 - DNA, 25 bp, Artificial
  probe
  misc_feature (1)..(25): SEQ ID NO: 2046; WAN024CFD; Start 244; Stop 268
acccgacgattacagatagagaaat

SEQ ID NO: 313319 - DNA, 25 bp, Artificial
  probe
  misc_feature (1)..(25): SEQ ID NO: 2046; WAN024CFD; Start 246; Stop 270
ccgacgattacagatagagaaatac

SEQ ID NO: 313320 - DNA, 25 bp, Artificial
  probe
  misc_feature (1)..(25): SEQ ID NO: 2046; WAN024CFD; Start 89; Stop 113
aagtgggagcattgattgaaattga

SEQ ID NO: 313321 - DNA, 25 bp, Artificial
  probe
  misc_feature (1)..(25): SEQ ID NO: 2046; WAN024CFD; Start 164; Stop 188
aagttctttatgaccttgtatcgtt

SEQ ID NO: 313322 - DNA, 25 bp, Artificial
  probe
  misc_feature (1)..(25): SEQ ID NO: 2046; WAN024CFD; Start 283; Stop 307
acagacaaagaactatccttaatgg

SEQ ID NO: 313323 - DNA, 25 bp, Artificial
  probe
  misc_feature (1)..(25): SEQ ID NO: 2046; WAN024CFD; Start 247; Stop 271
cgacgattacagatagagaaataca

SEQ ID NO: 313324 - DNA, 25 bp, Artificial
  probe
  misc_feature (1)..(25): SEQ ID NO: 2046; WAN024CFD; Start 177; Stop 201
ccttgtatcgttacttcatgtttcc

SEQ ID NO: 313325 - DNA, 25 bp, Artificial
  probe
  misc_feature (1)..(25): SEQ ID NO: 2046; WAN024CFD; Start 178; Stop 202
cttgtatcgttacttcatgtttccg

SEQ ID NO: 313326 - DNA, 25 bp, Artificial
  probe
  misc_feature (1)..(25): SEQ ID NO: 2046; WAN024CFD; Start 243; Stop 267
cacccgacgattacagatagagaaa

SEQ ID NO: 313327 - DNA, 25 bp, Artificial
  probe
  misc_feature (1)..(25): SEQ ID NO: 2046; WAN024CFD; Start 181; Stop 205
gtatcgttacttcatgtttccgttg

SEQ ID NO: 313328 - DNA, 25 bp, Artificial
  probe
  misc_feature (1)..(25): SEQ ID NO: 2046; WAN024CFD; Start 176; Stop 200
accttgtatcgttacttcatgtttc

SEQ ID NO: 313329 - DNA, 25 bp, Artificial
  probe
  misc_feature (1)..(25): SEQ ID NO: 2046; WAN024CFD; Start 175; Stop 199
gaccttgtatcgttacttcatgttt

SEQ ID NO: 313330 - DNA, 25 bp, Artificial
  probe
  misc_feature (1)..(25): SEQ ID NO: 2046; WAN024CFD; Start 88; Stop 112
caagtgggagcattgattgaaattg

SEQ ID NO: 313331 - DNA, 25 bp, Artificial
  probe
  misc_feature (1)..(25): SEQ ID NO: 2046; WAN024CFD; Start 180; Stop 204
tgtatcgttacttcatgtttccgtt

SEQ ID NO: 313332 - DNA, 25 bp, Artificial
  probe
  misc_feature (1)..(25): SEQ ID NO: 2046; WAN024CFD; Start 179; Stop 203
ttgtatcgttacttcatgtttccgt

SEQ ID NO: 313333 - DNA, 25 bp, Artificial
  probe
  misc_feature (1)..(25): SEQ ID NO: 2046; WAN024CFD; Start 86; Stop 110
aacaagtgggagcattgattgaaat

SEQ ID NO: 313334 - DNA, 25 bp, Artificial
  probe
  misc_feature (1)..(25): SEQ ID NO: 2046; WAN024CFD; Start 173; Stop 197
atgaccttgtatcgttacttcatgt

SEQ ID NO: 313335 - DNA, 25 bp, Artificial
  probe
  misc_feature (1)..(25): SEQ ID NO: 2046; WAN024CFD; Start 87; Stop 111
acaagtgggagcattgattgaaatt

SEQ ID NO: 313336 - DNA, 25 bp, Artificial
  probe
  misc_feature (1)..(25): SEQ ID NO: 2046; WAN024CFD; Start 90; Stop 114
agtgggagcattgattgaaattgac

SEQ ID NO: 313337 - DNA, 25 bp, Artificial
  probe
  misc_feature (1)..(25): SEQ ID NO: 2046; WAN024CFD; Start 165; Stop 189
agttctttatgaccttgtatcgtta

SEQ ID NO: 313338 - DNA, 25 bp, Artificial
  probe
  misc_feature (1)..(25): SEQ ID NO: 2046; WAN024CFD; Start 168; Stop 192
tctttatgaccttgtatcgttactt

SEQ ID NO: 313339 - DNA, 25 bp, Artificial
  probe
  misc_feature (1)..(25): SEQ ID NO: 2046; WAN024CFD; Start 167; Stop 191
ttctttatgaccttgtatcgttact

SEQ ID NO: 313340 - DNA, 25 bp, Artificial
  probe
  misc_feature (1)..(25): SEQ ID NO: 2046; WAN024CFD; Start 166; Stop 190
gttctttatgaccttgtatcgttac

SEQ ID NO: 313341 - DNA, 25 bp, Artificial
  probe
  misc_feature (1)..(25): SEQ ID NO: 2046; WAN024CFD; Start 182; Stop 206
tatcgttacttcatgtttccgttga

SEQ ID NO: 313342 - DNA, 25 bp, Artificial
  probe
  misc_feature (1)..(25): SEQ ID NO: 2046; WAN024CFD; Start 156; Stop 180
cagcatacaagttctttatgacctt

SEQ ID NO: 313343 - DNA, 25 bp, Artificial
  probe
  misc_feature (1)..(25): SEQ ID NO: 2046; WAN024CFD; Start 155; Stop 179
ccagcatacaagttctttatgacct

SEQ ID NO: 313344 - DNA, 25 bp, Artificial
  probe
  misc_feature (1)..(25): SEQ ID NO: 2046; WAN024CFD; Start 169; Stop 193
ctttatgaccttgtatcgttacttc

SEQ ID NO: 313345 - DNA, 25 bp, Artificial
  probe
  misc_feature (1)..(25): SEQ ID NO: 2046; WAN024CFD; Start 170; Stop 194
tttatgaccttgtatcgttacttca

SEQ ID NO: 313346 - DNA, 25 bp, Artificial
  probe
  misc_feature (1)..(25): SEQ ID NO: 2046; WAN024CFD; Start 183; Stop 207
atcgttacttcatgtttccgttgat

SEQ ID NO: 313347 - DNA, 25 bp, Artificial
  probe
  misc_feature (1)..(25): SEQ ID NO: 2046; WAN024CFD; Start 85; Stop 109
gaacaagtgggagcattgattgaaa

SEQ ID NO: 313348 - DNA, 25 bp, Artificial
  probe
  misc_feature (1)..(25): SEQ ID NO: 2046; WAN024CFD; Start 172; Stop 196
tatgaccttgtatcgttacttcatg

SEQ ID NO: 313349 - DNA, 25 bp, Artificial
  probe
  misc_feature (1)..(25): SEQ ID NO: 2047; WAN024DMP; Start 607; Stop 631
tatgttaagcaactgactactggaa

SEQ ID NO: 313350 - DNA, 25 bp, Artificial
  probe
  misc_feature (1)..(25): SEQ ID NO: 2047; WAN024DMP; Start 606; Stop 630
ttatgttaagcaactgactactgga

SEQ ID NO: 313351 - DNA, 25 bp, Artificial
  probe
  misc_feature (1)..(25): SEQ ID NO: 2047; WAN024DMP; Start 332; Stop 356
atcaatcagaggtaactccaacaat

SEQ ID NO: 313352 - DNA, 25 bp, Artificial
  probe
  misc_feature (1)..(25): SEQ ID NO: 2047; WAN024DMP; Start 532; Stop 556
tctgaagaagataatcggatgagta

SEQ ID NO: 313353 - DNA, 25 bp, Artificial
  probe
  misc_feature (1)..(25): SEQ ID NO: 2047; WAN024DMP; Start 333; Stop 357
tcaatcagaggtaactccaacaata

SEQ ID NO: 313354 - DNA, 25 bp, Artificial
  probe
  misc_feature (1)..(25): SEQ ID NO: 2047; WAN024DMP; Start 531; Stop 555
ttctgaagaagataatcggatgagt

SEQ ID NO: 313355 - DNA, 25 bp, Artificial
  probe
  misc_feature (1)..(25): SEQ ID NO: 2047; WAN024DMP; Start 533; Stop 557
ctgaagaagataatcggatgagtaa

SEQ ID NO: 313356 - DNA, 25 bp, Artificial
  probe
  misc_feature (1)..(25): SEQ ID NO: 2047; WAN024DMP; Start 334; Stop 358
caatcagaggtaactccaacaataa

SEQ ID NO: 313357 - DNA, 25 bp, Artificial
  probe
  misc_feature (1)..(25): SEQ ID NO: 2047; WAN024DMP; Start 331; Stop 355
gatcaatcagaggtaactccaacaa

SEQ ID NO: 313358 - DNA, 25 bp, Artificial
  probe
  misc_feature (1)..(25): SEQ ID NO: 2047; WAN024DMP; Start 423; Stop 447
atcatccttatcagcttattcgcaa

SEQ ID NO: 313359 - DNA, 25 bp, Artificial
  probe
  misc_feature (1)..(25): SEQ ID NO: 2047; WAN024DMP; Start 422; Stop 446
aatcatccttatcagcttattcgca

SEQ ID NO: 313360 - DNA, 25 bp, Artificial
  probe
  misc_feature (1)..(25): SEQ ID NO: 2047; WAN024DMP; Start 427; Stop 451
tccttatcagcttattcgcaagtat

SEQ ID NO: 313361 - DNA, 25 bp, Artificial
  probe
  misc_feature (1)..(25): SEQ ID NO: 2047; WAN024DMP; Start 426; Stop 450
atccttatcagcttattcgcaagta

SEQ ID NO: 313362 - DNA, 25 bp, Artificial
  probe
  misc_feature (1)..(25): SEQ ID NO: 2047; WAN024DMP; Start 428; Stop 452
ccttatcagcttattcgcaagtatc

SEQ ID NO: 313363 - DNA, 25 bp, Artificial
  probe
  misc_feature (1)..(25): SEQ ID NO: 2047; WAN024DMP; Start 432; Stop 456
atcagcttattcgcaagtatcaatc

SEQ ID NO: 313364 - DNA, 25 bp, Artificial
  probe
  misc_feature (1)..(25): SEQ ID NO: 2047; WAN024DMP; Start 429; Stop 453
cttatcagcttattcgcaagtatca

SEQ ID NO: 313365 - DNA, 25 bp, Artificial
  probe
  misc_feature (1)..(25): SEQ ID NO: 2047; WAN024DMP; Start 424; Stop 448
tcatccttatcagcttattcgcaag

SEQ ID NO: 313366 - DNA, 25 bp, Artificial
  probe
  misc_feature (1)..(25): SEQ ID NO: 2047; WAN024DMP; Start 633; Stop 657
agaagctggtatcaatcaagatgaa

SEQ ID NO: 313367 - DNA, 25 bp, Artificial
  probe
  misc_feature (1)..(25): SEQ ID NO: 2047; WAN024DMP; Start 632; Stop 656
aagaagctggtatcaatcaagatga

SEQ ID NO: 313368 - DNA, 25 bp, Artificial
  probe
  misc_feature (1)..(25): SEQ ID NO: 2047; WAN024DMP; Start 182; Stop 206
atgcgaatgaagatttagtagtgga

SEQ ID NO: 313369 - DNA, 25 bp, Artificial
  probe
  misc_feature (1)..(25): SEQ ID NO: 2047; WAN024DMP; Start 1234; Stop 1258
aagatagccaaggatgtttatgagg

SEQ ID NO: 313370 - DNA, 25 bp, Artificial
  probe
  misc_feature (1)..(25): SEQ ID NO: 2047; WAN024DMP; Start 183; Stop 207
tgcgaatgaagatttagtagtggaa

SEQ ID NO: 313371 - DNA, 25 bp, Artificial
  probe
  misc_feature (1)..(25): SEQ ID NO: 2047; WAN024DMP; Start 425; Stop 449
catccttatcagcttattcgcaagt

SEQ ID NO: 313372 - DNA, 25 bp, Artificial
  probe
  misc_feature (1)..(25): SEQ ID NO: 2047; WAN024DMP; Start 1237; Stop 1261
atagccaaggatgtttatgaggttc

SEQ ID NO: 313373 - DNA, 25 bp, Artificial
  probe
  misc_feature (1)..(25): SEQ ID NO: 2047; WAN024DMP; Start 1236; Stop 1260
gatagccaaggatgtttatgaggtt

SEQ ID NO: 313374 - DNA, 25 bp, Artificial
  probe
  misc_feature (1)..(25): SEQ ID NO: 2047; WAN024DMP; Start 430; Stop 454
ttatcagcttattcgcaagtatcaa

SEQ ID NO: 313375 - DNA, 25 bp, Artificial
  probe
  misc_feature (1)..(25): SEQ ID NO: 2047; WAN024DMP; Start 1226; Stop 1250
cgatttctaagatagccaaggatgt

SEQ ID NO: 313376 - DNA, 25 bp, Artificial
  probe
  misc_feature (1)..(25): SEQ ID NO: 2047; WAN024DMP; Start 1225; Stop 1249
acgatttctaagatagccaaggatg

SEQ ID NO: 313377 - DNA, 25 bp, Artificial
  probe
  misc_feature (1)..(25): SEQ ID NO: 2047; WAN024DMP; Start 1240; Stop 1264
gccaaggatgtttatgaggttctaa

SEQ ID NO: 313378 - DNA, 25 bp, Artificial
  probe
  misc_feature (1)..(25): SEQ ID NO: 2047; WAN024DMP; Start 1097; Stop 1121
ccaaaggtgtttctgttaaagtagc

SEQ ID NO: 313379 - DNA, 25 bp, Artificial
  probe
  misc_feature (1)..(25): SEQ ID NO: 2047; WAN024DMP; Start 1096; Stop 1120
gccaaaggtgtttctgttaaagtag

SEQ ID NO: 313380 - DNA, 25 bp, Artificial
  probe
  misc_feature (1)..(25): SEQ ID NO: 2047; WAN024DMP; Start 184; Stop 208
gcgaatgaagatttagtagtggaat

SEQ ID NO: 313381 - DNA, 25 bp, Artificial
  probe
  misc_feature (1)..(25): SEQ ID NO: 2047; WAN024DMP; Start 197; Stop 221
tagtagtggaatctgggaaattgac

SEQ ID NO: 313382 - DNA, 25 bp, Artificial
  probe
  misc_feature (1)..(25): SEQ ID NO: 2048; WAN024FD4; Start 1361; Stop 1385
ttagtgttgatgatgagatggaaga

SEQ ID NO: 313383 - DNA, 25 bp, Artificial
  probe
  misc_feature (1)..(25): SEQ ID NO: 2048; WAN024FD4; Start 1363; Stop 1387
agtgttgatgatgagatggaagatg

SEQ ID NO: 313384 - DNA, 25 bp, Artificial
  probe
  misc_feature (1)..(25): SEQ ID NO: 2048; WAN024FD4; Start 877; Stop 901
ccttggaatatcattgctcacattg

SEQ ID NO: 313385 - DNA, 25 bp, Artificial
  probe
  misc_feature (1)..(25): SEQ ID NO: 2048; WAN024FD4; Start 1362; Stop 1386
tagtgttgatgatgagatggaagat

SEQ ID NO: 313386 - DNA, 25 bp, Artificial
  probe
  misc_feature (1)..(25): SEQ ID NO: 2048; WAN024FD4; Start 878; Stop 902
cttggaatatcattgctcacattgt

SEQ ID NO: 313387 - DNA, 25 bp, Artificial
  probe
  misc_feature (1)..(25): SEQ ID NO: 2048; WAN024FD4; Start 1176; Stop 1200
atatggtgctctacttccttggtta

SEQ ID NO: 313388 - DNA, 25 bp, Artificial
  probe
  misc_feature (1)..(25): SEQ ID NO: 2048; WAN024FD4; Start 1172; Stop 1196
ttgaatatggtgctctacttccttg

SEQ ID NO: 313389 - DNA, 25 bp, Artificial
  probe
  misc_feature (1)..(25): SEQ ID NO: 2048; WAN024FD4; Start 880; Stop 904
tggaatatcattgctcacattgtag

SEQ ID NO: 313390 - DNA, 25 bp, Artificial
  probe
  misc_feature (1)..(25): SEQ ID NO: 2048; WAN024FD4; Start 1641; Stop 1665
tggaacggtattatacttcacacaa

SEQ ID NO: 313391 - DNA, 25 bp, Artificial
  probe
  misc_feature (1)..(25): SEQ ID NO: 2048; WAN024FD4; Start 1639; Stop 1663
tctggaacggtattatacttcacac

SEQ ID NO: 313392 - DNA, 25 bp, Artificial
  probe
  misc_feature (1)..(25): SEQ ID NO: 2048; WAN024FD4; Start 578; Stop 602
tgttaccaaccttaattccaactct

SEQ ID NO: 313393 - DNA, 25 bp, Artificial
  probe
  misc_feature (1)..(25): SEQ ID NO: 2048; WAN024FD4; Start 577; Stop 601
gtgttaccaaccttaattccaactc

SEQ ID NO: 313394 - DNA, 25 bp, Artificial
  probe
  misc_feature (1)..(25): SEQ ID NO: 2048; WAN024FD4; Start 1640; Stop 1664
ctggaacggtattatacttcacaca

SEQ ID NO: 313395 - DNA, 25 bp, Artificial
  probe
  misc_feature (1)..(25): SEQ ID NO: 2048; WAN024FD4; Start 573; Stop 597
agtagtgttaccaaccttaattcca

SEQ ID NO: 313396 - DNA, 25 bp, Artificial
  probe
  misc_feature (1)..(25): SEQ ID NO: 2048; WAN024FD4; Start 1638; Stop 1662
ttctggaacggtattatacttcaca

SEQ ID NO: 313397 - DNA, 25 bp, Artificial
  probe
  misc_feature (1)..(25): SEQ ID NO: 2048; WAN024FD4; Start 879; Stop 903
ttggaatatcattgctcacattgta

SEQ ID NO: 313398 - DNA, 25 bp, Artificial
  probe
  misc_feature (1)..(25): SEQ ID NO: 2048; WAN024FD4; Start 1080; Stop 1104
ttattctattattgctgcgacaaca

SEQ ID NO: 313399 - DNA, 25 bp, Artificial
  probe
  misc_feature (1)..(25): SEQ ID NO: 2048; WAN024FD4; Start 576; Stop 600
agtgttaccaaccttaattccaact

SEQ ID NO: 313400 - DNA, 25 bp, Artificial
  probe
  misc_feature (1)..(25): SEQ ID NO: 2048; WAN024FD4; Start 575; Stop 599
tagtgttaccaaccttaattccaac

SEQ ID NO: 313401 - DNA, 25 bp, Artificial
  probe
  misc_feature (1)..(25): SEQ ID NO: 2048; WAN024FD4; Start 574; Stop 598
gtagtgttaccaaccttaattccaa

SEQ ID NO: 313402 - DNA, 25 bp, Artificial
  probe
  misc_feature (1)..(25): SEQ ID NO: 2048; WAN024FD4; Start 864; Stop 888
aattgcgtctaagccttggaatatc

SEQ ID NO: 313403 - DNA, 25 bp, Artificial
  probe
  misc_feature (1)..(25): SEQ ID NO: 2048; WAN024FD4; Start 1175; Stop 1199
aatatggtgctctacttccttggtt

SEQ ID NO: 313404 - DNA, 25 bp, Artificial
  probe
  misc_feature (1)..(25): SEQ ID NO: 2048; WAN024FD4; Start 504; Stop 528
aagcgttgactatcacactattgag

SEQ ID NO: 313405 - DNA, 25 bp, Artificial
  probe
  misc_feature (1)..(25): SEQ ID NO: 2048; WAN024FD4; Start 503; Stop 527
gaagcgttgactatcacactattga

SEQ ID NO: 313406 - DNA, 25 bp, Artificial
  probe
  misc_feature (1)..(25): SEQ ID NO: 2048; WAN024FD4; Start 1177; Stop 1201
tatggtgctctacttccttggttac

SEQ ID NO: 313407 - DNA, 25 bp, Artificial
  probe
  misc_feature (1)..(25): SEQ ID NO: 2048; WAN024FD4; Start 572; Stop 596
aagtagtgttaccaaccttaattcc

SEQ ID NO: 313408 - DNA, 25 bp, Artificial
  probe
  misc_feature (1)..(25): SEQ ID NO: 2048; WAN024FD4; Start 876; Stop 900
gccttggaatatcattgctcacatt

SEQ ID NO: 313409 - DNA, 25 bp, Artificial
  probe
  misc_feature (1)..(25): SEQ ID NO: 2048; WAN024FD4; Start 508; Stop 532
gttgactatcacactattgaggctg

SEQ ID NO: 313410 - DNA, 25 bp, Artificial
  probe
  misc_feature (1)..(25): SEQ ID NO: 2048; WAN024FD4; Start 579; Stop 603
gttaccaaccttaattccaactcta

SEQ ID NO: 313411 - DNA, 25 bp, Artificial
  probe
  misc_feature (1)..(25): SEQ ID NO: 2048; WAN024FD4; Start 1364; Stop 1388
gtgttgatgatgagatggaagatgc

SEQ ID NO: 313412 - DNA, 25 bp, Artificial
  probe
  misc_feature (1)..(25): SEQ ID NO: 2048; WAN024FD4; Start 460; Stop 484
tcaggaactgctaatcatacattgt

SEQ ID NO: 313413 - DNA, 25 bp, Artificial
  probe
  misc_feature (1)..(25): SEQ ID NO: 2048; WAN024FD4; Start 1081; Stop 1105
tattctattattgctgcgacaacag

SEQ ID NO: 313414 - DNA, 25 bp, Artificial
  probe
  misc_feature (1)..(25): SEQ ID NO: 2048; WAN024FD4; Start 461; Stop 485
caggaactgctaatcatacattgtt

SEQ ID NO: 313415 - DNA, 25 bp, Artificial
  probe
  misc_feature (1)..(25): SEQ ID NO: 2049; WAN024G6U; Start 141; Stop 165
tgaacggtcagaagtatcattgtat

SEQ ID NO: 313416 - DNA, 25 bp, Artificial
  probe
  misc_feature (1)..(25): SEQ ID NO: 2049; WAN024G6U; Start 142; Stop 166
gaacggtcagaagtatcattgtata

SEQ ID NO: 313417 - DNA, 25 bp, Artificial
  probe
  misc_feature (1)..(25): SEQ ID NO: 2049; WAN024G6U; Start 145; Stop 169
cggtcagaagtatcattgtatatca

SEQ ID NO: 313418 - DNA, 25 bp, Artificial
  probe
  misc_feature (1)..(25): SEQ ID NO: 2049; WAN024G6U; Start 144; Stop 168
acggtcagaagtatcattgtatatc

SEQ ID NO: 313419 - DNA, 25 bp, Artificial
  probe
  misc_feature (1)..(25): SEQ ID NO: 2049; WAN024G6U; Start 143; Stop 167
aacggtcagaagtatcattgtatat

SEQ ID NO: 313420 - DNA, 25 bp, Artificial
  probe
  misc_feature (1)..(25): SEQ ID NO: 2049; WAN024G6U; Start 100; Stop 124
atcataagaatttcacttgctgctc

SEQ ID NO: 313421 - DNA, 25 bp, Artificial
  probe
  misc_feature (1)..(25): SEQ ID NO: 2049; WAN024G6U; Start 99; Stop 123
catcataagaatttcacttgctgct

SEQ ID NO: 313422 - DNA, 25 bp, Artificial
  probe
  misc_feature (1)..(25): SEQ ID NO: 2049; WAN024G6U; Start 98; Stop 122
tcatcataagaatttcacttgctgc

SEQ ID NO: 313423 - DNA, 25 bp, Artificial
  probe
  misc_feature (1)..(25): SEQ ID NO: 2049; WAN024G6U; Start 101; Stop 125
tcataagaatttcacttgctgctct

SEQ ID NO: 313424 - DNA, 25 bp, Artificial
  probe
  misc_feature (1)..(25): SEQ ID NO: 2049; WAN024G6U; Start 97; Stop 121
gtcatcataagaatttcacttgctg

SEQ ID NO: 313425 - DNA, 25 bp, Artificial
  probe
  misc_feature (1)..(25): SEQ ID NO: 2049; WAN024G6U; Start 175; Stop 199
atcatggcatataaagtatcgctct

SEQ ID NO: 313426 - DNA, 25 bp, Artificial
  probe
  misc_feature (1)..(25): SEQ ID NO: 2049; WAN024G6U; Start 176; Stop 200
tcatggcatataaagtatcgctcta

SEQ ID NO: 313427 - DNA, 25 bp, Artificial
  probe
  misc_feature (1)..(25): SEQ ID NO: 2049; WAN024G6U; Start 179; Stop 203
tggcatataaagtatcgctctattt

SEQ ID NO: 313428 - DNA, 25 bp, Artificial
  probe
  misc_feature (1)..(25): SEQ ID NO: 2049; WAN024G6U; Start 96; Stop 120
agtcatcataagaatttcacttgct

SEQ ID NO: 313429 - DNA, 25 bp, Artificial
  probe
  misc_feature (1)..(25): SEQ ID NO: 2049; WAN024G6U; Start 172; Stop 196
tgtatcatggcatataaagtatcgc

SEQ ID NO: 313430 - DNA, 25 bp, Artificial
  probe
  misc_feature (1)..(25): SEQ ID NO: 2049; WAN024G6U; Start 178; Stop 202
atggcatataaagtatcgctctatt

SEQ ID NO: 313431 - DNA, 25 bp, Artificial
  probe
  misc_feature (1)..(25): SEQ ID NO: 2049; WAN024G6U; Start 173; Stop 197
gtatcatggcatataaagtatcgct

SEQ ID NO: 313432 - DNA, 25 bp, Artificial
  probe
  misc_feature (1)..(25): SEQ ID NO: 2049; WAN024G6U; Start 177; Stop 201
catggcatataaagtatcgctctat

SEQ ID NO: 313433 - DNA, 25 bp, Artificial
  probe
  misc_feature (1)..(25): SEQ ID NO: 2049; WAN024G6U; Start 174; Stop 198
tatcatggcatataaagtatcgctc

SEQ ID NO: 313434 - DNA, 25 bp, Artificial
  probe
  misc_feature (1)..(25): SEQ ID NO: 2049; WAN024G6U; Start 146; Stop 170
ggtcagaagtatcattgtatatcat

SEQ ID NO: 313435 - DNA, 25 bp, Artificial
  probe
  misc_feature (1)..(25): SEQ ID NO: 2049; WAN024G6U; Start 57; Stop 81
tctaacaaactcacacattcaacgt

SEQ ID NO: 313436 - DNA, 25 bp, Artificial
  probe
  misc_feature (1)..(25): SEQ ID NO: 2049; WAN024G6U; Start 102; Stop 126
cataagaatttcacttgctgctctt

SEQ ID NO: 313437 - DNA, 25 bp, Artificial
  probe
  misc_feature (1)..(25): SEQ ID NO: 2049; WAN024G6U; Start 103; Stop 127
ataagaatttcacttgctgctcttt

SEQ ID NO: 313438 - DNA, 25 bp, Artificial
  probe
  misc_feature (1)..(25): SEQ ID NO: 2049; WAN024G6U; Start 253; Stop 277
ctccacaaatgaggaaagtaccatt

SEQ ID NO: 313439 - DNA, 25 bp, Artificial
  probe
  misc_feature (1)..(25): SEQ ID NO: 2049; WAN024G6U; Start 140; Stop 164
ctgaacggtcagaagtatcattgta

SEQ ID NO: 313440 - DNA, 25 bp, Artificial
  probe
  misc_feature (1)..(25): SEQ ID NO: 2049; WAN024G6U; Start 106; Stop 130
agaatttcacttgctgctcttttac

SEQ ID NO: 313441 - DNA, 25 bp, Artificial
  probe
  misc_feature (1)..(25): SEQ ID NO: 2049; WAN024G6U; Start 58; Stop 82
ctaacaaactcacacattcaacgtg

SEQ ID NO: 313442 - DNA, 25 bp, Artificial
  probe
  misc_feature (1)..(25): SEQ ID NO: 2049; WAN024G6U; Start 171; Stop 195
ttgtatcatggcatataaagtatcg

SEQ ID NO: 313443 - DNA, 25 bp, Artificial
  probe
  misc_feature (1)..(25): SEQ ID NO: 2049; WAN024G6U; Start 107; Stop 131
gaatttcacttgctgctcttttacg

SEQ ID NO: 313444 - DNA, 25 bp, Artificial
  probe
  misc_feature (1)..(25): SEQ ID NO: 2049; WAN024G6U; Start 160; Stop 184
ttgtatatcatttgtatcatggcat

SEQ ID NO: 313445 - DNA, 25 bp, Artificial
  probe
  misc_feature (1)..(25): SEQ ID NO: 2049; WAN024G6U; Start 159; Stop 183
attgtatatcatttgtatcatggca

SEQ ID NO: 313446 - DNA, 25 bp, Artificial
  probe
  misc_feature (1)..(25): SEQ ID NO: 2049; WAN024G6U; Start 167; Stop 191
tcatttgtatcatggcatataaagt

SEQ ID NO: 313447 - DNA, 25 bp, Artificial
  probe
  misc_feature (1)..(25): SEQ ID NO: 2049; WAN024G6U; Start 95; Stop 119
aagtcatcataagaatttcacttgc

SEQ ID NO: 313448 - DNA, 25 bp, Artificial
  probe
  misc_feature (1)..(25): SEQ ID NO: 2050; WAN024AVA; Start 335; Stop 359
tcaaggtcattccagacaaagaata

SEQ ID NO: 313449 - DNA, 25 bp, Artificial
  probe
  misc_feature (1)..(25): SEQ ID NO: 2050; WAN024AVA; Start 334; Stop 358
ttcaaggtcattccagacaaagaat

SEQ ID NO: 313450 - DNA, 25 bp, Artificial
  probe
  misc_feature (1)..(25): SEQ ID NO: 2050; WAN024AVA; Start 234; Stop 258
ctctatctacgtcttgatgggaatt

SEQ ID NO: 313451 - DNA, 25 bp, Artificial
  probe
  misc_feature (1)..(25): SEQ ID NO: 2050; WAN024AVA; Start 233; Stop 257
tctctatctacgtcttgatgggaat

SEQ ID NO: 313452 - DNA, 25 bp, Artificial
  probe
  misc_feature (1)..(25): SEQ ID NO: 2050; WAN024AVA; Start 239; Stop 263
tctacgtcttgatgggaatttctat

SEQ ID NO: 313453 - DNA, 25 bp, Artificial
  probe
  misc_feature (1)..(25): SEQ ID NO: 2050; WAN024AVA; Start 238; Stop 262
atctacgtcttgatgggaatttcta

SEQ ID NO: 313454 - DNA, 25 bp, Artificial
  probe
  misc_feature (1)..(25): SEQ ID NO: 2050; WAN024AVA; Start 237; Stop 261
tatctacgtcttgatgggaatttct

SEQ ID NO: 313455 - DNA, 25 bp, Artificial
  probe
  misc_feature (1)..(25): SEQ ID NO: 2050; WAN024AVA; Start 235; Stop 259
tctatctacgtcttgatgggaattt

SEQ ID NO: 313456 - DNA, 25 bp, Artificial
  probe
  misc_feature (1)..(25): SEQ ID NO: 2050; WAN024AVA; Start 243; Stop 267
cgtcttgatgggaatttctatttat

SEQ ID NO: 313457 - DNA, 25 bp, Artificial
  probe
  misc_feature (1)..(25): SEQ ID NO: 2050; WAN024AVA; Start 236; Stop 260
ctatctacgtcttgatgggaatttc

SEQ ID NO: 313458 - DNA, 25 bp, Artificial
  probe
  misc_feature (1)..(25): SEQ ID NO: 2050; WAN024AVA; Start 240; Stop 264
ctacgtcttgatgggaatttctatt

SEQ ID NO: 313459 - DNA, 25 bp, Artificial
  probe
  misc_feature (1)..(25): SEQ ID NO: 2050; WAN024AVA; Start 232; Stop 256
gtctctatctacgtcttgatgggaa

SEQ ID NO: 313460 - DNA, 25 bp, Artificial
  probe
  misc_feature (1)..(25): SEQ ID NO: 2050; WAN024AVA; Start 225; Stop 249
aatcatcgtctctatctacgtcttg

SEQ ID NO: 313461 - DNA, 25 bp, Artificial
  probe
  misc_feature (1)..(25): SEQ ID NO: 2050; WAN024AVA; Start 227; Stop 251
tcatcgtctctatctacgtcttgat

SEQ ID NO: 313462 - DNA, 25 bp, Artificial
  probe
  misc_feature (1)..(25): SEQ ID NO: 2050; WAN024AVA; Start 226; Stop 250
atcatcgtctctatctacgtcttga

SEQ ID NO: 313463 - DNA, 25 bp, Artificial
  probe
  misc_feature (1)..(25): SEQ ID NO: 2050; WAN024AVA; Start 242; Stop 266
acgtcttgatgggaatttctattta

SEQ ID NO: 313464 - DNA, 25 bp, Artificial
  probe
  misc_feature (1)..(25): SEQ ID NO: 2050; WAN024AVA; Start 241; Stop 265
tacgtcttgatgggaatttctattt

SEQ ID NO: 313465 - DNA, 25 bp, Artificial
  probe
  misc_feature (1)..(25): SEQ ID NO: 2050; WAN024AVA; Start 228; Stop 252
catcgtctctatctacgtcttgatg

SEQ ID NO: 313466 - DNA, 25 bp, Artificial
  probe
  misc_feature (1)..(25): SEQ ID NO: 2050; WAN024AVA; Start 229; Stop 253
atcgtctctatctacgtcttgatgg

SEQ ID NO: 313467 - DNA, 25 bp, Artificial
  probe
  misc_feature (1)..(25): SEQ ID NO: 2050; WAN024AVA; Start 224; Stop 248
aaatcatcgtctctatctacgtctt

SEQ ID NO: 313468 - DNA, 25 bp, Artificial
  probe
  misc_feature (1)..(25): SEQ ID NO: 2050; WAN024AVA; Start 264; Stop 288
ttattttgcacctcttttaccagtc

SEQ ID NO: 313469 - DNA, 25 bp, Artificial
  probe
  misc_feature (1)..(25): SEQ ID NO: 2050; WAN024AVA; Start 265; Stop 289
tattttgcacctcttttaccagtca

SEQ ID NO: 313470 - DNA, 25 bp, Artificial
  probe
  misc_feature (1)..(25): SEQ ID NO: 2050; WAN024AVA; Start 263; Stop 287
tttattttgcacctcttttaccagt

SEQ ID NO: 313471 - DNA, 25 bp, Artificial
  probe
  misc_feature (1)..(25): SEQ ID NO: 2050; WAN024AVA; Start 272; Stop 296
cacctcttttaccagtcaaaatcgg

SEQ ID NO: 313472 - DNA, 25 bp, Artificial
  probe
  misc_feature (1)..(25): SEQ ID NO: 2050; WAN024AVA; Start 262; Stop 286
atttattttgcacctcttttaccag

SEQ ID NO: 313473 - DNA, 25 bp, Artificial
  probe
  misc_feature (1)..(25): SEQ ID NO: 2050; WAN024AVA; Start 251; Stop 275
tgggaatttctatttattttgcacc

SEQ ID NO: 313474 - DNA, 25 bp, Artificial
  probe
  misc_feature (1)..(25): SEQ ID NO: 2050; WAN024AVA; Start 266; Stop 290
attttgcacctcttttaccagtcaa

SEQ ID NO: 313475 - DNA, 25 bp, Artificial
  probe
  misc_feature (1)..(25): SEQ ID NO: 2050; WAN024AVA; Start 244; Stop 268
gtcttgatgggaatttctatttatt

SEQ ID NO: 313476 - DNA, 25 bp, Artificial
  probe
  misc_feature (1)..(25): SEQ ID NO: 2050; WAN024AVA; Start 252; Stop 276
gggaatttctatttattttgcacct

SEQ ID NO: 313477 - DNA, 25 bp, Artificial
  probe
  misc_feature (1)..(25): SEQ ID NO: 2050; WAN024AVA; Start 271; Stop 295
gcacctcttttaccagtcaaaatcg

SEQ ID NO: 313478 - DNA, 25 bp, Artificial
  probe
  misc_feature (1)..(25): SEQ ID NO: 2050; WAN024AVA; Start 273; Stop 297
acctcttttaccagtcaaaatcggt

SEQ ID NO: 313479 - DNA, 25 bp, Artificial
  probe
  misc_feature (1)..(25): SEQ ID NO: 2050; WAN024AVA; Start 269; Stop 293
ttgcacctcttttaccagtcaaaat

SEQ ID NO: 313480 - DNA, 25 bp, Artificial
  probe
  misc_feature (1)..(25): SEQ ID NO: 2050; WAN024AVA; Start 248; Stop 272
tgatgggaatttctatttattttgc

SEQ ID NO: 313481 - DNA, 25 bp, Artificial
  probe
  misc_feature (1)..(25): SEQ ID NO: 2051; WAN024FZG; Start 221; Stop 245
taatctcatccaccaaggtcttaac

SEQ ID NO: 313482 - DNA, 25 bp, Artificial
  probe
  misc_feature (1)..(25): SEQ ID NO: 2051; WAN024FZG; Start 219; Stop 243
cttaatctcatccaccaaggtctta

SEQ ID NO: 313483 - DNA, 25 bp, Artificial
  probe
  misc_feature (1)..(25): SEQ ID NO: 2051; WAN024FZG; Start 238; Stop 262
gtcttaacattgccatcactgatag

SEQ ID NO: 313484 - DNA, 25 bp, Artificial
  probe
  misc_feature (1)..(25): SEQ ID NO: 2051; WAN024FZG; Start 220; Stop 244
ttaatctcatccaccaaggtcttaa

SEQ ID NO: 313485 - DNA, 25 bp, Artificial
  probe
  misc_feature (1)..(25): SEQ ID NO: 2051; WAN024FZG; Start 237; Stop 261
ggtcttaacattgccatcactgata

SEQ ID NO: 313486 - DNA, 25 bp, Artificial
  probe
  misc_feature (1)..(25): SEQ ID NO: 2051; WAN024FZG; Start 223; Stop 247
atctcatccaccaaggtcttaacat

SEQ ID NO: 313487 - DNA, 25 bp, Artificial
  probe
  misc_feature (1)..(25): SEQ ID NO: 2051; WAN024FZG; Start 239; Stop 263
tcttaacattgccatcactgatagc

SEQ ID NO: 313488 - DNA, 25 bp, Artificial
  probe
  misc_feature (1)..(25): SEQ ID NO: 2051; WAN024FZG; Start 224; Stop 248
tctcatccaccaaggtcttaacatt

SEQ ID NO: 313489 - DNA, 25 bp, Artificial
  probe
  misc_feature (1)..(25): SEQ ID NO: 2051; WAN024FZG; Start 222; Stop 246
aatctcatccaccaaggtcttaaca

SEQ ID NO: 313490 - DNA, 25 bp, Artificial
  probe
  misc_feature (1)..(25): SEQ ID NO: 2051; WAN024FZG; Start 225; Stop 249
ctcatccaccaaggtcttaacattg

SEQ ID NO: 313491 - DNA, 25 bp, Artificial
  probe
  misc_feature (1)..(25): SEQ ID NO: 2051; WAN024FZG; Start 235; Stop 259
aaggtcttaacattgccatcactga

SEQ ID NO: 313492 - DNA, 25 bp, Artificial
  probe
  misc_feature (1)..(25): SEQ ID NO: 2051; WAN024FZG; Start 234; Stop 258
caaggtcttaacattgccatcactg

SEQ ID NO: 313493 - DNA, 25 bp, Artificial
  probe
  misc_feature (1)..(25): SEQ ID NO: 2051; WAN024FZG; Start 236; Stop 260
aggtcttaacattgccatcactgat

SEQ ID NO: 313494 - DNA, 25 bp, Artificial
  probe
  misc_feature (1)..(25): SEQ ID NO: 2051; WAN024FZG; Start 218; Stop 242
gcttaatctcatccaccaaggtctt

SEQ ID NO: 313495 - DNA, 25 bp, Artificial
  probe
  misc_feature (1)..(25): SEQ ID NO: 2051; WAN024FZG; Start 62; Stop 86
aatgcttctccaaatcttcaaagtt

SEQ ID NO: 313496 - DNA, 25 bp, Artificial
  probe
  misc_feature (1)..(25): SEQ ID NO: 2051; WAN024FZG; Start 61; Stop 85
aaatgcttctccaaatcttcaaagt

SEQ ID NO: 313497 - DNA, 25 bp, Artificial
  probe
  misc_feature (1)..(25): SEQ ID NO: 2051; WAN024FZG; Start 63; Stop 87
atgcttctccaaatcttcaaagttg

SEQ ID NO: 313498 - DNA, 25 bp, Artificial
  probe
  misc_feature (1)..(25): SEQ ID NO: 2051; WAN024FZG; Start 201; Stop 225
aatcaggacctcagacagcttaatc

SEQ ID NO: 313499 - DNA, 25 bp, Artificial
  probe
  misc_feature (1)..(25): SEQ ID NO: 2051; WAN024FZG; Start 32; Stop 56
tttcgtcatttccatgtttcacttt

SEQ ID NO: 313500 - DNA, 25 bp, Artificial
  probe
  misc_feature (1)..(25): SEQ ID NO: 2051; WAN024FZG; Start 233; Stop 257
ccaaggtcttaacattgccatcact

SEQ ID NO: 313501 - DNA, 25 bp, Artificial
  probe
  misc_feature (1)..(25): SEQ ID NO: 2051; WAN024FZG; Start 213; Stop 237
agacagcttaatctcatccaccaag

SEQ ID NO: 313502 - DNA, 25 bp, Artificial
  probe
  misc_feature (1)..(25): SEQ ID NO: 2051; WAN024FZG; Start 33; Stop 57
ttcgtcatttccatgtttcactttc

SEQ ID NO: 313503 - DNA, 25 bp, Artificial
  probe
  misc_feature (1)..(25): SEQ ID NO: 2051; WAN024FZG; Start 31; Stop 55
gtttcgtcatttccatgtttcactt

SEQ ID NO: 313504 - DNA, 25 bp, Artificial
  probe
  misc_feature (1)..(25): SEQ ID NO: 2051; WAN024FZG; Start 207; Stop 231
gacctcagacagcttaatctcatcc

SEQ ID NO: 313505 - DNA, 25 bp, Artificial
  probe
  misc_feature (1)..(25): SEQ ID NO: 2051; WAN024FZG; Start 206; Stop 230
ggacctcagacagcttaatctcatc

SEQ ID NO: 313506 - DNA, 25 bp, Artificial
  probe
  misc_feature (1)..(25): SEQ ID NO: 2051; WAN024FZG; Start 226; Stop 250
tcatccaccaaggtcttaacattgc

SEQ ID NO: 313507 - DNA, 25 bp, Artificial
  probe
  misc_feature (1)..(25): SEQ ID NO: 2051; WAN024FZG; Start 212; Stop 236
cagacagcttaatctcatccaccaa

SEQ ID NO: 313508 - DNA, 25 bp, Artificial
  probe
  misc_feature (1)..(25): SEQ ID NO: 2051; WAN024FZG; Start 242; Stop 266
taacattgccatcactgatagcatt

SEQ ID NO: 313509 - DNA, 25 bp, Artificial
  probe
  misc_feature (1)..(25): SEQ ID NO: 2051; WAN024FZG; Start 241; Stop 265
ttaacattgccatcactgatagcat

SEQ ID NO: 313510 - DNA, 25 bp, Artificial
  probe
  misc_feature (1)..(25): SEQ ID NO: 2051; WAN024FZG; Start 64; Stop 88
tgcttctccaaatcttcaaagttga

SEQ ID NO: 313511 - DNA, 25 bp, Artificial
  probe
  misc_feature (1)..(25): SEQ ID NO: 2051; WAN024FZG; Start 269; Stop 293
tgacatcaatgacaaagctaggata

SEQ ID NO: 313512 - DNA, 25 bp, Artificial
  probe
  misc_feature (1)..(25): SEQ ID NO: 2051; WAN024FZG; Start 210; Stop 234
ctcagacagcttaatctcatccacc

SEQ ID NO: 313513 - DNA, 25 bp, Artificial
  probe
  misc_feature (1)..(25): SEQ ID NO: 2051; WAN024FZG; Start 209; Stop 233
cctcagacagcttaatctcatccac

SEQ ID NO: 313514 - DNA, 25 bp, Artificial
  probe
  misc_feature (1)..(25): SEQ ID NO: 2052; WAN024GEQ; Start 167; Stop 191
gctatgaacacacctatcttatgct

SEQ ID NO: 313515 - DNA, 25 bp, Artificial
  probe
  misc_feature (1)..(25): SEQ ID NO: 2052; WAN024GEQ; Start 414; Stop 438
acttctaacacctgaccatatccaa

SEQ ID NO: 313516 - DNA, 25 bp, Artificial
  probe
  misc_feature (1)..(25): SEQ ID NO: 2052; WAN024GEQ; Start 166; Stop 190
ggctatgaacacacctatcttatgc

SEQ ID NO: 313517 - DNA, 25 bp, Artificial
  probe
  misc_feature (1)..(25): SEQ ID NO: 2052; WAN024GEQ; Start 413; Stop 437
gacttctaacacctgaccatatcca

SEQ ID NO: 313518 - DNA, 25 bp, Artificial
  probe
  misc_feature (1)..(25): SEQ ID NO: 2052; WAN024GEQ; Start 168; Stop 192
ctatgaacacacctatcttatgctt

SEQ ID NO: 313519 - DNA, 25 bp, Artificial
  probe
  misc_feature (1)..(25): SEQ ID NO: 2052; WAN024GEQ; Start 169; Stop 193
tatgaacacacctatcttatgcttc

SEQ ID NO: 313520 - DNA, 25 bp, Artificial
  probe
  misc_feature (1)..(25): SEQ ID NO: 2052; WAN024GEQ; Start 165; Stop 189
aggctatgaacacacctatcttatg

SEQ ID NO: 313521 - DNA, 25 bp, Artificial
  probe
  misc_feature (1)..(25): SEQ ID NO: 2052; WAN024GEQ; Start 163; Stop 187
caaggctatgaacacacctatctta

SEQ ID NO: 313522 - DNA, 25 bp, Artificial
  probe
  misc_feature (1)..(25): SEQ ID NO: 2052; WAN024GEQ; Start 164; Stop 188
aaggctatgaacacacctatcttat

SEQ ID NO: 313523 - DNA, 25 bp, Artificial
  probe
  misc_feature (1)..(25): SEQ ID NO: 2052; WAN024GEQ; Start 162; Stop 186
tcaaggctatgaacacacctatctt

SEQ ID NO: 313524 - DNA, 25 bp, Artificial
  probe
  misc_feature (1)..(25): SEQ ID NO: 2052; WAN024GEQ; Start 406; Stop 430
gttaatggacttctaacacctgacc

SEQ ID NO: 313525 - DNA, 25 bp, Artificial
  probe
  misc_feature (1)..(25): SEQ ID NO: 2052; WAN024GEQ; Start 172; Stop 196
gaacacacctatcttatgcttcata

SEQ ID NO: 313526 - DNA, 25 bp, Artificial
  probe
  misc_feature (1)..(25): SEQ ID NO: 2052; WAN024GEQ; Start 405; Stop 429
ggttaatggacttctaacacctgac

SEQ ID NO: 313527 - DNA, 25 bp, Artificial
  probe
  misc_feature (1)..(25): SEQ ID NO: 2052; WAN024GEQ; Start 407; Stop 431
ttaatggacttctaacacctgacca

SEQ ID NO: 313528 - DNA, 25 bp, Artificial
  probe
  misc_feature (1)..(25): SEQ ID NO: 2052; WAN024GEQ; Start 411; Stop 435
tggacttctaacacctgaccatatc

SEQ ID NO: 313529 - DNA, 25 bp, Artificial
  probe
  misc_feature (1)..(25): SEQ ID NO: 2052; WAN024GEQ; Start 148; Stop 172
caggatcgaatcattcaaggctatg

SEQ ID NO: 313530 - DNA, 25 bp, Artificial
  probe
  misc_feature (1)..(25): SEQ ID NO: 2052; WAN024GEQ; Start 147; Stop 171
tcaggatcgaatcattcaaggctat

SEQ ID NO: 313531 - DNA, 25 bp, Artificial
  probe
  misc_feature (1)..(25): SEQ ID NO: 2052; WAN024GEQ; Start 633; Stop 657
cacattgaacccagatttagcagaa

SEQ ID NO: 313532 - DNA, 25 bp, Artificial
  probe
  misc_feature (1)..(25): SEQ ID NO: 2052; WAN024GEQ; Start 146; Stop 170
ttcaggatcgaatcattcaaggcta

SEQ ID NO: 313533 - DNA, 25 bp, Artificial
  probe
  misc_feature (1)..(25): SEQ ID NO: 2052; WAN024GEQ; Start 412; Stop 436
ggacttctaacacctgaccatatcc

SEQ ID NO: 313534 - DNA, 25 bp, Artificial
  probe
  misc_feature (1)..(25): SEQ ID NO: 2052; WAN024GEQ; Start 526; Stop 550
caagcctctatcaccatttcagaag

SEQ ID NO: 313535 - DNA, 25 bp, Artificial
  probe
  misc_feature (1)..(25): SEQ ID NO: 2052; WAN024GEQ; Start 525; Stop 549
tcaagcctctatcaccatttcagaa

SEQ ID NO: 313536 - DNA, 25 bp, Artificial
  probe
  misc_feature (1)..(25): SEQ ID NO: 2052; WAN024GEQ; Start 171; Stop 195
tgaacacacctatcttatgcttcat

SEQ ID NO: 313537 - DNA, 25 bp, Artificial
  probe
  misc_feature (1)..(25): SEQ ID NO: 2052; WAN024GEQ; Start 170; Stop 194
atgaacacacctatcttatgcttca

SEQ ID NO: 313538 - DNA, 25 bp, Artificial
  probe
  misc_feature (1)..(25): SEQ ID NO: 2052; WAN024GEQ; Start 155; Stop 179
gaatcattcaaggctatgaacacac

SEQ ID NO: 313539 - DNA, 25 bp, Artificial
  probe
  misc_feature (1)..(25): SEQ ID NO: 2052; WAN024GEQ; Start 160; Stop 184
attcaaggctatgaacacacctatc

SEQ ID NO: 313540 - DNA, 25 bp, Artificial
  probe
  misc_feature (1)..(25): SEQ ID NO: 2052; WAN024GEQ; Start 523; Stop 547
agtcaagcctctatcaccatttcag

SEQ ID NO: 313541 - DNA, 25 bp, Artificial
  probe
  misc_feature (1)..(25): SEQ ID NO: 2052; WAN024GEQ; Start 521; Stop 545
tcagtcaagcctctatcaccatttc

SEQ ID NO: 313542 - DNA, 25 bp, Artificial
  probe
  misc_feature (1)..(25): SEQ ID NO: 2052; WAN024GEQ; Start 159; Stop 183
cattcaaggctatgaacacacctat

SEQ ID NO: 313543 - DNA, 25 bp, Artificial
  probe
  misc_feature (1)..(25): SEQ ID NO: 2052; WAN024GEQ; Start 522; Stop 546
cagtcaagcctctatcaccatttca

SEQ ID NO: 313544 - DNA, 25 bp, Artificial
  probe
  misc_feature (1)..(25): SEQ ID NO: 2052; WAN024GEQ; Start 524; Stop 548
gtcaagcctctatcaccatttcaga

SEQ ID NO: 313545 - DNA, 25 bp, Artificial
  probe
  misc_feature (1)..(25): SEQ ID NO: 2052; WAN024GEQ; Start 161; Stop 185
ttcaaggctatgaacacacctatct

SEQ ID NO: 313546 - DNA, 25 bp, Artificial
  probe
  misc_feature (1)..(25): SEQ ID NO: 2052; WAN024GEQ; Start 632; Stop 656
tcacattgaacccagatttagcaga

SEQ ID NO: 313547 - DNA, 25 bp, Artificial
  probe
  misc_feature (1)..(25): SEQ ID NO: 2053; WAN024FRR; Start 203; Stop 227
aagtaacgataagactgtggattgt

SEQ ID NO: 313548 - DNA, 25 bp, Artificial
  probe
  misc_feature (1)..(25): SEQ ID NO: 2053; WAN024FRR; Start 201; Stop 225
tgaagtaacgataagactgtggatt

SEQ ID NO: 313549 - DNA, 25 bp, Artificial
  probe
  misc_feature (1)..(25): SEQ ID NO: 2053; WAN024FRR; Start 200; Stop 224
atgaagtaacgataagactgtggat

SEQ ID NO: 313550 - DNA, 25 bp, Artificial
  probe
  misc_feature (1)..(25): SEQ ID NO: 2053; WAN024FRR; Start 202; Stop 226
gaagtaacgataagactgtggattg

SEQ ID NO: 313551 - DNA, 25 bp, Artificial
  probe
  misc_feature (1)..(25): SEQ ID NO: 2053; WAN024FRR; Start 204; Stop 228
agtaacgataagactgtggattgtc

SEQ ID NO: 313552 - DNA, 25 bp, Artificial
  probe
  misc_feature (1)..(25): SEQ ID NO: 2053; WAN024FRR; Start 199; Stop 223
catgaagtaacgataagactgtgga

SEQ ID NO: 313553 - DNA, 25 bp, Artificial
  probe
  misc_feature (1)..(25): SEQ ID NO: 2053; WAN024FRR; Start 245; Stop 269
tactcatcaaggttgacactggtta

SEQ ID NO: 313554 - DNA, 25 bp, Artificial
  probe
  misc_feature (1)..(25): SEQ ID NO: 2053; WAN024FRR; Start 241; Stop 265
cacatactcatcaaggttgacactg

SEQ ID NO: 313555 - DNA, 25 bp, Artificial
  probe
  misc_feature (1)..(25): SEQ ID NO: 2053; WAN024FRR; Start 205; Stop 229
gtaacgataagactgtggattgtcc

SEQ ID NO: 313556 - DNA, 25 bp, Artificial
  probe
  misc_feature (1)..(25): SEQ ID NO: 2053; WAN024FRR; Start 244; Stop 268
atactcatcaaggttgacactggtt

SEQ ID NO: 313557 - DNA, 25 bp, Artificial
  probe
  misc_feature (1)..(25): SEQ ID NO: 2053; WAN024FRR; Start 198; Stop 222
gcatgaagtaacgataagactgtgg

SEQ ID NO: 313558 - DNA, 25 bp, Artificial
  probe
  misc_feature (1)..(25): SEQ ID NO: 2053; WAN024FRR; Start 195; Stop 219
cttgcatgaagtaacgataagactg

SEQ ID NO: 313559 - DNA, 25 bp, Artificial
  probe
  misc_feature (1)..(25): SEQ ID NO: 2053; WAN024FRR; Start 196; Stop 220
ttgcatgaagtaacgataagactgt

SEQ ID NO: 313560 - DNA, 25 bp, Artificial
  probe
  misc_feature (1)..(25): SEQ ID NO: 2053; WAN024FRR; Start 246; Stop 270
actcatcaaggttgacactggttag

SEQ ID NO: 313561 - DNA, 25 bp, Artificial
  probe
  misc_feature (1)..(25): SEQ ID NO: 2053; WAN024FRR; Start 243; Stop 267
catactcatcaaggttgacactggt

SEQ ID NO: 313562 - DNA, 25 bp, Artificial
  probe
  misc_feature (1)..(25): SEQ ID NO: 2053; WAN024FRR; Start 242; Stop 266
acatactcatcaaggttgacactgg

SEQ ID NO: 313563 - DNA, 25 bp, Artificial
  probe
  misc_feature (1)..(25): SEQ ID NO: 2053; WAN024FRR; Start 240; Stop 264
ccacatactcatcaaggttgacact

SEQ ID NO: 313564 - DNA, 25 bp, Artificial
  probe
  misc_feature (1)..(25): SEQ ID NO: 2053; WAN024FRR; Start 197; Stop 221
tgcatgaagtaacgataagactgtg

SEQ ID NO: 313565 - DNA, 25 bp, Artificial
  probe
  misc_feature (1)..(25): SEQ ID NO: 2053; WAN024FRR; Start 120; Stop 144
cttcagcttcagcattgtccttaac

SEQ ID NO: 313566 - DNA, 25 bp, Artificial
  probe
  misc_feature (1)..(25): SEQ ID NO: 2053; WAN024FRR; Start 119; Stop 143
acttcagcttcagcattgtccttaa

SEQ ID NO: 313567 - DNA, 25 bp, Artificial
  probe
  misc_feature (1)..(25): SEQ ID NO: 2053; WAN024FRR; Start 118; Stop 142
aacttcagcttcagcattgtcctta

SEQ ID NO: 313568 - DNA, 25 bp, Artificial
  probe
  misc_feature (1)..(25): SEQ ID NO: 2053; WAN024FRR; Start 31; Stop 55
ctcattaaagccgatatgcccattg

SEQ ID NO: 313569 - DNA, 25 bp, Artificial
  probe
  misc_feature (1)..(25): SEQ ID NO: 2053; WAN024FRR; Start 194; Stop 218
tcttgcatgaagtaacgataagact

SEQ ID NO: 313570 - DNA, 25 bp, Artificial
  probe
  misc_feature (1)..(25): SEQ ID NO: 2053; WAN024FRR; Start 193; Stop 217
ttcttgcatgaagtaacgataagac

SEQ ID NO: 313571 - DNA, 25 bp, Artificial
  probe
  misc_feature (1)..(25): SEQ ID NO: 2053; WAN024FRR; Start 114; Stop 138
gttcaacttcagcttcagcattgtc

SEQ ID NO: 313572 - DNA, 25 bp, Artificial
  probe
  misc_feature (1)..(25): SEQ ID NO: 2053; WAN024FRR; Start 121; Stop 145
ttcagcttcagcattgtccttaaca

SEQ ID NO: 313573 - DNA, 25 bp, Artificial
  probe
  misc_feature (1)..(25): SEQ ID NO: 2053; WAN024FRR; Start 206; Stop 230
taacgataagactgtggattgtccc

SEQ ID NO: 313574 - DNA, 25 bp, Artificial
  probe
  misc_feature (1)..(25): SEQ ID NO: 2053; WAN024FRR; Start 140; Stop 164
ttaacaccacgaggcaagaaacttt

SEQ ID NO: 313575 - DNA, 25 bp, Artificial
  probe
  misc_feature (1)..(25): SEQ ID NO: 2053; WAN024FRR; Start 122; Stop 146
tcagcttcagcattgtccttaacac

SEQ ID NO: 313576 - DNA, 25 bp, Artificial
  probe
  misc_feature (1)..(25): SEQ ID NO: 2053; WAN024FRR; Start 139; Stop 163
cttaacaccacgaggcaagaaactt

SEQ ID NO: 313577 - DNA, 25 bp, Artificial
  probe
  misc_feature (1)..(25): SEQ ID NO: 2053; WAN024FRR; Start 67; Stop 91
caagatttggaggtcaactggatgg

SEQ ID NO: 313578 - DNA, 25 bp, Artificial
  probe
  misc_feature (1)..(25): SEQ ID NO: 2053; WAN024FRR; Start 126; Stop 150
cttcagcattgtccttaacaccacg

SEQ ID NO: 313579 - DNA, 25 bp, Artificial
  probe
  misc_feature (1)..(25): SEQ ID NO: 2053; WAN024FRR; Start 117; Stop 141
caacttcagcttcagcattgtcctt

SEQ ID NO: 313580 - DNA, 25 bp, Artificial
  probe
  misc_feature (1)..(25): SEQ ID NO: 2054; WAN024A9L; Start 46; Stop 70
aacttccagtagtcttttcactttt

SEQ ID NO: 313581 - DNA, 25 bp, Artificial
  probe
  misc_feature (1)..(25): SEQ ID NO: 2054; WAN024A9L; Start 45; Stop 69
aaacttccagtagtcttttcacttt

SEQ ID NO: 313582 - DNA, 25 bp, Artificial
  probe
  misc_feature (1)..(25): SEQ ID NO: 2054; WAN024A9L; Start 44; Stop 68
taaacttccagtagtcttttcactt

SEQ ID NO: 313583 - DNA, 25 bp, Artificial
  probe
  misc_feature (1)..(25): SEQ ID NO: 2054; WAN024A9L; Start 43; Stop 67
ataaacttccagtagtcttttcact

SEQ ID NO: 313584 - DNA, 25 bp, Artificial
  probe
  misc_feature (1)..(25): SEQ ID NO: 2054; WAN024A9L; Start 42; Stop 66
aataaacttccagtagtcttttcac

SEQ ID NO: 313585 - DNA, 25 bp, Artificial
  probe
  misc_feature (1)..(25): SEQ ID NO: 2054; WAN024A9L; Start 41; Stop 65
aaataaacttccagtagtcttttca

SEQ ID NO: 313586 - DNA, 25 bp, Artificial
  probe
  misc_feature (1)..(25): SEQ ID NO: 2054; WAN024A9L; Start 38; Stop 62
tcaaaataaacttccagtagtcttt

SEQ ID NO: 313587 - DNA, 25 bp, Artificial
  probe
  misc_feature (1)..(25): SEQ ID NO: 2054; WAN024A9L; Start 37; Stop 61
atcaaaataaacttccagtagtctt

SEQ ID NO: 313588 - DNA, 25 bp, Artificial
  probe
  misc_feature (1)..(25): SEQ ID NO: 2054; WAN024A9L; Start 39; Stop 63
caaaataaacttccagtagtctttt

SEQ ID NO: 313589 - DNA, 25 bp, Artificial
  probe
  misc_feature (1)..(25): SEQ ID NO: 2054; WAN024A9L; Start 36; Stop 60
tatcaaaataaacttccagtagtct

SEQ ID NO: 313590 - DNA, 25 bp, Artificial
  probe
  misc_feature (1)..(25): SEQ ID NO: 2054; WAN024A9L; Start 40; Stop 64
aaaataaacttccagtagtcttttc

SEQ ID NO: 313591 - DNA, 25 bp, Artificial
  probe
  misc_feature (1)..(25): SEQ ID NO: 2054; WAN024A9L; Start 35; Stop 59
ttatcaaaataaacttccagtagtc

SEQ ID NO: 313592 - DNA, 25 bp, Artificial
  probe
  misc_feature (1)..(25): SEQ ID NO: 2054; WAN024A9L; Start 2; Stop 26
tgcgttttattatgaaaagatctac

SEQ ID NO: 313593 - DNA, 25 bp, Artificial
  probe
  misc_feature (1)..(25): SEQ ID NO: 2054; WAN024A9L; Start 3; Stop 27
gcgttttattatgaaaagatctact

SEQ ID NO: 313594 - DNA, 25 bp, Artificial
  probe
  misc_feature (1)..(25): SEQ ID NO: 2054; WAN024A9L; Start 1; Stop 25
atgcgttttattatgaaaagatcta

SEQ ID NO: 313595 - DNA, 25 bp, Artificial
  probe
  misc_feature (1)..(25): SEQ ID NO: 2055; WAN024D23; Start 77; Stop 101
ttcgttctatcatggaatacacagc

SEQ ID NO: 313596 - DNA, 25 bp, Artificial
  probe
  misc_feature (1)..(25): SEQ ID NO: 2055; WAN024D23; Start 79; Stop 103
cgttctatcatggaatacacagctt

SEQ ID NO: 313597 - DNA, 25 bp, Artificial
  probe
  misc_feature (1)..(25): SEQ ID NO: 2055; WAN024D23; Start 78; Stop 102
tcgttctatcatggaatacacagct

SEQ ID NO: 313598 - DNA, 25 bp, Artificial
  probe
  misc_feature (1)..(25): SEQ ID NO: 2055; WAN024D23; Start 132; Stop 156
ccagttgattgtttcaggtttgatt

SEQ ID NO: 313599 - DNA, 25 bp, Artificial
  probe
  misc_feature (1)..(25): SEQ ID NO: 2055; WAN024D23; Start 134; Stop 158
agttgattgtttcaggtttgattcg

SEQ ID NO: 313600 - DNA, 25 bp, Artificial
  probe
  misc_feature (1)..(25): SEQ ID NO: 2055; WAN024D23; Start 133; Stop 157
cagttgattgtttcaggtttgattc

SEQ ID NO: 313601 - DNA, 25 bp, Artificial
  probe
  misc_feature (1)..(25): SEQ ID NO: 2055; WAN024D23; Start 76; Stop 100
tttcgttctatcatggaatacacag

SEQ ID NO: 313602 - DNA, 25 bp, Artificial
  probe
  misc_feature (1)..(25): SEQ ID NO: 2055; WAN024D23; Start 85; Stop 109
atcatggaatacacagctttctttg

SEQ ID NO: 313603 - DNA, 25 bp, Artificial
  probe
  misc_feature (1)..(25): SEQ ID NO: 2055; WAN024D23; Start 82; Stop 106
tctatcatggaatacacagctttct

SEQ ID NO: 313604 - DNA, 25 bp, Artificial
  probe
  misc_feature (1)..(25): SEQ ID NO: 2055; WAN024D23; Start 80; Stop 104
gttctatcatggaatacacagcttt

SEQ ID NO: 313605 - DNA, 25 bp, Artificial
  probe
  misc_feature (1)..(25): SEQ ID NO: 2055; WAN024D23; Start 83; Stop 107
ctatcatggaatacacagctttctt

SEQ ID NO: 313606 - DNA, 25 bp, Artificial
  probe
  misc_feature (1)..(25): SEQ ID NO: 2055; WAN024D23; Start 81; Stop 105
ttctatcatggaatacacagctttc

SEQ ID NO: 313607 - DNA, 25 bp, Artificial
  probe
  misc_feature (1)..(25): SEQ ID NO: 2055; WAN024D23; Start 137; Stop 161
tgattgtttcaggtttgattcgatt

SEQ ID NO: 313608 - DNA, 25 bp, Artificial
  probe
  misc_feature (1)..(25): SEQ ID NO: 2055; WAN024D23; Start 136; Stop 160
ttgattgtttcaggtttgattcgat

SEQ ID NO: 313609 - DNA, 25 bp, Artificial
  probe
  misc_feature (1)..(25): SEQ ID NO: 2055; WAN024D23; Start 135; Stop 159
gttgattgtttcaggtttgattcga

SEQ ID NO: 313610 - DNA, 25 bp, Artificial
  probe
  misc_feature (1)..(25): SEQ ID NO: 2055; WAN024D23; Start 131; Stop 155
accagttgattgtttcaggtttgat

SEQ ID NO: 313611 - DNA, 25 bp, Artificial
  probe
  misc_feature (1)..(25): SEQ ID NO: 2055; WAN024D23; Start 84; Stop 108
tatcatggaatacacagctttcttt

SEQ ID NO: 313612 - DNA, 25 bp, Artificial
  probe
  misc_feature (1)..(25): SEQ ID NO: 2055; WAN024D23; Start 128; Stop 152
ttgaccagttgattgtttcaggttt

SEQ ID NO: 313613 - DNA, 25 bp, Artificial
  probe
  misc_feature (1)..(25): SEQ ID NO: 2055; WAN024D23; Start 127; Stop 151
tttgaccagttgattgtttcaggtt

SEQ ID NO: 313614 - DNA, 25 bp, Artificial
  probe
  misc_feature (1)..(25): SEQ ID NO: 2055; WAN024D23; Start 138; Stop 162
gattgtttcaggtttgattcgattt

SEQ ID NO: 313615 - DNA, 25 bp, Artificial
  probe
  misc_feature (1)..(25): SEQ ID NO: 2055; WAN024D23; Start 86; Stop 110
tcatggaatacacagctttctttgt

SEQ ID NO: 313616 - DNA, 25 bp, Artificial
  probe
  misc_feature (1)..(25): SEQ ID NO: 2055; WAN024D23; Start 130; Stop 154
gaccagttgattgtttcaggtttga

SEQ ID NO: 313617 - DNA, 25 bp, Artificial
  probe
  misc_feature (1)..(25): SEQ ID NO: 2055; WAN024D23; Start 129; Stop 153
tgaccagttgattgtttcaggtttg

SEQ ID NO: 313618 - DNA, 25 bp, Artificial
  probe
  misc_feature (1)..(25): SEQ ID NO: 2055; WAN024D23; Start 65; Stop 89
gctggagagattttcgttctatcat

SEQ ID NO: 313619 - DNA, 25 bp, Artificial
  probe
  misc_feature (1)..(25): SEQ ID NO: 2055; WAN024D23; Start 89; Stop 113
tggaatacacagctttctttgtagt

SEQ ID NO: 313620 - DNA, 25 bp, Artificial
  probe
  misc_feature (1)..(25): SEQ ID NO: 2055; WAN024D23; Start 87; Stop 111
catggaatacacagctttctttgta

SEQ ID NO: 313621 - DNA, 25 bp, Artificial
  probe
  misc_feature (1)..(25): SEQ ID NO: 2055; WAN024D23; Start 141; Stop 165
tgtttcaggtttgattcgatttatt

SEQ ID NO: 313622 - DNA, 25 bp, Artificial
  probe
  misc_feature (1)..(25): SEQ ID NO: 2055; WAN024D23; Start 140; Stop 164
ttgtttcaggtttgattcgatttat

SEQ ID NO: 313623 - DNA, 25 bp, Artificial
  probe
  misc_feature (1)..(25): SEQ ID NO: 2055; WAN024D23; Start 139; Stop 163
attgtttcaggtttgattcgattta

SEQ ID NO: 313624 - DNA, 25 bp, Artificial
  probe
  misc_feature (1)..(25): SEQ ID NO: 2055; WAN024D23; Start 88; Stop 112
atggaatacacagctttctttgtag

SEQ ID NO: 313625 - DNA, 25 bp, Artificial
  probe
  misc_feature (1)..(25): SEQ ID NO: 2055; WAN024D23; Start 90; Stop 114
ggaatacacagctttctttgtagta

SEQ ID NO: 313626 - DNA, 25 bp, Artificial
  probe
  misc_feature (1)..(25): SEQ ID NO: 2055; WAN024D23; Start 68; Stop 92
ggagagattttcgttctatcatgga

SEQ ID NO: 313627 - DNA, 25 bp, Artificial
  probe
  misc_feature (1)..(25): SEQ ID NO: 2055; WAN024D23; Start 67; Stop 91
tggagagattttcgttctatcatgg

SEQ ID NO: 313628 - DNA, 25 bp, Artificial
  probe
  misc_feature (1)..(25): SEQ ID NO: 2056; WAN024EVQ; Start 50; Stop 74
aaccaacagtcttatcatcacgaag

SEQ ID NO: 313629 - DNA, 25 bp, Artificial
  probe
  misc_feature (1)..(25): SEQ ID NO: 2056; WAN024EVQ; Start 51; Stop 75
accaacagtcttatcatcacgaagg

SEQ ID NO: 313630 - DNA, 25 bp, Artificial
  probe
  misc_feature (1)..(25): SEQ ID NO: 2056; WAN024EVQ; Start 49; Stop 73
aaaccaacagtcttatcatcacgaa

SEQ ID NO: 313631 - DNA, 25 bp, Artificial
  probe
  misc_feature (1)..(25): SEQ ID NO: 2056; WAN024EVQ; Start 82; Stop 106
gcacctagattcgatgtcataatga

SEQ ID NO: 313632 - DNA, 25 bp, Artificial
  probe
  misc_feature (1)..(25): SEQ ID NO: 2056; WAN024EVQ; Start 81; Stop 105
cgcacctagattcgatgtcataatg

SEQ ID NO: 313633 - DNA, 25 bp, Artificial
  probe
  misc_feature (1)..(25): SEQ ID NO: 2056; WAN024EVQ; Start 83; Stop 107
cacctagattcgatgtcataatgat

SEQ ID NO: 313634 - DNA, 25 bp, Artificial
  probe
  misc_feature (1)..(25): SEQ ID NO: 2056; WAN024EVQ; Start 213; Stop 237
ctcatcaaagaggagaacggaatag

SEQ ID NO: 313635 - DNA, 25 bp, Artificial
  probe
  misc_feature (1)..(25): SEQ ID NO: 2056; WAN024EVQ; Start 162; Stop 186
atccagaacctgcaagagaacatta

SEQ ID NO: 313636 - DNA, 25 bp, Artificial
  probe
  misc_feature (1)..(25): SEQ ID NO: 2056; WAN024EVQ; Start 163; Stop 187
tccagaacctgcaagagaacattaa

SEQ ID NO: 313637 - DNA, 25 bp, Artificial
  probe
  misc_feature (1)..(25): SEQ ID NO: 2056; WAN024EVQ; Start 167; Stop 191
gaacctgcaagagaacattaaagat

SEQ ID NO: 313638 - DNA, 25 bp, Artificial
  probe
  misc_feature (1)..(25): SEQ ID NO: 2056; WAN024EVQ; Start 166; Stop 190
agaacctgcaagagaacattaaaga

SEQ ID NO: 313639 - DNA, 25 bp, Artificial
  probe
  misc_feature (1)..(25): SEQ ID NO: 2056; WAN024EVQ; Start 89; Stop 113
gattcgatgtcataatgataatggt

SEQ ID NO: 313640 - DNA, 25 bp, Artificial
  probe
  misc_feature (1)..(25): SEQ ID NO: 2056; WAN024EVQ; Start 84; Stop 108
acctagattcgatgtcataatgata

SEQ ID NO: 313641 - DNA, 25 bp, Artificial
  probe
  misc_feature (1)..(25): SEQ ID NO: 2056; WAN024EVQ; Start 80; Stop 104
tcgcacctagattcgatgtcataat

SEQ ID NO: 313642 - DNA, 25 bp, Artificial
  probe
  misc_feature (1)..(25): SEQ ID NO: 2056; WAN024EVQ; Start 88; Stop 112
agattcgatgtcataatgataatgg

SEQ ID NO: 313643 - DNA, 25 bp, Artificial
  probe
  misc_feature (1)..(25): SEQ ID NO: 2056; WAN024EVQ; Start 168; Stop 192
aacctgcaagagaacattaaagata

SEQ ID NO: 313644 - DNA, 25 bp, Artificial
  probe
  misc_feature (1)..(25): SEQ ID NO: 2056; WAN024EVQ; Start 52; Stop 76
ccaacagtcttatcatcacgaaggg

SEQ ID NO: 313645 - DNA, 25 bp, Artificial
  probe
  misc_feature (1)..(25): SEQ ID NO: 2056; WAN024EVQ; Start 169; Stop 193
acctgcaagagaacattaaagatat

SEQ ID NO: 313646 - DNA, 25 bp, Artificial
  probe
  misc_feature (1)..(25): SEQ ID NO: 2056; WAN024EVQ; Start 46; Stop 70
ccaaaaccaacagtcttatcatcac

SEQ ID NO: 313647 - DNA, 25 bp, Artificial
  probe
  misc_feature (1)..(25): SEQ ID NO: 2056; WAN024EVQ; Start 165; Stop 189
cagaacctgcaagagaacattaaag

SEQ ID NO: 313648 - DNA, 25 bp, Artificial
  probe
  misc_feature (1)..(25): SEQ ID NO: 2056; WAN024EVQ; Start 19; Stop 43
tcctggtcaaaacgaatatccttag

SEQ ID NO: 313649 - DNA, 25 bp, Artificial
  probe
  misc_feature (1)..(25): SEQ ID NO: 2056; WAN024EVQ; Start 48; Stop 72
aaaaccaacagtcttatcatcacga

SEQ ID NO: 313650 - DNA, 25 bp, Artificial
  probe
  misc_feature (1)..(25): SEQ ID NO: 2056; WAN024EVQ; Start 47; Stop 71
caaaaccaacagtcttatcatcacg

SEQ ID NO: 313651 - DNA, 25 bp, Artificial
  probe
  misc_feature (1)..(25): SEQ ID NO: 2056; WAN024EVQ; Start 18; Stop 42
ttcctggtcaaaacgaatatcctta

SEQ ID NO: 313652 - DNA, 25 bp, Artificial
  probe
  misc_feature (1)..(25): SEQ ID NO: 2056; WAN024EVQ; Start 27; Stop 51
aaaacgaatatccttagccccaaaa

SEQ ID NO: 313653 - DNA, 25 bp, Artificial
  probe
  misc_feature (1)..(25): SEQ ID NO: 2056; WAN024EVQ; Start 17; Stop 41
tttcctggtcaaaacgaatatcctt

SEQ ID NO: 313654 - DNA, 25 bp, Artificial
  probe
  misc_feature (1)..(25): SEQ ID NO: 2056; WAN024EVQ; Start 45; Stop 69
cccaaaaccaacagtcttatcatca

SEQ ID NO: 313655 - DNA, 25 bp, Artificial
  probe
  misc_feature (1)..(25): SEQ ID NO: 2056; WAN024EVQ; Start 79; Stop 103
gtcgcacctagattcgatgtcataa

SEQ ID NO: 313656 - DNA, 25 bp, Artificial
  probe
  misc_feature (1)..(25): SEQ ID NO: 2056; WAN024EVQ; Start 164; Stop 188
ccagaacctgcaagagaacattaaa

SEQ ID NO: 313657 - DNA, 25 bp, Artificial
  probe
  misc_feature (1)..(25): SEQ ID NO: 2056; WAN024EVQ; Start 170; Stop 194
cctgcaagagaacattaaagatatc

SEQ ID NO: 313658 - DNA, 25 bp, Artificial
  probe
  misc_feature (1)..(25): SEQ ID NO: 2056; WAN024EVQ; Start 161; Stop 185
catccagaacctgcaagagaacatt

SEQ ID NO: 313659 - DNA, 25 bp, Artificial
  probe
  misc_feature (1)..(25): SEQ ID NO: 2056; WAN024EVQ; Start 28; Stop 52
aaacgaatatccttagccccaaaac

SEQ ID NO: 313660 - DNA, 25 bp, Artificial
  probe
  misc_feature (1)..(25): SEQ ID NO: 2056; WAN024EVQ; Start 26; Stop 50
caaaacgaatatccttagccccaaa

SEQ ID NO: 313661 - DNA, 25 bp, Artificial
  probe
  misc_feature (1)..(25): SEQ ID NO: 2057; WAN024EUZ; Start 768; Stop 792
gattctcatcctgaccatgttcatc

SEQ ID NO: 313662 - DNA, 25 bp, Artificial
  probe
  misc_feature (1)..(25): SEQ ID NO: 2057; WAN024EUZ; Start 304; Stop 328
ctcatgctgattatccttcctacct

SEQ ID NO: 313663 - DNA, 25 bp, Artificial
  probe
  misc_feature (1)..(25): SEQ ID NO: 2057; WAN024EUZ; Start 305; Stop 329
tcatgctgattatccttcctacctg

SEQ ID NO: 313664 - DNA, 25 bp, Artificial
  probe
  misc_feature (1)..(25): SEQ ID NO: 2057; WAN024EUZ; Start 769; Stop 793
attctcatcctgaccatgttcatca

SEQ ID NO: 313665 - DNA, 25 bp, Artificial
  probe
  misc_feature (1)..(25): SEQ ID NO: 2057; WAN024EUZ; Start 767; Stop 791
tgattctcatcctgaccatgttcat

SEQ ID NO: 313666 - DNA, 25 bp, Artificial
  probe
  misc_feature (1)..(25): SEQ ID NO: 2057; WAN024EUZ; Start 596; Stop 620
ctctatctatgaacggtgtgcgaag

SEQ ID NO: 313667 - DNA, 25 bp, Artificial
  probe
  misc_feature (1)..(25): SEQ ID NO: 2057; WAN024EUZ; Start 634; Stop 658
gtctttatcccaagtttgagtctct

SEQ ID NO: 313668 - DNA, 25 bp, Artificial
  probe
  misc_feature (1)..(25): SEQ ID NO: 2057; WAN024EUZ; Start 635; Stop 659
tctttatcccaagtttgagtctctt

SEQ ID NO: 313669 - DNA, 25 bp, Artificial
  probe
  misc_feature (1)..(25): SEQ ID NO: 2057; WAN024EUZ; Start 636; Stop 660
ctttatcccaagtttgagtctcttc

SEQ ID NO: 313670 - DNA, 25 bp, Artificial
  probe
  misc_feature (1)..(25): SEQ ID NO: 2057; WAN024EUZ; Start 306; Stop 330
catgctgattatccttcctacctgg

SEQ ID NO: 313671 - DNA, 25 bp, Artificial
  probe
  misc_feature (1)..(25): SEQ ID NO: 2057; WAN024EUZ; Start 733; Stop 757
aatgacaactatggtatgggttcaa

SEQ ID NO: 313672 - DNA, 25 bp, Artificial
  probe
  misc_feature (1)..(25): SEQ ID NO: 2057; WAN024EUZ; Start 589; Stop 613
atcttccctctatctatgaacggtg

SEQ ID NO: 313673 - DNA, 25 bp, Artificial
  probe
  misc_feature (1)..(25): SEQ ID NO: 2057; WAN024EUZ; Start 588; Stop 612
catcttccctctatctatgaacggt

SEQ ID NO: 313674 - DNA, 25 bp, Artificial
  probe
  misc_feature (1)..(25): SEQ ID NO: 2057; WAN024EUZ; Start 637; Stop 661
tttatcccaagtttgagtctcttca

SEQ ID NO: 313675 - DNA, 25 bp, Artificial
  probe
  misc_feature (1)..(25): SEQ ID NO: 2057; WAN024EUZ; Start 633; Stop 657
ggtctttatcccaagtttgagtctc

SEQ ID NO: 313676 - DNA, 25 bp, Artificial
  probe
  misc_feature (1)..(25): SEQ ID NO: 2057; WAN024EUZ; Start 638; Stop 662
ttatcccaagtttgagtctcttcat

SEQ ID NO: 313677 - DNA, 25 bp, Artificial
  probe
  misc_feature (1)..(25): SEQ ID NO: 2057; WAN024EUZ; Start 734; Stop 758
atgacaactatggtatgggttcaac

SEQ ID NO: 313678 - DNA, 25 bp, Artificial
  probe
  misc_feature (1)..(25): SEQ ID NO: 2057; WAN024EUZ; Start 732; Stop 756
caatgacaactatggtatgggttca

SEQ ID NO: 313679 - DNA, 25 bp, Artificial
  probe
  misc_feature (1)..(25): SEQ ID NO: 2057; WAN024EUZ; Start 770; Stop 794
ttctcatcctgaccatgttcatcac

SEQ ID NO: 313680 - DNA, 25 bp, Artificial
  probe
  misc_feature (1)..(25): SEQ ID NO: 2057; WAN024EUZ; Start 766; Stop 790
gtgattctcatcctgaccatgttca

SEQ ID NO: 313681 - DNA, 25 bp, Artificial
  probe
  misc_feature (1)..(25): SEQ ID NO: 2057; WAN024EUZ; Start 765; Stop 789
tgtgattctcatcctgaccatgttc

SEQ ID NO: 313682 - DNA, 25 bp, Artificial
  probe
  misc_feature (1)..(25): SEQ ID NO: 2057; WAN024EUZ; Start 307; Stop 331
atgctgattatccttcctacctgga

SEQ ID NO: 313683 - DNA, 25 bp, Artificial
  probe
  misc_feature (1)..(25): SEQ ID NO: 2057; WAN024EUZ; Start 580; Stop 604
cgtcatgtcatcttccctctatcta

SEQ ID NO: 313684 - DNA, 25 bp, Artificial
  probe
  misc_feature (1)..(25): SEQ ID NO: 2057; WAN024EUZ; Start 598; Stop 622
ctatctatgaacggtgtgcgaagtg

SEQ ID NO: 313685 - DNA, 25 bp, Artificial
  probe
  misc_feature (1)..(25): SEQ ID NO: 2057; WAN024EUZ; Start 581; Stop 605
gtcatgtcatcttccctctatctat

SEQ ID NO: 313686 - DNA, 25 bp, Artificial
  probe
  misc_feature (1)..(25): SEQ ID NO: 2057; WAN024EUZ; Start 294; Stop 318
tcaactctggctcatgctgattatc

SEQ ID NO: 313687 - DNA, 25 bp, Artificial
  probe
  misc_feature (1)..(25): SEQ ID NO: 2057; WAN024EUZ; Start 764; Stop 788
gtgtgattctcatcctgaccatgtt

SEQ ID NO: 313688 - DNA, 25 bp, Artificial
  probe
  misc_feature (1)..(25): SEQ ID NO: 2057; WAN024EUZ; Start 597; Stop 621
tctatctatgaacggtgtgcgaagt

SEQ ID NO: 313689 - DNA, 25 bp, Artificial
  probe
  misc_feature (1)..(25): SEQ ID NO: 2057; WAN024EUZ; Start 303; Stop 327
gctcatgctgattatccttcctacc

SEQ ID NO: 313690 - DNA, 25 bp, Artificial
  probe
  misc_feature (1)..(25): SEQ ID NO: 2057; WAN024EUZ; Start 302; Stop 326
ggctcatgctgattatccttcctac

SEQ ID NO: 313691 - DNA, 25 bp, Artificial
  probe
  misc_feature (1)..(25): SEQ ID NO: 2057; WAN024EUZ; Start 639; Stop 663
tatcccaagtttgagtctcttcatg

SEQ ID NO: 313692 - DNA, 25 bp, Artificial
  probe
  misc_feature (1)..(25): SEQ ID NO: 2057; WAN024EUZ; Start 626; Stop 650
ttcagtcggtctttatcccaagttt

SEQ ID NO: 313693 - DNA, 25 bp, Artificial
  probe
  misc_feature (1)..(25): SEQ ID NO: 2057; WAN024EUZ; Start 582; Stop 606
tcatgtcatcttccctctatctatg

SEQ ID NO: 313694 - DNA, 25 bp, Artificial
  probe
  misc_feature (1)..(25): SEQ ID NO: 2058; WAN024C9V; Start 1869; Stop 1893
ccattattgtgagtatccagtcctt

SEQ ID NO: 313695 - DNA, 25 bp, Artificial
  probe
  misc_feature (1)..(25): SEQ ID NO: 2058; WAN024C9V; Start 1867; Stop 1891
atccattattgtgagtatccagtcc

SEQ ID NO: 313696 - DNA, 25 bp, Artificial
  probe
  misc_feature (1)..(25): SEQ ID NO: 2058; WAN024C9V; Start 1746; Stop 1770
tatcacagacaaggaatactacacc

SEQ ID NO: 313697 - DNA, 25 bp, Artificial
  probe
  misc_feature (1)..(25): SEQ ID NO: 2058; WAN024C9V; Start 1868; Stop 1892
tccattattgtgagtatccagtcct

SEQ ID NO: 313698 - DNA, 25 bp, Artificial
  probe
  misc_feature (1)..(25): SEQ ID NO: 2058; WAN024C9V; Start 1866; Stop 1890
catccattattgtgagtatccagtc

SEQ ID NO: 313699 - DNA, 25 bp, Artificial
  probe
  misc_feature (1)..(25): SEQ ID NO: 2058; WAN024C9V; Start 1870; Stop 1894
cattattgtgagtatccagtccttc

SEQ ID NO: 313700 - DNA, 25 bp, Artificial
  probe
  misc_feature (1)..(25): SEQ ID NO: 2058; WAN024C9V; Start 1747; Stop 1771
atcacagacaaggaatactacacca

SEQ ID NO: 313701 - DNA, 25 bp, Artificial
  probe
  misc_feature (1)..(25): SEQ ID NO: 2058; WAN024C9V; Start 1301; Stop 1325
ctcttgagtctgaaggtgatatgaa

SEQ ID NO: 313702 - DNA, 25 bp, Artificial
  probe
  misc_feature (1)..(25): SEQ ID NO: 2058; WAN024C9V; Start 1519; Stop 1543
ggctatatcggcttgtatgaagtag

SEQ ID NO: 313703 - DNA, 25 bp, Artificial
  probe
  misc_feature (1)..(25): SEQ ID NO: 2058; WAN024C9V; Start 1302; Stop 1326
tcttgagtctgaaggtgatatgaat

SEQ ID NO: 313704 - DNA, 25 bp, Artificial
  probe
  misc_feature (1)..(25): SEQ ID NO: 2058; WAN024C9V; Start 1748; Stop 1772
tcacagacaaggaatactacaccaa

SEQ ID NO: 313705 - DNA, 25 bp, Artificial
  probe
  misc_feature (1)..(25): SEQ ID NO: 2058; WAN024C9V; Start 1234; Stop 1258
aatggtgtagaagtcaattcaggtc

SEQ ID NO: 313706 - DNA, 25 bp, Artificial
  probe
  misc_feature (1)..(25): SEQ ID NO: 2058; WAN024C9V; Start 1929; Stop 1953
ttatgcttatgaccgtgtaggctat

SEQ ID NO: 313707 - DNA, 25 bp, Artificial
  probe
  misc_feature (1)..(25): SEQ ID NO: 2058; WAN024C9V; Start 1928; Stop 1952
attatgcttatgaccgtgtaggcta

SEQ ID NO: 313708 - DNA, 25 bp, Artificial
  probe
  misc_feature (1)..(25): SEQ ID NO: 2058; WAN024C9V; Start 1665; Stop 1689
ctctatctactcaacaccatccgaa

SEQ ID NO: 313709 - DNA, 25 bp, Artificial
  probe
  misc_feature (1)..(25): SEQ ID NO: 2058; WAN024C9V; Start 1663; Stop 1687
ttctctatctactcaacaccatccg

SEQ ID NO: 313710 - DNA, 25 bp, Artificial
  probe
  misc_feature (1)..(25): SEQ ID NO: 2058; WAN024C9V; Start 1872; Stop 1896
ttattgtgagtatccagtccttcag

SEQ ID NO: 313711 - DNA, 25 bp, Artificial
  probe
  misc_feature (1)..(25): SEQ ID NO: 2058; WAN024C9V; Start 1865; Stop 1889
tcatccattattgtgagtatccagt

SEQ ID NO: 313712 - DNA, 25 bp, Artificial
  probe
  misc_feature (1)..(25): SEQ ID NO: 2058; WAN024C9V; Start 1871; Stop 1895
attattgtgagtatccagtccttca

SEQ ID NO: 313713 - DNA, 25 bp, Artificial
  probe
  misc_feature (1)..(25): SEQ ID NO: 2058; WAN024C9V; Start 1930; Stop 1954
tatgcttatgaccgtgtaggctatc

SEQ ID NO: 313714 - DNA, 25 bp, Artificial
  probe
  misc_feature (1)..(25): SEQ ID NO: 2058; WAN024C9V; Start 294; Stop 318
gtatattacttatcggacacagagg

SEQ ID NO: 313715 - DNA, 25 bp, Artificial
  probe
  misc_feature (1)..(25): SEQ ID NO: 2058; WAN024C9V; Start 1298; Stop 1322
ttgctcttgagtctgaaggtgatat

SEQ ID NO: 313716 - DNA, 25 bp, Artificial
  probe
  misc_feature (1)..(25): SEQ ID NO: 2058; WAN024C9V; Start 1297; Stop 1321
attgctcttgagtctgaaggtgata

SEQ ID NO: 313717 - DNA, 25 bp, Artificial
  probe
  misc_feature (1)..(25): SEQ ID NO: 2058; WAN024C9V; Start 1296; Stop 1320
tattgctcttgagtctgaaggtgat

SEQ ID NO: 313718 - DNA, 25 bp, Artificial
  probe
  misc_feature (1)..(25): SEQ ID NO: 2058; WAN024C9V; Start 243; Stop 267
tatcgtagaacatgaactccttgaa

SEQ ID NO: 313719 - DNA, 25 bp, Artificial
  probe
  misc_feature (1)..(25): SEQ ID NO: 2058; WAN024C9V; Start 1706; Stop 1730
tctgccgactagatatagacaagtt

SEQ ID NO: 313720 - DNA, 25 bp, Artificial
  probe
  misc_feature (1)..(25): SEQ ID NO: 2058; WAN024C9V; Start 1705; Stop 1729
ttctgccgactagatatagacaagt

SEQ ID NO: 313721 - DNA, 25 bp, Artificial
  probe
  misc_feature (1)..(25): SEQ ID NO: 2058; WAN024C9V; Start 244; Stop 268
atcgtagaacatgaactccttgaag

SEQ ID NO: 313722 - DNA, 25 bp, Artificial
  probe
  misc_feature (1)..(25): SEQ ID NO: 2058; WAN024C9V; Start 1311; Stop 1335
tgaaggtgatatgaataagttctgg

SEQ ID NO: 313723 - DNA, 25 bp, Artificial
  probe
  misc_feature (1)..(25): SEQ ID NO: 2058; WAN024C9V; Start 242; Stop 266
atatcgtagaacatgaactccttga

SEQ ID NO: 313724 - DNA, 25 bp, Artificial
  probe
  misc_feature (1)..(25): SEQ ID NO: 2058; WAN024C9V; Start 1664; Stop 1688
tctctatctactcaacaccatccga

SEQ ID NO: 313725 - DNA, 25 bp, Artificial
  probe
  misc_feature (1)..(25): SEQ ID NO: 2058; WAN024C9V; Start 1950; Stop 1974
ctatctaggcaccaatactccgatt

SEQ ID NO: 313726 - DNA, 25 bp, Artificial
  probe
  misc_feature (1)..(25): SEQ ID NO: 2058; WAN024C9V; Start 1934; Stop 1958
cttatgaccgtgtaggctatctagg

SEQ ID NO: 313727 - DNA, 25 bp, Artificial
  probe
  misc_feature (1)..(25): SEQ ID NO: 2059; WAN024CK6; Start 1089; Stop 1113
tgagcagaagattgaaggagttatc

SEQ ID NO: 313728 - DNA, 25 bp, Artificial
  probe
  misc_feature (1)..(25): SEQ ID NO: 2059; WAN024CK6; Start 1088; Stop 1112
ctgagcagaagattgaaggagttat

SEQ ID NO: 313729 - DNA, 25 bp, Artificial
  probe
  misc_feature (1)..(25): SEQ ID NO: 2059; WAN024CK6; Start 1090; Stop 1114
gagcagaagattgaaggagttatcg

SEQ ID NO: 313730 - DNA, 25 bp, Artificial
  probe
  misc_feature (1)..(25): SEQ ID NO: 2059; WAN024CK6; Start 416; Stop 440
atcaagtagttggtcctgaatatcg

SEQ ID NO: 313731 - DNA, 25 bp, Artificial
  probe
  misc_feature (1)..(25): SEQ ID NO: 2059; WAN024CK6; Start 881; Stop 905
agcatctactatccaagttcaagaa

SEQ ID NO: 313732 - DNA, 25 bp, Artificial
  probe
  misc_feature (1)..(25): SEQ ID NO: 2059; WAN024CK6; Start 880; Stop 904
aagcatctactatccaagttcaaga

SEQ ID NO: 313733 - DNA, 25 bp, Artificial
  probe
  misc_feature (1)..(25): SEQ ID NO: 2059; WAN024CK6; Start 537; Stop 561
gcagtctaattctcaactcagtcat

SEQ ID NO: 313734 - DNA, 25 bp, Artificial
  probe
  misc_feature (1)..(25): SEQ ID NO: 2059; WAN024CK6; Start 420; Stop 444
agtagttggtcctgaatatcgcatt

SEQ ID NO: 313735 - DNA, 25 bp, Artificial
  probe
  misc_feature (1)..(25): SEQ ID NO: 2059; WAN024CK6; Start 419; Stop 443
aagtagttggtcctgaatatcgcat

SEQ ID NO: 313736 - DNA, 25 bp, Artificial
  probe
  misc_feature (1)..(25): SEQ ID NO: 2059; WAN024CK6; Start 1068; Stop 1092
aattgttcaagagtggatgactgag

SEQ ID NO: 313737 - DNA, 25 bp, Artificial
  probe
  misc_feature (1)..(25): SEQ ID NO: 2059; WAN024CK6; Start 882; Stop 906
gcatctactatccaagttcaagaat

SEQ ID NO: 313738 - DNA, 25 bp, Artificial
  probe
  misc_feature (1)..(25): SEQ ID NO: 2059; WAN024CK6; Start 1087; Stop 1111
actgagcagaagattgaaggagtta

SEQ ID NO: 313739 - DNA, 25 bp, Artificial
  probe
  misc_feature (1)..(25): SEQ ID NO: 2059; WAN024CK6; Start 415; Stop 439
aatcaagtagttggtcctgaatatc

SEQ ID NO: 313740 - DNA, 25 bp, Artificial
  probe
  misc_feature (1)..(25): SEQ ID NO: 2059; WAN024CK6; Start 184; Stop 208
gatacgcaacaagttcaattaatcg

SEQ ID NO: 313741 - DNA, 25 bp, Artificial
  probe
  misc_feature (1)..(25): SEQ ID NO: 2059; WAN024CK6; Start 538; Stop 562
cagtctaattctcaactcagtcatg

SEQ ID NO: 313742 - DNA, 25 bp, Artificial
  probe
  misc_feature (1)..(25): SEQ ID NO: 2059; WAN024CK6; Start 1084; Stop 1108
atgactgagcagaagattgaaggag

SEQ ID NO: 313743 - DNA, 25 bp, Artificial
  probe
  misc_feature (1)..(25): SEQ ID NO: 2059; WAN024CK6; Start 1083; Stop 1107
gatgactgagcagaagattgaagga

SEQ ID NO: 313744 - DNA, 25 bp, Artificial
  probe
  misc_feature (1)..(25): SEQ ID NO: 2059; WAN024CK6; Start 70; Stop 94
cggtctattgaactagatgaactgt

SEQ ID NO: 313745 - DNA, 25 bp, Artificial
  probe
  misc_feature (1)..(25): SEQ ID NO: 2059; WAN024CK6; Start 69; Stop 93
tcggtctattgaactagatgaactg

SEQ ID NO: 313746 - DNA, 25 bp, Artificial
  probe
  misc_feature (1)..(25): SEQ ID NO: 2059; WAN024CK6; Start 61; Stop 85
ttggatattcggtctattgaactag

SEQ ID NO: 313747 - DNA, 25 bp, Artificial
  probe
  misc_feature (1)..(25): SEQ ID NO: 2059; WAN024CK6; Start 185; Stop 209
atacgcaacaagttcaattaatcga

SEQ ID NO: 313748 - DNA, 25 bp, Artificial
  probe
  misc_feature (1)..(25): SEQ ID NO: 2059; WAN024CK6; Start 754; Stop 778
actcaggaagaactggattatatct

SEQ ID NO: 313749 - DNA, 25 bp, Artificial
  probe
  misc_feature (1)..(25): SEQ ID NO: 2059; WAN024CK6; Start 68; Stop 92
ttcggtctattgaactagatgaact

SEQ ID NO: 313750 - DNA, 25 bp, Artificial
  probe
  misc_feature (1)..(25): SEQ ID NO: 2059; WAN024CK6; Start 186; Stop 210
tacgcaacaagttcaattaatcgaa

SEQ ID NO: 313751 - DNA, 25 bp, Artificial
  probe
  misc_feature (1)..(25): SEQ ID NO: 2059; WAN024CK6; Start 1081; Stop 1105
tggatgactgagcagaagattgaag

SEQ ID NO: 313752 - DNA, 25 bp, Artificial
  probe
  misc_feature (1)..(25): SEQ ID NO: 2059; WAN024CK6; Start 1324; Stop 1348
gagccattgattattattacaacga

SEQ ID NO: 313753 - DNA, 25 bp, Artificial
  probe
  misc_feature (1)..(25): SEQ ID NO: 2059; WAN024CK6; Start 1323; Stop 1347
agagccattgattattattacaacg

SEQ ID NO: 313754 - DNA, 25 bp, Artificial
  probe
  misc_feature (1)..(25): SEQ ID NO: 2059; WAN024CK6; Start 1095; Stop 1119
gaagattgaaggagttatcgaccag

SEQ ID NO: 313755 - DNA, 25 bp, Artificial
  probe
  misc_feature (1)..(25): SEQ ID NO: 2059; WAN024CK6; Start 1093; Stop 1117
cagaagattgaaggagttatcgacc

SEQ ID NO: 313756 - DNA, 25 bp, Artificial
  probe
  misc_feature (1)..(25): SEQ ID NO: 2059; WAN024CK6; Start 574; Stop 598
atcacacctgacgagtatgttcatt

SEQ ID NO: 313757 - DNA, 25 bp, Artificial
  probe
  misc_feature (1)..(25): SEQ ID NO: 2059; WAN024CK6; Start 573; Stop 597
aatcacacctgacgagtatgttcat

SEQ ID NO: 313758 - DNA, 25 bp, Artificial
  probe
  misc_feature (1)..(25): SEQ ID NO: 2059; WAN024CK6; Start 60; Stop 84
attggatattcggtctattgaacta

SEQ ID NO: 313759 - DNA, 25 bp, Artificial
  probe
  misc_feature (1)..(25): SEQ ID NO: 2059; WAN024CK6; Start 59; Stop 83
tattggatattcggtctattgaact

SEQ ID NO: 313760 - DNA, 25 bp, Artificial
  probe
  misc_feature (1)..(25): SEQ ID NO: 2060; WAN024CEC; Start 222; Stop 246
atttagatgagtggtttgtccttca

SEQ ID NO: 313761 - DNA, 25 bp, Artificial
  probe
  misc_feature (1)..(25): SEQ ID NO: 2060; WAN024CEC; Start 221; Stop 245
tatttagatgagtggtttgtccttc

SEQ ID NO: 313762 - DNA, 25 bp, Artificial
  probe
  misc_feature (1)..(25): SEQ ID NO: 2060; WAN024CEC; Start 223; Stop 247
tttagatgagtggtttgtccttcag

SEQ ID NO: 313763 - DNA, 25 bp, Artificial
  probe
  misc_feature (1)..(25): SEQ ID NO: 2060; WAN024CEC; Start 225; Stop 249
tagatgagtggtttgtccttcagta

SEQ ID NO: 313764 - DNA, 25 bp, Artificial
  probe
  misc_feature (1)..(25): SEQ ID NO: 2060; WAN024CEC; Start 284; Stop 308
gcactttggttacatggtttatctt

SEQ ID NO: 313765 - DNA, 25 bp, Artificial
  probe
  misc_feature (1)..(25): SEQ ID NO: 2060; WAN024CEC; Start 227; Stop 251
gatgagtggtttgtccttcagtatc

SEQ ID NO: 313766 - DNA, 25 bp, Artificial
  probe
  misc_feature (1)..(25): SEQ ID NO: 2060; WAN024CEC; Start 220; Stop 244
ttatttagatgagtggtttgtcctt

SEQ ID NO: 313767 - DNA, 25 bp, Artificial
  probe
  misc_feature (1)..(25): SEQ ID NO: 2060; WAN024CEC; Start 219; Stop 243
tttatttagatgagtggtttgtcct

SEQ ID NO: 313768 - DNA, 25 bp, Artificial
  probe
  misc_feature (1)..(25): SEQ ID NO: 2060; WAN024CEC; Start 295; Stop 319
acatggtttatctttgactatccct

SEQ ID NO: 313769 - DNA, 25 bp, Artificial
  probe
  misc_feature (1)..(25): SEQ ID NO: 2060; WAN024CEC; Start 283; Stop 307
agcactttggttacatggtttatct

SEQ ID NO: 313770 - DNA, 25 bp, Artificial
  probe
  misc_feature (1)..(25): SEQ ID NO: 2060; WAN024CEC; Start 282; Stop 306
cagcactttggttacatggtttatc

SEQ ID NO: 313771 - DNA, 25 bp, Artificial
  probe
  misc_feature (1)..(25): SEQ ID NO: 2060; WAN024CEC; Start 226; Stop 250
agatgagtggtttgtccttcagtat

SEQ ID NO: 313772 - DNA, 25 bp, Artificial
  probe
  misc_feature (1)..(25): SEQ ID NO: 2060; WAN024CEC; Start 297; Stop 321
atggtttatctttgactatcccttt

SEQ ID NO: 313773 - DNA, 25 bp, Artificial
  probe
  misc_feature (1)..(25): SEQ ID NO: 2060; WAN024CEC; Start 281; Stop 305
acagcactttggttacatggtttat

SEQ ID NO: 313774 - DNA, 25 bp, Artificial
  probe
  misc_feature (1)..(25): SEQ ID NO: 2060; WAN024CEC; Start 40; Stop 64
aagaaaggagaatgatatggttgat

SEQ ID NO: 313775 - DNA, 25 bp, Artificial
  probe
  misc_feature (1)..(25): SEQ ID NO: 2060; WAN024CEC; Start 224; Stop 248
ttagatgagtggtttgtccttcagt

SEQ ID NO: 313776 - DNA, 25 bp, Artificial
  probe
  misc_feature (1)..(25): SEQ ID NO: 2060; WAN024CEC; Start 289; Stop 313
ttggttacatggtttatctttgact

SEQ ID NO: 313777 - DNA, 25 bp, Artificial
  probe
  misc_feature (1)..(25): SEQ ID NO: 2060; WAN024CEC; Start 296; Stop 320
catggtttatctttgactatccctt

SEQ ID NO: 313778 - DNA, 25 bp, Artificial
  probe
  misc_feature (1)..(25): SEQ ID NO: 2060; WAN024CEC; Start 455; Stop 479
aaagtttatgaagttgaacgagttt

SEQ ID NO: 313779 - DNA, 25 bp, Artificial
  probe
  misc_feature (1)..(25): SEQ ID NO: 2060; WAN024CEC; Start 280; Stop 304
gacagcactttggttacatggttta

SEQ ID NO: 313780 - DNA, 25 bp, Artificial
  probe
  misc_feature (1)..(25): SEQ ID NO: 2060; WAN024CEC; Start 294; Stop 318
tacatggtttatctttgactatccc

SEQ ID NO: 313781 - DNA, 25 bp, Artificial
  probe
  misc_feature (1)..(25): SEQ ID NO: 2060; WAN024CEC; Start 288; Stop 312
tttggttacatggtttatctttgac

SEQ ID NO: 313782 - DNA, 25 bp, Artificial
  probe
  misc_feature (1)..(25): SEQ ID NO: 2060; WAN024CEC; Start 286; Stop 310
actttggttacatggtttatctttg

SEQ ID NO: 313783 - DNA, 25 bp, Artificial
  probe
  misc_feature (1)..(25): SEQ ID NO: 2060; WAN024CEC; Start 285; Stop 309
cactttggttacatggtttatcttt

SEQ ID NO: 313784 - DNA, 25 bp, Artificial
  probe
  misc_feature (1)..(25): SEQ ID NO: 2060; WAN024CEC; Start 218; Stop 242
atttatttagatgagtggtttgtcc

SEQ ID NO: 313785 - DNA, 25 bp, Artificial
  probe
  misc_feature (1)..(25): SEQ ID NO: 2060; WAN024CEC; Start 271; Stop 295
ttctttggagacagcactttggtta

SEQ ID NO: 313786 - DNA, 25 bp, Artificial
  probe
  misc_feature (1)..(25): SEQ ID NO: 2060; WAN024CEC; Start 290; Stop 314
tggttacatggtttatctttgacta

SEQ ID NO: 313787 - DNA, 25 bp, Artificial
  probe
  misc_feature (1)..(25): SEQ ID NO: 2060; WAN024CEC; Start 274; Stop 298
tttggagacagcactttggttacat

SEQ ID NO: 313788 - DNA, 25 bp, Artificial
  probe
  misc_feature (1)..(25): SEQ ID NO: 2060; WAN024CEC; Start 41; Stop 65
agaaaggagaatgatatggttgata

SEQ ID NO: 313789 - DNA, 25 bp, Artificial
  probe
  misc_feature (1)..(25): SEQ ID NO: 2060; WAN024CEC; Start 363; Stop 387
acattaaggaagcagatatatgtcc

SEQ ID NO: 313790 - DNA, 25 bp, Artificial
  probe
  misc_feature (1)..(25): SEQ ID NO: 2060; WAN024CEC; Start 228; Stop 252
atgagtggtttgtccttcagtatcg

SEQ ID NO: 313791 - DNA, 25 bp, Artificial
  probe
  misc_feature (1)..(25): SEQ ID NO: 2060; WAN024CEC; Start 287; Stop 311
ctttggttacatggtttatctttga

SEQ ID NO: 313792 - DNA, 25 bp, Artificial
  probe
  misc_feature (1)..(25): SEQ ID NO: 2060; WAN024CEC; Start 454; Stop 478
taaagtttatgaagttgaacgagtt

SEQ ID NO: 313793 - DNA, 25 bp, Artificial
  probe
  misc_feature (1)..(25): SEQ ID NO: 2061; WAN024DL3; Start 2; Stop 26
tgctaactaaggaagaagtgaatga

SEQ ID NO: 313794 - DNA, 25 bp, Artificial
  probe
  misc_feature (1)..(25): SEQ ID NO: 2061; WAN024DL3; Start 1; Stop 25
atgctaactaaggaagaagtgaatg

SEQ ID NO: 313795 - DNA, 25 bp, Artificial
  probe
  misc_feature (1)..(25): SEQ ID NO: 2061; WAN024DL3; Start 3; Stop 27
gctaactaaggaagaagtgaatgat

SEQ ID NO: 313796 - DNA, 25 bp, Artificial
  probe
  misc_feature (1)..(25): SEQ ID NO: 2061; WAN024DL3; Start 11; Stop 35
aggaagaagtgaatgatatgattga

SEQ ID NO: 313797 - DNA, 25 bp, Artificial
  probe
  misc_feature (1)..(25): SEQ ID NO: 2061; WAN024DL3; Start 12; Stop 36
ggaagaagtgaatgatatgattgag

SEQ ID NO: 313798 - DNA, 25 bp, Artificial
  probe
  misc_feature (1)..(25): SEQ ID NO: 2061; WAN024DL3; Start 33; Stop 57
tgagttcaaacagacacatttacac

SEQ ID NO: 313799 - DNA, 25 bp, Artificial
  probe
  misc_feature (1)..(25): SEQ ID NO: 2061; WAN024DL3; Start 34; Stop 58
gagttcaaacagacacatttacacc

SEQ ID NO: 313800 - DNA, 25 bp, Artificial
  probe
  misc_feature (1)..(25): SEQ ID NO: 2061; WAN024DL3; Start 10; Stop 34
aaggaagaagtgaatgatatgattg

SEQ ID NO: 313801 - DNA, 25 bp, Artificial
  probe
  misc_feature (1)..(25): SEQ ID NO: 2061; WAN024DL3; Start 65; Stop 89
gggaaattgaaacctttgtgaaact

SEQ ID NO: 313802 - DNA, 25 bp, Artificial
  probe
  misc_feature (1)..(25): SEQ ID NO: 2061; WAN024DL3; Start 69; Stop 93
aattgaaacctttgtgaaactatgc

SEQ ID NO: 313803 - DNA, 25 bp, Artificial
  probe
  misc_feature (1)..(25): SEQ ID NO: 2061; WAN024DL3; Start 13; Stop 37
gaagaagtgaatgatatgattgagt

SEQ ID NO: 313804 - DNA, 25 bp, Artificial
  probe
  misc_feature (1)..(25): SEQ ID NO: 2061; WAN024DL3; Start 7; Stop 31
actaaggaagaagtgaatgatatga

SEQ ID NO: 313805 - DNA, 25 bp, Artificial
  probe
  misc_feature (1)..(25): SEQ ID NO: 2061; WAN024DL3; Start 15; Stop 39
agaagtgaatgatatgattgagttc

SEQ ID NO: 313806 - DNA, 25 bp, Artificial
  probe
  misc_feature (1)..(25): SEQ ID NO: 2061; WAN024DL3; Start 66; Stop 90
ggaaattgaaacctttgtgaaacta

SEQ ID NO: 313807 - DNA, 25 bp, Artificial
  probe
  misc_feature (1)..(25): SEQ ID NO: 2061; WAN024DL3; Start 64; Stop 88
cgggaaattgaaacctttgtgaaac

SEQ ID NO: 313808 - DNA, 25 bp, Artificial
  probe
  misc_feature (1)..(25): SEQ ID NO: 2061; WAN024DL3; Start 35; Stop 59
agttcaaacagacacatttacaccg

SEQ ID NO: 313809 - DNA, 25 bp, Artificial
  probe
  misc_feature (1)..(25): SEQ ID NO: 2061; WAN024DL3; Start 63; Stop 87
tcgggaaattgaaacctttgtgaaa

SEQ ID NO: 313810 - DNA, 25 bp, Artificial
  probe
  misc_feature (1)..(25): SEQ ID NO: 2061; WAN024DL3; Start 32; Stop 56
ttgagttcaaacagacacatttaca

SEQ ID NO: 313811 - DNA, 25 bp, Artificial
  probe
  misc_feature (1)..(25): SEQ ID NO: 2061; WAN024DL3; Start 29; Stop 53
tgattgagttcaaacagacacattt

SEQ ID NO: 313812 - DNA, 25 bp, Artificial
  probe
  misc_feature (1)..(25): SEQ ID NO: 2061; WAN024DL3; Start 14; Stop 38
aagaagtgaatgatatgattgagtt

SEQ ID NO: 313813 - DNA, 25 bp, Artificial
  probe
  misc_feature (1)..(25): SEQ ID NO: 2061; WAN024DL3; Start 62; Stop 86
ttcgggaaattgaaacctttgtgaa

SEQ ID NO: 313814 - DNA, 25 bp, Artificial
  probe
  misc_feature (1)..(25): SEQ ID NO: 2061; WAN024DL3; Start 28; Stop 52
atgattgagttcaaacagacacatt

SEQ ID NO: 313815 - DNA, 25 bp, Artificial
  probe
  misc_feature (1)..(25): SEQ ID NO: 2061; WAN024DL3; Start 27; Stop 51
tatgattgagttcaaacagacacat

SEQ ID NO: 313816 - DNA, 25 bp, Artificial
  probe
  misc_feature (1)..(25): SEQ ID NO: 2061; WAN024DL3; Start 26; Stop 50
atatgattgagttcaaacagacaca

SEQ ID NO: 313817 - DNA, 25 bp, Artificial
  probe
  misc_feature (1)..(25): SEQ ID NO: 2061; WAN024DL3; Start 6; Stop 30
aactaaggaagaagtgaatgatatg

SEQ ID NO: 313818 - DNA, 25 bp, Artificial
  probe
  misc_feature (1)..(25): SEQ ID NO: 2061; WAN024DL3; Start 40; Stop 64
aaacagacacatttacaccgctttc

SEQ ID NO: 313819 - DNA, 25 bp, Artificial
  probe
  misc_feature (1)..(25): SEQ ID NO: 2061; WAN024DL3; Start 24; Stop 48
tgatatgattgagttcaaacagaca

SEQ ID NO: 313820 - DNA, 25 bp, Artificial
  probe
  misc_feature (1)..(25): SEQ ID NO: 2061; WAN024DL3; Start 31; Stop 55
attgagttcaaacagacacatttac

SEQ ID NO: 313821 - DNA, 25 bp, Artificial
  probe
  misc_feature (1)..(25): SEQ ID NO: 2061; WAN024DL3; Start 8; Stop 32
ctaaggaagaagtgaatgatatgat

SEQ ID NO: 313822 - DNA, 25 bp, Artificial
  probe
  misc_feature (1)..(25): SEQ ID NO: 2061; WAN024DL3; Start 25; Stop 49
gatatgattgagttcaaacagacac

SEQ ID NO: 313823 - DNA, 25 bp, Artificial
  probe
  misc_feature (1)..(25): SEQ ID NO: 2061; WAN024DL3; Start 39; Stop 63
caaacagacacatttacaccgcttt

SEQ ID NO: 313824 - DNA, 25 bp, Artificial
  probe
  misc_feature (1)..(25): SEQ ID NO: 2061; WAN024DL3; Start 30; Stop 54
gattgagttcaaacagacacattta

SEQ ID NO: 313825 - DNA, 25 bp, Artificial
  probe
  misc_feature (1)..(25): SEQ ID NO: 2061; WAN024DL3; Start 70; Stop 94
attgaaacctttgtgaaactatgca

SEQ ID NO: 313826 - DNA, 25 bp, Artificial
  probe
  misc_feature (1)..(25): SEQ ID NO: 2062; WAN024DC3; Start 151; Stop 175
gcagctaatcatgtcttacttggat

SEQ ID NO: 313827 - DNA, 25 bp, Artificial
  probe
  misc_feature (1)..(25): SEQ ID NO: 2062; WAN024DC3; Start 148; Stop 172
gatgcagctaatcatgtcttacttg

SEQ ID NO: 313828 - DNA, 25 bp, Artificial
  probe
  misc_feature (1)..(25): SEQ ID NO: 2062; WAN024DC3; Start 333; Stop 357
cttaaattctgccaatcatcgtctg

SEQ ID NO: 313829 - DNA, 25 bp, Artificial
  probe
  misc_feature (1)..(25): SEQ ID NO: 2062; WAN024DC3; Start 147; Stop 171
ggatgcagctaatcatgtcttactt

SEQ ID NO: 313830 - DNA, 25 bp, Artificial
  probe
  misc_feature (1)..(25): SEQ ID NO: 2062; WAN024DC3; Start 327; Stop 351
tatccgcttaaattctgccaatcat

SEQ ID NO: 313831 - DNA, 25 bp, Artificial
  probe
  misc_feature (1)..(25): SEQ ID NO: 2062; WAN024DC3; Start 308; Stop 332
aaagatgtggttatgggtttatccg

SEQ ID NO: 313832 - DNA, 25 bp, Artificial
  probe
  misc_feature (1)..(25): SEQ ID NO: 2062; WAN024DC3; Start 152; Stop 176
cagctaatcatgtcttacttggata

SEQ ID NO: 313833 - DNA, 25 bp, Artificial
  probe
  misc_feature (1)..(25): SEQ ID NO: 2062; WAN024DC3; Start 326; Stop 350
ttatccgcttaaattctgccaatca

SEQ ID NO: 313834 - DNA, 25 bp, Artificial
  probe
  misc_feature (1)..(25): SEQ ID NO: 2062; WAN024DC3; Start 149; Stop 173
atgcagctaatcatgtcttacttgg

SEQ ID NO: 313835 - DNA, 25 bp, Artificial
  probe
  misc_feature (1)..(25): SEQ ID NO: 2062; WAN024DC3; Start 315; Stop 339
tggttatgggtttatccgcttaaat

SEQ ID NO: 313836 - DNA, 25 bp, Artificial
  probe
  misc_feature (1)..(25): SEQ ID NO: 2062; WAN024DC3; Start 325; Stop 349
tttatccgcttaaattctgccaatc

SEQ ID NO: 313837 - DNA, 25 bp, Artificial
  probe
  misc_feature (1)..(25): SEQ ID NO: 2062; WAN024DC3; Start 145; Stop 169
gaggatgcagctaatcatgtcttac

SEQ ID NO: 313838 - DNA, 25 bp, Artificial
  probe
  misc_feature (1)..(25): SEQ ID NO: 2062; WAN024DC3; Start 324; Stop 348
gtttatccgcttaaattctgccaat

SEQ ID NO: 313839 - DNA, 25 bp, Artificial
  probe
  misc_feature (1)..(25): SEQ ID NO: 2062; WAN024DC3; Start 316; Stop 340
ggttatgggtttatccgcttaaatt

SEQ ID NO: 313840 - DNA, 25 bp, Artificial
  probe
  misc_feature (1)..(25): SEQ ID NO: 2062; WAN024DC3; Start 319; Stop 343
tatgggtttatccgcttaaattctg

SEQ ID NO: 313841 - DNA, 25 bp, Artificial
  probe
  misc_feature (1)..(25): SEQ ID NO: 2062; WAN024DC3; Start 157; Stop 181
aatcatgtcttacttggatatgtcc

SEQ ID NO: 313842 - DNA, 25 bp, Artificial
  probe
  misc_feature (1)..(25): SEQ ID NO: 2062; WAN024DC3; Start 184; Stop 208
gctgaagtttacgaatcactctatt

SEQ ID NO: 313843 - DNA, 25 bp, Artificial
  probe
  misc_feature (1)..(25): SEQ ID NO: 2062; WAN024DC3; Start 154; Stop 178
gctaatcatgtcttacttggatatg

SEQ ID NO: 313844 - DNA, 25 bp, Artificial
  probe
  misc_feature (1)..(25): SEQ ID NO: 2062; WAN024DC3; Start 146; Stop 170
aggatgcagctaatcatgtcttact

SEQ ID NO: 313845 - DNA, 25 bp, Artificial
  probe
  misc_feature (1)..(25): SEQ ID NO: 2062; WAN024DC3; Start 183; Stop 207
cgctgaagtttacgaatcactctat

SEQ ID NO: 313846 - DNA, 25 bp, Artificial
  probe
  misc_feature (1)..(25): SEQ ID NO: 2062; WAN024DC3; Start 314; Stop 338
gtggttatgggtttatccgcttaaa

SEQ ID NO: 313847 - DNA, 25 bp, Artificial
  probe
  misc_feature (1)..(25): SEQ ID NO: 2062; WAN024DC3; Start 150; Stop 174
tgcagctaatcatgtcttacttgga

SEQ ID NO: 313848 - DNA, 25 bp, Artificial
  probe
  misc_feature (1)..(25): SEQ ID NO: 2062; WAN024DC3; Start 317; Stop 341
gttatgggtttatccgcttaaattc

SEQ ID NO: 313849 - DNA, 25 bp, Artificial
  probe
  misc_feature (1)..(25): SEQ ID NO: 2062; WAN024DC3; Start 312; Stop 336
atgtggttatgggtttatccgctta

SEQ ID NO: 313850 - DNA, 25 bp, Artificial
  probe
  misc_feature (1)..(25): SEQ ID NO: 2062; WAN024DC3; Start 144; Stop 168
tgaggatgcagctaatcatgtctta

SEQ ID NO: 313851 - DNA, 25 bp, Artificial
  probe
  misc_feature (1)..(25): SEQ ID NO: 2062; WAN024DC3; Start 332; Stop 356
gcttaaattctgccaatcatcgtct

SEQ ID NO: 313852 - DNA, 25 bp, Artificial
  probe
  misc_feature (1)..(25): SEQ ID NO: 2062; WAN024DC3; Start 318; Stop 342
ttatgggtttatccgcttaaattct

SEQ ID NO: 313853 - DNA, 25 bp, Artificial
  probe
  misc_feature (1)..(25): SEQ ID NO: 2062; WAN024DC3; Start 209; Stop 233
ccaaagcaggatttaatatcttagc

SEQ ID NO: 313854 - DNA, 25 bp, Artificial
  probe
  misc_feature (1)..(25): SEQ ID NO: 2062; WAN024DC3; Start 328; Stop 352
atccgcttaaattctgccaatcatc

SEQ ID NO: 313855 - DNA, 25 bp, Artificial
  probe
  misc_feature (1)..(25): SEQ ID NO: 2062; WAN024DC3; Start 313; Stop 337
tgtggttatgggtttatccgcttaa

SEQ ID NO: 313856 - DNA, 25 bp, Artificial
  probe
  misc_feature (1)..(25): SEQ ID NO: 2062; WAN024DC3; Start 153; Stop 177
agctaatcatgtcttacttggatat

SEQ ID NO: 313857 - DNA, 25 bp, Artificial
  probe
  misc_feature (1)..(25): SEQ ID NO: 2062; WAN024DC3; Start 320; Stop 344
atgggtttatccgcttaaattctgc

SEQ ID NO: 313858 - DNA, 25 bp, Artificial
  probe
  misc_feature (1)..(25): SEQ ID NO: 2062; WAN024DC3; Start 198; Stop 222
atcactctattccaaagcaggattt

SEQ ID NO: 313859 - DNA, 25 bp, Artificial
  probe
  misc_feature (1)..(25): SEQ ID NO: 2063; WAN024C7I; Start 335; Stop 359
ttcgtctgttagtcaatctctatca

SEQ ID NO: 313860 - DNA, 25 bp, Artificial
  probe
  misc_feature (1)..(25): SEQ ID NO: 2063; WAN024C7I; Start 868; Stop 892
gacttccttggtgtgaactactatc

SEQ ID NO: 313861 - DNA, 25 bp, Artificial
  probe
  misc_feature (1)..(25): SEQ ID NO: 2063; WAN024C7I; Start 336; Stop 360
tcgtctgttagtcaatctctatcat

SEQ ID NO: 313862 - DNA, 25 bp, Artificial
  probe
  misc_feature (1)..(25): SEQ ID NO: 2063; WAN024C7I; Start 1077; Stop 1101
gtggatgttgactgagaatggtatg

SEQ ID NO: 313863 - DNA, 25 bp, Artificial
  probe
  misc_feature (1)..(25): SEQ ID NO: 2063; WAN024C7I; Start 870; Stop 894
cttccttggtgtgaactactatcaa

SEQ ID NO: 313864 - DNA, 25 bp, Artificial
  probe
  misc_feature (1)..(25): SEQ ID NO: 2063; WAN024C7I; Start 1071; Stop 1095
tattgagtggatgttgactgagaat

SEQ ID NO: 313865 - DNA, 25 bp, Artificial
  probe
  misc_feature (1)..(25): SEQ ID NO: 2063; WAN024C7I; Start 1070; Stop 1094
atattgagtggatgttgactgagaa

SEQ ID NO: 313866 - DNA, 25 bp, Artificial
  probe
  misc_feature (1)..(25): SEQ ID NO: 2063; WAN024C7I; Start 871; Stop 895
ttccttggtgtgaactactatcaac

SEQ ID NO: 313867 - DNA, 25 bp, Artificial
  probe
  misc_feature (1)..(25): SEQ ID NO: 2063; WAN024C7I; Start 337; Stop 361
cgtctgttagtcaatctctatcatt

SEQ ID NO: 313868 - DNA, 25 bp, Artificial
  probe
  misc_feature (1)..(25): SEQ ID NO: 2063; WAN024C7I; Start 1072; Stop 1096
attgagtggatgttgactgagaatg

SEQ ID NO: 313869 - DNA, 25 bp, Artificial
  probe
  misc_feature (1)..(25): SEQ ID NO: 2063; WAN024C7I; Start 1134; Stop 1158
tggaatgattcaagatgattaccgt

SEQ ID NO: 313870 - DNA, 25 bp, Artificial
  probe
  misc_feature (1)..(25): SEQ ID NO: 2063; WAN024C7I; Start 1126; Stop 1150
cgtcaagatggaatgattcaagatg

SEQ ID NO: 313871 - DNA, 25 bp, Artificial
  probe
  misc_feature (1)..(25): SEQ ID NO: 2063; WAN024C7I; Start 869; Stop 893
acttccttggtgtgaactactatca

SEQ ID NO: 313872 - DNA, 25 bp, Artificial
  probe
  misc_feature (1)..(25): SEQ ID NO: 2063; WAN024C7I; Start 1133; Stop 1157
atggaatgattcaagatgattaccg

SEQ ID NO: 313873 - DNA, 25 bp, Artificial
  probe
  misc_feature (1)..(25): SEQ ID NO: 2063; WAN024C7I; Start 1127; Stop 1151
gtcaagatggaatgattcaagatga

SEQ ID NO: 313874 - DNA, 25 bp, Artificial
  probe
  misc_feature (1)..(25): SEQ ID NO: 2063; WAN024C7I; Start 334; Stop 358
attcgtctgttagtcaatctctatc

SEQ ID NO: 313875 - DNA, 25 bp, Artificial
  probe
  misc_feature (1)..(25): SEQ ID NO: 2063; WAN024C7I; Start 1076; Stop 1100
agtggatgttgactgagaatggtat

SEQ ID NO: 313876 - DNA, 25 bp, Artificial
  probe
  misc_feature (1)..(25): SEQ ID NO: 2063; WAN024C7I; Start 1125; Stop 1149
ccgtcaagatggaatgattcaagat

SEQ ID NO: 313877 - DNA, 25 bp, Artificial
  probe
  misc_feature (1)..(25): SEQ ID NO: 2063; WAN024C7I; Start 867; Stop 891
ggacttccttggtgtgaactactat

SEQ ID NO: 313878 - DNA, 25 bp, Artificial
  probe
  misc_feature (1)..(25): SEQ ID NO: 2063; WAN024C7I; Start 1135; Stop 1159
ggaatgattcaagatgattaccgta

SEQ ID NO: 313879 - DNA, 25 bp, Artificial
  probe
  misc_feature (1)..(25): SEQ ID NO: 2063; WAN024C7I; Start 569; Stop 593
ctgttaaggtagcctatcatacaca

SEQ ID NO: 313880 - DNA, 25 bp, Artificial
  probe
  misc_feature (1)..(25): SEQ ID NO: 2063; WAN024C7I; Start 1078; Stop 1102
tggatgttgactgagaatggtatgg

SEQ ID NO: 313881 - DNA, 25 bp, Artificial
  probe
  misc_feature (1)..(25): SEQ ID NO: 2063; WAN024C7I; Start 839; Stop 863
agttggaactcattcgtgataatac

SEQ ID NO: 313882 - DNA, 25 bp, Artificial
  probe
  misc_feature (1)..(25): SEQ ID NO: 2063; WAN024C7I; Start 570; Stop 594
tgttaaggtagcctatcatacacaa

SEQ ID NO: 313883 - DNA, 25 bp, Artificial
  probe
  misc_feature (1)..(25): SEQ ID NO: 2063; WAN024C7I; Start 1128; Stop 1152
tcaagatggaatgattcaagatgat

SEQ ID NO: 313884 - DNA, 25 bp, Artificial
  probe
  misc_feature (1)..(25): SEQ ID NO: 2063; WAN024C7I; Start 1075; Stop 1099
gagtggatgttgactgagaatggta

SEQ ID NO: 313885 - DNA, 25 bp, Artificial
  probe
  misc_feature (1)..(25): SEQ ID NO: 2063; WAN024C7I; Start 333; Stop 357
aattcgtctgttagtcaatctctat

SEQ ID NO: 313886 - DNA, 25 bp, Artificial
  probe
  misc_feature (1)..(25): SEQ ID NO: 2063; WAN024C7I; Start 1069; Stop 1093
aatattgagtggatgttgactgaga

SEQ ID NO: 313887 - DNA, 25 bp, Artificial
  probe
  misc_feature (1)..(25): SEQ ID NO: 2063; WAN024C7I; Start 141; Stop 165
gattggttcagataagacatcgact

SEQ ID NO: 313888 - DNA, 25 bp, Artificial
  probe
  misc_feature (1)..(25): SEQ ID NO: 2063; WAN024C7I; Start 874; Stop 898
cttggtgtgaactactatcaacctt

SEQ ID NO: 313889 - DNA, 25 bp, Artificial
  probe
  misc_feature (1)..(25): SEQ ID NO: 2063; WAN024C7I; Start 142; Stop 166
attggttcagataagacatcgactt

SEQ ID NO: 313890 - DNA, 25 bp, Artificial
  probe
  misc_feature (1)..(25): SEQ ID NO: 2063; WAN024C7I; Start 1225; Stop 1249
ggctacttgatttggacctttattg

SEQ ID NO: 313891 - DNA, 25 bp, Artificial
  probe
  misc_feature (1)..(25): SEQ ID NO: 2063; WAN024C7I; Start 1010; Stop 1034
gggagatttatgagcaagggattta

SEQ ID NO: 313892 - DNA, 25 bp, Artificial
  probe
  misc_feature (1)..(25): SEQ ID NO: 2064; WAN024BDC; Start 89; Stop 113
aggttgctaccgacatatatagatt

SEQ ID NO: 313893 - DNA, 25 bp, Artificial
  probe
  misc_feature (1)..(25): SEQ ID NO: 2064; WAN024BDC; Start 88; Stop 112
aaggttgctaccgacatatatagat

SEQ ID NO: 313894 - DNA, 25 bp, Artificial
  probe
  misc_feature (1)..(25): SEQ ID NO: 2064; WAN024BDC; Start 90; Stop 114
ggttgctaccgacatatatagattc

SEQ ID NO: 313895 - DNA, 25 bp, Artificial
  probe
  misc_feature (1)..(25): SEQ ID NO: 2064; WAN024BDC; Start 61; Stop 85
gcttggatcatttccgtcaaattaa

SEQ ID NO: 313896 - DNA, 25 bp, Artificial
  probe
  misc_feature (1)..(25): SEQ ID NO: 2064; WAN024BDC; Start 87; Stop 111
aaaggttgctaccgacatatataga

SEQ ID NO: 313897 - DNA, 25 bp, Artificial
  probe
  misc_feature (1)..(25): SEQ ID NO: 2064; WAN024BDC; Start 62; Stop 86
cttggatcatttccgtcaaattaaa

SEQ ID NO: 313898 - DNA, 25 bp, Artificial
  probe
  misc_feature (1)..(25): SEQ ID NO: 2064; WAN024BDC; Start 60; Stop 84
agcttggatcatttccgtcaaatta

SEQ ID NO: 313899 - DNA, 25 bp, Artificial
  probe
  misc_feature (1)..(25): SEQ ID NO: 2064; WAN024BDC; Start 50; Stop 74
catctgtagaagcttggatcatttc

SEQ ID NO: 313900 - DNA, 25 bp, Artificial
  probe
  misc_feature (1)..(25): SEQ ID NO: 2064; WAN024BDC; Start 49; Stop 73
gcatctgtagaagcttggatcattt

SEQ ID NO: 313901 - DNA, 25 bp, Artificial
  probe
  misc_feature (1)..(25): SEQ ID NO: 2064; WAN024BDC; Start 86; Stop 110
aaaaggttgctaccgacatatatag

SEQ ID NO: 313902 - DNA, 25 bp, Artificial
  probe
  misc_feature (1)..(25): SEQ ID NO: 2064; WAN024BDC; Start 63; Stop 87
ttggatcatttccgtcaaattaaaa

SEQ ID NO: 313903 - DNA, 25 bp, Artificial
  probe
  misc_feature (1)..(25): SEQ ID NO: 2064; WAN024BDC; Start 48; Stop 72
agcatctgtagaagcttggatcatt

SEQ ID NO: 313904 - DNA, 25 bp, Artificial
  probe
  misc_feature (1)..(25): SEQ ID NO: 2064; WAN024BDC; Start 51; Stop 75
atctgtagaagcttggatcatttcc

SEQ ID NO: 313905 - DNA, 25 bp, Artificial
  probe
  misc_feature (1)..(25): SEQ ID NO: 2064; WAN024BDC; Start 47; Stop 71
cagcatctgtagaagcttggatcat

SEQ ID NO: 313906 - DNA, 25 bp, Artificial
  probe
  misc_feature (1)..(25): SEQ ID NO: 2064; WAN024BDC; Start 59; Stop 83
aagcttggatcatttccgtcaaatt

SEQ ID NO: 313907 - DNA, 25 bp, Artificial
  probe
  misc_feature (1)..(25): SEQ ID NO: 2064; WAN024BDC; Start 58; Stop 82
gaagcttggatcatttccgtcaaat

SEQ ID NO: 313908 - DNA, 25 bp, Artificial
  probe
  misc_feature (1)..(25): SEQ ID NO: 2064; WAN024BDC; Start 56; Stop 80
tagaagcttggatcatttccgtcaa

SEQ ID NO: 313909 - DNA, 25 bp, Artificial
  probe
  misc_feature (1)..(25): SEQ ID NO: 2064; WAN024BDC; Start 52; Stop 76
tctgtagaagcttggatcatttccg

SEQ ID NO: 313910 - DNA, 25 bp, Artificial
  probe
  misc_feature (1)..(25): SEQ ID NO: 2064; WAN024BDC; Start 55; Stop 79
gtagaagcttggatcatttccgtca

SEQ ID NO: 313911 - DNA, 25 bp, Artificial
  probe
  misc_feature (1)..(25): SEQ ID NO: 2064; WAN024BDC; Start 54; Stop 78
tgtagaagcttggatcatttccgtc

SEQ ID NO: 313912 - DNA, 25 bp, Artificial
  probe
  misc_feature (1)..(25): SEQ ID NO: 2064; WAN024BDC; Start 53; Stop 77
ctgtagaagcttggatcatttccgt

SEQ ID NO: 313913 - DNA, 25 bp, Artificial
  probe
  misc_feature (1)..(25): SEQ ID NO: 2064; WAN024BDC; Start 57; Stop 81
agaagcttggatcatttccgtcaaa

SEQ ID NO: 313914 - DNA, 25 bp, Artificial
  probe
  misc_feature (1)..(25): SEQ ID NO: 2064; WAN024BDC; Start 46; Stop 70
ccagcatctgtagaagcttggatca

SEQ ID NO: 313915 - DNA, 25 bp, Artificial
  probe
  misc_feature (1)..(25): SEQ ID NO: 2065; WAN0249XI; Start 6; Stop 30
accttctttctacccctctattttg

SEQ ID NO: 313916 - DNA, 25 bp, Artificial
  probe
  misc_feature (1)..(25): SEQ ID NO: 2065; WAN0249XI; Start 7; Stop 31
ccttctttctacccctctattttgg

SEQ ID NO: 313917 - DNA, 25 bp, Artificial
  probe
  misc_feature (1)..(25): SEQ ID NO: 2065; WAN0249XI; Start 52; Stop 76
aagggagaagggtaaaagaaaagac

SEQ ID NO: 313918 - DNA, 25 bp, Artificial
  probe
  misc_feature (1)..(25): SEQ ID NO: 2065; WAN0249XI; Start 51; Stop 75
caagggagaagggtaaaagaaaaga

SEQ ID NO: 313919 - DNA, 25 bp, Artificial
  probe
  misc_feature (1)..(25): SEQ ID NO: 2065; WAN0249XI; Start 55; Stop 79
ggagaagggtaaaagaaaagacaaa

SEQ ID NO: 313920 - DNA, 25 bp, Artificial
  probe
  misc_feature (1)..(25): SEQ ID NO: 2065; WAN0249XI; Start 86; Stop 110
cgacaagataacggagttctttgat

SEQ ID NO: 313921 - DNA, 25 bp, Artificial
  probe
  misc_feature (1)..(25): SEQ ID NO: 2065; WAN0249XI; Start 54; Stop 78
gggagaagggtaaaagaaaagacaa

SEQ ID NO: 313922 - DNA, 25 bp, Artificial
  probe
  misc_feature (1)..(25): SEQ ID NO: 2065; WAN0249XI; Start 87; Stop 111
gacaagataacggagttctttgata

SEQ ID NO: 313923 - DNA, 25 bp, Artificial
  probe
  misc_feature (1)..(25): SEQ ID NO: 2065; WAN0249XI; Start 4; Stop 28
ctaccttctttctacccctctattt

SEQ ID NO: 313924 - DNA, 25 bp, Artificial
  probe
  misc_feature (1)..(25): SEQ ID NO: 2065; WAN0249XI; Start 3; Stop 27
gctaccttctttctacccctctatt

SEQ ID NO: 313925 - DNA, 25 bp, Artificial
  probe
  misc_feature (1)..(25): SEQ ID NO: 2065; WAN0249XI; Start 8; Stop 32
cttctttctacccctctattttggc

SEQ ID NO: 313926 - DNA, 25 bp, Artificial
  probe
  misc_feature (1)..(25): SEQ ID NO: 2065; WAN0249XI; Start 53; Stop 77
agggagaagggtaaaagaaaagaca

SEQ ID NO: 313927 - DNA, 25 bp, Artificial
  probe
  misc_feature (1)..(25): SEQ ID NO: 2065; WAN0249XI; Start 5; Stop 29
taccttctttctacccctctatttt

SEQ ID NO: 313928 - DNA, 25 bp, Artificial
  probe
  misc_feature (1)..(25): SEQ ID NO: 2065; WAN0249XI; Start 9; Stop 33
ttctttctacccctctattttggca

SEQ ID NO: 313929 - DNA, 25 bp, Artificial
  probe
  misc_feature (1)..(25): SEQ ID NO: 2065; WAN0249XI; Start 10; Stop 34
tctttctacccctctattttggcaa

SEQ ID NO: 313930 - DNA, 25 bp, Artificial
  probe
  misc_feature (1)..(25): SEQ ID NO: 2065; WAN0249XI; Start 11; Stop 35
ctttctacccctctattttggcaaa

SEQ ID NO: 313931 - DNA, 25 bp, Artificial
  probe
  misc_feature (1)..(25): SEQ ID NO: 2065; WAN0249XI; Start 88; Stop 112
acaagataacggagttctttgatat

SEQ ID NO: 313932 - DNA, 25 bp, Artificial
  probe
  misc_feature (1)..(25): SEQ ID NO: 2065; WAN0249XI; Start 2; Stop 26
tgctaccttctttctacccctctat

SEQ ID NO: 313933 - DNA, 25 bp, Artificial
  probe
  misc_feature (1)..(25): SEQ ID NO: 2065; WAN0249XI; Start 1; Stop 25
atgctaccttctttctacccctcta

SEQ ID NO: 313934 - DNA, 25 bp, Artificial
  probe
  misc_feature (1)..(25): SEQ ID NO: 2065; WAN0249XI; Start 50; Stop 74
gcaagggagaagggtaaaagaaaag

SEQ ID NO: 313935 - DNA, 25 bp, Artificial
  probe
  misc_feature (1)..(25): SEQ ID NO: 2065; WAN0249XI; Start 56; Stop 80
gagaagggtaaaagaaaagacaaaa

SEQ ID NO: 313936 - DNA, 25 bp, Artificial
  probe
  misc_feature (1)..(25): SEQ ID NO: 2065; WAN0249XI; Start 36; Stop 60
aaatgagagaaaatgcaagggagaa

SEQ ID NO: 313937 - DNA, 25 bp, Artificial
  probe
  misc_feature (1)..(25): SEQ ID NO: 2065; WAN0249XI; Start 35; Stop 59
aaaatgagagaaaatgcaagggaga

SEQ ID NO: 313938 - DNA, 25 bp, Artificial
  probe
  misc_feature (1)..(25): SEQ ID NO: 2065; WAN0249XI; Start 37; Stop 61
aatgagagaaaatgcaagggagaag

SEQ ID NO: 313939 - DNA, 25 bp, Artificial
  probe
  misc_feature (1)..(25): SEQ ID NO: 2065; WAN0249XI; Start 45; Stop 69
aaaatgcaagggagaagggtaaaag

SEQ ID NO: 313940 - DNA, 25 bp, Artificial
  probe
  misc_feature (1)..(25): SEQ ID NO: 2065; WAN0249XI; Start 44; Stop 68
gaaaatgcaagggagaagggtaaaa

SEQ ID NO: 313941 - DNA, 25 bp, Artificial
  probe
  misc_feature (1)..(25): SEQ ID NO: 2065; WAN0249XI; Start 12; Stop 36
tttctacccctctattttggcaaaa

SEQ ID NO: 313942 - DNA, 25 bp, Artificial
  probe
  misc_feature (1)..(25): SEQ ID NO: 2065; WAN0249XI; Start 89; Stop 113
caagataacggagttctttgatatc

SEQ ID NO: 313943 - DNA, 25 bp, Artificial
  probe
  misc_feature (1)..(25): SEQ ID NO: 2065; WAN0249XI; Start 48; Stop 72
atgcaagggagaagggtaaaagaaa

SEQ ID NO: 313944 - DNA, 25 bp, Artificial
  probe
  misc_feature (1)..(25): SEQ ID NO: 2065; WAN0249XI; Start 47; Stop 71
aatgcaagggagaagggtaaaagaa

SEQ ID NO: 313945 - DNA, 25 bp, Artificial
  probe
  misc_feature (1)..(25): SEQ ID NO: 2065; WAN0249XI; Start 46; Stop 70
aaatgcaagggagaagggtaaaaga

SEQ ID NO: 313946 - DNA, 25 bp, Artificial
  probe
  misc_feature (1)..(25): SEQ ID NO: 2065; WAN0249XI; Start 43; Stop 67
agaaaatgcaagggagaagggtaaa

SEQ ID NO: 313947 - DNA, 25 bp, Artificial
  probe
  misc_feature (1)..(25): SEQ ID NO: 2065; WAN0249XI; Start 49; Stop 73
tgcaagggagaagggtaaaagaaaa

SEQ ID NO: 313948 - DNA, 25 bp, Artificial
  probe
  misc_feature (1)..(25): SEQ ID NO: 2066; WAN024CYF; Start 463; Stop 487
gagagcagtaagattgtcaaggaag

SEQ ID NO: 313949 - DNA, 25 bp, Artificial
  probe
  misc_feature (1)..(25): SEQ ID NO: 2066; WAN024CYF; Start 462; Stop 486
tgagagcagtaagattgtcaaggaa

SEQ ID NO: 313950 - DNA, 25 bp, Artificial
  probe
  misc_feature (1)..(25): SEQ ID NO: 2066; WAN024CYF; Start 1029; Stop 1053
gttgagcttgatggaattacttgaa

SEQ ID NO: 313951 - DNA, 25 bp, Artificial
  probe
  misc_feature (1)..(25): SEQ ID NO: 2066; WAN024CYF; Start 468; Stop 492
cagtaagattgtcaaggaagccatg

SEQ ID NO: 313952 - DNA, 25 bp, Artificial
  probe
  misc_feature (1)..(25): SEQ ID NO: 2066; WAN024CYF; Start 353; Stop 377
tcaagacagttgcgaccattactaa

SEQ ID NO: 313953 - DNA, 25 bp, Artificial
  probe
  misc_feature (1)..(25): SEQ ID NO: 2066; WAN024CYF; Start 878; Stop 902
aatcaggtgtcatcacagttattgc

SEQ ID NO: 313954 - DNA, 25 bp, Artificial
  probe
  misc_feature (1)..(25): SEQ ID NO: 2066; WAN024CYF; Start 341; Stop 365
agaagattaatgtcaagacagttgc

SEQ ID NO: 313955 - DNA, 25 bp, Artificial
  probe
  misc_feature (1)..(25): SEQ ID NO: 2066; WAN024CYF; Start 1027; Stop 1051
gagttgagcttgatggaattacttg

SEQ ID NO: 313956 - DNA, 25 bp, Artificial
  probe
  misc_feature (1)..(25): SEQ ID NO: 2066; WAN024CYF; Start 1028; Stop 1052
agttgagcttgatggaattacttga

SEQ ID NO: 313957 - DNA, 25 bp, Artificial
  probe
  misc_feature (1)..(25): SEQ ID NO: 2066; WAN024CYF; Start 1026; Stop 1050
tgagttgagcttgatggaattactt

SEQ ID NO: 313958 - DNA, 25 bp, Artificial
  probe
  misc_feature (1)..(25): SEQ ID NO: 2066; WAN024CYF; Start 506; Stop 530
aactcaatacctttatcagccttca

SEQ ID NO: 313959 - DNA, 25 bp, Artificial
  probe
  misc_feature (1)..(25): SEQ ID NO: 2066; WAN024CYF; Start 275; Stop 299
ctaataccagtccaaccatttcaga

SEQ ID NO: 313960 - DNA, 25 bp, Artificial
  probe
  misc_feature (1)..(25): SEQ ID NO: 2066; WAN024CYF; Start 507; Stop 531
actcaatacctttatcagccttcat

SEQ ID NO: 313961 - DNA, 25 bp, Artificial
  probe
  misc_feature (1)..(25): SEQ ID NO: 2066; WAN024CYF; Start 464; Stop 488
agagcagtaagattgtcaaggaagc

SEQ ID NO: 313962 - DNA, 25 bp, Artificial
  probe
  misc_feature (1)..(25): SEQ ID NO: 2066; WAN024CYF; Start 342; Stop 366
gaagattaatgtcaagacagttgcg

SEQ ID NO: 313963 - DNA, 25 bp, Artificial
  probe
  misc_feature (1)..(25): SEQ ID NO: 2066; WAN024CYF; Start 704; Stop 728
aaagtgttaaagtagtggagtttgc

SEQ ID NO: 313964 - DNA, 25 bp, Artificial
  probe
  misc_feature (1)..(25): SEQ ID NO: 2066; WAN024CYF; Start 698; Stop 722
aggaagaaagtgttaaagtagtgga

SEQ ID NO: 313965 - DNA, 25 bp, Artificial
  probe
  misc_feature (1)..(25): SEQ ID NO: 2066; WAN024CYF; Start 705; Stop 729
aagtgttaaagtagtggagtttgct

SEQ ID NO: 313966 - DNA, 25 bp, Artificial
  probe
  misc_feature (1)..(25): SEQ ID NO: 2066; WAN024CYF; Start 343; Stop 367
aagattaatgtcaagacagttgcga

SEQ ID NO: 313967 - DNA, 25 bp, Artificial
  probe
  misc_feature (1)..(25): SEQ ID NO: 2066; WAN024CYF; Start 1110; Stop 1134
gaatggtccagcagatatcactatt

SEQ ID NO: 313968 - DNA, 25 bp, Artificial
  probe
  misc_feature (1)..(25): SEQ ID NO: 2066; WAN024CYF; Start 1025; Stop 1049
gtgagttgagcttgatggaattact

SEQ ID NO: 313969 - DNA, 25 bp, Artificial
  probe
  misc_feature (1)..(25): SEQ ID NO: 2066; WAN024CYF; Start 699; Stop 723
ggaagaaagtgttaaagtagtggag

SEQ ID NO: 313970 - DNA, 25 bp, Artificial
  probe
  misc_feature (1)..(25): SEQ ID NO: 2066; WAN024CYF; Start 505; Stop 529
aaactcaatacctttatcagccttc

SEQ ID NO: 313971 - DNA, 25 bp, Artificial
  probe
  misc_feature (1)..(25): SEQ ID NO: 2066; WAN024CYF; Start 687; Stop 711
gcatttgtctaaggaagaaagtgtt

SEQ ID NO: 313972 - DNA, 25 bp, Artificial
  probe
  misc_feature (1)..(25): SEQ ID NO: 2066; WAN024CYF; Start 1109; Stop 1133
agaatggtccagcagatatcactat

SEQ ID NO: 313973 - DNA, 25 bp, Artificial
  probe
  misc_feature (1)..(25): SEQ ID NO: 2066; WAN024CYF; Start 685; Stop 709
cagcatttgtctaaggaagaaagtg

SEQ ID NO: 313974 - DNA, 25 bp, Artificial
  probe
  misc_feature (1)..(25): SEQ ID NO: 2066; WAN024CYF; Start 190; Stop 214
gaacctggtcaaacacataaagaag

SEQ ID NO: 313975 - DNA, 25 bp, Artificial
  probe
  misc_feature (1)..(25): SEQ ID NO: 2066; WAN024CYF; Start 697; Stop 721
aaggaagaaagtgttaaagtagtgg

SEQ ID NO: 313976 - DNA, 25 bp, Artificial
  probe
  misc_feature (1)..(25): SEQ ID NO: 2066; WAN024CYF; Start 686; Stop 710
agcatttgtctaaggaagaaagtgt

SEQ ID NO: 313977 - DNA, 25 bp, Artificial
  probe
  misc_feature (1)..(25): SEQ ID NO: 2066; WAN024CYF; Start 1024; Stop 1048
ggtgagttgagcttgatggaattac

SEQ ID NO: 313978 - DNA, 25 bp, Artificial
  probe
  misc_feature (1)..(25): SEQ ID NO: 2066; WAN024CYF; Start 191; Stop 215
aacctggtcaaacacataaagaaga

SEQ ID NO: 313979 - DNA, 25 bp, Artificial
  probe
  misc_feature (1)..(25): SEQ ID NO: 2066; WAN024CYF; Start 936; Stop 960
aaatgttgaggatattaccaaagcg

SEQ ID NO: 313980 - DNA, 25 bp, Artificial
  probe
  misc_feature (1)..(25): SEQ ID NO: 2066; WAN024CYF; Start 700; Stop 724
gaagaaagtgttaaagtagtggagt

SEQ ID NO: 313981 - DNA, 25 bp, Artificial
  probe
  misc_feature (1)..(25): SEQ ID NO: 2067; WAN024F8M; Start 808; Stop 832
actcaaggtcaatatatcgcaacat

SEQ ID NO: 313982 - DNA, 25 bp, Artificial
  probe
  misc_feature (1)..(25): SEQ ID NO: 2067; WAN024F8M; Start 809; Stop 833
ctcaaggtcaatatatcgcaacatt

SEQ ID NO: 313983 - DNA, 25 bp, Artificial
  probe
  misc_feature (1)..(25): SEQ ID NO: 2067; WAN024F8M; Start 442; Stop 466
gacctgattatcttggatgagcctt

SEQ ID NO: 313984 - DNA, 25 bp, Artificial
  probe
  misc_feature (1)..(25): SEQ ID NO: 2067; WAN024F8M; Start 251; Stop 275
aattgacagttcttgaacaagttcg

SEQ ID NO: 313985 - DNA, 25 bp, Artificial
  probe
  misc_feature (1)..(25): SEQ ID NO: 2067; WAN024F8M; Start 680; Stop 704
caagtgaacgaagcaaggaagaatt

SEQ ID NO: 313986 - DNA, 25 bp, Artificial
  probe
  misc_feature (1)..(25): SEQ ID NO: 2067; WAN024F8M; Start 402; Stop 426
gcagaagattcagctcattattact

SEQ ID NO: 313987 - DNA, 25 bp, Artificial
  probe
  misc_feature (1)..(25): SEQ ID NO: 2067; WAN024F8M; Start 681; Stop 705
aagtgaacgaagcaaggaagaattg

SEQ ID NO: 313988 - DNA, 25 bp, Artificial
  probe
  misc_feature (1)..(25): SEQ ID NO: 2067; WAN024F8M; Start 807; Stop 831
gactcaaggtcaatatatcgcaaca

SEQ ID NO: 313989 - DNA, 25 bp, Artificial
  probe
  misc_feature (1)..(25): SEQ ID NO: 2067; WAN024F8M; Start 436; Stop 460
gaaccagacctgattatcttggatg

SEQ ID NO: 313990 - DNA, 25 bp, Artificial
  probe
  misc_feature (1)..(25): SEQ ID NO: 2067; WAN024F8M; Start 437; Stop 461
aaccagacctgattatcttggatga

SEQ ID NO: 313991 - DNA, 25 bp, Artificial
  probe
  misc_feature (1)..(25): SEQ ID NO: 2067; WAN024F8M; Start 435; Stop 459
tgaaccagacctgattatcttggat

SEQ ID NO: 313992 - DNA, 25 bp, Artificial
  probe
  misc_feature (1)..(25): SEQ ID NO: 2067; WAN024F8M; Start 434; Stop 458
atgaaccagacctgattatcttgga

SEQ ID NO: 313993 - DNA, 25 bp, Artificial
  probe
  misc_feature (1)..(25): SEQ ID NO: 2067; WAN024F8M; Start 576; Stop 600
ggaactttgtgacgatattctgatg

SEQ ID NO: 313994 - DNA, 25 bp, Artificial
  probe
  misc_feature (1)..(25): SEQ ID NO: 2067; WAN024F8M; Start 575; Stop 599
aggaactttgtgacgatattctgat

SEQ ID NO: 313995 - DNA, 25 bp, Artificial
  probe
  misc_feature (1)..(25): SEQ ID NO: 2067; WAN024F8M; Start 479; Stop 503
acccagttaatacagaattgctcaa

SEQ ID NO: 313996 - DNA, 25 bp, Artificial
  probe
  misc_feature (1)..(25): SEQ ID NO: 2067; WAN024F8M; Start 572; Stop 596
ttgaggaactttgtgacgatattct

SEQ ID NO: 313997 - DNA, 25 bp, Artificial
  probe
  misc_feature (1)..(25): SEQ ID NO: 2067; WAN024F8M; Start 480; Stop 504
cccagttaatacagaattgctcaaa

SEQ ID NO: 313998 - DNA, 25 bp, Artificial
  probe
  misc_feature (1)..(25): SEQ ID NO: 2067; WAN024F8M; Start 679; Stop 703
tcaagtgaacgaagcaaggaagaat

SEQ ID NO: 313999 - DNA, 25 bp, Artificial
  probe
  misc_feature (1)..(25): SEQ ID NO: 2067; WAN024F8M; Start 574; Stop 598
gaggaactttgtgacgatattctga

SEQ ID NO: 314000 - DNA, 25 bp, Artificial
  probe
  misc_feature (1)..(25): SEQ ID NO: 2067; WAN024F8M; Start 571; Stop 595
gttgaggaactttgtgacgatattc

SEQ ID NO: 314001 - DNA, 25 bp, Artificial
  probe
  misc_feature (1)..(25): SEQ ID NO: 2067; WAN024F8M; Start 441; Stop 465
agacctgattatcttggatgagcct

SEQ ID NO: 314002 - DNA, 25 bp, Artificial
  probe
  misc_feature (1)..(25): SEQ ID NO: 2067; WAN024F8M; Start 478; Stop 502
gacccagttaatacagaattgctca

SEQ ID NO: 314003 - DNA, 25 bp, Artificial
  probe
  misc_feature (1)..(25): SEQ ID NO: 2067; WAN024F8M; Start 440; Stop 464
cagacctgattatcttggatgagcc

SEQ ID NO: 314004 - DNA, 25 bp, Artificial
  probe
  misc_feature (1)..(25): SEQ ID NO: 2067; WAN024F8M; Start 152; Stop 176
tagaatatcagggagaaatcggtct

SEQ ID NO: 314005 - DNA, 25 bp, Artificial
  probe
  misc_feature (1)..(25): SEQ ID NO: 2067; WAN024F8M; Start 472; Stop 496
ggattggacccagttaatacagaat

SEQ ID NO: 314006 - DNA, 25 bp, Artificial
  probe
  misc_feature (1)..(25): SEQ ID NO: 2067; WAN024F8M; Start 577; Stop 601
gaactttgtgacgatattctgatga

SEQ ID NO: 314007 - DNA, 25 bp, Artificial
  probe
  misc_feature (1)..(25): SEQ ID NO: 2067; WAN024F8M; Start 573; Stop 597
tgaggaactttgtgacgatattctg

SEQ ID NO: 314008 - DNA, 25 bp, Artificial
  probe
  misc_feature (1)..(25): SEQ ID NO: 2067; WAN024F8M; Start 569; Stop 593
atgttgaggaactttgtgacgatat

SEQ ID NO: 314009 - DNA, 25 bp, Artificial
  probe
  misc_feature (1)..(25): SEQ ID NO: 2067; WAN024F8M; Start 438; Stop 462
accagacctgattatcttggatgag

SEQ ID NO: 314010 - DNA, 25 bp, Artificial
  probe
  misc_feature (1)..(25): SEQ ID NO: 2067; WAN024F8M; Start 151; Stop 175
ctagaatatcagggagaaatcggtc

SEQ ID NO: 314011 - DNA, 25 bp, Artificial
  probe
  misc_feature (1)..(25): SEQ ID NO: 2067; WAN024F8M; Start 820; Stop 844
tatatcgcaacatttgaccaacaag

SEQ ID NO: 314012 - DNA, 25 bp, Artificial
  probe
  misc_feature (1)..(25): SEQ ID NO: 2067; WAN024F8M; Start 570; Stop 594
tgttgaggaactttgtgacgatatt

SEQ ID NO: 314013 - DNA, 25 bp, Artificial
  probe
  misc_feature (1)..(25): SEQ ID NO: 2067; WAN024F8M; Start 568; Stop 592
aatgttgaggaactttgtgacgata

SEQ ID NO: 314014 - DNA, 25 bp, Artificial
  probe
  misc_feature (1)..(25): SEQ ID NO: 2068; WAN024GGL; Start 43; Stop 67
ttgagaaaggaggttagaagagatg

SEQ ID NO: 314015 - DNA, 25 bp, Artificial
  probe
  misc_feature (1)..(25): SEQ ID NO: 2068; WAN024GGL; Start 44; Stop 68
tgagaaaggaggttagaagagatga

SEQ ID NO: 314016 - DNA, 25 bp, Artificial
  probe
  misc_feature (1)..(25): SEQ ID NO: 2068; WAN024GGL; Start 41; Stop 65
gattgagaaaggaggttagaagaga

SEQ ID NO: 314017 - DNA, 25 bp, Artificial
  probe
  misc_feature (1)..(25): SEQ ID NO: 2068; WAN024GGL; Start 40; Stop 64
agattgagaaaggaggttagaagag

SEQ ID NO: 314018 - DNA, 25 bp, Artificial
  probe
  misc_feature (1)..(25): SEQ ID NO: 2068; WAN024GGL; Start 45; Stop 69
gagaaaggaggttagaagagatgat

SEQ ID NO: 314019 - DNA, 25 bp, Artificial
  probe
  misc_feature (1)..(25): SEQ ID NO: 2068; WAN024GGL; Start 46; Stop 70
agaaaggaggttagaagagatgatt

SEQ ID NO: 314020 - DNA, 25 bp, Artificial
  probe
  misc_feature (1)..(25): SEQ ID NO: 2068; WAN024GGL; Start 42; Stop 66
attgagaaaggaggttagaagagat

SEQ ID NO: 314021 - DNA, 25 bp, Artificial
  probe
  misc_feature (1)..(25): SEQ ID NO: 2068; WAN024GGL; Start 49; Stop 73
aaggaggttagaagagatgattatt

SEQ ID NO: 314022 - DNA, 25 bp, Artificial
  probe
  misc_feature (1)..(25): SEQ ID NO: 2068; WAN024GGL; Start 39; Stop 63
tagattgagaaaggaggttagaaga

SEQ ID NO: 314023 - DNA, 25 bp, Artificial
  probe
  misc_feature (1)..(25): SEQ ID NO: 2068; WAN024GGL; Start 47; Stop 71
gaaaggaggttagaagagatgatta

SEQ ID NO: 314024 - DNA, 25 bp, Artificial
  probe
  misc_feature (1)..(25): SEQ ID NO: 2068; WAN024GGL; Start 51; Stop 75
ggaggttagaagagatgattattac

SEQ ID NO: 314025 - DNA, 25 bp, Artificial
  probe
  misc_feature (1)..(25): SEQ ID NO: 2068; WAN024GGL; Start 38; Stop 62
atagattgagaaaggaggttagaag

SEQ ID NO: 314026 - DNA, 25 bp, Artificial
  probe
  misc_feature (1)..(25): SEQ ID NO: 2068; WAN024GGL; Start 50; Stop 74
aggaggttagaagagatgattatta

SEQ ID NO: 314027 - DNA, 25 bp, Artificial
  probe
  misc_feature (1)..(25): SEQ ID NO: 2068; WAN024GGL; Start 37; Stop 61
aatagattgagaaaggaggttagaa

SEQ ID NO: 314028 - DNA, 25 bp, Artificial
  probe
  misc_feature (1)..(25): SEQ ID NO: 2068; WAN024GGL; Start 36; Stop 60
aaatagattgagaaaggaggttaga

SEQ ID NO: 314029 - DNA, 25 bp, Artificial
  probe
  misc_feature (1)..(25): SEQ ID NO: 2068; WAN024GGL; Start 48; Stop 72
aaaggaggttagaagagatgattat

SEQ ID NO: 314030 - DNA, 25 bp, Artificial
  probe
  misc_feature (1)..(25): SEQ ID NO: 2068; WAN024GGL; Start 52; Stop 76
gaggttagaagagatgattattaca

SEQ ID NO: 314031 - DNA, 25 bp, Artificial
  probe
  misc_feature (1)..(25): SEQ ID NO: 2068; WAN024GGL; Start 13; Stop 37
agaatggggaacttggataggaaaa

SEQ ID NO: 314032 - DNA, 25 bp, Artificial
  probe
  misc_feature (1)..(25): SEQ ID NO: 2068; WAN024GGL; Start 12; Stop 36
aagaatggggaacttggataggaaa

SEQ ID NO: 314033 - DNA, 25 bp, Artificial
  probe
  misc_feature (1)..(25): SEQ ID NO: 2068; WAN024GGL; Start 53; Stop 77
aggttagaagagatgattattacaa

SEQ ID NO: 314034 - DNA, 25 bp, Artificial
  probe
  misc_feature (1)..(25): SEQ ID NO: 2068; WAN024GGL; Start 11; Stop 35
gaagaatggggaacttggataggaa

SEQ ID NO: 314035 - DNA, 25 bp, Artificial
  probe
  misc_feature (1)..(25): SEQ ID NO: 2068; WAN024GGL; Start 8; Stop 32
acagaagaatggggaacttggatag

SEQ ID NO: 314036 - DNA, 25 bp, Artificial
  probe
  misc_feature (1)..(25): SEQ ID NO: 2068; WAN024GGL; Start 7; Stop 31
gacagaagaatggggaacttggata

SEQ ID NO: 314037 - DNA, 25 bp, Artificial
  probe
  misc_feature (1)..(25): SEQ ID NO: 2068; WAN024GGL; Start 10; Stop 34
agaagaatggggaacttggatagga

SEQ ID NO: 314038 - DNA, 25 bp, Artificial
  probe
  misc_feature (1)..(25): SEQ ID NO: 2068; WAN024GGL; Start 9; Stop 33
cagaagaatggggaacttggatagg

SEQ ID NO: 314039 - DNA, 25 bp, Artificial
  probe
  misc_feature (1)..(25): SEQ ID NO: 2068; WAN024GGL; Start 4; Stop 28
ctagacagaagaatggggaacttgg

SEQ ID NO: 314040 - DNA, 25 bp, Artificial
  probe
  misc_feature (1)..(25): SEQ ID NO: 2068; WAN024GGL; Start 5; Stop 29
tagacagaagaatggggaacttgga

SEQ ID NO: 314041 - DNA, 25 bp, Artificial
  probe
  misc_feature (1)..(25): SEQ ID NO: 2068; WAN024GGL; Start 6; Stop 30
agacagaagaatggggaacttggat

SEQ ID NO: 314042 - DNA, 25 bp, Artificial
  probe
  misc_feature (1)..(25): SEQ ID NO: 2068; WAN024GGL; Start 1; Stop 25
atgctagacagaagaatggggaact

SEQ ID NO: 314043 - DNA, 25 bp, Artificial
  probe
  misc_feature (1)..(25): SEQ ID NO: 2068; WAN024GGL; Start 3; Stop 27
gctagacagaagaatggggaacttg

SEQ ID NO: 314044 - DNA, 25 bp, Artificial
  probe
  misc_feature (1)..(25): SEQ ID NO: 2068; WAN024GGL; Start 35; Stop 59
aaaatagattgagaaaggaggttag

SEQ ID NO: 314045 - DNA, 25 bp, Artificial
  probe
  misc_feature (1)..(25): SEQ ID NO: 2068; WAN024GGL; Start 2; Stop 26
tgctagacagaagaatggggaactt

SEQ ID NO: 314046 - DNA, 25 bp, Artificial
  probe
  misc_feature (1)..(25): SEQ ID NO: 2069; WAN024B4I; Start 179; Stop 203
gagaagatgatgccagctaactaat

SEQ ID NO: 314047 - DNA, 25 bp, Artificial
  probe
  misc_feature (1)..(25): SEQ ID NO: 2069; WAN024B4I; Start 178; Stop 202
ggagaagatgatgccagctaactaa

SEQ ID NO: 314048 - DNA, 25 bp, Artificial
  probe
  misc_feature (1)..(25): SEQ ID NO: 2069; WAN024B4I; Start 20; Stop 44
atcgtccttttgtatctgagttttg

SEQ ID NO: 314049 - DNA, 25 bp, Artificial
  probe
  misc_feature (1)..(25): SEQ ID NO: 2069; WAN024B4I; Start 21; Stop 45
tcgtccttttgtatctgagttttgg

SEQ ID NO: 314050 - DNA, 25 bp, Artificial
  probe
  misc_feature (1)..(25): SEQ ID NO: 2069; WAN024B4I; Start 25; Stop 49
ccttttgtatctgagttttggaatg

SEQ ID NO: 314051 - DNA, 25 bp, Artificial
  probe
  misc_feature (1)..(25): SEQ ID NO: 2069; WAN024B4I; Start 2; Stop 26
tgctagagatatggaaatatcgtcc

SEQ ID NO: 314052 - DNA, 25 bp, Artificial
  probe
  misc_feature (1)..(25): SEQ ID NO: 2069; WAN024B4I; Start 19; Stop 43
tatcgtccttttgtatctgagtttt

SEQ ID NO: 314053 - DNA, 25 bp, Artificial
  probe
  misc_feature (1)..(25): SEQ ID NO: 2069; WAN024B4I; Start 3; Stop 27
gctagagatatggaaatatcgtcct

SEQ ID NO: 314054 - DNA, 25 bp, Artificial
  probe
  misc_feature (1)..(25): SEQ ID NO: 2069; WAN024B4I; Start 18; Stop 42
atatcgtccttttgtatctgagttt

SEQ ID NO: 314055 - DNA, 25 bp, Artificial
  probe
  misc_feature (1)..(25): SEQ ID NO: 2069; WAN024B4I; Start 17; Stop 41
aatatcgtccttttgtatctgagtt

SEQ ID NO: 314056 - DNA, 25 bp, Artificial
  probe
  misc_feature (1)..(25): SEQ ID NO: 2069; WAN024B4I; Start 16; Stop 40
aaatatcgtccttttgtatctgagt

SEQ ID NO: 314057 - DNA, 25 bp, Artificial
  probe
  misc_feature (1)..(25): SEQ ID NO: 2069; WAN024B4I; Start 26; Stop 50
cttttgtatctgagttttggaatga

SEQ ID NO: 314058 - DNA, 25 bp, Artificial
  probe
  misc_feature (1)..(25): SEQ ID NO: 2069; WAN024B4I; Start 15; Stop 39
gaaatatcgtccttttgtatctgag

SEQ ID NO: 314059 - DNA, 25 bp, Artificial
  probe
  misc_feature (1)..(25): SEQ ID NO: 2069; WAN024B4I; Start 99; Stop 123
tttgaccttaaaagatgatgatgac

SEQ ID NO: 314060 - DNA, 25 bp, Artificial
  probe
  misc_feature (1)..(25): SEQ ID NO: 2069; WAN024B4I; Start 23; Stop 47
gtccttttgtatctgagttttggaa

SEQ ID NO: 314061 - DNA, 25 bp, Artificial
  probe
  misc_feature (1)..(25): SEQ ID NO: 2069; WAN024B4I; Start 13; Stop 37
tggaaatatcgtccttttgtatctg

SEQ ID NO: 314062 - DNA, 25 bp, Artificial
  probe
  misc_feature (1)..(25): SEQ ID NO: 2069; WAN024B4I; Start 22; Stop 46
cgtccttttgtatctgagttttgga

SEQ ID NO: 314063 - DNA, 25 bp, Artificial
  probe
  misc_feature (1)..(25): SEQ ID NO: 2069; WAN024B4I; Start 1; Stop 25
atgctagagatatggaaatatcgtc

SEQ ID NO: 314064 - DNA, 25 bp, Artificial
  probe
  misc_feature (1)..(25): SEQ ID NO: 2069; WAN024B4I; Start 86; Stop 110
cgatttctctttatttgaccttaaa

SEQ ID NO: 314065 - DNA, 25 bp, Artificial
  probe
  misc_feature (1)..(25): SEQ ID NO: 2069; WAN024B4I; Start 14; Stop 38
ggaaatatcgtccttttgtatctga

SEQ ID NO: 314066 - DNA, 25 bp, Artificial
  probe
  misc_feature (1)..(25): SEQ ID NO: 2069; WAN024B4I; Start 24; Stop 48
tccttttgtatctgagttttggaat

SEQ ID NO: 314067 - DNA, 25 bp, Artificial
  probe
  misc_feature (1)..(25): SEQ ID NO: 2069; WAN024B4I; Start 177; Stop 201
gggagaagatgatgccagctaacta

SEQ ID NO: 314068 - DNA, 25 bp, Artificial
  probe
  misc_feature (1)..(25): SEQ ID NO: 2069; WAN024B4I; Start 30; Stop 54
tgtatctgagttttggaatgatttt

SEQ ID NO: 314069 - DNA, 25 bp, Artificial
  probe
  misc_feature (1)..(25): SEQ ID NO: 2069; WAN024B4I; Start 29; Stop 53
ttgtatctgagttttggaatgattt

SEQ ID NO: 314070 - DNA, 25 bp, Artificial
  probe
  misc_feature (1)..(25): SEQ ID NO: 2069; WAN024B4I; Start 28; Stop 52
tttgtatctgagttttggaatgatt

SEQ ID NO: 314071 - DNA, 25 bp, Artificial
  probe
  misc_feature (1)..(25): SEQ ID NO: 2069; WAN024B4I; Start 27; Stop 51
ttttgtatctgagttttggaatgat

SEQ ID NO: 314072 - DNA, 25 bp, Artificial
  probe
  misc_feature (1)..(25): SEQ ID NO: 2069; WAN024B4I; Start 12; Stop 36
atggaaatatcgtccttttgtatct

SEQ ID NO: 314073 - DNA, 25 bp, Artificial
  probe
  misc_feature (1)..(25): SEQ ID NO: 2069; WAN024B4I; Start 4; Stop 28
ctagagatatggaaatatcgtcctt

SEQ ID NO: 314074 - DNA, 25 bp, Artificial
  probe
  misc_feature (1)..(25): SEQ ID NO: 2069; WAN024B4I; Start 98; Stop 122
atttgaccttaaaagatgatgatga

SEQ ID NO: 314075 - DNA, 25 bp, Artificial
  probe
  misc_feature (1)..(25): SEQ ID NO: 2069; WAN024B4I; Start 5; Stop 29
tagagatatggaaatatcgtccttt

SEQ ID NO: 314076 - DNA, 25 bp, Artificial
  probe
  misc_feature (1)..(25): SEQ ID NO: 2069; WAN024B4I; Start 11; Stop 35
tatggaaatatcgtccttttgtatc

SEQ ID NO: 314077 - DNA, 25 bp, Artificial
  probe
  misc_feature (1)..(25): SEQ ID NO: 2069; WAN024B4I; Start 8; Stop 32
agatatggaaatatcgtccttttgt

SEQ ID NO: 314078 - DNA, 25 bp, Artificial
  probe
  misc_feature (1)..(25): SEQ ID NO: 2069; WAN024B4I; Start 7; Stop 31
gagatatggaaatatcgtccttttg

SEQ ID NO: 314079 - DNA, 25 bp, Artificial
  probe
  misc_feature (1)..(25): SEQ ID NO: 2070; WAN024CRU; Start 511; Stop 535
ggagataaggttcattactggacaa

SEQ ID NO: 314080 - DNA, 25 bp, Artificial
  probe
  misc_feature (1)..(25): SEQ ID NO: 2070; WAN024CRU; Start 509; Stop 533
ttggagataaggttcattactggac

SEQ ID NO: 314081 - DNA, 25 bp, Artificial
  probe
  misc_feature (1)..(25): SEQ ID NO: 2070; WAN024CRU; Start 461; Stop 485
atgtagtggagttattcgtgaagtt

SEQ ID NO: 314082 - DNA, 25 bp, Artificial
  probe
  misc_feature (1)..(25): SEQ ID NO: 2070; WAN024CRU; Start 510; Stop 534
tggagataaggttcattactggaca

SEQ ID NO: 314083 - DNA, 25 bp, Artificial
  probe
  misc_feature (1)..(25): SEQ ID NO: 2070; WAN024CRU; Start 720; Stop 744
gacacctgcttatccaagaagtaat

SEQ ID NO: 314084 - DNA, 25 bp, Artificial
  probe
  misc_feature (1)..(25): SEQ ID NO: 2070; WAN024CRU; Start 721; Stop 745
acacctgcttatccaagaagtaatt

SEQ ID NO: 314085 - DNA, 25 bp, Artificial
  probe
  misc_feature (1)..(25): SEQ ID NO: 2070; WAN024CRU; Start 722; Stop 746
cacctgcttatccaagaagtaattc

SEQ ID NO: 314086 - DNA, 25 bp, Artificial
  probe
  misc_feature (1)..(25): SEQ ID NO: 2070; WAN024CRU; Start 513; Stop 537
agataaggttcattactggacaact

SEQ ID NO: 314087 - DNA, 25 bp, Artificial
  probe
  misc_feature (1)..(25): SEQ ID NO: 2070; WAN024CRU; Start 512; Stop 536
gagataaggttcattactggacaac

SEQ ID NO: 314088 - DNA, 25 bp, Artificial
  probe
  misc_feature (1)..(25): SEQ ID NO: 2070; WAN024CRU; Start 514; Stop 538
gataaggttcattactggacaactt

SEQ ID NO: 314089 - DNA, 25 bp, Artificial
  probe
  misc_feature (1)..(25): SEQ ID NO: 2070; WAN024CRU; Start 719; Stop 743
tgacacctgcttatccaagaagtaa

SEQ ID NO: 314090 - DNA, 25 bp, Artificial
  probe
  misc_feature (1)..(25): SEQ ID NO: 2070; WAN024CRU; Start 460; Stop 484
catgtagtggagttattcgtgaagt

SEQ ID NO: 314091 - DNA, 25 bp, Artificial
  probe
  misc_feature (1)..(25): SEQ ID NO: 2070; WAN024CRU; Start 376; Stop 400
aaccagatggatcttgtgatgaatt

SEQ ID NO: 314092 - DNA, 25 bp, Artificial
  probe
  misc_feature (1)..(25): SEQ ID NO: 2070; WAN024CRU; Start 375; Stop 399
gaaccagatggatcttgtgatgaat

SEQ ID NO: 314093 - DNA, 25 bp, Artificial
  probe
  misc_feature (1)..(25): SEQ ID NO: 2070; WAN024CRU; Start 718; Stop 742
ttgacacctgcttatccaagaagta

SEQ ID NO: 314094 - DNA, 25 bp, Artificial
  probe
  misc_feature (1)..(25): SEQ ID NO: 2070; WAN024CRU; Start 1301; Stop 1325
ttgattgctggtcttggaataatgc

SEQ ID NO: 314095 - DNA, 25 bp, Artificial
  probe
  misc_feature (1)..(25): SEQ ID NO: 2070; WAN024CRU; Start 659; Stop 683
aagtgattcaactatatcgctcatt

SEQ ID NO: 314096 - DNA, 25 bp, Artificial
  probe
  misc_feature (1)..(25): SEQ ID NO: 2070; WAN024CRU; Start 374; Stop 398
agaaccagatggatcttgtgatgaa

SEQ ID NO: 314097 - DNA, 25 bp, Artificial
  probe
  misc_feature (1)..(25): SEQ ID NO: 2070; WAN024CRU; Start 660; Stop 684
agtgattcaactatatcgctcatta

SEQ ID NO: 314098 - DNA, 25 bp, Artificial
  probe
  misc_feature (1)..(25): SEQ ID NO: 2070; WAN024CRU; Start 1402; Stop 1426
tatcgcaaagtaagtgacaataacg

SEQ ID NO: 314099 - DNA, 25 bp, Artificial
  probe
  misc_feature (1)..(25): SEQ ID NO: 2070; WAN024CRU; Start 1300; Stop 1324
tttgattgctggtcttggaataatg

SEQ ID NO: 314100 - DNA, 25 bp, Artificial
  probe
  misc_feature (1)..(25): SEQ ID NO: 2070; WAN024CRU; Start 1298; Stop 1322
catttgattgctggtcttggaataa

SEQ ID NO: 314101 - DNA, 25 bp, Artificial
  probe
  misc_feature (1)..(25): SEQ ID NO: 2070; WAN024CRU; Start 1399; Stop 1423
tggtatcgcaaagtaagtgacaata

SEQ ID NO: 314102 - DNA, 25 bp, Artificial
  probe
  misc_feature (1)..(25): SEQ ID NO: 2070; WAN024CRU; Start 100; Stop 124
cctcagacagaaggtcaatatggaa

SEQ ID NO: 314103 - DNA, 25 bp, Artificial
  probe
  misc_feature (1)..(25): SEQ ID NO: 2070; WAN024CRU; Start 661; Stop 685
gtgattcaactatatcgctcattag

SEQ ID NO: 314104 - DNA, 25 bp, Artificial
  probe
  misc_feature (1)..(25): SEQ ID NO: 2070; WAN024CRU; Start 463; Stop 487
gtagtggagttattcgtgaagtttg

SEQ ID NO: 314105 - DNA, 25 bp, Artificial
  probe
  misc_feature (1)..(25): SEQ ID NO: 2070; WAN024CRU; Start 462; Stop 486
tgtagtggagttattcgtgaagttt

SEQ ID NO: 314106 - DNA, 25 bp, Artificial
  probe
  misc_feature (1)..(25): SEQ ID NO: 2070; WAN024CRU; Start 1244; Stop 1268
tacataaagccattgaagagggaag

SEQ ID NO: 314107 - DNA, 25 bp, Artificial
  probe
  misc_feature (1)..(25): SEQ ID NO: 2070; WAN024CRU; Start 1243; Stop 1267
ctacataaagccattgaagagggaa

SEQ ID NO: 314108 - DNA, 25 bp, Artificial
  probe
  misc_feature (1)..(25): SEQ ID NO: 2070; WAN024CRU; Start 1070; Stop 1094
ttccgaaagccatttatgatattgc

SEQ ID NO: 314109 - DNA, 25 bp, Artificial
  probe
  misc_feature (1)..(25): SEQ ID NO: 2070; WAN024CRU; Start 1400; Stop 1424
ggtatcgcaaagtaagtgacaataa

SEQ ID NO: 314110 - DNA, 25 bp, Artificial
  probe
  misc_feature (1)..(25): SEQ ID NO: 2070; WAN024CRU; Start 508; Stop 532
tttggagataaggttcattactgga

SEQ ID NO: 314111 - DNA, 25 bp, Artificial
  probe
  misc_feature (1)..(25): SEQ ID NO: 2070; WAN024CRU; Start 19; Stop 43
agaataatagaaaggaggttgagca

SEQ ID NO: 314112 - DNA, 25 bp, Artificial
  probe
  misc_feature (1)..(25): SEQ ID NO: 2071; WAN024GBX; Start 166; Stop 190
atgattctaaccaaatgtgattcca

SEQ ID NO: 314113 - DNA, 25 bp, Artificial
  probe
  misc_feature (1)..(25): SEQ ID NO: 2071; WAN024GBX; Start 167; Stop 191
tgattctaaccaaatgtgattccat

SEQ ID NO: 314114 - DNA, 25 bp, Artificial
  probe
  misc_feature (1)..(25): SEQ ID NO: 2071; WAN024GBX; Start 165; Stop 189
gatgattctaaccaaatgtgattcc

SEQ ID NO: 314115 - DNA, 25 bp, Artificial
  probe
  misc_feature (1)..(25): SEQ ID NO: 2071; WAN024GBX; Start 197; Stop 221
ttctccttcatttcttatcgttact

SEQ ID NO: 314116 - DNA, 25 bp, Artificial
  probe
  misc_feature (1)..(25): SEQ ID NO: 2071; WAN024GBX; Start 194; Stop 218
tgattctccttcatttcttatcgtt

SEQ ID NO: 314117 - DNA, 25 bp, Artificial
  probe
  misc_feature (1)..(25): SEQ ID NO: 2071; WAN024GBX; Start 193; Stop 217
ttgattctccttcatttcttatcgt

SEQ ID NO: 314118 - DNA, 25 bp, Artificial
  probe
  misc_feature (1)..(25): SEQ ID NO: 2071; WAN024GBX; Start 164; Stop 188
tgatgattctaaccaaatgtgattc

SEQ ID NO: 314119 - DNA, 25 bp, Artificial
  probe
  misc_feature (1)..(25): SEQ ID NO: 2071; WAN024GBX; Start 162; Stop 186
gttgatgattctaaccaaatgtgat

SEQ ID NO: 314120 - DNA, 25 bp, Artificial
  probe
  misc_feature (1)..(25): SEQ ID NO: 2071; WAN024GBX; Start 83; Stop 107
caacttctgcaacaacaactccttc

SEQ ID NO: 314121 - DNA, 25 bp, Artificial
  probe
  misc_feature (1)..(25): SEQ ID NO: 2071; WAN024GBX; Start 198; Stop 222
tctccttcatttcttatcgttacta

SEQ ID NO: 314122 - DNA, 25 bp, Artificial
  probe
  misc_feature (1)..(25): SEQ ID NO: 2071; WAN024GBX; Start 196; Stop 220
attctccttcatttcttatcgttac

SEQ ID NO: 314123 - DNA, 25 bp, Artificial
  probe
  misc_feature (1)..(25): SEQ ID NO: 2071; WAN024GBX; Start 192; Stop 216
tttgattctccttcatttcttatcg

SEQ ID NO: 314124 - DNA, 25 bp, Artificial
  probe
  misc_feature (1)..(25): SEQ ID NO: 2071; WAN024GBX; Start 163; Stop 187
ttgatgattctaaccaaatgtgatt

SEQ ID NO: 314125 - DNA, 25 bp, Artificial
  probe
  misc_feature (1)..(25): SEQ ID NO: 2071; WAN024GBX; Start 152; Stop 176
cttcaaggcggttgatgattctaac

SEQ ID NO: 314126 - DNA, 25 bp, Artificial
  probe
  misc_feature (1)..(25): SEQ ID NO: 2071; WAN024GBX; Start 195; Stop 219
gattctccttcatttcttatcgtta

SEQ ID NO: 314127 - DNA, 25 bp, Artificial
  probe
  misc_feature (1)..(25): SEQ ID NO: 2071; WAN024GBX; Start 181; Stop 205
tgtgattccattttgattctccttc

SEQ ID NO: 314128 - DNA, 25 bp, Artificial
  probe
  misc_feature (1)..(25): SEQ ID NO: 2071; WAN024GBX; Start 30; Stop 54
ttctacgtcacgaagggtaaagatt

SEQ ID NO: 314129 - DNA, 25 bp, Artificial
  probe
  misc_feature (1)..(25): SEQ ID NO: 2071; WAN024GBX; Start 180; Stop 204
atgtgattccattttgattctcctt

SEQ ID NO: 314130 - DNA, 25 bp, Artificial
  probe
  misc_feature (1)..(25): SEQ ID NO: 2071; WAN024GBX; Start 182; Stop 206
gtgattccattttgattctccttca

SEQ ID NO: 314131 - DNA, 25 bp, Artificial
  probe
  misc_feature (1)..(25): SEQ ID NO: 2071; WAN024GBX; Start 199; Stop 223
ctccttcatttcttatcgttactat

SEQ ID NO: 314132 - DNA, 25 bp, Artificial
  probe
  misc_feature (1)..(25): SEQ ID NO: 2071; WAN024GBX; Start 168; Stop 192
gattctaaccaaatgtgattccatt

SEQ ID NO: 314133 - DNA, 25 bp, Artificial
  probe
  misc_feature (1)..(25): SEQ ID NO: 2071; WAN024GBX; Start 31; Stop 55
tctacgtcacgaagggtaaagattg

SEQ ID NO: 314134 - DNA, 25 bp, Artificial
  probe
  misc_feature (1)..(25): SEQ ID NO: 2071; WAN024GBX; Start 183; Stop 207
tgattccattttgattctccttcat

SEQ ID NO: 314135 - DNA, 25 bp, Artificial
  probe
  misc_feature (1)..(25): SEQ ID NO: 2071; WAN024GBX; Start 187; Stop 211
tccattttgattctccttcatttct

SEQ ID NO: 314136 - DNA, 25 bp, Artificial
  probe
  misc_feature (1)..(25): SEQ ID NO: 2071; WAN024GBX; Start 84; Stop 108
aacttctgcaacaacaactccttcg

SEQ ID NO: 314137 - DNA, 25 bp, Artificial
  probe
  misc_feature (1)..(25): SEQ ID NO: 2071; WAN024GBX; Start 188; Stop 212
ccattttgattctccttcatttctt

SEQ ID NO: 314138 - DNA, 25 bp, Artificial
  probe
  misc_feature (1)..(25): SEQ ID NO: 2071; WAN024GBX; Start 186; Stop 210
ttccattttgattctccttcatttc

SEQ ID NO: 314139 - DNA, 25 bp, Artificial
  probe
  misc_feature (1)..(25): SEQ ID NO: 2071; WAN024GBX; Start 32; Stop 56
ctacgtcacgaagggtaaagattgg

SEQ ID NO: 314140 - DNA, 25 bp, Artificial
  probe
  misc_feature (1)..(25): SEQ ID NO: 2071; WAN024GBX; Start 200; Stop 224
tccttcatttcttatcgttactatt

SEQ ID NO: 314141 - DNA, 25 bp, Artificial
  probe
  misc_feature (1)..(25): SEQ ID NO: 2071; WAN024GBX; Start 151; Stop 175
gcttcaaggcggttgatgattctaa

SEQ ID NO: 314142 - DNA, 25 bp, Artificial
  probe
  misc_feature (1)..(25): SEQ ID NO: 2071; WAN024GBX; Start 184; Stop 208
gattccattttgattctccttcatt

SEQ ID NO: 314143 - DNA, 25 bp, Artificial
  probe
  misc_feature (1)..(25): SEQ ID NO: 2071; WAN024GBX; Start 224; Stop 248
tttaccataaaggaggccaacttga

SEQ ID NO: 314144 - DNA, 25 bp, Artificial
  probe
  misc_feature (1)..(25): SEQ ID NO: 2071; WAN024GBX; Start 216; Stop 240
gttactattttaccataaaggaggc

SEQ ID NO: 314145 - DNA, 25 bp, Artificial
  probe
  misc_feature (1)..(25): SEQ ID NO: 2072; WAN024CM2; Start 136; Stop 160
gtagatgattcactagcaggagata

SEQ ID NO: 314146 - DNA, 25 bp, Artificial
  probe
  misc_feature (1)..(25): SEQ ID NO: 2072; WAN024CM2; Start 135; Stop 159
agtagatgattcactagcaggagat

SEQ ID NO: 314147 - DNA, 25 bp, Artificial
  probe
  misc_feature (1)..(25): SEQ ID NO: 2072; WAN024CM2; Start 137; Stop 161
tagatgattcactagcaggagatat

SEQ ID NO: 314148 - DNA, 25 bp, Artificial
  probe
  misc_feature (1)..(25): SEQ ID NO: 2072; WAN024CM2; Start 134; Stop 158
tagtagatgattcactagcaggaga

SEQ ID NO: 314149 - DNA, 25 bp, Artificial
  probe
  misc_feature (1)..(25): SEQ ID NO: 2072; WAN024CM2; Start 133; Stop 157
ttagtagatgattcactagcaggag

SEQ ID NO: 314150 - DNA, 25 bp, Artificial
  probe
  misc_feature (1)..(25): SEQ ID NO: 2072; WAN024CM2; Start 132; Stop 156
attagtagatgattcactagcagga

SEQ ID NO: 314151 - DNA, 25 bp, Artificial
  probe
  misc_feature (1)..(25): SEQ ID NO: 2072; WAN024CM2; Start 138; Stop 162
agatgattcactagcaggagatatc

SEQ ID NO: 314152 - DNA, 25 bp, Artificial
  probe
  misc_feature (1)..(25): SEQ ID NO: 2072; WAN024CM2; Start 125; Stop 149
tggacttattagtagatgattcact

SEQ ID NO: 314153 - DNA, 25 bp, Artificial
  probe
  misc_feature (1)..(25): SEQ ID NO: 2072; WAN024CM2; Start 131; Stop 155
tattagtagatgattcactagcagg

SEQ ID NO: 314154 - DNA, 25 bp, Artificial
  probe
  misc_feature (1)..(25): SEQ ID NO: 2072; WAN024CM2; Start 113; Stop 137
ccaagcgaaatatggacttattagt

SEQ ID NO: 314155 - DNA, 25 bp, Artificial
  probe
  misc_feature (1)..(25): SEQ ID NO: 2072; WAN024CM2; Start 139; Stop 163
gatgattcactagcaggagatatca

SEQ ID NO: 314156 - DNA, 25 bp, Artificial
  probe
  misc_feature (1)..(25): SEQ ID NO: 2072; WAN024CM2; Start 116; Stop 140
agcgaaatatggacttattagtaga

SEQ ID NO: 314157 - DNA, 25 bp, Artificial
  probe
  misc_feature (1)..(25): SEQ ID NO: 2072; WAN024CM2; Start 124; Stop 148
atggacttattagtagatgattcac

SEQ ID NO: 314158 - DNA, 25 bp, Artificial
  probe
  misc_feature (1)..(25): SEQ ID NO: 2072; WAN024CM2; Start 141; Stop 165
tgattcactagcaggagatatcatt

SEQ ID NO: 314159 - DNA, 25 bp, Artificial
  probe
  misc_feature (1)..(25): SEQ ID NO: 2072; WAN024CM2; Start 142; Stop 166
gattcactagcaggagatatcattt

SEQ ID NO: 314160 - DNA, 25 bp, Artificial
  probe
  misc_feature (1)..(25): SEQ ID NO: 2072; WAN024CM2; Start 114; Stop 138
caagcgaaatatggacttattagta

SEQ ID NO: 314161 - DNA, 25 bp, Artificial
  probe
  misc_feature (1)..(25): SEQ ID NO: 2072; WAN024CM2; Start 115; Stop 139
aagcgaaatatggacttattagtag

SEQ ID NO: 314162 - DNA, 25 bp, Artificial
  probe
  misc_feature (1)..(25): SEQ ID NO: 2072; WAN024CM2; Start 117; Stop 141
gcgaaatatggacttattagtagat

SEQ ID NO: 314163 - DNA, 25 bp, Artificial
  probe
  misc_feature (1)..(25): SEQ ID NO: 2072; WAN024CM2; Start 130; Stop 154
ttattagtagatgattcactagcag

SEQ ID NO: 314164 - DNA, 25 bp, Artificial
  probe
  misc_feature (1)..(25): SEQ ID NO: 2072; WAN024CM2; Start 129; Stop 153
cttattagtagatgattcactagca

SEQ ID NO: 314165 - DNA, 25 bp, Artificial
  probe
  misc_feature (1)..(25): SEQ ID NO: 2072; WAN024CM2; Start 128; Stop 152
acttattagtagatgattcactagc

SEQ ID NO: 314166 - DNA, 25 bp, Artificial
  probe
  misc_feature (1)..(25): SEQ ID NO: 2072; WAN024CM2; Start 126; Stop 150
ggacttattagtagatgattcacta

SEQ ID NO: 314167 - DNA, 25 bp, Artificial
  probe
  misc_feature (1)..(25): SEQ ID NO: 2072; WAN024CM2; Start 140; Stop 164
atgattcactagcaggagatatcat

SEQ ID NO: 314168 - DNA, 25 bp, Artificial
  probe
  misc_feature (1)..(25): SEQ ID NO: 2072; WAN024CM2; Start 79; Stop 103
ttggatacttggcttctaagtccca

SEQ ID NO: 314169 - DNA, 25 bp, Artificial
  probe
  misc_feature (1)..(25): SEQ ID NO: 2072; WAN024CM2; Start 145; Stop 169
tcactagcaggagatatcattttac

SEQ ID NO: 314170 - DNA, 25 bp, Artificial
  probe
  misc_feature (1)..(25): SEQ ID NO: 2072; WAN024CM2; Start 146; Stop 170
cactagcaggagatatcattttact

SEQ ID NO: 314171 - DNA, 25 bp, Artificial
  probe
  misc_feature (1)..(25): SEQ ID NO: 2072; WAN024CM2; Start 151; Stop 175
gcaggagatatcattttactatgga

SEQ ID NO: 314172 - DNA, 25 bp, Artificial
  probe
  misc_feature (1)..(25): SEQ ID NO: 2072; WAN024CM2; Start 150; Stop 174
agcaggagatatcattttactatgg

SEQ ID NO: 314173 - DNA, 25 bp, Artificial
  probe
  misc_feature (1)..(25): SEQ ID NO: 2072; WAN024CM2; Start 143; Stop 167
attcactagcaggagatatcatttt

SEQ ID NO: 314174 - DNA, 25 bp, Artificial
  probe
  misc_feature (1)..(25): SEQ ID NO: 2072; WAN024CM2; Start 144; Stop 168
ttcactagcaggagatatcatttta

SEQ ID NO: 314175 - DNA, 25 bp, Artificial
  probe
  misc_feature (1)..(25): SEQ ID NO: 2072; WAN024CM2; Start 118; Stop 142
cgaaatatggacttattagtagatg

SEQ ID NO: 314176 - DNA, 25 bp, Artificial
  probe
  misc_feature (1)..(25): SEQ ID NO: 2072; WAN024CM2; Start 147; Stop 171
actagcaggagatatcattttacta

SEQ ID NO: 314177 - DNA, 25 bp, Artificial
  probe
  misc_feature (1)..(25): SEQ ID NO: 2072; WAN024CM2; Start 80; Stop 104
tggatacttggcttctaagtcccaa

SEQ ID NO: 314178 - DNA, 25 bp, Artificial
  probe
  misc_feature (1)..(25): SEQ ID NO: 2073; WAN024BEI; Start 231; Stop 255
ttggtacaatatcggtatgtctagt

SEQ ID NO: 314179 - DNA, 25 bp, Artificial
  probe
  misc_feature (1)..(25): SEQ ID NO: 2073; WAN024BEI; Start 232; Stop 256
tggtacaatatcggtatgtctagta

SEQ ID NO: 314180 - DNA, 25 bp, Artificial
  probe
  misc_feature (1)..(25): SEQ ID NO: 2073; WAN024BEI; Start 533; Stop 557
gcaatctagtcggaacagttctctt

SEQ ID NO: 314181 - DNA, 25 bp, Artificial
  probe
  misc_feature (1)..(25): SEQ ID NO: 2073; WAN024BEI; Start 535; Stop 559
aatctagtcggaacagttctctttg

SEQ ID NO: 314182 - DNA, 25 bp, Artificial
  probe
  misc_feature (1)..(25): SEQ ID NO: 2073; WAN024BEI; Start 534; Stop 558
caatctagtcggaacagttctcttt

SEQ ID NO: 314183 - DNA, 25 bp, Artificial
  probe
  misc_feature (1)..(25): SEQ ID NO: 2073; WAN024BEI; Start 225; Stop 249
cagtctttggtacaatatcggtatg

SEQ ID NO: 314184 - DNA, 25 bp, Artificial
  probe
  misc_feature (1)..(25): SEQ ID NO: 2073; WAN024BEI; Start 303; Stop 327
tacagacaaggtaaatcctatgtgg

SEQ ID NO: 314185 - DNA, 25 bp, Artificial
  probe
  misc_feature (1)..(25): SEQ ID NO: 2073; WAN024BEI; Start 299; Stop 323
cccatacagacaaggtaaatcctat

SEQ ID NO: 314186 - DNA, 25 bp, Artificial
  probe
  misc_feature (1)..(25): SEQ ID NO: 2073; WAN024BEI; Start 226; Stop 250
agtctttggtacaatatcggtatgt

SEQ ID NO: 314187 - DNA, 25 bp, Artificial
  probe
  misc_feature (1)..(25): SEQ ID NO: 2073; WAN024BEI; Start 399; Stop 423
cctgctaccaaatccagaaatcttt

SEQ ID NO: 314188 - DNA, 25 bp, Artificial
  probe
  misc_feature (1)..(25): SEQ ID NO: 2073; WAN024BEI; Start 228; Stop 252
tctttggtacaatatcggtatgtct

SEQ ID NO: 314189 - DNA, 25 bp, Artificial
  probe
  misc_feature (1)..(25): SEQ ID NO: 2073; WAN024BEI; Start 227; Stop 251
gtctttggtacaatatcggtatgtc

SEQ ID NO: 314190 - DNA, 25 bp, Artificial
  probe
  misc_feature (1)..(25): SEQ ID NO: 2073; WAN024BEI; Start 233; Stop 257
ggtacaatatcggtatgtctagtat

SEQ ID NO: 314191 - DNA, 25 bp, Artificial
  probe
  misc_feature (1)..(25): SEQ ID NO: 2073; WAN024BEI; Start 550; Stop 574
gttctctttggagtggtcttgattg

SEQ ID NO: 314192 - DNA, 25 bp, Artificial
  probe
  misc_feature (1)..(25): SEQ ID NO: 2073; WAN024BEI; Start 549; Stop 573
agttctctttggagtggtcttgatt

SEQ ID NO: 314193 - DNA, 25 bp, Artificial
  probe
  misc_feature (1)..(25): SEQ ID NO: 2073; WAN024BEI; Start 331; Stop 355
cacggaaacaatcttaacagctatg

SEQ ID NO: 314194 - DNA, 25 bp, Artificial
  probe
  misc_feature (1)..(25): SEQ ID NO: 2073; WAN024BEI; Start 300; Stop 324
ccatacagacaaggtaaatcctatg

SEQ ID NO: 314195 - DNA, 25 bp, Artificial
  probe
  misc_feature (1)..(25): SEQ ID NO: 2073; WAN024BEI; Start 409; Stop 433
aatccagaaatctttgccttgattc

SEQ ID NO: 314196 - DNA, 25 bp, Artificial
  probe
  misc_feature (1)..(25): SEQ ID NO: 2073; WAN024BEI; Start 337; Stop 361
aacaatcttaacagctatgtggctt

SEQ ID NO: 314197 - DNA, 25 bp, Artificial
  probe
  misc_feature (1)..(25): SEQ ID NO: 2073; WAN024BEI; Start 408; Stop 432
aaatccagaaatctttgccttgatt

SEQ ID NO: 314198 - DNA, 25 bp, Artificial
  probe
  misc_feature (1)..(25): SEQ ID NO: 2073; WAN024BEI; Start 304; Stop 328
acagacaaggtaaatcctatgtgga

SEQ ID NO: 314199 - DNA, 25 bp, Artificial
  probe
  misc_feature (1)..(25): SEQ ID NO: 2073; WAN024BEI; Start 224; Stop 248
ccagtctttggtacaatatcggtat

SEQ ID NO: 314200 - DNA, 25 bp, Artificial
  probe
  misc_feature (1)..(25): SEQ ID NO: 2073; WAN024BEI; Start 536; Stop 560
atctagtcggaacagttctctttgg

SEQ ID NO: 314201 - DNA, 25 bp, Artificial
  probe
  misc_feature (1)..(25): SEQ ID NO: 2073; WAN024BEI; Start 298; Stop 322
gcccatacagacaaggtaaatccta

SEQ ID NO: 314202 - DNA, 25 bp, Artificial
  probe
  misc_feature (1)..(25): SEQ ID NO: 2073; WAN024BEI; Start 192; Stop 216
gagtttacacgcatcgacttatttc

SEQ ID NO: 314203 - DNA, 25 bp, Artificial
  probe
  misc_feature (1)..(25): SEQ ID NO: 2073; WAN024BEI; Start 548; Stop 572
cagttctctttggagtggtcttgat

SEQ ID NO: 314204 - DNA, 25 bp, Artificial
  probe
  misc_feature (1)..(25): SEQ ID NO: 2073; WAN024BEI; Start 338; Stop 362
acaatcttaacagctatgtggcttg

SEQ ID NO: 314205 - DNA, 25 bp, Artificial
  probe
  misc_feature (1)..(25): SEQ ID NO: 2073; WAN024BEI; Start 334; Stop 358
ggaaacaatcttaacagctatgtgg

SEQ ID NO: 314206 - DNA, 25 bp, Artificial
  probe
  misc_feature (1)..(25): SEQ ID NO: 2073; WAN024BEI; Start 302; Stop 326
atacagacaaggtaaatcctatgtg

SEQ ID NO: 314207 - DNA, 25 bp, Artificial
  probe
  misc_feature (1)..(25): SEQ ID NO: 2073; WAN024BEI; Start 301; Stop 325
catacagacaaggtaaatcctatgt

SEQ ID NO: 314208 - DNA, 25 bp, Artificial
  probe
  misc_feature (1)..(25): SEQ ID NO: 2073; WAN024BEI; Start 333; Stop 357
cggaaacaatcttaacagctatgtg

SEQ ID NO: 314209 - DNA, 25 bp, Artificial
  probe
  misc_feature (1)..(25): SEQ ID NO: 2073; WAN024BEI; Start 335; Stop 359
gaaacaatcttaacagctatgtggc

SEQ ID NO: 314210 - DNA, 25 bp, Artificial
  probe
  misc_feature (1)..(25): SEQ ID NO: 2073; WAN024BEI; Start 332; Stop 356
acggaaacaatcttaacagctatgt

SEQ ID NO: 314211 - DNA, 25 bp, Artificial
  probe
  misc_feature (1)..(25): SEQ ID NO: 2074; WAN024DJ3; Start 1772; Stop 1796
ggtgtctgctaatgctaatgtctaa

SEQ ID NO: 314212 - DNA, 25 bp, Artificial
  probe
  misc_feature (1)..(25): SEQ ID NO: 2074; WAN024DJ3; Start 430; Stop 454
ggtgattcagttggtaagagaagat

SEQ ID NO: 314213 - DNA, 25 bp, Artificial
  probe
  misc_feature (1)..(25): SEQ ID NO: 2074; WAN024DJ3; Start 1633; Stop 1657
cctatggctattcctaatactggtc

SEQ ID NO: 314214 - DNA, 25 bp, Artificial
  probe
  misc_feature (1)..(25): SEQ ID NO: 2074; WAN024DJ3; Start 1632; Stop 1656
tcctatggctattcctaatactggt

SEQ ID NO: 314215 - DNA, 25 bp, Artificial
  probe
  misc_feature (1)..(25): SEQ ID NO: 2074; WAN024DJ3; Start 1631; Stop 1655
gtcctatggctattcctaatactgg

SEQ ID NO: 314216 - DNA, 25 bp, Artificial
  probe
  misc_feature (1)..(25): SEQ ID NO: 2074; WAN024DJ3; Start 592; Stop 616
gatatggatgctaggatgaagatgt

SEQ ID NO: 314217 - DNA, 25 bp, Artificial
  probe
  misc_feature (1)..(25): SEQ ID NO: 2074; WAN024DJ3; Start 1771; Stop 1795
aggtgtctgctaatgctaatgtcta

SEQ ID NO: 314218 - DNA, 25 bp, Artificial
  probe
  misc_feature (1)..(25): SEQ ID NO: 2074; WAN024DJ3; Start 1378; Stop 1402
gaattacaggaacgacttcagtatg

SEQ ID NO: 314219 - DNA, 25 bp, Artificial
  probe
  misc_feature (1)..(25): SEQ ID NO: 2074; WAN024DJ3; Start 591; Stop 615
agatatggatgctaggatgaagatg

SEQ ID NO: 314220 - DNA, 25 bp, Artificial
  probe
  misc_feature (1)..(25): SEQ ID NO: 2074; WAN024DJ3; Start 590; Stop 614
cagatatggatgctaggatgaagat

SEQ ID NO: 314221 - DNA, 25 bp, Artificial
  probe
  misc_feature (1)..(25): SEQ ID NO: 2074; WAN024DJ3; Start 1635; Stop 1659
tatggctattcctaatactggtctg

SEQ ID NO: 314222 - DNA, 25 bp, Artificial
  probe
  misc_feature (1)..(25): SEQ ID NO: 2074; WAN024DJ3; Start 593; Stop 617
atatggatgctaggatgaagatgtt

SEQ ID NO: 314223 - DNA, 25 bp, Artificial
  probe
  misc_feature (1)..(25): SEQ ID NO: 2074; WAN024DJ3; Start 1641; Stop 1665
tattcctaatactggtctggtgctt

SEQ ID NO: 314224 - DNA, 25 bp, Artificial
  probe
  misc_feature (1)..(25): SEQ ID NO: 2074; WAN024DJ3; Start 1371; Stop 1395
attgcttgaattacaggaacgactt

SEQ ID NO: 314225 - DNA, 25 bp, Artificial
  probe
  misc_feature (1)..(25): SEQ ID NO: 2074; WAN024DJ3; Start 553; Stop 577
gccagtcagattgttaataagcaac

SEQ ID NO: 314226 - DNA, 25 bp, Artificial
  probe
  misc_feature (1)..(25): SEQ ID NO: 2074; WAN024DJ3; Start 252; Stop 276
aagacaagagttgattacctatcgc

SEQ ID NO: 314227 - DNA, 25 bp, Artificial
  probe
  misc_feature (1)..(25): SEQ ID NO: 2074; WAN024DJ3; Start 561; Stop 585
gattgttaataagcaactgtcaggt

SEQ ID NO: 314228 - DNA, 25 bp, Artificial
  probe
  misc_feature (1)..(25): SEQ ID NO: 2074; WAN024DJ3; Start 1610; Stop 1634
tgttatctcacttccagaatagtcc

SEQ ID NO: 314229 - DNA, 25 bp, Artificial
  probe
  misc_feature (1)..(25): SEQ ID NO: 2074; WAN024DJ3; Start 1634; Stop 1658
ctatggctattcctaatactggtct

SEQ ID NO: 314230 - DNA, 25 bp, Artificial
  probe
  misc_feature (1)..(25): SEQ ID NO: 2074; WAN024DJ3; Start 1563; Stop 1587
ccaatatcagaagaatgtgagtgac

SEQ ID NO: 314231 - DNA, 25 bp, Artificial
  probe
  misc_feature (1)..(25): SEQ ID NO: 2074; WAN024DJ3; Start 1562; Stop 1586
tccaatatcagaagaatgtgagtga

SEQ ID NO: 314232 - DNA, 25 bp, Artificial
  probe
  misc_feature (1)..(25): SEQ ID NO: 2074; WAN024DJ3; Start 431; Stop 455
gtgattcagttggtaagagaagatt

SEQ ID NO: 314233 - DNA, 25 bp, Artificial
  probe
  misc_feature (1)..(25): SEQ ID NO: 2074; WAN024DJ3; Start 1611; Stop 1635
gttatctcacttccagaatagtcct

SEQ ID NO: 314234 - DNA, 25 bp, Artificial
  probe
  misc_feature (1)..(25): SEQ ID NO: 2074; WAN024DJ3; Start 560; Stop 584
agattgttaataagcaactgtcagg

SEQ ID NO: 314235 - DNA, 25 bp, Artificial
  probe
  misc_feature (1)..(25): SEQ ID NO: 2074; WAN024DJ3; Start 554; Stop 578
ccagtcagattgttaataagcaact

SEQ ID NO: 314236 - DNA, 25 bp, Artificial
  probe
  misc_feature (1)..(25): SEQ ID NO: 2074; WAN024DJ3; Start 429; Stop 453
tggtgattcagttggtaagagaaga

SEQ ID NO: 314237 - DNA, 25 bp, Artificial
  probe
  misc_feature (1)..(25): SEQ ID NO: 2074; WAN024DJ3; Start 629; Stop 653
tgttatctcttataggtcaggagca

SEQ ID NO: 314238 - DNA, 25 bp, Artificial
  probe
  misc_feature (1)..(25): SEQ ID NO: 2074; WAN024DJ3; Start 1640; Stop 1664
ctattcctaatactggtctggtgct

SEQ ID NO: 314239 - DNA, 25 bp, Artificial
  probe
  misc_feature (1)..(25): SEQ ID NO: 2074; WAN024DJ3; Start 257; Stop 281
aagagttgattacctatcgccttct

SEQ ID NO: 314240 - DNA, 25 bp, Artificial
  probe
  misc_feature (1)..(25): SEQ ID NO: 2074; WAN024DJ3; Start 562; Stop 586
attgttaataagcaactgtcaggtt

SEQ ID NO: 314241 - DNA, 25 bp, Artificial
  probe
  misc_feature (1)..(25): SEQ ID NO: 2074; WAN024DJ3; Start 16; Stop 40
cgagaagaacaattattgaaggctt

SEQ ID NO: 314242 - DNA, 25 bp, Artificial
  probe
  misc_feature (1)..(25): SEQ ID NO: 2074; WAN024DJ3; Start 14; Stop 38
aacgagaagaacaattattgaaggc

SEQ ID NO: 314243 - DNA, 25 bp, Artificial
  probe
  misc_feature (1)..(25): SEQ ID NO: 2074; WAN024DJ3; Start 1636; Stop 1660
atggctattcctaatactggtctgg

SEQ ID NO: 314244 - DNA, 25 bp, Artificial
  probe
  misc_feature (1)..(25): SEQ ID NO: 2075; WAN024DVS; Start 74; Stop 98
ttatgattcaccgtccgttagttac

SEQ ID NO: 314245 - DNA, 25 bp, Artificial
  probe
  misc_feature (1)..(25): SEQ ID NO: 2075; WAN024DVS; Start 13; Stop 37
caagcattactggtgacattagttg

SEQ ID NO: 314246 - DNA, 25 bp, Artificial
  probe
  misc_feature (1)..(25): SEQ ID NO: 2075; WAN024DVS; Start 12; Stop 36
acaagcattactggtgacattagtt

SEQ ID NO: 314247 - DNA, 25 bp, Artificial
  probe
  misc_feature (1)..(25): SEQ ID NO: 2075; WAN024DVS; Start 160; Stop 184
cttgaattaacttggctcggtgtaa

SEQ ID NO: 314248 - DNA, 25 bp, Artificial
  probe
  misc_feature (1)..(25): SEQ ID NO: 2075; WAN024DVS; Start 747; Stop 771
tgatgttgaggaggatcttgatcta

SEQ ID NO: 314249 - DNA, 25 bp, Artificial
  probe
  misc_feature (1)..(25): SEQ ID NO: 2075; WAN024DVS; Start 75; Stop 99
tatgattcaccgtccgttagttaca

SEQ ID NO: 314250 - DNA, 25 bp, Artificial
  probe
  misc_feature (1)..(25): SEQ ID NO: 2075; WAN024DVS; Start 744; Stop 768
tagtgatgttgaggaggatcttgat

SEQ ID NO: 314251 - DNA, 25 bp, Artificial
  probe
  misc_feature (1)..(25): SEQ ID NO: 2075; WAN024DVS; Start 638; Stop 662
gttctgtgtatggaggaatgtcaac

SEQ ID NO: 314252 - DNA, 25 bp, Artificial
  probe
  misc_feature (1)..(25): SEQ ID NO: 2075; WAN024DVS; Start 14; Stop 38
aagcattactggtgacattagttgg

SEQ ID NO: 314253 - DNA, 25 bp, Artificial
  probe
  misc_feature (1)..(25): SEQ ID NO: 2075; WAN024DVS; Start 161; Stop 185
ttgaattaacttggctcggtgtaac

SEQ ID NO: 314254 - DNA, 25 bp, Artificial
  probe
  misc_feature (1)..(25): SEQ ID NO: 2075; WAN024DVS; Start 741; Stop 765
aagtagtgatgttgaggaggatctt

SEQ ID NO: 314255 - DNA, 25 bp, Artificial
  probe
  misc_feature (1)..(25): SEQ ID NO: 2075; WAN024DVS; Start 48; Stop 72
cactattgactataatggaccgtta

SEQ ID NO: 314256 - DNA, 25 bp, Artificial
  probe
  misc_feature (1)..(25): SEQ ID NO: 2075; WAN024DVS; Start 637; Stop 661
tgttctgtgtatggaggaatgtcaa

SEQ ID NO: 314257 - DNA, 25 bp, Artificial
  probe
  misc_feature (1)..(25): SEQ ID NO: 2075; WAN024DVS; Start 636; Stop 660
ttgttctgtgtatggaggaatgtca

SEQ ID NO: 314258 - DNA, 25 bp, Artificial
  probe
  misc_feature (1)..(25): SEQ ID NO: 2075; WAN024DVS; Start 743; Stop 767
gtagtgatgttgaggaggatcttga

SEQ ID NO: 314259 - DNA, 25 bp, Artificial
  probe
  misc_feature (1)..(25): SEQ ID NO: 2075; WAN024DVS; Start 742; Stop 766
agtagtgatgttgaggaggatcttg

SEQ ID NO: 314260 - DNA, 25 bp, Artificial
  probe
  misc_feature (1)..(25): SEQ ID NO: 2075; WAN024DVS; Start 163; Stop 187
gaattaacttggctcggtgtaacag

SEQ ID NO: 314261 - DNA, 25 bp, Artificial
  probe
  misc_feature (1)..(25): SEQ ID NO: 2075; WAN024DVS; Start 159; Stop 183
tcttgaattaacttggctcggtgta

SEQ ID NO: 314262 - DNA, 25 bp, Artificial
  probe
  misc_feature (1)..(25): SEQ ID NO: 2075; WAN024DVS; Start 693; Stop 717
agcatacttctacgatatgattgga

SEQ ID NO: 314263 - DNA, 25 bp, Artificial
  probe
  misc_feature (1)..(25): SEQ ID NO: 2075; WAN024DVS; Start 76; Stop 100
atgattcaccgtccgttagttacaa

SEQ ID NO: 314264 - DNA, 25 bp, Artificial
  probe
  misc_feature (1)..(25): SEQ ID NO: 2075; WAN024DVS; Start 746; Stop 770
gtgatgttgaggaggatcttgatct

SEQ ID NO: 314265 - DNA, 25 bp, Artificial
  probe
  misc_feature (1)..(25): SEQ ID NO: 2075; WAN024DVS; Start 745; Stop 769
agtgatgttgaggaggatcttgatc

SEQ ID NO: 314266 - DNA, 25 bp, Artificial
  probe
  misc_feature (1)..(25): SEQ ID NO: 2075; WAN024DVS; Start 740; Stop 764
caagtagtgatgttgaggaggatct

SEQ ID NO: 314267 - DNA, 25 bp, Artificial
  probe
  misc_feature (1)..(25): SEQ ID NO: 2075; WAN024DVS; Start 11; Stop 35
cacaagcattactggtgacattagt

SEQ ID NO: 314268 - DNA, 25 bp, Artificial
  probe
  misc_feature (1)..(25): SEQ ID NO: 2075; WAN024DVS; Start 10; Stop 34
acacaagcattactggtgacattag

SEQ ID NO: 314269 - DNA, 25 bp, Artificial
  probe
  misc_feature (1)..(25): SEQ ID NO: 2075; WAN024DVS; Start 47; Stop 71
ccactattgactataatggaccgtt

SEQ ID NO: 314270 - DNA, 25 bp, Artificial
  probe
  misc_feature (1)..(25): SEQ ID NO: 2075; WAN024DVS; Start 694; Stop 718
gcatacttctacgatatgattggaa

SEQ ID NO: 314271 - DNA, 25 bp, Artificial
  probe
  misc_feature (1)..(25): SEQ ID NO: 2075; WAN024DVS; Start 44; Stop 68
ttgccactattgactataatggacc

SEQ ID NO: 314272 - DNA, 25 bp, Artificial
  probe
  misc_feature (1)..(25): SEQ ID NO: 2075; WAN024DVS; Start 612; Stop 636
ggtattcttgttgattggattcatt

SEQ ID NO: 314273 - DNA, 25 bp, Artificial
  probe
  misc_feature (1)..(25): SEQ ID NO: 2075; WAN024DVS; Start 639; Stop 663
ttctgtgtatggaggaatgtcaacc

SEQ ID NO: 314274 - DNA, 25 bp, Artificial
  probe
  misc_feature (1)..(25): SEQ ID NO: 2075; WAN024DVS; Start 9; Stop 33
cacacaagcattactggtgacatta

SEQ ID NO: 314275 - DNA, 25 bp, Artificial
  probe
  misc_feature (1)..(25): SEQ ID NO: 2075; WAN024DVS; Start 162; Stop 186
tgaattaacttggctcggtgtaaca

SEQ ID NO: 314276 - DNA, 25 bp, Artificial
  probe
  misc_feature (1)..(25): SEQ ID NO: 2075; WAN024DVS; Start 609; Stop 633
gtgggtattcttgttgattggattc

SEQ ID NO: 314277 - DNA, 25 bp, Artificial
  probe
  misc_feature (1)..(25): SEQ ID NO: 2076; WAN024CP5; Start 192; Stop 216
taacctcaactgtatgctcaaccat

SEQ ID NO: 314278 - DNA, 25 bp, Artificial
  probe
  misc_feature (1)..(25): SEQ ID NO: 2076; WAN024CP5; Start 191; Stop 215
ttaacctcaactgtatgctcaacca

SEQ ID NO: 314279 - DNA, 25 bp, Artificial
  probe
  misc_feature (1)..(25): SEQ ID NO: 2076; WAN024CP5; Start 195; Stop 219
cctcaactgtatgctcaaccatata

SEQ ID NO: 314280 - DNA, 25 bp, Artificial
  probe
  misc_feature (1)..(25): SEQ ID NO: 2076; WAN024CP5; Start 194; Stop 218
acctcaactgtatgctcaaccatat

SEQ ID NO: 314281 - DNA, 25 bp, Artificial
  probe
  misc_feature (1)..(25): SEQ ID NO: 2076; WAN024CP5; Start 81; Stop 105
acaaatcttccaaggtatagccatt

SEQ ID NO: 314282 - DNA, 25 bp, Artificial
  probe
  misc_feature (1)..(25): SEQ ID NO: 2076; WAN024CP5; Start 80; Stop 104
aacaaatcttccaaggtatagccat

SEQ ID NO: 314283 - DNA, 25 bp, Artificial
  probe
  misc_feature (1)..(25): SEQ ID NO: 2076; WAN024CP5; Start 78; Stop 102
caaacaaatcttccaaggtatagcc

SEQ ID NO: 314284 - DNA, 25 bp, Artificial
  probe
  misc_feature (1)..(25): SEQ ID NO: 2076; WAN024CP5; Start 79; Stop 103
aaacaaatcttccaaggtatagcca

SEQ ID NO: 314285 - DNA, 25 bp, Artificial
  probe
  misc_feature (1)..(25): SEQ ID NO: 2076; WAN024CP5; Start 216; Stop 240
tatatggaagtcgaacgagtggaat

SEQ ID NO: 314286 - DNA, 25 bp, Artificial
  probe
  misc_feature (1)..(25): SEQ ID NO: 2076; WAN024CP5; Start 215; Stop 239
atatatggaagtcgaacgagtggaa

SEQ ID NO: 314287 - DNA, 25 bp, Artificial
  probe
  misc_feature (1)..(25): SEQ ID NO: 2076; WAN024CP5; Start 76; Stop 100
cgcaaacaaatcttccaaggtatag

SEQ ID NO: 314288 - DNA, 25 bp, Artificial
  probe
  misc_feature (1)..(25): SEQ ID NO: 2076; WAN024CP5; Start 65; Stop 89
tacttaatcgtcgcaaacaaatctt

SEQ ID NO: 314289 - DNA, 25 bp, Artificial
  probe
  misc_feature (1)..(25): SEQ ID NO: 2076; WAN024CP5; Start 77; Stop 101
gcaaacaaatcttccaaggtatagc

SEQ ID NO: 314290 - DNA, 25 bp, Artificial
  probe
  misc_feature (1)..(25): SEQ ID NO: 2076; WAN024CP5; Start 75; Stop 99
tcgcaaacaaatcttccaaggtata

SEQ ID NO: 314291 - DNA, 25 bp, Artificial
  probe
  misc_feature (1)..(25): SEQ ID NO: 2076; WAN024CP5; Start 193; Stop 217
aacctcaactgtatgctcaaccata

SEQ ID NO: 314292 - DNA, 25 bp, Artificial
  probe
  misc_feature (1)..(25): SEQ ID NO: 2076; WAN024CP5; Start 66; Stop 90
acttaatcgtcgcaaacaaatcttc

SEQ ID NO: 314293 - DNA, 25 bp, Artificial
  probe
  misc_feature (1)..(25): SEQ ID NO: 2076; WAN024CP5; Start 196; Stop 220
ctcaactgtatgctcaaccatatat

SEQ ID NO: 314294 - DNA, 25 bp, Artificial
  probe
  misc_feature (1)..(25): SEQ ID NO: 2076; WAN024CP5; Start 190; Stop 214
tttaacctcaactgtatgctcaacc

SEQ ID NO: 314295 - DNA, 25 bp, Artificial
  probe
  misc_feature (1)..(25): SEQ ID NO: 2076; WAN024CP5; Start 67; Stop 91
cttaatcgtcgcaaacaaatcttcc

SEQ ID NO: 314296 - DNA, 25 bp, Artificial
  probe
  misc_feature (1)..(25): SEQ ID NO: 2076; WAN024CP5; Start 64; Stop 88
gtacttaatcgtcgcaaacaaatct

SEQ ID NO: 314297 - DNA, 25 bp, Artificial
  probe
  misc_feature (1)..(25): SEQ ID NO: 2076; WAN024CP5; Start 217; Stop 241
atatggaagtcgaacgagtggaatt

SEQ ID NO: 314298 - DNA, 25 bp, Artificial
  probe
  misc_feature (1)..(25): SEQ ID NO: 2076; WAN024CP5; Start 69; Stop 93
taatcgtcgcaaacaaatcttccaa

SEQ ID NO: 314299 - DNA, 25 bp, Artificial
  probe
  misc_feature (1)..(25): SEQ ID NO: 2076; WAN024CP5; Start 68; Stop 92
ttaatcgtcgcaaacaaatcttcca

SEQ ID NO: 314300 - DNA, 25 bp, Artificial
  probe
  misc_feature (1)..(25): SEQ ID NO: 2076; WAN024CP5; Start 83; Stop 107
aaatcttccaaggtatagccatttg

SEQ ID NO: 314301 - DNA, 25 bp, Artificial
  probe
  misc_feature (1)..(25): SEQ ID NO: 2076; WAN024CP5; Start 82; Stop 106
caaatcttccaaggtatagccattt

SEQ ID NO: 314302 - DNA, 25 bp, Artificial
  probe
  misc_feature (1)..(25): SEQ ID NO: 2076; WAN024CP5; Start 74; Stop 98
gtcgcaaacaaatcttccaaggtat

SEQ ID NO: 314303 - DNA, 25 bp, Artificial
  probe
  misc_feature (1)..(25): SEQ ID NO: 2076; WAN024CP5; Start 287; Stop 311
ccagttggatttgctttaacatctg

SEQ ID NO: 314304 - DNA, 25 bp, Artificial
  probe
  misc_feature (1)..(25): SEQ ID NO: 2076; WAN024CP5; Start 288; Stop 312
cagttggatttgctttaacatctgc

SEQ ID NO: 314305 - DNA, 25 bp, Artificial
  probe
  misc_feature (1)..(25): SEQ ID NO: 2076; WAN024CP5; Start 102; Stop 126
catttggagctttgtatgtgtgatc

SEQ ID NO: 314306 - DNA, 25 bp, Artificial
  probe
  misc_feature (1)..(25): SEQ ID NO: 2076; WAN024CP5; Start 291; Stop 315
ttggatttgctttaacatctgcgtc

SEQ ID NO: 314307 - DNA, 25 bp, Artificial
  probe
  misc_feature (1)..(25): SEQ ID NO: 2076; WAN024CP5; Start 70; Stop 94
aatcgtcgcaaacaaatcttccaag

SEQ ID NO: 314308 - DNA, 25 bp, Artificial
  probe
  misc_feature (1)..(25): SEQ ID NO: 2076; WAN024CP5; Start 24; Stop 48
catcattagaatgtggacgttcgtc

SEQ ID NO: 314309 - DNA, 25 bp, Artificial
  probe
  misc_feature (1)..(25): SEQ ID NO: 2076; WAN024CP5; Start 289; Stop 313
agttggatttgctttaacatctgcg

SEQ ID NO: 314310 - DNA, 25 bp, Artificial
  probe
  misc_feature (1)..(25): SEQ ID NO: 2077; WAN024F2Y; Start 74; Stop 98
gaattatcaactcacgcatcgacta

SEQ ID NO: 314311 - DNA, 25 bp, Artificial
  probe
  misc_feature (1)..(25): SEQ ID NO: 2077; WAN024F2Y; Start 75; Stop 99
aattatcaactcacgcatcgactac

SEQ ID NO: 314312 - DNA, 25 bp, Artificial
  probe
  misc_feature (1)..(25): SEQ ID NO: 2077; WAN024F2Y; Start 57; Stop 81
agaagtccataccctgagaattatc

SEQ ID NO: 314313 - DNA, 25 bp, Artificial
  probe
  misc_feature (1)..(25): SEQ ID NO: 2077; WAN024F2Y; Start 55; Stop 79
aaagaagtccataccctgagaatta

SEQ ID NO: 314314 - DNA, 25 bp, Artificial
  probe
  misc_feature (1)..(25): SEQ ID NO: 2077; WAN024F2Y; Start 56; Stop 80
aagaagtccataccctgagaattat

SEQ ID NO: 314315 - DNA, 25 bp, Artificial
  probe
  misc_feature (1)..(25): SEQ ID NO: 2077; WAN024F2Y; Start 61; Stop 85
gtccataccctgagaattatcaact

SEQ ID NO: 314316 - DNA, 25 bp, Artificial
  probe
  misc_feature (1)..(25): SEQ ID NO: 2077; WAN024F2Y; Start 60; Stop 84
agtccataccctgagaattatcaac

SEQ ID NO: 314317 - DNA, 25 bp, Artificial
  probe
  misc_feature (1)..(25): SEQ ID NO: 2077; WAN024F2Y; Start 58; Stop 82
gaagtccataccctgagaattatca

SEQ ID NO: 314318 - DNA, 25 bp, Artificial
  probe
  misc_feature (1)..(25): SEQ ID NO: 2077; WAN024F2Y; Start 1; Stop 25
atgctcagaatgattgtctctaaac

SEQ ID NO: 314319 - DNA, 25 bp, Artificial
  probe
  misc_feature (1)..(25): SEQ ID NO: 2077; WAN024F2Y; Start 62; Stop 86
tccataccctgagaattatcaactc

SEQ ID NO: 314320 - DNA, 25 bp, Artificial
  probe
  misc_feature (1)..(25): SEQ ID NO: 2077; WAN024F2Y; Start 59; Stop 83
aagtccataccctgagaattatcaa

SEQ ID NO: 314321 - DNA, 25 bp, Artificial
  probe
  misc_feature (1)..(25): SEQ ID NO: 2077; WAN024F2Y; Start 15; Stop 39
tgtctctaaacaatacctgctcttt

SEQ ID NO: 314322 - DNA, 25 bp, Artificial
  probe
  misc_feature (1)..(25): SEQ ID NO: 2077; WAN024F2Y; Start 2; Stop 26
tgctcagaatgattgtctctaaaca

SEQ ID NO: 314323 - DNA, 25 bp, Artificial
  probe
  misc_feature (1)..(25): SEQ ID NO: 2077; WAN024F2Y; Start 73; Stop 97
agaattatcaactcacgcatcgact

SEQ ID NO: 314324 - DNA, 25 bp, Artificial
  probe
  misc_feature (1)..(25): SEQ ID NO: 2077; WAN024F2Y; Start 72; Stop 96
gagaattatcaactcacgcatcgac

SEQ ID NO: 314325 - DNA, 25 bp, Artificial
  probe
  misc_feature (1)..(25): SEQ ID NO: 2077; WAN024F2Y; Start 76; Stop 100
attatcaactcacgcatcgactacc

SEQ ID NO: 314326 - DNA, 25 bp, Artificial
  probe
  misc_feature (1)..(25): SEQ ID NO: 2077; WAN024F2Y; Start 78; Stop 102
tatcaactcacgcatcgactaccta

SEQ ID NO: 314327 - DNA, 25 bp, Artificial
  probe
  misc_feature (1)..(25): SEQ ID NO: 2077; WAN024F2Y; Start 27; Stop 51
atacctgctcttttacctcattcat

SEQ ID NO: 314328 - DNA, 25 bp, Artificial
  probe
  misc_feature (1)..(25): SEQ ID NO: 2077; WAN024F2Y; Start 26; Stop 50
aatacctgctcttttacctcattca

SEQ ID NO: 314329 - DNA, 25 bp, Artificial
  probe
  misc_feature (1)..(25): SEQ ID NO: 2077; WAN024F2Y; Start 25; Stop 49
caatacctgctcttttacctcattc

SEQ ID NO: 314330 - DNA, 25 bp, Artificial
  probe
  misc_feature (1)..(25): SEQ ID NO: 2077; WAN024F2Y; Start 24; Stop 48
acaatacctgctcttttacctcatt

SEQ ID NO: 314331 - DNA, 25 bp, Artificial
  probe
  misc_feature (1)..(25): SEQ ID NO: 2077; WAN024F2Y; Start 23; Stop 47
aacaatacctgctcttttacctcat

SEQ ID NO: 314332 - DNA, 25 bp, Artificial
  probe
  misc_feature (1)..(25): SEQ ID NO: 2077; WAN024F2Y; Start 22; Stop 46
aaacaatacctgctcttttacctca

SEQ ID NO: 314333 - DNA, 25 bp, Artificial
  probe
  misc_feature (1)..(25): SEQ ID NO: 2077; WAN024F2Y; Start 79; Stop 103
atcaactcacgcatcgactacctaa

SEQ ID NO: 314334 - DNA, 25 bp, Artificial
  probe
  misc_feature (1)..(25): SEQ ID NO: 2077; WAN024F2Y; Start 77; Stop 101
ttatcaactcacgcatcgactacct

SEQ ID NO: 314335 - DNA, 25 bp, Artificial
  probe
  misc_feature (1)..(25): SEQ ID NO: 2077; WAN024F2Y; Start 54; Stop 78
aaaagaagtccataccctgagaatt

SEQ ID NO: 314336 - DNA, 25 bp, Artificial
  probe
  misc_feature (1)..(25): SEQ ID NO: 2077; WAN024F2Y; Start 16; Stop 40
gtctctaaacaatacctgctctttt

SEQ ID NO: 314337 - DNA, 25 bp, Artificial
  probe
  misc_feature (1)..(25): SEQ ID NO: 2077; WAN024F2Y; Start 69; Stop 93
cctgagaattatcaactcacgcatc

SEQ ID NO: 314338 - DNA, 25 bp, Artificial
  probe
  misc_feature (1)..(25): SEQ ID NO: 2077; WAN024F2Y; Start 21; Stop 45
taaacaatacctgctcttttacctc

SEQ ID NO: 314339 - DNA, 25 bp, Artificial
  probe
  misc_feature (1)..(25): SEQ ID NO: 2077; WAN024F2Y; Start 20; Stop 44
ctaaacaatacctgctcttttacct

SEQ ID NO: 314340 - DNA, 25 bp, Artificial
  probe
  misc_feature (1)..(25): SEQ ID NO: 2077; WAN024F2Y; Start 19; Stop 43
tctaaacaatacctgctcttttacc

SEQ ID NO: 314341 - DNA, 25 bp, Artificial
  probe
  misc_feature (1)..(25): SEQ ID NO: 2077; WAN024F2Y; Start 28; Stop 52
tacctgctcttttacctcattcatg

SEQ ID NO: 314342 - DNA, 25 bp, Artificial
  probe
  misc_feature (1)..(25): SEQ ID NO: 2077; WAN024F2Y; Start 70; Stop 94
ctgagaattatcaactcacgcatcg

SEQ ID NO: 314343 - DNA, 25 bp, Artificial
  probe
  misc_feature (1)..(25): SEQ ID NO: 2078; WAN024C9Y; Start 142; Stop 166
gatattgtgttgcttgctcttagac

SEQ ID NO: 314344 - DNA, 25 bp, Artificial
  probe
  misc_feature (1)..(25): SEQ ID NO: 2078; WAN024C9Y; Start 141; Stop 165
cgatattgtgttgcttgctcttaga

SEQ ID NO: 314345 - DNA, 25 bp, Artificial
  probe
  misc_feature (1)..(25): SEQ ID NO: 2078; WAN024C9Y; Start 143; Stop 167
atattgtgttgcttgctcttagaca

SEQ ID NO: 314346 - DNA, 25 bp, Artificial
  probe
  misc_feature (1)..(25): SEQ ID NO: 2078; WAN024C9Y; Start 232; Stop 256
ctgaaccttctcgataacactctta

SEQ ID NO: 314347 - DNA, 25 bp, Artificial
  probe
  misc_feature (1)..(25): SEQ ID NO: 2078; WAN024C9Y; Start 38; Stop 62
tcgataatgacataaccttctgcaa

SEQ ID NO: 314348 - DNA, 25 bp, Artificial
  probe
  misc_feature (1)..(25): SEQ ID NO: 2078; WAN024C9Y; Start 231; Stop 255
tctgaaccttctcgataacactctt

SEQ ID NO: 314349 - DNA, 25 bp, Artificial
  probe
  misc_feature (1)..(25): SEQ ID NO: 2078; WAN024C9Y; Start 230; Stop 254
ttctgaaccttctcgataacactct

SEQ ID NO: 314350 - DNA, 25 bp, Artificial
  probe
  misc_feature (1)..(25): SEQ ID NO: 2078; WAN024C9Y; Start 233; Stop 257
tgaaccttctcgataacactcttat

SEQ ID NO: 314351 - DNA, 25 bp, Artificial
  probe
  misc_feature (1)..(25): SEQ ID NO: 2078; WAN024C9Y; Start 39; Stop 63
cgataatgacataaccttctgcaat

SEQ ID NO: 314352 - DNA, 25 bp, Artificial
  probe
  misc_feature (1)..(25): SEQ ID NO: 2078; WAN024C9Y; Start 43; Stop 67
aatgacataaccttctgcaatacga

SEQ ID NO: 314353 - DNA, 25 bp, Artificial
  probe
  misc_feature (1)..(25): SEQ ID NO: 2078; WAN024C9Y; Start 234; Stop 258
gaaccttctcgataacactcttatg

SEQ ID NO: 314354 - DNA, 25 bp, Artificial
  probe
  misc_feature (1)..(25): SEQ ID NO: 2078; WAN024C9Y; Start 42; Stop 66
taatgacataaccttctgcaatacg

SEQ ID NO: 314355 - DNA, 25 bp, Artificial
  probe
  misc_feature (1)..(25): SEQ ID NO: 2078; WAN024C9Y; Start 77; Stop 101
tcaatggaatcaaagagacgactac

SEQ ID NO: 314356 - DNA, 25 bp, Artificial
  probe
  misc_feature (1)..(25): SEQ ID NO: 2078; WAN024C9Y; Start 140; Stop 164
tcgatattgtgttgcttgctcttag

SEQ ID NO: 314357 - DNA, 25 bp, Artificial
  probe
  misc_feature (1)..(25): SEQ ID NO: 2078; WAN024C9Y; Start 44; Stop 68
atgacataaccttctgcaatacgaa

SEQ ID NO: 314358 - DNA, 25 bp, Artificial
  probe
  misc_feature (1)..(25): SEQ ID NO: 2078; WAN024C9Y; Start 235; Stop 259
aaccttctcgataacactcttatgt

SEQ ID NO: 314359 - DNA, 25 bp, Artificial
  probe
  misc_feature (1)..(25): SEQ ID NO: 2078; WAN024C9Y; Start 82; Stop 106
ggaatcaaagagacgactacgaatg

SEQ ID NO: 314360 - DNA, 25 bp, Artificial
  probe
  misc_feature (1)..(25): SEQ ID NO: 2078; WAN024C9Y; Start 76; Stop 100
ctcaatggaatcaaagagacgacta

SEQ ID NO: 314361 - DNA, 25 bp, Artificial
  probe
  misc_feature (1)..(25): SEQ ID NO: 2078; WAN024C9Y; Start 116; Stop 140
ataacaatacggtcaaccacgacat

SEQ ID NO: 314362 - DNA, 25 bp, Artificial
  probe
  misc_feature (1)..(25): SEQ ID NO: 2078; WAN024C9Y; Start 81; Stop 105
tggaatcaaagagacgactacgaat

SEQ ID NO: 314363 - DNA, 25 bp, Artificial
  probe
  misc_feature (1)..(25): SEQ ID NO: 2078; WAN024C9Y; Start 80; Stop 104
atggaatcaaagagacgactacgaa

SEQ ID NO: 314364 - DNA, 25 bp, Artificial
  probe
  misc_feature (1)..(25): SEQ ID NO: 2078; WAN024C9Y; Start 79; Stop 103
aatggaatcaaagagacgactacga

SEQ ID NO: 314365 - DNA, 25 bp, Artificial
  probe
  misc_feature (1)..(25): SEQ ID NO: 2078; WAN024C9Y; Start 78; Stop 102
caatggaatcaaagagacgactacg

SEQ ID NO: 314366 - DNA, 25 bp, Artificial
  probe
  misc_feature (1)..(25): SEQ ID NO: 2078; WAN024C9Y; Start 37; Stop 61
gtcgataatgacataaccttctgca

SEQ ID NO: 314367 - DNA, 25 bp, Artificial
  probe
  misc_feature (1)..(25): SEQ ID NO: 2078; WAN024C9Y; Start 83; Stop 107
gaatcaaagagacgactacgaatgc

SEQ ID NO: 314368 - DNA, 25 bp, Artificial
  probe
  misc_feature (1)..(25): SEQ ID NO: 2078; WAN024C9Y; Start 175; Stop 199
cacttcggtcacatcatagacttcc

SEQ ID NO: 314369 - DNA, 25 bp, Artificial
  probe
  misc_feature (1)..(25): SEQ ID NO: 2078; WAN024C9Y; Start 102; Stop 126
gaatgccctccttgataacaatacg

SEQ ID NO: 314370 - DNA, 25 bp, Artificial
  probe
  misc_feature (1)..(25): SEQ ID NO: 2078; WAN024C9Y; Start 101; Stop 125
cgaatgccctccttgataacaatac

SEQ ID NO: 314371 - DNA, 25 bp, Artificial
  probe
  misc_feature (1)..(25): SEQ ID NO: 2078; WAN024C9Y; Start 100; Stop 124
acgaatgccctccttgataacaata

SEQ ID NO: 314372 - DNA, 25 bp, Artificial
  probe
  misc_feature (1)..(25): SEQ ID NO: 2078; WAN024C9Y; Start 99; Stop 123
tacgaatgccctccttgataacaat

SEQ ID NO: 314373 - DNA, 25 bp, Artificial
  probe
  misc_feature (1)..(25): SEQ ID NO: 2078; WAN024C9Y; Start 117; Stop 141
taacaatacggtcaaccacgacatc

SEQ ID NO: 314374 - DNA, 25 bp, Artificial
  probe
  misc_feature (1)..(25): SEQ ID NO: 2078; WAN024C9Y; Start 115; Stop 139
gataacaatacggtcaaccacgaca

SEQ ID NO: 314375 - DNA, 25 bp, Artificial
  probe
  misc_feature (1)..(25): SEQ ID NO: 2078; WAN024C9Y; Start 114; Stop 138
tgataacaatacggtcaaccacgac

SEQ ID NO: 314376 - DNA, 25 bp, Artificial
  probe
  misc_feature (1)..(25): SEQ ID NO: 2079; WAN024FWH; Start 184; Stop 208
gtattcggaggagtaacattattct

SEQ ID NO: 314377 - DNA, 25 bp, Artificial
  probe
  misc_feature (1)..(25): SEQ ID NO: 2079; WAN024FWH; Start 183; Stop 207
agtattcggaggagtaacattattc

SEQ ID NO: 314378 - DNA, 25 bp, Artificial
  probe
  misc_feature (1)..(25): SEQ ID NO: 2079; WAN024FWH; Start 449; Stop 473
cgagtgctgttggatgtatcattac

SEQ ID NO: 314379 - DNA, 25 bp, Artificial
  probe
  misc_feature (1)..(25): SEQ ID NO: 2079; WAN024FWH; Start 448; Stop 472
acgagtgctgttggatgtatcatta

SEQ ID NO: 314380 - DNA, 25 bp, Artificial
  probe
  misc_feature (1)..(25): SEQ ID NO: 2079; WAN024FWH; Start 185; Stop 209
tattcggaggagtaacattattctt

SEQ ID NO: 314381 - DNA, 25 bp, Artificial
  probe
  misc_feature (1)..(25): SEQ ID NO: 2079; WAN024FWH; Start 180; Stop 204
gatagtattcggaggagtaacatta

SEQ ID NO: 314382 - DNA, 25 bp, Artificial
  probe
  misc_feature (1)..(25): SEQ ID NO: 2079; WAN024FWH; Start 79; Stop 103
agtttagttatgggattggctgtta

SEQ ID NO: 314383 - DNA, 25 bp, Artificial
  probe
  misc_feature (1)..(25): SEQ ID NO: 2079; WAN024FWH; Start 948; Stop 972
atttattgtctatgtaggagcacca

SEQ ID NO: 314384 - DNA, 25 bp, Artificial
  probe
  misc_feature (1)..(25): SEQ ID NO: 2079; WAN024FWH; Start 606; Stop 630
tagtgttatctggttgctttctttg

SEQ ID NO: 314385 - DNA, 25 bp, Artificial
  probe
  misc_feature (1)..(25): SEQ ID NO: 2079; WAN024FWH; Start 113; Stop 137
ttaatgttgagaataattcgcaagt

SEQ ID NO: 314386 - DNA, 25 bp, Artificial
  probe
  misc_feature (1)..(25): SEQ ID NO: 2079; WAN024FWH; Start 83; Stop 107
tagttatgggattggctgttaatgg

SEQ ID NO: 314387 - DNA, 25 bp, Artificial
  probe
  misc_feature (1)..(25): SEQ ID NO: 2079; WAN024FWH; Start 80; Stop 104
gtttagttatgggattggctgttaa

SEQ ID NO: 314388 - DNA, 25 bp, Artificial
  probe
  misc_feature (1)..(25): SEQ ID NO: 2079; WAN024FWH; Start 946; Stop 970
gcatttattgtctatgtaggagcac

SEQ ID NO: 314389 - DNA, 25 bp, Artificial
  probe
  misc_feature (1)..(25): SEQ ID NO: 2079; WAN024FWH; Start 78; Stop 102
gagtttagttatgggattggctgtt

SEQ ID NO: 314390 - DNA, 25 bp, Artificial
  probe
  misc_feature (1)..(25): SEQ ID NO: 2079; WAN024FWH; Start 605; Stop 629
ttagtgttatctggttgctttcttt

SEQ ID NO: 314391 - DNA, 25 bp, Artificial
  probe
  misc_feature (1)..(25): SEQ ID NO: 2079; WAN024FWH; Start 604; Stop 628
tttagtgttatctggttgctttctt

SEQ ID NO: 314392 - DNA, 25 bp, Artificial
  probe
  misc_feature (1)..(25): SEQ ID NO: 2079; WAN024FWH; Start 187; Stop 211
ttcggaggagtaacattattctttg

SEQ ID NO: 314393 - DNA, 25 bp, Artificial
  probe
  misc_feature (1)..(25): SEQ ID NO: 2079; WAN024FWH; Start 82; Stop 106
ttagttatgggattggctgttaatg

SEQ ID NO: 314394 - DNA, 25 bp, Artificial
  probe
  misc_feature (1)..(25): SEQ ID NO: 2079; WAN024FWH; Start 447; Stop 471
aacgagtgctgttggatgtatcatt

SEQ ID NO: 314395 - DNA, 25 bp, Artificial
  probe
  misc_feature (1)..(25): SEQ ID NO: 2079; WAN024FWH; Start 1080; Stop 1104
ggttaagattaaagttggtgaggct

SEQ ID NO: 314396 - DNA, 25 bp, Artificial
  probe
  misc_feature (1)..(25): SEQ ID NO: 2079; WAN024FWH; Start 1078; Stop 1102
atggttaagattaaagttggtgagg

SEQ ID NO: 314397 - DNA, 25 bp, Artificial
  probe
  misc_feature (1)..(25): SEQ ID NO: 2079; WAN024FWH; Start 951; Stop 975
tattgtctatgtaggagcaccaatt

SEQ ID NO: 314398 - DNA, 25 bp, Artificial
  probe
  misc_feature (1)..(25): SEQ ID NO: 2079; WAN024FWH; Start 950; Stop 974
ttattgtctatgtaggagcaccaat

SEQ ID NO: 314399 - DNA, 25 bp, Artificial
  probe
  misc_feature (1)..(25): SEQ ID NO: 2079; WAN024FWH; Start 947; Stop 971
catttattgtctatgtaggagcacc

SEQ ID NO: 314400 - DNA, 25 bp, Artificial
  probe
  misc_feature (1)..(25): SEQ ID NO: 2079; WAN024FWH; Start 116; Stop 140
atgttgagaataattcgcaagtatt

SEQ ID NO: 314401 - DNA, 25 bp, Artificial
  probe
  misc_feature (1)..(25): SEQ ID NO: 2079; WAN024FWH; Start 115; Stop 139
aatgttgagaataattcgcaagtat

SEQ ID NO: 314402 - DNA, 25 bp, Artificial
  probe
  misc_feature (1)..(25): SEQ ID NO: 2079; WAN024FWH; Start 1081; Stop 1105
gttaagattaaagttggtgaggcta

SEQ ID NO: 314403 - DNA, 25 bp, Artificial
  probe
  misc_feature (1)..(25): SEQ ID NO: 2079; WAN024FWH; Start 1079; Stop 1103
tggttaagattaaagttggtgaggc

SEQ ID NO: 314404 - DNA, 25 bp, Artificial
  probe
  misc_feature (1)..(25): SEQ ID NO: 2079; WAN024FWH; Start 949; Stop 973
tttattgtctatgtaggagcaccaa

SEQ ID NO: 314405 - DNA, 25 bp, Artificial
  probe
  misc_feature (1)..(25): SEQ ID NO: 2079; WAN024FWH; Start 450; Stop 474
gagtgctgttggatgtatcattaca

SEQ ID NO: 314406 - DNA, 25 bp, Artificial
  probe
  misc_feature (1)..(25): SEQ ID NO: 2079; WAN024FWH; Start 581; Stop 605
aaagaatactgctattggctggttt

SEQ ID NO: 314407 - DNA, 25 bp, Artificial
  probe
  misc_feature (1)..(25): SEQ ID NO: 2079; WAN024FWH; Start 33; Stop 57
taataagaaacaatggttaggcgtt

SEQ ID NO: 314408 - DNA, 25 bp, Artificial
  probe
  misc_feature (1)..(25): SEQ ID NO: 2079; WAN024FWH; Start 179; Stop 203
cgatagtattcggaggagtaacatt

SEQ ID NO: 314409 - DNA, 25 bp, Artificial
  probe
  misc_feature (1)..(25): SEQ ID NO: 2080; WAN024FIC; Start 238; Stop 262
ctggtcacggaagatattagtaatg

SEQ ID NO: 314410 - DNA, 25 bp, Artificial
  probe
  misc_feature (1)..(25): SEQ ID NO: 2080; WAN024FIC; Start 237; Stop 261
tctggtcacggaagatattagtaat

SEQ ID NO: 314411 - DNA, 25 bp, Artificial
  probe
  misc_feature (1)..(25): SEQ ID NO: 2080; WAN024FIC; Start 239; Stop 263
tggtcacggaagatattagtaatga

SEQ ID NO: 314412 - DNA, 25 bp, Artificial
  probe
  misc_feature (1)..(25): SEQ ID NO: 2080; WAN024FIC; Start 152; Stop 176
ttaaggagaacagtagcagttggaa

SEQ ID NO: 314413 - DNA, 25 bp, Artificial
  probe
  misc_feature (1)..(25): SEQ ID NO: 2080; WAN024FIC; Start 273; Stop 297
taggctggatatagtcacagatacg

SEQ ID NO: 314414 - DNA, 25 bp, Artificial
  probe
  misc_feature (1)..(25): SEQ ID NO: 2080; WAN024FIC; Start 272; Stop 296
ctaggctggatatagtcacagatac

SEQ ID NO: 314415 - DNA, 25 bp, Artificial
  probe
  misc_feature (1)..(25): SEQ ID NO: 2080; WAN024FIC; Start 278; Stop 302
tggatatagtcacagatacgagata

SEQ ID NO: 314416 - DNA, 25 bp, Artificial
  probe
  misc_feature (1)..(25): SEQ ID NO: 2080; WAN024FIC; Start 276; Stop 300
gctggatatagtcacagatacgaga

SEQ ID NO: 314417 - DNA, 25 bp, Artificial
  probe
  misc_feature (1)..(25): SEQ ID NO: 2080; WAN024FIC; Start 277; Stop 301
ctggatatagtcacagatacgagat

SEQ ID NO: 314418 - DNA, 25 bp, Artificial
  probe
  misc_feature (1)..(25): SEQ ID NO: 2080; WAN024FIC; Start 153; Stop 177
taaggagaacagtagcagttggaac

SEQ ID NO: 314419 - DNA, 25 bp, Artificial
  probe
  misc_feature (1)..(25): SEQ ID NO: 2080; WAN024FIC; Start 151; Stop 175
gttaaggagaacagtagcagttgga

SEQ ID NO: 314420 - DNA, 25 bp, Artificial
  probe
  misc_feature (1)..(25): SEQ ID NO: 2080; WAN024FIC; Start 271; Stop 295
actaggctggatatagtcacagata

SEQ ID NO: 314421 - DNA, 25 bp, Artificial
  probe
  misc_feature (1)..(25): SEQ ID NO: 2080; WAN024FIC; Start 279; Stop 303
ggatatagtcacagatacgagatag

SEQ ID NO: 314422 - DNA, 25 bp, Artificial
  probe
  misc_feature (1)..(25): SEQ ID NO: 2080; WAN024FIC; Start 275; Stop 299
ggctggatatagtcacagatacgag

SEQ ID NO: 314423 - DNA, 25 bp, Artificial
  probe
  misc_feature (1)..(25): SEQ ID NO: 2080; WAN024FIC; Start 112; Stop 136
gtttggaatagttggcttgtagaaa

SEQ ID NO: 314424 - DNA, 25 bp, Artificial
  probe
  misc_feature (1)..(25): SEQ ID NO: 2080; WAN024FIC; Start 242; Stop 266
tcacggaagatattagtaatgacaa

SEQ ID NO: 314425 - DNA, 25 bp, Artificial
  probe
  misc_feature (1)..(25): SEQ ID NO: 2080; WAN024FIC; Start 187; Stop 211
ggcatccaatatcatgttataggta

SEQ ID NO: 314426 - DNA, 25 bp, Artificial
  probe
  misc_feature (1)..(25): SEQ ID NO: 2080; WAN024FIC; Start 106; Stop 130
tatagggtttggaatagttggcttg

SEQ ID NO: 314427 - DNA, 25 bp, Artificial
  probe
  misc_feature (1)..(25): SEQ ID NO: 2080; WAN024FIC; Start 274; Stop 298
aggctggatatagtcacagatacga

SEQ ID NO: 314428 - DNA, 25 bp, Artificial
  probe
  misc_feature (1)..(25): SEQ ID NO: 2080; WAN024FIC; Start 186; Stop 210
tggcatccaatatcatgttataggt

SEQ ID NO: 314429 - DNA, 25 bp, Artificial
  probe
  misc_feature (1)..(25): SEQ ID NO: 2080; WAN024FIC; Start 182; Stop 206
cgaatggcatccaatatcatgttat

SEQ ID NO: 314430 - DNA, 25 bp, Artificial
  probe
  misc_feature (1)..(25): SEQ ID NO: 2080; WAN024FIC; Start 235; Stop 259
catctggtcacggaagatattagta

SEQ ID NO: 314431 - DNA, 25 bp, Artificial
  probe
  misc_feature (1)..(25): SEQ ID NO: 2080; WAN024FIC; Start 111; Stop 135
ggtttggaatagttggcttgtagaa

SEQ ID NO: 314432 - DNA, 25 bp, Artificial
  probe
  misc_feature (1)..(25): SEQ ID NO: 2080; WAN024FIC; Start 236; Stop 260
atctggtcacggaagatattagtaa

SEQ ID NO: 314433 - DNA, 25 bp, Artificial
  probe
  misc_feature (1)..(25): SEQ ID NO: 2080; WAN024FIC; Start 108; Stop 132
tagggtttggaatagttggcttgta

SEQ ID NO: 314434 - DNA, 25 bp, Artificial
  probe
  misc_feature (1)..(25): SEQ ID NO: 2080; WAN024FIC; Start 233; Stop 257
tccatctggtcacggaagatattag

SEQ ID NO: 314435 - DNA, 25 bp, Artificial
  probe
  misc_feature (1)..(25): SEQ ID NO: 2080; WAN024FIC; Start 185; Stop 209
atggcatccaatatcatgttatagg

SEQ ID NO: 314436 - DNA, 25 bp, Artificial
  probe
  misc_feature (1)..(25): SEQ ID NO: 2080; WAN024FIC; Start 38; Stop 62
agaatcccttcggtattgtagtgag

SEQ ID NO: 314437 - DNA, 25 bp, Artificial
  probe
  misc_feature (1)..(25): SEQ ID NO: 2080; WAN024FIC; Start 37; Stop 61
gagaatcccttcggtattgtagtga

SEQ ID NO: 314438 - DNA, 25 bp, Artificial
  probe
  misc_feature (1)..(25): SEQ ID NO: 2080; WAN024FIC; Start 36; Stop 60
agagaatcccttcggtattgtagtg

SEQ ID NO: 314439 - DNA, 25 bp, Artificial
  probe
  misc_feature (1)..(25): SEQ ID NO: 2080; WAN024FIC; Start 35; Stop 59
cagagaatcccttcggtattgtagt

SEQ ID NO: 314440 - DNA, 25 bp, Artificial
  probe
  misc_feature (1)..(25): SEQ ID NO: 2080; WAN024FIC; Start 45; Stop 69
cttcggtattgtagtgagccagttg

SEQ ID NO: 314441 - DNA, 25 bp, Artificial
  probe
  misc_feature (1)..(25): SEQ ID NO: 2080; WAN024FIC; Start 234; Stop 258
ccatctggtcacggaagatattagt

SEQ ID NO: 314442 - DNA, 25 bp, Artificial
  probe
  misc_feature (1)..(25): SEQ ID NO: 2081; WAN024CHX; Start 116; Stop 140
cccatttcttccatgaggtaatctg

SEQ ID NO: 314443 - DNA, 25 bp, Artificial
  probe
  misc_feature (1)..(25): SEQ ID NO: 2081; WAN024CHX; Start 57; Stop 81
tattatccgacttatcacccatgag

SEQ ID NO: 314444 - DNA, 25 bp, Artificial
  probe
  misc_feature (1)..(25): SEQ ID NO: 2081; WAN024CHX; Start 56; Stop 80
atattatccgacttatcacccatga

SEQ ID NO: 314445 - DNA, 25 bp, Artificial
  probe
  misc_feature (1)..(25): SEQ ID NO: 2081; WAN024CHX; Start 55; Stop 79
gatattatccgacttatcacccatg

SEQ ID NO: 314446 - DNA, 25 bp, Artificial
  probe
  misc_feature (1)..(25): SEQ ID NO: 2081; WAN024CHX; Start 117; Stop 141
ccatttcttccatgaggtaatctgg

SEQ ID NO: 314447 - DNA, 25 bp, Artificial
  probe
  misc_feature (1)..(25): SEQ ID NO: 2081; WAN024CHX; Start 58; Stop 82
attatccgacttatcacccatgagc

SEQ ID NO: 314448 - DNA, 25 bp, Artificial
  probe
  misc_feature (1)..(25): SEQ ID NO: 2081; WAN024CHX; Start 115; Stop 139
gcccatttcttccatgaggtaatct

SEQ ID NO: 314449 - DNA, 25 bp, Artificial
  probe
  misc_feature (1)..(25): SEQ ID NO: 2081; WAN024CHX; Start 239; Stop 263
gtaatatcaaaaccatcctgctctg

SEQ ID NO: 314450 - DNA, 25 bp, Artificial
  probe
  misc_feature (1)..(25): SEQ ID NO: 2081; WAN024CHX; Start 177; Stop 201
aaatttcaaccaccgtatgctcatc

SEQ ID NO: 314451 - DNA, 25 bp, Artificial
  probe
  misc_feature (1)..(25): SEQ ID NO: 2081; WAN024CHX; Start 118; Stop 142
catttcttccatgaggtaatctggc

SEQ ID NO: 314452 - DNA, 25 bp, Artificial
  probe
  misc_feature (1)..(25): SEQ ID NO: 2081; WAN024CHX; Start 122; Stop 146
tcttccatgaggtaatctggcgtaa

SEQ ID NO: 314453 - DNA, 25 bp, Artificial
  probe
  misc_feature (1)..(25): SEQ ID NO: 2081; WAN024CHX; Start 121; Stop 145
ttcttccatgaggtaatctggcgta

SEQ ID NO: 314454 - DNA, 25 bp, Artificial
  probe
  misc_feature (1)..(25): SEQ ID NO: 2081; WAN024CHX; Start 240; Stop 264
taatatcaaaaccatcctgctctgc

SEQ ID NO: 314455 - DNA, 25 bp, Artificial
  probe
  misc_feature (1)..(25): SEQ ID NO: 2081; WAN024CHX; Start 178; Stop 202
aatttcaaccaccgtatgctcatcc

SEQ ID NO: 314456 - DNA, 25 bp, Artificial
  probe
  misc_feature (1)..(25): SEQ ID NO: 2081; WAN024CHX; Start 242; Stop 266
atatcaaaaccatcctgctctgcta

SEQ ID NO: 314457 - DNA, 25 bp, Artificial
  probe
  misc_feature (1)..(25): SEQ ID NO: 2081; WAN024CHX; Start 124; Stop 148
ttccatgaggtaatctggcgtaaag

SEQ ID NO: 314458 - DNA, 25 bp, Artificial
  probe
  misc_feature (1)..(25): SEQ ID NO: 2081; WAN024CHX; Start 123; Stop 147
cttccatgaggtaatctggcgtaaa

SEQ ID NO: 314459 - DNA, 25 bp, Artificial
  probe
  misc_feature (1)..(25): SEQ ID NO: 2081; WAN024CHX; Start 241; Stop 265
aatatcaaaaccatcctgctctgct

SEQ ID NO: 314460 - DNA, 25 bp, Artificial
  probe
  misc_feature (1)..(25): SEQ ID NO: 2081; WAN024CHX; Start 119; Stop 143
atttcttccatgaggtaatctggcg

SEQ ID NO: 314461 - DNA, 25 bp, Artificial
  probe
  misc_feature (1)..(25): SEQ ID NO: 2081; WAN024CHX; Start 243; Stop 267
tatcaaaaccatcctgctctgctag

SEQ ID NO: 314462 - DNA, 25 bp, Artificial
  probe
  misc_feature (1)..(25): SEQ ID NO: 2081; WAN024CHX; Start 151; Stop 175
ctcaaactcagccacacctttcttg

SEQ ID NO: 314463 - DNA, 25 bp, Artificial
  probe
  misc_feature (1)..(25): SEQ ID NO: 2081; WAN024CHX; Start 51; Stop 75
cagggatattatccgacttatcacc

SEQ ID NO: 314464 - DNA, 25 bp, Artificial
  probe
  misc_feature (1)..(25): SEQ ID NO: 2081; WAN024CHX; Start 50; Stop 74
ccagggatattatccgacttatcac

SEQ ID NO: 314465 - DNA, 25 bp, Artificial
  probe
  misc_feature (1)..(25): SEQ ID NO: 2081; WAN024CHX; Start 54; Stop 78
ggatattatccgacttatcacccat

SEQ ID NO: 314466 - DNA, 25 bp, Artificial
  probe
  misc_feature (1)..(25): SEQ ID NO: 2081; WAN024CHX; Start 18; Stop 42
taatacccgtcttttcaccgacttt

SEQ ID NO: 314467 - DNA, 25 bp, Artificial
  probe
  misc_feature (1)..(25): SEQ ID NO: 2081; WAN024CHX; Start 17; Stop 41
ttaatacccgtcttttcaccgactt

SEQ ID NO: 314468 - DNA, 25 bp, Artificial
  probe
  misc_feature (1)..(25): SEQ ID NO: 2081; WAN024CHX; Start 52; Stop 76
agggatattatccgacttatcaccc

SEQ ID NO: 314469 - DNA, 25 bp, Artificial
  probe
  misc_feature (1)..(25): SEQ ID NO: 2081; WAN024CHX; Start 49; Stop 73
cccagggatattatccgacttatca

SEQ ID NO: 314470 - DNA, 25 bp, Artificial
  probe
  misc_feature (1)..(25): SEQ ID NO: 2081; WAN024CHX; Start 53; Stop 77
gggatattatccgacttatcaccca

SEQ ID NO: 314471 - DNA, 25 bp, Artificial
  probe
  misc_feature (1)..(25): SEQ ID NO: 2081; WAN024CHX; Start 157; Stop 181
ctcagccacacctttcttggaaatt

SEQ ID NO: 314472 - DNA, 25 bp, Artificial
  probe
  misc_feature (1)..(25): SEQ ID NO: 2081; WAN024CHX; Start 16; Stop 40
cttaatacccgtcttttcaccgact

SEQ ID NO: 314473 - DNA, 25 bp, Artificial
  probe
  misc_feature (1)..(25): SEQ ID NO: 2081; WAN024CHX; Start 85; Stop 109
cttgagatcgataaactgagctggt

SEQ ID NO: 314474 - DNA, 25 bp, Artificial
  probe
  misc_feature (1)..(25): SEQ ID NO: 2081; WAN024CHX; Start 59; Stop 83
ttatccgacttatcacccatgagcg

SEQ ID NO: 314475 - DNA, 25 bp, Artificial
  probe
  misc_feature (1)..(25): SEQ ID NO: 2082; WAN024DPV; Start 1; Stop 25
atgctcgctagaccaactatctttt

SEQ ID NO: 314476 - DNA, 25 bp, Artificial
  probe
  misc_feature (1)..(25): SEQ ID NO: 2083; WAN024F65; Start 260; Stop 284
cacttgctgatgatggtaaggttaa

SEQ ID NO: 314477 - DNA, 25 bp, Artificial
  probe
  misc_feature (1)..(25): SEQ ID NO: 2083; WAN024F65; Start 1209; Stop 1233
cttgatgattgctgtgacttggaat

SEQ ID NO: 314478 - DNA, 25 bp, Artificial
  probe
  misc_feature (1)..(25): SEQ ID NO: 2083; WAN024F65; Start 1226; Stop 1250
cttggaatgacattatgcgactctt

SEQ ID NO: 314479 - DNA, 25 bp, Artificial
  probe
  misc_feature (1)..(25): SEQ ID NO: 2083; WAN024F65; Start 1210; Stop 1234
ttgatgattgctgtgacttggaatg

SEQ ID NO: 314480 - DNA, 25 bp, Artificial
  probe
  misc_feature (1)..(25): SEQ ID NO: 2083; WAN024F65; Start 259; Stop 283
acacttgctgatgatggtaaggtta

SEQ ID NO: 314481 - DNA, 25 bp, Artificial
  probe
  misc_feature (1)..(25): SEQ ID NO: 2083; WAN024F65; Start 602; Stop 626
ataccaatcagttccatatcatgcc

SEQ ID NO: 314482 - DNA, 25 bp, Artificial
  probe
  misc_feature (1)..(25): SEQ ID NO: 2083; WAN024F65; Start 1217; Stop 1241
ttgctgtgacttggaatgacattat

SEQ ID NO: 314483 - DNA, 25 bp, Artificial
  probe
  misc_feature (1)..(25): SEQ ID NO: 2083; WAN024F65; Start 1216; Stop 1240
attgctgtgacttggaatgacatta

SEQ ID NO: 314484 - DNA, 25 bp, Artificial
  probe
  misc_feature (1)..(25): SEQ ID NO: 2083; WAN024F65; Start 1224; Stop 1248
gacttggaatgacattatgcgactc

SEQ ID NO: 314485 - DNA, 25 bp, Artificial
  probe
  misc_feature (1)..(25): SEQ ID NO: 2083; WAN024F65; Start 1212; Stop 1236
gatgattgctgtgacttggaatgac

SEQ ID NO: 314486 - DNA, 25 bp, Artificial
  probe
  misc_feature (1)..(25): SEQ ID NO: 2083; WAN024F65; Start 1032; Stop 1056
tatcttgtacttcttggcaatgatt

SEQ ID NO: 314487 - DNA, 25 bp, Artificial
  probe
  misc_feature (1)..(25): SEQ ID NO: 2083; WAN024F65; Start 1030; Stop 1054
aatatcttgtacttcttggcaatga

SEQ ID NO: 314488 - DNA, 25 bp, Artificial
  probe
  misc_feature (1)..(25): SEQ ID NO: 2083; WAN024F65; Start 601; Stop 625
gataccaatcagttccatatcatgc

SEQ ID NO: 314489 - DNA, 25 bp, Artificial
  probe
  misc_feature (1)..(25): SEQ ID NO: 2083; WAN024F65; Start 1208; Stop 1232
tcttgatgattgctgtgacttggaa

SEQ ID NO: 314490 - DNA, 25 bp, Artificial
  probe
  misc_feature (1)..(25): SEQ ID NO: 2083; WAN024F65; Start 1031; Stop 1055
atatcttgtacttcttggcaatgat

SEQ ID NO: 314491 - DNA, 25 bp, Artificial
  probe
  misc_feature (1)..(25): SEQ ID NO: 2083; WAN024F65; Start 1076; Stop 1100
ttaatcttattccgattccagcctt

SEQ ID NO: 314492 - DNA, 25 bp, Artificial
  probe
  misc_feature (1)..(25): SEQ ID NO: 2083; WAN024F65; Start 1225; Stop 1249
acttggaatgacattatgcgactct

SEQ ID NO: 314493 - DNA, 25 bp, Artificial
  probe
  misc_feature (1)..(25): SEQ ID NO: 2083; WAN024F65; Start 1218; Stop 1242
tgctgtgacttggaatgacattatg

SEQ ID NO: 314494 - DNA, 25 bp, Artificial
  probe
  misc_feature (1)..(25): SEQ ID NO: 2083; WAN024F65; Start 1211; Stop 1235
tgatgattgctgtgacttggaatga

SEQ ID NO: 314495 - DNA, 25 bp, Artificial
  probe
  misc_feature (1)..(25): SEQ ID NO: 2083; WAN024F65; Start 1077; Stop 1101
taatcttattccgattccagccttg

SEQ ID NO: 314496 - DNA, 25 bp, Artificial
  probe
  misc_feature (1)..(25): SEQ ID NO: 2083; WAN024F65; Start 282; Stop 306
taaacgcatcaatctctcaggtaaa

SEQ ID NO: 314497 - DNA, 25 bp, Artificial
  probe
  misc_feature (1)..(25): SEQ ID NO: 2083; WAN024F65; Start 1223; Stop 1247
tgacttggaatgacattatgcgact

SEQ ID NO: 314498 - DNA, 25 bp, Artificial
  probe
  misc_feature (1)..(25): SEQ ID NO: 2083; WAN024F65; Start 1222; Stop 1246
gtgacttggaatgacattatgcgac

SEQ ID NO: 314499 - DNA, 25 bp, Artificial
  probe
  misc_feature (1)..(25): SEQ ID NO: 2083; WAN024F65; Start 727; Stop 751
gaaacagaaaccaaagataagacgg

SEQ ID NO: 314500 - DNA, 25 bp, Artificial
  probe
  misc_feature (1)..(25): SEQ ID NO: 2083; WAN024F65; Start 726; Stop 750
ggaaacagaaaccaaagataagacg

SEQ ID NO: 314501 - DNA, 25 bp, Artificial
  probe
  misc_feature (1)..(25): SEQ ID NO: 2083; WAN024F65; Start 275; Stop 299
gtaaggttaaacgcatcaatctctc

SEQ ID NO: 314502 - DNA, 25 bp, Artificial
  probe
  misc_feature (1)..(25): SEQ ID NO: 2083; WAN024F65; Start 1205; Stop 1229
ttgtcttgatgattgctgtgacttg

SEQ ID NO: 314503 - DNA, 25 bp, Artificial
  probe
  misc_feature (1)..(25): SEQ ID NO: 2083; WAN024F65; Start 1204; Stop 1228
gttgtcttgatgattgctgtgactt

SEQ ID NO: 314504 - DNA, 25 bp, Artificial
  probe
  misc_feature (1)..(25): SEQ ID NO: 2083; WAN024F65; Start 586; Stop 610
ggtgtcagagatgttgataccaatc

SEQ ID NO: 314505 - DNA, 25 bp, Artificial
  probe
  misc_feature (1)..(25): SEQ ID NO: 2083; WAN024F65; Start 281; Stop 305
ttaaacgcatcaatctctcaggtaa

SEQ ID NO: 314506 - DNA, 25 bp, Artificial
  probe
  misc_feature (1)..(25): SEQ ID NO: 2083; WAN024F65; Start 276; Stop 300
taaggttaaacgcatcaatctctca

SEQ ID NO: 314507 - DNA, 25 bp, Artificial
  probe
  misc_feature (1)..(25): SEQ ID NO: 2083; WAN024F65; Start 1201; Stop 1225
atggttgtcttgatgattgctgtga

SEQ ID NO: 314508 - DNA, 25 bp, Artificial
  probe
  misc_feature (1)..(25): SEQ ID NO: 2083; WAN024F65; Start 755; Stop 779
cgactttggatgtgactatttctga

SEQ ID NO: 314509 - DNA, 25 bp, Artificial
  probe
  misc_feature (1)..(25): SEQ ID NO: 2084; WAN024GB5; Start 85; Stop 109
gcagcaatcttaggaatctatgaac

SEQ ID NO: 314510 - DNA, 25 bp, Artificial
  probe
  misc_feature (1)..(25): SEQ ID NO: 2084; WAN024GB5; Start 84; Stop 108
agcagcaatcttaggaatctatgaa

SEQ ID NO: 314511 - DNA, 25 bp, Artificial
  probe
  misc_feature (1)..(25): SEQ ID NO: 2084; WAN024GB5; Start 87; Stop 111
agcaatcttaggaatctatgaacga

SEQ ID NO: 314512 - DNA, 25 bp, Artificial
  probe
  misc_feature (1)..(25): SEQ ID NO: 2084; WAN024GB5; Start 86; Stop 110
cagcaatcttaggaatctatgaacg

SEQ ID NO: 314513 - DNA, 25 bp, Artificial
  probe
  misc_feature (1)..(25): SEQ ID NO: 2084; WAN024GB5; Start 83; Stop 107
tagcagcaatcttaggaatctatga

SEQ ID NO: 314514 - DNA, 25 bp, Artificial
  probe
  misc_feature (1)..(25): SEQ ID NO: 2084; WAN024GB5; Start 88; Stop 112
gcaatcttaggaatctatgaacgaa

SEQ ID NO: 314515 - DNA, 25 bp, Artificial
  probe
  misc_feature (1)..(25): SEQ ID NO: 2084; WAN024GB5; Start 79; Stop 103
gttctagcagcaatcttaggaatct

SEQ ID NO: 314516 - DNA, 25 bp, Artificial
  probe
  misc_feature (1)..(25): SEQ ID NO: 2084; WAN024GB5; Start 82; Stop 106
ctagcagcaatcttaggaatctatg

SEQ ID NO: 314517 - DNA, 25 bp, Artificial
  probe
  misc_feature (1)..(25): SEQ ID NO: 2084; WAN024GB5; Start 81; Stop 105
tctagcagcaatcttaggaatctat

SEQ ID NO: 314518 - DNA, 25 bp, Artificial
  probe
  misc_feature (1)..(25): SEQ ID NO: 2084; WAN024GB5; Start 80; Stop 104
ttctagcagcaatcttaggaatcta

SEQ ID NO: 314519 - DNA, 25 bp, Artificial
  probe
  misc_feature (1)..(25): SEQ ID NO: 2084; WAN024GB5; Start 276; Stop 300
tattatcggtacagttcctagcctc

SEQ ID NO: 314520 - DNA, 25 bp, Artificial
  probe
  misc_feature (1)..(25): SEQ ID NO: 2084; WAN024GB5; Start 275; Stop 299
ctattatcggtacagttcctagcct

SEQ ID NO: 314521 - DNA, 25 bp, Artificial
  probe
  misc_feature (1)..(25): SEQ ID NO: 2084; WAN024GB5; Start 78; Stop 102
ggttctagcagcaatcttaggaatc

SEQ ID NO: 314522 - DNA, 25 bp, Artificial
  probe
  misc_feature (1)..(25): SEQ ID NO: 2084; WAN024GB5; Start 373; Stop 397
tctggattaggactctatgccttaa

SEQ ID NO: 314523 - DNA, 25 bp, Artificial
  probe
  misc_feature (1)..(25): SEQ ID NO: 2084; WAN024GB5; Start 372; Stop 396
ttctggattaggactctatgcctta

SEQ ID NO: 314524 - DNA, 25 bp, Artificial
  probe
  misc_feature (1)..(25): SEQ ID NO: 2084; WAN024GB5; Start 272; Stop 296
gagctattatcggtacagttcctag

SEQ ID NO: 314525 - DNA, 25 bp, Artificial
  probe
  misc_feature (1)..(25): SEQ ID NO: 2084; WAN024GB5; Start 91; Stop 115
atcttaggaatctatgaacgaatga

SEQ ID NO: 314526 - DNA, 25 bp, Artificial
  probe
  misc_feature (1)..(25): SEQ ID NO: 2084; WAN024GB5; Start 98; Stop 122
gaatctatgaacgaatgattggctt

SEQ ID NO: 314527 - DNA, 25 bp, Artificial
  probe
  misc_feature (1)..(25): SEQ ID NO: 2084; WAN024GB5; Start 92; Stop 116
tcttaggaatctatgaacgaatgat

SEQ ID NO: 314528 - DNA, 25 bp, Artificial
  probe
  misc_feature (1)..(25): SEQ ID NO: 2084; WAN024GB5; Start 627; Stop 651
ttatgccttaaacaactaccactca

SEQ ID NO: 314529 - DNA, 25 bp, Artificial
  probe
  misc_feature (1)..(25): SEQ ID NO: 2084; WAN024GB5; Start 355; Stop 379
tggacaacctttatcatttctggat

SEQ ID NO: 314530 - DNA, 25 bp, Artificial
  probe
  misc_feature (1)..(25): SEQ ID NO: 2084; WAN024GB5; Start 97; Stop 121
ggaatctatgaacgaatgattggct

SEQ ID NO: 314531 - DNA, 25 bp, Artificial
  probe
  misc_feature (1)..(25): SEQ ID NO: 2084; WAN024GB5; Start 96; Stop 120
aggaatctatgaacgaatgattggc

SEQ ID NO: 314532 - DNA, 25 bp, Artificial
  probe
  misc_feature (1)..(25): SEQ ID NO: 2084; WAN024GB5; Start 356; Stop 380
ggacaacctttatcatttctggatt

SEQ ID NO: 314533 - DNA, 25 bp, Artificial
  probe
  misc_feature (1)..(25): SEQ ID NO: 2084; WAN024GB5; Start 368; Stop 392
tcatttctggattaggactctatgc

SEQ ID NO: 314534 - DNA, 25 bp, Artificial
  probe
  misc_feature (1)..(25): SEQ ID NO: 2084; WAN024GB5; Start 354; Stop 378
atggacaacctttatcatttctgga

SEQ ID NO: 314535 - DNA, 25 bp, Artificial
  probe
  misc_feature (1)..(25): SEQ ID NO: 2084; WAN024GB5; Start 628; Stop 652
tatgccttaaacaactaccactcac

SEQ ID NO: 314536 - DNA, 25 bp, Artificial
  probe
  misc_feature (1)..(25): SEQ ID NO: 2084; WAN024GB5; Start 100; Stop 124
atctatgaacgaatgattggctttc

SEQ ID NO: 314537 - DNA, 25 bp, Artificial
  probe
  misc_feature (1)..(25): SEQ ID NO: 2084; WAN024GB5; Start 626; Stop 650
attatgccttaaacaactaccactc

SEQ ID NO: 314538 - DNA, 25 bp, Artificial
  probe
  misc_feature (1)..(25): SEQ ID NO: 2084; WAN024GB5; Start 625; Stop 649
gattatgccttaaacaactaccact

SEQ ID NO: 314539 - DNA, 25 bp, Artificial
  probe
  misc_feature (1)..(25): SEQ ID NO: 2084; WAN024GB5; Start 31; Stop 55
gggattgtaattgctcttggattta

SEQ ID NO: 314540 - DNA, 25 bp, Artificial
  probe
  misc_feature (1)..(25): SEQ ID NO: 2084; WAN024GB5; Start 30; Stop 54
agggattgtaattgctcttggattt

SEQ ID NO: 314541 - DNA, 25 bp, Artificial
  probe
  misc_feature (1)..(25): SEQ ID NO: 2084; WAN024GB5; Start 102; Stop 126
ctatgaacgaatgattggctttctg

SEQ ID NO: 314542 - DNA, 25 bp, Artificial
  probe
  misc_feature (1)..(25): SEQ ID NO: 2085; WAN024GOG; Start 34; Stop 58
caactcatggattggtctgtagatg

SEQ ID NO: 314543 - DNA, 25 bp, Artificial
  probe
  misc_feature (1)..(25): SEQ ID NO: 2085; WAN024GOG; Start 39; Stop 63
catggattggtctgtagatgacatt

SEQ ID NO: 314544 - DNA, 25 bp, Artificial
  probe
  misc_feature (1)..(25): SEQ ID NO: 2085; WAN024GOG; Start 17; Stop 41
ttccaacgaatatctgccaactcat

SEQ ID NO: 314545 - DNA, 25 bp, Artificial
  probe
  misc_feature (1)..(25): SEQ ID NO: 2085; WAN024GOG; Start 236; Stop 260
gcgataagactagctgtatcaatct

SEQ ID NO: 314546 - DNA, 25 bp, Artificial
  probe
  misc_feature (1)..(25): SEQ ID NO: 2085; WAN024GOG; Start 219; Stop 243
cgtaggtatcttcctcagcgataag

SEQ ID NO: 314547 - DNA, 25 bp, Artificial
  probe
  misc_feature (1)..(25): SEQ ID NO: 2085; WAN024GOG; Start 6; Stop 30
ctccgatgtccttccaacgaatatc

SEQ ID NO: 314548 - DNA, 25 bp, Artificial
  probe
  misc_feature (1)..(25): SEQ ID NO: 2085; WAN024GOG; Start 224; Stop 248
gtatcttcctcagcgataagactag

SEQ ID NO: 314549 - DNA, 25 bp, Artificial
  probe
  misc_feature (1)..(25): SEQ ID NO: 2085; WAN024GOG; Start 16; Stop 40
cttccaacgaatatctgccaactca

SEQ ID NO: 314550 - DNA, 25 bp, Artificial
  probe
  misc_feature (1)..(25): SEQ ID NO: 2085; WAN024GOG; Start 237; Stop 261
cgataagactagctgtatcaatctc

SEQ ID NO: 314551 - DNA, 25 bp, Artificial
  probe
  misc_feature (1)..(25): SEQ ID NO: 2085; WAN024GOG; Start 223; Stop 247
ggtatcttcctcagcgataagacta

SEQ ID NO: 314552 - DNA, 25 bp, Artificial
  probe
  misc_feature (1)..(25): SEQ ID NO: 2085; WAN024GOG; Start 221; Stop 245
taggtatcttcctcagcgataagac

SEQ ID NO: 314553 - DNA, 25 bp, Artificial
  probe
  misc_feature (1)..(25): SEQ ID NO: 2085; WAN024GOG; Start 220; Stop 244
gtaggtatcttcctcagcgataaga

SEQ ID NO: 314554 - DNA, 25 bp, Artificial
  probe
  misc_feature (1)..(25): SEQ ID NO: 2085; WAN024GOG; Start 49; Stop 73
tctgtagatgacatttccaagactt

SEQ ID NO: 314555 - DNA, 25 bp, Artificial
  probe
  misc_feature (1)..(25): SEQ ID NO: 2085; WAN024GOG; Start 241; Stop 265
aagactagctgtatcaatctcaatt

SEQ ID NO: 314556 - DNA, 25 bp, Artificial
  probe
  misc_feature (1)..(25): SEQ ID NO: 2085; WAN024GOG; Start 225; Stop 249
tatcttcctcagcgataagactagc

SEQ ID NO: 314557 - DNA, 25 bp, Artificial
  probe
  misc_feature (1)..(25): SEQ ID NO: 2085; WAN024GOG; Start 8; Stop 32
ccgatgtccttccaacgaatatctg

SEQ ID NO: 314558 - DNA, 25 bp, Artificial
  probe
  misc_feature (1)..(25): SEQ ID NO: 2085; WAN024GOG; Start 7; Stop 31
tccgatgtccttccaacgaatatct

SEQ ID NO: 314559 - DNA, 25 bp, Artificial
  probe
  misc_feature (1)..(25): SEQ ID NO: 2085; WAN024GOG; Start 5; Stop 29
tctccgatgtccttccaacgaatat

SEQ ID NO: 314560 - DNA, 25 bp, Artificial
  probe
  misc_feature (1)..(25): SEQ ID NO: 2085; WAN024GOG; Start 40; Stop 64
atggattggtctgtagatgacattt

SEQ ID NO: 314561 - DNA, 25 bp, Artificial
  probe
  misc_feature (1)..(25): SEQ ID NO: 2085; WAN024GOG; Start 41; Stop 65
tggattggtctgtagatgacatttc

SEQ ID NO: 314562 - DNA, 25 bp, Artificial
  probe
  misc_feature (1)..(25): SEQ ID NO: 2085; WAN024GOG; Start 60; Stop 84
catttccaagacttgtgaacatcaa

SEQ ID NO: 314563 - DNA, 25 bp, Artificial
  probe
  misc_feature (1)..(25): SEQ ID NO: 2085; WAN024GOG; Start 18; Stop 42
tccaacgaatatctgccaactcatg

SEQ ID NO: 314564 - DNA, 25 bp, Artificial
  probe
  misc_feature (1)..(25): SEQ ID NO: 2085; WAN024GOG; Start 10; Stop 34
gatgtccttccaacgaatatctgcc

SEQ ID NO: 314565 - DNA, 25 bp, Artificial
  probe
  misc_feature (1)..(25): SEQ ID NO: 2085; WAN024GOG; Start 23; Stop 47
cgaatatctgccaactcatggattg

SEQ ID NO: 314566 - DNA, 25 bp, Artificial
  probe
  misc_feature (1)..(25): SEQ ID NO: 2085; WAN024GOG; Start 35; Stop 59
aactcatggattggtctgtagatga

SEQ ID NO: 314567 - DNA, 25 bp, Artificial
  probe
  misc_feature (1)..(25): SEQ ID NO: 2085; WAN024GOG; Start 235; Stop 259
agcgataagactagctgtatcaatc

SEQ ID NO: 314568 - DNA, 25 bp, Artificial
  probe
  misc_feature (1)..(25): SEQ ID NO: 2085; WAN024GOG; Start 15; Stop 39
ccttccaacgaatatctgccaactc

SEQ ID NO: 314569 - DNA, 25 bp, Artificial
  probe
  misc_feature (1)..(25): SEQ ID NO: 2085; WAN024GOG; Start 53; Stop 77
tagatgacatttccaagacttgtga

SEQ ID NO: 314570 - DNA, 25 bp, Artificial
  probe
  misc_feature (1)..(25): SEQ ID NO: 2085; WAN024GOG; Start 52; Stop 76
gtagatgacatttccaagacttgtg

SEQ ID NO: 314571 - DNA, 25 bp, Artificial
  probe
  misc_feature (1)..(25): SEQ ID NO: 2085; WAN024GOG; Start 51; Stop 75
tgtagatgacatttccaagacttgt

SEQ ID NO: 314572 - DNA, 25 bp, Artificial
  probe
  misc_feature (1)..(25): SEQ ID NO: 2085; WAN024GOG; Start 50; Stop 74
ctgtagatgacatttccaagacttg

SEQ ID NO: 314573 - DNA, 25 bp, Artificial
  probe
  misc_feature (1)..(25): SEQ ID NO: 2085; WAN024GOG; Start 38; Stop 62
tcatggattggtctgtagatgacat

SEQ ID NO: 314574 - DNA, 25 bp, Artificial
  probe
  misc_feature (1)..(25): SEQ ID NO: 2085; WAN024GOG; Start 22; Stop 46
acgaatatctgccaactcatggatt

SEQ ID NO: 314575 - DNA, 25 bp, Artificial
  probe
  misc_feature (1)..(25): SEQ ID NO: 2086; WAN024GH8; Start 241; Stop 265
gaactaggaacttcagtagcaggtt

SEQ ID NO: 314576 - DNA, 25 bp, Artificial
  probe
  misc_feature (1)..(25): SEQ ID NO: 2086; WAN024GH8; Start 192; Stop 216
tgtccagtttccagcattatcttta

SEQ ID NO: 314577 - DNA, 25 bp, Artificial
  probe
  misc_feature (1)..(25): SEQ ID NO: 2086; WAN024GH8; Start 196; Stop 220
cagtttccagcattatctttagcat

SEQ ID NO: 314578 - DNA, 25 bp, Artificial
  probe
  misc_feature (1)..(25): SEQ ID NO: 2086; WAN024GH8; Start 193; Stop 217
gtccagtttccagcattatctttag

SEQ ID NO: 314579 - DNA, 25 bp, Artificial
  probe
  misc_feature (1)..(25): SEQ ID NO: 2086; WAN024GH8; Start 242; Stop 266
aactaggaacttcagtagcaggttg

SEQ ID NO: 314580 - DNA, 25 bp, Artificial
  probe
  misc_feature (1)..(25): SEQ ID NO: 2086; WAN024GH8; Start 191; Stop 215
ttgtccagtttccagcattatcttt

SEQ ID NO: 314581 - DNA, 25 bp, Artificial
  probe
  misc_feature (1)..(25): SEQ ID NO: 2086; WAN024GH8; Start 197; Stop 221
agtttccagcattatctttagcatt

SEQ ID NO: 314582 - DNA, 25 bp, Artificial
  probe
  misc_feature (1)..(25): SEQ ID NO: 2086; WAN024GH8; Start 194; Stop 218
tccagtttccagcattatctttagc

SEQ ID NO: 314583 - DNA, 25 bp, Artificial
  probe
  misc_feature (1)..(25): SEQ ID NO: 2086; WAN024GH8; Start 195; Stop 219
ccagtttccagcattatctttagca

SEQ ID NO: 314584 - DNA, 25 bp, Artificial
  probe
  misc_feature (1)..(25): SEQ ID NO: 2086; WAN024GH8; Start 190; Stop 214
cttgtccagtttccagcattatctt

SEQ ID NO: 314585 - DNA, 25 bp, Artificial
  probe
  misc_feature (1)..(25): SEQ ID NO: 2086; WAN024GH8; Start 198; Stop 222
gtttccagcattatctttagcattt

SEQ ID NO: 314586 - DNA, 25 bp, Artificial
  probe
  misc_feature (1)..(25): SEQ ID NO: 2086; WAN024GH8; Start 243; Stop 267
actaggaacttcagtagcaggttga

SEQ ID NO: 314587 - DNA, 25 bp, Artificial
  probe
  misc_feature (1)..(25): SEQ ID NO: 2086; WAN024GH8; Start 126; Stop 150
tttgtctggatatgtcggtttagca

SEQ ID NO: 314588 - DNA, 25 bp, Artificial
  probe
  misc_feature (1)..(25): SEQ ID NO: 2086; WAN024GH8; Start 189; Stop 213
acttgtccagtttccagcattatct

SEQ ID NO: 314589 - DNA, 25 bp, Artificial
  probe
  misc_feature (1)..(25): SEQ ID NO: 2086; WAN024GH8; Start 188; Stop 212
cacttgtccagtttccagcattatc

SEQ ID NO: 314590 - DNA, 25 bp, Artificial
  probe
  misc_feature (1)..(25): SEQ ID NO: 2086; WAN024GH8; Start 199; Stop 223
tttccagcattatctttagcattta

SEQ ID NO: 314591 - DNA, 25 bp, Artificial
  probe
  misc_feature (1)..(25): SEQ ID NO: 2086; WAN024GH8; Start 200; Stop 224
ttccagcattatctttagcatttaa

SEQ ID NO: 314592 - DNA, 25 bp, Artificial
  probe
  misc_feature (1)..(25): SEQ ID NO: 2086; WAN024GH8; Start 134; Stop 158
gatatgtcggtttagcagaaacaat

SEQ ID NO: 314593 - DNA, 25 bp, Artificial
  probe
  misc_feature (1)..(25): SEQ ID NO: 2086; WAN024GH8; Start 136; Stop 160
tatgtcggtttagcagaaacaattt

SEQ ID NO: 314594 - DNA, 25 bp, Artificial
  probe
  misc_feature (1)..(25): SEQ ID NO: 2086; WAN024GH8; Start 135; Stop 159
atatgtcggtttagcagaaacaatt

SEQ ID NO: 314595 - DNA, 25 bp, Artificial
  probe
  misc_feature (1)..(25): SEQ ID NO: 2086; WAN024GH8; Start 127; Stop 151
ttgtctggatatgtcggtttagcag

SEQ ID NO: 314596 - DNA, 25 bp, Artificial
  probe
  misc_feature (1)..(25): SEQ ID NO: 2086; WAN024GH8; Start 201; Stop 225
tccagcattatctttagcatttaat

SEQ ID NO: 314597 - DNA, 25 bp, Artificial
  probe
  misc_feature (1)..(25): SEQ ID NO: 2086; WAN024GH8; Start 124; Stop 148
attttgtctggatatgtcggtttag

SEQ ID NO: 314598 - DNA, 25 bp, Artificial
  probe
  misc_feature (1)..(25): SEQ ID NO: 2086; WAN024GH8; Start 123; Stop 147
gattttgtctggatatgtcggttta

SEQ ID NO: 314599 - DNA, 25 bp, Artificial
  probe
  misc_feature (1)..(25): SEQ ID NO: 2086; WAN024GH8; Start 133; Stop 157
ggatatgtcggtttagcagaaacaa

SEQ ID NO: 314600 - DNA, 25 bp, Artificial
  probe
  misc_feature (1)..(25): SEQ ID NO: 2086; WAN024GH8; Start 120; Stop 144
taagattttgtctggatatgtcggt

SEQ ID NO: 314601 - DNA, 25 bp, Artificial
  probe
  misc_feature (1)..(25): SEQ ID NO: 2086; WAN024GH8; Start 122; Stop 146
agattttgtctggatatgtcggttt

SEQ ID NO: 314602 - DNA, 25 bp, Artificial
  probe
  misc_feature (1)..(25): SEQ ID NO: 2086; WAN024GH8; Start 121; Stop 145
aagattttgtctggatatgtcggtt

SEQ ID NO: 314603 - DNA, 25 bp, Artificial
  probe
  misc_feature (1)..(25): SEQ ID NO: 2086; WAN024GH8; Start 240; Stop 264
tgaactaggaacttcagtagcaggt

SEQ ID NO: 314604 - DNA, 25 bp, Artificial
  probe
  misc_feature (1)..(25): SEQ ID NO: 2086; WAN024GH8; Start 119; Stop 143
ctaagattttgtctggatatgtcgg

SEQ ID NO: 314605 - DNA, 25 bp, Artificial
  probe
  misc_feature (1)..(25): SEQ ID NO: 2086; WAN024GH8; Start 131; Stop 155
ctggatatgtcggtttagcagaaac

SEQ ID NO: 314606 - DNA, 25 bp, Artificial
  probe
  misc_feature (1)..(25): SEQ ID NO: 2086; WAN024GH8; Start 125; Stop 149
ttttgtctggatatgtcggtttagc

SEQ ID NO: 314607 - DNA, 25 bp, Artificial
  probe
  misc_feature (1)..(25): SEQ ID NO: 2086; WAN024GH8; Start 118; Stop 142
actaagattttgtctggatatgtcg

SEQ ID NO: 314608 - DNA, 25 bp, Artificial
  probe
  misc_feature (1)..(25): SEQ ID NO: 2087; WAN024GL7; Start 138; Stop 162
cagcagattcataaacaaaggcata

SEQ ID NO: 314609 - DNA, 25 bp, Artificial
  probe
  misc_feature (1)..(25): SEQ ID NO: 2087; WAN024GL7; Start 135; Stop 159
tttcagcagattcataaacaaaggc

SEQ ID NO: 314610 - DNA, 25 bp, Artificial
  probe
  misc_feature (1)..(25): SEQ ID NO: 2087; WAN024GL7; Start 139; Stop 163
agcagattcataaacaaaggcataa

SEQ ID NO: 314611 - DNA, 25 bp, Artificial
  probe
  misc_feature (1)..(25): SEQ ID NO: 2087; WAN024GL7; Start 137; Stop 161
tcagcagattcataaacaaaggcat

SEQ ID NO: 314612 - DNA, 25 bp, Artificial
  probe
  misc_feature (1)..(25): SEQ ID NO: 2087; WAN024GL7; Start 136; Stop 160
ttcagcagattcataaacaaaggca

SEQ ID NO: 314613 - DNA, 25 bp, Artificial
  probe
  misc_feature (1)..(25): SEQ ID NO: 2087; WAN024GL7; Start 140; Stop 164
gcagattcataaacaaaggcataat

SEQ ID NO: 314614 - DNA, 25 bp, Artificial
  probe
  misc_feature (1)..(25): SEQ ID NO: 2087; WAN024GL7; Start 150; Stop 174
aaacaaaggcataatgagtaaagtg

SEQ ID NO: 314615 - DNA, 25 bp, Artificial
  probe
  misc_feature (1)..(25): SEQ ID NO: 2087; WAN024GL7; Start 27; Stop 51
tttcctcttgaacttccaatttagg

SEQ ID NO: 314616 - DNA, 25 bp, Artificial
  probe
  misc_feature (1)..(25): SEQ ID NO: 2087; WAN024GL7; Start 179; Stop 203
gctgtaaagataacatgactatccg

SEQ ID NO: 314617 - DNA, 25 bp, Artificial
  probe
  misc_feature (1)..(25): SEQ ID NO: 2087; WAN024GL7; Start 34; Stop 58
ttgaacttccaatttaggagccttt

SEQ ID NO: 314618 - DNA, 25 bp, Artificial
  probe
  misc_feature (1)..(25): SEQ ID NO: 2087; WAN024GL7; Start 33; Stop 57
cttgaacttccaatttaggagcctt

SEQ ID NO: 314619 - DNA, 25 bp, Artificial
  probe
  misc_feature (1)..(25): SEQ ID NO: 2087; WAN024GL7; Start 176; Stop 200
ggtgctgtaaagataacatgactat

SEQ ID NO: 314620 - DNA, 25 bp, Artificial
  probe
  misc_feature (1)..(25): SEQ ID NO: 2087; WAN024GL7; Start 184; Stop 208
aaagataacatgactatccgtttgt

SEQ ID NO: 314621 - DNA, 25 bp, Artificial
  probe
  misc_feature (1)..(25): SEQ ID NO: 2087; WAN024GL7; Start 31; Stop 55
ctcttgaacttccaatttaggagcc

SEQ ID NO: 314622 - DNA, 25 bp, Artificial
  probe
  misc_feature (1)..(25): SEQ ID NO: 2087; WAN024GL7; Start 30; Stop 54
cctcttgaacttccaatttaggagc

SEQ ID NO: 314623 - DNA, 25 bp, Artificial
  probe
  misc_feature (1)..(25): SEQ ID NO: 2087; WAN024GL7; Start 178; Stop 202
tgctgtaaagataacatgactatcc

SEQ ID NO: 314624 - DNA, 25 bp, Artificial
  probe
  misc_feature (1)..(25): SEQ ID NO: 2087; WAN024GL7; Start 32; Stop 56
tcttgaacttccaatttaggagcct

SEQ ID NO: 314625 - DNA, 25 bp, Artificial
  probe
  misc_feature (1)..(25): SEQ ID NO: 2087; WAN024GL7; Start 141; Stop 165
cagattcataaacaaaggcataatg

SEQ ID NO: 314626 - DNA, 25 bp, Artificial
  probe
  misc_feature (1)..(25): SEQ ID NO: 2087; WAN024GL7; Start 180; Stop 204
ctgtaaagataacatgactatccgt

SEQ ID NO: 314627 - DNA, 25 bp, Artificial
  probe
  misc_feature (1)..(25): SEQ ID NO: 2087; WAN024GL7; Start 149; Stop 173
taaacaaaggcataatgagtaaagt

SEQ ID NO: 314628 - DNA, 25 bp, Artificial
  probe
  misc_feature (1)..(25): SEQ ID NO: 2087; WAN024GL7; Start 181; Stop 205
tgtaaagataacatgactatccgtt

SEQ ID NO: 314629 - DNA, 25 bp, Artificial
  probe
  misc_feature (1)..(25): SEQ ID NO: 2087; WAN024GL7; Start 75; Stop 99
gttgataagtaggttttggaaggac

SEQ ID NO: 314630 - DNA, 25 bp, Artificial
  probe
  misc_feature (1)..(25): SEQ ID NO: 2087; WAN024GL7; Start 74; Stop 98
ggttgataagtaggttttggaagga

SEQ ID NO: 314631 - DNA, 25 bp, Artificial
  probe
  misc_feature (1)..(25): SEQ ID NO: 2087; WAN024GL7; Start 177; Stop 201
gtgctgtaaagataacatgactatc

SEQ ID NO: 314632 - DNA, 25 bp, Artificial
  probe
  misc_feature (1)..(25): SEQ ID NO: 2087; WAN024GL7; Start 24; Stop 48
ccttttcctcttgaacttccaattt

SEQ ID NO: 314633 - DNA, 25 bp, Artificial
  probe
  misc_feature (1)..(25): SEQ ID NO: 2087; WAN024GL7; Start 22; Stop 46
aaccttttcctcttgaacttccaat

SEQ ID NO: 314634 - DNA, 25 bp, Artificial
  probe
  misc_feature (1)..(25): SEQ ID NO: 2087; WAN024GL7; Start 134; Stop 158
ttttcagcagattcataaacaaagg

SEQ ID NO: 314635 - DNA, 25 bp, Artificial
  probe
  misc_feature (1)..(25): SEQ ID NO: 2087; WAN024GL7; Start 76; Stop 100
ttgataagtaggttttggaaggact

SEQ ID NO: 314636 - DNA, 25 bp, Artificial
  probe
  misc_feature (1)..(25): SEQ ID NO: 2087; WAN024GL7; Start 73; Stop 97
cggttgataagtaggttttggaagg

SEQ ID NO: 314637 - DNA, 25 bp, Artificial
  probe
  misc_feature (1)..(25): SEQ ID NO: 2087; WAN024GL7; Start 23; Stop 47
accttttcctcttgaacttccaatt

SEQ ID NO: 314638 - DNA, 25 bp, Artificial
  probe
  misc_feature (1)..(25): SEQ ID NO: 2087; WAN024GL7; Start 203; Stop 227
gtttgttcaaaagccaattctactg

SEQ ID NO: 314639 - DNA, 25 bp, Artificial
  probe
  misc_feature (1)..(25): SEQ ID NO: 2087; WAN024GL7; Start 21; Stop 45
caaccttttcctcttgaacttccaa

SEQ ID NO: 314640 - DNA, 25 bp, Artificial
  probe
  misc_feature (1)..(25): SEQ ID NO: 2087; WAN024GL7; Start 202; Stop 226
cgtttgttcaaaagccaattctact

SEQ ID NO: 314641 - DNA, 25 bp, Artificial
  probe
  misc_feature (1)..(25): SEQ ID NO: 2088; WAN024C5T; Start 122; Stop 146
ttatattcagccatacaagacggtg

SEQ ID NO: 314642 - DNA, 25 bp, Artificial
  probe
  misc_feature (1)..(25): SEQ ID NO: 2088; WAN024C5T; Start 121; Stop 145
cttatattcagccatacaagacggt

SEQ ID NO: 314643 - DNA, 25 bp, Artificial
  probe
  misc_feature (1)..(25): SEQ ID NO: 2088; WAN024C5T; Start 257; Stop 281
tattcataagccaaccacagttctc

SEQ ID NO: 314644 - DNA, 25 bp, Artificial
  probe
  misc_feature (1)..(25): SEQ ID NO: 2088; WAN024C5T; Start 256; Stop 280
gtattcataagccaaccacagttct

SEQ ID NO: 314645 - DNA, 25 bp, Artificial
  probe
  misc_feature (1)..(25): SEQ ID NO: 2088; WAN024C5T; Start 243; Stop 267
catcctgttgactgtattcataagc

SEQ ID NO: 314646 - DNA, 25 bp, Artificial
  probe
  misc_feature (1)..(25): SEQ ID NO: 2088; WAN024C5T; Start 242; Stop 266
gcatcctgttgactgtattcataag

SEQ ID NO: 314647 - DNA, 25 bp, Artificial
  probe
  misc_feature (1)..(25): SEQ ID NO: 2088; WAN024C5T; Start 244; Stop 268
atcctgttgactgtattcataagcc

SEQ ID NO: 314648 - DNA, 25 bp, Artificial
  probe
  misc_feature (1)..(25): SEQ ID NO: 2088; WAN024C5T; Start 180; Stop 204
ctactctcttattgacacgatccag

SEQ ID NO: 314649 - DNA, 25 bp, Artificial
  probe
  misc_feature (1)..(25): SEQ ID NO: 2088; WAN024C5T; Start 178; Stop 202
ttctactctcttattgacacgatcc

SEQ ID NO: 314650 - DNA, 25 bp, Artificial
  probe
  misc_feature (1)..(25): SEQ ID NO: 2088; WAN024C5T; Start 179; Stop 203
tctactctcttattgacacgatcca

SEQ ID NO: 314651 - DNA, 25 bp, Artificial
  probe
  misc_feature (1)..(25): SEQ ID NO: 2088; WAN024C5T; Start 246; Stop 270
cctgttgactgtattcataagccaa

SEQ ID NO: 314652 - DNA, 25 bp, Artificial
  probe
  misc_feature (1)..(25): SEQ ID NO: 2088; WAN024C5T; Start 54; Stop 78
gatagcgttcaatcaacttatctgc

SEQ ID NO: 314653 - DNA, 25 bp, Artificial
  probe
  misc_feature (1)..(25): SEQ ID NO: 2088; WAN024C5T; Start 250; Stop 274
ttgactgtattcataagccaaccac

SEQ ID NO: 314654 - DNA, 25 bp, Artificial
  probe
  misc_feature (1)..(25): SEQ ID NO: 2088; WAN024C5T; Start 181; Stop 205
tactctcttattgacacgatccagg

SEQ ID NO: 314655 - DNA, 25 bp, Artificial
  probe
  misc_feature (1)..(25): SEQ ID NO: 2088; WAN024C5T; Start 255; Stop 279
tgtattcataagccaaccacagttc

SEQ ID NO: 314656 - DNA, 25 bp, Artificial
  probe
  misc_feature (1)..(25): SEQ ID NO: 2088; WAN024C5T; Start 245; Stop 269
tcctgttgactgtattcataagcca

SEQ ID NO: 314657 - DNA, 25 bp, Artificial
  probe
  misc_feature (1)..(25): SEQ ID NO: 2088; WAN024C5T; Start 183; Stop 207
ctctcttattgacacgatccaggaa

SEQ ID NO: 314658 - DNA, 25 bp, Artificial
  probe
  misc_feature (1)..(25): SEQ ID NO: 2088; WAN024C5T; Start 123; Stop 147
tatattcagccatacaagacggtgt

SEQ ID NO: 314659 - DNA, 25 bp, Artificial
  probe
  misc_feature (1)..(25): SEQ ID NO: 2088; WAN024C5T; Start 176; Stop 200
aattctactctcttattgacacgat

SEQ ID NO: 314660 - DNA, 25 bp, Artificial
  probe
  misc_feature (1)..(25): SEQ ID NO: 2088; WAN024C5T; Start 177; Stop 201
attctactctcttattgacacgatc

SEQ ID NO: 314661 - DNA, 25 bp, Artificial
  probe
  misc_feature (1)..(25): SEQ ID NO: 2088; WAN024C5T; Start 168; Stop 192
ggtgatccaattctactctcttatt

SEQ ID NO: 314662 - DNA, 25 bp, Artificial
  probe
  misc_feature (1)..(25): SEQ ID NO: 2088; WAN024C5T; Start 101; Stop 125
gcctctccatctccatttatcttat

SEQ ID NO: 314663 - DNA, 25 bp, Artificial
  probe
  misc_feature (1)..(25): SEQ ID NO: 2088; WAN024C5T; Start 299; Stop 323
gtccattccgtgttatccatgattg

SEQ ID NO: 314664 - DNA, 25 bp, Artificial
  probe
  misc_feature (1)..(25): SEQ ID NO: 2088; WAN024C5T; Start 100; Stop 124
agcctctccatctccatttatctta

SEQ ID NO: 314665 - DNA, 25 bp, Artificial
  probe
  misc_feature (1)..(25): SEQ ID NO: 2088; WAN024C5T; Start 99; Stop 123
tagcctctccatctccatttatctt

SEQ ID NO: 314666 - DNA, 25 bp, Artificial
  probe
  misc_feature (1)..(25): SEQ ID NO: 2088; WAN024C5T; Start 251; Stop 275
tgactgtattcataagccaaccaca

SEQ ID NO: 314667 - DNA, 25 bp, Artificial
  probe
  misc_feature (1)..(25): SEQ ID NO: 2088; WAN024C5T; Start 165; Stop 189
catggtgatccaattctactctctt

SEQ ID NO: 314668 - DNA, 25 bp, Artificial
  probe
  misc_feature (1)..(25): SEQ ID NO: 2088; WAN024C5T; Start 164; Stop 188
tcatggtgatccaattctactctct

SEQ ID NO: 314669 - DNA, 25 bp, Artificial
  probe
  misc_feature (1)..(25): SEQ ID NO: 2088; WAN024C5T; Start 241; Stop 265
tgcatcctgttgactgtattcataa

SEQ ID NO: 314670 - DNA, 25 bp, Artificial
  probe
  misc_feature (1)..(25): SEQ ID NO: 2088; WAN024C5T; Start 174; Stop 198
ccaattctactctcttattgacacg

SEQ ID NO: 314671 - DNA, 25 bp, Artificial
  probe
  misc_feature (1)..(25): SEQ ID NO: 2088; WAN024C5T; Start 93; Stop 117
cttctctagcctctccatctccatt

SEQ ID NO: 314672 - DNA, 25 bp, Artificial
  probe
  misc_feature (1)..(25): SEQ ID NO: 2088; WAN024C5T; Start 55; Stop 79
atagcgttcaatcaacttatctgca

SEQ ID NO: 314673 - DNA, 25 bp, Artificial
  probe
  misc_feature (1)..(25): SEQ ID NO: 2088; WAN024C5T; Start 167; Stop 191
tggtgatccaattctactctcttat

SEQ ID NO: 314674 - DNA, 25 bp, Artificial
  probe
  misc_feature (1)..(25): SEQ ID NO: 2089; WAN024F4V; Start 50; Stop 74
agtcttactaccagcttgtctctaa

SEQ ID NO: 314675 - DNA, 25 bp, Artificial
  probe
  misc_feature (1)..(25): SEQ ID NO: 2089; WAN024F4V; Start 49; Stop 73
gagtcttactaccagcttgtctcta

SEQ ID NO: 314676 - DNA, 25 bp, Artificial
  probe
  misc_feature (1)..(25): SEQ ID NO: 2089; WAN024F4V; Start 47; Stop 71
ttgagtcttactaccagcttgtctc

SEQ ID NO: 314677 - DNA, 25 bp, Artificial
  probe
  misc_feature (1)..(25): SEQ ID NO: 2089; WAN024F4V; Start 293; Stop 317
gtctggtgacttctgctaacgatag

SEQ ID NO: 314678 - DNA, 25 bp, Artificial
  probe
  misc_feature (1)..(25): SEQ ID NO: 2089; WAN024F4V; Start 46; Stop 70
gttgagtcttactaccagcttgtct

SEQ ID NO: 314679 - DNA, 25 bp, Artificial
  probe
  misc_feature (1)..(25): SEQ ID NO: 2089; WAN024F4V; Start 14; Stop 38
aagacttgcctgtggaaatgaaatc

SEQ ID NO: 314680 - DNA, 25 bp, Artificial
  probe
  misc_feature (1)..(25): SEQ ID NO: 2089; WAN024F4V; Start 13; Stop 37
gaagacttgcctgtggaaatgaaat

SEQ ID NO: 314681 - DNA, 25 bp, Artificial
  probe
  misc_feature (1)..(25): SEQ ID NO: 2089; WAN024F4V; Start 164; Stop 188
tgagcatttggatcaagttggatag

SEQ ID NO: 314682 - DNA, 25 bp, Artificial
  probe
  misc_feature (1)..(25): SEQ ID NO: 2089; WAN024F4V; Start 620; Stop 644
cctatctccgagagtttagtttctt

SEQ ID NO: 314683 - DNA, 25 bp, Artificial
  probe
  misc_feature (1)..(25): SEQ ID NO: 2089; WAN024F4V; Start 623; Stop 647
atctccgagagtttagtttctttgg

SEQ ID NO: 314684 - DNA, 25 bp, Artificial
  probe
  misc_feature (1)..(25): SEQ ID NO: 2089; WAN024F4V; Start 51; Stop 75
gtcttactaccagcttgtctctaaa

SEQ ID NO: 314685 - DNA, 25 bp, Artificial
  probe
  misc_feature (1)..(25): SEQ ID NO: 2089; WAN024F4V; Start 48; Stop 72
tgagtcttactaccagcttgtctct

SEQ ID NO: 314686 - DNA, 25 bp, Artificial
  probe
  misc_feature (1)..(25): SEQ ID NO: 2089; WAN024F4V; Start 437; Stop 461
atacagagcagtatagccctgaaat

SEQ ID NO: 314687 - DNA, 25 bp, Artificial
  probe
  misc_feature (1)..(25): SEQ ID NO: 2089; WAN024F4V; Start 576; Stop 600
ctatgtggagcatgttcttcctgaa

SEQ ID NO: 314688 - DNA, 25 bp, Artificial
  probe
  misc_feature (1)..(25): SEQ ID NO: 2089; WAN024F4V; Start 16; Stop 40
gacttgcctgtggaaatgaaatcaa

SEQ ID NO: 314689 - DNA, 25 bp, Artificial
  probe
  misc_feature (1)..(25): SEQ ID NO: 2089; WAN024F4V; Start 35; Stop 59
aatcaagcgaggttgagtcttacta

SEQ ID NO: 314690 - DNA, 25 bp, Artificial
  probe
  misc_feature (1)..(25): SEQ ID NO: 2089; WAN024F4V; Start 438; Stop 462
tacagagcagtatagccctgaaatg

SEQ ID NO: 314691 - DNA, 25 bp, Artificial
  probe
  misc_feature (1)..(25): SEQ ID NO: 2089; WAN024F4V; Start 622; Stop 646
tatctccgagagtttagtttctttg

SEQ ID NO: 314692 - DNA, 25 bp, Artificial
  probe
  misc_feature (1)..(25): SEQ ID NO: 2089; WAN024F4V; Start 619; Stop 643
gcctatctccgagagtttagtttct

SEQ ID NO: 314693 - DNA, 25 bp, Artificial
  probe
  misc_feature (1)..(25): SEQ ID NO: 2089; WAN024F4V; Start 380; Stop 404
tcaatgtccttaaaggtgagatgtc

SEQ ID NO: 314694 - DNA, 25 bp, Artificial
  probe
  misc_feature (1)..(25): SEQ ID NO: 2089; WAN024F4V; Start 167; Stop 191
gcatttggatcaagttggatagcaa

SEQ ID NO: 314695 - DNA, 25 bp, Artificial
  probe
  misc_feature (1)..(25): SEQ ID NO: 2089; WAN024F4V; Start 15; Stop 39
agacttgcctgtggaaatgaaatca

SEQ ID NO: 314696 - DNA, 25 bp, Artificial
  probe
  misc_feature (1)..(25): SEQ ID NO: 2089; WAN024F4V; Start 379; Stop 403
gtcaatgtccttaaaggtgagatgt

SEQ ID NO: 314697 - DNA, 25 bp, Artificial
  probe
  misc_feature (1)..(25): SEQ ID NO: 2089; WAN024F4V; Start 165; Stop 189
gagcatttggatcaagttggatagc

SEQ ID NO: 314698 - DNA, 25 bp, Artificial
  probe
  misc_feature (1)..(25): SEQ ID NO: 2089; WAN024F4V; Start 441; Stop 465
agagcagtatagccctgaaatgatg

SEQ ID NO: 314699 - DNA, 25 bp, Artificial
  probe
  misc_feature (1)..(25): SEQ ID NO: 2089; WAN024F4V; Start 440; Stop 464
cagagcagtatagccctgaaatgat

SEQ ID NO: 314700 - DNA, 25 bp, Artificial
  probe
  misc_feature (1)..(25): SEQ ID NO: 2089; WAN024F4V; Start 36; Stop 60
atcaagcgaggttgagtcttactac

SEQ ID NO: 314701 - DNA, 25 bp, Artificial
  probe
  misc_feature (1)..(25): SEQ ID NO: 2089; WAN024F4V; Start 621; Stop 645
ctatctccgagagtttagtttcttt

SEQ ID NO: 314702 - DNA, 25 bp, Artificial
  probe
  misc_feature (1)..(25): SEQ ID NO: 2089; WAN024F4V; Start 381; Stop 405
caatgtccttaaaggtgagatgtcc

SEQ ID NO: 314703 - DNA, 25 bp, Artificial
  probe
  misc_feature (1)..(25): SEQ ID NO: 2089; WAN024F4V; Start 378; Stop 402
ggtcaatgtccttaaaggtgagatg

SEQ ID NO: 314704 - DNA, 25 bp, Artificial
  probe
  misc_feature (1)..(25): SEQ ID NO: 2089; WAN024F4V; Start 382; Stop 406
aatgtccttaaaggtgagatgtcct

SEQ ID NO: 314705 - DNA, 25 bp, Artificial
  probe
  misc_feature (1)..(25): SEQ ID NO: 2089; WAN024F4V; Start 43; Stop 67
gaggttgagtcttactaccagcttg

SEQ ID NO: 314706 - DNA, 25 bp, Artificial
  probe
  misc_feature (1)..(25): SEQ ID NO: 2089; WAN024F4V; Start 624; Stop 648
tctccgagagtttagtttctttggg

SEQ ID NO: 314707 - DNA, 25 bp, Artificial
  probe
  misc_feature (1)..(25): SEQ ID NO: 2090; WAN024FOU; Start 157; Stop 181
atcttgaacagagtgagagacgatt

SEQ ID NO: 314708 - DNA, 25 bp, Artificial
  probe
  misc_feature (1)..(25): SEQ ID NO: 2090; WAN024FOU; Start 156; Stop 180
catcttgaacagagtgagagacgat

SEQ ID NO: 314709 - DNA, 25 bp, Artificial
  probe
  misc_feature (1)..(25): SEQ ID NO: 2090; WAN024FOU; Start 17; Stop 41
gagttgtagcctttgagtttgatac

SEQ ID NO: 314710 - DNA, 25 bp, Artificial
  probe
  misc_feature (1)..(25): SEQ ID NO: 2090; WAN024FOU; Start 16; Stop 40
ggagttgtagcctttgagtttgata

SEQ ID NO: 314711 - DNA, 25 bp, Artificial
  probe
  misc_feature (1)..(25): SEQ ID NO: 2090; WAN024FOU; Start 231; Stop 255
cgccttcttcaacaatattaggtac

SEQ ID NO: 314712 - DNA, 25 bp, Artificial
  probe
  misc_feature (1)..(25): SEQ ID NO: 2090; WAN024FOU; Start 230; Stop 254
tcgccttcttcaacaatattaggta

SEQ ID NO: 314713 - DNA, 25 bp, Artificial
  probe
  misc_feature (1)..(25): SEQ ID NO: 2090; WAN024FOU; Start 229; Stop 253
ttcgccttcttcaacaatattaggt

SEQ ID NO: 314714 - DNA, 25 bp, Artificial
  probe
  misc_feature (1)..(25): SEQ ID NO: 2090; WAN024FOU; Start 18; Stop 42
agttgtagcctttgagtttgatacg

SEQ ID NO: 314715 - DNA, 25 bp, Artificial
  probe
  misc_feature (1)..(25): SEQ ID NO: 2090; WAN024FOU; Start 13; Stop 37
aatggagttgtagcctttgagtttg

SEQ ID NO: 314716 - DNA, 25 bp, Artificial
  probe
  misc_feature (1)..(25): SEQ ID NO: 2090; WAN024FOU; Start 153; Stop 177
cagcatcttgaacagagtgagagac

SEQ ID NO: 314717 - DNA, 25 bp, Artificial
  probe
  misc_feature (1)..(25): SEQ ID NO: 2090; WAN024FOU; Start 224; Stop 248
ggagtttcgccttcttcaacaatat

SEQ ID NO: 314718 - DNA, 25 bp, Artificial
  probe
  misc_feature (1)..(25): SEQ ID NO: 2090; WAN024FOU; Start 158; Stop 182
tcttgaacagagtgagagacgattt

SEQ ID NO: 314719 - DNA, 25 bp, Artificial
  probe
  misc_feature (1)..(25): SEQ ID NO: 2090; WAN024FOU; Start 19; Stop 43
gttgtagcctttgagtttgatacgg

SEQ ID NO: 314720 - DNA, 25 bp, Artificial
  probe
  misc_feature (1)..(25): SEQ ID NO: 2090; WAN024FOU; Start 12; Stop 36
caatggagttgtagcctttgagttt

SEQ ID NO: 314721 - DNA, 25 bp, Artificial
  probe
  misc_feature (1)..(25): SEQ ID NO: 2090; WAN024FOU; Start 58; Stop 82
tttgtcaaagtagtcaacagtaacg

SEQ ID NO: 314722 - DNA, 25 bp, Artificial
  probe
  misc_feature (1)..(25): SEQ ID NO: 2090; WAN024FOU; Start 15; Stop 39
tggagttgtagcctttgagtttgat

SEQ ID NO: 314723 - DNA, 25 bp, Artificial
  probe
  misc_feature (1)..(25): SEQ ID NO: 2090; WAN024FOU; Start 14; Stop 38
atggagttgtagcctttgagtttga

SEQ ID NO: 314724 - DNA, 25 bp, Artificial
  probe
  misc_feature (1)..(25): SEQ ID NO: 2090; WAN024FOU; Start 225; Stop 249
gagtttcgccttcttcaacaatatt

SEQ ID NO: 314725 - DNA, 25 bp, Artificial
  probe
  misc_feature (1)..(25): SEQ ID NO: 2090; WAN024FOU; Start 23; Stop 47
tagcctttgagtttgatacggtgtt

SEQ ID NO: 314726 - DNA, 25 bp, Artificial
  probe
  misc_feature (1)..(25): SEQ ID NO: 2090; WAN024FOU; Start 20; Stop 44
ttgtagcctttgagtttgatacggt

SEQ ID NO: 314727 - DNA, 25 bp, Artificial
  probe
  misc_feature (1)..(25): SEQ ID NO: 2090; WAN024FOU; Start 59; Stop 83
ttgtcaaagtagtcaacagtaacgc

SEQ ID NO: 314728 - DNA, 25 bp, Artificial
  probe
  misc_feature (1)..(25): SEQ ID NO: 2090; WAN024FOU; Start 226; Stop 250
agtttcgccttcttcaacaatatta

SEQ ID NO: 314729 - DNA, 25 bp, Artificial
  probe
  misc_feature (1)..(25): SEQ ID NO: 2090; WAN024FOU; Start 227; Stop 251
gtttcgccttcttcaacaatattag

SEQ ID NO: 314730 - DNA, 25 bp, Artificial
  probe
  misc_feature (1)..(25): SEQ ID NO: 2090; WAN024FOU; Start 191; Stop 215
tacataatggcttccaaatcgtagg

SEQ ID NO: 314731 - DNA, 25 bp, Artificial
  probe
  misc_feature (1)..(25): SEQ ID NO: 2090; WAN024FOU; Start 223; Stop 247
tggagtttcgccttcttcaacaata

SEQ ID NO: 314732 - DNA, 25 bp, Artificial
  probe
  misc_feature (1)..(25): SEQ ID NO: 2090; WAN024FOU; Start 190; Stop 214
gtacataatggcttccaaatcgtag

SEQ ID NO: 314733 - DNA, 25 bp, Artificial
  probe
  misc_feature (1)..(25): SEQ ID NO: 2090; WAN024FOU; Start 228; Stop 252
tttcgccttcttcaacaatattagg

SEQ ID NO: 314734 - DNA, 25 bp, Artificial
  probe
  misc_feature (1)..(25): SEQ ID NO: 2090; WAN024FOU; Start 22; Stop 46
gtagcctttgagtttgatacggtgt

SEQ ID NO: 314735 - DNA, 25 bp, Artificial
  probe
  misc_feature (1)..(25): SEQ ID NO: 2090; WAN024FOU; Start 21; Stop 45
tgtagcctttgagtttgatacggtg

SEQ ID NO: 314736 - DNA, 25 bp, Artificial
  probe
  misc_feature (1)..(25): SEQ ID NO: 2090; WAN024FOU; Start 24; Stop 48
agcctttgagtttgatacggtgttt

SEQ ID NO: 314737 - DNA, 25 bp, Artificial
  probe
  misc_feature (1)..(25): SEQ ID NO: 2090; WAN024FOU; Start 159; Stop 183
cttgaacagagtgagagacgatttt

SEQ ID NO: 314738 - DNA, 25 bp, Artificial
  probe
  misc_feature (1)..(25): SEQ ID NO: 2090; WAN024FOU; Start 155; Stop 179
gcatcttgaacagagtgagagacga

SEQ ID NO: 314739 - DNA, 25 bp, Artificial
  probe
  misc_feature (1)..(25): SEQ ID NO: 2090; WAN024FOU; Start 154; Stop 178
agcatcttgaacagagtgagagacg

SEQ ID NO: 314740 - DNA, 25 bp, Artificial
  probe
  misc_feature (1)..(25): SEQ ID NO: 2091; WAN024FEH; Start 11; Stop 35
atccaatgactaaaccaatgatgac

SEQ ID NO: 314741 - DNA, 25 bp, Artificial
  probe
  misc_feature (1)..(25): SEQ ID NO: 2091; WAN024FEH; Start 1; Stop 25
atgctgacatatccaatgactaaac

SEQ ID NO: 314742 - DNA, 25 bp, Artificial
  probe
  misc_feature (1)..(25): SEQ ID NO: 2091; WAN024FEH; Start 3; Stop 27
gctgacatatccaatgactaaacca

SEQ ID NO: 314743 - DNA, 25 bp, Artificial
  probe
  misc_feature (1)..(25): SEQ ID NO: 2091; WAN024FEH; Start 2; Stop 26
tgctgacatatccaatgactaaacc

SEQ ID NO: 314744 - DNA, 25 bp, Artificial
  probe
  misc_feature (1)..(25): SEQ ID NO: 2091; WAN024FEH; Start 12; Stop 36
tccaatgactaaaccaatgatgacg

SEQ ID NO: 314745 - DNA, 25 bp, Artificial
  probe
  misc_feature (1)..(25): SEQ ID NO: 2091; WAN024FEH; Start 4; Stop 28
ctgacatatccaatgactaaaccaa

SEQ ID NO: 314746 - DNA, 25 bp, Artificial
  probe
  misc_feature (1)..(25): SEQ ID NO: 2091; WAN024FEH; Start 7; Stop 31
acatatccaatgactaaaccaatga

SEQ ID NO: 314747 - DNA, 25 bp, Artificial
  probe
  misc_feature (1)..(25): SEQ ID NO: 2091; WAN024FEH; Start 5; Stop 29
tgacatatccaatgactaaaccaat

SEQ ID NO: 314748 - DNA, 25 bp, Artificial
  probe
  misc_feature (1)..(25): SEQ ID NO: 2091; WAN024FEH; Start 10; Stop 34
tatccaatgactaaaccaatgatga

SEQ ID NO: 314749 - DNA, 25 bp, Artificial
  probe
  misc_feature (1)..(25): SEQ ID NO: 2091; WAN024FEH; Start 13; Stop 37
ccaatgactaaaccaatgatgacgg

SEQ ID NO: 314750 - DNA, 25 bp, Artificial
  probe
  misc_feature (1)..(25): SEQ ID NO: 2091; WAN024FEH; Start 6; Stop 30
gacatatccaatgactaaaccaatg

SEQ ID NO: 314751 - DNA, 25 bp, Artificial
  probe
  misc_feature (1)..(25): SEQ ID NO: 2091; WAN024FEH; Start 14; Stop 38
caatgactaaaccaatgatgacggc

SEQ ID NO: 314752 - DNA, 25 bp, Artificial
  probe
  misc_feature (1)..(25): SEQ ID NO: 2091; WAN024FEH; Start 86; Stop 110
ttattgttattccgaatgacataca

SEQ ID NO: 314753 - DNA, 25 bp, Artificial
  probe
  misc_feature (1)..(25): SEQ ID NO: 2091; WAN024FEH; Start 9; Stop 33
atatccaatgactaaaccaatgatg

SEQ ID NO: 314754 - DNA, 25 bp, Artificial
  probe
  misc_feature (1)..(25): SEQ ID NO: 2091; WAN024FEH; Start 8; Stop 32
catatccaatgactaaaccaatgat

SEQ ID NO: 314755 - DNA, 25 bp, Artificial
  probe
  misc_feature (1)..(25): SEQ ID NO: 2091; WAN024FEH; Start 16; Stop 40
atgactaaaccaatgatgacggcaa

SEQ ID NO: 314756 - DNA, 25 bp, Artificial
  probe
  misc_feature (1)..(25): SEQ ID NO: 2091; WAN024FEH; Start 15; Stop 39
aatgactaaaccaatgatgacggca

SEQ ID NO: 314757 - DNA, 25 bp, Artificial
  probe
  misc_feature (1)..(25): SEQ ID NO: 2091; WAN024FEH; Start 87; Stop 111
tattgttattccgaatgacatacat

SEQ ID NO: 314758 - DNA, 25 bp, Artificial
  probe
  misc_feature (1)..(25): SEQ ID NO: 2091; WAN024FEH; Start 88; Stop 112
attgttattccgaatgacatacatt

SEQ ID NO: 314759 - DNA, 25 bp, Artificial
  probe
  misc_feature (1)..(25): SEQ ID NO: 2091; WAN024FEH; Start 17; Stop 41
tgactaaaccaatgatgacggcaaa

SEQ ID NO: 314760 - DNA, 25 bp, Artificial
  probe
  misc_feature (1)..(25): SEQ ID NO: 2091; WAN024FEH; Start 18; Stop 42
gactaaaccaatgatgacggcaaaa

SEQ ID NO: 314761 - DNA, 25 bp, Artificial
  probe
  misc_feature (1)..(25): SEQ ID NO: 2091; WAN024FEH; Start 78; Stop 102
acctcattttattgttattccgaat

SEQ ID NO: 314762 - DNA, 25 bp, Artificial
  probe
  misc_feature (1)..(25): SEQ ID NO: 2091; WAN024FEH; Start 85; Stop 109
tttattgttattccgaatgacatac

SEQ ID NO: 314763 - DNA, 25 bp, Artificial
  probe
  misc_feature (1)..(25): SEQ ID NO: 2091; WAN024FEH; Start 76; Stop 100
ttacctcattttattgttattccga

SEQ ID NO: 314764 - DNA, 25 bp, Artificial
  probe
  misc_feature (1)..(25): SEQ ID NO: 2091; WAN024FEH; Start 77; Stop 101
tacctcattttattgttattccgaa

SEQ ID NO: 314765 - DNA, 25 bp, Artificial
  probe
  misc_feature (1)..(25): SEQ ID NO: 2091; WAN024FEH; Start 104; Stop 128
acatacattcttttacattctacca

SEQ ID NO: 314766 - DNA, 25 bp, Artificial
  probe
  misc_feature (1)..(25): SEQ ID NO: 2091; WAN024FEH; Start 75; Stop 99
tttacctcattttattgttattccg

SEQ ID NO: 314767 - DNA, 25 bp, Artificial
  probe
  misc_feature (1)..(25): SEQ ID NO: 2091; WAN024FEH; Start 103; Stop 127
gacatacattcttttacattctacc

SEQ ID NO: 314768 - DNA, 25 bp, Artificial
  probe
  misc_feature (1)..(25): SEQ ID NO: 2091; WAN024FEH; Start 79; Stop 103
cctcattttattgttattccgaatg

SEQ ID NO: 314769 - DNA, 25 bp, Artificial
  probe
  misc_feature (1)..(25): SEQ ID NO: 2091; WAN024FEH; Start 82; Stop 106
cattttattgttattccgaatgaca

SEQ ID NO: 314770 - DNA, 25 bp, Artificial
  probe
  misc_feature (1)..(25): SEQ ID NO: 2091; WAN024FEH; Start 105; Stop 129
catacattcttttacattctaccat

SEQ ID NO: 314771 - DNA, 25 bp, Artificial
  probe
  misc_feature (1)..(25): SEQ ID NO: 2091; WAN024FEH; Start 102; Stop 126
tgacatacattcttttacattctac

SEQ ID NO: 314772 - DNA, 25 bp, Artificial
  probe
  misc_feature (1)..(25): SEQ ID NO: 2091; WAN024FEH; Start 83; Stop 107
attttattgttattccgaatgacat

SEQ ID NO: 314773 - DNA, 25 bp, Artificial
  probe
  misc_feature (1)..(25): SEQ ID NO: 2092; WAN024CC6; Start 995; Stop 1019
caacagaagagataatgaagcaact

SEQ ID NO: 314774 - DNA, 25 bp, Artificial
  probe
  misc_feature (1)..(25): SEQ ID NO: 2092; WAN024CC6; Start 997; Stop 1021
acagaagagataatgaagcaacttg

SEQ ID NO: 314775 - DNA, 25 bp, Artificial
  probe
  misc_feature (1)..(25): SEQ ID NO: 2092; WAN024CC6; Start 998; Stop 1022
cagaagagataatgaagcaacttga

SEQ ID NO: 314776 - DNA, 25 bp, Artificial
  probe
  misc_feature (1)..(25): SEQ ID NO: 2092; WAN024CC6; Start 996; Stop 1020
aacagaagagataatgaagcaactt

SEQ ID NO: 314777 - DNA, 25 bp, Artificial
  probe
  misc_feature (1)..(25): SEQ ID NO: 2092; WAN024CC6; Start 994; Stop 1018
tcaacagaagagataatgaagcaac

SEQ ID NO: 314778 - DNA, 25 bp, Artificial
  probe
  misc_feature (1)..(25): SEQ ID NO: 2092; WAN024CC6; Start 999; Stop 1023
agaagagataatgaagcaacttgaa

SEQ ID NO: 314779 - DNA, 25 bp, Artificial
  probe
  misc_feature (1)..(25): SEQ ID NO: 2092; WAN024CC6; Start 1000; Stop 1024
gaagagataatgaagcaacttgaag

SEQ ID NO: 314780 - DNA, 25 bp, Artificial
  probe
  misc_feature (1)..(25): SEQ ID NO: 2092; WAN024CC6; Start 691; Stop 715
gattggcaattagtacaacttcgtt

SEQ ID NO: 314781 - DNA, 25 bp, Artificial
  probe
  misc_feature (1)..(25): SEQ ID NO: 2092; WAN024CC6; Start 689; Stop 713
ttgattggcaattagtacaacttcg

SEQ ID NO: 314782 - DNA, 25 bp, Artificial
  probe
  misc_feature (1)..(25): SEQ ID NO: 2092; WAN024CC6; Start 695; Stop 719
ggcaattagtacaacttcgttatcg

SEQ ID NO: 314783 - DNA, 25 bp, Artificial
  probe
  misc_feature (1)..(25): SEQ ID NO: 2092; WAN024CC6; Start 694; Stop 718
tggcaattagtacaacttcgttatc

SEQ ID NO: 314784 - DNA, 25 bp, Artificial
  probe
  misc_feature (1)..(25): SEQ ID NO: 2092; WAN024CC6; Start 693; Stop 717
ttggcaattagtacaacttcgttat

SEQ ID NO: 314785 - DNA, 25 bp, Artificial
  probe
  misc_feature (1)..(25): SEQ ID NO: 2092; WAN024CC6; Start 692; Stop 716
attggcaattagtacaacttcgtta

SEQ ID NO: 314786 - DNA, 25 bp, Artificial
  probe
  misc_feature (1)..(25): SEQ ID NO: 2092; WAN024CC6; Start 690; Stop 714
tgattggcaattagtacaacttcgt

SEQ ID NO: 314787 - DNA, 25 bp, Artificial
  probe
  misc_feature (1)..(25): SEQ ID NO: 2092; WAN024CC6; Start 1001; Stop 1025
aagagataatgaagcaacttgaagt

SEQ ID NO: 314788 - DNA, 25 bp, Artificial
  probe
  misc_feature (1)..(25): SEQ ID NO: 2092; WAN024CC6; Start 614; Stop 638
atattaaacttaccgacgatgatgc

SEQ ID NO: 314789 - DNA, 25 bp, Artificial
  probe
  misc_feature (1)..(25): SEQ ID NO: 2092; WAN024CC6; Start 27; Stop 51
actattgaatactcctgaagatgag

SEQ ID NO: 314790 - DNA, 25 bp, Artificial
  probe
  misc_feature (1)..(25): SEQ ID NO: 2092; WAN024CC6; Start 88; Stop 112
actgaattggtgcgtgatatcttaa

SEQ ID NO: 314791 - DNA, 25 bp, Artificial
  probe
  misc_feature (1)..(25): SEQ ID NO: 2092; WAN024CC6; Start 87; Stop 111
aactgaattggtgcgtgatatctta

SEQ ID NO: 314792 - DNA, 25 bp, Artificial
  probe
  misc_feature (1)..(25): SEQ ID NO: 2092; WAN024CC6; Start 432; Stop 456
aaatactcctaaagactcctctgct

SEQ ID NO: 314793 - DNA, 25 bp, Artificial
  probe
  misc_feature (1)..(25): SEQ ID NO: 2092; WAN024CC6; Start 431; Stop 455
taaatactcctaaagactcctctgc

SEQ ID NO: 314794 - DNA, 25 bp, Artificial
  probe
  misc_feature (1)..(25): SEQ ID NO: 2092; WAN024CC6; Start 801; Stop 825
tgaatgtggttattctgacactatt

SEQ ID NO: 314795 - DNA, 25 bp, Artificial
  probe
  misc_feature (1)..(25): SEQ ID NO: 2092; WAN024CC6; Start 800; Stop 824
ttgaatgtggttattctgacactat

SEQ ID NO: 314796 - DNA, 25 bp, Artificial
  probe
  misc_feature (1)..(25): SEQ ID NO: 2092; WAN024CC6; Start 499; Stop 523
accgacttaaatatcaaagagcagt

SEQ ID NO: 314797 - DNA, 25 bp, Artificial
  probe
  misc_feature (1)..(25): SEQ ID NO: 2092; WAN024CC6; Start 433; Stop 457
aatactcctaaagactcctctgctc

SEQ ID NO: 314798 - DNA, 25 bp, Artificial
  probe
  misc_feature (1)..(25): SEQ ID NO: 2092; WAN024CC6; Start 498; Stop 522
taccgacttaaatatcaaagagcag

SEQ ID NO: 314799 - DNA, 25 bp, Artificial
  probe
  misc_feature (1)..(25): SEQ ID NO: 2092; WAN024CC6; Start 448; Stop 472
tcctctgctccatttgagttaataa

SEQ ID NO: 314800 - DNA, 25 bp, Artificial
  probe
  misc_feature (1)..(25): SEQ ID NO: 2092; WAN024CC6; Start 447; Stop 471
ctcctctgctccatttgagttaata

SEQ ID NO: 314801 - DNA, 25 bp, Artificial
  probe
  misc_feature (1)..(25): SEQ ID NO: 2092; WAN024CC6; Start 449; Stop 473
cctctgctccatttgagttaataaa

SEQ ID NO: 314802 - DNA, 25 bp, Artificial
  probe
  misc_feature (1)..(25): SEQ ID NO: 2092; WAN024CC6; Start 684; Stop 708
caatgttgattggcaattagtacaa

SEQ ID NO: 314803 - DNA, 25 bp, Artificial
  probe
  misc_feature (1)..(25): SEQ ID NO: 2092; WAN024CC6; Start 500; Stop 524
ccgacttaaatatcaaagagcagta

SEQ ID NO: 314804 - DNA, 25 bp, Artificial
  probe
  misc_feature (1)..(25): SEQ ID NO: 2092; WAN024CC6; Start 497; Stop 521
ataccgacttaaatatcaaagagca

SEQ ID NO: 314805 - DNA, 25 bp, Artificial
  probe
  misc_feature (1)..(25): SEQ ID NO: 2092; WAN024CC6; Start 26; Stop 50
tactattgaatactcctgaagatga

SEQ ID NO: 314806 - DNA, 25 bp, Artificial
  probe
  misc_feature (1)..(25): SEQ ID NO: 2093; WAN024CVB; Start 631; Stop 655
gattatgtgaccttgctgacttgta

SEQ ID NO: 314807 - DNA, 25 bp, Artificial
  probe
  misc_feature (1)..(25): SEQ ID NO: 2093; WAN024CVB; Start 629; Stop 653
atgattatgtgaccttgctgacttg

SEQ ID NO: 314808 - DNA, 25 bp, Artificial
  probe
  misc_feature (1)..(25): SEQ ID NO: 2093; WAN024CVB; Start 226; Stop 250
ttgaataatgtagtgagtggcgatc

SEQ ID NO: 314809 - DNA, 25 bp, Artificial
  probe
  misc_feature (1)..(25): SEQ ID NO: 2093; WAN024CVB; Start 632; Stop 656
attatgtgaccttgctgacttgtac

SEQ ID NO: 314810 - DNA, 25 bp, Artificial
  probe
  misc_feature (1)..(25): SEQ ID NO: 2093; WAN024CVB; Start 749; Stop 773
aactcagtcatctctatcgctacct

SEQ ID NO: 314811 - DNA, 25 bp, Artificial
  probe
  misc_feature (1)..(25): SEQ ID NO: 2093; WAN024CVB; Start 630; Stop 654
tgattatgtgaccttgctgacttgt

SEQ ID NO: 314812 - DNA, 25 bp, Artificial
  probe
  misc_feature (1)..(25): SEQ ID NO: 2093; WAN024CVB; Start 628; Stop 652
catgattatgtgaccttgctgactt

SEQ ID NO: 314813 - DNA, 25 bp, Artificial
  probe
  misc_feature (1)..(25): SEQ ID NO: 2093; WAN024CVB; Start 229; Stop 253
aataatgtagtgagtggcgatcctt

SEQ ID NO: 314814 - DNA, 25 bp, Artificial
  probe
  misc_feature (1)..(25): SEQ ID NO: 2093; WAN024CVB; Start 228; Stop 252
gaataatgtagtgagtggcgatcct

SEQ ID NO: 314815 - DNA, 25 bp, Artificial
  probe
  misc_feature (1)..(25): SEQ ID NO: 2093; WAN024CVB; Start 592; Stop 616
ccgacgaactttgatgatttattga

SEQ ID NO: 314816 - DNA, 25 bp, Artificial
  probe
  misc_feature (1)..(25): SEQ ID NO: 2093; WAN024CVB; Start 225; Stop 249
tttgaataatgtagtgagtggcgat

SEQ ID NO: 314817 - DNA, 25 bp, Artificial
  probe
  misc_feature (1)..(25): SEQ ID NO: 2093; WAN024CVB; Start 742; Stop 766
gcaaacaaactcagtcatctctatc

SEQ ID NO: 314818 - DNA, 25 bp, Artificial
  probe
  misc_feature (1)..(25): SEQ ID NO: 2093; WAN024CVB; Start 743; Stop 767
caaacaaactcagtcatctctatcg

SEQ ID NO: 314819 - DNA, 25 bp, Artificial
  probe
  misc_feature (1)..(25): SEQ ID NO: 2093; WAN024CVB; Start 741; Stop 765
agcaaacaaactcagtcatctctat

SEQ ID NO: 314820 - DNA, 25 bp, Artificial
  probe
  misc_feature (1)..(25): SEQ ID NO: 2093; WAN024CVB; Start 230; Stop 254
ataatgtagtgagtggcgatccttg

SEQ ID NO: 314821 - DNA, 25 bp, Artificial
  probe
  misc_feature (1)..(25): SEQ ID NO: 2093; WAN024CVB; Start 227; Stop 251
tgaataatgtagtgagtggcgatcc

SEQ ID NO: 314822 - DNA, 25 bp, Artificial
  probe
  misc_feature (1)..(25): SEQ ID NO: 2093; WAN024CVB; Start 716; Stop 740
cagaggttgaggaagaatttattgc

SEQ ID NO: 314823 - DNA, 25 bp, Artificial
  probe
  misc_feature (1)..(25): SEQ ID NO: 2093; WAN024CVB; Start 715; Stop 739
gcagaggttgaggaagaatttattg

SEQ ID NO: 314824 - DNA, 25 bp, Artificial
  probe
  misc_feature (1)..(25): SEQ ID NO: 2093; WAN024CVB; Start 714; Stop 738
agcagaggttgaggaagaatttatt

SEQ ID NO: 314825 - DNA, 25 bp, Artificial
  probe
  misc_feature (1)..(25): SEQ ID NO: 2093; WAN024CVB; Start 712; Stop 736
gtagcagaggttgaggaagaattta

SEQ ID NO: 314826 - DNA, 25 bp, Artificial
  probe
  misc_feature (1)..(25): SEQ ID NO: 2093; WAN024CVB; Start 485; Stop 509
ctaagatgtttacggatttgaccaa

SEQ ID NO: 314827 - DNA, 25 bp, Artificial
  probe
  misc_feature (1)..(25): SEQ ID NO: 2093; WAN024CVB; Start 173; Stop 197
atgaggctgacattgatgaacgaat

SEQ ID NO: 314828 - DNA, 25 bp, Artificial
  probe
  misc_feature (1)..(25): SEQ ID NO: 2093; WAN024CVB; Start 784; Stop 808
gcagttggtttgattgtgattcttt

SEQ ID NO: 314829 - DNA, 25 bp, Artificial
  probe
  misc_feature (1)..(25): SEQ ID NO: 2093; WAN024CVB; Start 713; Stop 737
tagcagaggttgaggaagaatttat

SEQ ID NO: 314830 - DNA, 25 bp, Artificial
  probe
  misc_feature (1)..(25): SEQ ID NO: 2093; WAN024CVB; Start 747; Stop 771
caaactcagtcatctctatcgctac

SEQ ID NO: 314831 - DNA, 25 bp, Artificial
  probe
  misc_feature (1)..(25): SEQ ID NO: 2093; WAN024CVB; Start 224; Stop 248
ctttgaataatgtagtgagtggcga

SEQ ID NO: 314832 - DNA, 25 bp, Artificial
  probe
  misc_feature (1)..(25): SEQ ID NO: 2093; WAN024CVB; Start 223; Stop 247
tctttgaataatgtagtgagtggcg

SEQ ID NO: 314833 - DNA, 25 bp, Artificial
  probe
  misc_feature (1)..(25): SEQ ID NO: 2093; WAN024CVB; Start 740; Stop 764
cagcaaacaaactcagtcatctcta

SEQ ID NO: 314834 - DNA, 25 bp, Artificial
  probe
  misc_feature (1)..(25): SEQ ID NO: 2093; WAN024CVB; Start 106; Stop 130
cgcttgtattatcgagtggaatcaa

SEQ ID NO: 314835 - DNA, 25 bp, Artificial
  probe
  misc_feature (1)..(25): SEQ ID NO: 2093; WAN024CVB; Start 746; Stop 770
acaaactcagtcatctctatcgcta

SEQ ID NO: 314836 - DNA, 25 bp, Artificial
  probe
  misc_feature (1)..(25): SEQ ID NO: 2093; WAN024CVB; Start 591; Stop 615
gccgacgaactttgatgatttattg

SEQ ID NO: 314837 - DNA, 25 bp, Artificial
  probe
  misc_feature (1)..(25): SEQ ID NO: 2093; WAN024CVB; Start 590; Stop 614
agccgacgaactttgatgatttatt

SEQ ID NO: 314838 - DNA, 25 bp, Artificial
  probe
  misc_feature (1)..(25): SEQ ID NO: 2093; WAN024CVB; Start 744; Stop 768
aaacaaactcagtcatctctatcgc

SEQ ID NO: 314839 - DNA, 25 bp, Artificial
  probe
  misc_feature (1)..(25): SEQ ID NO: 2094; WAN024DWH; Start 193; Stop 217
gataaggagagttcttgtggtcttg

SEQ ID NO: 314840 - DNA, 25 bp, Artificial
  probe
  misc_feature (1)..(25): SEQ ID NO: 2094; WAN024DWH; Start 194; Stop 218
ataaggagagttcttgtggtcttgt

SEQ ID NO: 314841 - DNA, 25 bp, Artificial
  probe
  misc_feature (1)..(25): SEQ ID NO: 2094; WAN024DWH; Start 195; Stop 219
taaggagagttcttgtggtcttgtt

SEQ ID NO: 314842 - DNA, 25 bp, Artificial
  probe
  misc_feature (1)..(25): SEQ ID NO: 2094; WAN024DWH; Start 192; Stop 216
cgataaggagagttcttgtggtctt

SEQ ID NO: 314843 - DNA, 25 bp, Artificial
  probe
  misc_feature (1)..(25): SEQ ID NO: 2094; WAN024DWH; Start 190; Stop 214
aacgataaggagagttcttgtggtc

SEQ ID NO: 314844 - DNA, 25 bp, Artificial
  probe
  misc_feature (1)..(25): SEQ ID NO: 2094; WAN024DWH; Start 53; Stop 77
tgacggaatcaagtaactatactgg

SEQ ID NO: 314845 - DNA, 25 bp, Artificial
  probe
  misc_feature (1)..(25): SEQ ID NO: 2094; WAN024DWH; Start 57; Stop 81
ggaatcaagtaactatactggcaac

SEQ ID NO: 314846 - DNA, 25 bp, Artificial
  probe
  misc_feature (1)..(25): SEQ ID NO: 2094; WAN024DWH; Start 56; Stop 80
cggaatcaagtaactatactggcaa

SEQ ID NO: 314847 - DNA, 25 bp, Artificial
  probe
  misc_feature (1)..(25): SEQ ID NO: 2094; WAN024DWH; Start 54; Stop 78
gacggaatcaagtaactatactggc

SEQ ID NO: 314848 - DNA, 25 bp, Artificial
  probe
  misc_feature (1)..(25): SEQ ID NO: 2094; WAN024DWH; Start 196; Stop 220
aaggagagttcttgtggtcttgttc

SEQ ID NO: 314849 - DNA, 25 bp, Artificial
  probe
  misc_feature (1)..(25): SEQ ID NO: 2094; WAN024DWH; Start 59; Stop 83
aatcaagtaactatactggcaacag

SEQ ID NO: 314850 - DNA, 25 bp, Artificial
  probe
  misc_feature (1)..(25): SEQ ID NO: 2094; WAN024DWH; Start 58; Stop 82
gaatcaagtaactatactggcaaca

SEQ ID NO: 314851 - DNA, 25 bp, Artificial
  probe
  misc_feature (1)..(25): SEQ ID NO: 2094; WAN024DWH; Start 27; Stop 51
cccaagactactacagcaaacatat

SEQ ID NO: 314852 - DNA, 25 bp, Artificial
  probe
  misc_feature (1)..(25): SEQ ID NO: 2094; WAN024DWH; Start 23; Stop 47
ataacccaagactactacagcaaac

SEQ ID NO: 314853 - DNA, 25 bp, Artificial
  probe
  misc_feature (1)..(25): SEQ ID NO: 2094; WAN024DWH; Start 22; Stop 46
cataacccaagactactacagcaaa

SEQ ID NO: 314854 - DNA, 25 bp, Artificial
  probe
  misc_feature (1)..(25): SEQ ID NO: 2094; WAN024DWH; Start 55; Stop 79
acggaatcaagtaactatactggca

SEQ ID NO: 314855 - DNA, 25 bp, Artificial
  probe
  misc_feature (1)..(25): SEQ ID NO: 2094; WAN024DWH; Start 28; Stop 52
ccaagactactacagcaaacatatt

SEQ ID NO: 314856 - DNA, 25 bp, Artificial
  probe
  misc_feature (1)..(25): SEQ ID NO: 2094; WAN024DWH; Start 191; Stop 215
acgataaggagagttcttgtggtct

SEQ ID NO: 314857 - DNA, 25 bp, Artificial
  probe
  misc_feature (1)..(25): SEQ ID NO: 2094; WAN024DWH; Start 26; Stop 50
acccaagactactacagcaaacata

SEQ ID NO: 314858 - DNA, 25 bp, Artificial
  probe
  misc_feature (1)..(25): SEQ ID NO: 2094; WAN024DWH; Start 21; Stop 45
acataacccaagactactacagcaa

SEQ ID NO: 314859 - DNA, 25 bp, Artificial
  probe
  misc_feature (1)..(25): SEQ ID NO: 2094; WAN024DWH; Start 24; Stop 48
taacccaagactactacagcaaaca

SEQ ID NO: 314860 - DNA, 25 bp, Artificial
  probe
  misc_feature (1)..(25): SEQ ID NO: 2094; WAN024DWH; Start 20; Stop 44
cacataacccaagactactacagca

SEQ ID NO: 314861 - DNA, 25 bp, Artificial
  probe
  misc_feature (1)..(25): SEQ ID NO: 2094; WAN024DWH; Start 25; Stop 49
aacccaagactactacagcaaacat

SEQ ID NO: 314862 - DNA, 25 bp, Artificial
  probe
  misc_feature (1)..(25): SEQ ID NO: 2094; WAN024DWH; Start 189; Stop 213
aaacgataaggagagttcttgtggt

SEQ ID NO: 314863 - DNA, 25 bp, Artificial
  probe
  misc_feature (1)..(25): SEQ ID NO: 2094; WAN024DWH; Start 129; Stop 153
aagtcaggtccaaagccatcattta

SEQ ID NO: 314864 - DNA, 25 bp, Artificial
  probe
  misc_feature (1)..(25): SEQ ID NO: 2094; WAN024DWH; Start 29; Stop 53
caagactactacagcaaacatattt

SEQ ID NO: 314865 - DNA, 25 bp, Artificial
  probe
  misc_feature (1)..(25): SEQ ID NO: 2094; WAN024DWH; Start 52; Stop 76
ttgacggaatcaagtaactatactg

SEQ ID NO: 314866 - DNA, 25 bp, Artificial
  probe
  misc_feature (1)..(25): SEQ ID NO: 2094; WAN024DWH; Start 140; Stop 164
aaagccatcatttaccaaggtgtct

SEQ ID NO: 314867 - DNA, 25 bp, Artificial
  probe
  misc_feature (1)..(25): SEQ ID NO: 2094; WAN024DWH; Start 139; Stop 163
caaagccatcatttaccaaggtgtc

SEQ ID NO: 314868 - DNA, 25 bp, Artificial
  probe
  misc_feature (1)..(25): SEQ ID NO: 2094; WAN024DWH; Start 141; Stop 165
aagccatcatttaccaaggtgtctt

SEQ ID NO: 314869 - DNA, 25 bp, Artificial
  probe
  misc_feature (1)..(25): SEQ ID NO: 2094; WAN024DWH; Start 130; Stop 154
agtcaggtccaaagccatcatttac

SEQ ID NO: 314870 - DNA, 25 bp, Artificial
  probe
  misc_feature (1)..(25): SEQ ID NO: 2094; WAN024DWH; Start 128; Stop 152
aaagtcaggtccaaagccatcattt

SEQ ID NO: 314871 - DNA, 25 bp, Artificial
  probe
  misc_feature (1)..(25): SEQ ID NO: 2094; WAN024DWH; Start 19; Stop 43
gcacataacccaagactactacagc

SEQ ID NO: 314872 - DNA, 25 bp, Artificial
  probe
  misc_feature (1)..(25): SEQ ID NO: 2095; WAN024CYE; Start 204; Stop 228
cttccttgacaatcttactgctctc

SEQ ID NO: 314873 - DNA, 25 bp, Artificial
  probe
  misc_feature (1)..(25): SEQ ID NO: 2095; WAN024CYE; Start 205; Stop 229
ttccttgacaatcttactgctctca

SEQ ID NO: 314874 - DNA, 25 bp, Artificial
  probe
  misc_feature (1)..(25): SEQ ID NO: 2095; WAN024CYE; Start 199; Stop 223
catggcttccttgacaatcttactg

SEQ ID NO: 314875 - DNA, 25 bp, Artificial
  probe
  misc_feature (1)..(25): SEQ ID NO: 2095; WAN024CYE; Start 314; Stop 338
ttagtaatggtcgcaactgtcttga

SEQ ID NO: 314876 - DNA, 25 bp, Artificial
  probe
  misc_feature (1)..(25): SEQ ID NO: 2095; WAN024CYE; Start 326; Stop 350
gcaactgtcttgacattaatcttct

SEQ ID NO: 314877 - DNA, 25 bp, Artificial
  probe
  misc_feature (1)..(25): SEQ ID NO: 2095; WAN024CYE; Start 392; Stop 416
tctgaaatggttggactggtattag

SEQ ID NO: 314878 - DNA, 25 bp, Artificial
  probe
  misc_feature (1)..(25): SEQ ID NO: 2095; WAN024CYE; Start 161; Stop 185
tgaaggctgataaaggtattgagtt

SEQ ID NO: 314879 - DNA, 25 bp, Artificial
  probe
  misc_feature (1)..(25): SEQ ID NO: 2095; WAN024CYE; Start 160; Stop 184
atgaaggctgataaaggtattgagt

SEQ ID NO: 314880 - DNA, 25 bp, Artificial
  probe
  misc_feature (1)..(25): SEQ ID NO: 2095; WAN024CYE; Start 325; Stop 349
cgcaactgtcttgacattaatcttc

SEQ ID NO: 314881 - DNA, 25 bp, Artificial
  probe
  misc_feature (1)..(25): SEQ ID NO: 2095; WAN024CYE; Start 203; Stop 227
gcttccttgacaatcttactgctct

SEQ ID NO: 314882 - DNA, 25 bp, Artificial
  probe
  misc_feature (1)..(25): SEQ ID NO: 2095; WAN024CYE; Start 324; Stop 348
tcgcaactgtcttgacattaatctt

SEQ ID NO: 314883 - DNA, 25 bp, Artificial
  probe
  misc_feature (1)..(25): SEQ ID NO: 2095; WAN024CYE; Start 162; Stop 186
gaaggctgataaaggtattgagttt

SEQ ID NO: 314884 - DNA, 25 bp, Artificial
  probe
  misc_feature (1)..(25): SEQ ID NO: 2095; WAN024CYE; Start 393; Stop 417
ctgaaatggttggactggtattagc

SEQ ID NO: 314885 - DNA, 25 bp, Artificial
  probe
  misc_feature (1)..(25): SEQ ID NO: 2095; WAN024CYE; Start 323; Stop 347
gtcgcaactgtcttgacattaatct

SEQ ID NO: 314886 - DNA, 25 bp, Artificial
  probe
  misc_feature (1)..(25): SEQ ID NO: 2095; WAN024CYE; Start 234; Stop 258
gaataccgtcatcagagaaaccaac

SEQ ID NO: 314887 - DNA, 25 bp, Artificial
  probe
  misc_feature (1)..(25): SEQ ID NO: 2095; WAN024CYE; Start 274; Stop 298
gagtgccttaaagtcagtcaagttt

SEQ ID NO: 314888 - DNA, 25 bp, Artificial
  probe
  misc_feature (1)..(25): SEQ ID NO: 2095; WAN024CYE; Start 88; Stop 112
gcagatatggaaatgttctctagca

SEQ ID NO: 314889 - DNA, 25 bp, Artificial
  probe
  misc_feature (1)..(25): SEQ ID NO: 2095; WAN024CYE; Start 200; Stop 224
atggcttccttgacaatcttactgc

SEQ ID NO: 314890 - DNA, 25 bp, Artificial
  probe
  misc_feature (1)..(25): SEQ ID NO: 2095; WAN024CYE; Start 159; Stop 183
catgaaggctgataaaggtattgag

SEQ ID NO: 314891 - DNA, 25 bp, Artificial
  probe
  misc_feature (1)..(25): SEQ ID NO: 2095; WAN024CYE; Start 327; Stop 351
caactgtcttgacattaatcttctc

SEQ ID NO: 314892 - DNA, 25 bp, Artificial
  probe
  misc_feature (1)..(25): SEQ ID NO: 2095; WAN024CYE; Start 86; Stop 110
ccgcagatatggaaatgttctctag

SEQ ID NO: 314893 - DNA, 25 bp, Artificial
  probe
  misc_feature (1)..(25): SEQ ID NO: 2095; WAN024CYE; Start 85; Stop 109
accgcagatatggaaatgttctcta

SEQ ID NO: 314894 - DNA, 25 bp, Artificial
  probe
  misc_feature (1)..(25): SEQ ID NO: 2095; WAN024CYE; Start 329; Stop 353
actgtcttgacattaatcttctctt

SEQ ID NO: 314895 - DNA, 25 bp, Artificial
  probe
  misc_feature (1)..(25): SEQ ID NO: 2095; WAN024CYE; Start 328; Stop 352
aactgtcttgacattaatcttctct

SEQ ID NO: 314896 - DNA, 25 bp, Artificial
  probe
  misc_feature (1)..(25): SEQ ID NO: 2095; WAN024CYE; Start 315; Stop 339
tagtaatggtcgcaactgtcttgac

SEQ ID NO: 314897 - DNA, 25 bp, Artificial
  probe
  misc_feature (1)..(25): SEQ ID NO: 2095; WAN024CYE; Start 268; Stop 292
ttctaagagtgccttaaagtcagtc

SEQ ID NO: 314898 - DNA, 25 bp, Artificial
  probe
  misc_feature (1)..(25): SEQ ID NO: 2095; WAN024CYE; Start 267; Stop 291
cttctaagagtgccttaaagtcagt

SEQ ID NO: 314899 - DNA, 25 bp, Artificial
  probe
  misc_feature (1)..(25): SEQ ID NO: 2095; WAN024CYE; Start 89; Stop 113
cagatatggaaatgttctctagcaa

SEQ ID NO: 314900 - DNA, 25 bp, Artificial
  probe
  misc_feature (1)..(25): SEQ ID NO: 2095; WAN024CYE; Start 391; Stop 415
gtctgaaatggttggactggtatta

SEQ ID NO: 314901 - DNA, 25 bp, Artificial
  probe
  misc_feature (1)..(25): SEQ ID NO: 2095; WAN024CYE; Start 313; Stop 337
tttagtaatggtcgcaactgtcttg

SEQ ID NO: 314902 - DNA, 25 bp, Artificial
  probe
  misc_feature (1)..(25): SEQ ID NO: 2095; WAN024CYE; Start 271; Stop 295
taagagtgccttaaagtcagtcaag

SEQ ID NO: 314903 - DNA, 25 bp, Artificial
  probe
  misc_feature (1)..(25): SEQ ID NO: 2095; WAN024CYE; Start 270; Stop 294
ctaagagtgccttaaagtcagtcaa

SEQ ID NO: 314904 - DNA, 25 bp, Artificial
  probe
  misc_feature (1)..(25): SEQ ID NO: 2095; WAN024CYE; Start 117; Stop 141
tttcattaaagccaagaacaccgtt

SEQ ID NO: 314905 - DNA, 25 bp, Artificial
  probe
  misc_feature (1)..(25): SEQ ID NO: 2096; WAN024G3I; Start 158; Stop 182
attcttcaacctgattggcttctaa

SEQ ID NO: 314906 - DNA, 25 bp, Artificial
  probe
  misc_feature (1)..(25): SEQ ID NO: 2096; WAN024G3I; Start 155; Stop 179
ctaattcttcaacctgattggcttc

SEQ ID NO: 314907 - DNA, 25 bp, Artificial
  probe
  misc_feature (1)..(25): SEQ ID NO: 2096; WAN024G3I; Start 157; Stop 181
aattcttcaacctgattggcttcta

SEQ ID NO: 314908 - DNA, 25 bp, Artificial
  probe
  misc_feature (1)..(25): SEQ ID NO: 2096; WAN024G3I; Start 156; Stop 180
taattcttcaacctgattggcttct

SEQ ID NO: 314909 - DNA, 25 bp, Artificial
  probe
  misc_feature (1)..(25): SEQ ID NO: 2096; WAN024G3I; Start 159; Stop 183
ttcttcaacctgattggcttctaag

SEQ ID NO: 314910 - DNA, 25 bp, Artificial
  probe
  misc_feature (1)..(25): SEQ ID NO: 2096; WAN024G3I; Start 154; Stop 178
cctaattcttcaacctgattggctt

SEQ ID NO: 314911 - DNA, 25 bp, Artificial
  probe
  misc_feature (1)..(25): SEQ ID NO: 2096; WAN024G3I; Start 161; Stop 185
cttcaacctgattggcttctaagag

SEQ ID NO: 314912 - DNA, 25 bp, Artificial
  probe
  misc_feature (1)..(25): SEQ ID NO: 2096; WAN024G3I; Start 162; Stop 186
ttcaacctgattggcttctaagaga

SEQ ID NO: 314913 - DNA, 25 bp, Artificial
  probe
  misc_feature (1)..(25): SEQ ID NO: 2096; WAN024G3I; Start 165; Stop 189
aacctgattggcttctaagagacaa

SEQ ID NO: 314914 - DNA, 25 bp, Artificial
  probe
  misc_feature (1)..(25): SEQ ID NO: 2096; WAN024G3I; Start 163; Stop 187
tcaacctgattggcttctaagagac

SEQ ID NO: 314915 - DNA, 25 bp, Artificial
  probe
  misc_feature (1)..(25): SEQ ID NO: 2096; WAN024G3I; Start 164; Stop 188
caacctgattggcttctaagagaca

SEQ ID NO: 314916 - DNA, 25 bp, Artificial
  probe
  misc_feature (1)..(25): SEQ ID NO: 2096; WAN024G3I; Start 145; Stop 169
atctcaaaccctaattcttcaacct

SEQ ID NO: 314917 - DNA, 25 bp, Artificial
  probe
  misc_feature (1)..(25): SEQ ID NO: 2096; WAN024G3I; Start 37; Stop 61
aaacagtcaattagtcctcacaaac

SEQ ID NO: 314918 - DNA, 25 bp, Artificial
  probe
  misc_feature (1)..(25): SEQ ID NO: 2096; WAN024G3I; Start 146; Stop 170
tctcaaaccctaattcttcaacctg

SEQ ID NO: 314919 - DNA, 25 bp, Artificial
  probe
  misc_feature (1)..(25): SEQ ID NO: 2096; WAN024G3I; Start 172; Stop 196
ttggcttctaagagacaaacattct

SEQ ID NO: 314920 - DNA, 25 bp, Artificial
  probe
  misc_feature (1)..(25): SEQ ID NO: 2096; WAN024G3I; Start 171; Stop 195
attggcttctaagagacaaacattc

SEQ ID NO: 314921 - DNA, 25 bp, Artificial
  probe
  misc_feature (1)..(25): SEQ ID NO: 2096; WAN024G3I; Start 170; Stop 194
gattggcttctaagagacaaacatt

SEQ ID NO: 314922 - DNA, 25 bp, Artificial
  probe
  misc_feature (1)..(25): SEQ ID NO: 2096; WAN024G3I; Start 169; Stop 193
tgattggcttctaagagacaaacat

SEQ ID NO: 314923 - DNA, 25 bp, Artificial
  probe
  misc_feature (1)..(25): SEQ ID NO: 2096; WAN024G3I; Start 148; Stop 172
tcaaaccctaattcttcaacctgat

SEQ ID NO: 314924 - DNA, 25 bp, Artificial
  probe
  misc_feature (1)..(25): SEQ ID NO: 2096; WAN024G3I; Start 168; Stop 192
ctgattggcttctaagagacaaaca

SEQ ID NO: 314925 - DNA, 25 bp, Artificial
  probe
  misc_feature (1)..(25): SEQ ID NO: 2096; WAN024G3I; Start 150; Stop 174
aaaccctaattcttcaacctgattg

SEQ ID NO: 314926 - DNA, 25 bp, Artificial
  probe
  misc_feature (1)..(25): SEQ ID NO: 2096; WAN024G3I; Start 149; Stop 173
caaaccctaattcttcaacctgatt

SEQ ID NO: 314927 - DNA, 25 bp, Artificial
  probe
  misc_feature (1)..(25): SEQ ID NO: 2096; WAN024G3I; Start 147; Stop 171
ctcaaaccctaattcttcaacctga

SEQ ID NO: 314928 - DNA, 25 bp, Artificial
  probe
  misc_feature (1)..(25): SEQ ID NO: 2096; WAN024G3I; Start 144; Stop 168
tatctcaaaccctaattcttcaacc

SEQ ID NO: 314929 - DNA, 25 bp, Artificial
  probe
  misc_feature (1)..(25): SEQ ID NO: 2096; WAN024G3I; Start 151; Stop 175
aaccctaattcttcaacctgattgg

SEQ ID NO: 314930 - DNA, 25 bp, Artificial
  probe
  misc_feature (1)..(25): SEQ ID NO: 2096; WAN024G3I; Start 167; Stop 191
cctgattggcttctaagagacaaac

SEQ ID NO: 314931 - DNA, 25 bp, Artificial
  probe
  misc_feature (1)..(25): SEQ ID NO: 2096; WAN024G3I; Start 160; Stop 184
tcttcaacctgattggcttctaaga

SEQ ID NO: 314932 - DNA, 25 bp, Artificial
  probe
  misc_feature (1)..(25): SEQ ID NO: 2096; WAN024G3I; Start 166; Stop 190
acctgattggcttctaagagacaaa

SEQ ID NO: 314933 - DNA, 25 bp, Artificial
  probe
  misc_feature (1)..(25): SEQ ID NO: 2096; WAN024G3I; Start 143; Stop 167
ctatctcaaaccctaattcttcaac

SEQ ID NO: 314934 - DNA, 25 bp, Artificial
  probe
  misc_feature (1)..(25): SEQ ID NO: 2096; WAN024G3I; Start 142; Stop 166
tctatctcaaaccctaattcttcaa

SEQ ID NO: 314935 - DNA, 25 bp, Artificial
  probe
  misc_feature (1)..(25): SEQ ID NO: 2096; WAN024G3I; Start 141; Stop 165
ttctatctcaaaccctaattcttca

SEQ ID NO: 314936 - DNA, 25 bp, Artificial
  probe
  misc_feature (1)..(25): SEQ ID NO: 2096; WAN024G3I; Start 139; Stop 163
acttctatctcaaaccctaattctt

SEQ ID NO: 314937 - DNA, 25 bp, Artificial
  probe
  misc_feature (1)..(25): SEQ ID NO: 2096; WAN024G3I; Start 138; Stop 162
aacttctatctcaaaccctaattct

SEQ ID NO: 314938 - DNA, 25 bp, Artificial
  probe
  misc_feature (1)..(25): SEQ ID NO: 2097; WAN024CLY; Start 18; Stop 42
gcacaagaaaataaatgaacagaca

SEQ ID NO: 314939 - DNA, 25 bp, Artificial
  probe
  misc_feature (1)..(25): SEQ ID NO: 2097; WAN024CLY; Start 59; Stop 83
atgcagaaactgatattgtctcttt

SEQ ID NO: 314940 - DNA, 25 bp, Artificial
  probe
  misc_feature (1)..(25): SEQ ID NO: 2097; WAN024CLY; Start 58; Stop 82
aatgcagaaactgatattgtctctt

SEQ ID NO: 314941 - DNA, 25 bp, Artificial
  probe
  misc_feature (1)..(25): SEQ ID NO: 2097; WAN024CLY; Start 17; Stop 41
agcacaagaaaataaatgaacagac

SEQ ID NO: 314942 - DNA, 25 bp, Artificial
  probe
  misc_feature (1)..(25): SEQ ID NO: 2097; WAN024CLY; Start 15; Stop 39
tgagcacaagaaaataaatgaacag

SEQ ID NO: 314943 - DNA, 25 bp, Artificial
  probe
  misc_feature (1)..(25): SEQ ID NO: 2097; WAN024CLY; Start 4; Stop 28
ctggatttgaatgagcacaagaaaa

SEQ ID NO: 314944 - DNA, 25 bp, Artificial
  probe
  misc_feature (1)..(25): SEQ ID NO: 2097; WAN024CLY; Start 55; Stop 79
tgtaatgcagaaactgatattgtct

SEQ ID NO: 314945 - DNA, 25 bp, Artificial
  probe
  misc_feature (1)..(25): SEQ ID NO: 2097; WAN024CLY; Start 54; Stop 78
ctgtaatgcagaaactgatattgtc

SEQ ID NO: 314946 - DNA, 25 bp, Artificial
  probe
  misc_feature (1)..(25): SEQ ID NO: 2097; WAN024CLY; Start 16; Stop 40
gagcacaagaaaataaatgaacaga

SEQ ID NO: 314947 - DNA, 25 bp, Artificial
  probe
  misc_feature (1)..(25): SEQ ID NO: 2097; WAN024CLY; Start 5; Stop 29
tggatttgaatgagcacaagaaaat

SEQ ID NO: 314948 - DNA, 25 bp, Artificial
  probe
  misc_feature (1)..(25): SEQ ID NO: 2097; WAN024CLY; Start 56; Stop 80
gtaatgcagaaactgatattgtctc

SEQ ID NO: 314949 - DNA, 25 bp, Artificial
  probe
  misc_feature (1)..(25): SEQ ID NO: 2097; WAN024CLY; Start 57; Stop 81
taatgcagaaactgatattgtctct

SEQ ID NO: 314950 - DNA, 25 bp, Artificial
  probe
  misc_feature (1)..(25): SEQ ID NO: 2097; WAN024CLY; Start 14; Stop 38
atgagcacaagaaaataaatgaaca

SEQ ID NO: 314951 - DNA, 25 bp, Artificial
  probe
  misc_feature (1)..(25): SEQ ID NO: 2097; WAN024CLY; Start 11; Stop 35
tgaatgagcacaagaaaataaatga

SEQ ID NO: 314952 - DNA, 25 bp, Artificial
  probe
  misc_feature (1)..(25): SEQ ID NO: 2097; WAN024CLY; Start 3; Stop 27
gctggatttgaatgagcacaagaaa

SEQ ID NO: 314953 - DNA, 25 bp, Artificial
  probe
  misc_feature (1)..(25): SEQ ID NO: 2097; WAN024CLY; Start 6; Stop 30
ggatttgaatgagcacaagaaaata

SEQ ID NO: 314954 - DNA, 25 bp, Artificial
  probe
  misc_feature (1)..(25): SEQ ID NO: 2097; WAN024CLY; Start 13; Stop 37
aatgagcacaagaaaataaatgaac

SEQ ID NO: 314955 - DNA, 25 bp, Artificial
  probe
  misc_feature (1)..(25): SEQ ID NO: 2097; WAN024CLY; Start 12; Stop 36
gaatgagcacaagaaaataaatgaa

SEQ ID NO: 314956 - DNA, 25 bp, Artificial
  probe
  misc_feature (1)..(25): SEQ ID NO: 2097; WAN024CLY; Start 10; Stop 34
ttgaatgagcacaagaaaataaatg

SEQ ID NO: 314957 - DNA, 25 bp, Artificial
  probe
  misc_feature (1)..(25): SEQ ID NO: 2097; WAN024CLY; Start 19; Stop 43
cacaagaaaataaatgaacagacaa

SEQ ID NO: 314958 - DNA, 25 bp, Artificial
  probe
  misc_feature (1)..(25): SEQ ID NO: 2097; WAN024CLY; Start 60; Stop 84
tgcagaaactgatattgtctctttt

SEQ ID NO: 314959 - DNA, 25 bp, Artificial
  probe
  misc_feature (1)..(25): SEQ ID NO: 2097; WAN024CLY; Start 7; Stop 31
gatttgaatgagcacaagaaaataa

SEQ ID NO: 314960 - DNA, 25 bp, Artificial
  probe
  misc_feature (1)..(25): SEQ ID NO: 2097; WAN024CLY; Start 53; Stop 77
tctgtaatgcagaaactgatattgt

SEQ ID NO: 314961 - DNA, 25 bp, Artificial
  probe
  misc_feature (1)..(25): SEQ ID NO: 2097; WAN024CLY; Start 9; Stop 33
tttgaatgagcacaagaaaataaat

SEQ ID NO: 314962 - DNA, 25 bp, Artificial
  probe
  misc_feature (1)..(25): SEQ ID NO: 2097; WAN024CLY; Start 8; Stop 32
atttgaatgagcacaagaaaataaa

SEQ ID NO: 314963 - DNA, 25 bp, Artificial
  probe
  misc_feature (1)..(25): SEQ ID NO: 2097; WAN024CLY; Start 20; Stop 44
acaagaaaataaatgaacagacaat

SEQ ID NO: 314964 - DNA, 25 bp, Artificial
  probe
  misc_feature (1)..(25): SEQ ID NO: 2098; WAN024ERT; Start 199; Stop 223
ctgagtgaggatgataagcagttaa

SEQ ID NO: 314965 - DNA, 25 bp, Artificial
  probe
  misc_feature (1)..(25): SEQ ID NO: 2098; WAN024ERT; Start 228; Stop 252
agagatgtcagcgatacgaattgaa

SEQ ID NO: 314966 - DNA, 25 bp, Artificial
  probe
  misc_feature (1)..(25): SEQ ID NO: 2098; WAN024ERT; Start 227; Stop 251
aagagatgtcagcgatacgaattga

SEQ ID NO: 314967 - DNA, 25 bp, Artificial
  probe
  misc_feature (1)..(25): SEQ ID NO: 2098; WAN024ERT; Start 198; Stop 222
cctgagtgaggatgataagcagtta

SEQ ID NO: 314968 - DNA, 25 bp, Artificial
  probe
  misc_feature (1)..(25): SEQ ID NO: 2098; WAN024ERT; Start 224; Stop 248
ataaagagatgtcagcgatacgaat

SEQ ID NO: 314969 - DNA, 25 bp, Artificial
  probe
  misc_feature (1)..(25): SEQ ID NO: 2098; WAN024ERT; Start 223; Stop 247
aataaagagatgtcagcgatacgaa

SEQ ID NO: 314970 - DNA, 25 bp, Artificial
  probe
  misc_feature (1)..(25): SEQ ID NO: 2098; WAN024ERT; Start 222; Stop 246
aaataaagagatgtcagcgatacga

SEQ ID NO: 314971 - DNA, 25 bp, Artificial
  probe
  misc_feature (1)..(25): SEQ ID NO: 2098; WAN024ERT; Start 200; Stop 224
tgagtgaggatgataagcagttaaa

SEQ ID NO: 314972 - DNA, 25 bp, Artificial
  probe
  misc_feature (1)..(25): SEQ ID NO: 2098; WAN024ERT; Start 268; Stop 292
gctaaattcaagaccttccaaatca

SEQ ID NO: 314973 - DNA, 25 bp, Artificial
  probe
  misc_feature (1)..(25): SEQ ID NO: 2098; WAN024ERT; Start 237; Stop 261
agcgatacgaattgaaattgaacat

SEQ ID NO: 314974 - DNA, 25 bp, Artificial
  probe
  misc_feature (1)..(25): SEQ ID NO: 2098; WAN024ERT; Start 225; Stop 249
taaagagatgtcagcgatacgaatt

SEQ ID NO: 314975 - DNA, 25 bp, Artificial
  probe
  misc_feature (1)..(25): SEQ ID NO: 2098; WAN024ERT; Start 216; Stop 240
gcagttaaataaagagatgtcagcg

SEQ ID NO: 314976 - DNA, 25 bp, Artificial
  probe
  misc_feature (1)..(25): SEQ ID NO: 2098; WAN024ERT; Start 215; Stop 239
agcagttaaataaagagatgtcagc

SEQ ID NO: 314977 - DNA, 25 bp, Artificial
  probe
  misc_feature (1)..(25): SEQ ID NO: 2098; WAN024ERT; Start 217; Stop 241
cagttaaataaagagatgtcagcga

SEQ ID NO: 314978 - DNA, 25 bp, Artificial
  probe
  misc_feature (1)..(25): SEQ ID NO: 2098; WAN024ERT; Start 267; Stop 291
cgctaaattcaagaccttccaaatc

SEQ ID NO: 314979 - DNA, 25 bp, Artificial
  probe
  misc_feature (1)..(25): SEQ ID NO: 2098; WAN024ERT; Start 264; Stop 288
taacgctaaattcaagaccttccaa

SEQ ID NO: 314980 - DNA, 25 bp, Artificial
  probe
  misc_feature (1)..(25): SEQ ID NO: 2098; WAN024ERT; Start 263; Stop 287
ttaacgctaaattcaagaccttcca

SEQ ID NO: 314981 - DNA, 25 bp, Artificial
  probe
  misc_feature (1)..(25): SEQ ID NO: 2098; WAN024ERT; Start 238; Stop 262
gcgatacgaattgaaattgaacatt

SEQ ID NO: 314982 - DNA, 25 bp, Artificial
  probe
  misc_feature (1)..(25): SEQ ID NO: 2098; WAN024ERT; Start 221; Stop 245
taaataaagagatgtcagcgatacg

SEQ ID NO: 314983 - DNA, 25 bp, Artificial
  probe
  misc_feature (1)..(25): SEQ ID NO: 2098; WAN024ERT; Start 236; Stop 260
cagcgatacgaattgaaattgaaca

SEQ ID NO: 314984 - DNA, 25 bp, Artificial
  probe
  misc_feature (1)..(25): SEQ ID NO: 2098; WAN024ERT; Start 201; Stop 225
gagtgaggatgataagcagttaaat

SEQ ID NO: 314985 - DNA, 25 bp, Artificial
  probe
  misc_feature (1)..(25): SEQ ID NO: 2098; WAN024ERT; Start 266; Stop 290
acgctaaattcaagaccttccaaat

SEQ ID NO: 314986 - DNA, 25 bp, Artificial
  probe
  misc_feature (1)..(25): SEQ ID NO: 2098; WAN024ERT; Start 262; Stop 286
tttaacgctaaattcaagaccttcc

SEQ ID NO: 314987 - DNA, 25 bp, Artificial
  probe
  misc_feature (1)..(25): SEQ ID NO: 2098; WAN024ERT; Start 231; Stop 255
gatgtcagcgatacgaattgaaatt

SEQ ID NO: 314988 - DNA, 25 bp, Artificial
  probe
  misc_feature (1)..(25): SEQ ID NO: 2098; WAN024ERT; Start 265; Stop 289
aacgctaaattcaagaccttccaaa

SEQ ID NO: 314989 - DNA, 25 bp, Artificial
  probe
  misc_feature (1)..(25): SEQ ID NO: 2098; WAN024ERT; Start 235; Stop 259
tcagcgatacgaattgaaattgaac

SEQ ID NO: 314990 - DNA, 25 bp, Artificial
  probe
  misc_feature (1)..(25): SEQ ID NO: 2098; WAN024ERT; Start 234; Stop 258
gtcagcgatacgaattgaaattgaa

SEQ ID NO: 314991 - DNA, 25 bp, Artificial
  probe
  misc_feature (1)..(25): SEQ ID NO: 2098; WAN024ERT; Start 232; Stop 256
atgtcagcgatacgaattgaaattg

SEQ ID NO: 314992 - DNA, 25 bp, Artificial
  probe
  misc_feature (1)..(25): SEQ ID NO: 2098; WAN024ERT; Start 218; Stop 242
agttaaataaagagatgtcagcgat

SEQ ID NO: 314993 - DNA, 25 bp, Artificial
  probe
  misc_feature (1)..(25): SEQ ID NO: 2098; WAN024ERT; Start 226; Stop 250
aaagagatgtcagcgatacgaattg

SEQ ID NO: 314994 - DNA, 25 bp, Artificial
  probe
  misc_feature (1)..(25): SEQ ID NO: 2098; WAN024ERT; Start 287; Stop 311
aaatcatgtcagtcccttatcgtaa

SEQ ID NO: 314995 - DNA, 25 bp, Artificial
  probe
  misc_feature (1)..(25): SEQ ID NO: 2098; WAN024ERT; Start 351; Stop 375
tgccatcatcaattatgaagtgaac

SEQ ID NO: 314996 - DNA, 25 bp, Artificial
  probe
  misc_feature (1)..(25): SEQ ID NO: 2098; WAN024ERT; Start 350; Stop 374
gtgccatcatcaattatgaagtgaa

SEQ ID NO: 314997 - DNA, 25 bp, Artificial
  probe
  misc_feature (1)..(25): SEQ ID NO: 2099; WAN024GAC; Start 156; Stop 180
ccataccatcattgtcaatagcaac

SEQ ID NO: 314998 - DNA, 25 bp, Artificial
  probe
  misc_feature (1)..(25): SEQ ID NO: 2099; WAN024GAC; Start 158; Stop 182
ataccatcattgtcaatagcaacga

SEQ ID NO: 314999 - DNA, 25 bp, Artificial
  probe
  misc_feature (1)..(25): SEQ ID NO: 2099; WAN024GAC; Start 157; Stop 181
cataccatcattgtcaatagcaacg

SEQ ID NO: 315000 - DNA, 25 bp, Artificial
  probe
  misc_feature (1)..(25): SEQ ID NO: 2099; WAN024GAC; Start 225; Stop 249
taatcttccatgaatgtccaatgaa

SEQ ID NO: 315001 - DNA, 25 bp, Artificial
  probe
  misc_feature (1)..(25): SEQ ID NO: 2099; WAN024GAC; Start 224; Stop 248
ataatcttccatgaatgtccaatga

SEQ ID NO: 315002 - DNA, 25 bp, Artificial
  probe
  misc_feature (1)..(25): SEQ ID NO: 2099; WAN024GAC; Start 159; Stop 183
taccatcattgtcaatagcaacgac

SEQ ID NO: 315003 - DNA, 25 bp, Artificial
  probe
  misc_feature (1)..(25): SEQ ID NO: 2099; WAN024GAC; Start 223; Stop 247
gataatcttccatgaatgtccaatg

SEQ ID NO: 315004 - DNA, 25 bp, Artificial
  probe
  misc_feature (1)..(25): SEQ ID NO: 2099; WAN024GAC; Start 222; Stop 246
ggataatcttccatgaatgtccaat

SEQ ID NO: 315005 - DNA, 25 bp, Artificial
  probe
  misc_feature (1)..(25): SEQ ID NO: 2099; WAN024GAC; Start 106; Stop 130
tgggataggagattcttggaacttc

SEQ ID NO: 315006 - DNA, 25 bp, Artificial
  probe
  misc_feature (1)..(25): SEQ ID NO: 2099; WAN024GAC; Start 105; Stop 129
ctgggataggagattcttggaactt

SEQ ID NO: 315007 - DNA, 25 bp, Artificial
  probe
  misc_feature (1)..(25): SEQ ID NO: 2099; WAN024GAC; Start 227; Stop 251
atcttccatgaatgtccaatgaaag

SEQ ID NO: 315008 - DNA, 25 bp, Artificial
  probe
  misc_feature (1)..(25): SEQ ID NO: 2099; WAN024GAC; Start 155; Stop 179
cccataccatcattgtcaatagcaa

SEQ ID NO: 315009 - DNA, 25 bp, Artificial
  probe
  misc_feature (1)..(25): SEQ ID NO: 2099; WAN024GAC; Start 226; Stop 250
aatcttccatgaatgtccaatgaaa

SEQ ID NO: 315010 - DNA, 25 bp, Artificial
  probe
  misc_feature (1)..(25): SEQ ID NO: 2099; WAN024GAC; Start 207; Stop 231
ttcgtttgatagctgggataatctt

SEQ ID NO: 315011 - DNA, 25 bp, Artificial
  probe
  misc_feature (1)..(25): SEQ ID NO: 2099; WAN024GAC; Start 206; Stop 230
tttcgtttgatagctgggataatct

SEQ ID NO: 315012 - DNA, 25 bp, Artificial
  probe
  misc_feature (1)..(25): SEQ ID NO: 2099; WAN024GAC; Start 208; Stop 232
tcgtttgatagctgggataatcttc

SEQ ID NO: 315013 - DNA, 25 bp, Artificial
  probe
  misc_feature (1)..(25): SEQ ID NO: 2099; WAN024GAC; Start 204; Stop 228
gatttcgtttgatagctgggataat

SEQ ID NO: 315014 - DNA, 25 bp, Artificial
  probe
  misc_feature (1)..(25): SEQ ID NO: 2099; WAN024GAC; Start 205; Stop 229
atttcgtttgatagctgggataatc

SEQ ID NO: 315015 - DNA, 25 bp, Artificial
  probe
  misc_feature (1)..(25): SEQ ID NO: 2099; WAN024GAC; Start 203; Stop 227
ggatttcgtttgatagctgggataa

SEQ ID NO: 315016 - DNA, 25 bp, Artificial
  probe
  misc_feature (1)..(25): SEQ ID NO: 2099; WAN024GAC; Start 229; Stop 253
cttccatgaatgtccaatgaaagac

SEQ ID NO: 315017 - DNA, 25 bp, Artificial
  probe
  misc_feature (1)..(25): SEQ ID NO: 2099; WAN024GAC; Start 233; Stop 257
catgaatgtccaatgaaagactctt

SEQ ID NO: 315018 - DNA, 25 bp, Artificial
  probe
  misc_feature (1)..(25): SEQ ID NO: 2099; WAN024GAC; Start 230; Stop 254
ttccatgaatgtccaatgaaagact

SEQ ID NO: 315019 - DNA, 25 bp, Artificial
  probe
  misc_feature (1)..(25): SEQ ID NO: 2099; WAN024GAC; Start 232; Stop 256
ccatgaatgtccaatgaaagactct

SEQ ID NO: 315020 - DNA, 25 bp, Artificial
  probe
  misc_feature (1)..(25): SEQ ID NO: 2099; WAN024GAC; Start 231; Stop 255
tccatgaatgtccaatgaaagactc

SEQ ID NO: 315021 - DNA, 25 bp, Artificial
  probe
  misc_feature (1)..(25): SEQ ID NO: 2099; WAN024GAC; Start 127; Stop 151
cttccaagccgcatactcattcatc

SEQ ID NO: 315022 - DNA, 25 bp, Artificial
  probe
  misc_feature (1)..(25): SEQ ID NO: 2099; WAN024GAC; Start 221; Stop 245
gggataatcttccatgaatgtccaa

SEQ ID NO: 315023 - DNA, 25 bp, Artificial
  probe
  misc_feature (1)..(25): SEQ ID NO: 2099; WAN024GAC; Start 219; Stop 243
ctgggataatcttccatgaatgtcc

SEQ ID NO: 315024 - DNA, 25 bp, Artificial
  probe
  misc_feature (1)..(25): SEQ ID NO: 2099; WAN024GAC; Start 124; Stop 148
gaacttccaagccgcatactcattc

SEQ ID NO: 315025 - DNA, 25 bp, Artificial
  probe
  misc_feature (1)..(25): SEQ ID NO: 2099; WAN024GAC; Start 220; Stop 244
tgggataatcttccatgaatgtcca

SEQ ID NO: 315026 - DNA, 25 bp, Artificial
  probe
  misc_feature (1)..(25): SEQ ID NO: 2099; WAN024GAC; Start 218; Stop 242
gctgggataatcttccatgaatgtc

SEQ ID NO: 315027 - DNA, 25 bp, Artificial
  probe
  misc_feature (1)..(25): SEQ ID NO: 2099; WAN024GAC; Start 59; Stop 83
atgacaaactcagcatactccacac

SEQ ID NO: 315028 - DNA, 25 bp, Artificial
  probe
  misc_feature (1)..(25): SEQ ID NO: 2099; WAN024GAC; Start 216; Stop 240
tagctgggataatcttccatgaatg

SEQ ID NO: 315029 - DNA, 25 bp, Artificial
  probe
  misc_feature (1)..(25): SEQ ID NO: 2099; WAN024GAC; Start 214; Stop 238
gatagctgggataatcttccatgaa

SEQ ID NO: 315030 - DNA, 25 bp, Artificial
  probe
  misc_feature (1)..(25): SEQ ID NO: 2100; WAN024C7G; Start 104; Stop 128
tgtgtatgataggctaccttaacag

SEQ ID NO: 315031 - DNA, 25 bp, Artificial
  probe
  misc_feature (1)..(25): SEQ ID NO: 2100; WAN024C7G; Start 103; Stop 127
ttgtgtatgataggctaccttaaca

SEQ ID NO: 315032 - DNA, 25 bp, Artificial
  probe
  misc_feature (1)..(25): SEQ ID NO: 2100; WAN024C7G; Start 102; Stop 126
attgtgtatgataggctaccttaac

SEQ ID NO: 315033 - DNA, 25 bp, Artificial
  probe
  misc_feature (1)..(25): SEQ ID NO: 2100; WAN024C7G; Start 197; Stop 221
ggctcgttaaaggtaatccattgat

SEQ ID NO: 315034 - DNA, 25 bp, Artificial
  probe
  misc_feature (1)..(25): SEQ ID NO: 2100; WAN024C7G; Start 172; Stop 196
ataaccaaattctacaggaacgatg

SEQ ID NO: 315035 - DNA, 25 bp, Artificial
  probe
  misc_feature (1)..(25): SEQ ID NO: 2100; WAN024C7G; Start 201; Stop 225
cgttaaaggtaatccattgatccac

SEQ ID NO: 315036 - DNA, 25 bp, Artificial
  probe
  misc_feature (1)..(25): SEQ ID NO: 2100; WAN024C7G; Start 200; Stop 224
tcgttaaaggtaatccattgatcca

SEQ ID NO: 315037 - DNA, 25 bp, Artificial
  probe
  misc_feature (1)..(25): SEQ ID NO: 2100; WAN024C7G; Start 198; Stop 222
gctcgttaaaggtaatccattgatc

SEQ ID NO: 315038 - DNA, 25 bp, Artificial
  probe
  misc_feature (1)..(25): SEQ ID NO: 2100; WAN024C7G; Start 105; Stop 129
gtgtatgataggctaccttaacagc

SEQ ID NO: 315039 - DNA, 25 bp, Artificial
  probe
  misc_feature (1)..(25): SEQ ID NO: 2100; WAN024C7G; Start 199; Stop 223
ctcgttaaaggtaatccattgatcc

SEQ ID NO: 315040 - DNA, 25 bp, Artificial
  probe
  misc_feature (1)..(25): SEQ ID NO: 2100; WAN024C7G; Start 170; Stop 194
aaataaccaaattctacaggaacga

SEQ ID NO: 315041 - DNA, 25 bp, Artificial
  probe
  misc_feature (1)..(25): SEQ ID NO: 2100; WAN024C7G; Start 101; Stop 125
aattgtgtatgataggctaccttaa

SEQ ID NO: 315042 - DNA, 25 bp, Artificial
  probe
  misc_feature (1)..(25): SEQ ID NO: 2100; WAN024C7G; Start 171; Stop 195
aataaccaaattctacaggaacgat

SEQ ID NO: 315043 - DNA, 25 bp, Artificial
  probe
  misc_feature (1)..(25): SEQ ID NO: 2100; WAN024C7G; Start 202; Stop 226
gttaaaggtaatccattgatccact

SEQ ID NO: 315044 - DNA, 25 bp, Artificial
  probe
  misc_feature (1)..(25): SEQ ID NO: 2100; WAN024C7G; Start 143; Stop 167
accttatgtggataatgggcatcat

SEQ ID NO: 315045 - DNA, 25 bp, Artificial
  probe
  misc_feature (1)..(25): SEQ ID NO: 2100; WAN024C7G; Start 144; Stop 168
ccttatgtggataatgggcatcata

SEQ ID NO: 315046 - DNA, 25 bp, Artificial
  probe
  misc_feature (1)..(25): SEQ ID NO: 2100; WAN024C7G; Start 106; Stop 130
tgtatgataggctaccttaacagct

SEQ ID NO: 315047 - DNA, 25 bp, Artificial
  probe
  misc_feature (1)..(25): SEQ ID NO: 2100; WAN024C7G; Start 173; Stop 197
taaccaaattctacaggaacgatgg

SEQ ID NO: 315048 - DNA, 25 bp, Artificial
  probe
  misc_feature (1)..(25): SEQ ID NO: 2100; WAN024C7G; Start 196; Stop 220
gggctcgttaaaggtaatccattga

SEQ ID NO: 315049 - DNA, 25 bp, Artificial
  probe
  misc_feature (1)..(25): SEQ ID NO: 2100; WAN024C7G; Start 204; Stop 228
taaaggtaatccattgatccactaa

SEQ ID NO: 315050 - DNA, 25 bp, Artificial
  probe
  misc_feature (1)..(25): SEQ ID NO: 2100; WAN024C7G; Start 203; Stop 227
ttaaaggtaatccattgatccacta

SEQ ID NO: 315051 - DNA, 25 bp, Artificial
  probe
  misc_feature (1)..(25): SEQ ID NO: 2100; WAN024C7G; Start 99; Stop 123
ccaattgtgtatgataggctacctt

SEQ ID NO: 315052 - DNA, 25 bp, Artificial
  probe
  misc_feature (1)..(25): SEQ ID NO: 2100; WAN024C7G; Start 27; Stop 51
tcaagttgaggacaatcccaatctt

SEQ ID NO: 315053 - DNA, 25 bp, Artificial
  probe
  misc_feature (1)..(25): SEQ ID NO: 2100; WAN024C7G; Start 142; Stop 166
caccttatgtggataatgggcatca

SEQ ID NO: 315054 - DNA, 25 bp, Artificial
  probe
  misc_feature (1)..(25): SEQ ID NO: 2100; WAN024C7G; Start 100; Stop 124
caattgtgtatgataggctacctta

SEQ ID NO: 315055 - DNA, 25 bp, Artificial
  probe
  misc_feature (1)..(25): SEQ ID NO: 2100; WAN024C7G; Start 45; Stop 69
caatcttggaatcaggcaaaagttc

SEQ ID NO: 315056 - DNA, 25 bp, Artificial
  probe
  misc_feature (1)..(25): SEQ ID NO: 2100; WAN024C7G; Start 47; Stop 71
atcttggaatcaggcaaaagttcat

SEQ ID NO: 315057 - DNA, 25 bp, Artificial
  probe
  misc_feature (1)..(25): SEQ ID NO: 2100; WAN024C7G; Start 32; Stop 56
ttgaggacaatcccaatcttggaat

SEQ ID NO: 315058 - DNA, 25 bp, Artificial
  probe
  misc_feature (1)..(25): SEQ ID NO: 2100; WAN024C7G; Start 177; Stop 201
caaattctacaggaacgatgggctc

SEQ ID NO: 315059 - DNA, 25 bp, Artificial
  probe
  misc_feature (1)..(25): SEQ ID NO: 2100; WAN024C7G; Start 46; Stop 70
aatcttggaatcaggcaaaagttca

SEQ ID NO: 315060 - DNA, 25 bp, Artificial
  probe
  misc_feature (1)..(25): SEQ ID NO: 2100; WAN024C7G; Start 26; Stop 50
gtcaagttgaggacaatcccaatct

SEQ ID NO: 315061 - DNA, 25 bp, Artificial
  probe
  misc_feature (1)..(25): SEQ ID NO: 2100; WAN024C7G; Start 195; Stop 219
tgggctcgttaaaggtaatccattg

SEQ ID NO: 315062 - DNA, 25 bp, Artificial
  probe
  misc_feature (1)..(25): SEQ ID NO: 2100; WAN024C7G; Start 174; Stop 198
aaccaaattctacaggaacgatggg

SEQ ID NO: 315063 - DNA, 25 bp, Artificial
  probe
  misc_feature (1)..(25): SEQ ID NO: 2101; WAN024GGR; Start 27; Stop 51
gctgagtaatatcctctggaatgtt

SEQ ID NO: 315064 - DNA, 25 bp, Artificial
  probe
  misc_feature (1)..(25): SEQ ID NO: 2101; WAN024GGR; Start 26; Stop 50
agctgagtaatatcctctggaatgt

SEQ ID NO: 315065 - DNA, 25 bp, Artificial
  probe
  misc_feature (1)..(25): SEQ ID NO: 2101; WAN024GGR; Start 212; Stop 236
ccattccattggttgacagacaatt

SEQ ID NO: 315066 - DNA, 25 bp, Artificial
  probe
  misc_feature (1)..(25): SEQ ID NO: 2101; WAN024GGR; Start 216; Stop 240
tccattggttgacagacaatttaac

SEQ ID NO: 315067 - DNA, 25 bp, Artificial
  probe
  misc_feature (1)..(25): SEQ ID NO: 2101; WAN024GGR; Start 213; Stop 237
cattccattggttgacagacaattt

SEQ ID NO: 315068 - DNA, 25 bp, Artificial
  probe
  misc_feature (1)..(25): SEQ ID NO: 2101; WAN024GGR; Start 215; Stop 239
ttccattggttgacagacaatttaa

SEQ ID NO: 315069 - DNA, 25 bp, Artificial
  probe
  misc_feature (1)..(25): SEQ ID NO: 2101; WAN024GGR; Start 28; Stop 52
ctgagtaatatcctctggaatgttt

SEQ ID NO: 315070 - DNA, 25 bp, Artificial
  probe
  misc_feature (1)..(25): SEQ ID NO: 2101; WAN024GGR; Start 214; Stop 238
attccattggttgacagacaattta

SEQ ID NO: 315071 - DNA, 25 bp, Artificial
  probe
  misc_feature (1)..(25): SEQ ID NO: 2101; WAN024GGR; Start 211; Stop 235
gccattccattggttgacagacaat

SEQ ID NO: 315072 - DNA, 25 bp, Artificial
  probe
  misc_feature (1)..(25): SEQ ID NO: 2101; WAN024GGR; Start 78; Stop 102
caagatttggcagttctccaggaaa

SEQ ID NO: 315073 - DNA, 25 bp, Artificial
  probe
  misc_feature (1)..(25): SEQ ID NO: 2101; WAN024GGR; Start 29; Stop 53
tgagtaatatcctctggaatgtttt

SEQ ID NO: 315074 - DNA, 25 bp, Artificial
  probe
  misc_feature (1)..(25): SEQ ID NO: 2101; WAN024GGR; Start 217; Stop 241
ccattggttgacagacaatttaacc

SEQ ID NO: 315075 - DNA, 25 bp, Artificial
  probe
  misc_feature (1)..(25): SEQ ID NO: 2101; WAN024GGR; Start 89; Stop 113
agttctccaggaaaatccaagactg

SEQ ID NO: 315076 - DNA, 25 bp, Artificial
  probe
  misc_feature (1)..(25): SEQ ID NO: 2101; WAN024GGR; Start 88; Stop 112
cagttctccaggaaaatccaagact

SEQ ID NO: 315077 - DNA, 25 bp, Artificial
  probe
  misc_feature (1)..(25): SEQ ID NO: 2101; WAN024GGR; Start 218; Stop 242
cattggttgacagacaatttaaccg

SEQ ID NO: 315078 - DNA, 25 bp, Artificial
  probe
  misc_feature (1)..(25): SEQ ID NO: 2101; WAN024GGR; Start 80; Stop 104
agatttggcagttctccaggaaaat

SEQ ID NO: 315079 - DNA, 25 bp, Artificial
  probe
  misc_feature (1)..(25): SEQ ID NO: 2101; WAN024GGR; Start 222; Stop 246
ggttgacagacaatttaaccgctaa

SEQ ID NO: 315080 - DNA, 25 bp, Artificial
  probe
  misc_feature (1)..(25): SEQ ID NO: 2101; WAN024GGR; Start 79; Stop 103
aagatttggcagttctccaggaaaa

SEQ ID NO: 315081 - DNA, 25 bp, Artificial
  probe
  misc_feature (1)..(25): SEQ ID NO: 2101; WAN024GGR; Start 219; Stop 243
attggttgacagacaatttaaccgc

SEQ ID NO: 315082 - DNA, 25 bp, Artificial
  probe
  misc_feature (1)..(25): SEQ ID NO: 2101; WAN024GGR; Start 221; Stop 245
tggttgacagacaatttaaccgcta

SEQ ID NO: 315083 - DNA, 25 bp, Artificial
  probe
  misc_feature (1)..(25): SEQ ID NO: 2101; WAN024GGR; Start 82; Stop 106
atttggcagttctccaggaaaatcc

SEQ ID NO: 315084 - DNA, 25 bp, Artificial
  probe
  misc_feature (1)..(25): SEQ ID NO: 2101; WAN024GGR; Start 87; Stop 111
gcagttctccaggaaaatccaagac

SEQ ID NO: 315085 - DNA, 25 bp, Artificial
  probe
  misc_feature (1)..(25): SEQ ID NO: 2101; WAN024GGR; Start 220; Stop 244
ttggttgacagacaatttaaccgct

SEQ ID NO: 315086 - DNA, 25 bp, Artificial
  probe
  misc_feature (1)..(25): SEQ ID NO: 2101; WAN024GGR; Start 101; Stop 125
aaatccaagactggaacaccttctg

SEQ ID NO: 315087 - DNA, 25 bp, Artificial
  probe
  misc_feature (1)..(25): SEQ ID NO: 2101; WAN024GGR; Start 102; Stop 126
aatccaagactggaacaccttctgg

SEQ ID NO: 315088 - DNA, 25 bp, Artificial
  probe
  misc_feature (1)..(25): SEQ ID NO: 2101; WAN024GGR; Start 52; Stop 76
ttttacgacaacagcttcactagcc

SEQ ID NO: 315089 - DNA, 25 bp, Artificial
  probe
  misc_feature (1)..(25): SEQ ID NO: 2101; WAN024GGR; Start 86; Stop 110
ggcagttctccaggaaaatccaaga

SEQ ID NO: 315090 - DNA, 25 bp, Artificial
  probe
  misc_feature (1)..(25): SEQ ID NO: 2101; WAN024GGR; Start 83; Stop 107
tttggcagttctccaggaaaatcca

SEQ ID NO: 315091 - DNA, 25 bp, Artificial
  probe
  misc_feature (1)..(25): SEQ ID NO: 2101; WAN024GGR; Start 81; Stop 105
gatttggcagttctccaggaaaatc

SEQ ID NO: 315092 - DNA, 25 bp, Artificial
  probe
  misc_feature (1)..(25): SEQ ID NO: 2101; WAN024GGR; Start 99; Stop 123
gaaaatccaagactggaacaccttc

SEQ ID NO: 315093 - DNA, 25 bp, Artificial
  probe
  misc_feature (1)..(25): SEQ ID NO: 2101; WAN024GGR; Start 100; Stop 124
aaaatccaagactggaacaccttct

SEQ ID NO: 315094 - DNA, 25 bp, Artificial
  probe
  misc_feature (1)..(25): SEQ ID NO: 2101; WAN024GGR; Start 85; Stop 109
tggcagttctccaggaaaatccaag

SEQ ID NO: 315095 - DNA, 25 bp, Artificial
  probe
  misc_feature (1)..(25): SEQ ID NO: 2101; WAN024GGR; Start 98; Stop 122
ggaaaatccaagactggaacacctt

SEQ ID NO: 315096 - DNA, 25 bp, Artificial
  probe
  misc_feature (1)..(25): SEQ ID NO: 2102; WAN024D5C; Start 192; Stop 216
tcgcttgatttatatgatggatgga

SEQ ID NO: 315097 - DNA, 25 bp, Artificial
  probe
  misc_feature (1)..(25): SEQ ID NO: 2102; WAN024D5C; Start 191; Stop 215
atcgcttgatttatatgatggatgg

SEQ ID NO: 315098 - DNA, 25 bp, Artificial
  probe
  misc_feature (1)..(25): SEQ ID NO: 2102; WAN024D5C; Start 140; Stop 164
cactcaaatatgattaccaaggagc

SEQ ID NO: 315099 - DNA, 25 bp, Artificial
  probe
  misc_feature (1)..(25): SEQ ID NO: 2102; WAN024D5C; Start 143; Stop 167
tcaaatatgattaccaaggagcctg

SEQ ID NO: 315100 - DNA, 25 bp, Artificial
  probe
  misc_feature (1)..(25): SEQ ID NO: 2102; WAN024D5C; Start 141; Stop 165
actcaaatatgattaccaaggagcc

SEQ ID NO: 315101 - DNA, 25 bp, Artificial
  probe
  misc_feature (1)..(25): SEQ ID NO: 2102; WAN024D5C; Start 142; Stop 166
ctcaaatatgattaccaaggagcct

SEQ ID NO: 315102 - DNA, 25 bp, Artificial
  probe
  misc_feature (1)..(25): SEQ ID NO: 2102; WAN024D5C; Start 139; Stop 163
ccactcaaatatgattaccaaggag

SEQ ID NO: 315103 - DNA, 25 bp, Artificial
  probe
  misc_feature (1)..(25): SEQ ID NO: 2102; WAN024D5C; Start 144; Stop 168
caaatatgattaccaaggagcctgg

SEQ ID NO: 315104 - DNA, 25 bp, Artificial
  probe
  misc_feature (1)..(25): SEQ ID NO: 2102; WAN024D5C; Start 190; Stop 214
aatcgcttgatttatatgatggatg

SEQ ID NO: 315105 - DNA, 25 bp, Artificial
  probe
  misc_feature (1)..(25): SEQ ID NO: 2102; WAN024D5C; Start 7; Stop 31
ctcaagtttacagaagatgcctggg

SEQ ID NO: 315106 - DNA, 25 bp, Artificial
  probe
  misc_feature (1)..(25): SEQ ID NO: 2102; WAN024D5C; Start 218; Stop 242
atagcgtggctttcttgtcctttaa

SEQ ID NO: 315107 - DNA, 25 bp, Artificial
  probe
  misc_feature (1)..(25): SEQ ID NO: 2102; WAN024D5C; Start 176; Stop 200
gtattgatgcagaaaatcgcttgat

SEQ ID NO: 315108 - DNA, 25 bp, Artificial
  probe
  misc_feature (1)..(25): SEQ ID NO: 2102; WAN024D5C; Start 219; Stop 243
tagcgtggctttcttgtcctttaaa

SEQ ID NO: 315109 - DNA, 25 bp, Artificial
  probe
  misc_feature (1)..(25): SEQ ID NO: 2102; WAN024D5C; Start 146; Stop 170
aatatgattaccaaggagcctggtc

SEQ ID NO: 315110 - DNA, 25 bp, Artificial
  probe
  misc_feature (1)..(25): SEQ ID NO: 2102; WAN024D5C; Start 177; Stop 201
tattgatgcagaaaatcgcttgatt

SEQ ID NO: 315111 - DNA, 25 bp, Artificial
  probe
  misc_feature (1)..(25): SEQ ID NO: 2102; WAN024D5C; Start 175; Stop 199
cgtattgatgcagaaaatcgcttga

SEQ ID NO: 315112 - DNA, 25 bp, Artificial
  probe
  misc_feature (1)..(25): SEQ ID NO: 2102; WAN024D5C; Start 147; Stop 171
atatgattaccaaggagcctggtca

SEQ ID NO: 315113 - DNA, 25 bp, Artificial
  probe
  misc_feature (1)..(25): SEQ ID NO: 2102; WAN024D5C; Start 145; Stop 169
aaatatgattaccaaggagcctggt

SEQ ID NO: 315114 - DNA, 25 bp, Artificial
  probe
  misc_feature (1)..(25): SEQ ID NO: 2102; WAN024D5C; Start 15; Stop 39
tacagaagatgcctgggcagattat

SEQ ID NO: 315115 - DNA, 25 bp, Artificial
  probe
  misc_feature (1)..(25): SEQ ID NO: 2102; WAN024D5C; Start 8; Stop 32
tcaagtttacagaagatgcctgggc

SEQ ID NO: 315116 - DNA, 25 bp, Artificial
  probe
  misc_feature (1)..(25): SEQ ID NO: 2102; WAN024D5C; Start 14; Stop 38
ttacagaagatgcctgggcagatta

SEQ ID NO: 315117 - DNA, 25 bp, Artificial
  probe
  misc_feature (1)..(25): SEQ ID NO: 2102; WAN024D5C; Start 189; Stop 213
aaatcgcttgatttatatgatggat

SEQ ID NO: 315118 - DNA, 25 bp, Artificial
  probe
  misc_feature (1)..(25): SEQ ID NO: 2102; WAN024D5C; Start 223; Stop 247
gtggctttcttgtcctttaaagatc

SEQ ID NO: 315119 - DNA, 25 bp, Artificial
  probe
  misc_feature (1)..(25): SEQ ID NO: 2102; WAN024D5C; Start 225; Stop 249
ggctttcttgtcctttaaagatcat

SEQ ID NO: 315120 - DNA, 25 bp, Artificial
  probe
  misc_feature (1)..(25): SEQ ID NO: 2102; WAN024D5C; Start 224; Stop 248
tggctttcttgtcctttaaagatca

SEQ ID NO: 315121 - DNA, 25 bp, Artificial
  probe
  misc_feature (1)..(25): SEQ ID NO: 2102; WAN024D5C; Start 148; Stop 172
tatgattaccaaggagcctggtcac

SEQ ID NO: 315122 - DNA, 25 bp, Artificial
  probe
  misc_feature (1)..(25): SEQ ID NO: 2102; WAN024D5C; Start 17; Stop 41
cagaagatgcctgggcagattattg

SEQ ID NO: 315123 - DNA, 25 bp, Artificial
  probe
  misc_feature (1)..(25): SEQ ID NO: 2102; WAN024D5C; Start 16; Stop 40
acagaagatgcctgggcagattatt

SEQ ID NO: 315124 - DNA, 25 bp, Artificial
  probe
  misc_feature (1)..(25): SEQ ID NO: 2102; WAN024D5C; Start 222; Stop 246
cgtggctttcttgtcctttaaagat

SEQ ID NO: 315125 - DNA, 25 bp, Artificial
  probe
  misc_feature (1)..(25): SEQ ID NO: 2102; WAN024D5C; Start 226; Stop 250
gctttcttgtcctttaaagatcatt

SEQ ID NO: 315126 - DNA, 25 bp, Artificial
  probe
  misc_feature (1)..(25): SEQ ID NO: 2102; WAN024D5C; Start 20; Stop 44
aagatgcctgggcagattattgcta

SEQ ID NO: 315127 - DNA, 25 bp, Artificial
  probe
  misc_feature (1)..(25): SEQ ID NO: 2102; WAN024D5C; Start 184; Stop 208
gcagaaaatcgcttgatttatatga

SEQ ID NO: 315128 - DNA, 25 bp, Artificial
  probe
  misc_feature (1)..(25): SEQ ID NO: 2102; WAN024D5C; Start 180; Stop 204
tgatgcagaaaatcgcttgatttat

SEQ ID NO: 315129 - DNA, 25 bp, Artificial
  probe
  misc_feature (1)..(25): SEQ ID NO: 2103; WAN024DND; Start 41; Stop 65
cagactatcttcgtggaagtattca

SEQ ID NO: 315130 - DNA, 25 bp, Artificial
  probe
  misc_feature (1)..(25): SEQ ID NO: 2103; WAN024DND; Start 40; Stop 64
tcagactatcttcgtggaagtattc

SEQ ID NO: 315131 - DNA, 25 bp, Artificial
  probe
  misc_feature (1)..(25): SEQ ID NO: 2103; WAN024DND; Start 44; Stop 68
actatcttcgtggaagtattcatca

SEQ ID NO: 315132 - DNA, 25 bp, Artificial
  probe
  misc_feature (1)..(25): SEQ ID NO: 2103; WAN024DND; Start 39; Stop 63
ttcagactatcttcgtggaagtatt

SEQ ID NO: 315133 - DNA, 25 bp, Artificial
  probe
  misc_feature (1)..(25): SEQ ID NO: 2103; WAN024DND; Start 42; Stop 66
agactatcttcgtggaagtattcat

SEQ ID NO: 315134 - DNA, 25 bp, Artificial
  probe
  misc_feature (1)..(25): SEQ ID NO: 2103; WAN024DND; Start 43; Stop 67
gactatcttcgtggaagtattcatc

SEQ ID NO: 315135 - DNA, 25 bp, Artificial
  probe
  misc_feature (1)..(25): SEQ ID NO: 2103; WAN024DND; Start 45; Stop 69
ctatcttcgtggaagtattcatcaa

SEQ ID NO: 315136 - DNA, 25 bp, Artificial
  probe
  misc_feature (1)..(25): SEQ ID NO: 2103; WAN024DND; Start 34; Stop 58
tcattttcagactatcttcgtggaa

SEQ ID NO: 315137 - DNA, 25 bp, Artificial
  probe
  misc_feature (1)..(25): SEQ ID NO: 2103; WAN024DND; Start 33; Stop 57
ttcattttcagactatcttcgtgga

SEQ ID NO: 315138 - DNA, 25 bp, Artificial
  probe
  misc_feature (1)..(25): SEQ ID NO: 2103; WAN024DND; Start 32; Stop 56
attcattttcagactatcttcgtgg

SEQ ID NO: 315139 - DNA, 25 bp, Artificial
  probe
  misc_feature (1)..(25): SEQ ID NO: 2103; WAN024DND; Start 38; Stop 62
tttcagactatcttcgtggaagtat

SEQ ID NO: 315140 - DNA, 25 bp, Artificial
  probe
  misc_feature (1)..(25): SEQ ID NO: 2103; WAN024DND; Start 52; Stop 76
cgtggaagtattcatcaaaatagac

SEQ ID NO: 315141 - DNA, 25 bp, Artificial
  probe
  misc_feature (1)..(25): SEQ ID NO: 2103; WAN024DND; Start 51; Stop 75
tcgtggaagtattcatcaaaataga

SEQ ID NO: 315142 - DNA, 25 bp, Artificial
  probe
  misc_feature (1)..(25): SEQ ID NO: 2103; WAN024DND; Start 46; Stop 70
tatcttcgtggaagtattcatcaaa

SEQ ID NO: 315143 - DNA, 25 bp, Artificial
  probe
  misc_feature (1)..(25): SEQ ID NO: 2103; WAN024DND; Start 31; Stop 55
aattcattttcagactatcttcgtg

SEQ ID NO: 315144 - DNA, 25 bp, Artificial
  probe
  misc_feature (1)..(25): SEQ ID NO: 2103; WAN024DND; Start 50; Stop 74
ttcgtggaagtattcatcaaaatag

SEQ ID NO: 315145 - DNA, 25 bp, Artificial
  probe
  misc_feature (1)..(25): SEQ ID NO: 2103; WAN024DND; Start 24; Stop 48
tggtgcaaattcattttcagactat

SEQ ID NO: 315146 - DNA, 25 bp, Artificial
  probe
  misc_feature (1)..(25): SEQ ID NO: 2103; WAN024DND; Start 25; Stop 49
ggtgcaaattcattttcagactatc

SEQ ID NO: 315147 - DNA, 25 bp, Artificial
  probe
  misc_feature (1)..(25): SEQ ID NO: 2103; WAN024DND; Start 22; Stop 46
attggtgcaaattcattttcagact

SEQ ID NO: 315148 - DNA, 25 bp, Artificial
  probe
  misc_feature (1)..(25): SEQ ID NO: 2103; WAN024DND; Start 9; Stop 33
aaagagaaggaaaattggtgcaaat

SEQ ID NO: 315149 - DNA, 25 bp, Artificial
  probe
  misc_feature (1)..(25): SEQ ID NO: 2103; WAN024DND; Start 8; Stop 32
aaaagagaaggaaaattggtgcaaa

SEQ ID NO: 315150 - DNA, 25 bp, Artificial
  probe
  misc_feature (1)..(25): SEQ ID NO: 2103; WAN024DND; Start 23; Stop 47
ttggtgcaaattcattttcagacta

SEQ ID NO: 315151 - DNA, 25 bp, Artificial
  probe
  misc_feature (1)..(25): SEQ ID NO: 2103; WAN024DND; Start 53; Stop 77
gtggaagtattcatcaaaatagaca

SEQ ID NO: 315152 - DNA, 25 bp, Artificial
  probe
  misc_feature (1)..(25): SEQ ID NO: 2103; WAN024DND; Start 28; Stop 52
gcaaattcattttcagactatcttc

SEQ ID NO: 315153 - DNA, 25 bp, Artificial
  probe
  misc_feature (1)..(25): SEQ ID NO: 2103; WAN024DND; Start 13; Stop 37
agaaggaaaattggtgcaaattcat

SEQ ID NO: 315154 - DNA, 25 bp, Artificial
  probe
  misc_feature (1)..(25): SEQ ID NO: 2103; WAN024DND; Start 10; Stop 34
aagagaaggaaaattggtgcaaatt

SEQ ID NO: 315155 - DNA, 25 bp, Artificial
  probe
  misc_feature (1)..(25): SEQ ID NO: 2103; WAN024DND; Start 21; Stop 45
aattggtgcaaattcattttcagac

SEQ ID NO: 315156 - DNA, 25 bp, Artificial
  probe
  misc_feature (1)..(25): SEQ ID NO: 2103; WAN024DND; Start 14; Stop 38
gaaggaaaattggtgcaaattcatt

SEQ ID NO: 315157 - DNA, 25 bp, Artificial
  probe
  misc_feature (1)..(25): SEQ ID NO: 2103; WAN024DND; Start 11; Stop 35
agagaaggaaaattggtgcaaattc

SEQ ID NO: 315158 - DNA, 25 bp, Artificial
  probe
  misc_feature (1)..(25): SEQ ID NO: 2103; WAN024DND; Start 30; Stop 54
aaattcattttcagactatcttcgt

SEQ ID NO: 315159 - DNA, 25 bp, Artificial
  probe
  misc_feature (1)..(25): SEQ ID NO: 2103; WAN024DND; Start 12; Stop 36
gagaaggaaaattggtgcaaattca

SEQ ID NO: 315160 - DNA, 25 bp, Artificial
  probe
  misc_feature (1)..(25): SEQ ID NO: 2103; WAN024DND; Start 15; Stop 39
aaggaaaattggtgcaaattcattt

SEQ ID NO: 315161 - DNA, 25 bp, Artificial
  probe
  misc_feature (1)..(25): SEQ ID NO: 2103; WAN024DND; Start 29; Stop 53
caaattcattttcagactatcttcg

SEQ ID NO: 315162 - DNA, 25 bp, Artificial
  probe
  misc_feature (1)..(25): SEQ ID NO: 2104; WAN024DG5; Start 532; Stop 556
ttggataagacagttgcgaagataa

SEQ ID NO: 315163 - DNA, 25 bp, Artificial
  probe
  misc_feature (1)..(25): SEQ ID NO: 2104; WAN024DG5; Start 539; Stop 563
agacagttgcgaagataacagatta

SEQ ID NO: 315164 - DNA, 25 bp, Artificial
  probe
  misc_feature (1)..(25): SEQ ID NO: 2104; WAN024DG5; Start 537; Stop 561
taagacagttgcgaagataacagat

SEQ ID NO: 315165 - DNA, 25 bp, Artificial
  probe
  misc_feature (1)..(25): SEQ ID NO: 2104; WAN024DG5; Start 536; Stop 560
ataagacagttgcgaagataacaga

SEQ ID NO: 315166 - DNA, 25 bp, Artificial
  probe
  misc_feature (1)..(25): SEQ ID NO: 2104; WAN024DG5; Start 535; Stop 559
gataagacagttgcgaagataacag

SEQ ID NO: 315167 - DNA, 25 bp, Artificial
  probe
  misc_feature (1)..(25): SEQ ID NO: 2104; WAN024DG5; Start 540; Stop 564
gacagttgcgaagataacagattat

SEQ ID NO: 315168 - DNA, 25 bp, Artificial
  probe
  misc_feature (1)..(25): SEQ ID NO: 2104; WAN024DG5; Start 538; Stop 562
aagacagttgcgaagataacagatt

SEQ ID NO: 315169 - DNA, 25 bp, Artificial
  probe
  misc_feature (1)..(25): SEQ ID NO: 2104; WAN024DG5; Start 534; Stop 558
ggataagacagttgcgaagataaca

SEQ ID NO: 315170 - DNA, 25 bp, Artificial
  probe
  misc_feature (1)..(25): SEQ ID NO: 2104; WAN024DG5; Start 533; Stop 557
tggataagacagttgcgaagataac

SEQ ID NO: 315171 - DNA, 25 bp, Artificial
  probe
  misc_feature (1)..(25): SEQ ID NO: 2104; WAN024DG5; Start 195; Stop 219
ggctgttggaagtcctataactatt

SEQ ID NO: 315172 - DNA, 25 bp, Artificial
  probe
  misc_feature (1)..(25): SEQ ID NO: 2104; WAN024DG5; Start 194; Stop 218
tggctgttggaagtcctataactat

SEQ ID NO: 315173 - DNA, 25 bp, Artificial
  probe
  misc_feature (1)..(25): SEQ ID NO: 2104; WAN024DG5; Start 193; Stop 217
ttggctgttggaagtcctataacta

SEQ ID NO: 315174 - DNA, 25 bp, Artificial
  probe
  misc_feature (1)..(25): SEQ ID NO: 2104; WAN024DG5; Start 541; Stop 565
acagttgcgaagataacagattata

SEQ ID NO: 315175 - DNA, 25 bp, Artificial
  probe
  misc_feature (1)..(25): SEQ ID NO: 2104; WAN024DG5; Start 391; Stop 415
attacaatcgttcttctaacctctt

SEQ ID NO: 315176 - DNA, 25 bp, Artificial
  probe
  misc_feature (1)..(25): SEQ ID NO: 2104; WAN024DG5; Start 543; Stop 567
agttgcgaagataacagattatagt

SEQ ID NO: 315177 - DNA, 25 bp, Artificial
  probe
  misc_feature (1)..(25): SEQ ID NO: 2104; WAN024DG5; Start 466; Stop 490
gtagtagctcaggttatcagtcttc

SEQ ID NO: 315178 - DNA, 25 bp, Artificial
  probe
  misc_feature (1)..(25): SEQ ID NO: 2104; WAN024DG5; Start 465; Stop 489
agtagtagctcaggttatcagtctt

SEQ ID NO: 315179 - DNA, 25 bp, Artificial
  probe
  misc_feature (1)..(25): SEQ ID NO: 2104; WAN024DG5; Start 464; Stop 488
aagtagtagctcaggttatcagtct

SEQ ID NO: 315180 - DNA, 25 bp, Artificial
  probe
  misc_feature (1)..(25): SEQ ID NO: 2104; WAN024DG5; Start 463; Stop 487
caagtagtagctcaggttatcagtc

SEQ ID NO: 315181 - DNA, 25 bp, Artificial
  probe
  misc_feature (1)..(25): SEQ ID NO: 2104; WAN024DG5; Start 467; Stop 491
tagtagctcaggttatcagtcttcc

SEQ ID NO: 315182 - DNA, 25 bp, Artificial
  probe
  misc_feature (1)..(25): SEQ ID NO: 2104; WAN024DG5; Start 542; Stop 566
cagttgcgaagataacagattatag

SEQ ID NO: 315183 - DNA, 25 bp, Artificial
  probe
  misc_feature (1)..(25): SEQ ID NO: 2104; WAN024DG5; Start 138; Stop 162
caacgatcaacaggcattagttctt

SEQ ID NO: 315184 - DNA, 25 bp, Artificial
  probe
  misc_feature (1)..(25): SEQ ID NO: 2104; WAN024DG5; Start 196; Stop 220
gctgttggaagtcctataactatta

SEQ ID NO: 315185 - DNA, 25 bp, Artificial
  probe
  misc_feature (1)..(25): SEQ ID NO: 2104; WAN024DG5; Start 462; Stop 486
ccaagtagtagctcaggttatcagt

SEQ ID NO: 315186 - DNA, 25 bp, Artificial
  probe
  misc_feature (1)..(25): SEQ ID NO: 2104; WAN024DG5; Start 531; Stop 555
tttggataagacagttgcgaagata

SEQ ID NO: 315187 - DNA, 25 bp, Artificial
  probe
  misc_feature (1)..(25): SEQ ID NO: 2104; WAN024DG5; Start 502; Stop 526
ttagttgctttcttaccgatgctat

SEQ ID NO: 315188 - DNA, 25 bp, Artificial
  probe
  misc_feature (1)..(25): SEQ ID NO: 2104; WAN024DG5; Start 501; Stop 525
tttagttgctttcttaccgatgcta

SEQ ID NO: 315189 - DNA, 25 bp, Artificial
  probe
  misc_feature (1)..(25): SEQ ID NO: 2104; WAN024DG5; Start 544; Stop 568
gttgcgaagataacagattatagtt

SEQ ID NO: 315190 - DNA, 25 bp, Artificial
  probe
  misc_feature (1)..(25): SEQ ID NO: 2104; WAN024DG5; Start 390; Stop 414
tattacaatcgttcttctaacctct

SEQ ID NO: 315191 - DNA, 25 bp, Artificial
  probe
  misc_feature (1)..(25): SEQ ID NO: 2104; WAN024DG5; Start 503; Stop 527
tagttgctttcttaccgatgctatc

SEQ ID NO: 315192 - DNA, 25 bp, Artificial
  probe
  misc_feature (1)..(25): SEQ ID NO: 2104; WAN024DG5; Start 136; Stop 160
gtcaacgatcaacaggcattagttc

SEQ ID NO: 315193 - DNA, 25 bp, Artificial
  probe
  misc_feature (1)..(25): SEQ ID NO: 2104; WAN024DG5; Start 398; Stop 422
tcgttcttctaacctctttatccat

SEQ ID NO: 315194 - DNA, 25 bp, Artificial
  probe
  misc_feature (1)..(25): SEQ ID NO: 2104; WAN024DG5; Start 397; Stop 421
atcgttcttctaacctctttatcca

SEQ ID NO: 315195 - DNA, 25 bp, Artificial
  probe
  misc_feature (1)..(25): SEQ ID NO: 2105; WAN024CH4; Start 238; Stop 262
agaagatacaacaactgctccatta

SEQ ID NO: 315196 - DNA, 25 bp, Artificial
  probe
  misc_feature (1)..(25): SEQ ID NO: 2105; WAN024CH4; Start 239; Stop 263
gaagatacaacaactgctccattag

SEQ ID NO: 315197 - DNA, 25 bp, Artificial
  probe
  misc_feature (1)..(25): SEQ ID NO: 2105; WAN024CH4; Start 53; Stop 77
acattgacaccgtggatattagaat

SEQ ID NO: 315198 - DNA, 25 bp, Artificial
  probe
  misc_feature (1)..(25): SEQ ID NO: 2105; WAN024CH4; Start 54; Stop 78
cattgacaccgtggatattagaatc

SEQ ID NO: 315199 - DNA, 25 bp, Artificial
  probe
  misc_feature (1)..(25): SEQ ID NO: 2105; WAN024CH4; Start 52; Stop 76
gacattgacaccgtggatattagaa

SEQ ID NO: 315200 - DNA, 25 bp, Artificial
  probe
  misc_feature (1)..(25): SEQ ID NO: 2105; WAN024CH4; Start 55; Stop 79
attgacaccgtggatattagaatca

SEQ ID NO: 315201 - DNA, 25 bp, Artificial
  probe
  misc_feature (1)..(25): SEQ ID NO: 2105; WAN024CH4; Start 56; Stop 80
ttgacaccgtggatattagaatcag

SEQ ID NO: 315202 - DNA, 25 bp, Artificial
  probe
  misc_feature (1)..(25): SEQ ID NO: 2105; WAN024CH4; Start 49; Stop 73
atggacattgacaccgtggatatta

SEQ ID NO: 315203 - DNA, 25 bp, Artificial
  probe
  misc_feature (1)..(25): SEQ ID NO: 2105; WAN024CH4; Start 48; Stop 72
tatggacattgacaccgtggatatt

SEQ ID NO: 315204 - DNA, 25 bp, Artificial
  probe
  misc_feature (1)..(25): SEQ ID NO: 2105; WAN024CH4; Start 396; Stop 420
taggattatgactgcgacgaatgag

SEQ ID NO: 315205 - DNA, 25 bp, Artificial
  probe
  misc_feature (1)..(25): SEQ ID NO: 2105; WAN024CH4; Start 51; Stop 75
ggacattgacaccgtggatattaga

SEQ ID NO: 315206 - DNA, 25 bp, Artificial
  probe
  misc_feature (1)..(25): SEQ ID NO: 2105; WAN024CH4; Start 237; Stop 261
cagaagatacaacaactgctccatt

SEQ ID NO: 315207 - DNA, 25 bp, Artificial
  probe
  misc_feature (1)..(25): SEQ ID NO: 2105; WAN024CH4; Start 57; Stop 81
tgacaccgtggatattagaatcagg

SEQ ID NO: 315208 - DNA, 25 bp, Artificial
  probe
  misc_feature (1)..(25): SEQ ID NO: 2105; WAN024CH4; Start 50; Stop 74
tggacattgacaccgtggatattag

SEQ ID NO: 315209 - DNA, 25 bp, Artificial
  probe
  misc_feature (1)..(25): SEQ ID NO: 2105; WAN024CH4; Start 47; Stop 71
gtatggacattgacaccgtggatat

SEQ ID NO: 315210 - DNA, 25 bp, Artificial
  probe
  misc_feature (1)..(25): SEQ ID NO: 2105; WAN024CH4; Start 127; Stop 151
atcatctgtatagctgtcatactga

SEQ ID NO: 315211 - DNA, 25 bp, Artificial
  probe
  misc_feature (1)..(25): SEQ ID NO: 2105; WAN024CH4; Start 395; Stop 419
ctaggattatgactgcgacgaatga

SEQ ID NO: 315212 - DNA, 25 bp, Artificial
  probe
  misc_feature (1)..(25): SEQ ID NO: 2105; WAN024CH4; Start 236; Stop 260
tcagaagatacaacaactgctccat

SEQ ID NO: 315213 - DNA, 25 bp, Artificial
  probe
  misc_feature (1)..(25): SEQ ID NO: 2105; WAN024CH4; Start 93; Stop 117
agatatactccatagaacaaaccgc

SEQ ID NO: 315214 - DNA, 25 bp, Artificial
  probe
  misc_feature (1)..(25): SEQ ID NO: 2105; WAN024CH4; Start 462; Stop 486
ctcctctttgttccagttctttctt

SEQ ID NO: 315215 - DNA, 25 bp, Artificial
  probe
  misc_feature (1)..(25): SEQ ID NO: 2105; WAN024CH4; Start 235; Stop 259
ttcagaagatacaacaactgctcca

SEQ ID NO: 315216 - DNA, 25 bp, Artificial
  probe
  misc_feature (1)..(25): SEQ ID NO: 2105; WAN024CH4; Start 224; Stop 248
aaagcacaggtttcagaagatacaa

SEQ ID NO: 315217 - DNA, 25 bp, Artificial
  probe
  misc_feature (1)..(25): SEQ ID NO: 2105; WAN024CH4; Start 464; Stop 488
cctctttgttccagttctttcttga

SEQ ID NO: 315218 - DNA, 25 bp, Artificial
  probe
  misc_feature (1)..(25): SEQ ID NO: 2105; WAN024CH4; Start 463; Stop 487
tcctctttgttccagttctttcttg

SEQ ID NO: 315219 - DNA, 25 bp, Artificial
  probe
  misc_feature (1)..(25): SEQ ID NO: 2105; WAN024CH4; Start 468; Stop 492
tttgttccagttctttcttgagaga

SEQ ID NO: 315220 - DNA, 25 bp, Artificial
  probe
  misc_feature (1)..(25): SEQ ID NO: 2105; WAN024CH4; Start 467; Stop 491
ctttgttccagttctttcttgagag

SEQ ID NO: 315221 - DNA, 25 bp, Artificial
  probe
  misc_feature (1)..(25): SEQ ID NO: 2105; WAN024CH4; Start 466; Stop 490
tctttgttccagttctttcttgaga

SEQ ID NO: 315222 - DNA, 25 bp, Artificial
  probe
  misc_feature (1)..(25): SEQ ID NO: 2105; WAN024CH4; Start 229; Stop 253
acaggtttcagaagatacaacaact

SEQ ID NO: 315223 - DNA, 25 bp, Artificial
  probe
  misc_feature (1)..(25): SEQ ID NO: 2105; WAN024CH4; Start 228; Stop 252
cacaggtttcagaagatacaacaac

SEQ ID NO: 315224 - DNA, 25 bp, Artificial
  probe
  misc_feature (1)..(25): SEQ ID NO: 2105; WAN024CH4; Start 94; Stop 118
gatatactccatagaacaaaccgcc

SEQ ID NO: 315225 - DNA, 25 bp, Artificial
  probe
  misc_feature (1)..(25): SEQ ID NO: 2105; WAN024CH4; Start 469; Stop 493
ttgttccagttctttcttgagagag

SEQ ID NO: 315226 - DNA, 25 bp, Artificial
  probe
  misc_feature (1)..(25): SEQ ID NO: 2105; WAN024CH4; Start 131; Stop 155
tctgtatagctgtcatactgaatgc

SEQ ID NO: 315227 - DNA, 25 bp, Artificial
  probe
  misc_feature (1)..(25): SEQ ID NO: 2105; WAN024CH4; Start 75; Stop 99
aatcagggcgagcaaagtagatata

SEQ ID NO: 315228 - DNA, 25 bp, Artificial
  probe
  misc_feature (1)..(25): SEQ ID NO: 2106; WAN024G5J; Start 2105; Stop 2129
ctaaggaagtagaacagaacacagt

SEQ ID NO: 315229 - DNA, 25 bp, Artificial
  probe
  misc_feature (1)..(25): SEQ ID NO: 2106; WAN024G5J; Start 1604; Stop 1628
ttacggtaggtattggtattaacgg

SEQ ID NO: 315230 - DNA, 25 bp, Artificial
  probe
  misc_feature (1)..(25): SEQ ID NO: 2106; WAN024G5J; Start 1608; Stop 1632
ggtaggtattggtattaacggagat

SEQ ID NO: 315231 - DNA, 25 bp, Artificial
  probe
  misc_feature (1)..(25): SEQ ID NO: 2106; WAN024G5J; Start 1477; Stop 1501
tggcttaattggagagagagtattc

SEQ ID NO: 315232 - DNA, 25 bp, Artificial
  probe
  misc_feature (1)..(25): SEQ ID NO: 2106; WAN024G5J; Start 1605; Stop 1629
tacggtaggtattggtattaacgga

SEQ ID NO: 315233 - DNA, 25 bp, Artificial
  probe
  misc_feature (1)..(25): SEQ ID NO: 2106; WAN024G5J; Start 2554; Stop 2578
attaccaatgaacctattcctccaa

SEQ ID NO: 315234 - DNA, 25 bp, Artificial
  probe
  misc_feature (1)..(25): SEQ ID NO: 2106; WAN024G5J; Start 2106; Stop 2130
taaggaagtagaacagaacacagtg

SEQ ID NO: 315235 - DNA, 25 bp, Artificial
  probe
  misc_feature (1)..(25): SEQ ID NO: 2106; WAN024G5J; Start 1476; Stop 1500
ttggcttaattggagagagagtatt

SEQ ID NO: 315236 - DNA, 25 bp, Artificial
  probe
  misc_feature (1)..(25): SEQ ID NO: 2106; WAN024G5J; Start 2104; Stop 2128
cctaaggaagtagaacagaacacag

SEQ ID NO: 315237 - DNA, 25 bp, Artificial
  probe
  misc_feature (1)..(25): SEQ ID NO: 2106; WAN024G5J; Start 1485; Stop 1509
ttggagagagagtattctggcttat

SEQ ID NO: 315238 - DNA, 25 bp, Artificial
  probe
  misc_feature (1)..(25): SEQ ID NO: 2106; WAN024G5J; Start 1484; Stop 1508
attggagagagagtattctggctta

SEQ ID NO: 315239 - DNA, 25 bp, Artificial
  probe
  misc_feature (1)..(25): SEQ ID NO: 2106; WAN024G5J; Start 1481; Stop 1505
ttaattggagagagagtattctggc

SEQ ID NO: 315240 - DNA, 25 bp, Artificial
  probe
  misc_feature (1)..(25): SEQ ID NO: 2106; WAN024G5J; Start 1478; Stop 1502
ggcttaattggagagagagtattct

SEQ ID NO: 315241 - DNA, 25 bp, Artificial
  probe
  misc_feature (1)..(25): SEQ ID NO: 2106; WAN024G5J; Start 1482; Stop 1506
taattggagagagagtattctggct

SEQ ID NO: 315242 - DNA, 25 bp, Artificial
  probe
  misc_feature (1)..(25): SEQ ID NO: 2106; WAN024G5J; Start 2553; Stop 2577
tattaccaatgaacctattcctcca

SEQ ID NO: 315243 - DNA, 25 bp, Artificial
  probe
  misc_feature (1)..(25): SEQ ID NO: 2106; WAN024G5J; Start 1486; Stop 1510
tggagagagagtattctggcttatc

SEQ ID NO: 315244 - DNA, 25 bp, Artificial
  probe
  misc_feature (1)..(25): SEQ ID NO: 2106; WAN024G5J; Start 1607; Stop 1631
cggtaggtattggtattaacggaga

SEQ ID NO: 315245 - DNA, 25 bp, Artificial
  probe
  misc_feature (1)..(25): SEQ ID NO: 2106; WAN024G5J; Start 1778; Stop 1802
ttgagaatggtacgattacagatcc

SEQ ID NO: 315246 - DNA, 25 bp, Artificial
  probe
  misc_feature (1)..(25): SEQ ID NO: 2106; WAN024G5J; Start 1613; Stop 1637
gtattggtattaacggagatcctgg

SEQ ID NO: 315247 - DNA, 25 bp, Artificial
  probe
  misc_feature (1)..(25): SEQ ID NO: 2106; WAN024G5J; Start 1612; Stop 1636
ggtattggtattaacggagatcctg

SEQ ID NO: 315248 - DNA, 25 bp, Artificial
  probe
  misc_feature (1)..(25): SEQ ID NO: 2106; WAN024G5J; Start 1615; Stop 1639
attggtattaacggagatcctggta

SEQ ID NO: 315249 - DNA, 25 bp, Artificial
  probe
  misc_feature (1)..(25): SEQ ID NO: 2106; WAN024G5J; Start 1614; Stop 1638
tattggtattaacggagatcctggt

SEQ ID NO: 315250 - DNA, 25 bp, Artificial
  probe
  misc_feature (1)..(25): SEQ ID NO: 2106; WAN024G5J; Start 1610; Stop 1634
taggtattggtattaacggagatcc

SEQ ID NO: 315251 - DNA, 25 bp, Artificial
  probe
  misc_feature (1)..(25): SEQ ID NO: 2106; WAN024G5J; Start 1483; Stop 1507
aattggagagagagtattctggctt

SEQ ID NO: 315252 - DNA, 25 bp, Artificial
  probe
  misc_feature (1)..(25): SEQ ID NO: 2106; WAN024G5J; Start 1479; Stop 1503
gcttaattggagagagagtattctg

SEQ ID NO: 315253 - DNA, 25 bp, Artificial
  probe
  misc_feature (1)..(25): SEQ ID NO: 2106; WAN024G5J; Start 1606; Stop 1630
acggtaggtattggtattaacggag

SEQ ID NO: 315254 - DNA, 25 bp, Artificial
  probe
  misc_feature (1)..(25): SEQ ID NO: 2106; WAN024G5J; Start 1696; Stop 1720
tataccaatgttactgacacgacaa

SEQ ID NO: 315255 - DNA, 25 bp, Artificial
  probe
  misc_feature (1)..(25): SEQ ID NO: 2106; WAN024G5J; Start 1693; Stop 1717
aactataccaatgttactgacacga

SEQ ID NO: 315256 - DNA, 25 bp, Artificial
  probe
  misc_feature (1)..(25): SEQ ID NO: 2106; WAN024G5J; Start 1695; Stop 1719
ctataccaatgttactgacacgaca

SEQ ID NO: 315257 - DNA, 25 bp, Artificial
  probe
  misc_feature (1)..(25): SEQ ID NO: 2106; WAN024G5J; Start 1694; Stop 1718
actataccaatgttactgacacgac

SEQ ID NO: 315258 - DNA, 25 bp, Artificial
  probe
  misc_feature (1)..(25): SEQ ID NO: 2106; WAN024G5J; Start 1952; Stop 1976
aagtgctctatgatacgactgagaa

SEQ ID NO: 315259 - DNA, 25 bp, Artificial
  probe
  misc_feature (1)..(25): SEQ ID NO: 2106; WAN024G5J; Start 1490; Stop 1514
gagagagtattctggcttatccgtt

SEQ ID NO: 315260 - DNA, 25 bp, Artificial
  probe
  misc_feature (1)..(25): SEQ ID NO: 2106; WAN024G5J; Start 1782; Stop 1806
gaatggtacgattacagatccgatg

SEQ ID NO: 315261 - DNA, 25 bp, Artificial
  probe
  misc_feature (1)..(25): SEQ ID NO: 2107; WAN024G69; Start 97; Stop 121
atattagcagaagcatccagcatag

SEQ ID NO: 315262 - DNA, 25 bp, Artificial
  probe
  misc_feature (1)..(25): SEQ ID NO: 2107; WAN024G69; Start 104; Stop 128
cagaagcatccagcatagacatatt

SEQ ID NO: 315263 - DNA, 25 bp, Artificial
  probe
  misc_feature (1)..(25): SEQ ID NO: 2107; WAN024G69; Start 98; Stop 122
tattagcagaagcatccagcataga

SEQ ID NO: 315264 - DNA, 25 bp, Artificial
  probe
  misc_feature (1)..(25): SEQ ID NO: 2107; WAN024G69; Start 154; Stop 178
ttctcaactgtacctagaccaattc

SEQ ID NO: 315265 - DNA, 25 bp, Artificial
  probe
  misc_feature (1)..(25): SEQ ID NO: 2107; WAN024G69; Start 96; Stop 120
aatattagcagaagcatccagcata

SEQ ID NO: 315266 - DNA, 25 bp, Artificial
  probe
  misc_feature (1)..(25): SEQ ID NO: 2107; WAN024G69; Start 156; Stop 180
ctcaactgtacctagaccaattcca

SEQ ID NO: 315267 - DNA, 25 bp, Artificial
  probe
  misc_feature (1)..(25): SEQ ID NO: 2107; WAN024G69; Start 155; Stop 179
tctcaactgtacctagaccaattcc

SEQ ID NO: 315268 - DNA, 25 bp, Artificial
  probe
  misc_feature (1)..(25): SEQ ID NO: 2107; WAN024G69; Start 157; Stop 181
tcaactgtacctagaccaattccac

SEQ ID NO: 315269 - DNA, 25 bp, Artificial
  probe
  misc_feature (1)..(25): SEQ ID NO: 2107; WAN024G69; Start 99; Stop 123
attagcagaagcatccagcatagac

SEQ ID NO: 315270 - DNA, 25 bp, Artificial
  probe
  misc_feature (1)..(25): SEQ ID NO: 2107; WAN024G69; Start 105; Stop 129
agaagcatccagcatagacatattt

SEQ ID NO: 315271 - DNA, 25 bp, Artificial
  probe
  misc_feature (1)..(25): SEQ ID NO: 2107; WAN024G69; Start 103; Stop 127
gcagaagcatccagcatagacatat

SEQ ID NO: 315272 - DNA, 25 bp, Artificial
  probe
  misc_feature (1)..(25): SEQ ID NO: 2107; WAN024G69; Start 72; Stop 96
cttacccttgataccagacaacata

SEQ ID NO: 315273 - DNA, 25 bp, Artificial
  probe
  misc_feature (1)..(25): SEQ ID NO: 2107; WAN024G69; Start 218; Stop 242
tgtcactcaaattagcaataaggtt

SEQ ID NO: 315274 - DNA, 25 bp, Artificial
  probe
  misc_feature (1)..(25): SEQ ID NO: 2107; WAN024G69; Start 73; Stop 97
ttacccttgataccagacaacataa

SEQ ID NO: 315275 - DNA, 25 bp, Artificial
  probe
  misc_feature (1)..(25): SEQ ID NO: 2107; WAN024G69; Start 75; Stop 99
acccttgataccagacaacataata

SEQ ID NO: 315276 - DNA, 25 bp, Artificial
  probe
  misc_feature (1)..(25): SEQ ID NO: 2107; WAN024G69; Start 74; Stop 98
tacccttgataccagacaacataat

SEQ ID NO: 315277 - DNA, 25 bp, Artificial
  probe
  misc_feature (1)..(25): SEQ ID NO: 2107; WAN024G69; Start 217; Stop 241
ttgtcactcaaattagcaataaggt

SEQ ID NO: 315278 - DNA, 25 bp, Artificial
  probe
  misc_feature (1)..(25): SEQ ID NO: 2107; WAN024G69; Start 93; Stop 117
cataatattagcagaagcatccagc

SEQ ID NO: 315279 - DNA, 25 bp, Artificial
  probe
  misc_feature (1)..(25): SEQ ID NO: 2107; WAN024G69; Start 95; Stop 119
taatattagcagaagcatccagcat

SEQ ID NO: 315280 - DNA, 25 bp, Artificial
  probe
  misc_feature (1)..(25): SEQ ID NO: 2107; WAN024G69; Start 94; Stop 118
ataatattagcagaagcatccagca

SEQ ID NO: 315281 - DNA, 25 bp, Artificial
  probe
  misc_feature (1)..(25): SEQ ID NO: 2107; WAN024G69; Start 153; Stop 177
tttctcaactgtacctagaccaatt

SEQ ID NO: 315282 - DNA, 25 bp, Artificial
  probe
  misc_feature (1)..(25): SEQ ID NO: 2107; WAN024G69; Start 26; Stop 50
gcaaatcaagcatcatattggcaaa

SEQ ID NO: 315283 - DNA, 25 bp, Artificial
  probe
  misc_feature (1)..(25): SEQ ID NO: 2107; WAN024G69; Start 219; Stop 243
gtcactcaaattagcaataaggttg

SEQ ID NO: 315284 - DNA, 25 bp, Artificial
  probe
  misc_feature (1)..(25): SEQ ID NO: 2107; WAN024G69; Start 158; Stop 182
caactgtacctagaccaattccacg

SEQ ID NO: 315285 - DNA, 25 bp, Artificial
  probe
  misc_feature (1)..(25): SEQ ID NO: 2107; WAN024G69; Start 92; Stop 116
acataatattagcagaagcatccag

SEQ ID NO: 315286 - DNA, 25 bp, Artificial
  probe
  misc_feature (1)..(25): SEQ ID NO: 2107; WAN024G69; Start 102; Stop 126
agcagaagcatccagcatagacata

SEQ ID NO: 315287 - DNA, 25 bp, Artificial
  probe
  misc_feature (1)..(25): SEQ ID NO: 2107; WAN024G69; Start 101; Stop 125
tagcagaagcatccagcatagacat

SEQ ID NO: 315288 - DNA, 25 bp, Artificial
  probe
  misc_feature (1)..(25): SEQ ID NO: 2107; WAN024G69; Start 76; Stop 100
cccttgataccagacaacataatat

SEQ ID NO: 315289 - DNA, 25 bp, Artificial
  probe
  misc_feature (1)..(25): SEQ ID NO: 2107; WAN024G69; Start 71; Stop 95
ccttacccttgataccagacaacat

SEQ ID NO: 315290 - DNA, 25 bp, Artificial
  probe
  misc_feature (1)..(25): SEQ ID NO: 2107; WAN024G69; Start 91; Stop 115
aacataatattagcagaagcatcca

SEQ ID NO: 315291 - DNA, 25 bp, Artificial
  probe
  misc_feature (1)..(25): SEQ ID NO: 2107; WAN024G69; Start 87; Stop 111
agacaacataatattagcagaagca

SEQ ID NO: 315292 - DNA, 25 bp, Artificial
  probe
  misc_feature (1)..(25): SEQ ID NO: 2107; WAN024G69; Start 90; Stop 114
caacataatattagcagaagcatcc

SEQ ID NO: 315293 - DNA, 25 bp, Artificial
  probe
  misc_feature (1)..(25): SEQ ID NO: 2107; WAN024G69; Start 86; Stop 110
cagacaacataatattagcagaagc

SEQ ID NO: 315294 - DNA, 25 bp, Artificial
  probe
  misc_feature (1)..(25): SEQ ID NO: 2108; WAN024FXA; Start 218; Stop 242
ctctccaccaagatccattaagtac

SEQ ID NO: 315295 - DNA, 25 bp, Artificial
  probe
  misc_feature (1)..(25): SEQ ID NO: 2108; WAN024FXA; Start 215; Stop 239
gtactctccaccaagatccattaag

SEQ ID NO: 315296 - DNA, 25 bp, Artificial
  probe
  misc_feature (1)..(25): SEQ ID NO: 2108; WAN024FXA; Start 217; Stop 241
actctccaccaagatccattaagta

SEQ ID NO: 315297 - DNA, 25 bp, Artificial
  probe
  misc_feature (1)..(25): SEQ ID NO: 2108; WAN024FXA; Start 216; Stop 240
tactctccaccaagatccattaagt

SEQ ID NO: 315298 - DNA, 25 bp, Artificial
  probe
  misc_feature (1)..(25): SEQ ID NO: 2108; WAN024FXA; Start 252; Stop 276
cctgactcaacaatcttaccacctt

SEQ ID NO: 315299 - DNA, 25 bp, Artificial
  probe
  misc_feature (1)..(25): SEQ ID NO: 2108; WAN024FXA; Start 250; Stop 274
ttcctgactcaacaatcttaccacc

SEQ ID NO: 315300 - DNA, 25 bp, Artificial
  probe
  misc_feature (1)..(25): SEQ ID NO: 2108; WAN024FXA; Start 256; Stop 280
actcaacaatcttaccacctttcat

SEQ ID NO: 315301 - DNA, 25 bp, Artificial
  probe
  misc_feature (1)..(25): SEQ ID NO: 2108; WAN024FXA; Start 24; Stop 48
taaacaatcagcgaacccaatacta

SEQ ID NO: 315302 - DNA, 25 bp, Artificial
  probe
  misc_feature (1)..(25): SEQ ID NO: 2108; WAN024FXA; Start 257; Stop 281
ctcaacaatcttaccacctttcatt

SEQ ID NO: 315303 - DNA, 25 bp, Artificial
  probe
  misc_feature (1)..(25): SEQ ID NO: 2108; WAN024FXA; Start 248; Stop 272
atttcctgactcaacaatcttacca

SEQ ID NO: 315304 - DNA, 25 bp, Artificial
  probe
  misc_feature (1)..(25): SEQ ID NO: 2108; WAN024FXA; Start 25; Stop 49
aaacaatcagcgaacccaatactat

SEQ ID NO: 315305 - DNA, 25 bp, Artificial
  probe
  misc_feature (1)..(25): SEQ ID NO: 2108; WAN024FXA; Start 255; Stop 279
gactcaacaatcttaccacctttca

SEQ ID NO: 315306 - DNA, 25 bp, Artificial
  probe
  misc_feature (1)..(25): SEQ ID NO: 2108; WAN024FXA; Start 26; Stop 50
aacaatcagcgaacccaatactatt

SEQ ID NO: 315307 - DNA, 25 bp, Artificial
  probe
  misc_feature (1)..(25): SEQ ID NO: 2108; WAN024FXA; Start 35; Stop 59
cgaacccaatactattccattcaac

SEQ ID NO: 315308 - DNA, 25 bp, Artificial
  probe
  misc_feature (1)..(25): SEQ ID NO: 2108; WAN024FXA; Start 254; Stop 278
tgactcaacaatcttaccacctttc

SEQ ID NO: 315309 - DNA, 25 bp, Artificial
  probe
  misc_feature (1)..(25): SEQ ID NO: 2108; WAN024FXA; Start 253; Stop 277
ctgactcaacaatcttaccaccttt

SEQ ID NO: 315310 - DNA, 25 bp, Artificial
  probe
  misc_feature (1)..(25): SEQ ID NO: 2108; WAN024FXA; Start 249; Stop 273
tttcctgactcaacaatcttaccac

SEQ ID NO: 315311 - DNA, 25 bp, Artificial
  probe
  misc_feature (1)..(25): SEQ ID NO: 2108; WAN024FXA; Start 261; Stop 285
acaatcttaccacctttcattacaa

SEQ ID NO: 315312 - DNA, 25 bp, Artificial
  probe
  misc_feature (1)..(25): SEQ ID NO: 2108; WAN024FXA; Start 260; Stop 284
aacaatcttaccacctttcattaca

SEQ ID NO: 315313 - DNA, 25 bp, Artificial
  probe
  misc_feature (1)..(25): SEQ ID NO: 2108; WAN024FXA; Start 36; Stop 60
gaacccaatactattccattcaaca

SEQ ID NO: 315314 - DNA, 25 bp, Artificial
  probe
  misc_feature (1)..(25): SEQ ID NO: 2108; WAN024FXA; Start 251; Stop 275
tcctgactcaacaatcttaccacct

SEQ ID NO: 315315 - DNA, 25 bp, Artificial
  probe
  misc_feature (1)..(25): SEQ ID NO: 2108; WAN024FXA; Start 37; Stop 61
aacccaatactattccattcaacaa

SEQ ID NO: 315316 - DNA, 25 bp, Artificial
  probe
  misc_feature (1)..(25): SEQ ID NO: 2108; WAN024FXA; Start 27; Stop 51
acaatcagcgaacccaatactattc

SEQ ID NO: 315317 - DNA, 25 bp, Artificial
  probe
  misc_feature (1)..(25): SEQ ID NO: 2108; WAN024FXA; Start 259; Stop 283
caacaatcttaccacctttcattac

SEQ ID NO: 315318 - DNA, 25 bp, Artificial
  probe
  misc_feature (1)..(25): SEQ ID NO: 2108; WAN024FXA; Start 258; Stop 282
tcaacaatcttaccacctttcatta

SEQ ID NO: 315319 - DNA, 25 bp, Artificial
  probe
  misc_feature (1)..(25): SEQ ID NO: 2108; WAN024FXA; Start 23; Stop 47
gtaaacaatcagcgaacccaatact

SEQ ID NO: 315320 - DNA, 25 bp, Artificial
  probe
  misc_feature (1)..(25): SEQ ID NO: 2108; WAN024FXA; Start 34; Stop 58
gcgaacccaatactattccattcaa

SEQ ID NO: 315321 - DNA, 25 bp, Artificial
  probe
  misc_feature (1)..(25): SEQ ID NO: 2108; WAN024FXA; Start 22; Stop 46
tgtaaacaatcagcgaacccaatac

SEQ ID NO: 315322 - DNA, 25 bp, Artificial
  probe
  misc_feature (1)..(25): SEQ ID NO: 2108; WAN024FXA; Start 32; Stop 56
cagcgaacccaatactattccattc

SEQ ID NO: 315323 - DNA, 25 bp, Artificial
  probe
  misc_feature (1)..(25): SEQ ID NO: 2108; WAN024FXA; Start 28; Stop 52
caatcagcgaacccaatactattcc

SEQ ID NO: 315324 - DNA, 25 bp, Artificial
  probe
  misc_feature (1)..(25): SEQ ID NO: 2108; WAN024FXA; Start 30; Stop 54
atcagcgaacccaatactattccat

SEQ ID NO: 315325 - DNA, 25 bp, Artificial
  probe
  misc_feature (1)..(25): SEQ ID NO: 2108; WAN024FXA; Start 241; Stop 265
acttatgatttcctgactcaacaat

SEQ ID NO: 315326 - DNA, 25 bp, Artificial
  probe
  misc_feature (1)..(25): SEQ ID NO: 2108; WAN024FXA; Start 203; Stop 227
atataagctgtagtactctccacca

SEQ ID NO: 315327 - DNA, 25 bp, Artificial
  probe
  misc_feature (1)..(25): SEQ ID NO: 2109; WAN024FHW; Start 439; Stop 463
ccatctattcgtgaagaagtgacta

SEQ ID NO: 315328 - DNA, 25 bp, Artificial
  probe
  misc_feature (1)..(25): SEQ ID NO: 2109; WAN024FHW; Start 1819; Stop 1843
accagcaagattccttaccaattaa

SEQ ID NO: 315329 - DNA, 25 bp, Artificial
  probe
  misc_feature (1)..(25): SEQ ID NO: 2109; WAN024FHW; Start 1818; Stop 1842
aaccagcaagattccttaccaatta

SEQ ID NO: 315330 - DNA, 25 bp, Artificial
  probe
  misc_feature (1)..(25): SEQ ID NO: 2109; WAN024FHW; Start 500; Stop 524
acaagttggaattgattgaagaaca

SEQ ID NO: 315331 - DNA, 25 bp, Artificial
  probe
  misc_feature (1)..(25): SEQ ID NO: 2109; WAN024FHW; Start 501; Stop 525
caagttggaattgattgaagaacac

SEQ ID NO: 315332 - DNA, 25 bp, Artificial
  probe
  misc_feature (1)..(25): SEQ ID NO: 2109; WAN024FHW; Start 504; Stop 528
gttggaattgattgaagaacactca

SEQ ID NO: 315333 - DNA, 25 bp, Artificial
  probe
  misc_feature (1)..(25): SEQ ID NO: 2109; WAN024FHW; Start 505; Stop 529
ttggaattgattgaagaacactcag

SEQ ID NO: 315334 - DNA, 25 bp, Artificial
  probe
  misc_feature (1)..(25): SEQ ID NO: 2109; WAN024FHW; Start 503; Stop 527
agttggaattgattgaagaacactc

SEQ ID NO: 315335 - DNA, 25 bp, Artificial
  probe
  misc_feature (1)..(25): SEQ ID NO: 2109; WAN024FHW; Start 506; Stop 530
tggaattgattgaagaacactcaga

SEQ ID NO: 315336 - DNA, 25 bp, Artificial
  probe
  misc_feature (1)..(25): SEQ ID NO: 2109; WAN024FHW; Start 510; Stop 534
attgattgaagaacactcagaagac

SEQ ID NO: 315337 - DNA, 25 bp, Artificial
  probe
  misc_feature (1)..(25): SEQ ID NO: 2109; WAN024FHW; Start 507; Stop 531
ggaattgattgaagaacactcagaa

SEQ ID NO: 315338 - DNA, 25 bp, Artificial
  probe
  misc_feature (1)..(25): SEQ ID NO: 2109; WAN024FHW; Start 502; Stop 526
aagttggaattgattgaagaacact

SEQ ID NO: 315339 - DNA, 25 bp, Artificial
  probe
  misc_feature (1)..(25): SEQ ID NO: 2109; WAN024FHW; Start 1197; Stop 1221
tcacctattcgttactccagaacaa

SEQ ID NO: 315340 - DNA, 25 bp, Artificial
  probe
  misc_feature (1)..(25): SEQ ID NO: 2109; WAN024FHW; Start 514; Stop 538
attgaagaacactcagaagacgaag

SEQ ID NO: 315341 - DNA, 25 bp, Artificial
  probe
  misc_feature (1)..(25): SEQ ID NO: 2109; WAN024FHW; Start 513; Stop 537
gattgaagaacactcagaagacgaa

SEQ ID NO: 315342 - DNA, 25 bp, Artificial
  probe
  misc_feature (1)..(25): SEQ ID NO: 2109; WAN024FHW; Start 440; Stop 464
catctattcgtgaagaagtgactaa

SEQ ID NO: 315343 - DNA, 25 bp, Artificial
  probe
  misc_feature (1)..(25): SEQ ID NO: 2109; WAN024FHW; Start 511; Stop 535
ttgattgaagaacactcagaagacg

SEQ ID NO: 315344 - DNA, 25 bp, Artificial
  probe
  misc_feature (1)..(25): SEQ ID NO: 2109; WAN024FHW; Start 496; Stop 520
ccttacaagttggaattgattgaag

SEQ ID NO: 315345 - DNA, 25 bp, Artificial
  probe
  misc_feature (1)..(25): SEQ ID NO: 2109; WAN024FHW; Start 1599; Stop 1623
tatctcaactatggaacgcttcaca

SEQ ID NO: 315346 - DNA, 25 bp, Artificial
  probe
  misc_feature (1)..(25): SEQ ID NO: 2109; WAN024FHW; Start 509; Stop 533
aattgattgaagaacactcagaaga

SEQ ID NO: 315347 - DNA, 25 bp, Artificial
  probe
  misc_feature (1)..(25): SEQ ID NO: 2109; WAN024FHW; Start 508; Stop 532
gaattgattgaagaacactcagaag

SEQ ID NO: 315348 - DNA, 25 bp, Artificial
  probe
  misc_feature (1)..(25): SEQ ID NO: 2109; WAN024FHW; Start 1196; Stop 1220
gtcacctattcgttactccagaaca

SEQ ID NO: 315349 - DNA, 25 bp, Artificial
  probe
  misc_feature (1)..(25): SEQ ID NO: 2109; WAN024FHW; Start 1270; Stop 1294
gaagacttcaacttgactgactacc

SEQ ID NO: 315350 - DNA, 25 bp, Artificial
  probe
  misc_feature (1)..(25): SEQ ID NO: 2109; WAN024FHW; Start 512; Stop 536
tgattgaagaacactcagaagacga

SEQ ID NO: 315351 - DNA, 25 bp, Artificial
  probe
  misc_feature (1)..(25): SEQ ID NO: 2109; WAN024FHW; Start 1820; Stop 1844
ccagcaagattccttaccaattaat

SEQ ID NO: 315352 - DNA, 25 bp, Artificial
  probe
  misc_feature (1)..(25): SEQ ID NO: 2109; WAN024FHW; Start 499; Stop 523
tacaagttggaattgattgaagaac

SEQ ID NO: 315353 - DNA, 25 bp, Artificial
  probe
  misc_feature (1)..(25): SEQ ID NO: 2109; WAN024FHW; Start 497; Stop 521
cttacaagttggaattgattgaaga

SEQ ID NO: 315354 - DNA, 25 bp, Artificial
  probe
  misc_feature (1)..(25): SEQ ID NO: 2109; WAN024FHW; Start 1621; Stop 1645
acagctatcttgattgagaactaca

SEQ ID NO: 315355 - DNA, 25 bp, Artificial
  probe
  misc_feature (1)..(25): SEQ ID NO: 2109; WAN024FHW; Start 1620; Stop 1644
cacagctatcttgattgagaactac

SEQ ID NO: 315356 - DNA, 25 bp, Artificial
  probe
  misc_feature (1)..(25): SEQ ID NO: 2109; WAN024FHW; Start 1618; Stop 1642
ttcacagctatcttgattgagaact

SEQ ID NO: 315357 - DNA, 25 bp, Artificial
  probe
  misc_feature (1)..(25): SEQ ID NO: 2109; WAN024FHW; Start 1617; Stop 1641
cttcacagctatcttgattgagaac

SEQ ID NO: 315358 - DNA, 25 bp, Artificial
  probe
  misc_feature (1)..(25): SEQ ID NO: 2109; WAN024FHW; Start 1209; Stop 1233
tactccagaacaaatccaagaagaa

SEQ ID NO: 315359 - DNA, 25 bp, Artificial
  probe
  misc_feature (1)..(25): SEQ ID NO: 2109; WAN024FHW; Start 1208; Stop 1232
ttactccagaacaaatccaagaaga

SEQ ID NO: 315360 - DNA, 25 bp, Artificial
  probe
  misc_feature (1)..(25): SEQ ID NO: 2110; WAN024GGD; Start 20; Stop 44
gttggtggactaatatgtgccttat

SEQ ID NO: 315361 - DNA, 25 bp, Artificial
  probe
  misc_feature (1)..(25): SEQ ID NO: 2110; WAN024GGD; Start 21; Stop 45
ttggtggactaatatgtgccttatt

SEQ ID NO: 315362 - DNA, 25 bp, Artificial
  probe
  misc_feature (1)..(25): SEQ ID NO: 2110; WAN024GGD; Start 19; Stop 43
cgttggtggactaatatgtgcctta

SEQ ID NO: 315363 - DNA, 25 bp, Artificial
  probe
  misc_feature (1)..(25): SEQ ID NO: 2110; WAN024GGD; Start 223; Stop 247
gaagaaatgagtttagtccaagagg

SEQ ID NO: 315364 - DNA, 25 bp, Artificial
  probe
  misc_feature (1)..(25): SEQ ID NO: 2110; WAN024GGD; Start 34; Stop 58
atgtgccttatttgtcagagaattg

SEQ ID NO: 315365 - DNA, 25 bp, Artificial
  probe
  misc_feature (1)..(25): SEQ ID NO: 2110; WAN024GGD; Start 224; Stop 248
aagaaatgagtttagtccaagaggc

SEQ ID NO: 315366 - DNA, 25 bp, Artificial
  probe
  misc_feature (1)..(25): SEQ ID NO: 2110; WAN024GGD; Start 22; Stop 46
tggtggactaatatgtgccttattt

SEQ ID NO: 315367 - DNA, 25 bp, Artificial
  probe
  misc_feature (1)..(25): SEQ ID NO: 2110; WAN024GGD; Start 23; Stop 47
ggtggactaatatgtgccttatttg

SEQ ID NO: 315368 - DNA, 25 bp, Artificial
  probe
  misc_feature (1)..(25): SEQ ID NO: 2110; WAN024GGD; Start 395; Stop 419
cctttgaagaaatgacagcagaaac

SEQ ID NO: 315369 - DNA, 25 bp, Artificial
  probe
  misc_feature (1)..(25): SEQ ID NO: 2110; WAN024GGD; Start 24; Stop 48
gtggactaatatgtgccttatttgt

SEQ ID NO: 315370 - DNA, 25 bp, Artificial
  probe
  misc_feature (1)..(25): SEQ ID NO: 2110; WAN024GGD; Start 222; Stop 246
agaagaaatgagtttagtccaagag

SEQ ID NO: 315371 - DNA, 25 bp, Artificial
  probe
  misc_feature (1)..(25): SEQ ID NO: 2110; WAN024GGD; Start 226; Stop 250
gaaatgagtttagtccaagaggcag

SEQ ID NO: 315372 - DNA, 25 bp, Artificial
  probe
  misc_feature (1)..(25): SEQ ID NO: 2110; WAN024GGD; Start 35; Stop 59
tgtgccttatttgtcagagaattga

SEQ ID NO: 315373 - DNA, 25 bp, Artificial
  probe
  misc_feature (1)..(25): SEQ ID NO: 2110; WAN024GGD; Start 33; Stop 57
tatgtgccttatttgtcagagaatt

SEQ ID NO: 315374 - DNA, 25 bp, Artificial
  probe
  misc_feature (1)..(25): SEQ ID NO: 2110; WAN024GGD; Start 32; Stop 56
atatgtgccttatttgtcagagaat

SEQ ID NO: 315375 - DNA, 25 bp, Artificial
  probe
  misc_feature (1)..(25): SEQ ID NO: 2110; WAN024GGD; Start 31; Stop 55
aatatgtgccttatttgtcagagaa

SEQ ID NO: 315376 - DNA, 25 bp, Artificial
  probe
  misc_feature (1)..(25): SEQ ID NO: 2110; WAN024GGD; Start 225; Stop 249
agaaatgagtttagtccaagaggca

SEQ ID NO: 315377 - DNA, 25 bp, Artificial
  probe
  misc_feature (1)..(25): SEQ ID NO: 2110; WAN024GGD; Start 394; Stop 418
ccctttgaagaaatgacagcagaaa

SEQ ID NO: 315378 - DNA, 25 bp, Artificial
  probe
  misc_feature (1)..(25): SEQ ID NO: 2110; WAN024GGD; Start 228; Stop 252
aatgagtttagtccaagaggcagtt

SEQ ID NO: 315379 - DNA, 25 bp, Artificial
  probe
  misc_feature (1)..(25): SEQ ID NO: 2110; WAN024GGD; Start 227; Stop 251
aaatgagtttagtccaagaggcagt

SEQ ID NO: 315380 - DNA, 25 bp, Artificial
  probe
  misc_feature (1)..(25): SEQ ID NO: 2110; WAN024GGD; Start 345; Stop 369
tgatatgaatggtcatggtctcaag

SEQ ID NO: 315381 - DNA, 25 bp, Artificial
  probe
  misc_feature (1)..(25): SEQ ID NO: 2110; WAN024GGD; Start 54; Stop 78
aattgacctcatcaagaaggaagaa

SEQ ID NO: 315382 - DNA, 25 bp, Artificial
  probe
  misc_feature (1)..(25): SEQ ID NO: 2110; WAN024GGD; Start 308; Stop 332
ctcatcttcattggcatctgtttcc

SEQ ID NO: 315383 - DNA, 25 bp, Artificial
  probe
  misc_feature (1)..(25): SEQ ID NO: 2110; WAN024GGD; Start 48; Stop 72
tcagagaattgacctcatcaagaag

SEQ ID NO: 315384 - DNA, 25 bp, Artificial
  probe
  misc_feature (1)..(25): SEQ ID NO: 2110; WAN024GGD; Start 344; Stop 368
gtgatatgaatggtcatggtctcaa

SEQ ID NO: 315385 - DNA, 25 bp, Artificial
  probe
  misc_feature (1)..(25): SEQ ID NO: 2110; WAN024GGD; Start 91; Stop 115
gtcaaagagttggaaacaggctatc

SEQ ID NO: 315386 - DNA, 25 bp, Artificial
  probe
  misc_feature (1)..(25): SEQ ID NO: 2110; WAN024GGD; Start 148; Stop 172
tatagtctctttctagccaaggagc

SEQ ID NO: 315387 - DNA, 25 bp, Artificial
  probe
  misc_feature (1)..(25): SEQ ID NO: 2110; WAN024GGD; Start 53; Stop 77
gaattgacctcatcaagaaggaaga

SEQ ID NO: 315388 - DNA, 25 bp, Artificial
  probe
  misc_feature (1)..(25): SEQ ID NO: 2110; WAN024GGD; Start 52; Stop 76
agaattgacctcatcaagaaggaag

SEQ ID NO: 315389 - DNA, 25 bp, Artificial
  probe
  misc_feature (1)..(25): SEQ ID NO: 2110; WAN024GGD; Start 51; Stop 75
gagaattgacctcatcaagaaggaa

SEQ ID NO: 315390 - DNA, 25 bp, Artificial
  probe
  misc_feature (1)..(25): SEQ ID NO: 2110; WAN024GGD; Start 28; Stop 52
actaatatgtgccttatttgtcaga

SEQ ID NO: 315391 - DNA, 25 bp, Artificial
  probe
  misc_feature (1)..(25): SEQ ID NO: 2110; WAN024GGD; Start 92; Stop 116
tcaaagagttggaaacaggctatct

SEQ ID NO: 315392 - DNA, 25 bp, Artificial
  probe
  misc_feature (1)..(25): SEQ ID NO: 2110; WAN024GGD; Start 26; Stop 50
ggactaatatgtgccttatttgtca

SEQ ID NO: 315393 - DNA, 25 bp, Artificial
  probe
  misc_feature (1)..(25): SEQ ID NO: 2111; WAN024FR2; Start 413; Stop 437
atagttctcaggcaataatcacacc

SEQ ID NO: 315394 - DNA, 25 bp, Artificial
  probe
  misc_feature (1)..(25): SEQ ID NO: 2111; WAN024FR2; Start 412; Stop 436
gatagttctcaggcaataatcacac

SEQ ID NO: 315395 - DNA, 25 bp, Artificial
  probe
  misc_feature (1)..(25): SEQ ID NO: 2111; WAN024FR2; Start 411; Stop 435
cgatagttctcaggcaataatcaca

SEQ ID NO: 315396 - DNA, 25 bp, Artificial
  probe
  misc_feature (1)..(25): SEQ ID NO: 2111; WAN024FR2; Start 410; Stop 434
ccgatagttctcaggcaataatcac

SEQ ID NO: 315397 - DNA, 25 bp, Artificial
  probe
  misc_feature (1)..(25): SEQ ID NO: 2111; WAN024FR2; Start 1181; Stop 1205
taaagataggcgggatagcaataag

SEQ ID NO: 315398 - DNA, 25 bp, Artificial
  probe
  misc_feature (1)..(25): SEQ ID NO: 2111; WAN024FR2; Start 1179; Stop 1203
cataaagataggcgggatagcaata

SEQ ID NO: 315399 - DNA, 25 bp, Artificial
  probe
  misc_feature (1)..(25): SEQ ID NO: 2111; WAN024FR2; Start 1302; Stop 1326
taataaagatgcgacgaaagatgac

SEQ ID NO: 315400 - DNA, 25 bp, Artificial
  probe
  misc_feature (1)..(25): SEQ ID NO: 2111; WAN024FR2; Start 1509; Stop 1533
tattgacccagataacgagtttgaa

SEQ ID NO: 315401 - DNA, 25 bp, Artificial
  probe
  misc_feature (1)..(25): SEQ ID NO: 2111; WAN024FR2; Start 1301; Stop 1325
ctaataaagatgcgacgaaagatga

SEQ ID NO: 315402 - DNA, 25 bp, Artificial
  probe
  misc_feature (1)..(25): SEQ ID NO: 2111; WAN024FR2; Start 1180; Stop 1204
ataaagataggcgggatagcaataa

SEQ ID NO: 315403 - DNA, 25 bp, Artificial
  probe
  misc_feature (1)..(25): SEQ ID NO: 2111; WAN024FR2; Start 1508; Stop 1532
ctattgacccagataacgagtttga

SEQ ID NO: 315404 - DNA, 25 bp, Artificial
  probe
  misc_feature (1)..(25): SEQ ID NO: 2111; WAN024FR2; Start 1510; Stop 1534
attgacccagataacgagtttgaat

SEQ ID NO: 315405 - DNA, 25 bp, Artificial
  probe
  misc_feature (1)..(25): SEQ ID NO: 2111; WAN024FR2; Start 1300; Stop 1324
gctaataaagatgcgacgaaagatg

SEQ ID NO: 315406 - DNA, 25 bp, Artificial
  probe
  misc_feature (1)..(25): SEQ ID NO: 2111; WAN024FR2; Start 1169; Stop 1193
ataaaggaagcataaagataggcgg

SEQ ID NO: 315407 - DNA, 25 bp, Artificial
  probe
  misc_feature (1)..(25): SEQ ID NO: 2111; WAN024FR2; Start 1168; Stop 1192
aataaaggaagcataaagataggcg

SEQ ID NO: 315408 - DNA, 25 bp, Artificial
  probe
  misc_feature (1)..(25): SEQ ID NO: 2111; WAN024FR2; Start 856; Stop 880
tcaggagttctctttgtttcattca

SEQ ID NO: 315409 - DNA, 25 bp, Artificial
  probe
  misc_feature (1)..(25): SEQ ID NO: 2111; WAN024FR2; Start 1585; Stop 1609
gcacacaggctatctacaattaaag

SEQ ID NO: 315410 - DNA, 25 bp, Artificial
  probe
  misc_feature (1)..(25): SEQ ID NO: 2111; WAN024FR2; Start 857; Stop 881
caggagttctctttgtttcattcat

SEQ ID NO: 315411 - DNA, 25 bp, Artificial
  probe
  misc_feature (1)..(25): SEQ ID NO: 2111; WAN024FR2; Start 538; Stop 562
ggcgagcaagaatttatgaagatat

SEQ ID NO: 315412 - DNA, 25 bp, Artificial
  probe
  misc_feature (1)..(25): SEQ ID NO: 2111; WAN024FR2; Start 882; Stop 906
gagaatgatgtggtactccatgtat

SEQ ID NO: 315413 - DNA, 25 bp, Artificial
  probe
  misc_feature (1)..(25): SEQ ID NO: 2111; WAN024FR2; Start 855; Stop 879
atcaggagttctctttgtttcattc

SEQ ID NO: 315414 - DNA, 25 bp, Artificial
  probe
  misc_feature (1)..(25): SEQ ID NO: 2111; WAN024FR2; Start 572; Stop 596
ccctatctaaactaagtgctgaaac

SEQ ID NO: 315415 - DNA, 25 bp, Artificial
  probe
  misc_feature (1)..(25): SEQ ID NO: 2111; WAN024FR2; Start 571; Stop 595
tccctatctaaactaagtgctgaaa

SEQ ID NO: 315416 - DNA, 25 bp, Artificial
  probe
  misc_feature (1)..(25): SEQ ID NO: 2111; WAN024FR2; Start 1511; Stop 1535
ttgacccagataacgagtttgaatt

SEQ ID NO: 315417 - DNA, 25 bp, Artificial
  probe
  misc_feature (1)..(25): SEQ ID NO: 2111; WAN024FR2; Start 1583; Stop 1607
ttgcacacaggctatctacaattaa

SEQ ID NO: 315418 - DNA, 25 bp, Artificial
  probe
  misc_feature (1)..(25): SEQ ID NO: 2111; WAN024FR2; Start 319; Stop 343
aggttctttgacttaaatccatctg

SEQ ID NO: 315419 - DNA, 25 bp, Artificial
  probe
  misc_feature (1)..(25): SEQ ID NO: 2111; WAN024FR2; Start 1507; Stop 1531
tctattgacccagataacgagtttg

SEQ ID NO: 315420 - DNA, 25 bp, Artificial
  probe
  misc_feature (1)..(25): SEQ ID NO: 2111; WAN024FR2; Start 1187; Stop 1211
taggcgggatagcaataagtgaata

SEQ ID NO: 315421 - DNA, 25 bp, Artificial
  probe
  misc_feature (1)..(25): SEQ ID NO: 2111; WAN024FR2; Start 570; Stop 594
atccctatctaaactaagtgctgaa

SEQ ID NO: 315422 - DNA, 25 bp, Artificial
  probe
  misc_feature (1)..(25): SEQ ID NO: 2111; WAN024FR2; Start 569; Stop 593
aatccctatctaaactaagtgctga

SEQ ID NO: 315423 - DNA, 25 bp, Artificial
  probe
  misc_feature (1)..(25): SEQ ID NO: 2111; WAN024FR2; Start 320; Stop 344
ggttctttgacttaaatccatctgg

SEQ ID NO: 315424 - DNA, 25 bp, Artificial
  probe
  misc_feature (1)..(25): SEQ ID NO: 2111; WAN024FR2; Start 568; Stop 592
gaatccctatctaaactaagtgctg

SEQ ID NO: 315425 - DNA, 25 bp, Artificial
  probe
  misc_feature (1)..(25): SEQ ID NO: 2111; WAN024FR2; Start 1650; Stop 1674
agaaagagggtctgacaaagaatta

SEQ ID NO: 315426 - DNA, 25 bp, Artificial
  probe
  misc_feature (1)..(25): SEQ ID NO: 2112; WAN024CYX; Start 252; Stop 276
tggcacattaacttatactggaaca

SEQ ID NO: 315427 - DNA, 25 bp, Artificial
  probe
  misc_feature (1)..(25): SEQ ID NO: 2112; WAN024CYX; Start 489; Stop 513
tgtctatatcagcctcttcctagtt

SEQ ID NO: 315428 - DNA, 25 bp, Artificial
  probe
  misc_feature (1)..(25): SEQ ID NO: 2112; WAN024CYX; Start 249; Stop 273
cgatggcacattaacttatactgga

SEQ ID NO: 315429 - DNA, 25 bp, Artificial
  probe
  misc_feature (1)..(25): SEQ ID NO: 2112; WAN024CYX; Start 491; Stop 515
tctatatcagcctcttcctagttct

SEQ ID NO: 315430 - DNA, 25 bp, Artificial
  probe
  misc_feature (1)..(25): SEQ ID NO: 2112; WAN024CYX; Start 490; Stop 514
gtctatatcagcctcttcctagttc

SEQ ID NO: 315431 - DNA, 25 bp, Artificial
  probe
  misc_feature (1)..(25): SEQ ID NO: 2112; WAN024CYX; Start 251; Stop 275
atggcacattaacttatactggaac

SEQ ID NO: 315432 - DNA, 25 bp, Artificial
  probe
  misc_feature (1)..(25): SEQ ID NO: 2112; WAN024CYX; Start 488; Stop 512
gtgtctatatcagcctcttcctagt

SEQ ID NO: 315433 - DNA, 25 bp, Artificial
  probe
  misc_feature (1)..(25): SEQ ID NO: 2112; WAN024CYX; Start 493; Stop 517
tatatcagcctcttcctagttctcg

SEQ ID NO: 315434 - DNA, 25 bp, Artificial
  probe
  misc_feature (1)..(25): SEQ ID NO: 2112; WAN024CYX; Start 492; Stop 516
ctatatcagcctcttcctagttctc

SEQ ID NO: 315435 - DNA, 25 bp, Artificial
  probe
  misc_feature (1)..(25): SEQ ID NO: 2112; WAN024CYX; Start 250; Stop 274
gatggcacattaacttatactggaa

SEQ ID NO: 315436 - DNA, 25 bp, Artificial
  probe
  misc_feature (1)..(25): SEQ ID NO: 2112; WAN024CYX; Start 484; Stop 508
aatcgtgtctatatcagcctcttcc

SEQ ID NO: 315437 - DNA, 25 bp, Artificial
  probe
  misc_feature (1)..(25): SEQ ID NO: 2112; WAN024CYX; Start 486; Stop 510
tcgtgtctatatcagcctcttccta

SEQ ID NO: 315438 - DNA, 25 bp, Artificial
  probe
  misc_feature (1)..(25): SEQ ID NO: 2112; WAN024CYX; Start 222; Stop 246
ggatctctctgaacatgctacaatt

SEQ ID NO: 315439 - DNA, 25 bp, Artificial
  probe
  misc_feature (1)..(25): SEQ ID NO: 2112; WAN024CYX; Start 487; Stop 511
cgtgtctatatcagcctcttcctag

SEQ ID NO: 315440 - DNA, 25 bp, Artificial
  probe
  misc_feature (1)..(25): SEQ ID NO: 2112; WAN024CYX; Start 253; Stop 277
ggcacattaacttatactggaacag

SEQ ID NO: 315441 - DNA, 25 bp, Artificial
  probe
  misc_feature (1)..(25): SEQ ID NO: 2112; WAN024CYX; Start 221; Stop 245
aggatctctctgaacatgctacaat

SEQ ID NO: 315442 - DNA, 25 bp, Artificial
  probe
  misc_feature (1)..(25): SEQ ID NO: 2112; WAN024CYX; Start 485; Stop 509
atcgtgtctatatcagcctcttcct

SEQ ID NO: 315443 - DNA, 25 bp, Artificial
  probe
  misc_feature (1)..(25): SEQ ID NO: 2112; WAN024CYX; Start 106; Stop 130
ttccttatcagcttgtctatggtac

SEQ ID NO: 315444 - DNA, 25 bp, Artificial
  probe
  misc_feature (1)..(25): SEQ ID NO: 2112; WAN024CYX; Start 103; Stop 127
atcttccttatcagcttgtctatgg

SEQ ID NO: 315445 - DNA, 25 bp, Artificial
  probe
  misc_feature (1)..(25): SEQ ID NO: 2112; WAN024CYX; Start 99; Stop 123
cagtatcttccttatcagcttgtct

SEQ ID NO: 315446 - DNA, 25 bp, Artificial
  probe
  misc_feature (1)..(25): SEQ ID NO: 2112; WAN024CYX; Start 105; Stop 129
cttccttatcagcttgtctatggta

SEQ ID NO: 315447 - DNA, 25 bp, Artificial
  probe
  misc_feature (1)..(25): SEQ ID NO: 2112; WAN024CYX; Start 96; Stop 120
taccagtatcttccttatcagcttg

SEQ ID NO: 315448 - DNA, 25 bp, Artificial
  probe
  misc_feature (1)..(25): SEQ ID NO: 2112; WAN024CYX; Start 98; Stop 122
ccagtatcttccttatcagcttgtc

SEQ ID NO: 315449 - DNA, 25 bp, Artificial
  probe
  misc_feature (1)..(25): SEQ ID NO: 2112; WAN024CYX; Start 104; Stop 128
tcttccttatcagcttgtctatggt

SEQ ID NO: 315450 - DNA, 25 bp, Artificial
  probe
  misc_feature (1)..(25): SEQ ID NO: 2112; WAN024CYX; Start 95; Stop 119
ttaccagtatcttccttatcagctt

SEQ ID NO: 315451 - DNA, 25 bp, Artificial
  probe
  misc_feature (1)..(25): SEQ ID NO: 2112; WAN024CYX; Start 247; Stop 271
gtcgatggcacattaacttatactg

SEQ ID NO: 315452 - DNA, 25 bp, Artificial
  probe
  misc_feature (1)..(25): SEQ ID NO: 2112; WAN024CYX; Start 97; Stop 121
accagtatcttccttatcagcttgt

SEQ ID NO: 315453 - DNA, 25 bp, Artificial
  probe
  misc_feature (1)..(25): SEQ ID NO: 2112; WAN024CYX; Start 248; Stop 272
tcgatggcacattaacttatactgg

SEQ ID NO: 315454 - DNA, 25 bp, Artificial
  probe
  misc_feature (1)..(25): SEQ ID NO: 2112; WAN024CYX; Start 483; Stop 507
aaatcgtgtctatatcagcctcttc

SEQ ID NO: 315455 - DNA, 25 bp, Artificial
  probe
  misc_feature (1)..(25): SEQ ID NO: 2112; WAN024CYX; Start 100; Stop 124
agtatcttccttatcagcttgtcta

SEQ ID NO: 315456 - DNA, 25 bp, Artificial
  probe
  misc_feature (1)..(25): SEQ ID NO: 2112; WAN024CYX; Start 74; Stop 98
tcaactggtttcaacttctctttac

SEQ ID NO: 315457 - DNA, 25 bp, Artificial
  probe
  misc_feature (1)..(25): SEQ ID NO: 2112; WAN024CYX; Start 73; Stop 97
ctcaactggtttcaacttctcttta

SEQ ID NO: 315458 - DNA, 25 bp, Artificial
  probe
  misc_feature (1)..(25): SEQ ID NO: 2112; WAN024CYX; Start 638; Stop 662
ttatcttgaactgtttaggattgcc

SEQ ID NO: 315459 - DNA, 25 bp, Artificial
  probe
  misc_feature (1)..(25): SEQ ID NO: 2113; WAN024DMW; Start 74; Stop 98
cagatccaagtgataaccagatgat

SEQ ID NO: 315460 - DNA, 25 bp, Artificial
  probe
  misc_feature (1)..(25): SEQ ID NO: 2113; WAN024DMW; Start 72; Stop 96
tacagatccaagtgataaccagatg

SEQ ID NO: 315461 - DNA, 25 bp, Artificial
  probe
  misc_feature (1)..(25): SEQ ID NO: 2113; WAN024DMW; Start 71; Stop 95
atacagatccaagtgataaccagat

SEQ ID NO: 315462 - DNA, 25 bp, Artificial
  probe
  misc_feature (1)..(25): SEQ ID NO: 2113; WAN024DMW; Start 75; Stop 99
agatccaagtgataaccagatgata

SEQ ID NO: 315463 - DNA, 25 bp, Artificial
  probe
  misc_feature (1)..(25): SEQ ID NO: 2113; WAN024DMW; Start 73; Stop 97
acagatccaagtgataaccagatga

SEQ ID NO: 315464 - DNA, 25 bp, Artificial
  probe
  misc_feature (1)..(25): SEQ ID NO: 2113; WAN024DMW; Start 70; Stop 94
tatacagatccaagtgataaccaga

SEQ ID NO: 315465 - DNA, 25 bp, Artificial
  probe
  misc_feature (1)..(25): SEQ ID NO: 2113; WAN024DMW; Start 78; Stop 102
tccaagtgataaccagatgataatt

SEQ ID NO: 315466 - DNA, 25 bp, Artificial
  probe
  misc_feature (1)..(25): SEQ ID NO: 2113; WAN024DMW; Start 76; Stop 100
gatccaagtgataaccagatgataa

SEQ ID NO: 315467 - DNA, 25 bp, Artificial
  probe
  misc_feature (1)..(25): SEQ ID NO: 2113; WAN024DMW; Start 77; Stop 101
atccaagtgataaccagatgataat

SEQ ID NO: 315468 - DNA, 25 bp, Artificial
  probe
  misc_feature (1)..(25): SEQ ID NO: 2113; WAN024DMW; Start 79; Stop 103
ccaagtgataaccagatgataattg

SEQ ID NO: 315469 - DNA, 25 bp, Artificial
  probe
  misc_feature (1)..(25): SEQ ID NO: 2113; WAN024DMW; Start 69; Stop 93
ttatacagatccaagtgataaccag

SEQ ID NO: 315470 - DNA, 25 bp, Artificial
  probe
  misc_feature (1)..(25): SEQ ID NO: 2113; WAN024DMW; Start 46; Stop 70
tcctttcacacaaacatttctcttt

SEQ ID NO: 315471 - DNA, 25 bp, Artificial
  probe
  misc_feature (1)..(25): SEQ ID NO: 2113; WAN024DMW; Start 45; Stop 69
atcctttcacacaaacatttctctt

SEQ ID NO: 315472 - DNA, 25 bp, Artificial
  probe
  misc_feature (1)..(25): SEQ ID NO: 2113; WAN024DMW; Start 84; Stop 108
tgataaccagatgataattggacac

SEQ ID NO: 315473 - DNA, 25 bp, Artificial
  probe
  misc_feature (1)..(25): SEQ ID NO: 2113; WAN024DMW; Start 83; Stop 107
gtgataaccagatgataattggaca

SEQ ID NO: 315474 - DNA, 25 bp, Artificial
  probe
  misc_feature (1)..(25): SEQ ID NO: 2113; WAN024DMW; Start 85; Stop 109
gataaccagatgataattggacact

SEQ ID NO: 315475 - DNA, 25 bp, Artificial
  probe
  misc_feature (1)..(25): SEQ ID NO: 2113; WAN024DMW; Start 82; Stop 106
agtgataaccagatgataattggac

SEQ ID NO: 315476 - DNA, 25 bp, Artificial
  probe
  misc_feature (1)..(25): SEQ ID NO: 2113; WAN024DMW; Start 44; Stop 68
tatcctttcacacaaacatttctct

SEQ ID NO: 315477 - DNA, 25 bp, Artificial
  probe
  misc_feature (1)..(25): SEQ ID NO: 2113; WAN024DMW; Start 86; Stop 110
ataaccagatgataattggacactt

SEQ ID NO: 315478 - DNA, 25 bp, Artificial
  probe
  misc_feature (1)..(25): SEQ ID NO: 2113; WAN024DMW; Start 47; Stop 71
cctttcacacaaacatttctcttta

SEQ ID NO: 315479 - DNA, 25 bp, Artificial
  probe
  misc_feature (1)..(25): SEQ ID NO: 2113; WAN024DMW; Start 80; Stop 104
caagtgataaccagatgataattgg

SEQ ID NO: 315480 - DNA, 25 bp, Artificial
  probe
  misc_feature (1)..(25): SEQ ID NO: 2113; WAN024DMW; Start 43; Stop 67
ttatcctttcacacaaacatttctc

SEQ ID NO: 315481 - DNA, 25 bp, Artificial
  probe
  misc_feature (1)..(25): SEQ ID NO: 2113; WAN024DMW; Start 81; Stop 105
aagtgataaccagatgataattgga

SEQ ID NO: 315482 - DNA, 25 bp, Artificial
  probe
  misc_feature (1)..(25): SEQ ID NO: 2113; WAN024DMW; Start 42; Stop 66
tttatcctttcacacaaacatttct

SEQ ID NO: 315483 - DNA, 25 bp, Artificial
  probe
  misc_feature (1)..(25): SEQ ID NO: 2113; WAN024DMW; Start 51; Stop 75
tcacacaaacatttctctttataca

SEQ ID NO: 315484 - DNA, 25 bp, Artificial
  probe
  misc_feature (1)..(25): SEQ ID NO: 2113; WAN024DMW; Start 87; Stop 111
taaccagatgataattggacacttt

SEQ ID NO: 315485 - DNA, 25 bp, Artificial
  probe
  misc_feature (1)..(25): SEQ ID NO: 2113; WAN024DMW; Start 68; Stop 92
tttatacagatccaagtgataacca

SEQ ID NO: 315486 - DNA, 25 bp, Artificial
  probe
  misc_feature (1)..(25): SEQ ID NO: 2113; WAN024DMW; Start 62; Stop 86
tttctctttatacagatccaagtga

SEQ ID NO: 315487 - DNA, 25 bp, Artificial
  probe
  misc_feature (1)..(25): SEQ ID NO: 2113; WAN024DMW; Start 52; Stop 76
cacacaaacatttctctttatacag

SEQ ID NO: 315488 - DNA, 25 bp, Artificial
  probe
  misc_feature (1)..(25): SEQ ID NO: 2113; WAN024DMW; Start 63; Stop 87
ttctctttatacagatccaagtgat

SEQ ID NO: 315489 - DNA, 25 bp, Artificial
  probe
  misc_feature (1)..(25): SEQ ID NO: 2113; WAN024DMW; Start 53; Stop 77
acacaaacatttctctttatacaga

SEQ ID NO: 315490 - DNA, 25 bp, Artificial
  probe
  misc_feature (1)..(25): SEQ ID NO: 2113; WAN024DMW; Start 48; Stop 72
ctttcacacaaacatttctctttat

SEQ ID NO: 315491 - DNA, 25 bp, Artificial
  probe
  misc_feature (1)..(25): SEQ ID NO: 2113; WAN024DMW; Start 67; Stop 91
ctttatacagatccaagtgataacc

SEQ ID NO: 315492 - DNA, 25 bp, Artificial
  probe
  misc_feature (1)..(25): SEQ ID NO: 2114; WAN0249ZT; Start 3; Stop 27
gcttctccttctattttattcatca

SEQ ID NO: 315493 - DNA, 25 bp, Artificial
  probe
  misc_feature (1)..(25): SEQ ID NO: 2114; WAN0249ZT; Start 2; Stop 26
tgcttctccttctattttattcatc

SEQ ID NO: 315494 - DNA, 25 bp, Artificial
  probe
  misc_feature (1)..(25): SEQ ID NO: 2114; WAN0249ZT; Start 1; Stop 25
atgcttctccttctattttattcat

SEQ ID NO: 315495 - DNA, 25 bp, Artificial
  probe
  misc_feature (1)..(25): SEQ ID NO: 2114; WAN0249ZT; Start 81; Stop 105
tgtcaaatatctaacagacctattt

SEQ ID NO: 315496 - DNA, 25 bp, Artificial
  probe
  misc_feature (1)..(25): SEQ ID NO: 2114; WAN0249ZT; Start 80; Stop 104
ctgtcaaatatctaacagacctatt

SEQ ID NO: 315497 - DNA, 25 bp, Artificial
  probe
  misc_feature (1)..(25): SEQ ID NO: 2115; WAN024GBV; Start 23; Stop 47
aatgtccgaagtgctgcttgataag

SEQ ID NO: 315498 - DNA, 25 bp, Artificial
  probe
  misc_feature (1)..(25): SEQ ID NO: 2115; WAN024GBV; Start 22; Stop 46
caatgtccgaagtgctgcttgataa

SEQ ID NO: 315499 - DNA, 25 bp, Artificial
  probe
  misc_feature (1)..(25): SEQ ID NO: 2115; WAN024GBV; Start 30; Stop 54
gaagtgctgcttgataagtttgctc

SEQ ID NO: 315500 - DNA, 25 bp, Artificial
  probe
  misc_feature (1)..(25): SEQ ID NO: 2115; WAN024GBV; Start 14; Stop 38
tttctatccaatgtccgaagtgctg

SEQ ID NO: 315501 - DNA, 25 bp, Artificial
  probe
  misc_feature (1)..(25): SEQ ID NO: 2115; WAN024GBV; Start 11; Stop 35
tattttctatccaatgtccgaagtg

SEQ ID NO: 315502 - DNA, 25 bp, Artificial
  probe
  misc_feature (1)..(25): SEQ ID NO: 2115; WAN024GBV; Start 24; Stop 48
atgtccgaagtgctgcttgataagt

SEQ ID NO: 315503 - DNA, 25 bp, Artificial
  probe
  misc_feature (1)..(25): SEQ ID NO: 2115; WAN024GBV; Start 7; Stop 31
ctcttattttctatccaatgtccga

SEQ ID NO: 315504 - DNA, 25 bp, Artificial
  probe
  misc_feature (1)..(25): SEQ ID NO: 2115; WAN024GBV; Start 6; Stop 30
tctcttattttctatccaatgtccg

SEQ ID NO: 315505 - DNA, 25 bp, Artificial
  probe
  misc_feature (1)..(25): SEQ ID NO: 2115; WAN024GBV; Start 12; Stop 36
attttctatccaatgtccgaagtgc

SEQ ID NO: 315506 - DNA, 25 bp, Artificial
  probe
  misc_feature (1)..(25): SEQ ID NO: 2115; WAN024GBV; Start 10; Stop 34
ttattttctatccaatgtccgaagt

SEQ ID NO: 315507 - DNA, 25 bp, Artificial
  probe
  misc_feature (1)..(25): SEQ ID NO: 2115; WAN024GBV; Start 25; Stop 49
tgtccgaagtgctgcttgataagtt

SEQ ID NO: 315508 - DNA, 25 bp, Artificial
  probe
  misc_feature (1)..(25): SEQ ID NO: 2115; WAN024GBV; Start 34; Stop 58
tgctgcttgataagtttgctccatc

SEQ ID NO: 315509 - DNA, 25 bp, Artificial
  probe
  misc_feature (1)..(25): SEQ ID NO: 2115; WAN024GBV; Start 27; Stop 51
tccgaagtgctgcttgataagtttg

SEQ ID NO: 315510 - DNA, 25 bp, Artificial
  probe
  misc_feature (1)..(25): SEQ ID NO: 2115; WAN024GBV; Start 26; Stop 50
gtccgaagtgctgcttgataagttt

SEQ ID NO: 315511 - DNA, 25 bp, Artificial
  probe
  misc_feature (1)..(25): SEQ ID NO: 2115; WAN024GBV; Start 8; Stop 32
tcttattttctatccaatgtccgaa

SEQ ID NO: 315512 - DNA, 25 bp, Artificial
  probe
  misc_feature (1)..(25): SEQ ID NO: 2115; WAN024GBV; Start 36; Stop 60
ctgcttgataagtttgctccatcag

SEQ ID NO: 315513 - DNA, 25 bp, Artificial
  probe
  misc_feature (1)..(25): SEQ ID NO: 2115; WAN024GBV; Start 9; Stop 33
cttattttctatccaatgtccgaag

SEQ ID NO: 315514 - DNA, 25 bp, Artificial
  probe
  misc_feature (1)..(25): SEQ ID NO: 2115; WAN024GBV; Start 33; Stop 57
gtgctgcttgataagtttgctccat

SEQ ID NO: 315515 - DNA, 25 bp, Artificial
  probe
  misc_feature (1)..(25): SEQ ID NO: 2115; WAN024GBV; Start 31; Stop 55
aagtgctgcttgataagtttgctcc

SEQ ID NO: 315516 - DNA, 25 bp, Artificial
  probe
  misc_feature (1)..(25): SEQ ID NO: 2115; WAN024GBV; Start 13; Stop 37
ttttctatccaatgtccgaagtgct

SEQ ID NO: 315517 - DNA, 25 bp, Artificial
  probe
  misc_feature (1)..(25): SEQ ID NO: 2115; WAN024GBV; Start 3; Stop 27
gcttctcttattttctatccaatgt

SEQ ID NO: 315518 - DNA, 25 bp, Artificial
  probe
  misc_feature (1)..(25): SEQ ID NO: 2115; WAN024GBV; Start 2; Stop 26
tgcttctcttattttctatccaatg

SEQ ID NO: 315519 - DNA, 25 bp, Artificial
  probe
  misc_feature (1)..(25): SEQ ID NO: 2115; WAN024GBV; Start 29; Stop 53
cgaagtgctgcttgataagtttgct

SEQ ID NO: 315520 - DNA, 25 bp, Artificial
  probe
  misc_feature (1)..(25): SEQ ID NO: 2115; WAN024GBV; Start 208; Stop 232
gacaaagtcagcagtcacaaacttg

SEQ ID NO: 315521 - DNA, 25 bp, Artificial
  probe
  misc_feature (1)..(25): SEQ ID NO: 2115; WAN024GBV; Start 5; Stop 29
ttctcttattttctatccaatgtcc

SEQ ID NO: 315522 - DNA, 25 bp, Artificial
  probe
  misc_feature (1)..(25): SEQ ID NO: 2115; WAN024GBV; Start 1; Stop 25
atgcttctcttattttctatccaat

SEQ ID NO: 315523 - DNA, 25 bp, Artificial
  probe
  misc_feature (1)..(25): SEQ ID NO: 2115; WAN024GBV; Start 32; Stop 56
agtgctgcttgataagtttgctcca

SEQ ID NO: 315524 - DNA, 25 bp, Artificial
  probe
  misc_feature (1)..(25): SEQ ID NO: 2115; WAN024GBV; Start 37; Stop 61
tgcttgataagtttgctccatcagc

SEQ ID NO: 315525 - DNA, 25 bp, Artificial
  probe
  misc_feature (1)..(25): SEQ ID NO: 2115; WAN024GBV; Start 35; Stop 59
gctgcttgataagtttgctccatca

SEQ ID NO: 315526 - DNA, 25 bp, Artificial
  probe
  misc_feature (1)..(25): SEQ ID NO: 2115; WAN024GBV; Start 205; Stop 229
tttgacaaagtcagcagtcacaaac

SEQ ID NO: 315527 - DNA, 25 bp, Artificial
  probe
  misc_feature (1)..(25): SEQ ID NO: 2115; WAN024GBV; Start 204; Stop 228
gtttgacaaagtcagcagtcacaaa

SEQ ID NO: 315528 - DNA, 25 bp, Artificial
  probe
  misc_feature (1)..(25): SEQ ID NO: 2115; WAN024GBV; Start 209; Stop 233
acaaagtcagcagtcacaaacttgg

SEQ ID NO: 315529 - DNA, 25 bp, Artificial
  probe
  misc_feature (1)..(25): SEQ ID NO: 2115; WAN024GBV; Start 4; Stop 28
cttctcttattttctatccaatgtc

SEQ ID NO: 315530 - DNA, 25 bp, Artificial
  probe
  misc_feature (1)..(25): SEQ ID NO: 2116; WAN024D26; Start 607; Stop 631
cagttatttcagatggaggcttatc

SEQ ID NO: 315531 - DNA, 25 bp, Artificial
  probe
  misc_feature (1)..(25): SEQ ID NO: 2116; WAN024D26; Start 606; Stop 630
gcagttatttcagatggaggcttat

SEQ ID NO: 315532 - DNA, 25 bp, Artificial
  probe
  misc_feature (1)..(25): SEQ ID NO: 2116; WAN024D26; Start 201; Stop 225
ttatgtagttgggaatactgccttt

SEQ ID NO: 315533 - DNA, 25 bp, Artificial
  probe
  misc_feature (1)..(25): SEQ ID NO: 2116; WAN024D26; Start 195; Stop 219
gctgacttatgtagttgggaatact

SEQ ID NO: 315534 - DNA, 25 bp, Artificial
  probe
  misc_feature (1)..(25): SEQ ID NO: 2116; WAN024D26; Start 200; Stop 224
cttatgtagttgggaatactgcctt

SEQ ID NO: 315535 - DNA, 25 bp, Artificial
  probe
  misc_feature (1)..(25): SEQ ID NO: 2116; WAN024D26; Start 197; Stop 221
tgacttatgtagttgggaatactgc

SEQ ID NO: 315536 - DNA, 25 bp, Artificial
  probe
  misc_feature (1)..(25): SEQ ID NO: 2116; WAN024D26; Start 194; Stop 218
tgctgacttatgtagttgggaatac

SEQ ID NO: 315537 - DNA, 25 bp, Artificial
  probe
  misc_feature (1)..(25): SEQ ID NO: 2116; WAN024D26; Start 202; Stop 226
tatgtagttgggaatactgcctttg

SEQ ID NO: 315538 - DNA, 25 bp, Artificial
  probe
  misc_feature (1)..(25): SEQ ID NO: 2116; WAN024D26; Start 667; Stop 691
atcagcaaggattccatgaatgaag

SEQ ID NO: 315539 - DNA, 25 bp, Artificial
  probe
  misc_feature (1)..(25): SEQ ID NO: 2116; WAN024D26; Start 666; Stop 690
gatcagcaaggattccatgaatgaa

SEQ ID NO: 315540 - DNA, 25 bp, Artificial
  probe
  misc_feature (1)..(25): SEQ ID NO: 2116; WAN024D26; Start 198; Stop 222
gacttatgtagttgggaatactgcc

SEQ ID NO: 315541 - DNA, 25 bp, Artificial
  probe
  misc_feature (1)..(25): SEQ ID NO: 2116; WAN024D26; Start 199; Stop 223
acttatgtagttgggaatactgcct

SEQ ID NO: 315542 - DNA, 25 bp, Artificial
  probe
  misc_feature (1)..(25): SEQ ID NO: 2116; WAN024D26; Start 657; Stop 681
aattcaccagatcagcaaggattcc

SEQ ID NO: 315543 - DNA, 25 bp, Artificial
  probe
  misc_feature (1)..(25): SEQ ID NO: 2116; WAN024D26; Start 196; Stop 220
ctgacttatgtagttgggaatactg

SEQ ID NO: 315544 - DNA, 25 bp, Artificial
  probe
  misc_feature (1)..(25): SEQ ID NO: 2116; WAN024D26; Start 323; Stop 347
ttcttcttgctcaagtccttgttgt

SEQ ID NO: 315545 - DNA, 25 bp, Artificial
  probe
  misc_feature (1)..(25): SEQ ID NO: 2116; WAN024D26; Start 665; Stop 689
agatcagcaaggattccatgaatga

SEQ ID NO: 315546 - DNA, 25 bp, Artificial
  probe
  misc_feature (1)..(25): SEQ ID NO: 2116; WAN024D26; Start 664; Stop 688
cagatcagcaaggattccatgaatg

SEQ ID NO: 315547 - DNA, 25 bp, Artificial
  probe
  misc_feature (1)..(25): SEQ ID NO: 2116; WAN024D26; Start 656; Stop 680
aaattcaccagatcagcaaggattc

SEQ ID NO: 315548 - DNA, 25 bp, Artificial
  probe
  misc_feature (1)..(25): SEQ ID NO: 2116; WAN024D26; Start 655; Stop 679
gaaattcaccagatcagcaaggatt

SEQ ID NO: 315549 - DNA, 25 bp, Artificial
  probe
  misc_feature (1)..(25): SEQ ID NO: 2116; WAN024D26; Start 97; Stop 121
gcctggcatttattgattgatattc

SEQ ID NO: 315550 - DNA, 25 bp, Artificial
  probe
  misc_feature (1)..(25): SEQ ID NO: 2116; WAN024D26; Start 652; Stop 676
aaagaaattcaccagatcagcaagg

SEQ ID NO: 315551 - DNA, 25 bp, Artificial
  probe
  misc_feature (1)..(25): SEQ ID NO: 2116; WAN024D26; Start 608; Stop 632
agttatttcagatggaggcttatcc

SEQ ID NO: 315552 - DNA, 25 bp, Artificial
  probe
  misc_feature (1)..(25): SEQ ID NO: 2116; WAN024D26; Start 98; Stop 122
cctggcatttattgattgatattct

SEQ ID NO: 315553 - DNA, 25 bp, Artificial
  probe
  misc_feature (1)..(25): SEQ ID NO: 2116; WAN024D26; Start 203; Stop 227
atgtagttgggaatactgcctttgt

SEQ ID NO: 315554 - DNA, 25 bp, Artificial
  probe
  misc_feature (1)..(25): SEQ ID NO: 2116; WAN024D26; Start 668; Stop 692
tcagcaaggattccatgaatgaagt

SEQ ID NO: 315555 - DNA, 25 bp, Artificial
  probe
  misc_feature (1)..(25): SEQ ID NO: 2116; WAN024D26; Start 654; Stop 678
agaaattcaccagatcagcaaggat

SEQ ID NO: 315556 - DNA, 25 bp, Artificial
  probe
  misc_feature (1)..(25): SEQ ID NO: 2116; WAN024D26; Start 324; Stop 348
tcttcttgctcaagtccttgttgtg

SEQ ID NO: 315557 - DNA, 25 bp, Artificial
  probe
  misc_feature (1)..(25): SEQ ID NO: 2116; WAN024D26; Start 653; Stop 677
aagaaattcaccagatcagcaagga

SEQ ID NO: 315558 - DNA, 25 bp, Artificial
  probe
  misc_feature (1)..(25): SEQ ID NO: 2116; WAN024D26; Start 322; Stop 346
tttcttcttgctcaagtccttgttg

SEQ ID NO: 315559 - DNA, 25 bp, Artificial
  probe
  misc_feature (1)..(25): SEQ ID NO: 2116; WAN024D26; Start 496; Stop 520
cagataaatctattgcttgctgaaa

SEQ ID NO: 315560 - DNA, 25 bp, Artificial
  probe
  misc_feature (1)..(25): SEQ ID NO: 2116; WAN024D26; Start 110; Stop 134
tgattgatattctatttgtagtggc

SEQ ID NO: 315561 - DNA, 25 bp, Artificial
  probe
  misc_feature (1)..(25): SEQ ID NO: 2116; WAN024D26; Start 663; Stop 687
ccagatcagcaaggattccatgaat

SEQ ID NO: 315562 - DNA, 25 bp, Artificial
  probe
  misc_feature (1)..(25): SEQ ID NO: 2116; WAN024D26; Start 659; Stop 683
ttcaccagatcagcaaggattccat

SEQ ID NO: 315563 - DNA, 25 bp, Artificial
  probe
  misc_feature (1)..(25): SEQ ID NO: 2117; WAN024EY3; Start 294; Stop 318
tgacagacaattccttatcttggtt

SEQ ID NO: 315564 - DNA, 25 bp, Artificial
  probe
  misc_feature (1)..(25): SEQ ID NO: 2117; WAN024EY3; Start 293; Stop 317
ttgacagacaattccttatcttggt

SEQ ID NO: 315565 - DNA, 25 bp, Artificial
  probe
  misc_feature (1)..(25): SEQ ID NO: 2117; WAN024EY3; Start 292; Stop 316
gttgacagacaattccttatcttgg

SEQ ID NO: 315566 - DNA, 25 bp, Artificial
  probe
  misc_feature (1)..(25): SEQ ID NO: 2117; WAN024EY3; Start 348; Stop 372
ccttgctagtcttgaccatattgag

SEQ ID NO: 315567 - DNA, 25 bp, Artificial
  probe
  misc_feature (1)..(25): SEQ ID NO: 2117; WAN024EY3; Start 174; Stop 198
agtcttctgtcttgtaactggtctt

SEQ ID NO: 315568 - DNA, 25 bp, Artificial
  probe
  misc_feature (1)..(25): SEQ ID NO: 2117; WAN024EY3; Start 291; Stop 315
tgttgacagacaattccttatcttg

SEQ ID NO: 315569 - DNA, 25 bp, Artificial
  probe
  misc_feature (1)..(25): SEQ ID NO: 2117; WAN024EY3; Start 353; Stop 377
ctagtcttgaccatattgagccagt

SEQ ID NO: 315570 - DNA, 25 bp, Artificial
  probe
  misc_feature (1)..(25): SEQ ID NO: 2117; WAN024EY3; Start 173; Stop 197
gagtcttctgtcttgtaactggtct

SEQ ID NO: 315571 - DNA, 25 bp, Artificial
  probe
  misc_feature (1)..(25): SEQ ID NO: 2117; WAN024EY3; Start 354; Stop 378
tagtcttgaccatattgagccagtc

SEQ ID NO: 315572 - DNA, 25 bp, Artificial
  probe
  misc_feature (1)..(25): SEQ ID NO: 2117; WAN024EY3; Start 175; Stop 199
gtcttctgtcttgtaactggtcttt

SEQ ID NO: 315573 - DNA, 25 bp, Artificial
  probe
  misc_feature (1)..(25): SEQ ID NO: 2117; WAN024EY3; Start 347; Stop 371
gccttgctagtcttgaccatattga

SEQ ID NO: 315574 - DNA, 25 bp, Artificial
  probe
  misc_feature (1)..(25): SEQ ID NO: 2117; WAN024EY3; Start 172; Stop 196
ggagtcttctgtcttgtaactggtc

SEQ ID NO: 315575 - DNA, 25 bp, Artificial
  probe
  misc_feature (1)..(25): SEQ ID NO: 2117; WAN024EY3; Start 295; Stop 319
gacagacaattccttatcttggttt

SEQ ID NO: 315576 - DNA, 25 bp, Artificial
  probe
  misc_feature (1)..(25): SEQ ID NO: 2117; WAN024EY3; Start 349; Stop 373
cttgctagtcttgaccatattgagc

SEQ ID NO: 315577 - DNA, 25 bp, Artificial
  probe
  misc_feature (1)..(25): SEQ ID NO: 2117; WAN024EY3; Start 346; Stop 370
cgccttgctagtcttgaccatattg

SEQ ID NO: 315578 - DNA, 25 bp, Artificial
  probe
  misc_feature (1)..(25): SEQ ID NO: 2117; WAN024EY3; Start 288; Stop 312
ccttgttgacagacaattccttatc

SEQ ID NO: 315579 - DNA, 25 bp, Artificial
  probe
  misc_feature (1)..(25): SEQ ID NO: 2117; WAN024EY3; Start 169; Stop 193
gagggagtcttctgtcttgtaactg

SEQ ID NO: 315580 - DNA, 25 bp, Artificial
  probe
  misc_feature (1)..(25): SEQ ID NO: 2117; WAN024EY3; Start 168; Stop 192
agagggagtcttctgtcttgtaact

SEQ ID NO: 315581 - DNA, 25 bp, Artificial
  probe
  misc_feature (1)..(25): SEQ ID NO: 2117; WAN024EY3; Start 289; Stop 313
cttgttgacagacaattccttatct

SEQ ID NO: 315582 - DNA, 25 bp, Artificial
  probe
  misc_feature (1)..(25): SEQ ID NO: 2117; WAN024EY3; Start 350; Stop 374
ttgctagtcttgaccatattgagcc

SEQ ID NO: 315583 - DNA, 25 bp, Artificial
  probe
  misc_feature (1)..(25): SEQ ID NO: 2117; WAN024EY3; Start 290; Stop 314
ttgttgacagacaattccttatctt

SEQ ID NO: 315584 - DNA, 25 bp, Artificial
  probe
  misc_feature (1)..(25): SEQ ID NO: 2117; WAN024EY3; Start 112; Stop 136
agtcagacggttaaagacggtaatc

SEQ ID NO: 315585 - DNA, 25 bp, Artificial
  probe
  misc_feature (1)..(25): SEQ ID NO: 2117; WAN024EY3; Start 320; Stop 344
ttaaagaactggcgaatcttattgc

SEQ ID NO: 315586 - DNA, 25 bp, Artificial
  probe
  misc_feature (1)..(25): SEQ ID NO: 2117; WAN024EY3; Start 236; Stop 260
ttatttgccacatagccattttctt

SEQ ID NO: 315587 - DNA, 25 bp, Artificial
  probe
  misc_feature (1)..(25): SEQ ID NO: 2117; WAN024EY3; Start 235; Stop 259
tttatttgccacatagccattttct

SEQ ID NO: 315588 - DNA, 25 bp, Artificial
  probe
  misc_feature (1)..(25): SEQ ID NO: 2117; WAN024EY3; Start 177; Stop 201
cttctgtcttgtaactggtcttttg

SEQ ID NO: 315589 - DNA, 25 bp, Artificial
  probe
  misc_feature (1)..(25): SEQ ID NO: 2117; WAN024EY3; Start 176; Stop 200
tcttctgtcttgtaactggtctttt

SEQ ID NO: 315590 - DNA, 25 bp, Artificial
  probe
  misc_feature (1)..(25): SEQ ID NO: 2117; WAN024EY3; Start 166; Stop 190
aaagagggagtcttctgtcttgtaa

SEQ ID NO: 315591 - DNA, 25 bp, Artificial
  probe
  misc_feature (1)..(25): SEQ ID NO: 2117; WAN024EY3; Start 111; Stop 135
cagtcagacggttaaagacggtaat

SEQ ID NO: 315592 - DNA, 25 bp, Artificial
  probe
  misc_feature (1)..(25): SEQ ID NO: 2117; WAN024EY3; Start 237; Stop 261
tatttgccacatagccattttcttg

SEQ ID NO: 315593 - DNA, 25 bp, Artificial
  probe
  misc_feature (1)..(25): SEQ ID NO: 2117; WAN024EY3; Start 352; Stop 376
gctagtcttgaccatattgagccag

SEQ ID NO: 315594 - DNA, 25 bp, Artificial
  probe
  misc_feature (1)..(25): SEQ ID NO: 2117; WAN024EY3; Start 234; Stop 258
atttatttgccacatagccattttc

SEQ ID NO: 315595 - DNA, 25 bp, Artificial
  probe
  misc_feature (1)..(25): SEQ ID NO: 2117; WAN024EY3; Start 232; Stop 256
aaatttatttgccacatagccattt

SEQ ID NO: 315596 - DNA, 25 bp, Artificial
  probe
  misc_feature (1)..(25): SEQ ID NO: 2118; WAN024D6Q; Start 953; Stop 977
aagtgaacttagtccttgagtaact

SEQ ID NO: 315597 - DNA, 25 bp, Artificial
  probe
  misc_feature (1)..(25): SEQ ID NO: 2118; WAN024D6Q; Start 202; Stop 226
gtctatcgccaggaacttctctatg

SEQ ID NO: 315598 - DNA, 25 bp, Artificial
  probe
  misc_feature (1)..(25): SEQ ID NO: 2118; WAN024D6Q; Start 328; Stop 352
ctgacggatttgctggattactata

SEQ ID NO: 315599 - DNA, 25 bp, Artificial
  probe
  misc_feature (1)..(25): SEQ ID NO: 2118; WAN024D6Q; Start 332; Stop 356
cggatttgctggattactatacctt

SEQ ID NO: 315600 - DNA, 25 bp, Artificial
  probe
  misc_feature (1)..(25): SEQ ID NO: 2118; WAN024D6Q; Start 673; Stop 697
caaatcatctcaaacagtctcaagt

SEQ ID NO: 315601 - DNA, 25 bp, Artificial
  probe
  misc_feature (1)..(25): SEQ ID NO: 2118; WAN024D6Q; Start 336; Stop 360
tttgctggattactataccttgtgg

SEQ ID NO: 315602 - DNA, 25 bp, Artificial
  probe
  misc_feature (1)..(25): SEQ ID NO: 2118; WAN024D6Q; Start 329; Stop 353
tgacggatttgctggattactatac

SEQ ID NO: 315603 - DNA, 25 bp, Artificial
  probe
  misc_feature (1)..(25): SEQ ID NO: 2118; WAN024D6Q; Start 710; Stop 734
gtggtctggagatttatatggatga

SEQ ID NO: 315604 - DNA, 25 bp, Artificial
  probe
  misc_feature (1)..(25): SEQ ID NO: 2118; WAN024D6Q; Start 706; Stop 730
gaaggtggtctggagatttatatgg

SEQ ID NO: 315605 - DNA, 25 bp, Artificial
  probe
  misc_feature (1)..(25): SEQ ID NO: 2118; WAN024D6Q; Start 705; Stop 729
ggaaggtggtctggagatttatatg

SEQ ID NO: 315606 - DNA, 25 bp, Artificial
  probe
  misc_feature (1)..(25): SEQ ID NO: 2118; WAN024D6Q; Start 704; Stop 728
aggaaggtggtctggagatttatat

SEQ ID NO: 315607 - DNA, 25 bp, Artificial
  probe
  misc_feature (1)..(25): SEQ ID NO: 2118; WAN024D6Q; Start 709; Stop 733
ggtggtctggagatttatatggatg

SEQ ID NO: 315608 - DNA, 25 bp, Artificial
  probe
  misc_feature (1)..(25): SEQ ID NO: 2118; WAN024D6Q; Start 708; Stop 732
aggtggtctggagatttatatggat

SEQ ID NO: 315609 - DNA, 25 bp, Artificial
  probe
  misc_feature (1)..(25): SEQ ID NO: 2118; WAN024D6Q; Start 685; Stop 709
aacagtctcaagtacaccaaggaag

SEQ ID NO: 315610 - DNA, 25 bp, Artificial
  probe
  misc_feature (1)..(25): SEQ ID NO: 2118; WAN024D6Q; Start 672; Stop 696
gcaaatcatctcaaacagtctcaag

SEQ ID NO: 315611 - DNA, 25 bp, Artificial
  probe
  misc_feature (1)..(25): SEQ ID NO: 2118; WAN024D6Q; Start 459; Stop 483
aatcgactcctataccaacctagtt

SEQ ID NO: 315612 - DNA, 25 bp, Artificial
  probe
  misc_feature (1)..(25): SEQ ID NO: 2118; WAN024D6Q; Start 333; Stop 357
ggatttgctggattactataccttg

SEQ ID NO: 315613 - DNA, 25 bp, Artificial
  probe
  misc_feature (1)..(25): SEQ ID NO: 2118; WAN024D6Q; Start 703; Stop 727
aaggaaggtggtctggagatttata

SEQ ID NO: 315614 - DNA, 25 bp, Artificial
  probe
  misc_feature (1)..(25): SEQ ID NO: 2118; WAN024D6Q; Start 707; Stop 731
aaggtggtctggagatttatatgga

SEQ ID NO: 315615 - DNA, 25 bp, Artificial
  probe
  misc_feature (1)..(25): SEQ ID NO: 2118; WAN024D6Q; Start 671; Stop 695
agcaaatcatctcaaacagtctcaa

SEQ ID NO: 315616 - DNA, 25 bp, Artificial
  probe
  misc_feature (1)..(25): SEQ ID NO: 2118; WAN024D6Q; Start 954; Stop 978
agtgaacttagtccttgagtaacta

SEQ ID NO: 315617 - DNA, 25 bp, Artificial
  probe
  misc_feature (1)..(25): SEQ ID NO: 2118; WAN024D6Q; Start 335; Stop 359
atttgctggattactataccttgtg

SEQ ID NO: 315618 - DNA, 25 bp, Artificial
  probe
  misc_feature (1)..(25): SEQ ID NO: 2118; WAN024D6Q; Start 330; Stop 354
gacggatttgctggattactatacc

SEQ ID NO: 315619 - DNA, 25 bp, Artificial
  probe
  misc_feature (1)..(25): SEQ ID NO: 2118; WAN024D6Q; Start 617; Stop 641
atgaccttgataaagaaatcgtgac

SEQ ID NO: 315620 - DNA, 25 bp, Artificial
  probe
  misc_feature (1)..(25): SEQ ID NO: 2118; WAN024D6Q; Start 331; Stop 355
acggatttgctggattactatacct

SEQ ID NO: 315621 - DNA, 25 bp, Artificial
  probe
  misc_feature (1)..(25): SEQ ID NO: 2118; WAN024D6Q; Start 334; Stop 358
gatttgctggattactataccttgt

SEQ ID NO: 315622 - DNA, 25 bp, Artificial
  probe
  misc_feature (1)..(25): SEQ ID NO: 2118; WAN024D6Q; Start 748; Stop 772
atcaaagatacgggaatcgggataa

SEQ ID NO: 315623 - DNA, 25 bp, Artificial
  probe
  misc_feature (1)..(25): SEQ ID NO: 2118; WAN024D6Q; Start 676; Stop 700
atcatctcaaacagtctcaagtaca

SEQ ID NO: 315624 - DNA, 25 bp, Artificial
  probe
  misc_feature (1)..(25): SEQ ID NO: 2118; WAN024D6Q; Start 201; Stop 225
ggtctatcgccaggaacttctctat

SEQ ID NO: 315625 - DNA, 25 bp, Artificial
  probe
  misc_feature (1)..(25): SEQ ID NO: 2118; WAN024D6Q; Start 677; Stop 701
tcatctcaaacagtctcaagtacac

SEQ ID NO: 315626 - DNA, 25 bp, Artificial
  probe
  misc_feature (1)..(25): SEQ ID NO: 2118; WAN024D6Q; Start 749; Stop 773
tcaaagatacgggaatcgggataaa

SEQ ID NO: 315627 - DNA, 25 bp, Artificial
  probe
  misc_feature (1)..(25): SEQ ID NO: 2118; WAN024D6Q; Start 674; Stop 698
aaatcatctcaaacagtctcaagta

SEQ ID NO: 315628 - DNA, 25 bp, Artificial
  probe
  misc_feature (1)..(25): SEQ ID NO: 2118; WAN024D6Q; Start 327; Stop 351
actgacggatttgctggattactat

SEQ ID NO: 315629 - DNA, 25 bp, Artificial
  probe
  misc_feature (1)..(25): SEQ ID NO: 2119; WAN024G2A; Start 967; Stop 991
attgatacagataagatgacgcagg

SEQ ID NO: 315630 - DNA, 25 bp, Artificial
  probe
  misc_feature (1)..(25): SEQ ID NO: 2119; WAN024G2A; Start 1012; Stop 1036
aatgctattaagtattcgccagatg

SEQ ID NO: 315631 - DNA, 25 bp, Artificial
  probe
  misc_feature (1)..(25): SEQ ID NO: 2119; WAN024G2A; Start 966; Stop 990
aattgatacagataagatgacgcag

SEQ ID NO: 315632 - DNA, 25 bp, Artificial
  probe
  misc_feature (1)..(25): SEQ ID NO: 2119; WAN024G2A; Start 970; Stop 994
gatacagataagatgacgcaggttg

SEQ ID NO: 315633 - DNA, 25 bp, Artificial
  probe
  misc_feature (1)..(25): SEQ ID NO: 2119; WAN024G2A; Start 1013; Stop 1037
atgctattaagtattcgccagatgg

SEQ ID NO: 315634 - DNA, 25 bp, Artificial
  probe
  misc_feature (1)..(25): SEQ ID NO: 2119; WAN024G2A; Start 384; Stop 408
gttggttaaggaagatgttctgaat

SEQ ID NO: 315635 - DNA, 25 bp, Artificial
  probe
  misc_feature (1)..(25): SEQ ID NO: 2119; WAN024G2A; Start 383; Stop 407
ggttggttaaggaagatgttctgaa

SEQ ID NO: 315636 - DNA, 25 bp, Artificial
  probe
  misc_feature (1)..(25): SEQ ID NO: 2119; WAN024G2A; Start 265; Stop 289
ctagaacaagagagtaagaggctaa

SEQ ID NO: 315637 - DNA, 25 bp, Artificial
  probe
  misc_feature (1)..(25): SEQ ID NO: 2119; WAN024G2A; Start 969; Stop 993
tgatacagataagatgacgcaggtt

SEQ ID NO: 315638 - DNA, 25 bp, Artificial
  probe
  misc_feature (1)..(25): SEQ ID NO: 2119; WAN024G2A; Start 968; Stop 992
ttgatacagataagatgacgcaggt

SEQ ID NO: 315639 - DNA, 25 bp, Artificial
  probe
  misc_feature (1)..(25): SEQ ID NO: 2119; WAN024G2A; Start 831; Stop 855
cctagatgtggaactgattaacttc

SEQ ID NO: 315640 - DNA, 25 bp, Artificial
  probe
  misc_feature (1)..(25): SEQ ID NO: 2119; WAN024G2A; Start 386; Stop 410
tggttaaggaagatgttctgaatag

SEQ ID NO: 315641 - DNA, 25 bp, Artificial
  probe
  misc_feature (1)..(25): SEQ ID NO: 2119; WAN024G2A; Start 1059; Stop 1083
gaagacaactgaagaccagatgatt

SEQ ID NO: 315642 - DNA, 25 bp, Artificial
  probe
  misc_feature (1)..(25): SEQ ID NO: 2119; WAN024G2A; Start 1055; Stop 1079
gaatgaagacaactgaagaccagat

SEQ ID NO: 315643 - DNA, 25 bp, Artificial
  probe
  misc_feature (1)..(25): SEQ ID NO: 2119; WAN024G2A; Start 835; Stop 859
gatgtggaactgattaacttcactg

SEQ ID NO: 315644 - DNA, 25 bp, Artificial
  probe
  misc_feature (1)..(25): SEQ ID NO: 2119; WAN024G2A; Start 834; Stop 858
agatgtggaactgattaacttcact

SEQ ID NO: 315645 - DNA, 25 bp, Artificial
  probe
  misc_feature (1)..(25): SEQ ID NO: 2119; WAN024G2A; Start 1056; Stop 1080
aatgaagacaactgaagaccagatg

SEQ ID NO: 315646 - DNA, 25 bp, Artificial
  probe
  misc_feature (1)..(25): SEQ ID NO: 2119; WAN024G2A; Start 1011; Stop 1035
taatgctattaagtattcgccagat

SEQ ID NO: 315647 - DNA, 25 bp, Artificial
  probe
  misc_feature (1)..(25): SEQ ID NO: 2119; WAN024G2A; Start 1010; Stop 1034
ataatgctattaagtattcgccaga

SEQ ID NO: 315648 - DNA, 25 bp, Artificial
  probe
  misc_feature (1)..(25): SEQ ID NO: 2119; WAN024G2A; Start 387; Stop 411
ggttaaggaagatgttctgaataga

SEQ ID NO: 315649 - DNA, 25 bp, Artificial
  probe
  misc_feature (1)..(25): SEQ ID NO: 2119; WAN024G2A; Start 385; Stop 409
ttggttaaggaagatgttctgaata

SEQ ID NO: 315650 - DNA, 25 bp, Artificial
  probe
  misc_feature (1)..(25): SEQ ID NO: 2119; WAN024G2A; Start 832; Stop 856
ctagatgtggaactgattaacttca

SEQ ID NO: 315651 - DNA, 25 bp, Artificial
  probe
  misc_feature (1)..(25): SEQ ID NO: 2119; WAN024G2A; Start 1053; Stop 1077
cagaatgaagacaactgaagaccag

SEQ ID NO: 315652 - DNA, 25 bp, Artificial
  probe
  misc_feature (1)..(25): SEQ ID NO: 2119; WAN024G2A; Start 1058; Stop 1082
tgaagacaactgaagaccagatgat

SEQ ID NO: 315653 - DNA, 25 bp, Artificial
  probe
  misc_feature (1)..(25): SEQ ID NO: 2119; WAN024G2A; Start 1057; Stop 1081
atgaagacaactgaagaccagatga

SEQ ID NO: 315654 - DNA, 25 bp, Artificial
  probe
  misc_feature (1)..(25): SEQ ID NO: 2119; WAN024G2A; Start 1054; Stop 1078
agaatgaagacaactgaagaccaga

SEQ ID NO: 315655 - DNA, 25 bp, Artificial
  probe
  misc_feature (1)..(25): SEQ ID NO: 2119; WAN024G2A; Start 971; Stop 995
atacagataagatgacgcaggttgt

SEQ ID NO: 315656 - DNA, 25 bp, Artificial
  probe
  misc_feature (1)..(25): SEQ ID NO: 2119; WAN024G2A; Start 833; Stop 857
tagatgtggaactgattaacttcac

SEQ ID NO: 315657 - DNA, 25 bp, Artificial
  probe
  misc_feature (1)..(25): SEQ ID NO: 2119; WAN024G2A; Start 838; Stop 862
gtggaactgattaacttcactgctt

SEQ ID NO: 315658 - DNA, 25 bp, Artificial
  probe
  misc_feature (1)..(25): SEQ ID NO: 2119; WAN024G2A; Start 836; Stop 860
atgtggaactgattaacttcactgc

SEQ ID NO: 315659 - DNA, 25 bp, Artificial
  probe
  misc_feature (1)..(25): SEQ ID NO: 2119; WAN024G2A; Start 752; Stop 776
ctcttgatgagaccaaccgtatgat

SEQ ID NO: 315660 - DNA, 25 bp, Artificial
  probe
  misc_feature (1)..(25): SEQ ID NO: 2119; WAN024G2A; Start 753; Stop 777
tcttgatgagaccaaccgtatgatg

SEQ ID NO: 315661 - DNA, 25 bp, Artificial
  probe
  misc_feature (1)..(25): SEQ ID NO: 2119; WAN024G2A; Start 1322; Stop 1346
aagtatgggaggatgaagtagaaga

SEQ ID NO: 315662 - DNA, 25 bp, Artificial
  probe
  misc_feature (1)..(25): SEQ ID NO: 2120; WAN024CAQ; Start 145; Stop 169
ataggtgtgttggaattgttcgtaa

SEQ ID NO: 315663 - DNA, 25 bp, Artificial
  probe
  misc_feature (1)..(25): SEQ ID NO: 2120; WAN024CAQ; Start 146; Stop 170
taggtgtgttggaattgttcgtaag

SEQ ID NO: 315664 - DNA, 25 bp, Artificial
  probe
  misc_feature (1)..(25): SEQ ID NO: 2120; WAN024CAQ; Start 154; Stop 178
ttggaattgttcgtaagtcgcataa

SEQ ID NO: 315665 - DNA, 25 bp, Artificial
  probe
  misc_feature (1)..(25): SEQ ID NO: 2120; WAN024CAQ; Start 144; Stop 168
cataggtgtgttggaattgttcgta

SEQ ID NO: 315666 - DNA, 25 bp, Artificial
  probe
  misc_feature (1)..(25): SEQ ID NO: 2120; WAN024CAQ; Start 153; Stop 177
gttggaattgttcgtaagtcgcata

SEQ ID NO: 315667 - DNA, 25 bp, Artificial
  probe
  misc_feature (1)..(25): SEQ ID NO: 2120; WAN024CAQ; Start 148; Stop 172
ggtgtgttggaattgttcgtaagtc

SEQ ID NO: 315668 - DNA, 25 bp, Artificial
  probe
  misc_feature (1)..(25): SEQ ID NO: 2120; WAN024CAQ; Start 158; Stop 182
aattgttcgtaagtcgcataaagag

SEQ ID NO: 315669 - DNA, 25 bp, Artificial
  probe
  misc_feature (1)..(25): SEQ ID NO: 2120; WAN024CAQ; Start 157; Stop 181
gaattgttcgtaagtcgcataaaga

SEQ ID NO: 315670 - DNA, 25 bp, Artificial
  probe
  misc_feature (1)..(25): SEQ ID NO: 2120; WAN024CAQ; Start 149; Stop 173
gtgtgttggaattgttcgtaagtcg

SEQ ID NO: 315671 - DNA, 25 bp, Artificial
  probe
  misc_feature (1)..(25): SEQ ID NO: 2120; WAN024CAQ; Start 147; Stop 171
aggtgtgttggaattgttcgtaagt

SEQ ID NO: 315672 - DNA, 25 bp, Artificial
  probe
  misc_feature (1)..(25): SEQ ID NO: 2120; WAN024CAQ; Start 12; Stop 36
ctgctgctaccaaattgtcataaac

SEQ ID NO: 315673 - DNA, 25 bp, Artificial
  probe
  misc_feature (1)..(25): SEQ ID NO: 2120; WAN024CAQ; Start 156; Stop 180
ggaattgttcgtaagtcgcataaag

SEQ ID NO: 315674 - DNA, 25 bp, Artificial
  probe
  misc_feature (1)..(25): SEQ ID NO: 2120; WAN024CAQ; Start 11; Stop 35
actgctgctaccaaattgtcataaa

SEQ ID NO: 315675 - DNA, 25 bp, Artificial
  probe
  misc_feature (1)..(25): SEQ ID NO: 2120; WAN024CAQ; Start 10; Stop 34
aactgctgctaccaaattgtcataa

SEQ ID NO: 315676 - DNA, 25 bp, Artificial
  probe
  misc_feature (1)..(25): SEQ ID NO: 2120; WAN024CAQ; Start 155; Stop 179
tggaattgttcgtaagtcgcataaa

SEQ ID NO: 315677 - DNA, 25 bp, Artificial
  probe
  misc_feature (1)..(25): SEQ ID NO: 2120; WAN024CAQ; Start 9; Stop 33
gaactgctgctaccaaattgtcata

SEQ ID NO: 315678 - DNA, 25 bp, Artificial
  probe
  misc_feature (1)..(25): SEQ ID NO: 2120; WAN024CAQ; Start 15; Stop 39
ctgctaccaaattgtcataaacact

SEQ ID NO: 315679 - DNA, 25 bp, Artificial
  probe
  misc_feature (1)..(25): SEQ ID NO: 2120; WAN024CAQ; Start 140; Stop 164
ttggcataggtgtgttggaattgtt

SEQ ID NO: 315680 - DNA, 25 bp, Artificial
  probe
  misc_feature (1)..(25): SEQ ID NO: 2120; WAN024CAQ; Start 16; Stop 40
tgctaccaaattgtcataaacactt

SEQ ID NO: 315681 - DNA, 25 bp, Artificial
  probe
  misc_feature (1)..(25): SEQ ID NO: 2120; WAN024CAQ; Start 27; Stop 51
tgtcataaacactttctggaacaaa

SEQ ID NO: 315682 - DNA, 25 bp, Artificial
  probe
  misc_feature (1)..(25): SEQ ID NO: 2120; WAN024CAQ; Start 159; Stop 183
attgttcgtaagtcgcataaagagc

SEQ ID NO: 315683 - DNA, 25 bp, Artificial
  probe
  misc_feature (1)..(25): SEQ ID NO: 2120; WAN024CAQ; Start 25; Stop 49
attgtcataaacactttctggaaca

SEQ ID NO: 315684 - DNA, 25 bp, Artificial
  probe
  misc_feature (1)..(25): SEQ ID NO: 2120; WAN024CAQ; Start 14; Stop 38
gctgctaccaaattgtcataaacac

SEQ ID NO: 315685 - DNA, 25 bp, Artificial
  probe
  misc_feature (1)..(25): SEQ ID NO: 2120; WAN024CAQ; Start 13; Stop 37
tgctgctaccaaattgtcataaaca

SEQ ID NO: 315686 - DNA, 25 bp, Artificial
  probe
  misc_feature (1)..(25): SEQ ID NO: 2120; WAN024CAQ; Start 20; Stop 44
accaaattgtcataaacactttctg

SEQ ID NO: 315687 - DNA, 25 bp, Artificial
  probe
  misc_feature (1)..(25): SEQ ID NO: 2120; WAN024CAQ; Start 17; Stop 41
gctaccaaattgtcataaacacttt

SEQ ID NO: 315688 - DNA, 25 bp, Artificial
  probe
  misc_feature (1)..(25): SEQ ID NO: 2120; WAN024CAQ; Start 152; Stop 176
tgttggaattgttcgtaagtcgcat

SEQ ID NO: 315689 - DNA, 25 bp, Artificial
  probe
  misc_feature (1)..(25): SEQ ID NO: 2120; WAN024CAQ; Start 88; Stop 112
gttacgaactttagcacggtaattt

SEQ ID NO: 315690 - DNA, 25 bp, Artificial
  probe
  misc_feature (1)..(25): SEQ ID NO: 2120; WAN024CAQ; Start 72; Stop 96
gacgagcactcttgtagttacgaac

SEQ ID NO: 315691 - DNA, 25 bp, Artificial
  probe
  misc_feature (1)..(25): SEQ ID NO: 2120; WAN024CAQ; Start 22; Stop 46
caaattgtcataaacactttctgga

SEQ ID NO: 315692 - DNA, 25 bp, Artificial
  probe
  misc_feature (1)..(25): SEQ ID NO: 2120; WAN024CAQ; Start 166; Stop 190
gtaagtcgcataaagagcttgatag

SEQ ID NO: 315693 - DNA, 25 bp, Artificial
  probe
  misc_feature (1)..(25): SEQ ID NO: 2120; WAN024CAQ; Start 24; Stop 48
aattgtcataaacactttctggaac

SEQ ID NO: 315694 - DNA, 25 bp, Artificial
  probe
  misc_feature (1)..(25): SEQ ID NO: 2120; WAN024CAQ; Start 167; Stop 191
taagtcgcataaagagcttgatagg

SEQ ID NO: 315695 - DNA, 25 bp, Artificial
  probe
  misc_feature (1)..(25): SEQ ID NO: 2121; WAN024CU6; Start 412; Stop 436
atatgcccaagcctactatttacag

SEQ ID NO: 315696 - DNA, 25 bp, Artificial
  probe
  misc_feature (1)..(25): SEQ ID NO: 2121; WAN024CU6; Start 411; Stop 435
aatatgcccaagcctactatttaca

SEQ ID NO: 315697 - DNA, 25 bp, Artificial
  probe
  misc_feature (1)..(25): SEQ ID NO: 2121; WAN024CU6; Start 410; Stop 434
caatatgcccaagcctactatttac

SEQ ID NO: 315698 - DNA, 25 bp, Artificial
  probe
  misc_feature (1)..(25): SEQ ID NO: 2121; WAN024CU6; Start 19; Stop 43
ggagggaaagtagatgtctcaaatc

SEQ ID NO: 315699 - DNA, 25 bp, Artificial
  probe
  misc_feature (1)..(25): SEQ ID NO: 2121; WAN024CU6; Start 44; Stop 68
gaaagaatcaaacaggctatcatgg

SEQ ID NO: 315700 - DNA, 25 bp, Artificial
  probe
  misc_feature (1)..(25): SEQ ID NO: 2121; WAN024CU6; Start 43; Stop 67
cgaaagaatcaaacaggctatcatg

SEQ ID NO: 315701 - DNA, 25 bp, Artificial
  probe
  misc_feature (1)..(25): SEQ ID NO: 2121; WAN024CU6; Start 20; Stop 44
gagggaaagtagatgtctcaaatcg

SEQ ID NO: 315702 - DNA, 25 bp, Artificial
  probe
  misc_feature (1)..(25): SEQ ID NO: 2121; WAN024CU6; Start 18; Stop 42
tggagggaaagtagatgtctcaaat

SEQ ID NO: 315703 - DNA, 25 bp, Artificial
  probe
  misc_feature (1)..(25): SEQ ID NO: 2121; WAN024CU6; Start 17; Stop 41
ttggagggaaagtagatgtctcaaa

SEQ ID NO: 315704 - DNA, 25 bp, Artificial
  probe
  misc_feature (1)..(25): SEQ ID NO: 2121; WAN024CU6; Start 16; Stop 40
tttggagggaaagtagatgtctcaa

SEQ ID NO: 315705 - DNA, 25 bp, Artificial
  probe
  misc_feature (1)..(25): SEQ ID NO: 2121; WAN024CU6; Start 224; Stop 248
gactggctaggtgtggatgaagata

SEQ ID NO: 315706 - DNA, 25 bp, Artificial
  probe
  misc_feature (1)..(25): SEQ ID NO: 2121; WAN024CU6; Start 418; Stop 442
ccaagcctactatttacaggagaaa

SEQ ID NO: 315707 - DNA, 25 bp, Artificial
  probe
  misc_feature (1)..(25): SEQ ID NO: 2121; WAN024CU6; Start 456; Stop 480
taacggagagggtgaaacactataa

SEQ ID NO: 315708 - DNA, 25 bp, Artificial
  probe
  misc_feature (1)..(25): SEQ ID NO: 2121; WAN024CU6; Start 225; Stop 249
actggctaggtgtggatgaagatac

SEQ ID NO: 315709 - DNA, 25 bp, Artificial
  probe
  misc_feature (1)..(25): SEQ ID NO: 2121; WAN024CU6; Start 38; Stop 62
caaatcgaaagaatcaaacaggcta

SEQ ID NO: 315710 - DNA, 25 bp, Artificial
  probe
  misc_feature (1)..(25): SEQ ID NO: 2121; WAN024CU6; Start 40; Stop 64
aatcgaaagaatcaaacaggctatc

SEQ ID NO: 315711 - DNA, 25 bp, Artificial
  probe
  misc_feature (1)..(25): SEQ ID NO: 2121; WAN024CU6; Start 45; Stop 69
aaagaatcaaacaggctatcatggc

SEQ ID NO: 315712 - DNA, 25 bp, Artificial
  probe
  misc_feature (1)..(25): SEQ ID NO: 2121; WAN024CU6; Start 42; Stop 66
tcgaaagaatcaaacaggctatcat

SEQ ID NO: 315713 - DNA, 25 bp, Artificial
  probe
  misc_feature (1)..(25): SEQ ID NO: 2121; WAN024CU6; Start 41; Stop 65
atcgaaagaatcaaacaggctatca

SEQ ID NO: 315714 - DNA, 25 bp, Artificial
  probe
  misc_feature (1)..(25): SEQ ID NO: 2121; WAN024CU6; Start 39; Stop 63
aaatcgaaagaatcaaacaggctat

SEQ ID NO: 315715 - DNA, 25 bp, Artificial
  probe
  misc_feature (1)..(25): SEQ ID NO: 2121; WAN024CU6; Start 22; Stop 46
gggaaagtagatgtctcaaatcgaa

SEQ ID NO: 315716 - DNA, 25 bp, Artificial
  probe
  misc_feature (1)..(25): SEQ ID NO: 2121; WAN024CU6; Start 417; Stop 441
cccaagcctactatttacaggagaa

SEQ ID NO: 315717 - DNA, 25 bp, Artificial
  probe
  misc_feature (1)..(25): SEQ ID NO: 2121; WAN024CU6; Start 35; Stop 59
tctcaaatcgaaagaatcaaacagg

SEQ ID NO: 315718 - DNA, 25 bp, Artificial
  probe
  misc_feature (1)..(25): SEQ ID NO: 2121; WAN024CU6; Start 23; Stop 47
ggaaagtagatgtctcaaatcgaaa

SEQ ID NO: 315719 - DNA, 25 bp, Artificial
  probe
  misc_feature (1)..(25): SEQ ID NO: 2121; WAN024CU6; Start 457; Stop 481
aacggagagggtgaaacactataaa

SEQ ID NO: 315720 - DNA, 25 bp, Artificial
  probe
  misc_feature (1)..(25): SEQ ID NO: 2121; WAN024CU6; Start 455; Stop 479
gtaacggagagggtgaaacactata

SEQ ID NO: 315721 - DNA, 25 bp, Artificial
  probe
  misc_feature (1)..(25): SEQ ID NO: 2121; WAN024CU6; Start 36; Stop 60
ctcaaatcgaaagaatcaaacaggc

SEQ ID NO: 315722 - DNA, 25 bp, Artificial
  probe
  misc_feature (1)..(25): SEQ ID NO: 2121; WAN024CU6; Start 21; Stop 45
agggaaagtagatgtctcaaatcga

SEQ ID NO: 315723 - DNA, 25 bp, Artificial
  probe
  misc_feature (1)..(25): SEQ ID NO: 2121; WAN024CU6; Start 37; Stop 61
tcaaatcgaaagaatcaaacaggct

SEQ ID NO: 315724 - DNA, 25 bp, Artificial
  probe
  misc_feature (1)..(25): SEQ ID NO: 2121; WAN024CU6; Start 34; Stop 58
gtctcaaatcgaaagaatcaaacag

SEQ ID NO: 315725 - DNA, 25 bp, Artificial
  probe
  misc_feature (1)..(25): SEQ ID NO: 2121; WAN024CU6; Start 413; Stop 437
tatgcccaagcctactatttacagg

SEQ ID NO: 315726 - DNA, 25 bp, Artificial
  probe
  misc_feature (1)..(25): SEQ ID NO: 2121; WAN024CU6; Start 30; Stop 54
agatgtctcaaatcgaaagaatcaa

SEQ ID NO: 315727 - DNA, 25 bp, Artificial
  probe
  misc_feature (1)..(25): SEQ ID NO: 2121; WAN024CU6; Start 458; Stop 482
acggagagggtgaaacactataaag

SEQ ID NO: 315728 - DNA, 25 bp, Artificial
  probe
  misc_feature (1)..(25): SEQ ID NO: 2122; WAN024CE2; Start 105; Stop 129
caccataagtcataacctcaagttg

SEQ ID NO: 315729 - DNA, 25 bp, Artificial
  probe
  misc_feature (1)..(25): SEQ ID NO: 2122; WAN024CE2; Start 104; Stop 128
gcaccataagtcataacctcaagtt

SEQ ID NO: 315730 - DNA, 25 bp, Artificial
  probe
  misc_feature (1)..(25): SEQ ID NO: 2122; WAN024CE2; Start 8; Stop 32
ggactattgcctacataactatcaa

SEQ ID NO: 315731 - DNA, 25 bp, Artificial
  probe
  misc_feature (1)..(25): SEQ ID NO: 2122; WAN024CE2; Start 102; Stop 126
tcgcaccataagtcataacctcaag

SEQ ID NO: 315732 - DNA, 25 bp, Artificial
  probe
  misc_feature (1)..(25): SEQ ID NO: 2122; WAN024CE2; Start 110; Stop 134
taagtcataacctcaagttggtagc

SEQ ID NO: 315733 - DNA, 25 bp, Artificial
  probe
  misc_feature (1)..(25): SEQ ID NO: 2122; WAN024CE2; Start 107; Stop 131
ccataagtcataacctcaagttggt

SEQ ID NO: 315734 - DNA, 25 bp, Artificial
  probe
  misc_feature (1)..(25): SEQ ID NO: 2122; WAN024CE2; Start 106; Stop 130
accataagtcataacctcaagttgg

SEQ ID NO: 315735 - DNA, 25 bp, Artificial
  probe
  misc_feature (1)..(25): SEQ ID NO: 2122; WAN024CE2; Start 232; Stop 256
tttctctcaagcaaacaaaccatag

SEQ ID NO: 315736 - DNA, 25 bp, Artificial
  probe
  misc_feature (1)..(25): SEQ ID NO: 2122; WAN024CE2; Start 229; Stop 253
ctatttctctcaagcaaacaaacca

SEQ ID NO: 315737 - DNA, 25 bp, Artificial
  probe
  misc_feature (1)..(25): SEQ ID NO: 2122; WAN024CE2; Start 228; Stop 252
actatttctctcaagcaaacaaacc

SEQ ID NO: 315738 - DNA, 25 bp, Artificial
  probe
  misc_feature (1)..(25): SEQ ID NO: 2122; WAN024CE2; Start 103; Stop 127
cgcaccataagtcataacctcaagt

SEQ ID NO: 315739 - DNA, 25 bp, Artificial
  probe
  misc_feature (1)..(25): SEQ ID NO: 2122; WAN024CE2; Start 101; Stop 125
gtcgcaccataagtcataacctcaa

SEQ ID NO: 315740 - DNA, 25 bp, Artificial
  probe
  misc_feature (1)..(25): SEQ ID NO: 2122; WAN024CE2; Start 4; Stop 28
cttgggactattgcctacataacta

SEQ ID NO: 315741 - DNA, 25 bp, Artificial
  probe
  misc_feature (1)..(25): SEQ ID NO: 2122; WAN024CE2; Start 7; Stop 31
gggactattgcctacataactatca

SEQ ID NO: 315742 - DNA, 25 bp, Artificial
  probe
  misc_feature (1)..(25): SEQ ID NO: 2122; WAN024CE2; Start 6; Stop 30
tgggactattgcctacataactatc

SEQ ID NO: 315743 - DNA, 25 bp, Artificial
  probe
  misc_feature (1)..(25): SEQ ID NO: 2122; WAN024CE2; Start 231; Stop 255
atttctctcaagcaaacaaaccata

SEQ ID NO: 315744 - DNA, 25 bp, Artificial
  probe
  misc_feature (1)..(25): SEQ ID NO: 2122; WAN024CE2; Start 230; Stop 254
tatttctctcaagcaaacaaaccat

SEQ ID NO: 315745 - DNA, 25 bp, Artificial
  probe
  misc_feature (1)..(25): SEQ ID NO: 2122; WAN024CE2; Start 198; Stop 222
ctgtgtatgctttcattctgttctc

SEQ ID NO: 315746 - DNA, 25 bp, Artificial
  probe
  misc_feature (1)..(25): SEQ ID NO: 2122; WAN024CE2; Start 196; Stop 220
ctctgtgtatgctttcattctgttc

SEQ ID NO: 315747 - DNA, 25 bp, Artificial
  probe
  misc_feature (1)..(25): SEQ ID NO: 2122; WAN024CE2; Start 202; Stop 226
gtatgctttcattctgttctccttt

SEQ ID NO: 315748 - DNA, 25 bp, Artificial
  probe
  misc_feature (1)..(25): SEQ ID NO: 2122; WAN024CE2; Start 201; Stop 225
tgtatgctttcattctgttctcctt

SEQ ID NO: 315749 - DNA, 25 bp, Artificial
  probe
  misc_feature (1)..(25): SEQ ID NO: 2122; WAN024CE2; Start 197; Stop 221
tctgtgtatgctttcattctgttct

SEQ ID NO: 315750 - DNA, 25 bp, Artificial
  probe
  misc_feature (1)..(25): SEQ ID NO: 2122; WAN024CE2; Start 5; Stop 29
ttgggactattgcctacataactat

SEQ ID NO: 315751 - DNA, 25 bp, Artificial
  probe
  misc_feature (1)..(25): SEQ ID NO: 2122; WAN024CE2; Start 236; Stop 260
tctcaagcaaacaaaccatagaaag

SEQ ID NO: 315752 - DNA, 25 bp, Artificial
  probe
  misc_feature (1)..(25): SEQ ID NO: 2122; WAN024CE2; Start 235; Stop 259
ctctcaagcaaacaaaccatagaaa

SEQ ID NO: 315753 - DNA, 25 bp, Artificial
  probe
  misc_feature (1)..(25): SEQ ID NO: 2122; WAN024CE2; Start 26; Stop 50
ctatcaaagtcatcaaatcccaaga

SEQ ID NO: 315754 - DNA, 25 bp, Artificial
  probe
  misc_feature (1)..(25): SEQ ID NO: 2122; WAN024CE2; Start 234; Stop 258
tctctcaagcaaacaaaccatagaa

SEQ ID NO: 315755 - DNA, 25 bp, Artificial
  probe
  misc_feature (1)..(25): SEQ ID NO: 2122; WAN024CE2; Start 233; Stop 257
ttctctcaagcaaacaaaccataga

SEQ ID NO: 315756 - DNA, 25 bp, Artificial
  probe
  misc_feature (1)..(25): SEQ ID NO: 2122; WAN024CE2; Start 237; Stop 261
ctcaagcaaacaaaccatagaaagc

SEQ ID NO: 315757 - DNA, 25 bp, Artificial
  probe
  misc_feature (1)..(25): SEQ ID NO: 2122; WAN024CE2; Start 200; Stop 224
gtgtatgctttcattctgttctcct

SEQ ID NO: 315758 - DNA, 25 bp, Artificial
  probe
  misc_feature (1)..(25): SEQ ID NO: 2122; WAN024CE2; Start 108; Stop 132
cataagtcataacctcaagttggta

SEQ ID NO: 315759 - DNA, 25 bp, Artificial
  probe
  misc_feature (1)..(25): SEQ ID NO: 2122; WAN024CE2; Start 31; Stop 55
aaagtcatcaaatcccaagataaca

SEQ ID NO: 315760 - DNA, 25 bp, Artificial
  probe
  misc_feature (1)..(25): SEQ ID NO: 2122; WAN024CE2; Start 259; Stop 283
agcgtactgacaatctatggtttat

SEQ ID NO: 315761 - DNA, 25 bp, Artificial
  probe
  misc_feature (1)..(25): SEQ ID NO: 2123; WAN024F37; Start 1911; Stop 1935
ccaagtaacctatacagcaacatct

SEQ ID NO: 315762 - DNA, 25 bp, Artificial
  probe
  misc_feature (1)..(25): SEQ ID NO: 2123; WAN024F37; Start 1910; Stop 1934
tccaagtaacctatacagcaacatc

SEQ ID NO: 315763 - DNA, 25 bp, Artificial
  probe
  misc_feature (1)..(25): SEQ ID NO: 2123; WAN024F37; Start 1909; Stop 1933
ctccaagtaacctatacagcaacat

SEQ ID NO: 315764 - DNA, 25 bp, Artificial
  probe
  misc_feature (1)..(25): SEQ ID NO: 2123; WAN024F37; Start 2182; Stop 2206
caagaagttgtagatgctatccaag

SEQ ID NO: 315765 - DNA, 25 bp, Artificial
  probe
  misc_feature (1)..(25): SEQ ID NO: 2123; WAN024F37; Start 1907; Stop 1931
gactccaagtaacctatacagcaac

SEQ ID NO: 315766 - DNA, 25 bp, Artificial
  probe
  misc_feature (1)..(25): SEQ ID NO: 2123; WAN024F37; Start 459; Stop 483
ttcttacctagacttggatgatgaa

SEQ ID NO: 315767 - DNA, 25 bp, Artificial
  probe
  misc_feature (1)..(25): SEQ ID NO: 2123; WAN024F37; Start 1109; Stop 1133
ttaatgtggcaacagttaatgaagc

SEQ ID NO: 315768 - DNA, 25 bp, Artificial
  probe
  misc_feature (1)..(25): SEQ ID NO: 2123; WAN024F37; Start 1908; Stop 1932
actccaagtaacctatacagcaaca

SEQ ID NO: 315769 - DNA, 25 bp, Artificial
  probe
  misc_feature (1)..(25): SEQ ID NO: 2123; WAN024F37; Start 1914; Stop 1938
agtaacctatacagcaacatctgaa

SEQ ID NO: 315770 - DNA, 25 bp, Artificial
  probe
  misc_feature (1)..(25): SEQ ID NO: 2123; WAN024F37; Start 1913; Stop 1937
aagtaacctatacagcaacatctga

SEQ ID NO: 315771 - DNA, 25 bp, Artificial
  probe
  misc_feature (1)..(25): SEQ ID NO: 2123; WAN024F37; Start 1912; Stop 1936
caagtaacctatacagcaacatctg

SEQ ID NO: 315772 - DNA, 25 bp, Artificial
  probe
  misc_feature (1)..(25): SEQ ID NO: 2123; WAN024F37; Start 340; Stop 364
tcacttggaatgatctgttcacttg

SEQ ID NO: 315773 - DNA, 25 bp, Artificial
  probe
  misc_feature (1)..(25): SEQ ID NO: 2123; WAN024F37; Start 339; Stop 363
gtcacttggaatgatctgttcactt

SEQ ID NO: 315774 - DNA, 25 bp, Artificial
  probe
  misc_feature (1)..(25): SEQ ID NO: 2123; WAN024F37; Start 1906; Stop 1930
ggactccaagtaacctatacagcaa

SEQ ID NO: 315775 - DNA, 25 bp, Artificial
  probe
  misc_feature (1)..(25): SEQ ID NO: 2123; WAN024F37; Start 337; Stop 361
gagtcacttggaatgatctgttcac

SEQ ID NO: 315776 - DNA, 25 bp, Artificial
  probe
  misc_feature (1)..(25): SEQ ID NO: 2123; WAN024F37; Start 1848; Stop 1872
agttccagttgatttcttctatgct

SEQ ID NO: 315777 - DNA, 25 bp, Artificial
  probe
  misc_feature (1)..(25): SEQ ID NO: 2123; WAN024F37; Start 1847; Stop 1871
cagttccagttgatttcttctatgc

SEQ ID NO: 315778 - DNA, 25 bp, Artificial
  probe
  misc_feature (1)..(25): SEQ ID NO: 2123; WAN024F37; Start 1846; Stop 1870
gcagttccagttgatttcttctatg

SEQ ID NO: 315779 - DNA, 25 bp, Artificial
  probe
  misc_feature (1)..(25): SEQ ID NO: 2123; WAN024F37; Start 1845; Stop 1869
agcagttccagttgatttcttctat

SEQ ID NO: 315780 - DNA, 25 bp, Artificial
  probe
  misc_feature (1)..(25): SEQ ID NO: 2123; WAN024F37; Start 1103; Stop 1127
aaggaattaatgtggcaacagttaa

SEQ ID NO: 315781 - DNA, 25 bp, Artificial
  probe
  misc_feature (1)..(25): SEQ ID NO: 2123; WAN024F37; Start 338; Stop 362
agtcacttggaatgatctgttcact

SEQ ID NO: 315782 - DNA, 25 bp, Artificial
  probe
  misc_feature (1)..(25): SEQ ID NO: 2123; WAN024F37; Start 1069; Stop 1093
aaccttcgttctgagtcatcttctc

SEQ ID NO: 315783 - DNA, 25 bp, Artificial
  probe
  misc_feature (1)..(25): SEQ ID NO: 2123; WAN024F37; Start 341; Stop 365
cacttggaatgatctgttcacttgg

SEQ ID NO: 315784 - DNA, 25 bp, Artificial
  probe
  misc_feature (1)..(25): SEQ ID NO: 2123; WAN024F37; Start 334; Stop 358
ttggagtcacttggaatgatctgtt

SEQ ID NO: 315785 - DNA, 25 bp, Artificial
  probe
  misc_feature (1)..(25): SEQ ID NO: 2123; WAN024F37; Start 1844; Stop 1868
cagcagttccagttgatttcttcta

SEQ ID NO: 315786 - DNA, 25 bp, Artificial
  probe
  misc_feature (1)..(25): SEQ ID NO: 2123; WAN024F37; Start 1853; Stop 1877
cagttgatttcttctatgctaaggg

SEQ ID NO: 315787 - DNA, 25 bp, Artificial
  probe
  misc_feature (1)..(25): SEQ ID NO: 2123; WAN024F37; Start 1852; Stop 1876
ccagttgatttcttctatgctaagg

SEQ ID NO: 315788 - DNA, 25 bp, Artificial
  probe
  misc_feature (1)..(25): SEQ ID NO: 2123; WAN024F37; Start 1849; Stop 1873
gttccagttgatttcttctatgcta

SEQ ID NO: 315789 - DNA, 25 bp, Artificial
  probe
  misc_feature (1)..(25): SEQ ID NO: 2123; WAN024F37; Start 1854; Stop 1878
agttgatttcttctatgctaaggga

SEQ ID NO: 315790 - DNA, 25 bp, Artificial
  probe
  misc_feature (1)..(25): SEQ ID NO: 2123; WAN024F37; Start 1040; Stop 1064
aatctatccgtaagacaagtggtcg

SEQ ID NO: 315791 - DNA, 25 bp, Artificial
  probe
  misc_feature (1)..(25): SEQ ID NO: 2123; WAN024F37; Start 1033; Stop 1057
aatggcaaatctatccgtaagacaa

SEQ ID NO: 315792 - DNA, 25 bp, Artificial
  probe
  misc_feature (1)..(25): SEQ ID NO: 2123; WAN024F37; Start 1038; Stop 1062
caaatctatccgtaagacaagtggt

SEQ ID NO: 315793 - DNA, 25 bp, Artificial
  probe
  misc_feature (1)..(25): SEQ ID NO: 2123; WAN024F37; Start 1877; Stop 1901
gaatccttgaagccctatttactcg

SEQ ID NO: 315794 - DNA, 25 bp, Artificial
  probe
  misc_feature (1)..(25): SEQ ID NO: 2124; WAN024FGU; Start 535; Stop 559
gacattgagtatgcggacgaagtga

SEQ ID NO: 315795 - DNA, 25 bp, Artificial
  probe
  misc_feature (1)..(25): SEQ ID NO: 2124; WAN024FGU; Start 544; Stop 568
tatgcggacgaagtgacactcttac

SEQ ID NO: 315796 - DNA, 25 bp, Artificial
  probe
  misc_feature (1)..(25): SEQ ID NO: 2124; WAN024FGU; Start 543; Stop 567
gtatgcggacgaagtgacactctta

SEQ ID NO: 315797 - DNA, 25 bp, Artificial
  probe
  misc_feature (1)..(25): SEQ ID NO: 2124; WAN024FGU; Start 295; Stop 319
gaataccatggactctatcatgtcc

SEQ ID NO: 315798 - DNA, 25 bp, Artificial
  probe
  misc_feature (1)..(25): SEQ ID NO: 2124; WAN024FGU; Start 296; Stop 320
aataccatggactctatcatgtcct

SEQ ID NO: 315799 - DNA, 25 bp, Artificial
  probe
  misc_feature (1)..(25): SEQ ID NO: 2125; WAN024FGT; Start 408; Stop 432
ttcagaagtaatcgtagcaaccaat

SEQ ID NO: 315800 - DNA, 25 bp, Artificial
  probe
  misc_feature (1)..(25): SEQ ID NO: 2125; WAN024FGT; Start 409; Stop 433
tcagaagtaatcgtagcaaccaatg

SEQ ID NO: 315801 - DNA, 25 bp, Artificial
  probe
  misc_feature (1)..(25): SEQ ID NO: 2125; WAN024FGT; Start 32; Stop 56
ttgacagttattccaagttaccagg

SEQ ID NO: 315802 - DNA, 25 bp, Artificial
  probe
  misc_feature (1)..(25): SEQ ID NO: 2125; WAN024FGT; Start 31; Stop 55
attgacagttattccaagttaccag

SEQ ID NO: 315803 - DNA, 25 bp, Artificial
  probe
  misc_feature (1)..(25): SEQ ID NO: 2125; WAN024FGT; Start 30; Stop 54
gattgacagttattccaagttacca

SEQ ID NO: 315804 - DNA, 25 bp, Artificial
  probe
  misc_feature (1)..(25): SEQ ID NO: 2125; WAN024FGT; Start 29; Stop 53
tgattgacagttattccaagttacc

SEQ ID NO: 315805 - DNA, 25 bp, Artificial
  probe
  misc_feature (1)..(25): SEQ ID NO: 2125; WAN024FGT; Start 37; Stop 61
agttattccaagttaccaggtatcg

SEQ ID NO: 315806 - DNA, 25 bp, Artificial
  probe
  misc_feature (1)..(25): SEQ ID NO: 2125; WAN024FGT; Start 34; Stop 58
gacagttattccaagttaccaggta

SEQ ID NO: 315807 - DNA, 25 bp, Artificial
  probe
  misc_feature (1)..(25): SEQ ID NO: 2125; WAN024FGT; Start 35; Stop 59
acagttattccaagttaccaggtat

SEQ ID NO: 315808 - DNA, 25 bp, Artificial
  probe
  misc_feature (1)..(25): SEQ ID NO: 2125; WAN024FGT; Start 33; Stop 57
tgacagttattccaagttaccaggt

SEQ ID NO: 315809 - DNA, 25 bp, Artificial
  probe
  misc_feature (1)..(25): SEQ ID NO: 2125; WAN024FGT; Start 38; Stop 62
gttattccaagttaccaggtatcgg

SEQ ID NO: 315810 - DNA, 25 bp, Artificial
  probe
  misc_feature (1)..(25): SEQ ID NO: 2125; WAN024FGT; Start 36; Stop 60
cagttattccaagttaccaggtatc

SEQ ID NO: 315811 - DNA, 25 bp, Artificial
  probe
  misc_feature (1)..(25): SEQ ID NO: 2125; WAN024FGT; Start 27; Stop 51
gctgattgacagttattccaagtta

SEQ ID NO: 315812 - DNA, 25 bp, Artificial
  probe
  misc_feature (1)..(25): SEQ ID NO: 2125; WAN024FGT; Start 89; Stop 113
tttatacgattgggatgtctgatga

SEQ ID NO: 315813 - DNA, 25 bp, Artificial
  probe
  misc_feature (1)..(25): SEQ ID NO: 2125; WAN024FGT; Start 28; Stop 52
ctgattgacagttattccaagttac

SEQ ID NO: 315814 - DNA, 25 bp, Artificial
  probe
  misc_feature (1)..(25): SEQ ID NO: 2125; WAN024FGT; Start 407; Stop 431
tttcagaagtaatcgtagcaaccaa

SEQ ID NO: 315815 - DNA, 25 bp, Artificial
  probe
  misc_feature (1)..(25): SEQ ID NO: 2125; WAN024FGT; Start 26; Stop 50
agctgattgacagttattccaagtt

SEQ ID NO: 315816 - DNA, 25 bp, Artificial
  probe
  misc_feature (1)..(25): SEQ ID NO: 2125; WAN024FGT; Start 25; Stop 49
aagctgattgacagttattccaagt

SEQ ID NO: 315817 - DNA, 25 bp, Artificial
  probe
  misc_feature (1)..(25): SEQ ID NO: 2125; WAN024FGT; Start 406; Stop 430
gtttcagaagtaatcgtagcaacca

SEQ ID NO: 315818 - DNA, 25 bp, Artificial
  probe
  misc_feature (1)..(25): SEQ ID NO: 2125; WAN024FGT; Start 46; Stop 70
aagttaccaggtatcgggattaaga

SEQ ID NO: 315819 - DNA, 25 bp, Artificial
  probe
  misc_feature (1)..(25): SEQ ID NO: 2125; WAN024FGT; Start 45; Stop 69
caagttaccaggtatcgggattaag

SEQ ID NO: 315820 - DNA, 25 bp, Artificial
  probe
  misc_feature (1)..(25): SEQ ID NO: 2125; WAN024FGT; Start 47; Stop 71
agttaccaggtatcgggattaagac

SEQ ID NO: 315821 - DNA, 25 bp, Artificial
  probe
  misc_feature (1)..(25): SEQ ID NO: 2125; WAN024FGT; Start 44; Stop 68
ccaagttaccaggtatcgggattaa

SEQ ID NO: 315822 - DNA, 25 bp, Artificial
  probe
  misc_feature (1)..(25): SEQ ID NO: 2125; WAN024FGT; Start 39; Stop 63
ttattccaagttaccaggtatcggg

SEQ ID NO: 315823 - DNA, 25 bp, Artificial
  probe
  misc_feature (1)..(25): SEQ ID NO: 2125; WAN024FGT; Start 453; Stop 477
gacttccatgtatctttcccgctta

SEQ ID NO: 315824 - DNA, 25 bp, Artificial
  probe
  misc_feature (1)..(25): SEQ ID NO: 2125; WAN024FGT; Start 455; Stop 479
cttccatgtatctttcccgcttact

SEQ ID NO: 315825 - DNA, 25 bp, Artificial
  probe
  misc_feature (1)..(25): SEQ ID NO: 2125; WAN024FGT; Start 48; Stop 72
gttaccaggtatcgggattaagacg

SEQ ID NO: 315826 - DNA, 25 bp, Artificial
  probe
  misc_feature (1)..(25): SEQ ID NO: 2125; WAN024FGT; Start 454; Stop 478
acttccatgtatctttcccgcttac

SEQ ID NO: 315827 - DNA, 25 bp, Artificial
  probe
  misc_feature (1)..(25): SEQ ID NO: 2125; WAN024FGT; Start 410; Stop 434
cagaagtaatcgtagcaaccaatgc

SEQ ID NO: 315828 - DNA, 25 bp, Artificial
  probe
  misc_feature (1)..(25): SEQ ID NO: 2125; WAN024FGT; Start 86; Stop 110
ccttttatacgattgggatgtctga

SEQ ID NO: 315829 - DNA, 25 bp, Artificial
  probe
  misc_feature (1)..(25): SEQ ID NO: 2125; WAN024FGT; Start 88; Stop 112
ttttatacgattgggatgtctgatg

SEQ ID NO: 315830 - DNA, 25 bp, Artificial
  probe
  misc_feature (1)..(25): SEQ ID NO: 2125; WAN024FGT; Start 87; Stop 111
cttttatacgattgggatgtctgat

SEQ ID NO: 315831 - DNA, 25 bp, Artificial
  probe
  misc_feature (1)..(25): SEQ ID NO: 2125; WAN024FGT; Start 43; Stop 67
tccaagttaccaggtatcgggatta

SEQ ID NO: 315832 - DNA, 25 bp, Artificial
  probe
  misc_feature (1)..(25): SEQ ID NO: 2126; WAN024GME; Start 348; Stop 372
agaatatacctaccaactcttgacg

SEQ ID NO: 315833 - DNA, 25 bp, Artificial
  probe
  misc_feature (1)..(25): SEQ ID NO: 2126; WAN024GME; Start 349; Stop 373
gaatatacctaccaactcttgacgc

SEQ ID NO: 315834 - DNA, 25 bp, Artificial
  probe
  misc_feature (1)..(25): SEQ ID NO: 2126; WAN024GME; Start 392; Stop 416
aaaggattgaggcaggatttgataa

SEQ ID NO: 315835 - DNA, 25 bp, Artificial
  probe
  misc_feature (1)..(25): SEQ ID NO: 2126; WAN024GME; Start 157; Stop 181
ctcatcgctcttaaacttctttctg

SEQ ID NO: 315836 - DNA, 25 bp, Artificial
  probe
  misc_feature (1)..(25): SEQ ID NO: 2126; WAN024GME; Start 156; Stop 180
tctcatcgctcttaaacttctttct

SEQ ID NO: 315837 - DNA, 25 bp, Artificial
  probe
  misc_feature (1)..(25): SEQ ID NO: 2126; WAN024GME; Start 155; Stop 179
gtctcatcgctcttaaacttctttc

SEQ ID NO: 315838 - DNA, 25 bp, Artificial
  probe
  misc_feature (1)..(25): SEQ ID NO: 2126; WAN024GME; Start 524; Stop 548
aaatcatcaaacattacaagaggct

SEQ ID NO: 315839 - DNA, 25 bp, Artificial
  probe
  misc_feature (1)..(25): SEQ ID NO: 2126; WAN024GME; Start 393; Stop 417
aaggattgaggcaggatttgataag

SEQ ID NO: 315840 - DNA, 25 bp, Artificial
  probe
  misc_feature (1)..(25): SEQ ID NO: 2126; WAN024GME; Start 154; Stop 178
tgtctcatcgctcttaaacttcttt

SEQ ID NO: 315841 - DNA, 25 bp, Artificial
  probe
  misc_feature (1)..(25): SEQ ID NO: 2126; WAN024GME; Start 525; Stop 549
aatcatcaaacattacaagaggctc

SEQ ID NO: 315842 - DNA, 25 bp, Artificial
  probe
  misc_feature (1)..(25): SEQ ID NO: 2126; WAN024GME; Start 527; Stop 551
tcatcaaacattacaagaggctcat

SEQ ID NO: 315843 - DNA, 25 bp, Artificial
  probe
  misc_feature (1)..(25): SEQ ID NO: 2126; WAN024GME; Start 526; Stop 550
atcatcaaacattacaagaggctca

SEQ ID NO: 315844 - DNA, 25 bp, Artificial
  probe
  misc_feature (1)..(25): SEQ ID NO: 2126; WAN024GME; Start 159; Stop 183
catcgctcttaaacttctttctgat

SEQ ID NO: 315845 - DNA, 25 bp, Artificial
  probe
  misc_feature (1)..(25): SEQ ID NO: 2126; WAN024GME; Start 523; Stop 547
gaaatcatcaaacattacaagaggc

SEQ ID NO: 315846 - DNA, 25 bp, Artificial
  probe
  misc_feature (1)..(25): SEQ ID NO: 2126; WAN024GME; Start 153; Stop 177
ctgtctcatcgctcttaaacttctt

SEQ ID NO: 315847 - DNA, 25 bp, Artificial
  probe
  misc_feature (1)..(25): SEQ ID NO: 2126; WAN024GME; Start 522; Stop 546
cgaaatcatcaaacattacaagagg

SEQ ID NO: 315848 - DNA, 25 bp, Artificial
  probe
  misc_feature (1)..(25): SEQ ID NO: 2126; WAN024GME; Start 158; Stop 182
tcatcgctcttaaacttctttctga

SEQ ID NO: 315849 - DNA, 25 bp, Artificial
  probe
  misc_feature (1)..(25): SEQ ID NO: 2126; WAN024GME; Start 168; Stop 192
taaacttctttctgatcccaatcgt

SEQ ID NO: 315850 - DNA, 25 bp, Artificial
  probe
  misc_feature (1)..(25): SEQ ID NO: 2126; WAN024GME; Start 163; Stop 187
gctcttaaacttctttctgatccca

SEQ ID NO: 315851 - DNA, 25 bp, Artificial
  probe
  misc_feature (1)..(25): SEQ ID NO: 2126; WAN024GME; Start 151; Stop 175
gactgtctcatcgctcttaaacttc

SEQ ID NO: 315852 - DNA, 25 bp, Artificial
  probe
  misc_feature (1)..(25): SEQ ID NO: 2126; WAN024GME; Start 161; Stop 185
tcgctcttaaacttctttctgatcc

SEQ ID NO: 315853 - DNA, 25 bp, Artificial
  probe
  misc_feature (1)..(25): SEQ ID NO: 2126; WAN024GME; Start 152; Stop 176
actgtctcatcgctcttaaacttct

SEQ ID NO: 315854 - DNA, 25 bp, Artificial
  probe
  misc_feature (1)..(25): SEQ ID NO: 2126; WAN024GME; Start 167; Stop 191
ttaaacttctttctgatcccaatcg

SEQ ID NO: 315855 - DNA, 25 bp, Artificial
  probe
  misc_feature (1)..(25): SEQ ID NO: 2126; WAN024GME; Start 160; Stop 184
atcgctcttaaacttctttctgatc

SEQ ID NO: 315856 - DNA, 25 bp, Artificial
  probe
  misc_feature (1)..(25): SEQ ID NO: 2126; WAN024GME; Start 164; Stop 188
ctcttaaacttctttctgatcccaa

SEQ ID NO: 315857 - DNA, 25 bp, Artificial
  probe
  misc_feature (1)..(25): SEQ ID NO: 2126; WAN024GME; Start 177; Stop 201
ttctgatcccaatcgtgaacaattt

SEQ ID NO: 315858 - DNA, 25 bp, Artificial
  probe
  misc_feature (1)..(25): SEQ ID NO: 2126; WAN024GME; Start 176; Stop 200
tttctgatcccaatcgtgaacaatt

SEQ ID NO: 315859 - DNA, 25 bp, Artificial
  probe
  misc_feature (1)..(25): SEQ ID NO: 2126; WAN024GME; Start 169; Stop 193
aaacttctttctgatcccaatcgtg

SEQ ID NO: 315860 - DNA, 25 bp, Artificial
  probe
  misc_feature (1)..(25): SEQ ID NO: 2126; WAN024GME; Start 162; Stop 186
cgctcttaaacttctttctgatccc

SEQ ID NO: 315861 - DNA, 25 bp, Artificial
  probe
  misc_feature (1)..(25): SEQ ID NO: 2126; WAN024GME; Start 178; Stop 202
tctgatcccaatcgtgaacaatttc

SEQ ID NO: 315862 - DNA, 25 bp, Artificial
  probe
  misc_feature (1)..(25): SEQ ID NO: 2126; WAN024GME; Start 175; Stop 199
ctttctgatcccaatcgtgaacaat

SEQ ID NO: 315863 - DNA, 25 bp, Artificial
  probe
  misc_feature (1)..(25): SEQ ID NO: 2126; WAN024GME; Start 165; Stop 189
tcttaaacttctttctgatcccaat

SEQ ID NO: 315864 - DNA, 25 bp, Artificial
  probe
  misc_feature (1)..(25): SEQ ID NO: 2126; WAN024GME; Start 172; Stop 196
cttctttctgatcccaatcgtgaac

SEQ ID NO: 315865 - DNA, 25 bp, Artificial
  probe
  misc_feature (1)..(25): SEQ ID NO: 2127; WAN024GMG; Start 509; Stop 533
aatatacctaccaactcttgacacg

SEQ ID NO: 315866 - DNA, 25 bp, Artificial
  probe
  misc_feature (1)..(25): SEQ ID NO: 2127; WAN024GMG; Start 508; Stop 532
gaatatacctaccaactcttgacac

SEQ ID NO: 315867 - DNA, 25 bp, Artificial
  probe
  misc_feature (1)..(25): SEQ ID NO: 2127; WAN024GMG; Start 507; Stop 531
agaatatacctaccaactcttgaca

SEQ ID NO: 315868 - DNA, 25 bp, Artificial
  probe
  misc_feature (1)..(25): SEQ ID NO: 2127; WAN024GMG; Start 510; Stop 534
atatacctaccaactcttgacacgc

SEQ ID NO: 315869 - DNA, 25 bp, Artificial
  probe
  misc_feature (1)..(25): SEQ ID NO: 2127; WAN024GMG; Start 177; Stop 201
cggacattatgcctttaatctactg

SEQ ID NO: 315870 - DNA, 25 bp, Artificial
  probe
  misc_feature (1)..(25): SEQ ID NO: 2127; WAN024GMG; Start 237; Stop 261
ctacaatcctttgctcatcaagaaa

SEQ ID NO: 315871 - DNA, 25 bp, Artificial
  probe
  misc_feature (1)..(25): SEQ ID NO: 2127; WAN024GMG; Start 230; Stop 254
tttacacctacaatcctttgctcat

SEQ ID NO: 315872 - DNA, 25 bp, Artificial
  probe
  misc_feature (1)..(25): SEQ ID NO: 2127; WAN024GMG; Start 227; Stop 251
aagtttacacctacaatcctttgct

SEQ ID NO: 315873 - DNA, 25 bp, Artificial
  probe
  misc_feature (1)..(25): SEQ ID NO: 2127; WAN024GMG; Start 239; Stop 263
acaatcctttgctcatcaagaaatt

SEQ ID NO: 315874 - DNA, 25 bp, Artificial
  probe
  misc_feature (1)..(25): SEQ ID NO: 2127; WAN024GMG; Start 231; Stop 255
ttacacctacaatcctttgctcatc

SEQ ID NO: 315875 - DNA, 25 bp, Artificial
  probe
  misc_feature (1)..(25): SEQ ID NO: 2127; WAN024GMG; Start 238; Stop 262
tacaatcctttgctcatcaagaaat

SEQ ID NO: 315876 - DNA, 25 bp, Artificial
  probe
  misc_feature (1)..(25): SEQ ID NO: 2127; WAN024GMG; Start 236; Stop 260
cctacaatcctttgctcatcaagaa

SEQ ID NO: 315877 - DNA, 25 bp, Artificial
  probe
  misc_feature (1)..(25): SEQ ID NO: 2127; WAN024GMG; Start 228; Stop 252
agtttacacctacaatcctttgctc

SEQ ID NO: 315878 - DNA, 25 bp, Artificial
  probe
  misc_feature (1)..(25): SEQ ID NO: 2127; WAN024GMG; Start 512; Stop 536
atacctaccaactcttgacacgcta

SEQ ID NO: 315879 - DNA, 25 bp, Artificial
  probe
  misc_feature (1)..(25): SEQ ID NO: 2127; WAN024GMG; Start 511; Stop 535
tatacctaccaactcttgacacgct

SEQ ID NO: 315880 - DNA, 25 bp, Artificial
  probe
  misc_feature (1)..(25): SEQ ID NO: 2127; WAN024GMG; Start 229; Stop 253
gtttacacctacaatcctttgctca

SEQ ID NO: 315881 - DNA, 25 bp, Artificial
  probe
  misc_feature (1)..(25): SEQ ID NO: 2127; WAN024GMG; Start 232; Stop 256
tacacctacaatcctttgctcatca

SEQ ID NO: 315882 - DNA, 25 bp, Artificial
  probe
  misc_feature (1)..(25): SEQ ID NO: 2127; WAN024GMG; Start 235; Stop 259
acctacaatcctttgctcatcaaga

SEQ ID NO: 315883 - DNA, 25 bp, Artificial
  probe
  misc_feature (1)..(25): SEQ ID NO: 2127; WAN024GMG; Start 234; Stop 258
cacctacaatcctttgctcatcaag

SEQ ID NO: 315884 - DNA, 25 bp, Artificial
  probe
  misc_feature (1)..(25): SEQ ID NO: 2127; WAN024GMG; Start 364; Stop 388
cacgataatcggcaagtagaactaa

SEQ ID NO: 315885 - DNA, 25 bp, Artificial
  probe
  misc_feature (1)..(25): SEQ ID NO: 2127; WAN024GMG; Start 233; Stop 257
acacctacaatcctttgctcatcaa

SEQ ID NO: 315886 - DNA, 25 bp, Artificial
  probe
  misc_feature (1)..(25): SEQ ID NO: 2127; WAN024GMG; Start 513; Stop 537
tacctaccaactcttgacacgctac

SEQ ID NO: 315887 - DNA, 25 bp, Artificial
  probe
  misc_feature (1)..(25): SEQ ID NO: 2127; WAN024GMG; Start 363; Stop 387
acacgataatcggcaagtagaacta

SEQ ID NO: 315888 - DNA, 25 bp, Artificial
  probe
  misc_feature (1)..(25): SEQ ID NO: 2127; WAN024GMG; Start 261; Stop 285
atttgccaaatcattatcacttcgc

SEQ ID NO: 315889 - DNA, 25 bp, Artificial
  probe
  misc_feature (1)..(25): SEQ ID NO: 2127; WAN024GMG; Start 260; Stop 284
aatttgccaaatcattatcacttcg

SEQ ID NO: 315890 - DNA, 25 bp, Artificial
  probe
  misc_feature (1)..(25): SEQ ID NO: 2127; WAN024GMG; Start 226; Stop 250
aaagtttacacctacaatcctttgc

SEQ ID NO: 315891 - DNA, 25 bp, Artificial
  probe
  misc_feature (1)..(25): SEQ ID NO: 2127; WAN024GMG; Start 242; Stop 266
atcctttgctcatcaagaaatttgc

SEQ ID NO: 315892 - DNA, 25 bp, Artificial
  probe
  misc_feature (1)..(25): SEQ ID NO: 2127; WAN024GMG; Start 245; Stop 269
ctttgctcatcaagaaatttgccaa

SEQ ID NO: 315893 - DNA, 25 bp, Artificial
  probe
  misc_feature (1)..(25): SEQ ID NO: 2127; WAN024GMG; Start 241; Stop 265
aatcctttgctcatcaagaaatttg

SEQ ID NO: 315894 - DNA, 25 bp, Artificial
  probe
  misc_feature (1)..(25): SEQ ID NO: 2127; WAN024GMG; Start 240; Stop 264
caatcctttgctcatcaagaaattt

SEQ ID NO: 315895 - DNA, 25 bp, Artificial
  probe
  misc_feature (1)..(25): SEQ ID NO: 2127; WAN024GMG; Start 6; Stop 30
ttatgtgggcattgatgtcgctaaa

SEQ ID NO: 315896 - DNA, 25 bp, Artificial
  probe
  misc_feature (1)..(25): SEQ ID NO: 2127; WAN024GMG; Start 5; Stop 29
tttatgtgggcattgatgtcgctaa

SEQ ID NO: 315897 - DNA, 25 bp, Artificial
  probe
  misc_feature (1)..(25): SEQ ID NO: 2127; WAN024GMG; Start 247; Stop 271
ttgctcatcaagaaatttgccaaat

SEQ ID NO: 315898 - DNA, 25 bp, Artificial
  probe
  misc_feature (1)..(25): SEQ ID NO: 2128; WAN024GML; Start 251; Stop 275
tcatcaaggaatttgccaaatcatt

SEQ ID NO: 315899 - DNA, 25 bp, Artificial
  probe
  misc_feature (1)..(25): SEQ ID NO: 2128; WAN024GML; Start 250; Stop 274
ctcatcaaggaatttgccaaatcat

SEQ ID NO: 315900 - DNA, 25 bp, Artificial
  probe
  misc_feature (1)..(25): SEQ ID NO: 2128; WAN024GML; Start 257; Stop 281
aggaatttgccaaatcattatcact

SEQ ID NO: 315901 - DNA, 25 bp, Artificial
  probe
  misc_feature (1)..(25): SEQ ID NO: 2128; WAN024GML; Start 245; Stop 269
ctttgctcatcaaggaatttgccaa

SEQ ID NO: 315902 - DNA, 25 bp, Artificial
  probe
  misc_feature (1)..(25): SEQ ID NO: 2128; WAN024GML; Start 258; Stop 282
ggaatttgccaaatcattatcactt

SEQ ID NO: 315903 - DNA, 25 bp, Artificial
  probe
  misc_feature (1)..(25): SEQ ID NO: 2128; WAN024GML; Start 256; Stop 280
aaggaatttgccaaatcattatcac

SEQ ID NO: 315904 - DNA, 25 bp, Artificial
  probe
  misc_feature (1)..(25): SEQ ID NO: 2128; WAN024GML; Start 255; Stop 279
caaggaatttgccaaatcattatca

SEQ ID NO: 315905 - DNA, 25 bp, Artificial
  probe
  misc_feature (1)..(25): SEQ ID NO: 2128; WAN024GML; Start 252; Stop 276
catcaaggaatttgccaaatcatta

SEQ ID NO: 315906 - DNA, 25 bp, Artificial
  probe
  misc_feature (1)..(25): SEQ ID NO: 2128; WAN024GML; Start 254; Stop 278
tcaaggaatttgccaaatcattatc

SEQ ID NO: 315907 - DNA, 25 bp, Artificial
  probe
  misc_feature (1)..(25): SEQ ID NO: 2128; WAN024GML; Start 253; Stop 277
atcaaggaatttgccaaatcattat

SEQ ID NO: 315908 - DNA, 25 bp, Artificial
  probe
  misc_feature (1)..(25): SEQ ID NO: 2128; WAN024GML; Start 247; Stop 271
ttgctcatcaaggaatttgccaaat

SEQ ID NO: 315909 - DNA, 25 bp, Artificial
  probe
  misc_feature (1)..(25): SEQ ID NO: 2128; WAN024GML; Start 259; Stop 283
gaatttgccaaatcattatcacttc

SEQ ID NO: 315910 - DNA, 25 bp, Artificial
  probe
  misc_feature (1)..(25): SEQ ID NO: 2128; WAN024GML; Start 249; Stop 273
gctcatcaaggaatttgccaaatca

SEQ ID NO: 315911 - DNA, 25 bp, Artificial
  probe
  misc_feature (1)..(25): SEQ ID NO: 2128; WAN024GML; Start 248; Stop 272
tgctcatcaaggaatttgccaaatc

SEQ ID NO: 315912 - DNA, 25 bp, Artificial
  probe
  misc_feature (1)..(25): SEQ ID NO: 2128; WAN024GML; Start 246; Stop 270
tttgctcatcaaggaatttgccaaa

SEQ ID NO: 315913 - DNA, 25 bp, Artificial
  probe
  misc_feature (1)..(25): SEQ ID NO: 2128; WAN024GML; Start 244; Stop 268
cctttgctcatcaaggaatttgcca

SEQ ID NO: 315914 - DNA, 25 bp, Artificial
  probe
  misc_feature (1)..(25): SEQ ID NO: 2129; WAN024CPN; Start 2; Stop 26
tgctttctgtgtggaattactataa

SEQ ID NO: 315915 - DNA, 25 bp, Artificial
  probe
  misc_feature (1)..(25): SEQ ID NO: 2129; WAN024CPN; Start 1; Stop 25
atgctttctgtgtggaattactata

SEQ ID NO: 315916 - DNA, 25 bp, Artificial
  probe
  misc_feature (1)..(25): SEQ ID NO: 2129; WAN024CPN; Start 3; Stop 27
gctttctgtgtggaattactataaa

SEQ ID NO: 315917 - DNA, 25 bp, Artificial
  probe
  misc_feature (1)..(25): SEQ ID NO: 2129; WAN024CPN; Start 4; Stop 28
ctttctgtgtggaattactataaat

SEQ ID NO: 315918 - DNA, 25 bp, Artificial
  probe
  misc_feature (1)..(25): SEQ ID NO: 2130; WAN024CNU; Start 12; Stop 36
ttctcgacgaatgactctactacat

SEQ ID NO: 315919 - DNA, 25 bp, Artificial
  probe
  misc_feature (1)..(25): SEQ ID NO: 2130; WAN024CNU; Start 10; Stop 34
tcttctcgacgaatgactctactac

SEQ ID NO: 315920 - DNA, 25 bp, Artificial
  probe
  misc_feature (1)..(25): SEQ ID NO: 2130; WAN024CNU; Start 11; Stop 35
cttctcgacgaatgactctactaca

SEQ ID NO: 315921 - DNA, 25 bp, Artificial
  probe
  misc_feature (1)..(25): SEQ ID NO: 2130; WAN024CNU; Start 9; Stop 33
gtcttctcgacgaatgactctacta

SEQ ID NO: 315922 - DNA, 25 bp, Artificial
  probe
  misc_feature (1)..(25): SEQ ID NO: 2130; WAN024CNU; Start 13; Stop 37
tctcgacgaatgactctactacatt

SEQ ID NO: 315923 - DNA, 25 bp, Artificial
  probe
  misc_feature (1)..(25): SEQ ID NO: 2130; WAN024CNU; Start 6; Stop 30
ttggtcttctcgacgaatgactcta

SEQ ID NO: 315924 - DNA, 25 bp, Artificial
  probe
  misc_feature (1)..(25): SEQ ID NO: 2130; WAN024CNU; Start 8; Stop 32
ggtcttctcgacgaatgactctact

SEQ ID NO: 315925 - DNA, 25 bp, Artificial
  probe
  misc_feature (1)..(25): SEQ ID NO: 2130; WAN024CNU; Start 7; Stop 31
tggtcttctcgacgaatgactctac

SEQ ID NO: 315926 - DNA, 25 bp, Artificial
  probe
  misc_feature (1)..(25): SEQ ID NO: 2130; WAN024CNU; Start 4; Stop 28
ctttggtcttctcgacgaatgactc

SEQ ID NO: 315927 - DNA, 25 bp, Artificial
  probe
  misc_feature (1)..(25): SEQ ID NO: 2130; WAN024CNU; Start 5; Stop 29
tttggtcttctcgacgaatgactct

SEQ ID NO: 315928 - DNA, 25 bp, Artificial
  probe
  misc_feature (1)..(25): SEQ ID NO: 2130; WAN024CNU; Start 1; Stop 25
atgctttggtcttctcgacgaatga

SEQ ID NO: 315929 - DNA, 25 bp, Artificial
  probe
  misc_feature (1)..(25): SEQ ID NO: 2130; WAN024CNU; Start 3; Stop 27
gctttggtcttctcgacgaatgact

SEQ ID NO: 315930 - DNA, 25 bp, Artificial
  probe
  misc_feature (1)..(25): SEQ ID NO: 2130; WAN024CNU; Start 64; Stop 88
tcaatgatgcaccgttttcgtcaag

SEQ ID NO: 315931 - DNA, 25 bp, Artificial
  probe
  misc_feature (1)..(25): SEQ ID NO: 2130; WAN024CNU; Start 63; Stop 87
gtcaatgatgcaccgttttcgtcaa

SEQ ID NO: 315932 - DNA, 25 bp, Artificial
  probe
  misc_feature (1)..(25): SEQ ID NO: 2130; WAN024CNU; Start 67; Stop 91
atgatgcaccgttttcgtcaaggta

SEQ ID NO: 315933 - DNA, 25 bp, Artificial
  probe
  misc_feature (1)..(25): SEQ ID NO: 2131; WAN024CCZ; Start 820; Stop 844
atcagttacatcactcgttatatgg

SEQ ID NO: 315934 - DNA, 25 bp, Artificial
  probe
  misc_feature (1)..(25): SEQ ID NO: 2131; WAN024CCZ; Start 875; Stop 899
ttatagatccgatacgacgtaacaa

SEQ ID NO: 315935 - DNA, 25 bp, Artificial
  probe
  misc_feature (1)..(25): SEQ ID NO: 2131; WAN024CCZ; Start 872; Stop 896
ttgttatagatccgatacgacgtaa

SEQ ID NO: 315936 - DNA, 25 bp, Artificial
  probe
  misc_feature (1)..(25): SEQ ID NO: 2131; WAN024CCZ; Start 606; Stop 630
ctatgcaatcattagtggtggtaga

SEQ ID NO: 315937 - DNA, 25 bp, Artificial
  probe
  misc_feature (1)..(25): SEQ ID NO: 2131; WAN024CCZ; Start 605; Stop 629
tctatgcaatcattagtggtggtag

SEQ ID NO: 315938 - DNA, 25 bp, Artificial
  probe
  misc_feature (1)..(25): SEQ ID NO: 2131; WAN024CCZ; Start 604; Stop 628
gtctatgcaatcattagtggtggta

SEQ ID NO: 315939 - DNA, 25 bp, Artificial
  probe
  misc_feature (1)..(25): SEQ ID NO: 2131; WAN024CCZ; Start 1016; Stop 1040
ggaatgtgtatactgcaattagacg

SEQ ID NO: 315940 - DNA, 25 bp, Artificial
  probe
  misc_feature (1)..(25): SEQ ID NO: 2131; WAN024CCZ; Start 1049; Stop 1073
cagactttggtgtaattggtattgt

SEQ ID NO: 315941 - DNA, 25 bp, Artificial
  probe
  misc_feature (1)..(25): SEQ ID NO: 2131; WAN024CCZ; Start 1048; Stop 1072
tcagactttggtgtaattggtattg

SEQ ID NO: 315942 - DNA, 25 bp, Artificial
  probe
  misc_feature (1)..(25): SEQ ID NO: 2131; WAN024CCZ; Start 822; Stop 846
cagttacatcactcgttatatggga

SEQ ID NO: 315943 - DNA, 25 bp, Artificial
  probe
  misc_feature (1)..(25): SEQ ID NO: 2131; WAN024CCZ; Start 821; Stop 845
tcagttacatcactcgttatatggg

SEQ ID NO: 315944 - DNA, 25 bp, Artificial
  probe
  misc_feature (1)..(25): SEQ ID NO: 2131; WAN024CCZ; Start 602; Stop 626
ttgtctatgcaatcattagtggtgg

SEQ ID NO: 315945 - DNA, 25 bp, Artificial
  probe
  misc_feature (1)..(25): SEQ ID NO: 2131; WAN024CCZ; Start 1047; Stop 1071
ttcagactttggtgtaattggtatt

SEQ ID NO: 315946 - DNA, 25 bp, Artificial
  probe
  misc_feature (1)..(25): SEQ ID NO: 2131; WAN024CCZ; Start 1044; Stop 1068
ttattcagactttggtgtaattggt

SEQ ID NO: 315947 - DNA, 25 bp, Artificial
  probe
  misc_feature (1)..(25): SEQ ID NO: 2131; WAN024CCZ; Start 823; Stop 847
agttacatcactcgttatatgggag

SEQ ID NO: 315948 - DNA, 25 bp, Artificial
  probe
  misc_feature (1)..(25): SEQ ID NO: 2131; WAN024CCZ; Start 824; Stop 848
gttacatcactcgttatatgggagg

SEQ ID NO: 315949 - DNA, 25 bp, Artificial
  probe
  misc_feature (1)..(25): SEQ ID NO: 2131; WAN024CCZ; Start 1046; Stop 1070
attcagactttggtgtaattggtat

SEQ ID NO: 315950 - DNA, 25 bp, Artificial
  probe
  misc_feature (1)..(25): SEQ ID NO: 2131; WAN024CCZ; Start 1050; Stop 1074
agactttggtgtaattggtattgta

SEQ ID NO: 315951 - DNA, 25 bp, Artificial
  probe
  misc_feature (1)..(25): SEQ ID NO: 2131; WAN024CCZ; Start 874; Stop 898
gttatagatccgatacgacgtaaca

SEQ ID NO: 315952 - DNA, 25 bp, Artificial
  probe
  misc_feature (1)..(25): SEQ ID NO: 2131; WAN024CCZ; Start 873; Stop 897
tgttatagatccgatacgacgtaac

SEQ ID NO: 315953 - DNA, 25 bp, Artificial
  probe
  misc_feature (1)..(25): SEQ ID NO: 2131; WAN024CCZ; Start 603; Stop 627
tgtctatgcaatcattagtggtggt

SEQ ID NO: 315954 - DNA, 25 bp, Artificial
  probe
  misc_feature (1)..(25): SEQ ID NO: 2131; WAN024CCZ; Start 1045; Stop 1069
tattcagactttggtgtaattggta

SEQ ID NO: 315955 - DNA, 25 bp, Artificial
  probe
  misc_feature (1)..(25): SEQ ID NO: 2131; WAN024CCZ; Start 869; Stop 893
tatttgttatagatccgatacgacg

SEQ ID NO: 315956 - DNA, 25 bp, Artificial
  probe
  misc_feature (1)..(25): SEQ ID NO: 2131; WAN024CCZ; Start 920; Stop 944
tttcgggaatttatgagatgcttgc

SEQ ID NO: 315957 - DNA, 25 bp, Artificial
  probe
  misc_feature (1)..(25): SEQ ID NO: 2131; WAN024CCZ; Start 1051; Stop 1075
gactttggtgtaattggtattgtaa

SEQ ID NO: 315958 - DNA, 25 bp, Artificial
  probe
  misc_feature (1)..(25): SEQ ID NO: 2131; WAN024CCZ; Start 1043; Stop 1067
attattcagactttggtgtaattgg

SEQ ID NO: 315959 - DNA, 25 bp, Artificial
  probe
  misc_feature (1)..(25): SEQ ID NO: 2131; WAN024CCZ; Start 870; Stop 894
atttgttatagatccgatacgacgt

SEQ ID NO: 315960 - DNA, 25 bp, Artificial
  probe
  misc_feature (1)..(25): SEQ ID NO: 2131; WAN024CCZ; Start 894; Stop 918
taacaaagaactaggtgcagaaact

SEQ ID NO: 315961 - DNA, 25 bp, Artificial
  probe
  misc_feature (1)..(25): SEQ ID NO: 2131; WAN024CCZ; Start 893; Stop 917
gtaacaaagaactaggtgcagaaac

SEQ ID NO: 315962 - DNA, 25 bp, Artificial
  probe
  misc_feature (1)..(25): SEQ ID NO: 2131; WAN024CCZ; Start 885; Stop 909
gatacgacgtaacaaagaactaggt

SEQ ID NO: 315963 - DNA, 25 bp, Artificial
  probe
  misc_feature (1)..(25): SEQ ID NO: 2131; WAN024CCZ; Start 877; Stop 901
atagatccgatacgacgtaacaaag

SEQ ID NO: 315964 - DNA, 25 bp, Artificial
  probe
  misc_feature (1)..(25): SEQ ID NO: 2131; WAN024CCZ; Start 886; Stop 910
atacgacgtaacaaagaactaggtg

SEQ ID NO: 315965 - DNA, 25 bp, Artificial
  probe
  misc_feature (1)..(25): SEQ ID NO: 2131; WAN024CCZ; Start 876; Stop 900
tatagatccgatacgacgtaacaaa

SEQ ID NO: 315966 - DNA, 25 bp, Artificial
  probe
  misc_feature (1)..(25): SEQ ID NO: 2132; WAN024CAV; Start 34; Stop 58
tctcttgaaatgaaaccttatcttc

SEQ ID NO: 315967 - DNA, 25 bp, Artificial
  probe
  misc_feature (1)..(25): SEQ ID NO: 2132; WAN024CAV; Start 33; Stop 57
ttctcttgaaatgaaaccttatctt

SEQ ID NO: 315968 - DNA, 25 bp, Artificial
  probe
  misc_feature (1)..(25): SEQ ID NO: 2132; WAN024CAV; Start 35; Stop 59
ctcttgaaatgaaaccttatcttca

SEQ ID NO: 315969 - DNA, 25 bp, Artificial
  probe
  misc_feature (1)..(25): SEQ ID NO: 2132; WAN024CAV; Start 32; Stop 56
tttctcttgaaatgaaaccttatct

SEQ ID NO: 315970 - DNA, 25 bp, Artificial
  probe
  misc_feature (1)..(25): SEQ ID NO: 2132; WAN024CAV; Start 24; Stop 48
tgctgaattttctcttgaaatgaaa

SEQ ID NO: 315971 - DNA, 25 bp, Artificial
  probe
  misc_feature (1)..(25): SEQ ID NO: 2132; WAN024CAV; Start 23; Stop 47
ttgctgaattttctcttgaaatgaa

SEQ ID NO: 315972 - DNA, 25 bp, Artificial
  probe
  misc_feature (1)..(25): SEQ ID NO: 2132; WAN024CAV; Start 22; Stop 46
tttgctgaattttctcttgaaatga

SEQ ID NO: 315973 - DNA, 25 bp, Artificial
  probe
  misc_feature (1)..(25): SEQ ID NO: 2132; WAN024CAV; Start 25; Stop 49
gctgaattttctcttgaaatgaaac

SEQ ID NO: 315974 - DNA, 25 bp, Artificial
  probe
  misc_feature (1)..(25): SEQ ID NO: 2132; WAN024CAV; Start 27; Stop 51
tgaattttctcttgaaatgaaacct

SEQ ID NO: 315975 - DNA, 25 bp, Artificial
  probe
  misc_feature (1)..(25): SEQ ID NO: 2132; WAN024CAV; Start 26; Stop 50
ctgaattttctcttgaaatgaaacc

SEQ ID NO: 315976 - DNA, 25 bp, Artificial
  probe
  misc_feature (1)..(25): SEQ ID NO: 2132; WAN024CAV; Start 21; Stop 45
atttgctgaattttctcttgaaatg

SEQ ID NO: 315977 - DNA, 25 bp, Artificial
  probe
  misc_feature (1)..(25): SEQ ID NO: 2132; WAN024CAV; Start 41; Stop 65
aaatgaaaccttatcttcatctcgc

SEQ ID NO: 315978 - DNA, 25 bp, Artificial
  probe
  misc_feature (1)..(25): SEQ ID NO: 2132; WAN024CAV; Start 45; Stop 69
gaaaccttatcttcatctcgcgctt

SEQ ID NO: 315979 - DNA, 25 bp, Artificial
  probe
  misc_feature (1)..(25): SEQ ID NO: 2132; WAN024CAV; Start 47; Stop 71
aaccttatcttcatctcgcgcttgt

SEQ ID NO: 315980 - DNA, 25 bp, Artificial
  probe
  misc_feature (1)..(25): SEQ ID NO: 2132; WAN024CAV; Start 28; Stop 52
gaattttctcttgaaatgaaacctt

SEQ ID NO: 315981 - DNA, 25 bp, Artificial
  probe
  misc_feature (1)..(25): SEQ ID NO: 2132; WAN024CAV; Start 46; Stop 70
aaaccttatcttcatctcgcgcttg

SEQ ID NO: 315982 - DNA, 25 bp, Artificial
  probe
  misc_feature (1)..(25): SEQ ID NO: 2132; WAN024CAV; Start 18; Stop 42
aatatttgctgaattttctcttgaa

SEQ ID NO: 315983 - DNA, 25 bp, Artificial
  probe
  misc_feature (1)..(25): SEQ ID NO: 2132; WAN024CAV; Start 40; Stop 64
gaaatgaaaccttatcttcatctcg

SEQ ID NO: 315984 - DNA, 25 bp, Artificial
  probe
  misc_feature (1)..(25): SEQ ID NO: 2132; WAN024CAV; Start 48; Stop 72
accttatcttcatctcgcgcttgtc

SEQ ID NO: 315985 - DNA, 25 bp, Artificial
  probe
  misc_feature (1)..(25): SEQ ID NO: 2132; WAN024CAV; Start 31; Stop 55
ttttctcttgaaatgaaaccttatc

SEQ ID NO: 315986 - DNA, 25 bp, Artificial
  probe
  misc_feature (1)..(25): SEQ ID NO: 2132; WAN024CAV; Start 20; Stop 44
tatttgctgaattttctcttgaaat

SEQ ID NO: 315987 - DNA, 25 bp, Artificial
  probe
  misc_feature (1)..(25): SEQ ID NO: 2132; WAN024CAV; Start 19; Stop 43
atatttgctgaattttctcttgaaa

SEQ ID NO: 315988 - DNA, 25 bp, Artificial
  probe
  misc_feature (1)..(25): SEQ ID NO: 2132; WAN024CAV; Start 39; Stop 63
tgaaatgaaaccttatcttcatctc

SEQ ID NO: 315989 - DNA, 25 bp, Artificial
  probe
  misc_feature (1)..(25): SEQ ID NO: 2132; WAN024CAV; Start 29; Stop 53
aattttctcttgaaatgaaacctta

SEQ ID NO: 315990 - DNA, 25 bp, Artificial
  probe
  misc_feature (1)..(25): SEQ ID NO: 2132; WAN024CAV; Start 38; Stop 62
ttgaaatgaaaccttatcttcatct

SEQ ID NO: 315991 - DNA, 25 bp, Artificial
  probe
  misc_feature (1)..(25): SEQ ID NO: 2132; WAN024CAV; Start 36; Stop 60
tcttgaaatgaaaccttatcttcat

SEQ ID NO: 315992 - DNA, 25 bp, Artificial
  probe
  misc_feature (1)..(25): SEQ ID NO: 2132; WAN024CAV; Start 30; Stop 54
attttctcttgaaatgaaaccttat

SEQ ID NO: 315993 - DNA, 25 bp, Artificial
  probe
  misc_feature (1)..(25): SEQ ID NO: 2132; WAN024CAV; Start 37; Stop 61
cttgaaatgaaaccttatcttcatc

SEQ ID NO: 315994 - DNA, 25 bp, Artificial
  probe
  misc_feature (1)..(25): SEQ ID NO: 2132; WAN024CAV; Start 42; Stop 66
aatgaaaccttatcttcatctcgcg

SEQ ID NO: 315995 - DNA, 25 bp, Artificial
  probe
  misc_feature (1)..(25): SEQ ID NO: 2132; WAN024CAV; Start 17; Stop 41
aaatatttgctgaattttctcttga

SEQ ID NO: 315996 - DNA, 25 bp, Artificial
  probe
  misc_feature (1)..(25): SEQ ID NO: 2132; WAN024CAV; Start 44; Stop 68
tgaaaccttatcttcatctcgcgct

SEQ ID NO: 315997 - DNA, 25 bp, Artificial
  probe
  misc_feature (1)..(25): SEQ ID NO: 2132; WAN024CAV; Start 16; Stop 40
gaaatatttgctgaattttctcttg

SEQ ID NO: 315998 - DNA, 25 bp, Artificial
  probe
  misc_feature (1)..(25): SEQ ID NO: 2132; WAN024CAV; Start 43; Stop 67
atgaaaccttatcttcatctcgcgc

SEQ ID NO: 315999 - DNA, 25 bp, Artificial
  probe
  misc_feature (1)..(25): SEQ ID NO: 2133; WAN024DYG; Start 178; Stop 202
aatatcattgcctacaccgacttag

SEQ ID NO: 316000 - DNA, 25 bp, Artificial
  probe
  misc_feature (1)..(25): SEQ ID NO: 2133; WAN024DYG; Start 130; Stop 154
acacaccatactaataagcactact

SEQ ID NO: 316001 - DNA, 25 bp, Artificial
  probe
  misc_feature (1)..(25): SEQ ID NO: 2133; WAN024DYG; Start 377; Stop 401
ttcctgaacatctccgtagtgatat

SEQ ID NO: 316002 - DNA, 25 bp, Artificial
  probe
  misc_feature (1)..(25): SEQ ID NO: 2133; WAN024DYG; Start 376; Stop 400
attcctgaacatctccgtagtgata

SEQ ID NO: 316003 - DNA, 25 bp, Artificial
  probe
  misc_feature (1)..(25): SEQ ID NO: 2133; WAN024DYG; Start 375; Stop 399
aattcctgaacatctccgtagtgat

SEQ ID NO: 316004 - DNA, 25 bp, Artificial
  probe
  misc_feature (1)..(25): SEQ ID NO: 2133; WAN024DYG; Start 131; Stop 155
cacaccatactaataagcactactt

SEQ ID NO: 316005 - DNA, 25 bp, Artificial
  probe
  misc_feature (1)..(25): SEQ ID NO: 2133; WAN024DYG; Start 129; Stop 153
tacacaccatactaataagcactac

SEQ ID NO: 316006 - DNA, 25 bp, Artificial
  probe
  misc_feature (1)..(25): SEQ ID NO: 2133; WAN024DYG; Start 127; Stop 151
aatacacaccatactaataagcact

SEQ ID NO: 316007 - DNA, 25 bp, Artificial
  probe
  misc_feature (1)..(25): SEQ ID NO: 2133; WAN024DYG; Start 179; Stop 203
atatcattgcctacaccgacttagc

SEQ ID NO: 316008 - DNA, 25 bp, Artificial
  probe
  misc_feature (1)..(25): SEQ ID NO: 2133; WAN024DYG; Start 324; Stop 348
gggattagaacctgatagccataaa

SEQ ID NO: 316009 - DNA, 25 bp, Artificial
  probe
  misc_feature (1)..(25): SEQ ID NO: 2133; WAN024DYG; Start 177; Stop 201
aaatatcattgcctacaccgactta

SEQ ID NO: 316010 - DNA, 25 bp, Artificial
  probe
  misc_feature (1)..(25): SEQ ID NO: 2133; WAN024DYG; Start 330; Stop 354
agaacctgatagccataaacgatta

SEQ ID NO: 316011 - DNA, 25 bp, Artificial
  probe
  misc_feature (1)..(25): SEQ ID NO: 2133; WAN024DYG; Start 329; Stop 353
tagaacctgatagccataaacgatt

SEQ ID NO: 316012 - DNA, 25 bp, Artificial
  probe
  misc_feature (1)..(25): SEQ ID NO: 2133; WAN024DYG; Start 328; Stop 352
ttagaacctgatagccataaacgat

SEQ ID NO: 316013 - DNA, 25 bp, Artificial
  probe
  misc_feature (1)..(25): SEQ ID NO: 2133; WAN024DYG; Start 327; Stop 351
attagaacctgatagccataaacga

SEQ ID NO: 316014 - DNA, 25 bp, Artificial
  probe
  misc_feature (1)..(25): SEQ ID NO: 2133; WAN024DYG; Start 617; Stop 641
gtcttggatttggtgataatgctaa

SEQ ID NO: 316015 - DNA, 25 bp, Artificial
  probe
  misc_feature (1)..(25): SEQ ID NO: 2133; WAN024DYG; Start 534; Stop 558
ttataccaatacggatgttatcggg

SEQ ID NO: 316016 - DNA, 25 bp, Artificial
  probe
  misc_feature (1)..(25): SEQ ID NO: 2133; WAN024DYG; Start 445; Stop 469
cgtgacctaactttaataactgctg

SEQ ID NO: 316017 - DNA, 25 bp, Artificial
  probe
  misc_feature (1)..(25): SEQ ID NO: 2133; WAN024DYG; Start 440; Stop 464
ttgtgcgtgacctaactttaataac

SEQ ID NO: 316018 - DNA, 25 bp, Artificial
  probe
  misc_feature (1)..(25): SEQ ID NO: 2133; WAN024DYG; Start 326; Stop 350
gattagaacctgatagccataaacg

SEQ ID NO: 316019 - DNA, 25 bp, Artificial
  probe
  misc_feature (1)..(25): SEQ ID NO: 2133; WAN024DYG; Start 946; Stop 970
ggaaccaatatcaaagatgccattt

SEQ ID NO: 316020 - DNA, 25 bp, Artificial
  probe
  misc_feature (1)..(25): SEQ ID NO: 2133; WAN024DYG; Start 447; Stop 471
tgacctaactttaataactgctgct

SEQ ID NO: 316021 - DNA, 25 bp, Artificial
  probe
  misc_feature (1)..(25): SEQ ID NO: 2133; WAN024DYG; Start 446; Stop 470
gtgacctaactttaataactgctgc

SEQ ID NO: 316022 - DNA, 25 bp, Artificial
  probe
  misc_feature (1)..(25): SEQ ID NO: 2133; WAN024DYG; Start 442; Stop 466
gtgcgtgacctaactttaataactg

SEQ ID NO: 316023 - DNA, 25 bp, Artificial
  probe
  misc_feature (1)..(25): SEQ ID NO: 2133; WAN024DYG; Start 438; Stop 462
cattgtgcgtgacctaactttaata

SEQ ID NO: 316024 - DNA, 25 bp, Artificial
  probe
  misc_feature (1)..(25): SEQ ID NO: 2133; WAN024DYG; Start 912; Stop 936
cattacacaggctatttaccaagtt

SEQ ID NO: 316025 - DNA, 25 bp, Artificial
  probe
  misc_feature (1)..(25): SEQ ID NO: 2133; WAN024DYG; Start 519; Stop 543
tcactacttccgactttataccaat

SEQ ID NO: 316026 - DNA, 25 bp, Artificial
  probe
  misc_feature (1)..(25): SEQ ID NO: 2133; WAN024DYG; Start 518; Stop 542
atcactacttccgactttataccaa

SEQ ID NO: 316027 - DNA, 25 bp, Artificial
  probe
  misc_feature (1)..(25): SEQ ID NO: 2133; WAN024DYG; Start 517; Stop 541
aatcactacttccgactttatacca

SEQ ID NO: 316028 - DNA, 25 bp, Artificial
  probe
  misc_feature (1)..(25): SEQ ID NO: 2133; WAN024DYG; Start 441; Stop 465
tgtgcgtgacctaactttaataact

SEQ ID NO: 316029 - DNA, 25 bp, Artificial
  probe
  misc_feature (1)..(25): SEQ ID NO: 2133; WAN024DYG; Start 911; Stop 935
ccattacacaggctatttaccaagt

SEQ ID NO: 316030 - DNA, 25 bp, Artificial
  probe
  misc_feature (1)..(25): SEQ ID NO: 2133; WAN024DYG; Start 616; Stop 640
ggtcttggatttggtgataatgcta

SEQ ID NO: 316031 - DNA, 25 bp, Artificial
  probe
  misc_feature (1)..(25): SEQ ID NO: 2133; WAN024DYG; Start 128; Stop 152
atacacaccatactaataagcacta

SEQ ID NO: 316032 - DNA, 25 bp, Artificial
  probe
  misc_feature (1)..(25): SEQ ID NO: 2134; WAN024GFS; Start 216; Stop 240
taggaagaagataatgattggtgcc

SEQ ID NO: 316033 - DNA, 25 bp, Artificial
  probe
  misc_feature (1)..(25): SEQ ID NO: 2134; WAN024GFS; Start 297; Stop 321
gctacctgtctggatgattatgata

SEQ ID NO: 316034 - DNA, 25 bp, Artificial
  probe
  misc_feature (1)..(25): SEQ ID NO: 2134; WAN024GFS; Start 220; Stop 244
aagaagataatgattggtgccgatt

SEQ ID NO: 316035 - DNA, 25 bp, Artificial
  probe
  misc_feature (1)..(25): SEQ ID NO: 2134; WAN024GFS; Start 808; Stop 832
gcaggaggcttattattaggaagat

SEQ ID NO: 316036 - DNA, 25 bp, Artificial
  probe
  misc_feature (1)..(25): SEQ ID NO: 2134; WAN024GFS; Start 135; Stop 159
cttgtctatggcttcattagtaggt

SEQ ID NO: 316037 - DNA, 25 bp, Artificial
  probe
  misc_feature (1)..(25): SEQ ID NO: 2134; WAN024GFS; Start 132; Stop 156
ggtcttgtctatggcttcattagta

SEQ ID NO: 316038 - DNA, 25 bp, Artificial
  probe
  misc_feature (1)..(25): SEQ ID NO: 2134; WAN024GFS; Start 134; Stop 158
tcttgtctatggcttcattagtagg

SEQ ID NO: 316039 - DNA, 25 bp, Artificial
  probe
  misc_feature (1)..(25): SEQ ID NO: 2134; WAN024GFS; Start 130; Stop 154
atggtcttgtctatggcttcattag

SEQ ID NO: 316040 - DNA, 25 bp, Artificial
  probe
  misc_feature (1)..(25): SEQ ID NO: 2134; WAN024GFS; Start 129; Stop 153
gatggtcttgtctatggcttcatta

SEQ ID NO: 316041 - DNA, 25 bp, Artificial
  probe
  misc_feature (1)..(25): SEQ ID NO: 2134; WAN024GFS; Start 136; Stop 160
ttgtctatggcttcattagtaggtt

SEQ ID NO: 316042 - DNA, 25 bp, Artificial
  probe
  misc_feature (1)..(25): SEQ ID NO: 2134; WAN024GFS; Start 219; Stop 243
gaagaagataatgattggtgccgat

SEQ ID NO: 316043 - DNA, 25 bp, Artificial
  probe
  misc_feature (1)..(25): SEQ ID NO: 2134; WAN024GFS; Start 133; Stop 157
gtcttgtctatggcttcattagtag

SEQ ID NO: 316044 - DNA, 25 bp, Artificial
  probe
  misc_feature (1)..(25): SEQ ID NO: 2134; WAN024GFS; Start 131; Stop 155
tggtcttgtctatggcttcattagt

SEQ ID NO: 316045 - DNA, 25 bp, Artificial
  probe
  misc_feature (1)..(25): SEQ ID NO: 2134; WAN024GFS; Start 300; Stop 324
acctgtctggatgattatgatagta

SEQ ID NO: 316046 - DNA, 25 bp, Artificial
  probe
  misc_feature (1)..(25): SEQ ID NO: 2134; WAN024GFS; Start 299; Stop 323
tacctgtctggatgattatgatagt

SEQ ID NO: 316047 - DNA, 25 bp, Artificial
  probe
  misc_feature (1)..(25): SEQ ID NO: 2134; WAN024GFS; Start 298; Stop 322
ctacctgtctggatgattatgatag

SEQ ID NO: 316048 - DNA, 25 bp, Artificial
  probe
  misc_feature (1)..(25): SEQ ID NO: 2134; WAN024GFS; Start 809; Stop 833
caggaggcttattattaggaagatt

SEQ ID NO: 316049 - DNA, 25 bp, Artificial
  probe
  misc_feature (1)..(25): SEQ ID NO: 2134; WAN024GFS; Start 1059; Stop 1083
tatcatgtcacttgctatgccaatt

SEQ ID NO: 316050 - DNA, 25 bp, Artificial
  probe
  misc_feature (1)..(25): SEQ ID NO: 2134; WAN024GFS; Start 665; Stop 689
ttgccttattactcttaggaacact

SEQ ID NO: 316051 - DNA, 25 bp, Artificial
  probe
  misc_feature (1)..(25): SEQ ID NO: 2134; WAN024GFS; Start 296; Stop 320
agctacctgtctggatgattatgat

SEQ ID NO: 316052 - DNA, 25 bp, Artificial
  probe
  misc_feature (1)..(25): SEQ ID NO: 2134; WAN024GFS; Start 666; Stop 690
tgccttattactcttaggaacacta

SEQ ID NO: 316053 - DNA, 25 bp, Artificial
  probe
  misc_feature (1)..(25): SEQ ID NO: 2134; WAN024GFS; Start 1058; Stop 1082
gtatcatgtcacttgctatgccaat

SEQ ID NO: 316054 - DNA, 25 bp, Artificial
  probe
  misc_feature (1)..(25): SEQ ID NO: 2134; WAN024GFS; Start 389; Stop 413
tagtaccagaagaacagctaacgaa

SEQ ID NO: 316055 - DNA, 25 bp, Artificial
  probe
  misc_feature (1)..(25): SEQ ID NO: 2134; WAN024GFS; Start 295; Stop 319
gagctacctgtctggatgattatga

SEQ ID NO: 316056 - DNA, 25 bp, Artificial
  probe
  misc_feature (1)..(25): SEQ ID NO: 2134; WAN024GFS; Start 613; Stop 637
ataagggagatgaaagaaggagttg

SEQ ID NO: 316057 - DNA, 25 bp, Artificial
  probe
  misc_feature (1)..(25): SEQ ID NO: 2134; WAN024GFS; Start 301; Stop 325
cctgtctggatgattatgatagtat

SEQ ID NO: 316058 - DNA, 25 bp, Artificial
  probe
  misc_feature (1)..(25): SEQ ID NO: 2134; WAN024GFS; Start 222; Stop 246
gaagataatgattggtgccgattta

SEQ ID NO: 316059 - DNA, 25 bp, Artificial
  probe
  misc_feature (1)..(25): SEQ ID NO: 2134; WAN024GFS; Start 276; Stop 300
tattgttgcattctgtatggagcta

SEQ ID NO: 316060 - DNA, 25 bp, Artificial
  probe
  misc_feature (1)..(25): SEQ ID NO: 2134; WAN024GFS; Start 221; Stop 245
agaagataatgattggtgccgattt

SEQ ID NO: 316061 - DNA, 25 bp, Artificial
  probe
  misc_feature (1)..(25): SEQ ID NO: 2134; WAN024GFS; Start 218; Stop 242
ggaagaagataatgattggtgccga

SEQ ID NO: 316062 - DNA, 25 bp, Artificial
  probe
  misc_feature (1)..(25): SEQ ID NO: 2134; WAN024GFS; Start 217; Stop 241
aggaagaagataatgattggtgccg

SEQ ID NO: 316063 - DNA, 25 bp, Artificial
  probe
  misc_feature (1)..(25): SEQ ID NO: 2134; WAN024GFS; Start 612; Stop 636
cataagggagatgaaagaaggagtt

SEQ ID NO: 316064 - DNA, 25 bp, Artificial
  probe
  misc_feature (1)..(25): SEQ ID NO: 2134; WAN024GFS; Start 503; Stop 527
atgctattattgccatcgacgtatt

SEQ ID NO: 316065 - DNA, 25 bp, Artificial
  probe
  misc_feature (1)..(25): SEQ ID NO: 2135; WAN024EVD; Start 65; Stop 89
ctgtaaagttgggttcatctgaaac

SEQ ID NO: 316066 - DNA, 25 bp, Artificial
  probe
  misc_feature (1)..(25): SEQ ID NO: 2135; WAN024EVD; Start 76; Stop 100
ggttcatctgaaacgagagaagaaa

SEQ ID NO: 316067 - DNA, 25 bp, Artificial
  probe
  misc_feature (1)..(25): SEQ ID NO: 2135; WAN024EVD; Start 68; Stop 92
taaagttgggttcatctgaaacgag

SEQ ID NO: 316068 - DNA, 25 bp, Artificial
  probe
  misc_feature (1)..(25): SEQ ID NO: 2135; WAN024EVD; Start 7; Stop 31
aaattacagttctttctctcacaga

SEQ ID NO: 316069 - DNA, 25 bp, Artificial
  probe
  misc_feature (1)..(25): SEQ ID NO: 2135; WAN024EVD; Start 67; Stop 91
gtaaagttgggttcatctgaaacga

SEQ ID NO: 316070 - DNA, 25 bp, Artificial
  probe
  misc_feature (1)..(25): SEQ ID NO: 2135; WAN024EVD; Start 64; Stop 88
gctgtaaagttgggttcatctgaaa

SEQ ID NO: 316071 - DNA, 25 bp, Artificial
  probe
  misc_feature (1)..(25): SEQ ID NO: 2135; WAN024EVD; Start 66; Stop 90
tgtaaagttgggttcatctgaaacg

SEQ ID NO: 316072 - DNA, 25 bp, Artificial
  probe
  misc_feature (1)..(25): SEQ ID NO: 2135; WAN024EVD; Start 60; Stop 84
gaaagctgtaaagttgggttcatct

SEQ ID NO: 316073 - DNA, 25 bp, Artificial
  probe
  misc_feature (1)..(25): SEQ ID NO: 2135; WAN024EVD; Start 59; Stop 83
agaaagctgtaaagttgggttcatc

SEQ ID NO: 316074 - DNA, 25 bp, Artificial
  probe
  misc_feature (1)..(25): SEQ ID NO: 2135; WAN024EVD; Start 58; Stop 82
gagaaagctgtaaagttgggttcat

SEQ ID NO: 316075 - DNA, 25 bp, Artificial
  probe
  misc_feature (1)..(25): SEQ ID NO: 2135; WAN024EVD; Start 61; Stop 85
aaagctgtaaagttgggttcatctg

SEQ ID NO: 316076 - DNA, 25 bp, Artificial
  probe
  misc_feature (1)..(25): SEQ ID NO: 2135; WAN024EVD; Start 75; Stop 99
gggttcatctgaaacgagagaagaa

SEQ ID NO: 316077 - DNA, 25 bp, Artificial
  probe
  misc_feature (1)..(25): SEQ ID NO: 2135; WAN024EVD; Start 69; Stop 93
aaagttgggttcatctgaaacgaga

SEQ ID NO: 316078 - DNA, 25 bp, Artificial
  probe
  misc_feature (1)..(25): SEQ ID NO: 2135; WAN024EVD; Start 73; Stop 97
ttgggttcatctgaaacgagagaag

SEQ ID NO: 316079 - DNA, 25 bp, Artificial
  probe
  misc_feature (1)..(25): SEQ ID NO: 2135; WAN024EVD; Start 62; Stop 86
aagctgtaaagttgggttcatctga

SEQ ID NO: 316080 - DNA, 25 bp, Artificial
  probe
  misc_feature (1)..(25): SEQ ID NO: 2135; WAN024EVD; Start 63; Stop 87
agctgtaaagttgggttcatctgaa

SEQ ID NO: 316081 - DNA, 25 bp, Artificial
  probe
  misc_feature (1)..(25): SEQ ID NO: 2135; WAN024EVD; Start 57; Stop 81
agagaaagctgtaaagttgggttca

SEQ ID NO: 316082 - DNA, 25 bp, Artificial
  probe
  misc_feature (1)..(25): SEQ ID NO: 2135; WAN024EVD; Start 72; Stop 96
gttgggttcatctgaaacgagagaa

SEQ ID NO: 316083 - DNA, 25 bp, Artificial
  probe
  misc_feature (1)..(25): SEQ ID NO: 2135; WAN024EVD; Start 70; Stop 94
aagttgggttcatctgaaacgagag

SEQ ID NO: 316084 - DNA, 25 bp, Artificial
  probe
  misc_feature (1)..(25): SEQ ID NO: 2135; WAN024EVD; Start 80; Stop 104
catctgaaacgagagaagaaaacat

SEQ ID NO: 316085 - DNA, 25 bp, Artificial
  probe
  misc_feature (1)..(25): SEQ ID NO: 2135; WAN024EVD; Start 81; Stop 105
atctgaaacgagagaagaaaacatc

SEQ ID NO: 316086 - DNA, 25 bp, Artificial
  probe
  misc_feature (1)..(25): SEQ ID NO: 2135; WAN024EVD; Start 79; Stop 103
tcatctgaaacgagagaagaaaaca

SEQ ID NO: 316087 - DNA, 25 bp, Artificial
  probe
  misc_feature (1)..(25): SEQ ID NO: 2135; WAN024EVD; Start 85; Stop 109
gaaacgagagaagaaaacatcattc

SEQ ID NO: 316088 - DNA, 25 bp, Artificial
  probe
  misc_feature (1)..(25): SEQ ID NO: 2135; WAN024EVD; Start 56; Stop 80
cagagaaagctgtaaagttgggttc

SEQ ID NO: 316089 - DNA, 25 bp, Artificial
  probe
  misc_feature (1)..(25): SEQ ID NO: 2135; WAN024EVD; Start 83; Stop 107
ctgaaacgagagaagaaaacatcat

SEQ ID NO: 316090 - DNA, 25 bp, Artificial
  probe
  misc_feature (1)..(25): SEQ ID NO: 2135; WAN024EVD; Start 82; Stop 106
tctgaaacgagagaagaaaacatca

SEQ ID NO: 316091 - DNA, 25 bp, Artificial
  probe
  misc_feature (1)..(25): SEQ ID NO: 2135; WAN024EVD; Start 84; Stop 108
tgaaacgagagaagaaaacatcatt

SEQ ID NO: 316092 - DNA, 25 bp, Artificial
  probe
  misc_feature (1)..(25): SEQ ID NO: 2135; WAN024EVD; Start 48; Stop 72
gaaacaagcagagaaagctgtaaag

SEQ ID NO: 316093 - DNA, 25 bp, Artificial
  probe
  misc_feature (1)..(25): SEQ ID NO: 2135; WAN024EVD; Start 78; Stop 102
ttcatctgaaacgagagaagaaaac

SEQ ID NO: 316094 - DNA, 25 bp, Artificial
  probe
  misc_feature (1)..(25): SEQ ID NO: 2135; WAN024EVD; Start 77; Stop 101
gttcatctgaaacgagagaagaaaa

SEQ ID NO: 316095 - DNA, 25 bp, Artificial
  probe
  misc_feature (1)..(25): SEQ ID NO: 2135; WAN024EVD; Start 74; Stop 98
tgggttcatctgaaacgagagaaga

SEQ ID NO: 316096 - DNA, 25 bp, Artificial
  probe
  misc_feature (1)..(25): SEQ ID NO: 2135; WAN024EVD; Start 50; Stop 74
aacaagcagagaaagctgtaaagtt

SEQ ID NO: 316097 - DNA, 25 bp, Artificial
  probe
  misc_feature (1)..(25): SEQ ID NO: 2135; WAN024EVD; Start 49; Stop 73
aaacaagcagagaaagctgtaaagt

SEQ ID NO: 316098 - DNA, 25 bp, Artificial
  probe
  misc_feature (1)..(25): SEQ ID NO: 2136; WAN024FSZ; Start 13; Stop 37
gttagtattattctgcccgtctaca

SEQ ID NO: 316099 - DNA, 25 bp, Artificial
  probe
  misc_feature (1)..(25): SEQ ID NO: 2136; WAN024FSZ; Start 12; Stop 36
agttagtattattctgcccgtctac

SEQ ID NO: 316100 - DNA, 25 bp, Artificial
  probe
  misc_feature (1)..(25): SEQ ID NO: 2136; WAN024FSZ; Start 16; Stop 40
agtattattctgcccgtctacaatg

SEQ ID NO: 316101 - DNA, 25 bp, Artificial
  probe
  misc_feature (1)..(25): SEQ ID NO: 2136; WAN024FSZ; Start 14; Stop 38
ttagtattattctgcccgtctacaa

SEQ ID NO: 316102 - DNA, 25 bp, Artificial
  probe
  misc_feature (1)..(25): SEQ ID NO: 2136; WAN024FSZ; Start 552; Stop 576
agatagtgcgattatgtatttgctc

SEQ ID NO: 316103 - DNA, 25 bp, Artificial
  probe
  misc_feature (1)..(25): SEQ ID NO: 2136; WAN024FSZ; Start 10; Stop 34
ttagttagtattattctgcccgtct

SEQ ID NO: 316104 - DNA, 25 bp, Artificial
  probe
  misc_feature (1)..(25): SEQ ID NO: 2136; WAN024FSZ; Start 18; Stop 42
tattattctgcccgtctacaatgtc

SEQ ID NO: 316105 - DNA, 25 bp, Artificial
  probe
  misc_feature (1)..(25): SEQ ID NO: 2136; WAN024FSZ; Start 15; Stop 39
tagtattattctgcccgtctacaat

SEQ ID NO: 316106 - DNA, 25 bp, Artificial
  probe
  misc_feature (1)..(25): SEQ ID NO: 2136; WAN024FSZ; Start 29; Stop 53
ccgtctacaatgtcgaacagtatat

SEQ ID NO: 316107 - DNA, 25 bp, Artificial
  probe
  misc_feature (1)..(25): SEQ ID NO: 2136; WAN024FSZ; Start 17; Stop 41
gtattattctgcccgtctacaatgt

SEQ ID NO: 316108 - DNA, 25 bp, Artificial
  probe
  misc_feature (1)..(25): SEQ ID NO: 2136; WAN024FSZ; Start 551; Stop 575
aagatagtgcgattatgtatttgct

SEQ ID NO: 316109 - DNA, 25 bp, Artificial
  probe
  misc_feature (1)..(25): SEQ ID NO: 2136; WAN024FSZ; Start 550; Stop 574
gaagatagtgcgattatgtatttgc

SEQ ID NO: 316110 - DNA, 25 bp, Artificial
  probe
  misc_feature (1)..(25): SEQ ID NO: 2136; WAN024FSZ; Start 343; Stop 367
gctatttgcgatcctgttcattatt

SEQ ID NO: 316111 - DNA, 25 bp, Artificial
  probe
  misc_feature (1)..(25): SEQ ID NO: 2136; WAN024FSZ; Start 11; Stop 35
tagttagtattattctgcccgtcta

SEQ ID NO: 316112 - DNA, 25 bp, Artificial
  probe
  misc_feature (1)..(25): SEQ ID NO: 2136; WAN024FSZ; Start 9; Stop 33
attagttagtattattctgcccgtc

SEQ ID NO: 316113 - DNA, 25 bp, Artificial
  probe
  misc_feature (1)..(25): SEQ ID NO: 2136; WAN024FSZ; Start 342; Stop 366
tgctatttgcgatcctgttcattat

SEQ ID NO: 316114 - DNA, 25 bp, Artificial
  probe
  misc_feature (1)..(25): SEQ ID NO: 2136; WAN024FSZ; Start 341; Stop 365
ttgctatttgcgatcctgttcatta

SEQ ID NO: 316115 - DNA, 25 bp, Artificial
  probe
  misc_feature (1)..(25): SEQ ID NO: 2136; WAN024FSZ; Start 30; Stop 54
cgtctacaatgtcgaacagtatata

SEQ ID NO: 316116 - DNA, 25 bp, Artificial
  probe
  misc_feature (1)..(25): SEQ ID NO: 2136; WAN024FSZ; Start 340; Stop 364
attgctatttgcgatcctgttcatt

SEQ ID NO: 316117 - DNA, 25 bp, Artificial
  probe
  misc_feature (1)..(25): SEQ ID NO: 2136; WAN024FSZ; Start 8; Stop 32
aattagttagtattattctgcccgt

SEQ ID NO: 316118 - DNA, 25 bp, Artificial
  probe
  misc_feature (1)..(25): SEQ ID NO: 2136; WAN024FSZ; Start 543; Stop 567
gctatttgaagatagtgcgattatg

SEQ ID NO: 316119 - DNA, 25 bp, Artificial
  probe
  misc_feature (1)..(25): SEQ ID NO: 2136; WAN024FSZ; Start 135; Stop 159
aagcgttgaatattgtgagcaaatt

SEQ ID NO: 316120 - DNA, 25 bp, Artificial
  probe
  misc_feature (1)..(25): SEQ ID NO: 2136; WAN024FSZ; Start 134; Stop 158
aaagcgttgaatattgtgagcaaat

SEQ ID NO: 316121 - DNA, 25 bp, Artificial
  probe
  misc_feature (1)..(25): SEQ ID NO: 2136; WAN024FSZ; Start 948; Stop 972
tagtaaagtaaacagatgggaatga

SEQ ID NO: 316122 - DNA, 25 bp, Artificial
  probe
  misc_feature (1)..(25): SEQ ID NO: 2136; WAN024FSZ; Start 549; Stop 573
tgaagatagtgcgattatgtatttg

SEQ ID NO: 316123 - DNA, 25 bp, Artificial
  probe
  misc_feature (1)..(25): SEQ ID NO: 2136; WAN024FSZ; Start 531; Stop 555
tcctgtaggtaagctatttgaagat

SEQ ID NO: 316124 - DNA, 25 bp, Artificial
  probe
  misc_feature (1)..(25): SEQ ID NO: 2136; WAN024FSZ; Start 530; Stop 554
ttcctgtaggtaagctatttgaaga

SEQ ID NO: 316125 - DNA, 25 bp, Artificial
  probe
  misc_feature (1)..(25): SEQ ID NO: 2136; WAN024FSZ; Start 339; Stop 363
cattgctatttgcgatcctgttcat

SEQ ID NO: 316126 - DNA, 25 bp, Artificial
  probe
  misc_feature (1)..(25): SEQ ID NO: 2136; WAN024FSZ; Start 311; Stop 335
tatcttgtatggagaacaatgaggc

SEQ ID NO: 316127 - DNA, 25 bp, Artificial
  probe
  misc_feature (1)..(25): SEQ ID NO: 2136; WAN024FSZ; Start 527; Stop 551
gatttcctgtaggtaagctatttga

SEQ ID NO: 316128 - DNA, 25 bp, Artificial
  probe
  misc_feature (1)..(25): SEQ ID NO: 2136; WAN024FSZ; Start 310; Stop 334
gtatcttgtatggagaacaatgagg

SEQ ID NO: 316129 - DNA, 25 bp, Artificial
  probe
  misc_feature (1)..(25): SEQ ID NO: 2136; WAN024FSZ; Start 526; Stop 550
agatttcctgtaggtaagctatttg

SEQ ID NO: 316130 - DNA, 25 bp, Artificial
  probe
  misc_feature (1)..(25): SEQ ID NO: 2136; WAN024FSZ; Start 529; Stop 553
tttcctgtaggtaagctatttgaag

SEQ ID NO: 316131 - DNA, 25 bp, Artificial
  probe
  misc_feature (1)..(25): SEQ ID NO: 2137; WAN024GN7; Start 297; Stop 321
tgctggtattgtgtcattatcatct

SEQ ID NO: 316132 - DNA, 25 bp, Artificial
  probe
  misc_feature (1)..(25): SEQ ID NO: 2137; WAN024GN7; Start 537; Stop 561
gactattgttggttggttgattgtt

SEQ ID NO: 316133 - DNA, 25 bp, Artificial
  probe
  misc_feature (1)..(25): SEQ ID NO: 2137; WAN024GN7; Start 296; Stop 320
ctgctggtattgtgtcattatcatc

SEQ ID NO: 316134 - DNA, 25 bp, Artificial
  probe
  misc_feature (1)..(25): SEQ ID NO: 2137; WAN024GN7; Start 291; Stop 315
tattcctgctggtattgtgtcatta

SEQ ID NO: 316135 - DNA, 25 bp, Artificial
  probe
  misc_feature (1)..(25): SEQ ID NO: 2137; WAN024GN7; Start 292; Stop 316
attcctgctggtattgtgtcattat

SEQ ID NO: 316136 - DNA, 25 bp, Artificial
  probe
  misc_feature (1)..(25): SEQ ID NO: 2137; WAN024GN7; Start 535; Stop 559
gtgactattgttggttggttgattg

SEQ ID NO: 316137 - DNA, 25 bp, Artificial
  probe
  misc_feature (1)..(25): SEQ ID NO: 2137; WAN024GN7; Start 298; Stop 322
gctggtattgtgtcattatcatctt

SEQ ID NO: 316138 - DNA, 25 bp, Artificial
  probe
  misc_feature (1)..(25): SEQ ID NO: 2137; WAN024GN7; Start 295; Stop 319
cctgctggtattgtgtcattatcat

SEQ ID NO: 316139 - DNA, 25 bp, Artificial
  probe
  misc_feature (1)..(25): SEQ ID NO: 2137; WAN024GN7; Start 293; Stop 317
ttcctgctggtattgtgtcattatc

SEQ ID NO: 316140 - DNA, 25 bp, Artificial
  probe
  misc_feature (1)..(25): SEQ ID NO: 2137; WAN024GN7; Start 534; Stop 558
agtgactattgttggttggttgatt

SEQ ID NO: 316141 - DNA, 25 bp, Artificial
  probe
  misc_feature (1)..(25): SEQ ID NO: 2137; WAN024GN7; Start 536; Stop 560
tgactattgttggttggttgattgt

SEQ ID NO: 316142 - DNA, 25 bp, Artificial
  probe
  misc_feature (1)..(25): SEQ ID NO: 2137; WAN024GN7; Start 290; Stop 314
gtattcctgctggtattgtgtcatt

SEQ ID NO: 316143 - DNA, 25 bp, Artificial
  probe
  misc_feature (1)..(25): SEQ ID NO: 2137; WAN024GN7; Start 172; Stop 196
ggtgatattggtgttgctgactatt

SEQ ID NO: 316144 - DNA, 25 bp, Artificial
  probe
  misc_feature (1)..(25): SEQ ID NO: 2137; WAN024GN7; Start 533; Stop 557
cagtgactattgttggttggttgat

SEQ ID NO: 316145 - DNA, 25 bp, Artificial
  probe
  misc_feature (1)..(25): SEQ ID NO: 2137; WAN024GN7; Start 294; Stop 318
tcctgctggtattgtgtcattatca

SEQ ID NO: 316146 - DNA, 25 bp, Artificial
  probe
  misc_feature (1)..(25): SEQ ID NO: 2137; WAN024GN7; Start 283; Stop 307
gttgatggtattcctgctggtattg

SEQ ID NO: 316147 - DNA, 25 bp, Artificial
  probe
  misc_feature (1)..(25): SEQ ID NO: 2137; WAN024GN7; Start 282; Stop 306
agttgatggtattcctgctggtatt

SEQ ID NO: 316148 - DNA, 25 bp, Artificial
  probe
  misc_feature (1)..(25): SEQ ID NO: 2137; WAN024GN7; Start 281; Stop 305
aagttgatggtattcctgctggtat

SEQ ID NO: 316149 - DNA, 25 bp, Artificial
  probe
  misc_feature (1)..(25): SEQ ID NO: 2137; WAN024GN7; Start 1084; Stop 1108
ttggttccgctaacttatacagatc

SEQ ID NO: 316150 - DNA, 25 bp, Artificial
  probe
  misc_feature (1)..(25): SEQ ID NO: 2137; WAN024GN7; Start 284; Stop 308
ttgatggtattcctgctggtattgt

SEQ ID NO: 316151 - DNA, 25 bp, Artificial
  probe
  misc_feature (1)..(25): SEQ ID NO: 2137; WAN024GN7; Start 1087; Stop 1111
gttccgctaacttatacagatccag

SEQ ID NO: 316152 - DNA, 25 bp, Artificial
  probe
  misc_feature (1)..(25): SEQ ID NO: 2137; WAN024GN7; Start 1091; Stop 1115
cgctaacttatacagatccaggttg

SEQ ID NO: 316153 - DNA, 25 bp, Artificial
  probe
  misc_feature (1)..(25): SEQ ID NO: 2137; WAN024GN7; Start 1088; Stop 1112
ttccgctaacttatacagatccagg

SEQ ID NO: 316154 - DNA, 25 bp, Artificial
  probe
  misc_feature (1)..(25): SEQ ID NO: 2137; WAN024GN7; Start 289; Stop 313
ggtattcctgctggtattgtgtcat

SEQ ID NO: 316155 - DNA, 25 bp, Artificial
  probe
  misc_feature (1)..(25): SEQ ID NO: 2137; WAN024GN7; Start 287; Stop 311
atggtattcctgctggtattgtgtc

SEQ ID NO: 316156 - DNA, 25 bp, Artificial
  probe
  misc_feature (1)..(25): SEQ ID NO: 2137; WAN024GN7; Start 286; Stop 310
gatggtattcctgctggtattgtgt

SEQ ID NO: 316157 - DNA, 25 bp, Artificial
  probe
  misc_feature (1)..(25): SEQ ID NO: 2137; WAN024GN7; Start 285; Stop 309
tgatggtattcctgctggtattgtg

SEQ ID NO: 316158 - DNA, 25 bp, Artificial
  probe
  misc_feature (1)..(25): SEQ ID NO: 2137; WAN024GN7; Start 1090; Stop 1114
ccgctaacttatacagatccaggtt

SEQ ID NO: 316159 - DNA, 25 bp, Artificial
  probe
  misc_feature (1)..(25): SEQ ID NO: 2137; WAN024GN7; Start 1086; Stop 1110
ggttccgctaacttatacagatcca

SEQ ID NO: 316160 - DNA, 25 bp, Artificial
  probe
  misc_feature (1)..(25): SEQ ID NO: 2137; WAN024GN7; Start 1085; Stop 1109
tggttccgctaacttatacagatcc

SEQ ID NO: 316161 - DNA, 25 bp, Artificial
  probe
  misc_feature (1)..(25): SEQ ID NO: 2137; WAN024GN7; Start 865; Stop 889
ataggtttagttcttgcgttaggat

SEQ ID NO: 316162 - DNA, 25 bp, Artificial
  probe
  misc_feature (1)..(25): SEQ ID NO: 2137; WAN024GN7; Start 538; Stop 562
actattgttggttggttgattgttt

SEQ ID NO: 316163 - DNA, 25 bp, Artificial
  probe
  misc_feature (1)..(25): SEQ ID NO: 2137; WAN024GN7; Start 188; Stop 212
ctgactatttatggaagggtgttga

SEQ ID NO: 316164 - DNA, 25 bp, Artificial
  probe
  misc_feature (1)..(25): SEQ ID NO: 2138; WAN024CX2; Start 381; Stop 405
caagtctcgtccatatatcagcaac

SEQ ID NO: 316165 - DNA, 25 bp, Artificial
  probe
  misc_feature (1)..(25): SEQ ID NO: 2138; WAN024CX2; Start 389; Stop 413
gtccatatatcagcaactccattcg

SEQ ID NO: 316166 - DNA, 25 bp, Artificial
  probe
  misc_feature (1)..(25): SEQ ID NO: 2138; WAN024CX2; Start 388; Stop 412
cgtccatatatcagcaactccattc

SEQ ID NO: 316167 - DNA, 25 bp, Artificial
  probe
  misc_feature (1)..(25): SEQ ID NO: 2138; WAN024CX2; Start 391; Stop 415
ccatatatcagcaactccattcgtt

SEQ ID NO: 316168 - DNA, 25 bp, Artificial
  probe
  misc_feature (1)..(25): SEQ ID NO: 2138; WAN024CX2; Start 390; Stop 414
tccatatatcagcaactccattcgt

SEQ ID NO: 316169 - DNA, 25 bp, Artificial
  probe
  misc_feature (1)..(25): SEQ ID NO: 2138; WAN024CX2; Start 387; Stop 411
tcgtccatatatcagcaactccatt

SEQ ID NO: 316170 - DNA, 25 bp, Artificial
  probe
  misc_feature (1)..(25): SEQ ID NO: 2138; WAN024CX2; Start 382; Stop 406
aagtctcgtccatatatcagcaact

SEQ ID NO: 316171 - DNA, 25 bp, Artificial
  probe
  misc_feature (1)..(25): SEQ ID NO: 2138; WAN024CX2; Start 386; Stop 410
ctcgtccatatatcagcaactccat

SEQ ID NO: 316172 - DNA, 25 bp, Artificial
  probe
  misc_feature (1)..(25): SEQ ID NO: 2138; WAN024CX2; Start 383; Stop 407
agtctcgtccatatatcagcaactc

SEQ ID NO: 316173 - DNA, 25 bp, Artificial
  probe
  misc_feature (1)..(25): SEQ ID NO: 2138; WAN024CX2; Start 83; Stop 107
tagatgaactagcacagtctatcaa

SEQ ID NO: 316174 - DNA, 25 bp, Artificial
  probe
  misc_feature (1)..(25): SEQ ID NO: 2138; WAN024CX2; Start 82; Stop 106
ctagatgaactagcacagtctatca

SEQ ID NO: 316175 - DNA, 25 bp, Artificial
  probe
  misc_feature (1)..(25): SEQ ID NO: 2138; WAN024CX2; Start 731; Stop 755
atagtagaattatcaacagcctgaa

SEQ ID NO: 316176 - DNA, 25 bp, Artificial
  probe
  misc_feature (1)..(25): SEQ ID NO: 2138; WAN024CX2; Start 139; Stop 163
cgtcaatctcctgttattggttatg

SEQ ID NO: 316177 - DNA, 25 bp, Artificial
  probe
  misc_feature (1)..(25): SEQ ID NO: 2138; WAN024CX2; Start 138; Stop 162
tcgtcaatctcctgttattggttat

SEQ ID NO: 316178 - DNA, 25 bp, Artificial
  probe
  misc_feature (1)..(25): SEQ ID NO: 2138; WAN024CX2; Start 137; Stop 161
ttcgtcaatctcctgttattggtta

SEQ ID NO: 316179 - DNA, 25 bp, Artificial
  probe
  misc_feature (1)..(25): SEQ ID NO: 2138; WAN024CX2; Start 133; Stop 157
attgttcgtcaatctcctgttattg

SEQ ID NO: 316180 - DNA, 25 bp, Artificial
  probe
  misc_feature (1)..(25): SEQ ID NO: 2138; WAN024CX2; Start 395; Stop 419
atatcagcaactccattcgtttact

SEQ ID NO: 316181 - DNA, 25 bp, Artificial
  probe
  misc_feature (1)..(25): SEQ ID NO: 2138; WAN024CX2; Start 232; Stop 256
gttaaacagatttcagaccaagaga

SEQ ID NO: 316182 - DNA, 25 bp, Artificial
  probe
  misc_feature (1)..(25): SEQ ID NO: 2138; WAN024CX2; Start 129; Stop 153
gattattgttcgtcaatctcctgtt

SEQ ID NO: 316183 - DNA, 25 bp, Artificial
  probe
  misc_feature (1)..(25): SEQ ID NO: 2138; WAN024CX2; Start 414; Stop 438
tttactttccttgccagaacagatt

SEQ ID NO: 316184 - DNA, 25 bp, Artificial
  probe
  misc_feature (1)..(25): SEQ ID NO: 2138; WAN024CX2; Start 396; Stop 420
tatcagcaactccattcgtttactt

SEQ ID NO: 316185 - DNA, 25 bp, Artificial
  probe
  misc_feature (1)..(25): SEQ ID NO: 2138; WAN024CX2; Start 234; Stop 258
taaacagatttcagaccaagagatg

SEQ ID NO: 316186 - DNA, 25 bp, Artificial
  probe
  misc_feature (1)..(25): SEQ ID NO: 2138; WAN024CX2; Start 149; Stop 173
ctgttattggttatgaaatccttgc

SEQ ID NO: 316187 - DNA, 25 bp, Artificial
  probe
  misc_feature (1)..(25): SEQ ID NO: 2138; WAN024CX2; Start 492; Stop 516
tgggttaaataaggaacaacaagac

SEQ ID NO: 316188 - DNA, 25 bp, Artificial
  probe
  misc_feature (1)..(25): SEQ ID NO: 2138; WAN024CX2; Start 384; Stop 408
gtctcgtccatatatcagcaactcc

SEQ ID NO: 316189 - DNA, 25 bp, Artificial
  probe
  misc_feature (1)..(25): SEQ ID NO: 2138; WAN024CX2; Start 493; Stop 517
gggttaaataaggaacaacaagact

SEQ ID NO: 316190 - DNA, 25 bp, Artificial
  probe
  misc_feature (1)..(25): SEQ ID NO: 2138; WAN024CX2; Start 145; Stop 169
tctcctgttattggttatgaaatcc

SEQ ID NO: 316191 - DNA, 25 bp, Artificial
  probe
  misc_feature (1)..(25): SEQ ID NO: 2138; WAN024CX2; Start 402; Stop 426
caactccattcgtttactttccttg

SEQ ID NO: 316192 - DNA, 25 bp, Artificial
  probe
  misc_feature (1)..(25): SEQ ID NO: 2138; WAN024CX2; Start 394; Stop 418
tatatcagcaactccattcgtttac

SEQ ID NO: 316193 - DNA, 25 bp, Artificial
  probe
  misc_feature (1)..(25): SEQ ID NO: 2138; WAN024CX2; Start 236; Stop 260
aacagatttcagaccaagagatgat

SEQ ID NO: 316194 - DNA, 25 bp, Artificial
  probe
  misc_feature (1)..(25): SEQ ID NO: 2138; WAN024CX2; Start 235; Stop 259
aaacagatttcagaccaagagatga

SEQ ID NO: 316195 - DNA, 25 bp, Artificial
  probe
  misc_feature (1)..(25): SEQ ID NO: 2138; WAN024CX2; Start 146; Stop 170
ctcctgttattggttatgaaatcct

SEQ ID NO: 316196 - DNA, 25 bp, Artificial
  probe
  misc_feature (1)..(25): SEQ ID NO: 2138; WAN024CX2; Start 415; Stop 439
ttactttccttgccagaacagattc

SEQ ID NO: 316197 - DNA, 25 bp, Artificial
  probe
  misc_feature (1)..(25): SEQ ID NO: 2139; WAN024DDY; Start 487; Stop 511
aatacggactatgaattgacctctg

SEQ ID NO: 316198 - DNA, 25 bp, Artificial
  probe
  misc_feature (1)..(25): SEQ ID NO: 2139; WAN024DDY; Start 817; Stop 841
caagaacaattagccgaacataaga

SEQ ID NO: 316199 - DNA, 25 bp, Artificial
  probe
  misc_feature (1)..(25): SEQ ID NO: 2139; WAN024DDY; Start 816; Stop 840
tcaagaacaattagccgaacataag

SEQ ID NO: 316200 - DNA, 25 bp, Artificial
  probe
  misc_feature (1)..(25): SEQ ID NO: 2139; WAN024DDY; Start 815; Stop 839
ctcaagaacaattagccgaacataa

SEQ ID NO: 316201 - DNA, 25 bp, Artificial
  probe
  misc_feature (1)..(25): SEQ ID NO: 2139; WAN024DDY; Start 814; Stop 838
tctcaagaacaattagccgaacata

SEQ ID NO: 316202 - DNA, 25 bp, Artificial
  probe
  misc_feature (1)..(25): SEQ ID NO: 2139; WAN024DDY; Start 818; Stop 842
aagaacaattagccgaacataagaa

SEQ ID NO: 316203 - DNA, 25 bp, Artificial
  probe
  misc_feature (1)..(25): SEQ ID NO: 2139; WAN024DDY; Start 821; Stop 845
aacaattagccgaacataagaatct

SEQ ID NO: 316204 - DNA, 25 bp, Artificial
  probe
  misc_feature (1)..(25): SEQ ID NO: 2139; WAN024DDY; Start 819; Stop 843
agaacaattagccgaacataagaat

SEQ ID NO: 316205 - DNA, 25 bp, Artificial
  probe
  misc_feature (1)..(25): SEQ ID NO: 2139; WAN024DDY; Start 820; Stop 844
gaacaattagccgaacataagaatc

SEQ ID NO: 316206 - DNA, 25 bp, Artificial
  probe
  misc_feature (1)..(25): SEQ ID NO: 2139; WAN024DDY; Start 811; Stop 835
gattctcaagaacaattagccgaac

SEQ ID NO: 316207 - DNA, 25 bp, Artificial
  probe
  misc_feature (1)..(25): SEQ ID NO: 2139; WAN024DDY; Start 810; Stop 834
agattctcaagaacaattagccgaa

SEQ ID NO: 316208 - DNA, 25 bp, Artificial
  probe
  misc_feature (1)..(25): SEQ ID NO: 2139; WAN024DDY; Start 492; Stop 516
ggactatgaattgacctctggagaa

SEQ ID NO: 316209 - DNA, 25 bp, Artificial
  probe
  misc_feature (1)..(25): SEQ ID NO: 2139; WAN024DDY; Start 807; Stop 831
ttcagattctcaagaacaattagcc

SEQ ID NO: 316210 - DNA, 25 bp, Artificial
  probe
  misc_feature (1)..(25): SEQ ID NO: 2139; WAN024DDY; Start 673; Stop 697
gtagaccatccatcaacagtacaag

SEQ ID NO: 316211 - DNA, 25 bp, Artificial
  probe
  misc_feature (1)..(25): SEQ ID NO: 2139; WAN024DDY; Start 488; Stop 512
atacggactatgaattgacctctgg

SEQ ID NO: 316212 - DNA, 25 bp, Artificial
  probe
  misc_feature (1)..(25): SEQ ID NO: 2139; WAN024DDY; Start 813; Stop 837
ttctcaagaacaattagccgaacat

SEQ ID NO: 316213 - DNA, 25 bp, Artificial
  probe
  misc_feature (1)..(25): SEQ ID NO: 2139; WAN024DDY; Start 812; Stop 836
attctcaagaacaattagccgaaca

SEQ ID NO: 316214 - DNA, 25 bp, Artificial
  probe
  misc_feature (1)..(25): SEQ ID NO: 2139; WAN024DDY; Start 729; Stop 753
taagccgacagaagttcaagtagtt

SEQ ID NO: 316215 - DNA, 25 bp, Artificial
  probe
  misc_feature (1)..(25): SEQ ID NO: 2139; WAN024DDY; Start 809; Stop 833
cagattctcaagaacaattagccga

SEQ ID NO: 316216 - DNA, 25 bp, Artificial
  probe
  misc_feature (1)..(25): SEQ ID NO: 2139; WAN024DDY; Start 808; Stop 832
tcagattctcaagaacaattagccg

SEQ ID NO: 316217 - DNA, 25 bp, Artificial
  probe
  misc_feature (1)..(25): SEQ ID NO: 2139; WAN024DDY; Start 822; Stop 846
acaattagccgaacataagaatcta

SEQ ID NO: 316218 - DNA, 25 bp, Artificial
  probe
  misc_feature (1)..(25): SEQ ID NO: 2139; WAN024DDY; Start 728; Stop 752
ctaagccgacagaagttcaagtagt

SEQ ID NO: 316219 - DNA, 25 bp, Artificial
  probe
  misc_feature (1)..(25): SEQ ID NO: 2139; WAN024DDY; Start 806; Stop 830
cttcagattctcaagaacaattagc

SEQ ID NO: 316220 - DNA, 25 bp, Artificial
  probe
  misc_feature (1)..(25): SEQ ID NO: 2139; WAN024DDY; Start 680; Stop 704
atccatcaacagtacaagctattca

SEQ ID NO: 316221 - DNA, 25 bp, Artificial
  probe
  misc_feature (1)..(25): SEQ ID NO: 2139; WAN024DDY; Start 684; Stop 708
atcaacagtacaagctattcaggaa

SEQ ID NO: 316222 - DNA, 25 bp, Artificial
  probe
  misc_feature (1)..(25): SEQ ID NO: 2139; WAN024DDY; Start 679; Stop 703
catccatcaacagtacaagctattc

SEQ ID NO: 316223 - DNA, 25 bp, Artificial
  probe
  misc_feature (1)..(25): SEQ ID NO: 2139; WAN024DDY; Start 687; Stop 711
aacagtacaagctattcaggaacaa

SEQ ID NO: 316224 - DNA, 25 bp, Artificial
  probe
  misc_feature (1)..(25): SEQ ID NO: 2139; WAN024DDY; Start 683; Stop 707
catcaacagtacaagctattcagga

SEQ ID NO: 316225 - DNA, 25 bp, Artificial
  probe
  misc_feature (1)..(25): SEQ ID NO: 2139; WAN024DDY; Start 681; Stop 705
tccatcaacagtacaagctattcag

SEQ ID NO: 316226 - DNA, 25 bp, Artificial
  probe
  misc_feature (1)..(25): SEQ ID NO: 2139; WAN024DDY; Start 152; Stop 176
aatatgtggcagattcagagctatc

SEQ ID NO: 316227 - DNA, 25 bp, Artificial
  probe
  misc_feature (1)..(25): SEQ ID NO: 2139; WAN024DDY; Start 685; Stop 709
tcaacagtacaagctattcaggaac

SEQ ID NO: 316228 - DNA, 25 bp, Artificial
  probe
  misc_feature (1)..(25): SEQ ID NO: 2139; WAN024DDY; Start 678; Stop 702
ccatccatcaacagtacaagctatt

SEQ ID NO: 316229 - DNA, 25 bp, Artificial
  probe
  misc_feature (1)..(25): SEQ ID NO: 2139; WAN024DDY; Start 161; Stop 185
cagattcagagctatcatcagaaga

SEQ ID NO: 316230 - DNA, 25 bp, Artificial
  probe
  misc_feature (1)..(25): SEQ ID NO: 2140; WAN024D6A; Start 114; Stop 138
gattgccaaacattgtcaaacagtc

SEQ ID NO: 316231 - DNA, 25 bp, Artificial
  probe
  misc_feature (1)..(25): SEQ ID NO: 2140; WAN024D6A; Start 112; Stop 136
gtgattgccaaacattgtcaaacag

SEQ ID NO: 316232 - DNA, 25 bp, Artificial
  probe
  misc_feature (1)..(25): SEQ ID NO: 2140; WAN024D6A; Start 113; Stop 137
tgattgccaaacattgtcaaacagt

SEQ ID NO: 316233 - DNA, 25 bp, Artificial
  probe
  misc_feature (1)..(25): SEQ ID NO: 2140; WAN024D6A; Start 111; Stop 135
tgtgattgccaaacattgtcaaaca

SEQ ID NO: 316234 - DNA, 25 bp, Artificial
  probe
  misc_feature (1)..(25): SEQ ID NO: 2140; WAN024D6A; Start 110; Stop 134
atgtgattgccaaacattgtcaaac

SEQ ID NO: 316235 - DNA, 25 bp, Artificial
  probe
  misc_feature (1)..(25): SEQ ID NO: 2140; WAN024D6A; Start 2; Stop 26
tggaaaataatgactcgtttactaa

SEQ ID NO: 316236 - DNA, 25 bp, Artificial
  probe
  misc_feature (1)..(25): SEQ ID NO: 2140; WAN024D6A; Start 1; Stop 25
atggaaaataatgactcgtttacta

SEQ ID NO: 316237 - DNA, 25 bp, Artificial
  probe
  misc_feature (1)..(25): SEQ ID NO: 2140; WAN024D6A; Start 22; Stop 46
actaaactaaaagagtcaactcaaa

SEQ ID NO: 316238 - DNA, 25 bp, Artificial
  probe
  misc_feature (1)..(25): SEQ ID NO: 2140; WAN024D6A; Start 3; Stop 27
ggaaaataatgactcgtttactaaa

SEQ ID NO: 316239 - DNA, 25 bp, Artificial
  probe
  misc_feature (1)..(25): SEQ ID NO: 2140; WAN024D6A; Start 109; Stop 133
aatgtgattgccaaacattgtcaaa

SEQ ID NO: 316240 - DNA, 25 bp, Artificial
  probe
  misc_feature (1)..(25): SEQ ID NO: 2140; WAN024D6A; Start 15; Stop 39
ctcgtttactaaactaaaagagtca

SEQ ID NO: 316241 - DNA, 25 bp, Artificial
  probe
  misc_feature (1)..(25): SEQ ID NO: 2140; WAN024D6A; Start 12; Stop 36
tgactcgtttactaaactaaaagag

SEQ ID NO: 316242 - DNA, 25 bp, Artificial
  probe
  misc_feature (1)..(25): SEQ ID NO: 2140; WAN024D6A; Start 21; Stop 45
tactaaactaaaagagtcaactcaa

SEQ ID NO: 316243 - DNA, 25 bp, Artificial
  probe
  misc_feature (1)..(25): SEQ ID NO: 2140; WAN024D6A; Start 20; Stop 44
ttactaaactaaaagagtcaactca

SEQ ID NO: 316244 - DNA, 25 bp, Artificial
  probe
  misc_feature (1)..(25): SEQ ID NO: 2140; WAN024D6A; Start 17; Stop 41
cgtttactaaactaaaagagtcaac

SEQ ID NO: 316245 - DNA, 25 bp, Artificial
  probe
  misc_feature (1)..(25): SEQ ID NO: 2140; WAN024D6A; Start 23; Stop 47
ctaaactaaaagagtcaactcaaaa

SEQ ID NO: 316246 - DNA, 25 bp, Artificial
  probe
  misc_feature (1)..(25): SEQ ID NO: 2140; WAN024D6A; Start 16; Stop 40
tcgtttactaaactaaaagagtcaa

SEQ ID NO: 316247 - DNA, 25 bp, Artificial
  probe
  misc_feature (1)..(25): SEQ ID NO: 2140; WAN024D6A; Start 11; Stop 35
atgactcgtttactaaactaaaaga

SEQ ID NO: 316248 - DNA, 25 bp, Artificial
  probe
  misc_feature (1)..(25): SEQ ID NO: 2140; WAN024D6A; Start 14; Stop 38
actcgtttactaaactaaaagagtc

SEQ ID NO: 316249 - DNA, 25 bp, Artificial
  probe
  misc_feature (1)..(25): SEQ ID NO: 2140; WAN024D6A; Start 13; Stop 37
gactcgtttactaaactaaaagagt

SEQ ID NO: 316250 - DNA, 25 bp, Artificial
  probe
  misc_feature (1)..(25): SEQ ID NO: 2140; WAN024D6A; Start 10; Stop 34
aatgactcgtttactaaactaaaag

SEQ ID NO: 316251 - DNA, 25 bp, Artificial
  probe
  misc_feature (1)..(25): SEQ ID NO: 2140; WAN024D6A; Start 19; Stop 43
tttactaaactaaaagagtcaactc

SEQ ID NO: 316252 - DNA, 25 bp, Artificial
  probe
  misc_feature (1)..(25): SEQ ID NO: 2140; WAN024D6A; Start 18; Stop 42
gtttactaaactaaaagagtcaact

SEQ ID NO: 316253 - DNA, 25 bp, Artificial
  probe
  misc_feature (1)..(25): SEQ ID NO: 2140; WAN024D6A; Start 5; Stop 29
aaaataatgactcgtttactaaact

SEQ ID NO: 316254 - DNA, 25 bp, Artificial
  probe
  misc_feature (1)..(25): SEQ ID NO: 2140; WAN024D6A; Start 4; Stop 28
gaaaataatgactcgtttactaaac

SEQ ID NO: 316255 - DNA, 25 bp, Artificial
  probe
  misc_feature (1)..(25): SEQ ID NO: 2141; WAN024B22-5; Start 496; Stop 520
atctctaattggcatatcaagacga

SEQ ID NO: 316256 - DNA, 25 bp, Artificial
  probe
  misc_feature (1)..(25): SEQ ID NO: 2141; WAN024B22-5; Start 501; Stop 525
taattggcatatcaagacgagtcaa

SEQ ID NO: 316257 - DNA, 25 bp, Artificial
  probe
  misc_feature (1)..(25): SEQ ID NO: 2141; WAN024B22-5; Start 499; Stop 523
tctaattggcatatcaagacgagtc

SEQ ID NO: 316258 - DNA, 25 bp, Artificial
  probe
  misc_feature (1)..(25): SEQ ID NO: 2141; WAN024B22-5; Start 506; Stop 530
ggcatatcaagacgagtcaatacta

SEQ ID NO: 316259 - DNA, 25 bp, Artificial
  probe
  misc_feature (1)..(25): SEQ ID NO: 2141; WAN024B22-5; Start 500; Stop 524
ctaattggcatatcaagacgagtca

SEQ ID NO: 316260 - DNA, 25 bp, Artificial
  probe
  misc_feature (1)..(25): SEQ ID NO: 2141; WAN024B22-5; Start 495; Stop 519
aatctctaattggcatatcaagacg

SEQ ID NO: 316261 - DNA, 25 bp, Artificial
  probe
  misc_feature (1)..(25): SEQ ID NO: 2141; WAN024B22-5; Start 497; Stop 521
tctctaattggcatatcaagacgag

SEQ ID NO: 316262 - DNA, 25 bp, Artificial
  probe
  misc_feature (1)..(25): SEQ ID NO: 2141; WAN024B22-5; Start 504; Stop 528
ttggcatatcaagacgagtcaatac

SEQ ID NO: 316263 - DNA, 25 bp, Artificial
  probe
  misc_feature (1)..(25): SEQ ID NO: 2141; WAN024B22-5; Start 498; Stop 522
ctctaattggcatatcaagacgagt

SEQ ID NO: 316264 - DNA, 25 bp, Artificial
  probe
  misc_feature (1)..(25): SEQ ID NO: 2141; WAN024B22-5; Start 507; Stop 531
gcatatcaagacgagtcaatactat

SEQ ID NO: 316265 - DNA, 25 bp, Artificial
  probe
  misc_feature (1)..(25): SEQ ID NO: 2141; WAN024B22-5; Start 505; Stop 529
tggcatatcaagacgagtcaatact

SEQ ID NO: 316266 - DNA, 25 bp, Artificial
  probe
  misc_feature (1)..(25): SEQ ID NO: 2141; WAN024B22-5; Start 379; Stop 403
tatggctcagtttctattatcgctc

SEQ ID NO: 316267 - DNA, 25 bp, Artificial
  probe
  misc_feature (1)..(25): SEQ ID NO: 2141; WAN024B22-5; Start 378; Stop 402
ctatggctcagtttctattatcgct

SEQ ID NO: 316268 - DNA, 25 bp, Artificial
  probe
  misc_feature (1)..(25): SEQ ID NO: 2141; WAN024B22-5; Start 387; Stop 411
agtttctattatcgctcacaccatc

SEQ ID NO: 316269 - DNA, 25 bp, Artificial
  probe
  misc_feature (1)..(25): SEQ ID NO: 2141; WAN024B22-5; Start 480; Stop 504
aatcacacgcaaggaaatctctaat

SEQ ID NO: 316270 - DNA, 25 bp, Artificial
  probe
  misc_feature (1)..(25): SEQ ID NO: 2141; WAN024B22-5; Start 105; Stop 129
taagaaatctaaagggaaacgccaa

SEQ ID NO: 316271 - DNA, 25 bp, Artificial
  probe
  misc_feature (1)..(25): SEQ ID NO: 2141; WAN024B22-5; Start 386; Stop 410
cagtttctattatcgctcacaccat

SEQ ID NO: 316272 - DNA, 25 bp, Artificial
  probe
  misc_feature (1)..(25): SEQ ID NO: 2141; WAN024B22-5; Start 503; Stop 527
attggcatatcaagacgagtcaata

SEQ ID NO: 316273 - DNA, 25 bp, Artificial
  probe
  misc_feature (1)..(25): SEQ ID NO: 2141; WAN024B22-5; Start 481; Stop 505
atcacacgcaaggaaatctctaatt

SEQ ID NO: 316274 - DNA, 25 bp, Artificial
  probe
  misc_feature (1)..(25): SEQ ID NO: 2141; WAN024B22-5; Start 384; Stop 408
ctcagtttctattatcgctcacacc

SEQ ID NO: 316275 - DNA, 25 bp, Artificial
  probe
  misc_feature (1)..(25): SEQ ID NO: 2141; WAN024B22-5; Start 502; Stop 526
aattggcatatcaagacgagtcaat

SEQ ID NO: 316276 - DNA, 25 bp, Artificial
  probe
  misc_feature (1)..(25): SEQ ID NO: 2141; WAN024B22-5; Start 454; Stop 478
gaagattgggctaagatgggtttac

SEQ ID NO: 316277 - DNA, 25 bp, Artificial
  probe
  misc_feature (1)..(25): SEQ ID NO: 2141; WAN024B22-5; Start 453; Stop 477
agaagattgggctaagatgggttta

SEQ ID NO: 316278 - DNA, 25 bp, Artificial
  probe
  misc_feature (1)..(25): SEQ ID NO: 2141; WAN024B22-5; Start 104; Stop 128
gtaagaaatctaaagggaaacgcca

SEQ ID NO: 316279 - DNA, 25 bp, Artificial
  probe
  misc_feature (1)..(25): SEQ ID NO: 2141; WAN024B22-5; Start 488; Stop 512
gcaaggaaatctctaattggcatat

SEQ ID NO: 316280 - DNA, 25 bp, Artificial
  probe
  misc_feature (1)..(25): SEQ ID NO: 2141; WAN024B22-5; Start 479; Stop 503
caatcacacgcaaggaaatctctaa

SEQ ID NO: 316281 - DNA, 25 bp, Artificial
  probe
  misc_feature (1)..(25): SEQ ID NO: 2141; WAN024B22-5; Start 388; Stop 412
gtttctattatcgctcacaccatcc

SEQ ID NO: 316282 - DNA, 25 bp, Artificial
  probe
  misc_feature (1)..(25): SEQ ID NO: 2141; WAN024B22-5; Start 512; Stop 536
tcaagacgagtcaatactatttgga

SEQ ID NO: 316283 - DNA, 25 bp, Artificial
  probe
  misc_feature (1)..(25): SEQ ID NO: 2141; WAN024B22-5; Start 377; Stop 401
gctatggctcagtttctattatcgc

SEQ ID NO: 316284 - DNA, 25 bp, Artificial
  probe
  misc_feature (1)..(25): SEQ ID NO: 2141; WAN024B22-5; Start 514; Stop 538
aagacgagtcaatactatttggagc

SEQ ID NO: 316285 - DNA, 25 bp, Artificial
  probe
  misc_feature (1)..(25): SEQ ID NO: 2141; WAN024B22-5; Start 513; Stop 537
caagacgagtcaatactatttggag

SEQ ID NO: 316286 - DNA, 25 bp, Artificial
  probe
  misc_feature (1)..(25): SEQ ID NO: 2141; WAN024B22-5; Start 106; Stop 130
aagaaatctaaagggaaacgccaag

SEQ ID NO: 316287 - DNA, 25 bp, Artificial
  probe
  misc_feature (1)..(25): SEQ ID NO: 2141; WAN024B22-5; Start 389; Stop 413
tttctattatcgctcacaccatcca

SEQ ID NO: 316288 - DNA, 25 bp, Artificial
  probe
  misc_feature (1)..(25): SEQ ID NO: 2142; WAN024CMT; Start 18; Stop 42
cgatgtagatatgctgttggaagaa

SEQ ID NO: 316289 - DNA, 25 bp, Artificial
  probe
  misc_feature (1)..(25): SEQ ID NO: 2142; WAN024CMT; Start 21; Stop 45
tgtagatatgctgttggaagaattg

SEQ ID NO: 316290 - DNA, 25 bp, Artificial
  probe
  misc_feature (1)..(25): SEQ ID NO: 2142; WAN024CMT; Start 19; Stop 43
gatgtagatatgctgttggaagaat

SEQ ID NO: 316291 - DNA, 25 bp, Artificial
  probe
  misc_feature (1)..(25): SEQ ID NO: 2142; WAN024CMT; Start 23; Stop 47
tagatatgctgttggaagaattgac

SEQ ID NO: 316292 - DNA, 25 bp, Artificial
  probe
  misc_feature (1)..(25): SEQ ID NO: 2142; WAN024CMT; Start 22; Stop 46
gtagatatgctgttggaagaattga

SEQ ID NO: 316293 - DNA, 25 bp, Artificial
  probe
  misc_feature (1)..(25): SEQ ID NO: 2142; WAN024CMT; Start 20; Stop 44
atgtagatatgctgttggaagaatt

SEQ ID NO: 316294 - DNA, 25 bp, Artificial
  probe
  misc_feature (1)..(25): SEQ ID NO: 2142; WAN024CMT; Start 31; Stop 55
ctgttggaagaattgacacaagaag

SEQ ID NO: 316295 - DNA, 25 bp, Artificial
  probe
  misc_feature (1)..(25): SEQ ID NO: 2142; WAN024CMT; Start 25; Stop 49
gatatgctgttggaagaattgacac

SEQ ID NO: 316296 - DNA, 25 bp, Artificial
  probe
  misc_feature (1)..(25): SEQ ID NO: 2142; WAN024CMT; Start 24; Stop 48
agatatgctgttggaagaattgaca

SEQ ID NO: 316297 - DNA, 25 bp, Artificial
  probe
  misc_feature (1)..(25): SEQ ID NO: 2142; WAN024CMT; Start 34; Stop 58
ttggaagaattgacacaagaagcaa

SEQ ID NO: 316298 - DNA, 25 bp, Artificial
  probe
  misc_feature (1)..(25): SEQ ID NO: 2142; WAN024CMT; Start 26; Stop 50
atatgctgttggaagaattgacaca

SEQ ID NO: 316299 - DNA, 25 bp, Artificial
  probe
  misc_feature (1)..(25): SEQ ID NO: 2142; WAN024CMT; Start 27; Stop 51
tatgctgttggaagaattgacacaa

SEQ ID NO: 316300 - DNA, 25 bp, Artificial
  probe
  misc_feature (1)..(25): SEQ ID NO: 2142; WAN024CMT; Start 57; Stop 81
aatggtcgttgttgctgttgataag

SEQ ID NO: 316301 - DNA, 25 bp, Artificial
  probe
  misc_feature (1)..(25): SEQ ID NO: 2142; WAN024CMT; Start 33; Stop 57
gttggaagaattgacacaagaagca

SEQ ID NO: 316302 - DNA, 25 bp, Artificial
  probe
  misc_feature (1)..(25): SEQ ID NO: 2142; WAN024CMT; Start 56; Stop 80
caatggtcgttgttgctgttgataa

SEQ ID NO: 316303 - DNA, 25 bp, Artificial
  probe
  misc_feature (1)..(25): SEQ ID NO: 2142; WAN024CMT; Start 17; Stop 41
tcgatgtagatatgctgttggaaga

SEQ ID NO: 316304 - DNA, 25 bp, Artificial
  probe
  misc_feature (1)..(25): SEQ ID NO: 2142; WAN024CMT; Start 32; Stop 56
tgttggaagaattgacacaagaagc

SEQ ID NO: 316305 - DNA, 25 bp, Artificial
  probe
  misc_feature (1)..(25): SEQ ID NO: 2142; WAN024CMT; Start 30; Stop 54
gctgttggaagaattgacacaagaa

SEQ ID NO: 316306 - DNA, 25 bp, Artificial
  probe
  misc_feature (1)..(25): SEQ ID NO: 2142; WAN024CMT; Start 28; Stop 52
atgctgttggaagaattgacacaag

SEQ ID NO: 316307 - DNA, 25 bp, Artificial
  probe
  misc_feature (1)..(25): SEQ ID NO: 2142; WAN024CMT; Start 37; Stop 61
gaagaattgacacaagaagcaatgg

SEQ ID NO: 316308 - DNA, 25 bp, Artificial
  probe
  misc_feature (1)..(25): SEQ ID NO: 2142; WAN024CMT; Start 36; Stop 60
ggaagaattgacacaagaagcaatg

SEQ ID NO: 316309 - DNA, 25 bp, Artificial
  probe
  misc_feature (1)..(25): SEQ ID NO: 2142; WAN024CMT; Start 35; Stop 59
tggaagaattgacacaagaagcaat

SEQ ID NO: 316310 - DNA, 25 bp, Artificial
  probe
  misc_feature (1)..(25): SEQ ID NO: 2142; WAN024CMT; Start 38; Stop 62
aagaattgacacaagaagcaatggt

SEQ ID NO: 316311 - DNA, 25 bp, Artificial
  probe
  misc_feature (1)..(25): SEQ ID NO: 2142; WAN024CMT; Start 62; Stop 86
tcgttgttgctgttgataaggactg

SEQ ID NO: 316312 - DNA, 25 bp, Artificial
  probe
  misc_feature (1)..(25): SEQ ID NO: 2142; WAN024CMT; Start 29; Stop 53
tgctgttggaagaattgacacaaga

SEQ ID NO: 316313 - DNA, 25 bp, Artificial
  probe
  misc_feature (1)..(25): SEQ ID NO: 2142; WAN024CMT; Start 39; Stop 63
agaattgacacaagaagcaatggtc

SEQ ID NO: 316314 - DNA, 25 bp, Artificial
  probe
  misc_feature (1)..(25): SEQ ID NO: 2142; WAN024CMT; Start 63; Stop 87
cgttgttgctgttgataaggactgt

SEQ ID NO: 316315 - DNA, 25 bp, Artificial
  probe
  misc_feature (1)..(25): SEQ ID NO: 2142; WAN024CMT; Start 58; Stop 82
atggtcgttgttgctgttgataagg

SEQ ID NO: 316316 - DNA, 25 bp, Artificial
  probe
  misc_feature (1)..(25): SEQ ID NO: 2142; WAN024CMT; Start 61; Stop 85
gtcgttgttgctgttgataaggact

SEQ ID NO: 316317 - DNA, 25 bp, Artificial
  probe
  misc_feature (1)..(25): SEQ ID NO: 2142; WAN024CMT; Start 15; Stop 39
aatcgatgtagatatgctgttggaa

SEQ ID NO: 316318 - DNA, 25 bp, Artificial
  probe
  misc_feature (1)..(25): SEQ ID NO: 2142; WAN024CMT; Start 16; Stop 40
atcgatgtagatatgctgttggaag

SEQ ID NO: 316319 - DNA, 25 bp, Artificial
  probe
  misc_feature (1)..(25): SEQ ID NO: 2142; WAN024CMT; Start 40; Stop 64
gaattgacacaagaagcaatggtcg

SEQ ID NO: 316320 - DNA, 25 bp, Artificial
  probe
  misc_feature (1)..(25): SEQ ID NO: 2142; WAN024CMT; Start 14; Stop 38
caatcgatgtagatatgctgttgga

SEQ ID NO: 316321 - DNA, 25 bp, Artificial
  probe
  misc_feature (1)..(25): SEQ ID NO: 2143; WAN024DIA; Start 1183; Stop 1207
attgatgacagtaagagaatccgtt

SEQ ID NO: 316322 - DNA, 25 bp, Artificial
  probe
  misc_feature (1)..(25): SEQ ID NO: 2143; WAN024DIA; Start 1184; Stop 1208
ttgatgacagtaagagaatccgtta

SEQ ID NO: 316323 - DNA, 25 bp, Artificial
  probe
  misc_feature (1)..(25): SEQ ID NO: 2143; WAN024DIA; Start 1185; Stop 1209
tgatgacagtaagagaatccgttat

SEQ ID NO: 316324 - DNA, 25 bp, Artificial
  probe
  misc_feature (1)..(25): SEQ ID NO: 2143; WAN024DIA; Start 1182; Stop 1206
tattgatgacagtaagagaatccgt

SEQ ID NO: 316325 - DNA, 25 bp, Artificial
  probe
  misc_feature (1)..(25): SEQ ID NO: 2143; WAN024DIA; Start 1168; Stop 1192
ggcgagaatgatattattgatgaca

SEQ ID NO: 316326 - DNA, 25 bp, Artificial
  probe
  misc_feature (1)..(25): SEQ ID NO: 2143; WAN024DIA; Start 1196; Stop 1220
agagaatccgttatattgagcaaca

SEQ ID NO: 316327 - DNA, 25 bp, Artificial
  probe
  misc_feature (1)..(25): SEQ ID NO: 2143; WAN024DIA; Start 1197; Stop 1221
gagaatccgttatattgagcaacat

SEQ ID NO: 316328 - DNA, 25 bp, Artificial
  probe
  misc_feature (1)..(25): SEQ ID NO: 2143; WAN024DIA; Start 572; Stop 596
aagcgaatcataatatgttgttggc

SEQ ID NO: 316329 - DNA, 25 bp, Artificial
  probe
  misc_feature (1)..(25): SEQ ID NO: 2143; WAN024DIA; Start 1195; Stop 1219
aagagaatccgttatattgagcaac

SEQ ID NO: 316330 - DNA, 25 bp, Artificial
  probe
  misc_feature (1)..(25): SEQ ID NO: 2143; WAN024DIA; Start 1193; Stop 1217
gtaagagaatccgttatattgagca

SEQ ID NO: 316331 - DNA, 25 bp, Artificial
  probe
  misc_feature (1)..(25): SEQ ID NO: 2143; WAN024DIA; Start 1198; Stop 1222
agaatccgttatattgagcaacatt

SEQ ID NO: 316332 - DNA, 25 bp, Artificial
  probe
  misc_feature (1)..(25): SEQ ID NO: 2143; WAN024DIA; Start 1181; Stop 1205
ttattgatgacagtaagagaatccg

SEQ ID NO: 316333 - DNA, 25 bp, Artificial
  probe
  misc_feature (1)..(25): SEQ ID NO: 2143; WAN024DIA; Start 1192; Stop 1216
agtaagagaatccgttatattgagc

SEQ ID NO: 316334 - DNA, 25 bp, Artificial
  probe
  misc_feature (1)..(25): SEQ ID NO: 2143; WAN024DIA; Start 571; Stop 595
caagcgaatcataatatgttgttgg

SEQ ID NO: 316335 - DNA, 25 bp, Artificial
  probe
  misc_feature (1)..(25): SEQ ID NO: 2143; WAN024DIA; Start 509; Stop 533
caggtcaatatataggaggtcagtt

SEQ ID NO: 316336 - DNA, 25 bp, Artificial
  probe
  misc_feature (1)..(25): SEQ ID NO: 2143; WAN024DIA; Start 1169; Stop 1193
gcgagaatgatattattgatgacag

SEQ ID NO: 316337 - DNA, 25 bp, Artificial
  probe
  misc_feature (1)..(25): SEQ ID NO: 2143; WAN024DIA; Start 508; Stop 532
gcaggtcaatatataggaggtcagt

SEQ ID NO: 316338 - DNA, 25 bp, Artificial
  probe
  misc_feature (1)..(25): SEQ ID NO: 2143; WAN024DIA; Start 1194; Stop 1218
taagagaatccgttatattgagcaa

SEQ ID NO: 316339 - DNA, 25 bp, Artificial
  probe
  misc_feature (1)..(25): SEQ ID NO: 2143; WAN024DIA; Start 1246; Stop 1270
gatagaggagtcaatattcaaggct

SEQ ID NO: 316340 - DNA, 25 bp, Artificial
  probe
  misc_feature (1)..(25): SEQ ID NO: 2143; WAN024DIA; Start 1245; Stop 1269
agatagaggagtcaatattcaaggc

SEQ ID NO: 316341 - DNA, 25 bp, Artificial
  probe
  misc_feature (1)..(25): SEQ ID NO: 2143; WAN024DIA; Start 1186; Stop 1210
gatgacagtaagagaatccgttata

SEQ ID NO: 316342 - DNA, 25 bp, Artificial
  probe
  misc_feature (1)..(25): SEQ ID NO: 2143; WAN024DIA; Start 570; Stop 594
tcaagcgaatcataatatgttgttg

SEQ ID NO: 316343 - DNA, 25 bp, Artificial
  probe
  misc_feature (1)..(25): SEQ ID NO: 2143; WAN024DIA; Start 1249; Stop 1273
agaggagtcaatattcaaggctatt

SEQ ID NO: 316344 - DNA, 25 bp, Artificial
  probe
  misc_feature (1)..(25): SEQ ID NO: 2143; WAN024DIA; Start 1248; Stop 1272
tagaggagtcaatattcaaggctat

SEQ ID NO: 316345 - DNA, 25 bp, Artificial
  probe
  misc_feature (1)..(25): SEQ ID NO: 2143; WAN024DIA; Start 1247; Stop 1271
atagaggagtcaatattcaaggcta

SEQ ID NO: 316346 - DNA, 25 bp, Artificial
  probe
  misc_feature (1)..(25): SEQ ID NO: 2143; WAN024DIA; Start 573; Stop 597
agcgaatcataatatgttgttggcg

SEQ ID NO: 316347 - DNA, 25 bp, Artificial
  probe
  misc_feature (1)..(25): SEQ ID NO: 2143; WAN024DIA; Start 1243; Stop 1267
cgagatagaggagtcaatattcaag

SEQ ID NO: 316348 - DNA, 25 bp, Artificial
  probe
  misc_feature (1)..(25): SEQ ID NO: 2143; WAN024DIA; Start 1190; Stop 1214
acagtaagagaatccgttatattga

SEQ ID NO: 316349 - DNA, 25 bp, Artificial
  probe
  misc_feature (1)..(25): SEQ ID NO: 2143; WAN024DIA; Start 1188; Stop 1212
tgacagtaagagaatccgttatatt

SEQ ID NO: 316350 - DNA, 25 bp, Artificial
  probe
  misc_feature (1)..(25): SEQ ID NO: 2143; WAN024DIA; Start 569; Stop 593
ttcaagcgaatcataatatgttgtt

SEQ ID NO: 316351 - DNA, 25 bp, Artificial
  probe
  misc_feature (1)..(25): SEQ ID NO: 2143; WAN024DIA; Start 223; Stop 247
ttgcgtttatctatttcttgggttc

SEQ ID NO: 316352 - DNA, 25 bp, Artificial
  probe
  misc_feature (1)..(25): SEQ ID NO: 2143; WAN024DIA; Start 221; Stop 245
ctttgcgtttatctatttcttgggt

SEQ ID NO: 316353 - DNA, 25 bp, Artificial
  probe
  misc_feature (1)..(25): SEQ ID NO: 2143; WAN024DIA; Start 218; Stop 242
aggctttgcgtttatctatttcttg

SEQ ID NO: 316354 - DNA, 25 bp, Artificial
  probe
  misc_feature (1)..(25): SEQ ID NO: 2144; WAN024G4K; Start 30; Stop 54
caccattatccttgctatgtctgag

SEQ ID NO: 316355 - DNA, 25 bp, Artificial
  probe
  misc_feature (1)..(25): SEQ ID NO: 2144; WAN024G4K; Start 249; Stop 273
gaccttcatggacttctctgttatt

SEQ ID NO: 316356 - DNA, 25 bp, Artificial
  probe
  misc_feature (1)..(25): SEQ ID NO: 2144; WAN024G4K; Start 481; Stop 505
aagtcttctatccgtgataacaacc

SEQ ID NO: 316357 - DNA, 25 bp, Artificial
  probe
  misc_feature (1)..(25): SEQ ID NO: 2144; WAN024G4K; Start 250; Stop 274
accttcatggacttctctgttattg

SEQ ID NO: 316358 - DNA, 25 bp, Artificial
  probe
  misc_feature (1)..(25): SEQ ID NO: 2144; WAN024G4K; Start 561; Stop 585
tgatccagactacacaattccactt

SEQ ID NO: 316359 - DNA, 25 bp, Artificial
  probe
  misc_feature (1)..(25): SEQ ID NO: 2144; WAN024G4K; Start 29; Stop 53
acaccattatccttgctatgtctga

SEQ ID NO: 316360 - DNA, 25 bp, Artificial
  probe
  misc_feature (1)..(25): SEQ ID NO: 2144; WAN024G4K; Start 562; Stop 586
gatccagactacacaattccacttg

SEQ ID NO: 316361 - DNA, 25 bp, Artificial
  probe
  misc_feature (1)..(25): SEQ ID NO: 2144; WAN024G4K; Start 252; Stop 276
cttcatggacttctctgttattgcc

SEQ ID NO: 316362 - DNA, 25 bp, Artificial
  probe
  misc_feature (1)..(25): SEQ ID NO: 2144; WAN024G4K; Start 251; Stop 275
ccttcatggacttctctgttattgc

SEQ ID NO: 316363 - DNA, 25 bp, Artificial
  probe
  misc_feature (1)..(25): SEQ ID NO: 2144; WAN024G4K; Start 557; Stop 581
cagttgatccagactacacaattcc

SEQ ID NO: 316364 - DNA, 25 bp, Artificial
  probe
  misc_feature (1)..(25): SEQ ID NO: 2144; WAN024G4K; Start 556; Stop 580
ccagttgatccagactacacaattc

SEQ ID NO: 316365 - DNA, 25 bp, Artificial
  probe
  misc_feature (1)..(25): SEQ ID NO: 2144; WAN024G4K; Start 248; Stop 272
tgaccttcatggacttctctgttat

SEQ ID NO: 316366 - DNA, 25 bp, Artificial
  probe
  misc_feature (1)..(25): SEQ ID NO: 2144; WAN024G4K; Start 560; Stop 584
ttgatccagactacacaattccact

SEQ ID NO: 316367 - DNA, 25 bp, Artificial
  probe
  misc_feature (1)..(25): SEQ ID NO: 2144; WAN024G4K; Start 559; Stop 583
gttgatccagactacacaattccac

SEQ ID NO: 316368 - DNA, 25 bp, Artificial
  probe
  misc_feature (1)..(25): SEQ ID NO: 2144; WAN024G4K; Start 480; Stop 504
taagtcttctatccgtgataacaac

SEQ ID NO: 316369 - DNA, 25 bp, Artificial
  probe
  misc_feature (1)..(25): SEQ ID NO: 2144; WAN024G4K; Start 558; Stop 582
agttgatccagactacacaattcca

SEQ ID NO: 316370 - DNA, 25 bp, Artificial
  probe
  misc_feature (1)..(25): SEQ ID NO: 2144; WAN024G4K; Start 800; Stop 824
aaacaagtggctatatcggtgaaat

SEQ ID NO: 316371 - DNA, 25 bp, Artificial
  probe
  misc_feature (1)..(25): SEQ ID NO: 2144; WAN024G4K; Start 31; Stop 55
accattatccttgctatgtctgagg

SEQ ID NO: 316372 - DNA, 25 bp, Artificial
  probe
  misc_feature (1)..(25): SEQ ID NO: 2144; WAN024G4K; Start 113; Stop 137
gagacttcggtacttctgttggaat

SEQ ID NO: 316373 - DNA, 25 bp, Artificial
  probe
  misc_feature (1)..(25): SEQ ID NO: 2144; WAN024G4K; Start 801; Stop 825
aacaagtggctatatcggtgaaatt

SEQ ID NO: 316374 - DNA, 25 bp, Artificial
  probe
  misc_feature (1)..(25): SEQ ID NO: 2144; WAN024G4K; Start 413; Stop 437
ggtttactcacattccaggacttaa

SEQ ID NO: 316375 - DNA, 25 bp, Artificial
  probe
  misc_feature (1)..(25): SEQ ID NO: 2144; WAN024G4K; Start 479; Stop 503
ttaagtcttctatccgtgataacaa

SEQ ID NO: 316376 - DNA, 25 bp, Artificial
  probe
  misc_feature (1)..(25): SEQ ID NO: 2144; WAN024G4K; Start 127; Stop 151
tctgttggaatgcttgaagaatttg

SEQ ID NO: 316377 - DNA, 25 bp, Artificial
  probe
  misc_feature (1)..(25): SEQ ID NO: 2144; WAN024G4K; Start 114; Stop 138
agacttcggtacttctgttggaatg

SEQ ID NO: 316378 - DNA, 25 bp, Artificial
  probe
  misc_feature (1)..(25): SEQ ID NO: 2144; WAN024G4K; Start 130; Stop 154
gttggaatgcttgaagaatttggtc

SEQ ID NO: 316379 - DNA, 25 bp, Artificial
  probe
  misc_feature (1)..(25): SEQ ID NO: 2144; WAN024G4K; Start 128; Stop 152
ctgttggaatgcttgaagaatttgg

SEQ ID NO: 316380 - DNA, 25 bp, Artificial
  probe
  misc_feature (1)..(25): SEQ ID NO: 2144; WAN024G4K; Start 835; Stop 859
atttcagaatcagaagcatttgact

SEQ ID NO: 316381 - DNA, 25 bp, Artificial
  probe
  misc_feature (1)..(25): SEQ ID NO: 2144; WAN024G4K; Start 135; Stop 159
aatgcttgaagaatttggtccagaa

SEQ ID NO: 316382 - DNA, 25 bp, Artificial
  probe
  misc_feature (1)..(25): SEQ ID NO: 2144; WAN024G4K; Start 607; Stop 631
caaggaacggatgtaacagttgtta

SEQ ID NO: 316383 - DNA, 25 bp, Artificial
  probe
  misc_feature (1)..(25): SEQ ID NO: 2144; WAN024G4K; Start 839; Stop 863
cagaatcagaagcatttgactatct

SEQ ID NO: 316384 - DNA, 25 bp, Artificial
  probe
  misc_feature (1)..(25): SEQ ID NO: 2144; WAN024G4K; Start 838; Stop 862
tcagaatcagaagcatttgactatc

SEQ ID NO: 316385 - DNA, 25 bp, Artificial
  probe
  misc_feature (1)..(25): SEQ ID NO: 2144; WAN024G4K; Start 417; Stop 441
tactcacattccaggacttaaggtt

SEQ ID NO: 316386 - DNA, 25 bp, Artificial
  probe
  misc_feature (1)..(25): SEQ ID NO: 2144; WAN024G4K; Start 416; Stop 440
ttactcacattccaggacttaaggt

SEQ ID NO: 316387 - DNA, 25 bp, Artificial
  probe
  misc_feature (1)..(25): SEQ ID NO: 2145; WAN024FMX; Start 1258; Stop 1282
tgtattcagaccattacgatgactt

SEQ ID NO: 316388 - DNA, 25 bp, Artificial
  probe
  misc_feature (1)..(25): SEQ ID NO: 2145; WAN024FMX; Start 1059; Stop 1083
tattatatacacgacgattgctggt

SEQ ID NO: 316389 - DNA, 25 bp, Artificial
  probe
  misc_feature (1)..(25): SEQ ID NO: 2145; WAN024FMX; Start 1257; Stop 1281
atgtattcagaccattacgatgact

SEQ ID NO: 316390 - DNA, 25 bp, Artificial
  probe
  misc_feature (1)..(25): SEQ ID NO: 2145; WAN024FMX; Start 518; Stop 542
tcgcttatattgtcagtaatggaat

SEQ ID NO: 316391 - DNA, 25 bp, Artificial
  probe
  misc_feature (1)..(25): SEQ ID NO: 2145; WAN024FMX; Start 517; Stop 541
ttcgcttatattgtcagtaatggaa

SEQ ID NO: 316392 - DNA, 25 bp, Artificial
  probe
  misc_feature (1)..(25): SEQ ID NO: 2145; WAN024FMX; Start 1058; Stop 1082
atattatatacacgacgattgctgg

SEQ ID NO: 316393 - DNA, 25 bp, Artificial
  probe
  misc_feature (1)..(25): SEQ ID NO: 2145; WAN024FMX; Start 1256; Stop 1280
tatgtattcagaccattacgatgac

SEQ ID NO: 316394 - DNA, 25 bp, Artificial
  probe
  misc_feature (1)..(25): SEQ ID NO: 2145; WAN024FMX; Start 519; Stop 543
cgcttatattgtcagtaatggaatt

SEQ ID NO: 316395 - DNA, 25 bp, Artificial
  probe
  misc_feature (1)..(25): SEQ ID NO: 2145; WAN024FMX; Start 1060; Stop 1084
attatatacacgacgattgctggtg

SEQ ID NO: 316396 - DNA, 25 bp, Artificial
  probe
  misc_feature (1)..(25): SEQ ID NO: 2145; WAN024FMX; Start 1255; Stop 1279
ttatgtattcagaccattacgatga

SEQ ID NO: 316397 - DNA, 25 bp, Artificial
  probe
  misc_feature (1)..(25): SEQ ID NO: 2145; WAN024FMX; Start 810; Stop 834
agcagtagaagagtttgaagaagaa

SEQ ID NO: 316398 - DNA, 25 bp, Artificial
  probe
  misc_feature (1)..(25): SEQ ID NO: 2145; WAN024FMX; Start 1105; Stop 1129
aatgcgatgtttattcctatgcttg

SEQ ID NO: 316399 - DNA, 25 bp, Artificial
  probe
  misc_feature (1)..(25): SEQ ID NO: 2145; WAN024FMX; Start 357; Stop 381
tttgaacttgagaatgtatcgggat

SEQ ID NO: 316400 - DNA, 25 bp, Artificial
  probe
  misc_feature (1)..(25): SEQ ID NO: 2145; WAN024FMX; Start 1104; Stop 1128
aaatgcgatgtttattcctatgctt

SEQ ID NO: 316401 - DNA, 25 bp, Artificial
  probe
  misc_feature (1)..(25): SEQ ID NO: 2145; WAN024FMX; Start 809; Stop 833
cagcagtagaagagtttgaagaaga

SEQ ID NO: 316402 - DNA, 25 bp, Artificial
  probe
  misc_feature (1)..(25): SEQ ID NO: 2145; WAN024FMX; Start 323; Stop 347
ctttgtcagagtggatggtttattt

SEQ ID NO: 316403 - DNA, 25 bp, Artificial
  probe
  misc_feature (1)..(25): SEQ ID NO: 2145; WAN024FMX; Start 863; Stop 887
ttcaccaatattatgcagcactctt

SEQ ID NO: 316404 - DNA, 25 bp, Artificial
  probe
  misc_feature (1)..(25): SEQ ID NO: 2145; WAN024FMX; Start 811; Stop 835
gcagtagaagagtttgaagaagaaa

SEQ ID NO: 316405 - DNA, 25 bp, Artificial
  probe
  misc_feature (1)..(25): SEQ ID NO: 2145; WAN024FMX; Start 715; Stop 739
gatgatagagcggtaggtttgtatg

SEQ ID NO: 316406 - DNA, 25 bp, Artificial
  probe
  misc_feature (1)..(25): SEQ ID NO: 2145; WAN024FMX; Start 987; Stop 1011
attgtcaagtgtagtttcaggaatc

SEQ ID NO: 316407 - DNA, 25 bp, Artificial
  probe
  misc_feature (1)..(25): SEQ ID NO: 2145; WAN024FMX; Start 358; Stop 382
ttgaacttgagaatgtatcgggatg

SEQ ID NO: 316408 - DNA, 25 bp, Artificial
  probe
  misc_feature (1)..(25): SEQ ID NO: 2145; WAN024FMX; Start 799; Stop 823
tggattatttcagcagtagaagagt

SEQ ID NO: 316409 - DNA, 25 bp, Artificial
  probe
  misc_feature (1)..(25): SEQ ID NO: 2145; WAN024FMX; Start 710; Stop 734
ttatggatgatagagcggtaggttt

SEQ ID NO: 316410 - DNA, 25 bp, Artificial
  probe
  misc_feature (1)..(25): SEQ ID NO: 2145; WAN024FMX; Start 709; Stop 733
tttatggatgatagagcggtaggtt

SEQ ID NO: 316411 - DNA, 25 bp, Artificial
  probe
  misc_feature (1)..(25): SEQ ID NO: 2145; WAN024FMX; Start 705; Stop 729
atggtttatggatgatagagcggta

SEQ ID NO: 316412 - DNA, 25 bp, Artificial
  probe
  misc_feature (1)..(25): SEQ ID NO: 2145; WAN024FMX; Start 361; Stop 385
aacttgagaatgtatcgggatgttt

SEQ ID NO: 316413 - DNA, 25 bp, Artificial
  probe
  misc_feature (1)..(25): SEQ ID NO: 2145; WAN024FMX; Start 464; Stop 488
tagcgagtattgtctttctagttcc

SEQ ID NO: 316414 - DNA, 25 bp, Artificial
  probe
  misc_feature (1)..(25): SEQ ID NO: 2145; WAN024FMX; Start 466; Stop 490
gcgagtattgtctttctagttcctt

SEQ ID NO: 316415 - DNA, 25 bp, Artificial
  probe
  misc_feature (1)..(25): SEQ ID NO: 2145; WAN024FMX; Start 418; Stop 442
acattatttgcttgcgatagtatga

SEQ ID NO: 316416 - DNA, 25 bp, Artificial
  probe
  misc_feature (1)..(25): SEQ ID NO: 2145; WAN024FMX; Start 988; Stop 1012
ttgtcaagtgtagtttcaggaatcg

SEQ ID NO: 316417 - DNA, 25 bp, Artificial
  probe
  misc_feature (1)..(25): SEQ ID NO: 2145; WAN024FMX; Start 360; Stop 384
gaacttgagaatgtatcgggatgtt

SEQ ID NO: 316418 - DNA, 25 bp, Artificial
  probe
  misc_feature (1)..(25): SEQ ID NO: 2145; WAN024FMX; Start 655; Stop 679
aatggtattgcatggtggattacaa

SEQ ID NO: 316419 - DNA, 25 bp, Artificial
  probe
  misc_feature (1)..(25): SEQ ID NO: 2145; WAN024FMX; Start 322; Stop 346
actttgtcagagtggatggtttatt

SEQ ID NO: 316420 - DNA, 25 bp, Artificial
  probe
  misc_feature (1)..(25): SEQ ID NO: 2146; WAN024G6C; Start 190; Stop 214
ctgagttctggttcttcttcattgc

SEQ ID NO: 316421 - DNA, 25 bp, Artificial
  probe
  misc_feature (1)..(25): SEQ ID NO: 2146; WAN024G6C; Start 189; Stop 213
gctgagttctggttcttcttcattg

SEQ ID NO: 316422 - DNA, 25 bp, Artificial
  probe
  misc_feature (1)..(25): SEQ ID NO: 2146; WAN024G6C; Start 191; Stop 215
tgagttctggttcttcttcattgct

SEQ ID NO: 316423 - DNA, 25 bp, Artificial
  probe
  misc_feature (1)..(25): SEQ ID NO: 2146; WAN024G6C; Start 230; Stop 254
ttggatttccttcgttatctgtgat

SEQ ID NO: 316424 - DNA, 25 bp, Artificial
  probe
  misc_feature (1)..(25): SEQ ID NO: 2146; WAN024G6C; Start 148; Stop 172
tcattgaccttagcagaagttgacc

SEQ ID NO: 316425 - DNA, 25 bp, Artificial
  probe
  misc_feature (1)..(25): SEQ ID NO: 2146; WAN024G6C; Start 229; Stop 253
cttggatttccttcgttatctgtga

SEQ ID NO: 316426 - DNA, 25 bp, Artificial
  probe
  misc_feature (1)..(25): SEQ ID NO: 2146; WAN024G6C; Start 81; Stop 105
ctctttctcctcttcattggtcaag

SEQ ID NO: 316427 - DNA, 25 bp, Artificial
  probe
  misc_feature (1)..(25): SEQ ID NO: 2146; WAN024G6C; Start 79; Stop 103
aactctttctcctcttcattggtca

SEQ ID NO: 316428 - DNA, 25 bp, Artificial
  probe
  misc_feature (1)..(25): SEQ ID NO: 2146; WAN024G6C; Start 228; Stop 252
acttggatttccttcgttatctgtg

SEQ ID NO: 316429 - DNA, 25 bp, Artificial
  probe
  misc_feature (1)..(25): SEQ ID NO: 2146; WAN024G6C; Start 227; Stop 251
cacttggatttccttcgttatctgt

SEQ ID NO: 316430 - DNA, 25 bp, Artificial
  probe
  misc_feature (1)..(25): SEQ ID NO: 2146; WAN024G6C; Start 80; Stop 104
actctttctcctcttcattggtcaa

SEQ ID NO: 316431 - DNA, 25 bp, Artificial
  probe
  misc_feature (1)..(25): SEQ ID NO: 2146; WAN024G6C; Start 117; Stop 141
ccctatttctttcaagtacatacgg

SEQ ID NO: 316432 - DNA, 25 bp, Artificial
  probe
  misc_feature (1)..(25): SEQ ID NO: 2146; WAN024G6C; Start 122; Stop 146
tttctttcaagtacatacggacagg

SEQ ID NO: 316433 - DNA, 25 bp, Artificial
  probe
  misc_feature (1)..(25): SEQ ID NO: 2146; WAN024G6C; Start 121; Stop 145
atttctttcaagtacatacggacag

SEQ ID NO: 316434 - DNA, 25 bp, Artificial
  probe
  misc_feature (1)..(25): SEQ ID NO: 2146; WAN024G6C; Start 78; Stop 102
caactctttctcctcttcattggtc

SEQ ID NO: 316435 - DNA, 25 bp, Artificial
  probe
  misc_feature (1)..(25): SEQ ID NO: 2146; WAN024G6C; Start 231; Stop 255
tggatttccttcgttatctgtgata

SEQ ID NO: 316436 - DNA, 25 bp, Artificial
  probe
  misc_feature (1)..(25): SEQ ID NO: 2146; WAN024G6C; Start 188; Stop 212
cgctgagttctggttcttcttcatt

SEQ ID NO: 316437 - DNA, 25 bp, Artificial
  probe
  misc_feature (1)..(25): SEQ ID NO: 2146; WAN024G6C; Start 232; Stop 256
ggatttccttcgttatctgtgatag

SEQ ID NO: 316438 - DNA, 25 bp, Artificial
  probe
  misc_feature (1)..(25): SEQ ID NO: 2146; WAN024G6C; Start 118; Stop 142
cctatttctttcaagtacatacgga

SEQ ID NO: 316439 - DNA, 25 bp, Artificial
  probe
  misc_feature (1)..(25): SEQ ID NO: 2146; WAN024G6C; Start 185; Stop 209
catcgctgagttctggttcttcttc

SEQ ID NO: 316440 - DNA, 25 bp, Artificial
  probe
  misc_feature (1)..(25): SEQ ID NO: 2146; WAN024G6C; Start 226; Stop 250
gcacttggatttccttcgttatctg

SEQ ID NO: 316441 - DNA, 25 bp, Artificial
  probe
  misc_feature (1)..(25): SEQ ID NO: 2146; WAN024G6C; Start 120; Stop 144
tatttctttcaagtacatacggaca

SEQ ID NO: 316442 - DNA, 25 bp, Artificial
  probe
  misc_feature (1)..(25): SEQ ID NO: 2146; WAN024G6C; Start 233; Stop 257
gatttccttcgttatctgtgataga

SEQ ID NO: 316443 - DNA, 25 bp, Artificial
  probe
  misc_feature (1)..(25): SEQ ID NO: 2146; WAN024G6C; Start 123; Stop 147
ttctttcaagtacatacggacaggg

SEQ ID NO: 316444 - DNA, 25 bp, Artificial
  probe
  misc_feature (1)..(25): SEQ ID NO: 2146; WAN024G6C; Start 92; Stop 116
cttcattggtcaagagaggaacgac

SEQ ID NO: 316445 - DNA, 25 bp, Artificial
  probe
  misc_feature (1)..(25): SEQ ID NO: 2146; WAN024G6C; Start 119; Stop 143
ctatttctttcaagtacatacggac

SEQ ID NO: 316446 - DNA, 25 bp, Artificial
  probe
  misc_feature (1)..(25): SEQ ID NO: 2146; WAN024G6C; Start 236; Stop 260
ttccttcgttatctgtgatagaaat

SEQ ID NO: 316447 - DNA, 25 bp, Artificial
  probe
  misc_feature (1)..(25): SEQ ID NO: 2146; WAN024G6C; Start 234; Stop 258
atttccttcgttatctgtgatagaa

SEQ ID NO: 316448 - DNA, 25 bp, Artificial
  probe
  misc_feature (1)..(25): SEQ ID NO: 2146; WAN024G6C; Start 74; Stop 98
gtgccaactctttctcctcttcatt

SEQ ID NO: 316449 - DNA, 25 bp, Artificial
  probe
  misc_feature (1)..(25): SEQ ID NO: 2146; WAN024G6C; Start 187; Stop 211
tcgctgagttctggttcttcttcat

SEQ ID NO: 316450 - DNA, 25 bp, Artificial
  probe
  misc_feature (1)..(25): SEQ ID NO: 2146; WAN024G6C; Start 186; Stop 210
atcgctgagttctggttcttcttca

SEQ ID NO: 316451 - DNA, 25 bp, Artificial
  probe
  misc_feature (1)..(25): SEQ ID NO: 2146; WAN024G6C; Start 184; Stop 208
tcatcgctgagttctggttcttctt

SEQ ID NO: 316452 - DNA, 25 bp, Artificial
  probe
  misc_feature (1)..(25): SEQ ID NO: 2146; WAN024G6C; Start 75; Stop 99
tgccaactctttctcctcttcattg

SEQ ID NO: 316453 - DNA, 25 bp, Artificial
  probe
  misc_feature (1)..(25): SEQ ID NO: 2147; WAN024CVM; Start 262; Stop 286
cttgaagcagatgaagatggttatt

SEQ ID NO: 316454 - DNA, 25 bp, Artificial
  probe
  misc_feature (1)..(25): SEQ ID NO: 2147; WAN024CVM; Start 265; Stop 289
gaagcagatgaagatggttatttcc

SEQ ID NO: 316455 - DNA, 25 bp, Artificial
  probe
  misc_feature (1)..(25): SEQ ID NO: 2147; WAN024CVM; Start 167; Stop 191
acttctttgatgccttcttatccat

SEQ ID NO: 316456 - DNA, 25 bp, Artificial
  probe
  misc_feature (1)..(25): SEQ ID NO: 2147; WAN024CVM; Start 263; Stop 287
ttgaagcagatgaagatggttattt

SEQ ID NO: 316457 - DNA, 25 bp, Artificial
  probe
  misc_feature (1)..(25): SEQ ID NO: 2147; WAN024CVM; Start 264; Stop 288
tgaagcagatgaagatggttatttc

SEQ ID NO: 316458 - DNA, 25 bp, Artificial
  probe
  misc_feature (1)..(25): SEQ ID NO: 2147; WAN024CVM; Start 166; Stop 190
cacttctttgatgccttcttatcca

SEQ ID NO: 316459 - DNA, 25 bp, Artificial
  probe
  misc_feature (1)..(25): SEQ ID NO: 2147; WAN024CVM; Start 261; Stop 285
tcttgaagcagatgaagatggttat

SEQ ID NO: 316460 - DNA, 25 bp, Artificial
  probe
  misc_feature (1)..(25): SEQ ID NO: 2147; WAN024CVM; Start 260; Stop 284
ttcttgaagcagatgaagatggtta

SEQ ID NO: 316461 - DNA, 25 bp, Artificial
  probe
  misc_feature (1)..(25): SEQ ID NO: 2147; WAN024CVM; Start 165; Stop 189
tcacttctttgatgccttcttatcc

SEQ ID NO: 316462 - DNA, 25 bp, Artificial
  probe
  misc_feature (1)..(25): SEQ ID NO: 2147; WAN024CVM; Start 168; Stop 192
cttctttgatgccttcttatccatg

SEQ ID NO: 316463 - DNA, 25 bp, Artificial
  probe
  misc_feature (1)..(25): SEQ ID NO: 2147; WAN024CVM; Start 30; Stop 54
aggtttgactgttggagaattatta

SEQ ID NO: 316464 - DNA, 25 bp, Artificial
  probe
  misc_feature (1)..(25): SEQ ID NO: 2147; WAN024CVM; Start 29; Stop 53
caggtttgactgttggagaattatt

SEQ ID NO: 316465 - DNA, 25 bp, Artificial
  probe
  misc_feature (1)..(25): SEQ ID NO: 2147; WAN024CVM; Start 209; Stop 233
ctcacgcagataaacttgaatccaa

SEQ ID NO: 316466 - DNA, 25 bp, Artificial
  probe
  misc_feature (1)..(25): SEQ ID NO: 2147; WAN024CVM; Start 477; Stop 501
acctgaagtctatattcattcggaa

SEQ ID NO: 316467 - DNA, 25 bp, Artificial
  probe
  misc_feature (1)..(25): SEQ ID NO: 2147; WAN024CVM; Start 134; Stop 158
aggtcttaaaggactatctgattca

SEQ ID NO: 316468 - DNA, 25 bp, Artificial
  probe
  misc_feature (1)..(25): SEQ ID NO: 2147; WAN024CVM; Start 169; Stop 193
ttctttgatgccttcttatccatgc

SEQ ID NO: 316469 - DNA, 25 bp, Artificial
  probe
  misc_feature (1)..(25): SEQ ID NO: 2147; WAN024CVM; Start 476; Stop 500
tacctgaagtctatattcattcgga

SEQ ID NO: 316470 - DNA, 25 bp, Artificial
  probe
  misc_feature (1)..(25): SEQ ID NO: 2147; WAN024CVM; Start 268; Stop 292
gcagatgaagatggttatttccaaa

SEQ ID NO: 316471 - DNA, 25 bp, Artificial
  probe
  misc_feature (1)..(25): SEQ ID NO: 2147; WAN024CVM; Start 490; Stop 514
attcattcggaatggatcaatctcc

SEQ ID NO: 316472 - DNA, 25 bp, Artificial
  probe
  misc_feature (1)..(25): SEQ ID NO: 2147; WAN024CVM; Start 267; Stop 291
agcagatgaagatggttatttccaa

SEQ ID NO: 316473 - DNA, 25 bp, Artificial
  probe
  misc_feature (1)..(25): SEQ ID NO: 2147; WAN024CVM; Start 266; Stop 290
aagcagatgaagatggttatttcca

SEQ ID NO: 316474 - DNA, 25 bp, Artificial
  probe
  misc_feature (1)..(25): SEQ ID NO: 2147; WAN024CVM; Start 31; Stop 55
ggtttgactgttggagaattattaa

SEQ ID NO: 316475 - DNA, 25 bp, Artificial
  probe
  misc_feature (1)..(25): SEQ ID NO: 2147; WAN024CVM; Start 587; Stop 611
aagatttgacagaacttcagcaacg

SEQ ID NO: 316476 - DNA, 25 bp, Artificial
  probe
  misc_feature (1)..(25): SEQ ID NO: 2147; WAN024CVM; Start 489; Stop 513
tattcattcggaatggatcaatctc

SEQ ID NO: 316477 - DNA, 25 bp, Artificial
  probe
  misc_feature (1)..(25): SEQ ID NO: 2147; WAN024CVM; Start 28; Stop 52
ccaggtttgactgttggagaattat

SEQ ID NO: 316478 - DNA, 25 bp, Artificial
  probe
  misc_feature (1)..(25): SEQ ID NO: 2147; WAN024CVM; Start 478; Stop 502
cctgaagtctatattcattcggaat

SEQ ID NO: 316479 - DNA, 25 bp, Artificial
  probe
  misc_feature (1)..(25): SEQ ID NO: 2147; WAN024CVM; Start 135; Stop 159
ggtcttaaaggactatctgattcaa

SEQ ID NO: 316480 - DNA, 25 bp, Artificial
  probe
  misc_feature (1)..(25): SEQ ID NO: 2147; WAN024CVM; Start 424; Stop 448
ctggtcattgcagaaggtctctatt

SEQ ID NO: 316481 - DNA, 25 bp, Artificial
  probe
  misc_feature (1)..(25): SEQ ID NO: 2147; WAN024CVM; Start 426; Stop 450
ggtcattgcagaaggtctctattta

SEQ ID NO: 316482 - DNA, 25 bp, Artificial
  probe
  misc_feature (1)..(25): SEQ ID NO: 2147; WAN024CVM; Start 484; Stop 508
gtctatattcattcggaatggatca

SEQ ID NO: 316483 - DNA, 25 bp, Artificial
  probe
  misc_feature (1)..(25): SEQ ID NO: 2147; WAN024CVM; Start 481; Stop 505
gaagtctatattcattcggaatgga

SEQ ID NO: 316484 - DNA, 25 bp, Artificial
  probe
  misc_feature (1)..(25): SEQ ID NO: 2147; WAN024CVM; Start 171; Stop 195
ctttgatgccttcttatccatgctg

SEQ ID NO: 316485 - DNA, 25 bp, Artificial
  probe
  misc_feature (1)..(25): SEQ ID NO: 2147; WAN024CVM; Start 508; Stop 532
aatctccacagaggtcctttctttg

SEQ ID NO: 316486 - DNA, 25 bp, Artificial
  probe
  misc_feature (1)..(25): SEQ ID NO: 2148; WAN024CA5; Start 120; Stop 144
tcttccattaagtaccttagagcaa

SEQ ID NO: 316487 - DNA, 25 bp, Artificial
  probe
  misc_feature (1)..(25): SEQ ID NO: 2148; WAN024CA5; Start 119; Stop 143
atcttccattaagtaccttagagca

SEQ ID NO: 316488 - DNA, 25 bp, Artificial
  probe
  misc_feature (1)..(25): SEQ ID NO: 2148; WAN024CA5; Start 121; Stop 145
cttccattaagtaccttagagcaag

SEQ ID NO: 316489 - DNA, 25 bp, Artificial
  probe
  misc_feature (1)..(25): SEQ ID NO: 2148; WAN024CA5; Start 175; Stop 199
tactatgtcatttgtcaaggaggag

SEQ ID NO: 316490 - DNA, 25 bp, Artificial
  probe
  misc_feature (1)..(25): SEQ ID NO: 2148; WAN024CA5; Start 174; Stop 198
atactatgtcatttgtcaaggagga

SEQ ID NO: 316491 - DNA, 25 bp, Artificial
  probe
  misc_feature (1)..(25): SEQ ID NO: 2148; WAN024CA5; Start 177; Stop 201
ctatgtcatttgtcaaggaggagtc

SEQ ID NO: 316492 - DNA, 25 bp, Artificial
  probe
  misc_feature (1)..(25): SEQ ID NO: 2148; WAN024CA5; Start 118; Stop 142
aatcttccattaagtaccttagagc

SEQ ID NO: 316493 - DNA, 25 bp, Artificial
  probe
  misc_feature (1)..(25): SEQ ID NO: 2148; WAN024CA5; Start 173; Stop 197
aatactatgtcatttgtcaaggagg

SEQ ID NO: 316494 - DNA, 25 bp, Artificial
  probe
  misc_feature (1)..(25): SEQ ID NO: 2148; WAN024CA5; Start 147; Stop 171
ctacaaagaactcaaacctgaccat

SEQ ID NO: 316495 - DNA, 25 bp, Artificial
  probe
  misc_feature (1)..(25): SEQ ID NO: 2148; WAN024CA5; Start 176; Stop 200
actatgtcatttgtcaaggaggagt

SEQ ID NO: 316496 - DNA, 25 bp, Artificial
  probe
  misc_feature (1)..(25): SEQ ID NO: 2148; WAN024CA5; Start 255; Stop 279
cgtagaaggtggtatgaatgcttgg

SEQ ID NO: 316497 - DNA, 25 bp, Artificial
  probe
  misc_feature (1)..(25): SEQ ID NO: 2148; WAN024CA5; Start 152; Stop 176
aagaactcaaacctgaccatgaata

SEQ ID NO: 316498 - DNA, 25 bp, Artificial
  probe
  misc_feature (1)..(25): SEQ ID NO: 2148; WAN024CA5; Start 253; Stop 277
aacgtagaaggtggtatgaatgctt

SEQ ID NO: 316499 - DNA, 25 bp, Artificial
  probe
  misc_feature (1)..(25): SEQ ID NO: 2148; WAN024CA5; Start 158; Stop 182
tcaaacctgaccatgaatactatgt

SEQ ID NO: 316500 - DNA, 25 bp, Artificial
  probe
  misc_feature (1)..(25): SEQ ID NO: 2148; WAN024CA5; Start 155; Stop 179
aactcaaacctgaccatgaatacta

SEQ ID NO: 316501 - DNA, 25 bp, Artificial
  probe
  misc_feature (1)..(25): SEQ ID NO: 2148; WAN024CA5; Start 156; Stop 180
actcaaacctgaccatgaatactat

SEQ ID NO: 316502 - DNA, 25 bp, Artificial
  probe
  misc_feature (1)..(25): SEQ ID NO: 2148; WAN024CA5; Start 154; Stop 178
gaactcaaacctgaccatgaatact

SEQ ID NO: 316503 - DNA, 25 bp, Artificial
  probe
  misc_feature (1)..(25): SEQ ID NO: 2148; WAN024CA5; Start 153; Stop 177
agaactcaaacctgaccatgaatac

SEQ ID NO: 316504 - DNA, 25 bp, Artificial
  probe
  misc_feature (1)..(25): SEQ ID NO: 2148; WAN024CA5; Start 157; Stop 181
ctcaaacctgaccatgaatactatg

SEQ ID NO: 316505 - DNA, 25 bp, Artificial
  probe
  misc_feature (1)..(25): SEQ ID NO: 2148; WAN024CA5; Start 151; Stop 175
aaagaactcaaacctgaccatgaat

SEQ ID NO: 316506 - DNA, 25 bp, Artificial
  probe
  misc_feature (1)..(25): SEQ ID NO: 2148; WAN024CA5; Start 256; Stop 280
gtagaaggtggtatgaatgcttggc

SEQ ID NO: 316507 - DNA, 25 bp, Artificial
  probe
  misc_feature (1)..(25): SEQ ID NO: 2148; WAN024CA5; Start 171; Stop 195
tgaatactatgtcatttgtcaagga

SEQ ID NO: 316508 - DNA, 25 bp, Artificial
  probe
  misc_feature (1)..(25): SEQ ID NO: 2148; WAN024CA5; Start 172; Stop 196
gaatactatgtcatttgtcaaggag

SEQ ID NO: 316509 - DNA, 25 bp, Artificial
  probe
  misc_feature (1)..(25): SEQ ID NO: 2148; WAN024CA5; Start 148; Stop 172
tacaaagaactcaaacctgaccatg

SEQ ID NO: 316510 - DNA, 25 bp, Artificial
  probe
  misc_feature (1)..(25): SEQ ID NO: 2148; WAN024CA5; Start 159; Stop 183
caaacctgaccatgaatactatgtc

SEQ ID NO: 316511 - DNA, 25 bp, Artificial
  probe
  misc_feature (1)..(25): SEQ ID NO: 2148; WAN024CA5; Start 252; Stop 276
caacgtagaaggtggtatgaatgct

SEQ ID NO: 316512 - DNA, 25 bp, Artificial
  probe
  misc_feature (1)..(25): SEQ ID NO: 2148; WAN024CA5; Start 150; Stop 174
caaagaactcaaacctgaccatgaa

SEQ ID NO: 316513 - DNA, 25 bp, Artificial
  probe
  misc_feature (1)..(25): SEQ ID NO: 2148; WAN024CA5; Start 254; Stop 278
acgtagaaggtggtatgaatgcttg

SEQ ID NO: 316514 - DNA, 25 bp, Artificial
  probe
  misc_feature (1)..(25): SEQ ID NO: 2148; WAN024CA5; Start 52; Stop 76
aatctagaacttatcgatgtccgtg

SEQ ID NO: 316515 - DNA, 25 bp, Artificial
  probe
  misc_feature (1)..(25): SEQ ID NO: 2148; WAN024CA5; Start 142; Stop 166
caaggctacaaagaactcaaacctg

SEQ ID NO: 316516 - DNA, 25 bp, Artificial
  probe
  misc_feature (1)..(25): SEQ ID NO: 2148; WAN024CA5; Start 178; Stop 202
tatgtcatttgtcaaggaggagtcc

SEQ ID NO: 316517 - DNA, 25 bp, Artificial
  probe
  misc_feature (1)..(25): SEQ ID NO: 2148; WAN024CA5; Start 53; Stop 77
atctagaacttatcgatgtccgtga

SEQ ID NO: 316518 - DNA, 25 bp, Artificial
  probe
  misc_feature (1)..(25): SEQ ID NO: 2148; WAN024CA5; Start 54; Stop 78
tctagaacttatcgatgtccgtgaa

SEQ ID NO: 316519 - DNA, 25 bp, Artificial
  probe
  misc_feature (1)..(25): SEQ ID NO: 2149; WAN024D99; Start 17; Stop 41
ttagtgtgattgtgccagtctataa

SEQ ID NO: 316520 - DNA, 25 bp, Artificial
  probe
  misc_feature (1)..(25): SEQ ID NO: 2149; WAN024D99; Start 18; Stop 42
tagtgtgattgtgccagtctataat

SEQ ID NO: 316521 - DNA, 25 bp, Artificial
  probe
  misc_feature (1)..(25): SEQ ID NO: 2149; WAN024D99; Start 16; Stop 40
attagtgtgattgtgccagtctata

SEQ ID NO: 316522 - DNA, 25 bp, Artificial
  probe
  misc_feature (1)..(25): SEQ ID NO: 2149; WAN024D99; Start 15; Stop 39
aattagtgtgattgtgccagtctat

SEQ ID NO: 316523 - DNA, 25 bp, Artificial
  probe
  misc_feature (1)..(25): SEQ ID NO: 2149; WAN024D99; Start 321; Stop 345
attagttcaagaagatgcggatgtt

SEQ ID NO: 316524 - DNA, 25 bp, Artificial
  probe
  misc_feature (1)..(25): SEQ ID NO: 2149; WAN024D99; Start 19; Stop 43
agtgtgattgtgccagtctataatg

SEQ ID NO: 316525 - DNA, 25 bp, Artificial
  probe
  misc_feature (1)..(25): SEQ ID NO: 2149; WAN024D99; Start 319; Stop 343
caattagttcaagaagatgcggatg

SEQ ID NO: 316526 - DNA, 25 bp, Artificial
  probe
  misc_feature (1)..(25): SEQ ID NO: 2149; WAN024D99; Start 21; Stop 45
tgtgattgtgccagtctataatgtg

SEQ ID NO: 316527 - DNA, 25 bp, Artificial
  probe
  misc_feature (1)..(25): SEQ ID NO: 2149; WAN024D99; Start 20; Stop 44
gtgtgattgtgccagtctataatgt

SEQ ID NO: 316528 - DNA, 25 bp, Artificial
  probe
  misc_feature (1)..(25): SEQ ID NO: 2149; WAN024D99; Start 320; Stop 344
aattagttcaagaagatgcggatgt

SEQ ID NO: 316529 - DNA, 25 bp, Artificial
  probe
  misc_feature (1)..(25): SEQ ID NO: 2149; WAN024D99; Start 817; Stop 841
gaagcctattctcagattcatcgtt

SEQ ID NO: 316530 - DNA, 25 bp, Artificial
  probe
  misc_feature (1)..(25): SEQ ID NO: 2149; WAN024D99; Start 776; Stop 800
ttctggataagatgttgctagatga

SEQ ID NO: 316531 - DNA, 25 bp, Artificial
  probe
  misc_feature (1)..(25): SEQ ID NO: 2149; WAN024D99; Start 777; Stop 801
tctggataagatgttgctagatgat

SEQ ID NO: 316532 - DNA, 25 bp, Artificial
  probe
  misc_feature (1)..(25): SEQ ID NO: 2149; WAN024D99; Start 72; Stop 96
ttccattcagaagcagacctatcaa

SEQ ID NO: 316533 - DNA, 25 bp, Artificial
  probe
  misc_feature (1)..(25): SEQ ID NO: 2149; WAN024D99; Start 778; Stop 802
ctggataagatgttgctagatgatc

SEQ ID NO: 316534 - DNA, 25 bp, Artificial
  probe
  misc_feature (1)..(25): SEQ ID NO: 2149; WAN024D99; Start 14; Stop 38
taattagtgtgattgtgccagtcta

SEQ ID NO: 316535 - DNA, 25 bp, Artificial
  probe
  misc_feature (1)..(25): SEQ ID NO: 2149; WAN024D99; Start 13; Stop 37
ttaattagtgtgattgtgccagtct

SEQ ID NO: 316536 - DNA, 25 bp, Artificial
  probe
  misc_feature (1)..(25): SEQ ID NO: 2149; WAN024D99; Start 11; Stop 35
cattaattagtgtgattgtgccagt

SEQ ID NO: 316537 - DNA, 25 bp, Artificial
  probe
  misc_feature (1)..(25): SEQ ID NO: 2149; WAN024D99; Start 775; Stop 799
attctggataagatgttgctagatg

SEQ ID NO: 316538 - DNA, 25 bp, Artificial
  probe
  misc_feature (1)..(25): SEQ ID NO: 2149; WAN024D99; Start 12; Stop 36
attaattagtgtgattgtgccagtc

SEQ ID NO: 316539 - DNA, 25 bp, Artificial
  probe
  misc_feature (1)..(25): SEQ ID NO: 2149; WAN024D99; Start 482; Stop 506
gcaataagctaatcaagagacagat

SEQ ID NO: 316540 - DNA, 25 bp, Artificial
  probe
  misc_feature (1)..(25): SEQ ID NO: 2149; WAN024D99; Start 481; Stop 505
tgcaataagctaatcaagagacaga

SEQ ID NO: 316541 - DNA, 25 bp, Artificial
  probe
  misc_feature (1)..(25): SEQ ID NO: 2149; WAN024D99; Start 536; Stop 560
tgatttacgaagatgcctattacca

SEQ ID NO: 316542 - DNA, 25 bp, Artificial
  probe
  misc_feature (1)..(25): SEQ ID NO: 2149; WAN024D99; Start 105; Stop 129
aattattcttgttgatgatggtgca

SEQ ID NO: 316543 - DNA, 25 bp, Artificial
  probe
  misc_feature (1)..(25): SEQ ID NO: 2149; WAN024D99; Start 818; Stop 842
aagcctattctcagattcatcgttt

SEQ ID NO: 316544 - DNA, 25 bp, Artificial
  probe
  misc_feature (1)..(25): SEQ ID NO: 2149; WAN024D99; Start 535; Stop 559
ttgatttacgaagatgcctattacc

SEQ ID NO: 316545 - DNA, 25 bp, Artificial
  probe
  misc_feature (1)..(25): SEQ ID NO: 2149; WAN024D99; Start 533; Stop 557
ggttgatttacgaagatgcctatta

SEQ ID NO: 316546 - DNA, 25 bp, Artificial
  probe
  misc_feature (1)..(25): SEQ ID NO: 2149; WAN024D99; Start 322; Stop 346
ttagttcaagaagatgcggatgttt

SEQ ID NO: 316547 - DNA, 25 bp, Artificial
  probe
  misc_feature (1)..(25): SEQ ID NO: 2149; WAN024D99; Start 285; Stop 309
tatccatccagaaatgattcagagc

SEQ ID NO: 316548 - DNA, 25 bp, Artificial
  probe
  misc_feature (1)..(25): SEQ ID NO: 2149; WAN024D99; Start 106; Stop 130
attattcttgttgatgatggtgcaa

SEQ ID NO: 316549 - DNA, 25 bp, Artificial
  probe
  misc_feature (1)..(25): SEQ ID NO: 2149; WAN024D99; Start 532; Stop 556
gggttgatttacgaagatgcctatt

SEQ ID NO: 316550 - DNA, 25 bp, Artificial
  probe
  misc_feature (1)..(25): SEQ ID NO: 2149; WAN024D99; Start 22; Stop 46
gtgattgtgccagtctataatgtgg

SEQ ID NO: 316551 - DNA, 25 bp, Artificial
  probe
  misc_feature (1)..(25): SEQ ID NO: 2149; WAN024D99; Start 773; Stop 797
ttattctggataagatgttgctaga

SEQ ID NO: 316552 - DNA, 25 bp, Artificial
  probe
  misc_feature (1)..(25): SEQ ID NO: 2150; WAN024DAH; Start 369; Stop 393
gaccaataccaatccttacctacaa

SEQ ID NO: 316553 - DNA, 25 bp, Artificial
  probe
  misc_feature (1)..(25): SEQ ID NO: 2150; WAN024DAH; Start 332; Stop 356
tgaatactaaggctgagattgaaga

SEQ ID NO: 316554 - DNA, 25 bp, Artificial
  probe
  misc_feature (1)..(25): SEQ ID NO: 2150; WAN024DAH; Start 331; Stop 355
ttgaatactaaggctgagattgaag

SEQ ID NO: 316555 - DNA, 25 bp, Artificial
  probe
  misc_feature (1)..(25): SEQ ID NO: 2150; WAN024DAH; Start 659; Stop 683
ggatgtacgacctactctatactct

SEQ ID NO: 316556 - DNA, 25 bp, Artificial
  probe
  misc_feature (1)..(25): SEQ ID NO: 2150; WAN024DAH; Start 333; Stop 357
gaatactaaggctgagattgaagaa

SEQ ID NO: 316557 - DNA, 25 bp, Artificial
  probe
  misc_feature (1)..(25): SEQ ID NO: 2150; WAN024DAH; Start 658; Stop 682
tggatgtacgacctactctatactc

SEQ ID NO: 316558 - DNA, 25 bp, Artificial
  probe
  misc_feature (1)..(25): SEQ ID NO: 2150; WAN024DAH; Start 657; Stop 681
atggatgtacgacctactctatact

SEQ ID NO: 316559 - DNA, 25 bp, Artificial
  probe
  misc_feature (1)..(25): SEQ ID NO: 2150; WAN024DAH; Start 330; Stop 354
cttgaatactaaggctgagattgaa

SEQ ID NO: 316560 - DNA, 25 bp, Artificial
  probe
  misc_feature (1)..(25): SEQ ID NO: 2150; WAN024DAH; Start 654; Stop 678
agaatggatgtacgacctactctat

SEQ ID NO: 316561 - DNA, 25 bp, Artificial
  probe
  misc_feature (1)..(25): SEQ ID NO: 2150; WAN024DAH; Start 653; Stop 677
aagaatggatgtacgacctactcta

SEQ ID NO: 316562 - DNA, 25 bp, Artificial
  probe
  misc_feature (1)..(25): SEQ ID NO: 2150; WAN024DAH; Start 656; Stop 680
aatggatgtacgacctactctatac

SEQ ID NO: 316563 - DNA, 25 bp, Artificial
  probe
  misc_feature (1)..(25): SEQ ID NO: 2150; WAN024DAH; Start 691; Stop 715
aatgaagaaggctacacagagagtc

SEQ ID NO: 316564 - DNA, 25 bp, Artificial
  probe
  misc_feature (1)..(25): SEQ ID NO: 2150; WAN024DAH; Start 655; Stop 679
gaatggatgtacgacctactctata

SEQ ID NO: 316565 - DNA, 25 bp, Artificial
  probe
  misc_feature (1)..(25): SEQ ID NO: 2150; WAN024DAH; Start 660; Stop 684
gatgtacgacctactctatactctt

SEQ ID NO: 316566 - DNA, 25 bp, Artificial
  probe
  misc_feature (1)..(25): SEQ ID NO: 2150; WAN024DAH; Start 863; Stop 887
gaacttccaaccatgacttcttctc

SEQ ID NO: 316567 - DNA, 25 bp, Artificial
  probe
  misc_feature (1)..(25): SEQ ID NO: 2150; WAN024DAH; Start 864; Stop 888
aacttccaaccatgacttcttctct

SEQ ID NO: 316568 - DNA, 25 bp, Artificial
  probe
  misc_feature (1)..(25): SEQ ID NO: 2150; WAN024DAH; Start 366; Stop 390
atggaccaataccaatccttaccta

SEQ ID NO: 316569 - DNA, 25 bp, Artificial
  probe
  misc_feature (1)..(25): SEQ ID NO: 2150; WAN024DAH; Start 297; Stop 321
ccacgctaaatcttactcatcaatc

SEQ ID NO: 316570 - DNA, 25 bp, Artificial
  probe
  misc_feature (1)..(25): SEQ ID NO: 2150; WAN024DAH; Start 296; Stop 320
tccacgctaaatcttactcatcaat

SEQ ID NO: 316571 - DNA, 25 bp, Artificial
  probe
  misc_feature (1)..(25): SEQ ID NO: 2150; WAN024DAH; Start 478; Stop 502
ctcttctactctggtttcttcactc

SEQ ID NO: 316572 - DNA, 25 bp, Artificial
  probe
  misc_feature (1)..(25): SEQ ID NO: 2150; WAN024DAH; Start 474; Stop 498
cttcctcttctactctggtttcttc

SEQ ID NO: 316573 - DNA, 25 bp, Artificial
  probe
  misc_feature (1)..(25): SEQ ID NO: 2150; WAN024DAH; Start 504; Stop 528
cctctactatctcggtaacaacaaa

SEQ ID NO: 316574 - DNA, 25 bp, Artificial
  probe
  misc_feature (1)..(25): SEQ ID NO: 2150; WAN024DAH; Start 370; Stop 394
accaataccaatccttacctacaaa

SEQ ID NO: 316575 - DNA, 25 bp, Artificial
  probe
  misc_feature (1)..(25): SEQ ID NO: 2150; WAN024DAH; Start 364; Stop 388
gaatggaccaataccaatccttacc

SEQ ID NO: 316576 - DNA, 25 bp, Artificial
  probe
  misc_feature (1)..(25): SEQ ID NO: 2150; WAN024DAH; Start 725; Stop 749
gtgttggttggactgaagaggttaa

SEQ ID NO: 316577 - DNA, 25 bp, Artificial
  probe
  misc_feature (1)..(25): SEQ ID NO: 2150; WAN024DAH; Start 368; Stop 392
ggaccaataccaatccttacctaca

SEQ ID NO: 316578 - DNA, 25 bp, Artificial
  probe
  misc_feature (1)..(25): SEQ ID NO: 2150; WAN024DAH; Start 865; Stop 889
acttccaaccatgacttcttctctc

SEQ ID NO: 316579 - DNA, 25 bp, Artificial
  probe
  misc_feature (1)..(25): SEQ ID NO: 2150; WAN024DAH; Start 406; Stop 430
attgtcaacgaaatctacctaaacg

SEQ ID NO: 316580 - DNA, 25 bp, Artificial
  probe
  misc_feature (1)..(25): SEQ ID NO: 2150; WAN024DAH; Start 290; Stop 314
aatctgtccacgctaaatcttactc

SEQ ID NO: 316581 - DNA, 25 bp, Artificial
  probe
  misc_feature (1)..(25): SEQ ID NO: 2150; WAN024DAH; Start 289; Stop 313
gaatctgtccacgctaaatcttact

SEQ ID NO: 316582 - DNA, 25 bp, Artificial
  probe
  misc_feature (1)..(25): SEQ ID NO: 2150; WAN024DAH; Start 867; Stop 891
ttccaaccatgacttcttctctcaa

SEQ ID NO: 316583 - DNA, 25 bp, Artificial
  probe
  misc_feature (1)..(25): SEQ ID NO: 2150; WAN024DAH; Start 475; Stop 499
ttcctcttctactctggtttcttca

SEQ ID NO: 316584 - DNA, 25 bp, Artificial
  probe
  misc_feature (1)..(25): SEQ ID NO: 2150; WAN024DAH; Start 692; Stop 716
atgaagaaggctacacagagagtct

SEQ ID NO: 316585 - DNA, 25 bp, Artificial
  probe
  misc_feature (1)..(25): SEQ ID NO: 2151; WAN024AVU; Start 134; Stop 158
ctccaacttatcgtgaagccttgat

SEQ ID NO: 316586 - DNA, 25 bp, Artificial
  probe
  misc_feature (1)..(25): SEQ ID NO: 2151; WAN024AVU; Start 123; Stop 147
agaaattgtcactccaacttatcgt

SEQ ID NO: 316587 - DNA, 25 bp, Artificial
  probe
  misc_feature (1)..(25): SEQ ID NO: 2151; WAN024AVU; Start 122; Stop 146
gagaaattgtcactccaacttatcg

SEQ ID NO: 316588 - DNA, 25 bp, Artificial
  probe
  misc_feature (1)..(25): SEQ ID NO: 2151; WAN024AVU; Start 121; Stop 145
cgagaaattgtcactccaacttatc

SEQ ID NO: 316589 - DNA, 25 bp, Artificial
  probe
  misc_feature (1)..(25): SEQ ID NO: 2151; WAN024AVU; Start 120; Stop 144
acgagaaattgtcactccaacttat

SEQ ID NO: 316590 - DNA, 25 bp, Artificial
  probe
  misc_feature (1)..(25): SEQ ID NO: 2151; WAN024AVU; Start 119; Stop 143
aacgagaaattgtcactccaactta

SEQ ID NO: 316591 - DNA, 25 bp, Artificial
  probe
  misc_feature (1)..(25): SEQ ID NO: 2151; WAN024AVU; Start 135; Stop 159
tccaacttatcgtgaagccttgatc

SEQ ID NO: 316592 - DNA, 25 bp, Artificial
  probe
  misc_feature (1)..(25): SEQ ID NO: 2151; WAN024AVU; Start 115; Stop 139
gaagaacgagaaattgtcactccaa

SEQ ID NO: 316593 - DNA, 25 bp, Artificial
  probe
  misc_feature (1)..(25): SEQ ID NO: 2151; WAN024AVU; Start 112; Stop 136
ttggaagaacgagaaattgtcactc

SEQ ID NO: 316594 - DNA, 25 bp, Artificial
  probe
  misc_feature (1)..(25): SEQ ID NO: 2151; WAN024AVU; Start 124; Stop 148
gaaattgtcactccaacttatcgtg

SEQ ID NO: 316595 - DNA, 25 bp, Artificial
  probe
  misc_feature (1)..(25): SEQ ID NO: 2151; WAN024AVU; Start 118; Stop 142
gaacgagaaattgtcactccaactt

SEQ ID NO: 316596 - DNA, 25 bp, Artificial
  probe
  misc_feature (1)..(25): SEQ ID NO: 2151; WAN024AVU; Start 116; Stop 140
aagaacgagaaattgtcactccaac

SEQ ID NO: 316597 - DNA, 25 bp, Artificial
  probe
  misc_feature (1)..(25): SEQ ID NO: 2151; WAN024AVU; Start 117; Stop 141
agaacgagaaattgtcactccaact

SEQ ID NO: 316598 - DNA, 25 bp, Artificial
  probe
  misc_feature (1)..(25): SEQ ID NO: 2151; WAN024AVU; Start 133; Stop 157
actccaacttatcgtgaagccttga

SEQ ID NO: 316599 - DNA, 25 bp, Artificial
  probe
  misc_feature (1)..(25): SEQ ID NO: 2151; WAN024AVU; Start 132; Stop 156
cactccaacttatcgtgaagccttg

SEQ ID NO: 316600 - DNA, 25 bp, Artificial
  probe
  misc_feature (1)..(25): SEQ ID NO: 2151; WAN024AVU; Start 114; Stop 138
ggaagaacgagaaattgtcactcca

SEQ ID NO: 316601 - DNA, 25 bp, Artificial
  probe
  misc_feature (1)..(25): SEQ ID NO: 2151; WAN024AVU; Start 113; Stop 137
tggaagaacgagaaattgtcactcc

SEQ ID NO: 316602 - DNA, 25 bp, Artificial
  probe
  misc_feature (1)..(25): SEQ ID NO: 2151; WAN024AVU; Start 126; Stop 150
aattgtcactccaacttatcgtgaa

SEQ ID NO: 316603 - DNA, 25 bp, Artificial
  probe
  misc_feature (1)..(25): SEQ ID NO: 2151; WAN024AVU; Start 127; Stop 151
attgtcactccaacttatcgtgaag

SEQ ID NO: 316604 - DNA, 25 bp, Artificial
  probe
  misc_feature (1)..(25): SEQ ID NO: 2151; WAN024AVU; Start 136; Stop 160
ccaacttatcgtgaagccttgatca

SEQ ID NO: 316605 - DNA, 25 bp, Artificial
  probe
  misc_feature (1)..(25): SEQ ID NO: 2151; WAN024AVU; Start 164; Stop 188
gtgaaaagtcatttccaactggttt

SEQ ID NO: 316606 - DNA, 25 bp, Artificial
  probe
  misc_feature (1)..(25): SEQ ID NO: 2151; WAN024AVU; Start 165; Stop 189
tgaaaagtcatttccaactggttta

SEQ ID NO: 316607 - DNA, 25 bp, Artificial
  probe
  misc_feature (1)..(25): SEQ ID NO: 2151; WAN024AVU; Start 125; Stop 149
aaattgtcactccaacttatcgtga

SEQ ID NO: 316608 - DNA, 25 bp, Artificial
  probe
  misc_feature (1)..(25): SEQ ID NO: 2151; WAN024AVU; Start 128; Stop 152
ttgtcactccaacttatcgtgaagc

SEQ ID NO: 316609 - DNA, 25 bp, Artificial
  probe
  misc_feature (1)..(25): SEQ ID NO: 2151; WAN024AVU; Start 163; Stop 187
cgtgaaaagtcatttccaactggtt

SEQ ID NO: 316610 - DNA, 25 bp, Artificial
  probe
  misc_feature (1)..(25): SEQ ID NO: 2151; WAN024AVU; Start 131; Stop 155
tcactccaacttatcgtgaagcctt

SEQ ID NO: 316611 - DNA, 25 bp, Artificial
  probe
  misc_feature (1)..(25): SEQ ID NO: 2151; WAN024AVU; Start 137; Stop 161
caacttatcgtgaagccttgatcac

SEQ ID NO: 316612 - DNA, 25 bp, Artificial
  probe
  misc_feature (1)..(25): SEQ ID NO: 2151; WAN024AVU; Start 130; Stop 154
gtcactccaacttatcgtgaagcct

SEQ ID NO: 316613 - DNA, 25 bp, Artificial
  probe
  misc_feature (1)..(25): SEQ ID NO: 2151; WAN024AVU; Start 129; Stop 153
tgtcactccaacttatcgtgaagcc

SEQ ID NO: 316614 - DNA, 25 bp, Artificial
  probe
  misc_feature (1)..(25): SEQ ID NO: 2151; WAN024AVU; Start 162; Stop 186
gcgtgaaaagtcatttccaactggt

SEQ ID NO: 316615 - DNA, 25 bp, Artificial
  probe
  misc_feature (1)..(25): SEQ ID NO: 2152; WAN024FF8; Start 127; Stop 151
gatacctgtaccgattgtgtagtaa

SEQ ID NO: 316616 - DNA, 25 bp, Artificial
  probe
  misc_feature (1)..(25): SEQ ID NO: 2152; WAN024FF8; Start 126; Stop 150
cgatacctgtaccgattgtgtagta

SEQ ID NO: 316617 - DNA, 25 bp, Artificial
  probe
  misc_feature (1)..(25): SEQ ID NO: 2152; WAN024FF8; Start 45; Stop 69
ggtgtctagcaacataataatgacc

SEQ ID NO: 316618 - DNA, 25 bp, Artificial
  probe
  misc_feature (1)..(25): SEQ ID NO: 2152; WAN024FF8; Start 135; Stop 159
taccgattgtgtagtaaaccaagtt

SEQ ID NO: 316619 - DNA, 25 bp, Artificial
  probe
  misc_feature (1)..(25): SEQ ID NO: 2152; WAN024FF8; Start 129; Stop 153
tacctgtaccgattgtgtagtaaac

SEQ ID NO: 316620 - DNA, 25 bp, Artificial
  probe
  misc_feature (1)..(25): SEQ ID NO: 2152; WAN024FF8; Start 128; Stop 152
atacctgtaccgattgtgtagtaaa

SEQ ID NO: 316621 - DNA, 25 bp, Artificial
  probe
  misc_feature (1)..(25): SEQ ID NO: 2152; WAN024FF8; Start 216; Stop 240
ttacgtctgttgtgaagtacattgg

SEQ ID NO: 316622 - DNA, 25 bp, Artificial
  probe
  misc_feature (1)..(25): SEQ ID NO: 2152; WAN024FF8; Start 43; Stop 67
tgggtgtctagcaacataataatga

SEQ ID NO: 316623 - DNA, 25 bp, Artificial
  probe
  misc_feature (1)..(25): SEQ ID NO: 2152; WAN024FF8; Start 134; Stop 158
gtaccgattgtgtagtaaaccaagt

SEQ ID NO: 316624 - DNA, 25 bp, Artificial
  probe
  misc_feature (1)..(25): SEQ ID NO: 2152; WAN024FF8; Start 133; Stop 157
tgtaccgattgtgtagtaaaccaag

SEQ ID NO: 316625 - DNA, 25 bp, Artificial
  probe
  misc_feature (1)..(25): SEQ ID NO: 2152; WAN024FF8; Start 132; Stop 156
ctgtaccgattgtgtagtaaaccaa

SEQ ID NO: 316626 - DNA, 25 bp, Artificial
  probe
  misc_feature (1)..(25): SEQ ID NO: 2152; WAN024FF8; Start 39; Stop 63
ccattgggtgtctagcaacataata

SEQ ID NO: 316627 - DNA, 25 bp, Artificial
  probe
  misc_feature (1)..(25): SEQ ID NO: 2152; WAN024FF8; Start 47; Stop 71
tgtctagcaacataataatgaccca

SEQ ID NO: 316628 - DNA, 25 bp, Artificial
  probe
  misc_feature (1)..(25): SEQ ID NO: 2152; WAN024FF8; Start 46; Stop 70
gtgtctagcaacataataatgaccc

SEQ ID NO: 316629 - DNA, 25 bp, Artificial
  probe
  misc_feature (1)..(25): SEQ ID NO: 2152; WAN024FF8; Start 44; Stop 68
gggtgtctagcaacataataatgac

SEQ ID NO: 316630 - DNA, 25 bp, Artificial
  probe
  misc_feature (1)..(25): SEQ ID NO: 2152; WAN024FF8; Start 42; Stop 66
ttgggtgtctagcaacataataatg

SEQ ID NO: 316631 - DNA, 25 bp, Artificial
  probe
  misc_feature (1)..(25): SEQ ID NO: 2152; WAN024FF8; Start 40; Stop 64
cattgggtgtctagcaacataataa

SEQ ID NO: 316632 - DNA, 25 bp, Artificial
  probe
  misc_feature (1)..(25): SEQ ID NO: 2152; WAN024FF8; Start 36; Stop 60
tatccattgggtgtctagcaacata

SEQ ID NO: 316633 - DNA, 25 bp, Artificial
  probe
  misc_feature (1)..(25): SEQ ID NO: 2152; WAN024FF8; Start 48; Stop 72
gtctagcaacataataatgacccat

SEQ ID NO: 316634 - DNA, 25 bp, Artificial
  probe
  misc_feature (1)..(25): SEQ ID NO: 2152; WAN024FF8; Start 41; Stop 65
attgggtgtctagcaacataataat

SEQ ID NO: 316635 - DNA, 25 bp, Artificial
  probe
  misc_feature (1)..(25): SEQ ID NO: 2152; WAN024FF8; Start 35; Stop 59
atatccattgggtgtctagcaacat

SEQ ID NO: 316636 - DNA, 25 bp, Artificial
  probe
  misc_feature (1)..(25): SEQ ID NO: 2152; WAN024FF8; Start 125; Stop 149
ccgatacctgtaccgattgtgtagt

SEQ ID NO: 316637 - DNA, 25 bp, Artificial
  probe
  misc_feature (1)..(25): SEQ ID NO: 2152; WAN024FF8; Start 124; Stop 148
accgatacctgtaccgattgtgtag

SEQ ID NO: 316638 - DNA, 25 bp, Artificial
  probe
  misc_feature (1)..(25): SEQ ID NO: 2152; WAN024FF8; Start 131; Stop 155
cctgtaccgattgtgtagtaaacca

SEQ ID NO: 316639 - DNA, 25 bp, Artificial
  probe
  misc_feature (1)..(25): SEQ ID NO: 2152; WAN024FF8; Start 130; Stop 154
acctgtaccgattgtgtagtaaacc

SEQ ID NO: 316640 - DNA, 25 bp, Artificial
  probe
  misc_feature (1)..(25): SEQ ID NO: 2152; WAN024FF8; Start 38; Stop 62
tccattgggtgtctagcaacataat

SEQ ID NO: 316641 - DNA, 25 bp, Artificial
  probe
  misc_feature (1)..(25): SEQ ID NO: 2152; WAN024FF8; Start 37; Stop 61
atccattgggtgtctagcaacataa

SEQ ID NO: 316642 - DNA, 25 bp, Artificial
  probe
  misc_feature (1)..(25): SEQ ID NO: 2152; WAN024FF8; Start 34; Stop 58
aatatccattgggtgtctagcaaca

SEQ ID NO: 316643 - DNA, 25 bp, Artificial
  probe
  misc_feature (1)..(25): SEQ ID NO: 2152; WAN024FF8; Start 30; Stop 54
tttcaatatccattgggtgtctagc

SEQ ID NO: 316644 - DNA, 25 bp, Artificial
  probe
  misc_feature (1)..(25): SEQ ID NO: 2152; WAN024FF8; Start 52; Stop 76
agcaacataataatgacccatttca

SEQ ID NO: 316645 - DNA, 25 bp, Artificial
  probe
  misc_feature (1)..(25): SEQ ID NO: 2152; WAN024FF8; Start 53; Stop 77
gcaacataataatgacccatttcag

SEQ ID NO: 316646 - DNA, 25 bp, Artificial
  probe
  misc_feature (1)..(25): SEQ ID NO: 2152; WAN024FF8; Start 215; Stop 239
tttacgtctgttgtgaagtacattg

SEQ ID NO: 316647 - DNA, 25 bp, Artificial
  probe
  misc_feature (1)..(25): SEQ ID NO: 2152; WAN024FF8; Start 214; Stop 238
gtttacgtctgttgtgaagtacatt

SEQ ID NO: 316648 - DNA, 25 bp, Artificial
  probe
  misc_feature (1)..(25): SEQ ID NO: 2153; WAN024DM2; Start 150; Stop 174
attggcgataccgttattctatatt

SEQ ID NO: 316649 - DNA, 25 bp, Artificial
  probe
  misc_feature (1)..(25): SEQ ID NO: 2153; WAN024DM2; Start 146; Stop 170
ttgtattggcgataccgttattcta

SEQ ID NO: 316650 - DNA, 25 bp, Artificial
  probe
  misc_feature (1)..(25): SEQ ID NO: 2153; WAN024DM2; Start 147; Stop 171
tgtattggcgataccgttattctat

SEQ ID NO: 316651 - DNA, 25 bp, Artificial
  probe
  misc_feature (1)..(25): SEQ ID NO: 2153; WAN024DM2; Start 149; Stop 173
tattggcgataccgttattctatat

SEQ ID NO: 316652 - DNA, 25 bp, Artificial
  probe
  misc_feature (1)..(25): SEQ ID NO: 2153; WAN024DM2; Start 899; Stop 923
gctcgcaaccattatctttatcttt

SEQ ID NO: 316653 - DNA, 25 bp, Artificial
  probe
  misc_feature (1)..(25): SEQ ID NO: 2153; WAN024DM2; Start 636; Stop 660
atgcgtggctttatcttatatcagt

SEQ ID NO: 316654 - DNA, 25 bp, Artificial
  probe
  misc_feature (1)..(25): SEQ ID NO: 2153; WAN024DM2; Start 637; Stop 661
tgcgtggctttatcttatatcagtt

SEQ ID NO: 316655 - DNA, 25 bp, Artificial
  probe
  misc_feature (1)..(25): SEQ ID NO: 2153; WAN024DM2; Start 638; Stop 662
gcgtggctttatcttatatcagttt

SEQ ID NO: 316656 - DNA, 25 bp, Artificial
  probe
  misc_feature (1)..(25): SEQ ID NO: 2153; WAN024DM2; Start 148; Stop 172
gtattggcgataccgttattctata

SEQ ID NO: 316657 - DNA, 25 bp, Artificial
  probe
  misc_feature (1)..(25): SEQ ID NO: 2153; WAN024DM2; Start 135; Stop 159
catcttaacctttgtattggcgata

SEQ ID NO: 316658 - DNA, 25 bp, Artificial
  probe
  misc_feature (1)..(25): SEQ ID NO: 2153; WAN024DM2; Start 902; Stop 926
cgcaaccattatctttatctttagc

SEQ ID NO: 316659 - DNA, 25 bp, Artificial
  probe
  misc_feature (1)..(25): SEQ ID NO: 2153; WAN024DM2; Start 177; Stop 201
gtctcaatgcttacatactttgcta

SEQ ID NO: 316660 - DNA, 25 bp, Artificial
  probe
  misc_feature (1)..(25): SEQ ID NO: 2153; WAN024DM2; Start 747; Stop 771
atcactttatggtatgttggatgtt

SEQ ID NO: 316661 - DNA, 25 bp, Artificial
  probe
  misc_feature (1)..(25): SEQ ID NO: 2153; WAN024DM2; Start 345; Stop 369
ggagagtcaaacaactaagaatctg

SEQ ID NO: 316662 - DNA, 25 bp, Artificial
  probe
  misc_feature (1)..(25): SEQ ID NO: 2153; WAN024DM2; Start 868; Stop 892
atcgagcagaatattgatgatagtt

SEQ ID NO: 316663 - DNA, 25 bp, Artificial
  probe
  misc_feature (1)..(25): SEQ ID NO: 2153; WAN024DM2; Start 867; Stop 891
aatcgagcagaatattgatgatagt

SEQ ID NO: 316664 - DNA, 25 bp, Artificial
  probe
  misc_feature (1)..(25): SEQ ID NO: 2153; WAN024DM2; Start 344; Stop 368
aggagagtcaaacaactaagaatct

SEQ ID NO: 316665 - DNA, 25 bp, Artificial
  probe
  misc_feature (1)..(25): SEQ ID NO: 2153; WAN024DM2; Start 903; Stop 927
gcaaccattatctttatctttagcc

SEQ ID NO: 316666 - DNA, 25 bp, Artificial
  probe
  misc_feature (1)..(25): SEQ ID NO: 2153; WAN024DM2; Start 151; Stop 175
ttggcgataccgttattctatattt

SEQ ID NO: 316667 - DNA, 25 bp, Artificial
  probe
  misc_feature (1)..(25): SEQ ID NO: 2153; WAN024DM2; Start 635; Stop 659
catgcgtggctttatcttatatcag

SEQ ID NO: 316668 - DNA, 25 bp, Artificial
  probe
  misc_feature (1)..(25): SEQ ID NO: 2153; WAN024DM2; Start 127; Stop 151
tctcatgccatcttaacctttgtat

SEQ ID NO: 316669 - DNA, 25 bp, Artificial
  probe
  misc_feature (1)..(25): SEQ ID NO: 2153; WAN024DM2; Start 175; Stop 199
ttgtctcaatgcttacatactttgc

SEQ ID NO: 316670 - DNA, 25 bp, Artificial
  probe
  misc_feature (1)..(25): SEQ ID NO: 2153; WAN024DM2; Start 129; Stop 153
tcatgccatcttaacctttgtattg

SEQ ID NO: 316671 - DNA, 25 bp, Artificial
  probe
  misc_feature (1)..(25): SEQ ID NO: 2153; WAN024DM2; Start 126; Stop 150
ctctcatgccatcttaacctttgta

SEQ ID NO: 316672 - DNA, 25 bp, Artificial
  probe
  misc_feature (1)..(25): SEQ ID NO: 2153; WAN024DM2; Start 128; Stop 152
ctcatgccatcttaacctttgtatt

SEQ ID NO: 316673 - DNA, 25 bp, Artificial
  probe
  misc_feature (1)..(25): SEQ ID NO: 2153; WAN024DM2; Start 343; Stop 367
aaggagagtcaaacaactaagaatc

SEQ ID NO: 316674 - DNA, 25 bp, Artificial
  probe
  misc_feature (1)..(25): SEQ ID NO: 2153; WAN024DM2; Start 176; Stop 200
tgtctcaatgcttacatactttgct

SEQ ID NO: 316675 - DNA, 25 bp, Artificial
  probe
  misc_feature (1)..(25): SEQ ID NO: 2153; WAN024DM2; Start 748; Stop 772
tcactttatggtatgttggatgtta

SEQ ID NO: 316676 - DNA, 25 bp, Artificial
  probe
  misc_feature (1)..(25): SEQ ID NO: 2153; WAN024DM2; Start 178; Stop 202
tctcaatgcttacatactttgctat

SEQ ID NO: 316677 - DNA, 25 bp, Artificial
  probe
  misc_feature (1)..(25): SEQ ID NO: 2153; WAN024DM2; Start 346; Stop 370
gagagtcaaacaactaagaatctgt

SEQ ID NO: 316678 - DNA, 25 bp, Artificial
  probe
  misc_feature (1)..(25): SEQ ID NO: 2153; WAN024DM2; Start 689; Stop 713
tgcgtgaacaaattgatttattaga

SEQ ID NO: 316679 - DNA, 25 bp, Artificial
  probe
  misc_feature (1)..(25): SEQ ID NO: 2153; WAN024DM2; Start 688; Stop 712
gtgcgtgaacaaattgatttattag

SEQ ID NO: 316680 - DNA, 25 bp, Artificial
  probe
  misc_feature (1)..(25): SEQ ID NO: 2153; WAN024DM2; Start 144; Stop 168
ctttgtattggcgataccgttattc

SEQ ID NO: 316681 - DNA, 25 bp, Artificial
  probe
  misc_feature (1)..(25): SEQ ID NO: 2154; WAN024FLI; Start 1086; Stop 1110
tgtggtaataggtgctgttatcaat

SEQ ID NO: 316682 - DNA, 25 bp, Artificial
  probe
  misc_feature (1)..(25): SEQ ID NO: 2154; WAN024FLI; Start 1083; Stop 1107
tagtgtggtaataggtgctgttatc

SEQ ID NO: 316683 - DNA, 25 bp, Artificial
  probe
  misc_feature (1)..(25): SEQ ID NO: 2154; WAN024FLI; Start 1082; Stop 1106
ttagtgtggtaataggtgctgttat

SEQ ID NO: 316684 - DNA, 25 bp, Artificial
  probe
  misc_feature (1)..(25): SEQ ID NO: 2154; WAN024FLI; Start 1085; Stop 1109
gtgtggtaataggtgctgttatcaa

SEQ ID NO: 316685 - DNA, 25 bp, Artificial
  probe
  misc_feature (1)..(25): SEQ ID NO: 2154; WAN024FLI; Start 1081; Stop 1105
attagtgtggtaataggtgctgtta

SEQ ID NO: 316686 - DNA, 25 bp, Artificial
  probe
  misc_feature (1)..(25): SEQ ID NO: 2154; WAN024FLI; Start 792; Stop 816
aagtgtagtaacgatgcctagaatg

SEQ ID NO: 316687 - DNA, 25 bp, Artificial
  probe
  misc_feature (1)..(25): SEQ ID NO: 2154; WAN024FLI; Start 686; Stop 710
tggataagacaatgataggttggtt

SEQ ID NO: 316688 - DNA, 25 bp, Artificial
  probe
  misc_feature (1)..(25): SEQ ID NO: 2154; WAN024FLI; Start 685; Stop 709
ttggataagacaatgataggttggt

SEQ ID NO: 316689 - DNA, 25 bp, Artificial
  probe
  misc_feature (1)..(25): SEQ ID NO: 2154; WAN024FLI; Start 1084; Stop 1108
agtgtggtaataggtgctgttatca

SEQ ID NO: 316690 - DNA, 25 bp, Artificial
  probe
  misc_feature (1)..(25): SEQ ID NO: 2154; WAN024FLI; Start 790; Stop 814
ttaagtgtagtaacgatgcctagaa

SEQ ID NO: 316691 - DNA, 25 bp, Artificial
  probe
  misc_feature (1)..(25): SEQ ID NO: 2154; WAN024FLI; Start 791; Stop 815
taagtgtagtaacgatgcctagaat

SEQ ID NO: 316692 - DNA, 25 bp, Artificial
  probe
  misc_feature (1)..(25): SEQ ID NO: 2154; WAN024FLI; Start 1348; Stop 1372
gtcattgttggagtcgcagtatata

SEQ ID NO: 316693 - DNA, 25 bp, Artificial
  probe
  misc_feature (1)..(25): SEQ ID NO: 2154; WAN024FLI; Start 1087; Stop 1111
gtggtaataggtgctgttatcaata

SEQ ID NO: 316694 - DNA, 25 bp, Artificial
  probe
  misc_feature (1)..(25): SEQ ID NO: 2154; WAN024FLI; Start 1096; Stop 1120
ggtgctgttatcaatatagtcttca

SEQ ID NO: 316695 - DNA, 25 bp, Artificial
  probe
  misc_feature (1)..(25): SEQ ID NO: 2154; WAN024FLI; Start 794; Stop 818
gtgtagtaacgatgcctagaatgac

SEQ ID NO: 316696 - DNA, 25 bp, Artificial
  probe
  misc_feature (1)..(25): SEQ ID NO: 2154; WAN024FLI; Start 793; Stop 817
agtgtagtaacgatgcctagaatga

SEQ ID NO: 316697 - DNA, 25 bp, Artificial
  probe
  misc_feature (1)..(25): SEQ ID NO: 2154; WAN024FLI; Start 1349; Stop 1373
tcattgttggagtcgcagtatatat

SEQ ID NO: 316698 - DNA, 25 bp, Artificial
  probe
  misc_feature (1)..(25): SEQ ID NO: 2154; WAN024FLI; Start 1352; Stop 1376
ttgttggagtcgcagtatatattct

SEQ ID NO: 316699 - DNA, 25 bp, Artificial
  probe
  misc_feature (1)..(25): SEQ ID NO: 2154; WAN024FLI; Start 1357; Stop 1381
ggagtcgcagtatatattctatcgt

SEQ ID NO: 316700 - DNA, 25 bp, Artificial
  probe
  misc_feature (1)..(25): SEQ ID NO: 2154; WAN024FLI; Start 1356; Stop 1380
tggagtcgcagtatatattctatcg

SEQ ID NO: 316701 - DNA, 25 bp, Artificial
  probe
  misc_feature (1)..(25): SEQ ID NO: 2154; WAN024FLI; Start 799; Stop 823
gtaacgatgcctagaatgacttatt

SEQ ID NO: 316702 - DNA, 25 bp, Artificial
  probe
  misc_feature (1)..(25): SEQ ID NO: 2154; WAN024FLI; Start 1347; Stop 1371
agtcattgttggagtcgcagtatat

SEQ ID NO: 316703 - DNA, 25 bp, Artificial
  probe
  misc_feature (1)..(25): SEQ ID NO: 2154; WAN024FLI; Start 1095; Stop 1119
aggtgctgttatcaatatagtcttc

SEQ ID NO: 316704 - DNA, 25 bp, Artificial
  probe
  misc_feature (1)..(25): SEQ ID NO: 2154; WAN024FLI; Start 796; Stop 820
gtagtaacgatgcctagaatgactt

SEQ ID NO: 316705 - DNA, 25 bp, Artificial
  probe
  misc_feature (1)..(25): SEQ ID NO: 2154; WAN024FLI; Start 1350; Stop 1374
cattgttggagtcgcagtatatatt

SEQ ID NO: 316706 - DNA, 25 bp, Artificial
  probe
  misc_feature (1)..(25): SEQ ID NO: 2154; WAN024FLI; Start 798; Stop 822
agtaacgatgcctagaatgacttat

SEQ ID NO: 316707 - DNA, 25 bp, Artificial
  probe
  misc_feature (1)..(25): SEQ ID NO: 2154; WAN024FLI; Start 1353; Stop 1377
tgttggagtcgcagtatatattcta

SEQ ID NO: 316708 - DNA, 25 bp, Artificial
  probe
  misc_feature (1)..(25): SEQ ID NO: 2154; WAN024FLI; Start 1346; Stop 1370
aagtcattgttggagtcgcagtata

SEQ ID NO: 316709 - DNA, 25 bp, Artificial
  probe
  misc_feature (1)..(25): SEQ ID NO: 2154; WAN024FLI; Start 1351; Stop 1375
attgttggagtcgcagtatatattc

SEQ ID NO: 316710 - DNA, 25 bp, Artificial
  probe
  misc_feature (1)..(25): SEQ ID NO: 2154; WAN024FLI; Start 1321; Stop 1345
ccttcgtggacagttgttataatac

SEQ ID NO: 316711 - DNA, 25 bp, Artificial
  probe
  misc_feature (1)..(25): SEQ ID NO: 2154; WAN024FLI; Start 797; Stop 821
tagtaacgatgcctagaatgactta

SEQ ID NO: 316712 - DNA, 25 bp, Artificial
  probe
  misc_feature (1)..(25): SEQ ID NO: 2154; WAN024FLI; Start 795; Stop 819
tgtagtaacgatgcctagaatgact

SEQ ID NO: 316713 - DNA, 25 bp, Artificial
  probe
  misc_feature (1)..(25): SEQ ID NO: 2154; WAN024FLI; Start 760; Stop 784
gagcagatggttgtgacaatagtta

SEQ ID NO: 316714 - DNA, 25 bp, Artificial
  probe
  misc_feature (1)..(25): SEQ ID NO: 2155; WAN024FZI; Start 318; Stop 342
tctcaagttaatcaatctaccagcc

SEQ ID NO: 316715 - DNA, 25 bp, Artificial
  probe
  misc_feature (1)..(25): SEQ ID NO: 2155; WAN024FZI; Start 315; Stop 339
ccgtctcaagttaatcaatctacca

SEQ ID NO: 316716 - DNA, 25 bp, Artificial
  probe
  misc_feature (1)..(25): SEQ ID NO: 2155; WAN024FZI; Start 314; Stop 338
accgtctcaagttaatcaatctacc

SEQ ID NO: 316717 - DNA, 25 bp, Artificial
  probe
  misc_feature (1)..(25): SEQ ID NO: 2155; WAN024FZI; Start 317; Stop 341
gtctcaagttaatcaatctaccagc

SEQ ID NO: 316718 - DNA, 25 bp, Artificial
  probe
  misc_feature (1)..(25): SEQ ID NO: 2155; WAN024FZI; Start 322; Stop 346
aagttaatcaatctaccagccagtc

SEQ ID NO: 316719 - DNA, 25 bp, Artificial
  probe
  misc_feature (1)..(25): SEQ ID NO: 2155; WAN024FZI; Start 320; Stop 344
tcaagttaatcaatctaccagccag

SEQ ID NO: 316720 - DNA, 25 bp, Artificial
  probe
  misc_feature (1)..(25): SEQ ID NO: 2155; WAN024FZI; Start 319; Stop 343
ctcaagttaatcaatctaccagcca

SEQ ID NO: 316721 - DNA, 25 bp, Artificial
  probe
  misc_feature (1)..(25): SEQ ID NO: 2155; WAN024FZI; Start 316; Stop 340
cgtctcaagttaatcaatctaccag

SEQ ID NO: 316722 - DNA, 25 bp, Artificial
  probe
  misc_feature (1)..(25): SEQ ID NO: 2155; WAN024FZI; Start 321; Stop 345
caagttaatcaatctaccagccagt

SEQ ID NO: 316723 - DNA, 25 bp, Artificial
  probe
  misc_feature (1)..(25): SEQ ID NO: 2155; WAN024FZI; Start 324; Stop 348
gttaatcaatctaccagccagtctc

SEQ ID NO: 316724 - DNA, 25 bp, Artificial
  probe
  misc_feature (1)..(25): SEQ ID NO: 2155; WAN024FZI; Start 311; Stop 335
agaaccgtctcaagttaatcaatct

SEQ ID NO: 316725 - DNA, 25 bp, Artificial
  probe
  misc_feature (1)..(25): SEQ ID NO: 2155; WAN024FZI; Start 604; Stop 628
gttaagaccttggtggatgagatta

SEQ ID NO: 316726 - DNA, 25 bp, Artificial
  probe
  misc_feature (1)..(25): SEQ ID NO: 2155; WAN024FZI; Start 326; Stop 350
taatcaatctaccagccagtctcaa

SEQ ID NO: 316727 - DNA, 25 bp, Artificial
  probe
  misc_feature (1)..(25): SEQ ID NO: 2155; WAN024FZI; Start 303; Stop 327
ggctattaagaaccgtctcaagtta

SEQ ID NO: 316728 - DNA, 25 bp, Artificial
  probe
  misc_feature (1)..(25): SEQ ID NO: 2155; WAN024FZI; Start 310; Stop 334
aagaaccgtctcaagttaatcaatc

SEQ ID NO: 316729 - DNA, 25 bp, Artificial
  probe
  misc_feature (1)..(25): SEQ ID NO: 2155; WAN024FZI; Start 325; Stop 349
ttaatcaatctaccagccagtctca

SEQ ID NO: 316730 - DNA, 25 bp, Artificial
  probe
  misc_feature (1)..(25): SEQ ID NO: 2155; WAN024FZI; Start 323; Stop 347
agttaatcaatctaccagccagtct

SEQ ID NO: 316731 - DNA, 25 bp, Artificial
  probe
  misc_feature (1)..(25): SEQ ID NO: 2155; WAN024FZI; Start 606; Stop 630
taagaccttggtggatgagattaag

SEQ ID NO: 316732 - DNA, 25 bp, Artificial
  probe
  misc_feature (1)..(25): SEQ ID NO: 2155; WAN024FZI; Start 538; Stop 562
tcatcaactctcctccactatccta

SEQ ID NO: 316733 - DNA, 25 bp, Artificial
  probe
  misc_feature (1)..(25): SEQ ID NO: 2155; WAN024FZI; Start 313; Stop 337
aaccgtctcaagttaatcaatctac

SEQ ID NO: 316734 - DNA, 25 bp, Artificial
  probe
  misc_feature (1)..(25): SEQ ID NO: 2155; WAN024FZI; Start 304; Stop 328
gctattaagaaccgtctcaagttaa

SEQ ID NO: 316735 - DNA, 25 bp, Artificial
  probe
  misc_feature (1)..(25): SEQ ID NO: 2155; WAN024FZI; Start 539; Stop 563
catcaactctcctccactatcctag

SEQ ID NO: 316736 - DNA, 25 bp, Artificial
  probe
  misc_feature (1)..(25): SEQ ID NO: 2155; WAN024FZI; Start 312; Stop 336
gaaccgtctcaagttaatcaatcta

SEQ ID NO: 316737 - DNA, 25 bp, Artificial
  probe
  misc_feature (1)..(25): SEQ ID NO: 2155; WAN024FZI; Start 605; Stop 629
ttaagaccttggtggatgagattaa

SEQ ID NO: 316738 - DNA, 25 bp, Artificial
  probe
  misc_feature (1)..(25): SEQ ID NO: 2155; WAN024FZI; Start 602; Stop 626
atgttaagaccttggtggatgagat

SEQ ID NO: 316739 - DNA, 25 bp, Artificial
  probe
  misc_feature (1)..(25): SEQ ID NO: 2155; WAN024FZI; Start 603; Stop 627
tgttaagaccttggtggatgagatt

SEQ ID NO: 316740 - DNA, 25 bp, Artificial
  probe
  misc_feature (1)..(25): SEQ ID NO: 2155; WAN024FZI; Start 601; Stop 625
aatgttaagaccttggtggatgaga

SEQ ID NO: 316741 - DNA, 25 bp, Artificial
  probe
  misc_feature (1)..(25): SEQ ID NO: 2155; WAN024FZI; Start 308; Stop 332
ttaagaaccgtctcaagttaatcaa

SEQ ID NO: 316742 - DNA, 25 bp, Artificial
  probe
  misc_feature (1)..(25): SEQ ID NO: 2155; WAN024FZI; Start 309; Stop 333
taagaaccgtctcaagttaatcaat

SEQ ID NO: 316743 - DNA, 25 bp, Artificial
  probe
  misc_feature (1)..(25): SEQ ID NO: 2155; WAN024FZI; Start 537; Stop 561
ttcatcaactctcctccactatcct

SEQ ID NO: 316744 - DNA, 25 bp, Artificial
  probe
  misc_feature (1)..(25): SEQ ID NO: 2155; WAN024FZI; Start 600; Stop 624
caatgttaagaccttggtggatgag

SEQ ID NO: 316745 - DNA, 25 bp, Artificial
  probe
  misc_feature (1)..(25): SEQ ID NO: 2155; WAN024FZI; Start 327; Stop 351
aatcaatctaccagccagtctcaag

SEQ ID NO: 316746 - DNA, 25 bp, Artificial
  probe
  misc_feature (1)..(25): SEQ ID NO: 2155; WAN024FZI; Start 591; Stop 615
cagtgatggcaatgttaagaccttg

SEQ ID NO: 316747 - DNA, 25 bp, Artificial
  probe
  misc_feature (1)..(25): SEQ ID NO: 2156; WAN024FZF; Start 187; Stop 211
cgaggagatacagattatattgcca

SEQ ID NO: 316748 - DNA, 25 bp, Artificial
  probe
  misc_feature (1)..(25): SEQ ID NO: 2156; WAN024FZF; Start 186; Stop 210
ccgaggagatacagattatattgcc

SEQ ID NO: 316749 - DNA, 25 bp, Artificial
  probe
  misc_feature (1)..(25): SEQ ID NO: 2156; WAN024FZF; Start 185; Stop 209
tccgaggagatacagattatattgc

SEQ ID NO: 316750 - DNA, 25 bp, Artificial
  probe
  misc_feature (1)..(25): SEQ ID NO: 2156; WAN024FZF; Start 152; Stop 176
ttaaccaatacatcactgagagaga

SEQ ID NO: 316751 - DNA, 25 bp, Artificial
  probe
  misc_feature (1)..(25): SEQ ID NO: 2156; WAN024FZF; Start 155; Stop 179
accaatacatcactgagagagataa

SEQ ID NO: 316752 - DNA, 25 bp, Artificial
  probe
  misc_feature (1)..(25): SEQ ID NO: 2156; WAN024FZF; Start 154; Stop 178
aaccaatacatcactgagagagata

SEQ ID NO: 316753 - DNA, 25 bp, Artificial
  probe
  misc_feature (1)..(25): SEQ ID NO: 2156; WAN024FZF; Start 153; Stop 177
taaccaatacatcactgagagagat

SEQ ID NO: 316754 - DNA, 25 bp, Artificial
  probe
  misc_feature (1)..(25): SEQ ID NO: 2156; WAN024FZF; Start 188; Stop 212
gaggagatacagattatattgccaa

SEQ ID NO: 316755 - DNA, 25 bp, Artificial
  probe
  misc_feature (1)..(25): SEQ ID NO: 2156; WAN024FZF; Start 134; Stop 158
accgtagtatttccaagtttaacca

SEQ ID NO: 316756 - DNA, 25 bp, Artificial
  probe
  misc_feature (1)..(25): SEQ ID NO: 2156; WAN024FZF; Start 135; Stop 159
ccgtagtatttccaagtttaaccaa

SEQ ID NO: 316757 - DNA, 25 bp, Artificial
  probe
  misc_feature (1)..(25): SEQ ID NO: 2156; WAN024FZF; Start 263; Stop 287
atgaagaaactcctgaactaatcgc

SEQ ID NO: 316758 - DNA, 25 bp, Artificial
  probe
  misc_feature (1)..(25): SEQ ID NO: 2156; WAN024FZF; Start 129; Stop 153
gttgaaccgtagtatttccaagttt

SEQ ID NO: 316759 - DNA, 25 bp, Artificial
  probe
  misc_feature (1)..(25): SEQ ID NO: 2156; WAN024FZF; Start 133; Stop 157
aaccgtagtatttccaagtttaacc

SEQ ID NO: 316760 - DNA, 25 bp, Artificial
  probe
  misc_feature (1)..(25): SEQ ID NO: 2156; WAN024FZF; Start 128; Stop 152
agttgaaccgtagtatttccaagtt

SEQ ID NO: 316761 - DNA, 25 bp, Artificial
  probe
  misc_feature (1)..(25): SEQ ID NO: 2156; WAN024FZF; Start 161; Stop 185
acatcactgagagagataaattcct

SEQ ID NO: 316762 - DNA, 25 bp, Artificial
  probe
  misc_feature (1)..(25): SEQ ID NO: 2156; WAN024FZF; Start 150; Stop 174
gtttaaccaatacatcactgagaga

SEQ ID NO: 316763 - DNA, 25 bp, Artificial
  probe
  misc_feature (1)..(25): SEQ ID NO: 2156; WAN024FZF; Start 127; Stop 151
gagttgaaccgtagtatttccaagt

SEQ ID NO: 316764 - DNA, 25 bp, Artificial
  probe
  misc_feature (1)..(25): SEQ ID NO: 2156; WAN024FZF; Start 262; Stop 286
tatgaagaaactcctgaactaatcg

SEQ ID NO: 316765 - DNA, 25 bp, Artificial
  probe
  misc_feature (1)..(25): SEQ ID NO: 2156; WAN024FZF; Start 367; Stop 391
gatgtttatcgtgatgatgttcagc

SEQ ID NO: 316766 - DNA, 25 bp, Artificial
  probe
  misc_feature (1)..(25): SEQ ID NO: 2156; WAN024FZF; Start 366; Stop 390
agatgtttatcgtgatgatgttcag

SEQ ID NO: 316767 - DNA, 25 bp, Artificial
  probe
  misc_feature (1)..(25): SEQ ID NO: 2156; WAN024FZF; Start 146; Stop 170
ccaagtttaaccaatacatcactga

SEQ ID NO: 316768 - DNA, 25 bp, Artificial
  probe
  misc_feature (1)..(25): SEQ ID NO: 2156; WAN024FZF; Start 145; Stop 169
tccaagtttaaccaatacatcactg

SEQ ID NO: 316769 - DNA, 25 bp, Artificial
  probe
  misc_feature (1)..(25): SEQ ID NO: 2156; WAN024FZF; Start 183; Stop 207
cctccgaggagatacagattatatt

SEQ ID NO: 316770 - DNA, 25 bp, Artificial
  probe
  misc_feature (1)..(25): SEQ ID NO: 2156; WAN024FZF; Start 163; Stop 187
atcactgagagagataaattcctcc

SEQ ID NO: 316771 - DNA, 25 bp, Artificial
  probe
  misc_feature (1)..(25): SEQ ID NO: 2156; WAN024FZF; Start 151; Stop 175
tttaaccaatacatcactgagagag

SEQ ID NO: 316772 - DNA, 25 bp, Artificial
  probe
  misc_feature (1)..(25): SEQ ID NO: 2156; WAN024FZF; Start 184; Stop 208
ctccgaggagatacagattatattg

SEQ ID NO: 316773 - DNA, 25 bp, Artificial
  probe
  misc_feature (1)..(25): SEQ ID NO: 2156; WAN024FZF; Start 131; Stop 155
tgaaccgtagtatttccaagtttaa

SEQ ID NO: 316774 - DNA, 25 bp, Artificial
  probe
  misc_feature (1)..(25): SEQ ID NO: 2156; WAN024FZF; Start 166; Stop 190
actgagagagataaattcctccgag

SEQ ID NO: 316775 - DNA, 25 bp, Artificial
  probe
  misc_feature (1)..(25): SEQ ID NO: 2156; WAN024FZF; Start 149; Stop 173
agtttaaccaatacatcactgagag

SEQ ID NO: 316776 - DNA, 25 bp, Artificial
  probe
  misc_feature (1)..(25): SEQ ID NO: 2156; WAN024FZF; Start 144; Stop 168
ttccaagtttaaccaatacatcact

SEQ ID NO: 316777 - DNA, 25 bp, Artificial
  probe
  misc_feature (1)..(25): SEQ ID NO: 2156; WAN024FZF; Start 130; Stop 154
ttgaaccgtagtatttccaagttta

SEQ ID NO: 316778 - DNA, 25 bp, Artificial
  probe
  misc_feature (1)..(25): SEQ ID NO: 2156; WAN024FZF; Start 143; Stop 167
tttccaagtttaaccaatacatcac

SEQ ID NO: 316779 - DNA, 25 bp, Artificial
  probe
  misc_feature (1)..(25): SEQ ID NO: 2156; WAN024FZF; Start 132; Stop 156
gaaccgtagtatttccaagtttaac

SEQ ID NO: 316780 - DNA, 25 bp, Artificial
  probe
  misc_feature (1)..(25): SEQ ID NO: 2157; WAN024CNZ; Start 4; Stop 28
gaaataattagtcttaccgtctgcg

SEQ ID NO: 316781 - DNA, 25 bp, Artificial
  probe
  misc_feature (1)..(25): SEQ ID NO: 2157; WAN024CNZ; Start 3; Stop 27
ggaaataattagtcttaccgtctgc

SEQ ID NO: 316782 - DNA, 25 bp, Artificial
  probe
  misc_feature (1)..(25): SEQ ID NO: 2157; WAN024CNZ; Start 2; Stop 26
tggaaataattagtcttaccgtctg

SEQ ID NO: 316783 - DNA, 25 bp, Artificial
  probe
  misc_feature (1)..(25): SEQ ID NO: 2157; WAN024CNZ; Start 67; Stop 91
cttccatttcgtccatgtataggct

SEQ ID NO: 316784 - DNA, 25 bp, Artificial
  probe
  misc_feature (1)..(25): SEQ ID NO: 2157; WAN024CNZ; Start 1; Stop 25
atggaaataattagtcttaccgtct

SEQ ID NO: 316785 - DNA, 25 bp, Artificial
  probe
  misc_feature (1)..(25): SEQ ID NO: 2157; WAN024CNZ; Start 68; Stop 92
ttccatttcgtccatgtataggctg

SEQ ID NO: 316786 - DNA, 25 bp, Artificial
  probe
  misc_feature (1)..(25): SEQ ID NO: 2157; WAN024CNZ; Start 65; Stop 89
cccttccatttcgtccatgtatagg

SEQ ID NO: 316787 - DNA, 25 bp, Artificial
  probe
  misc_feature (1)..(25): SEQ ID NO: 2157; WAN024CNZ; Start 66; Stop 90
ccttccatttcgtccatgtataggc

SEQ ID NO: 316788 - DNA, 25 bp, Artificial
  probe
  misc_feature (1)..(25): SEQ ID NO: 2157; WAN024CNZ; Start 6; Stop 30
aataattagtcttaccgtctgcgcc

SEQ ID NO: 316789 - DNA, 25 bp, Artificial
  probe
  misc_feature (1)..(25): SEQ ID NO: 2157; WAN024CNZ; Start 5; Stop 29
aaataattagtcttaccgtctgcgc

SEQ ID NO: 316790 - DNA, 25 bp, Artificial
  probe
  misc_feature (1)..(25): SEQ ID NO: 2157; WAN024CNZ; Start 64; Stop 88
ccccttccatttcgtccatgtatag

SEQ ID NO: 316791 - DNA, 25 bp, Artificial
  probe
  misc_feature (1)..(25): SEQ ID NO: 2157; WAN024CNZ; Start 7; Stop 31
ataattagtcttaccgtctgcgcct

SEQ ID NO: 316792 - DNA, 25 bp, Artificial
  probe
  misc_feature (1)..(25): SEQ ID NO: 2157; WAN024CNZ; Start 63; Stop 87
tccccttccatttcgtccatgtata

SEQ ID NO: 316793 - DNA, 25 bp, Artificial
  probe
  misc_feature (1)..(25): SEQ ID NO: 2157; WAN024CNZ; Start 69; Stop 93
tccatttcgtccatgtataggctgc

SEQ ID NO: 316794 - DNA, 25 bp, Artificial
  probe
  misc_feature (1)..(25): SEQ ID NO: 2157; WAN024CNZ; Start 62; Stop 86
ttccccttccatttcgtccatgtat

SEQ ID NO: 316795 - DNA, 25 bp, Artificial
  probe
  misc_feature (1)..(25): SEQ ID NO: 2157; WAN024CNZ; Start 61; Stop 85
attccccttccatttcgtccatgta

SEQ ID NO: 316796 - DNA, 25 bp, Artificial
  probe
  misc_feature (1)..(25): SEQ ID NO: 2157; WAN024CNZ; Start 8; Stop 32
taattagtcttaccgtctgcgcctg

SEQ ID NO: 316797 - DNA, 25 bp, Artificial
  probe
  misc_feature (1)..(25): SEQ ID NO: 2157; WAN024CNZ; Start 70; Stop 94
ccatttcgtccatgtataggctgca

SEQ ID NO: 316798 - DNA, 25 bp, Artificial
  probe
  misc_feature (1)..(25): SEQ ID NO: 2157; WAN024CNZ; Start 58; Stop 82
gtcattccccttccatttcgtccat

SEQ ID NO: 316799 - DNA, 25 bp, Artificial
  probe
  misc_feature (1)..(25): SEQ ID NO: 2157; WAN024CNZ; Start 59; Stop 83
tcattccccttccatttcgtccatg

SEQ ID NO: 316800 - DNA, 25 bp, Artificial
  probe
  misc_feature (1)..(25): SEQ ID NO: 2157; WAN024CNZ; Start 60; Stop 84
cattccccttccatttcgtccatgt

SEQ ID NO: 316801 - DNA, 25 bp, Artificial
  probe
  misc_feature (1)..(25): SEQ ID NO: 2158; WAN024DKJ; Start 108; Stop 132
atggtgttctaatcctgaatctcaa

SEQ ID NO: 316802 - DNA, 25 bp, Artificial
  probe
  misc_feature (1)..(25): SEQ ID NO: 2158; WAN024DKJ; Start 107; Stop 131
catggtgttctaatcctgaatctca

SEQ ID NO: 316803 - DNA, 25 bp, Artificial
  probe
  misc_feature (1)..(25): SEQ ID NO: 2158; WAN024DKJ; Start 334; Stop 358
gaacatcacatacacactgccattg

SEQ ID NO: 316804 - DNA, 25 bp, Artificial
  probe
  misc_feature (1)..(25): SEQ ID NO: 2158; WAN024DKJ; Start 333; Stop 357
agaacatcacatacacactgccatt

SEQ ID NO: 316805 - DNA, 25 bp, Artificial
  probe
  misc_feature (1)..(25): SEQ ID NO: 2158; WAN024DKJ; Start 332; Stop 356
aagaacatcacatacacactgccat

SEQ ID NO: 316806 - DNA, 25 bp, Artificial
  probe
  misc_feature (1)..(25): SEQ ID NO: 2158; WAN024DKJ; Start 329; Stop 353
ctaaagaacatcacatacacactgc

SEQ ID NO: 316807 - DNA, 25 bp, Artificial
  probe
  misc_feature (1)..(25): SEQ ID NO: 2158; WAN024DKJ; Start 328; Stop 352
gctaaagaacatcacatacacactg

SEQ ID NO: 316808 - DNA, 25 bp, Artificial
  probe
  misc_feature (1)..(25): SEQ ID NO: 2158; WAN024DKJ; Start 613; Stop 637
aatatcgaccaagttcaactactcc

SEQ ID NO: 316809 - DNA, 25 bp, Artificial
  probe
  misc_feature (1)..(25): SEQ ID NO: 2158; WAN024DKJ; Start 259; Stop 283
ggaggtttaactttatcaggaggtg

SEQ ID NO: 316810 - DNA, 25 bp, Artificial
  probe
  misc_feature (1)..(25): SEQ ID NO: 2158; WAN024DKJ; Start 257; Stop 281
gtggaggtttaactttatcaggagg

SEQ ID NO: 316811 - DNA, 25 bp, Artificial
  probe
  misc_feature (1)..(25): SEQ ID NO: 2158; WAN024DKJ; Start 256; Stop 280
ggtggaggtttaactttatcaggag

SEQ ID NO: 316812 - DNA, 25 bp, Artificial
  probe
  misc_feature (1)..(25): SEQ ID NO: 2158; WAN024DKJ; Start 162; Stop 186
tcaacgagagaaattcaccttagtc

SEQ ID NO: 316813 - DNA, 25 bp, Artificial
  probe
  misc_feature (1)..(25): SEQ ID NO: 2158; WAN024DKJ; Start 354; Stop 378
cattgaaactactgcctttgttgat

SEQ ID NO: 316814 - DNA, 25 bp, Artificial
  probe
  misc_feature (1)..(25): SEQ ID NO: 2158; WAN024DKJ; Start 258; Stop 282
tggaggtttaactttatcaggaggt

SEQ ID NO: 316815 - DNA, 25 bp, Artificial
  probe
  misc_feature (1)..(25): SEQ ID NO: 2158; WAN024DKJ; Start 343; Stop 367
atacacactgccattgaaactactg

SEQ ID NO: 316816 - DNA, 25 bp, Artificial
  probe
  misc_feature (1)..(25): SEQ ID NO: 2158; WAN024DKJ; Start 342; Stop 366
catacacactgccattgaaactact

SEQ ID NO: 316817 - DNA, 25 bp, Artificial
  probe
  misc_feature (1)..(25): SEQ ID NO: 2158; WAN024DKJ; Start 330; Stop 354
taaagaacatcacatacacactgcc

SEQ ID NO: 316818 - DNA, 25 bp, Artificial
  probe
  misc_feature (1)..(25): SEQ ID NO: 2158; WAN024DKJ; Start 675; Stop 699
aaatcggaaatatgaaatggatgga

SEQ ID NO: 316819 - DNA, 25 bp, Artificial
  probe
  misc_feature (1)..(25): SEQ ID NO: 2158; WAN024DKJ; Start 341; Stop 365
acatacacactgccattgaaactac

SEQ ID NO: 316820 - DNA, 25 bp, Artificial
  probe
  misc_feature (1)..(25): SEQ ID NO: 2158; WAN024DKJ; Start 340; Stop 364
cacatacacactgccattgaaacta

SEQ ID NO: 316821 - DNA, 25 bp, Artificial
  probe
  misc_feature (1)..(25): SEQ ID NO: 2158; WAN024DKJ; Start 260; Stop 284
gaggtttaactttatcaggaggtga

SEQ ID NO: 316822 - DNA, 25 bp, Artificial
  probe
  misc_feature (1)..(25): SEQ ID NO: 2158; WAN024DKJ; Start 121; Stop 145
cctgaatctcaaagaatgaaacctg

SEQ ID NO: 316823 - DNA, 25 bp, Artificial
  probe
  misc_feature (1)..(25): SEQ ID NO: 2158; WAN024DKJ; Start 120; Stop 144
tcctgaatctcaaagaatgaaacct

SEQ ID NO: 316824 - DNA, 25 bp, Artificial
  probe
  misc_feature (1)..(25): SEQ ID NO: 2158; WAN024DKJ; Start 109; Stop 133
tggtgttctaatcctgaatctcaaa

SEQ ID NO: 316825 - DNA, 25 bp, Artificial
  probe
  misc_feature (1)..(25): SEQ ID NO: 2158; WAN024DKJ; Start 295; Stop 319
cagtttgaatttgctaaagccatct

SEQ ID NO: 316826 - DNA, 25 bp, Artificial
  probe
  misc_feature (1)..(25): SEQ ID NO: 2158; WAN024DKJ; Start 261; Stop 285
aggtttaactttatcaggaggtgaa

SEQ ID NO: 316827 - DNA, 25 bp, Artificial
  probe
  misc_feature (1)..(25): SEQ ID NO: 2158; WAN024DKJ; Start 110; Stop 134
ggtgttctaatcctgaatctcaaag

SEQ ID NO: 316828 - DNA, 25 bp, Artificial
  probe
  misc_feature (1)..(25): SEQ ID NO: 2158; WAN024DKJ; Start 296; Stop 320
agtttgaatttgctaaagccatctt

SEQ ID NO: 316829 - DNA, 25 bp, Artificial
  probe
  misc_feature (1)..(25): SEQ ID NO: 2158; WAN024DKJ; Start 122; Stop 146
ctgaatctcaaagaatgaaacctga

SEQ ID NO: 316830 - DNA, 25 bp, Artificial
  probe
  misc_feature (1)..(25): SEQ ID NO: 2158; WAN024DKJ; Start 119; Stop 143
atcctgaatctcaaagaatgaaacc

SEQ ID NO: 316831 - DNA, 25 bp, Artificial
  probe
  misc_feature (1)..(25): SEQ ID NO: 2158; WAN024DKJ; Start 336; Stop 360
acatcacatacacactgccattgaa

SEQ ID NO: 316832 - DNA, 25 bp, Artificial
  probe
  misc_feature (1)..(25): SEQ ID NO: 2158; WAN024DKJ; Start 335; Stop 359
aacatcacatacacactgccattga

SEQ ID NO: 316833 - DNA, 25 bp, Artificial
  probe
  misc_feature (1)..(25): SEQ ID NO: 2158; WAN024DKJ; Start 289; Stop 313
tttgctcagtttgaatttgctaaag

SEQ ID NO: 316834 - DNA, 25 bp, Artificial
  probe
  misc_feature (1)..(25): SEQ ID NO: 2159; WAN024ERE; Start 144; Stop 168
ttatcagagagaggcagaaggacag

SEQ ID NO: 316835 - DNA, 25 bp, Artificial
  probe
  misc_feature (1)..(25): SEQ ID NO: 2159; WAN024ERE; Start 14; Stop 38
atattcttaatgtgagtctgatcca

SEQ ID NO: 316836 - DNA, 25 bp, Artificial
  probe
  misc_feature (1)..(25): SEQ ID NO: 2159; WAN024ERE; Start 381; Stop 405
taatgacgaagttgttgccaaatta

SEQ ID NO: 316837 - DNA, 25 bp, Artificial
  probe
  misc_feature (1)..(25): SEQ ID NO: 2159; WAN024ERE; Start 15; Stop 39
tattcttaatgtgagtctgatccag

SEQ ID NO: 316838 - DNA, 25 bp, Artificial
  probe
  misc_feature (1)..(25): SEQ ID NO: 2159; WAN024ERE; Start 382; Stop 406
aatgacgaagttgttgccaaattag

SEQ ID NO: 316839 - DNA, 25 bp, Artificial
  probe
  misc_feature (1)..(25): SEQ ID NO: 2159; WAN024ERE; Start 340; Stop 364
gagcatttgaagaccttatcactct

SEQ ID NO: 316840 - DNA, 25 bp, Artificial
  probe
  misc_feature (1)..(25): SEQ ID NO: 2159; WAN024ERE; Start 380; Stop 404
gtaatgacgaagttgttgccaaatt

SEQ ID NO: 316841 - DNA, 25 bp, Artificial
  probe
  misc_feature (1)..(25): SEQ ID NO: 2159; WAN024ERE; Start 385; Stop 409
gacgaagttgttgccaaattagttc

SEQ ID NO: 316842 - DNA, 25 bp, Artificial
  probe
  misc_feature (1)..(25): SEQ ID NO: 2159; WAN024ERE; Start 13; Stop 37
gatattcttaatgtgagtctgatcc

SEQ ID NO: 316843 - DNA, 25 bp, Artificial
  probe
  misc_feature (1)..(25): SEQ ID NO: 2159; WAN024ERE; Start 339; Stop 363
ggagcatttgaagaccttatcactc

SEQ ID NO: 316844 - DNA, 25 bp, Artificial
  probe
  misc_feature (1)..(25): SEQ ID NO: 2159; WAN024ERE; Start 89; Stop 113
aactattggttgagacgggttatgt

SEQ ID NO: 316845 - DNA, 25 bp, Artificial
  probe
  misc_feature (1)..(25): SEQ ID NO: 2159; WAN024ERE; Start 383; Stop 407
atgacgaagttgttgccaaattagt

SEQ ID NO: 316846 - DNA, 25 bp, Artificial
  probe
  misc_feature (1)..(25): SEQ ID NO: 2159; WAN024ERE; Start 142; Stop 166
ctttatcagagagaggcagaaggac

SEQ ID NO: 316847 - DNA, 25 bp, Artificial
  probe
  misc_feature (1)..(25): SEQ ID NO: 2159; WAN024ERE; Start 384; Stop 408
tgacgaagttgttgccaaattagtt

SEQ ID NO: 316848 - DNA, 25 bp, Artificial
  probe
  misc_feature (1)..(25): SEQ ID NO: 2159; WAN024ERE; Start 140; Stop 164
gtctttatcagagagaggcagaagg

SEQ ID NO: 316849 - DNA, 25 bp, Artificial
  probe
  misc_feature (1)..(25): SEQ ID NO: 2159; WAN024ERE; Start 139; Stop 163
ggtctttatcagagagaggcagaag

SEQ ID NO: 316850 - DNA, 25 bp, Artificial
  probe
  misc_feature (1)..(25): SEQ ID NO: 2159; WAN024ERE; Start 136; Stop 160
gaaggtctttatcagagagaggcag

SEQ ID NO: 316851 - DNA, 25 bp, Artificial
  probe
  misc_feature (1)..(25): SEQ ID NO: 2159; WAN024ERE; Start 145; Stop 169
tatcagagagaggcagaaggacaga

SEQ ID NO: 316852 - DNA, 25 bp, Artificial
  probe
  misc_feature (1)..(25): SEQ ID NO: 2159; WAN024ERE; Start 335; Stop 359
ctagggagcatttgaagaccttatc

SEQ ID NO: 316853 - DNA, 25 bp, Artificial
  probe
  misc_feature (1)..(25): SEQ ID NO: 2159; WAN024ERE; Start 141; Stop 165
tctttatcagagagaggcagaagga

SEQ ID NO: 316854 - DNA, 25 bp, Artificial
  probe
  misc_feature (1)..(25): SEQ ID NO: 2159; WAN024ERE; Start 91; Stop 115
ctattggttgagacgggttatgtgt

SEQ ID NO: 316855 - DNA, 25 bp, Artificial
  probe
  misc_feature (1)..(25): SEQ ID NO: 2159; WAN024ERE; Start 90; Stop 114
actattggttgagacgggttatgtg

SEQ ID NO: 316856 - DNA, 25 bp, Artificial
  probe
  misc_feature (1)..(25): SEQ ID NO: 2159; WAN024ERE; Start 336; Stop 360
tagggagcatttgaagaccttatca

SEQ ID NO: 316857 - DNA, 25 bp, Artificial
  probe
  misc_feature (1)..(25): SEQ ID NO: 2159; WAN024ERE; Start 245; Stop 269
taaatcacaatgagattccttggga

SEQ ID NO: 316858 - DNA, 25 bp, Artificial
  probe
  misc_feature (1)..(25): SEQ ID NO: 2159; WAN024ERE; Start 138; Stop 162
aggtctttatcagagagaggcagaa

SEQ ID NO: 316859 - DNA, 25 bp, Artificial
  probe
  misc_feature (1)..(25): SEQ ID NO: 2159; WAN024ERE; Start 137; Stop 161
aaggtctttatcagagagaggcaga

SEQ ID NO: 316860 - DNA, 25 bp, Artificial
  probe
  misc_feature (1)..(25): SEQ ID NO: 2159; WAN024ERE; Start 314; Stop 338
ttggtgatgatacagaagctgctag

SEQ ID NO: 316861 - DNA, 25 bp, Artificial
  probe
  misc_feature (1)..(25): SEQ ID NO: 2159; WAN024ERE; Start 143; Stop 167
tttatcagagagaggcagaaggaca

SEQ ID NO: 316862 - DNA, 25 bp, Artificial
  probe
  misc_feature (1)..(25): SEQ ID NO: 2159; WAN024ERE; Start 244; Stop 268
ataaatcacaatgagattccttggg

SEQ ID NO: 316863 - DNA, 25 bp, Artificial
  probe
  misc_feature (1)..(25): SEQ ID NO: 2159; WAN024ERE; Start 246; Stop 270
aaatcacaatgagattccttgggag

SEQ ID NO: 316864 - DNA, 25 bp, Artificial
  probe
  misc_feature (1)..(25): SEQ ID NO: 2159; WAN024ERE; Start 379; Stop 403
ggtaatgacgaagttgttgccaaat

SEQ ID NO: 316865 - DNA, 25 bp, Artificial
  probe
  misc_feature (1)..(25): SEQ ID NO: 2159; WAN024ERE; Start 313; Stop 337
gttggtgatgatacagaagctgcta

SEQ ID NO: 316866 - DNA, 25 bp, Artificial
  probe
  misc_feature (1)..(25): SEQ ID NO: 2159; WAN024ERE; Start 132; Stop 156
tatcgaaggtctttatcagagagag

SEQ ID NO: 316867 - DNA, 25 bp, Artificial
  probe
  misc_feature (1)..(25): SEQ ID NO: 2160; WAN024DI9; Start 484; Stop 508
ggaactcttctcttacttgcctatg

SEQ ID NO: 316868 - DNA, 25 bp, Artificial
  probe
  misc_feature (1)..(25): SEQ ID NO: 2160; WAN024DI9; Start 485; Stop 509
gaactcttctcttacttgcctatgc

SEQ ID NO: 316869 - DNA, 25 bp, Artificial
  probe
  misc_feature (1)..(25): SEQ ID NO: 2160; WAN024DI9; Start 223; Stop 247
ctatggtggacttggattatcgcta

SEQ ID NO: 316870 - DNA, 25 bp, Artificial
  probe
  misc_feature (1)..(25): SEQ ID NO: 2160; WAN024DI9; Start 217; Stop 241
tatggtctatggtggacttggatta

SEQ ID NO: 316871 - DNA, 25 bp, Artificial
  probe
  misc_feature (1)..(25): SEQ ID NO: 2160; WAN024DI9; Start 224; Stop 248
tatggtggacttggattatcgctag

SEQ ID NO: 316872 - DNA, 25 bp, Artificial
  probe
  misc_feature (1)..(25): SEQ ID NO: 2160; WAN024DI9; Start 451; Stop 475
ggaattgccaatggtgtatctgtag

SEQ ID NO: 316873 - DNA, 25 bp, Artificial
  probe
  misc_feature (1)..(25): SEQ ID NO: 2160; WAN024DI9; Start 218; Stop 242
atggtctatggtggacttggattat

SEQ ID NO: 316874 - DNA, 25 bp, Artificial
  probe
  misc_feature (1)..(25): SEQ ID NO: 2160; WAN024DI9; Start 483; Stop 507
aggaactcttctcttacttgcctat

SEQ ID NO: 316875 - DNA, 25 bp, Artificial
  probe
  misc_feature (1)..(25): SEQ ID NO: 2160; WAN024DI9; Start 216; Stop 240
ttatggtctatggtggacttggatt

SEQ ID NO: 316876 - DNA, 25 bp, Artificial
  probe
  misc_feature (1)..(25): SEQ ID NO: 2160; WAN024DI9; Start 452; Stop 476
gaattgccaatggtgtatctgtagc

SEQ ID NO: 316877 - DNA, 25 bp, Artificial
  probe
  misc_feature (1)..(25): SEQ ID NO: 2160; WAN024DI9; Start 219; Stop 243
tggtctatggtggacttggattatc

SEQ ID NO: 316878 - DNA, 25 bp, Artificial
  probe
  misc_feature (1)..(25): SEQ ID NO: 2160; WAN024DI9; Start 482; Stop 506
caggaactcttctcttacttgccta

SEQ ID NO: 316879 - DNA, 25 bp, Artificial
  probe
  misc_feature (1)..(25): SEQ ID NO: 2160; WAN024DI9; Start 215; Stop 239
gttatggtctatggtggacttggat

SEQ ID NO: 316880 - DNA, 25 bp, Artificial
  probe
  misc_feature (1)..(25): SEQ ID NO: 2160; WAN024DI9; Start 476; Stop 500
ctattgcaggaactcttctcttact

SEQ ID NO: 316881 - DNA, 25 bp, Artificial
  probe
  misc_feature (1)..(25): SEQ ID NO: 2160; WAN024DI9; Start 477; Stop 501
tattgcaggaactcttctcttactt

SEQ ID NO: 316882 - DNA, 25 bp, Artificial
  probe
  misc_feature (1)..(25): SEQ ID NO: 2160; WAN024DI9; Start 478; Stop 502
attgcaggaactcttctcttacttg

SEQ ID NO: 316883 - DNA, 25 bp, Artificial
  probe
  misc_feature (1)..(25): SEQ ID NO: 2160; WAN024DI9; Start 475; Stop 499
gctattgcaggaactcttctcttac

SEQ ID NO: 316884 - DNA, 25 bp, Artificial
  probe
  misc_feature (1)..(25): SEQ ID NO: 2160; WAN024DI9; Start 474; Stop 498
agctattgcaggaactcttctctta

SEQ ID NO: 316885 - DNA, 25 bp, Artificial
  probe
  misc_feature (1)..(25): SEQ ID NO: 2160; WAN024DI9; Start 222; Stop 246
tctatggtggacttggattatcgct

SEQ ID NO: 316886 - DNA, 25 bp, Artificial
  probe
  misc_feature (1)..(25): SEQ ID NO: 2160; WAN024DI9; Start 220; Stop 244
ggtctatggtggacttggattatcg

SEQ ID NO: 316887 - DNA, 25 bp, Artificial
  probe
  misc_feature (1)..(25): SEQ ID NO: 2160; WAN024DI9; Start 393; Stop 417
agatgttgtgatttatcaagaagcg

SEQ ID NO: 316888 - DNA, 25 bp, Artificial
  probe
  misc_feature (1)..(25): SEQ ID NO: 2160; WAN024DI9; Start 453; Stop 477
aattgccaatggtgtatctgtagct

SEQ ID NO: 316889 - DNA, 25 bp, Artificial
  probe
  misc_feature (1)..(25): SEQ ID NO: 2160; WAN024DI9; Start 394; Stop 418
gatgttgtgatttatcaagaagcgg

SEQ ID NO: 316890 - DNA, 25 bp, Artificial
  probe
  misc_feature (1)..(25): SEQ ID NO: 2160; WAN024DI9; Start 385; Stop 409
ccacttggagatgttgtgatttatc

SEQ ID NO: 316891 - DNA, 25 bp, Artificial
  probe
  misc_feature (1)..(25): SEQ ID NO: 2160; WAN024DI9; Start 221; Stop 245
gtctatggtggacttggattatcgc

SEQ ID NO: 316892 - DNA, 25 bp, Artificial
  probe
  misc_feature (1)..(25): SEQ ID NO: 2160; WAN024DI9; Start 384; Stop 408
accacttggagatgttgtgatttat

SEQ ID NO: 316893 - DNA, 25 bp, Artificial
  probe
  misc_feature (1)..(25): SEQ ID NO: 2160; WAN024DI9; Start 387; Stop 411
acttggagatgttgtgatttatcaa

SEQ ID NO: 316894 - DNA, 25 bp, Artificial
  probe
  misc_feature (1)..(25): SEQ ID NO: 2160; WAN024DI9; Start 392; Stop 416
gagatgttgtgatttatcaagaagc

SEQ ID NO: 316895 - DNA, 25 bp, Artificial
  probe
  misc_feature (1)..(25): SEQ ID NO: 2160; WAN024DI9; Start 390; Stop 414
tggagatgttgtgatttatcaagaa

SEQ ID NO: 316896 - DNA, 25 bp, Artificial
  probe
  misc_feature (1)..(25): SEQ ID NO: 2160; WAN024DI9; Start 389; Stop 413
ttggagatgttgtgatttatcaaga

SEQ ID NO: 316897 - DNA, 25 bp, Artificial
  probe
  misc_feature (1)..(25): SEQ ID NO: 2160; WAN024DI9; Start 386; Stop 410
cacttggagatgttgtgatttatca

SEQ ID NO: 316898 - DNA, 25 bp, Artificial
  probe
  misc_feature (1)..(25): SEQ ID NO: 2160; WAN024DI9; Start 383; Stop 407
caccacttggagatgttgtgattta

SEQ ID NO: 316899 - DNA, 25 bp, Artificial
  probe
  misc_feature (1)..(25): SEQ ID NO: 2160; WAN024DI9; Start 473; Stop 497
tagctattgcaggaactcttctctt

SEQ ID NO: 316900 - DNA, 25 bp, Artificial
  probe
  misc_feature (1)..(25): SEQ ID NO: 2161; WAN024FEJ-5; Start 50; Stop 74
tagtcattggatatgtcagcatctc

SEQ ID NO: 316901 - DNA, 25 bp, Artificial
  probe
  misc_feature (1)..(25): SEQ ID NO: 2161; WAN024FEJ-5; Start 49; Stop 73
ttagtcattggatatgtcagcatct

SEQ ID NO: 316902 - DNA, 25 bp, Artificial
  probe
  misc_feature (1)..(25): SEQ ID NO: 2161; WAN024FEJ-5; Start 52; Stop 76
gtcattggatatgtcagcatctcag

SEQ ID NO: 316903 - DNA, 25 bp, Artificial
  probe
  misc_feature (1)..(25): SEQ ID NO: 2161; WAN024FEJ-5; Start 51; Stop 75
agtcattggatatgtcagcatctca

SEQ ID NO: 316904 - DNA, 25 bp, Artificial
  probe
  misc_feature (1)..(25): SEQ ID NO: 2161; WAN024FEJ-5; Start 504; Stop 528
tcaggcagaagcacgagatattatc

SEQ ID NO: 316905 - DNA, 25 bp, Artificial
  probe
  misc_feature (1)..(25): SEQ ID NO: 2161; WAN024FEJ-5; Start 503; Stop 527
ctcaggcagaagcacgagatattat

SEQ ID NO: 316906 - DNA, 25 bp, Artificial
  probe
  misc_feature (1)..(25): SEQ ID NO: 2161; WAN024FEJ-5; Start 53; Stop 77
tcattggatatgtcagcatctcagc

SEQ ID NO: 316907 - DNA, 25 bp, Artificial
  probe
  misc_feature (1)..(25): SEQ ID NO: 2161; WAN024FEJ-5; Start 470; Stop 494
aagaagcagaactagagcgtattgg

SEQ ID NO: 316908 - DNA, 25 bp, Artificial
  probe
  misc_feature (1)..(25): SEQ ID NO: 2161; WAN024FEJ-5; Start 37; Stop 61
gtcatcattggtttagtcattggat

SEQ ID NO: 316909 - DNA, 25 bp, Artificial
  probe
  misc_feature (1)..(25): SEQ ID NO: 2161; WAN024FEJ-5; Start 351; Stop 375
taaggacgacaatttgacgagtaaa

SEQ ID NO: 316910 - DNA, 25 bp, Artificial
  probe
  misc_feature (1)..(25): SEQ ID NO: 2161; WAN024FEJ-5; Start 164; Stop 188
gtgaagcggatttacttgttaatga

SEQ ID NO: 316911 - DNA, 25 bp, Artificial
  probe
  misc_feature (1)..(25): SEQ ID NO: 2161; WAN024FEJ-5; Start 355; Stop 379
gacgacaatttgacgagtaaagaac

SEQ ID NO: 316912 - DNA, 25 bp, Artificial
  probe
  misc_feature (1)..(25): SEQ ID NO: 2161; WAN024FEJ-5; Start 167; Stop 191
aagcggatttacttgttaatgaagc

SEQ ID NO: 316913 - DNA, 25 bp, Artificial
  probe
  misc_feature (1)..(25): SEQ ID NO: 2161; WAN024FEJ-5; Start 438; Stop 462
tgaagagcaattagaggaagtcgaa

SEQ ID NO: 316914 - DNA, 25 bp, Artificial
  probe
  misc_feature (1)..(25): SEQ ID NO: 2161; WAN024FEJ-5; Start 165; Stop 189
tgaagcggatttacttgttaatgaa

SEQ ID NO: 316915 - DNA, 25 bp, Artificial
  probe
  misc_feature (1)..(25): SEQ ID NO: 2161; WAN024FEJ-5; Start 47; Stop 71
gtttagtcattggatatgtcagcat

SEQ ID NO: 316916 - DNA, 25 bp, Artificial
  probe
  misc_feature (1)..(25): SEQ ID NO: 2161; WAN024FEJ-5; Start 46; Stop 70
ggtttagtcattggatatgtcagca

SEQ ID NO: 316917 - DNA, 25 bp, Artificial
  probe
  misc_feature (1)..(25): SEQ ID NO: 2161; WAN024FEJ-5; Start 45; Stop 69
tggtttagtcattggatatgtcagc

SEQ ID NO: 316918 - DNA, 25 bp, Artificial
  probe
  misc_feature (1)..(25): SEQ ID NO: 2161; WAN024FEJ-5; Start 125; Stop 149
ctgaacaagaagcaactaatttacg

SEQ ID NO: 316919 - DNA, 25 bp, Artificial
  probe
  misc_feature (1)..(25): SEQ ID NO: 2161; WAN024FEJ-5; Start 350; Stop 374
gtaaggacgacaatttgacgagtaa

SEQ ID NO: 316920 - DNA, 25 bp, Artificial
  probe
  misc_feature (1)..(25): SEQ ID NO: 2161; WAN024FEJ-5; Start 48; Stop 72
tttagtcattggatatgtcagcatc

SEQ ID NO: 316921 - DNA, 25 bp, Artificial
  probe
  misc_feature (1)..(25): SEQ ID NO: 2161; WAN024FEJ-5; Start 36; Stop 60
cgtcatcattggtttagtcattgga

SEQ ID NO: 316922 - DNA, 25 bp, Artificial
  probe
  misc_feature (1)..(25): SEQ ID NO: 2161; WAN024FEJ-5; Start 356; Stop 380
acgacaatttgacgagtaaagaaca

SEQ ID NO: 316923 - DNA, 25 bp, Artificial
  probe
  misc_feature (1)..(25): SEQ ID NO: 2161; WAN024FEJ-5; Start 397; Stop 421
gaacaaagtatttctgatagagcga

SEQ ID NO: 316924 - DNA, 25 bp, Artificial
  probe
  misc_feature (1)..(25): SEQ ID NO: 2161; WAN024FEJ-5; Start 366; Stop 390
gacgagtaaagaacaaacacttgaa

SEQ ID NO: 316925 - DNA, 25 bp, Artificial
  probe
  misc_feature (1)..(25): SEQ ID NO: 2161; WAN024FEJ-5; Start 357; Stop 381
cgacaatttgacgagtaaagaacaa

SEQ ID NO: 316926 - DNA, 25 bp, Artificial
  probe
  misc_feature (1)..(25): SEQ ID NO: 2161; WAN024FEJ-5; Start 163; Stop 187
cgtgaagcggatttacttgttaatg

SEQ ID NO: 316927 - DNA, 25 bp, Artificial
  probe
  misc_feature (1)..(25): SEQ ID NO: 2161; WAN024FEJ-5; Start 368; Stop 392
cgagtaaagaacaaacacttgaaca

SEQ ID NO: 316928 - DNA, 25 bp, Artificial
  probe
  misc_feature (1)..(25): SEQ ID NO: 2161; WAN024FEJ-5; Start 367; Stop 391
acgagtaaagaacaaacacttgaac

SEQ ID NO: 316929 - DNA, 25 bp, Artificial
  probe
  misc_feature (1)..(25): SEQ ID NO: 2161; WAN024FEJ-5; Start 364; Stop 388
ttgacgagtaaagaacaaacacttg

SEQ ID NO: 316930 - DNA, 25 bp, Artificial
  probe
  misc_feature (1)..(25): SEQ ID NO: 2161; WAN024FEJ-5; Start 44; Stop 68
ttggtttagtcattggatatgtcag

SEQ ID NO: 316931 - DNA, 25 bp, Artificial
  probe
  misc_feature (1)..(25): SEQ ID NO: 2161; WAN024FEJ-5; Start 166; Stop 190
gaagcggatttacttgttaatgaag

SEQ ID NO: 316932 - DNA, 25 bp, Artificial
  probe
  misc_feature (1)..(25): SEQ ID NO: 2161; WAN024FEJ-5; Start 365; Stop 389
tgacgagtaaagaacaaacacttga

SEQ ID NO: 316933 - DNA, 25 bp, Artificial
  probe
  misc_feature (1)..(25): SEQ ID NO: 2162; WAN024F8T; Start 155; Stop 179
tctatgacaatatcaagcgaacaga

SEQ ID NO: 316934 - DNA, 25 bp, Artificial
  probe
  misc_feature (1)..(25): SEQ ID NO: 2162; WAN024F8T; Start 156; Stop 180
ctatgacaatatcaagcgaacagaa

SEQ ID NO: 316935 - DNA, 25 bp, Artificial
  probe
  misc_feature (1)..(25): SEQ ID NO: 2162; WAN024F8T; Start 154; Stop 178
gtctatgacaatatcaagcgaacag

SEQ ID NO: 316936 - DNA, 25 bp, Artificial
  probe
  misc_feature (1)..(25): SEQ ID NO: 2162; WAN024F8T; Start 182; Stop 206
agattctggaagattatgagatgaa

SEQ ID NO: 316937 - DNA, 25 bp, Artificial
  probe
  misc_feature (1)..(25): SEQ ID NO: 2162; WAN024F8T; Start 181; Stop 205
aagattctggaagattatgagatga

SEQ ID NO: 316938 - DNA, 25 bp, Artificial
  probe
  misc_feature (1)..(25): SEQ ID NO: 2162; WAN024F8T; Start 157; Stop 181
tatgacaatatcaagcgaacagaaa

SEQ ID NO: 316939 - DNA, 25 bp, Artificial
  probe
  misc_feature (1)..(25): SEQ ID NO: 2162; WAN024F8T; Start 187; Stop 211
ctggaagattatgagatgaaattgc

SEQ ID NO: 316940 - DNA, 25 bp, Artificial
  probe
  misc_feature (1)..(25): SEQ ID NO: 2162; WAN024F8T; Start 188; Stop 212
tggaagattatgagatgaaattgca

SEQ ID NO: 316941 - DNA, 25 bp, Artificial
  probe
  misc_feature (1)..(25): SEQ ID NO: 2162; WAN024F8T; Start 189; Stop 213
ggaagattatgagatgaaattgcac

SEQ ID NO: 316942 - DNA, 25 bp, Artificial
  probe
  misc_feature (1)..(25): SEQ ID NO: 2162; WAN024F8T; Start 160; Stop 184
gacaatatcaagcgaacagaaaaga

SEQ ID NO: 316943 - DNA, 25 bp, Artificial
  probe
  misc_feature (1)..(25): SEQ ID NO: 2162; WAN024F8T; Start 186; Stop 210
tctggaagattatgagatgaaattg

SEQ ID NO: 316944 - DNA, 25 bp, Artificial
  probe
  misc_feature (1)..(25): SEQ ID NO: 2162; WAN024F8T; Start 190; Stop 214
gaagattatgagatgaaattgcaca

SEQ ID NO: 316945 - DNA, 25 bp, Artificial
  probe
  misc_feature (1)..(25): SEQ ID NO: 2162; WAN024F8T; Start 161; Stop 185
acaatatcaagcgaacagaaaagat

SEQ ID NO: 316946 - DNA, 25 bp, Artificial
  probe
  misc_feature (1)..(25): SEQ ID NO: 2162; WAN024F8T; Start 183; Stop 207
gattctggaagattatgagatgaaa

SEQ ID NO: 316947 - DNA, 25 bp, Artificial
  probe
  misc_feature (1)..(25): SEQ ID NO: 2162; WAN024F8T; Start 180; Stop 204
aaagattctggaagattatgagatg

SEQ ID NO: 316948 - DNA, 25 bp, Artificial
  probe
  misc_feature (1)..(25): SEQ ID NO: 2162; WAN024F8T; Start 192; Stop 216
agattatgagatgaaattgcacatg

SEQ ID NO: 316949 - DNA, 25 bp, Artificial
  probe
  misc_feature (1)..(25): SEQ ID NO: 2162; WAN024F8T; Start 159; Stop 183
tgacaatatcaagcgaacagaaaag

SEQ ID NO: 316950 - DNA, 25 bp, Artificial
  probe
  misc_feature (1)..(25): SEQ ID NO: 2162; WAN024F8T; Start 158; Stop 182
atgacaatatcaagcgaacagaaaa

SEQ ID NO: 316951 - DNA, 25 bp, Artificial
  probe
  misc_feature (1)..(25): SEQ ID NO: 2162; WAN024F8T; Start 162; Stop 186
caatatcaagcgaacagaaaagatt

SEQ ID NO: 316952 - DNA, 25 bp, Artificial
  probe
  misc_feature (1)..(25): SEQ ID NO: 2162; WAN024F8T; Start 152; Stop 176
ctgtctatgacaatatcaagcgaac

SEQ ID NO: 316953 - DNA, 25 bp, Artificial
  probe
  misc_feature (1)..(25): SEQ ID NO: 2162; WAN024F8T; Start 147; Stop 171
tcaggctgtctatgacaatatcaag

SEQ ID NO: 316954 - DNA, 25 bp, Artificial
  probe
  misc_feature (1)..(25): SEQ ID NO: 2162; WAN024F8T; Start 153; Stop 177
tgtctatgacaatatcaagcgaaca

SEQ ID NO: 316955 - DNA, 25 bp, Artificial
  probe
  misc_feature (1)..(25): SEQ ID NO: 2162; WAN024F8T; Start 146; Stop 170
gtcaggctgtctatgacaatatcaa

SEQ ID NO: 316956 - DNA, 25 bp, Artificial
  probe
  misc_feature (1)..(25): SEQ ID NO: 2162; WAN024F8T; Start 163; Stop 187
aatatcaagcgaacagaaaagattc

SEQ ID NO: 316957 - DNA, 25 bp, Artificial
  probe
  misc_feature (1)..(25): SEQ ID NO: 2162; WAN024F8T; Start 191; Stop 215
aagattatgagatgaaattgcacat

SEQ ID NO: 316958 - DNA, 25 bp, Artificial
  probe
  misc_feature (1)..(25): SEQ ID NO: 2162; WAN024F8T; Start 151; Stop 175
gctgtctatgacaatatcaagcgaa

SEQ ID NO: 316959 - DNA, 25 bp, Artificial
  probe
  misc_feature (1)..(25): SEQ ID NO: 2162; WAN024F8T; Start 185; Stop 209
ttctggaagattatgagatgaaatt

SEQ ID NO: 316960 - DNA, 25 bp, Artificial
  probe
  misc_feature (1)..(25): SEQ ID NO: 2162; WAN024F8T; Start 148; Stop 172
caggctgtctatgacaatatcaagc

SEQ ID NO: 316961 - DNA, 25 bp, Artificial
  probe
  misc_feature (1)..(25): SEQ ID NO: 2162; WAN024F8T; Start 184; Stop 208
attctggaagattatgagatgaaat

SEQ ID NO: 316962 - DNA, 25 bp, Artificial
  probe
  misc_feature (1)..(25): SEQ ID NO: 2162; WAN024F8T; Start 144; Stop 168
tcgtcaggctgtctatgacaatatc

SEQ ID NO: 316963 - DNA, 25 bp, Artificial
  probe
  misc_feature (1)..(25): SEQ ID NO: 2162; WAN024F8T; Start 288; Stop 312
gcaggagcagatagaaattttaaca

SEQ ID NO: 316964 - DNA, 25 bp, Artificial
  probe
  misc_feature (1)..(25): SEQ ID NO: 2162; WAN024F8T; Start 145; Stop 169
cgtcaggctgtctatgacaatatca

SEQ ID NO: 316965 - DNA, 25 bp, Artificial
  probe
  misc_feature (1)..(25): SEQ ID NO: 2162; WAN024F8T; Start 143; Stop 167
gtcgtcaggctgtctatgacaatat

SEQ ID NO: 316966 - DNA, 25 bp, Artificial
  probe
  misc_feature (1)..(25): SEQ ID NO: 2163; WAN024G2U; Start 125; Stop 149
tatccgtcgtctattctatcacatt

SEQ ID NO: 316967 - DNA, 25 bp, Artificial
  probe
  misc_feature (1)..(25): SEQ ID NO: 2163; WAN024G2U; Start 124; Stop 148
ttatccgtcgtctattctatcacat

SEQ ID NO: 316968 - DNA, 25 bp, Artificial
  probe
  misc_feature (1)..(25): SEQ ID NO: 2163; WAN024G2U; Start 69; Stop 93
accacctgtcactccaataatgatt

SEQ ID NO: 316969 - DNA, 25 bp, Artificial
  probe
  misc_feature (1)..(25): SEQ ID NO: 2163; WAN024G2U; Start 68; Stop 92
aaccacctgtcactccaataatgat

SEQ ID NO: 316970 - DNA, 25 bp, Artificial
  probe
  misc_feature (1)..(25): SEQ ID NO: 2163; WAN024G2U; Start 66; Stop 90
agaaccacctgtcactccaataatg

SEQ ID NO: 316971 - DNA, 25 bp, Artificial
  probe
  misc_feature (1)..(25): SEQ ID NO: 2163; WAN024G2U; Start 126; Stop 150
atccgtcgtctattctatcacattt

SEQ ID NO: 316972 - DNA, 25 bp, Artificial
  probe
  misc_feature (1)..(25): SEQ ID NO: 2163; WAN024G2U; Start 123; Stop 147
tttatccgtcgtctattctatcaca

SEQ ID NO: 316973 - DNA, 25 bp, Artificial
  probe
  misc_feature (1)..(25): SEQ ID NO: 2163; WAN024G2U; Start 67; Stop 91
gaaccacctgtcactccaataatga

SEQ ID NO: 316974 - DNA, 25 bp, Artificial
  probe
  misc_feature (1)..(25): SEQ ID NO: 2163; WAN024G2U; Start 65; Stop 89
cagaaccacctgtcactccaataat

SEQ ID NO: 316975 - DNA, 25 bp, Artificial
  probe
  misc_feature (1)..(25): SEQ ID NO: 2163; WAN024G2U; Start 70; Stop 94
ccacctgtcactccaataatgattg

SEQ ID NO: 316976 - DNA, 25 bp, Artificial
  probe
  misc_feature (1)..(25): SEQ ID NO: 2163; WAN024G2U; Start 127; Stop 151
tccgtcgtctattctatcacatttt

SEQ ID NO: 316977 - DNA, 25 bp, Artificial
  probe
  misc_feature (1)..(25): SEQ ID NO: 2163; WAN024G2U; Start 116; Stop 140
ccgttattttatccgtcgtctattc

SEQ ID NO: 316978 - DNA, 25 bp, Artificial
  probe
  misc_feature (1)..(25): SEQ ID NO: 2163; WAN024G2U; Start 115; Stop 139
tccgttattttatccgtcgtctatt

SEQ ID NO: 316979 - DNA, 25 bp, Artificial
  probe
  misc_feature (1)..(25): SEQ ID NO: 2163; WAN024G2U; Start 22; Stop 46
aaatgcgataaaatggctcttgaaa

SEQ ID NO: 316980 - DNA, 25 bp, Artificial
  probe
  misc_feature (1)..(25): SEQ ID NO: 2163; WAN024G2U; Start 21; Stop 45
aaaatgcgataaaatggctcttgaa

SEQ ID NO: 316981 - DNA, 25 bp, Artificial
  probe
  misc_feature (1)..(25): SEQ ID NO: 2163; WAN024G2U; Start 114; Stop 138
ctccgttattttatccgtcgtctat

SEQ ID NO: 316982 - DNA, 25 bp, Artificial
  probe
  misc_feature (1)..(25): SEQ ID NO: 2163; WAN024G2U; Start 106; Stop 130
atgctatcctccgttattttatccg

SEQ ID NO: 316983 - DNA, 25 bp, Artificial
  probe
  misc_feature (1)..(25): SEQ ID NO: 2163; WAN024G2U; Start 28; Stop 52
gataaaatggctcttgaaacactgg

SEQ ID NO: 316984 - DNA, 25 bp, Artificial
  probe
  misc_feature (1)..(25): SEQ ID NO: 2163; WAN024G2U; Start 20; Stop 44
gaaaatgcgataaaatggctcttga

SEQ ID NO: 316985 - DNA, 25 bp, Artificial
  probe
  misc_feature (1)..(25): SEQ ID NO: 2163; WAN024G2U; Start 23; Stop 47
aatgcgataaaatggctcttgaaac

SEQ ID NO: 316986 - DNA, 25 bp, Artificial
  probe
  misc_feature (1)..(25): SEQ ID NO: 2163; WAN024G2U; Start 13; Stop 37
tcatcaggaaaatgcgataaaatgg

SEQ ID NO: 316987 - DNA, 25 bp, Artificial
  probe
  misc_feature (1)..(25): SEQ ID NO: 2163; WAN024G2U; Start 109; Stop 133
ctatcctccgttattttatccgtcg

SEQ ID NO: 316988 - DNA, 25 bp, Artificial
  probe
  misc_feature (1)..(25): SEQ ID NO: 2163; WAN024G2U; Start 27; Stop 51
cgataaaatggctcttgaaacactg

SEQ ID NO: 316989 - DNA, 25 bp, Artificial
  probe
  misc_feature (1)..(25): SEQ ID NO: 2163; WAN024G2U; Start 117; Stop 141
cgttattttatccgtcgtctattct

SEQ ID NO: 316990 - DNA, 25 bp, Artificial
  probe
  misc_feature (1)..(25): SEQ ID NO: 2163; WAN024G2U; Start 29; Stop 53
ataaaatggctcttgaaacactggt

SEQ ID NO: 316991 - DNA, 25 bp, Artificial
  probe
  misc_feature (1)..(25): SEQ ID NO: 2163; WAN024G2U; Start 108; Stop 132
gctatcctccgttattttatccgtc

SEQ ID NO: 316992 - DNA, 25 bp, Artificial
  probe
  misc_feature (1)..(25): SEQ ID NO: 2163; WAN024G2U; Start 110; Stop 134
tatcctccgttattttatccgtcgt

SEQ ID NO: 316993 - DNA, 25 bp, Artificial
  probe
  misc_feature (1)..(25): SEQ ID NO: 2163; WAN024G2U; Start 19; Stop 43
ggaaaatgcgataaaatggctcttg

SEQ ID NO: 316994 - DNA, 25 bp, Artificial
  probe
  misc_feature (1)..(25): SEQ ID NO: 2163; WAN024G2U; Start 18; Stop 42
aggaaaatgcgataaaatggctctt

SEQ ID NO: 316995 - DNA, 25 bp, Artificial
  probe
  misc_feature (1)..(25): SEQ ID NO: 2163; WAN024G2U; Start 64; Stop 88
ccagaaccacctgtcactccaataa

SEQ ID NO: 316996 - DNA, 25 bp, Artificial
  probe
  misc_feature (1)..(25): SEQ ID NO: 2163; WAN024G2U; Start 122; Stop 146
ttttatccgtcgtctattctatcac

SEQ ID NO: 316997 - DNA, 25 bp, Artificial
  probe
  misc_feature (1)..(25): SEQ ID NO: 2163; WAN024G2U; Start 107; Stop 131
tgctatcctccgttattttatccgt

SEQ ID NO: 316998 - DNA, 25 bp, Artificial
  probe
  misc_feature (1)..(25): SEQ ID NO: 2163; WAN024G2U; Start 12; Stop 36
ttcatcaggaaaatgcgataaaatg

SEQ ID NO: 316999 - DNA, 25 bp, Artificial
  probe
  misc_feature (1)..(25): SEQ ID NO: 2164; WAN024DKF; Start 228; Stop 252
tgttcattcacaagatcatctcatg

SEQ ID NO: 317000 - DNA, 25 bp, Artificial
  probe
  misc_feature (1)..(25): SEQ ID NO: 2164; WAN024DKF; Start 197; Stop 221
ctggtacaaagacagaaattacagc

SEQ ID NO: 317001 - DNA, 25 bp, Artificial
  probe
  misc_feature (1)..(25): SEQ ID NO: 2164; WAN024DKF; Start 199; Stop 223
ggtacaaagacagaaattacagctc

SEQ ID NO: 317002 - DNA, 25 bp, Artificial
  probe
  misc_feature (1)..(25): SEQ ID NO: 2164; WAN024DKF; Start 198; Stop 222
tggtacaaagacagaaattacagct

SEQ ID NO: 317003 - DNA, 25 bp, Artificial
  probe
  misc_feature (1)..(25): SEQ ID NO: 2164; WAN024DKF; Start 202; Stop 226
acaaagacagaaattacagctctct

SEQ ID NO: 317004 - DNA, 25 bp, Artificial
  probe
  misc_feature (1)..(25): SEQ ID NO: 2164; WAN024DKF; Start 200; Stop 224
gtacaaagacagaaattacagctct

SEQ ID NO: 317005 - DNA, 25 bp, Artificial
  probe
  misc_feature (1)..(25): SEQ ID NO: 2164; WAN024DKF; Start 201; Stop 225
tacaaagacagaaattacagctctc

SEQ ID NO: 317006 - DNA, 25 bp, Artificial
  probe
  misc_feature (1)..(25): SEQ ID NO: 2164; WAN024DKF; Start 206; Stop 230
agacagaaattacagctctctttgt

SEQ ID NO: 317007 - DNA, 25 bp, Artificial
  probe
  misc_feature (1)..(25): SEQ ID NO: 2164; WAN024DKF; Start 214; Stop 238
attacagctctctttgttcattcac

SEQ ID NO: 317008 - DNA, 25 bp, Artificial
  probe
  misc_feature (1)..(25): SEQ ID NO: 2164; WAN024DKF; Start 209; Stop 233
cagaaattacagctctctttgttca

SEQ ID NO: 317009 - DNA, 25 bp, Artificial
  probe
  misc_feature (1)..(25): SEQ ID NO: 2164; WAN024DKF; Start 208; Stop 232
acagaaattacagctctctttgttc

SEQ ID NO: 317010 - DNA, 25 bp, Artificial
  probe
  misc_feature (1)..(25): SEQ ID NO: 2164; WAN024DKF; Start 207; Stop 231
gacagaaattacagctctctttgtt

SEQ ID NO: 317011 - DNA, 25 bp, Artificial
  probe
  misc_feature (1)..(25): SEQ ID NO: 2164; WAN024DKF; Start 12; Stop 36
tgttccagatcaaattatcatgggt

SEQ ID NO: 317012 - DNA, 25 bp, Artificial
  probe
  misc_feature (1)..(25): SEQ ID NO: 2164; WAN024DKF; Start 215; Stop 239
ttacagctctctttgttcattcaca

SEQ ID NO: 317013 - DNA, 25 bp, Artificial
  probe
  misc_feature (1)..(25): SEQ ID NO: 2164; WAN024DKF; Start 227; Stop 251
ttgttcattcacaagatcatctcat

SEQ ID NO: 317014 - DNA, 25 bp, Artificial
  probe
  misc_feature (1)..(25): SEQ ID NO: 2164; WAN024DKF; Start 13; Stop 37
gttccagatcaaattatcatgggtt

SEQ ID NO: 317015 - DNA, 25 bp, Artificial
  probe
  misc_feature (1)..(25): SEQ ID NO: 2164; WAN024DKF; Start 11; Stop 35
ttgttccagatcaaattatcatggg

SEQ ID NO: 317016 - DNA, 25 bp, Artificial
  probe
  misc_feature (1)..(25): SEQ ID NO: 2164; WAN024DKF; Start 213; Stop 237
aattacagctctctttgttcattca

SEQ ID NO: 317017 - DNA, 25 bp, Artificial
  probe
  misc_feature (1)..(25): SEQ ID NO: 2164; WAN024DKF; Start 210; Stop 234
agaaattacagctctctttgttcat

SEQ ID NO: 317018 - DNA, 25 bp, Artificial
  probe
  misc_feature (1)..(25): SEQ ID NO: 2164; WAN024DKF; Start 14; Stop 38
ttccagatcaaattatcatgggttt

SEQ ID NO: 317019 - DNA, 25 bp, Artificial
  probe
  misc_feature (1)..(25): SEQ ID NO: 2164; WAN024DKF; Start 212; Stop 236
aaattacagctctctttgttcattc

SEQ ID NO: 317020 - DNA, 25 bp, Artificial
  probe
  misc_feature (1)..(25): SEQ ID NO: 2164; WAN024DKF; Start 211; Stop 235
gaaattacagctctctttgttcatt

SEQ ID NO: 317021 - DNA, 25 bp, Artificial
  probe
  misc_feature (1)..(25): SEQ ID NO: 2164; WAN024DKF; Start 15; Stop 39
tccagatcaaattatcatgggttta

SEQ ID NO: 317022 - DNA, 25 bp, Artificial
  probe
  misc_feature (1)..(25): SEQ ID NO: 2164; WAN024DKF; Start 205; Stop 229
aagacagaaattacagctctctttg

SEQ ID NO: 317023 - DNA, 25 bp, Artificial
  probe
  misc_feature (1)..(25): SEQ ID NO: 2164; WAN024DKF; Start 203; Stop 227
caaagacagaaattacagctctctt

SEQ ID NO: 317024 - DNA, 25 bp, Artificial
  probe
  misc_feature (1)..(25): SEQ ID NO: 2164; WAN024DKF; Start 10; Stop 34
attgttccagatcaaattatcatgg

SEQ ID NO: 317025 - DNA, 25 bp, Artificial
  probe
  misc_feature (1)..(25): SEQ ID NO: 2164; WAN024DKF; Start 220; Stop 244
gctctctttgttcattcacaagatc

SEQ ID NO: 317026 - DNA, 25 bp, Artificial
  probe
  misc_feature (1)..(25): SEQ ID NO: 2164; WAN024DKF; Start 221; Stop 245
ctctctttgttcattcacaagatca

SEQ ID NO: 317027 - DNA, 25 bp, Artificial
  probe
  misc_feature (1)..(25): SEQ ID NO: 2164; WAN024DKF; Start 16; Stop 40
ccagatcaaattatcatgggtttaa

SEQ ID NO: 317028 - DNA, 25 bp, Artificial
  probe
  misc_feature (1)..(25): SEQ ID NO: 2164; WAN024DKF; Start 226; Stop 250
tttgttcattcacaagatcatctca

SEQ ID NO: 317029 - DNA, 25 bp, Artificial
  probe
  misc_feature (1)..(25): SEQ ID NO: 2164; WAN024DKF; Start 224; Stop 248
tctttgttcattcacaagatcatct

SEQ ID NO: 317030 - DNA, 25 bp, Artificial
  probe
  misc_feature (1)..(25): SEQ ID NO: 2164; WAN024DKF; Start 222; Stop 246
tctctttgttcattcacaagatcat

SEQ ID NO: 317031 - DNA, 25 bp, Artificial
  probe
  misc_feature (1)..(25): SEQ ID NO: 2164; WAN024DKF; Start 230; Stop 254
ttcattcacaagatcatctcatgac

SEQ ID NO: 317032 - DNA, 25 bp, Artificial
  probe
  misc_feature (1)..(25): SEQ ID NO: 2165; WAN024DDC; Start 186; Stop 210
agaggtattagagtatgtggctgag

SEQ ID NO: 317033 - DNA, 25 bp, Artificial
  probe
  misc_feature (1)..(25): SEQ ID NO: 2165; WAN024DDC; Start 189; Stop 213
ggtattagagtatgtggctgaggat

SEQ ID NO: 317034 - DNA, 25 bp, Artificial
  probe
  misc_feature (1)..(25): SEQ ID NO: 2165; WAN024DDC; Start 517; Stop 541
cctaatgatcgtggtgtaattgaag

SEQ ID NO: 317035 - DNA, 25 bp, Artificial
  probe
  misc_feature (1)..(25): SEQ ID NO: 2165; WAN024DDC; Start 190; Stop 214
gtattagagtatgtggctgaggatc

SEQ ID NO: 317036 - DNA, 25 bp, Artificial
  probe
  misc_feature (1)..(25): SEQ ID NO: 2165; WAN024DDC; Start 518; Stop 542
ctaatgatcgtggtgtaattgaagc

SEQ ID NO: 317037 - DNA, 25 bp, Artificial
  probe
  misc_feature (1)..(25): SEQ ID NO: 2165; WAN024DDC; Start 187; Stop 211
gaggtattagagtatgtggctgagg

SEQ ID NO: 317038 - DNA, 25 bp, Artificial
  probe
  misc_feature (1)..(25): SEQ ID NO: 2165; WAN024DDC; Start 191; Stop 215
tattagagtatgtggctgaggatct

SEQ ID NO: 317039 - DNA, 25 bp, Artificial
  probe
  misc_feature (1)..(25): SEQ ID NO: 2165; WAN024DDC; Start 188; Stop 212
aggtattagagtatgtggctgagga

SEQ ID NO: 317040 - DNA, 25 bp, Artificial
  probe
  misc_feature (1)..(25): SEQ ID NO: 2165; WAN024DDC; Start 192; Stop 216
attagagtatgtggctgaggatctt

SEQ ID NO: 317041 - DNA, 25 bp, Artificial
  probe
  misc_feature (1)..(25): SEQ ID NO: 2165; WAN024DDC; Start 519; Stop 543
taatgatcgtggtgtaattgaagcg

SEQ ID NO: 317042 - DNA, 25 bp, Artificial
  probe
  misc_feature (1)..(25): SEQ ID NO: 2165; WAN024DDC; Start 185; Stop 209
cagaggtattagagtatgtggctga

SEQ ID NO: 317043 - DNA, 25 bp, Artificial
  probe
  misc_feature (1)..(25): SEQ ID NO: 2165; WAN024DDC; Start 193; Stop 217
ttagagtatgtggctgaggatcttc

SEQ ID NO: 317044 - DNA, 25 bp, Artificial
  probe
  misc_feature (1)..(25): SEQ ID NO: 2165; WAN024DDC; Start 636; Stop 660
tggcgattatagcttagtagagttg

SEQ ID NO: 317045 - DNA, 25 bp, Artificial
  probe
  misc_feature (1)..(25): SEQ ID NO: 2165; WAN024DDC; Start 635; Stop 659
ttggcgattatagcttagtagagtt

SEQ ID NO: 317046 - DNA, 25 bp, Artificial
  probe
  misc_feature (1)..(25): SEQ ID NO: 2165; WAN024DDC; Start 380; Stop 404
ttgttcaccgtattgataaggatac

SEQ ID NO: 317047 - DNA, 25 bp, Artificial
  probe
  misc_feature (1)..(25): SEQ ID NO: 2165; WAN024DDC; Start 181; Stop 205
gaaccagaggtattagagtatgtgg

SEQ ID NO: 317048 - DNA, 25 bp, Artificial
  probe
  misc_feature (1)..(25): SEQ ID NO: 2165; WAN024DDC; Start 178; Stop 202
ccagaaccagaggtattagagtatg

SEQ ID NO: 317049 - DNA, 25 bp, Artificial
  probe
  misc_feature (1)..(25): SEQ ID NO: 2165; WAN024DDC; Start 379; Stop 403
attgttcaccgtattgataaggata

SEQ ID NO: 317050 - DNA, 25 bp, Artificial
  probe
  misc_feature (1)..(25): SEQ ID NO: 2165; WAN024DDC; Start 637; Stop 661
ggcgattatagcttagtagagttgc

SEQ ID NO: 317051 - DNA, 25 bp, Artificial
  probe
  misc_feature (1)..(25): SEQ ID NO: 2165; WAN024DDC; Start 180; Stop 204
agaaccagaggtattagagtatgtg

SEQ ID NO: 317052 - DNA, 25 bp, Artificial
  probe
  misc_feature (1)..(25): SEQ ID NO: 2165; WAN024DDC; Start 179; Stop 203
cagaaccagaggtattagagtatgt

SEQ ID NO: 317053 - DNA, 25 bp, Artificial
  probe
  misc_feature (1)..(25): SEQ ID NO: 2165; WAN024DDC; Start 638; Stop 662
gcgattatagcttagtagagttgca

SEQ ID NO: 317054 - DNA, 25 bp, Artificial
  probe
  misc_feature (1)..(25): SEQ ID NO: 2165; WAN024DDC; Start 177; Stop 201
gccagaaccagaggtattagagtat

SEQ ID NO: 317055 - DNA, 25 bp, Artificial
  probe
  misc_feature (1)..(25): SEQ ID NO: 2165; WAN024DDC; Start 37; Stop 61
gataaggctttgtcagatttgtcag

SEQ ID NO: 317056 - DNA, 25 bp, Artificial
  probe
  misc_feature (1)..(25): SEQ ID NO: 2165; WAN024DDC; Start 33; Stop 57
tttggataaggctttgtcagatttg

SEQ ID NO: 317057 - DNA, 25 bp, Artificial
  probe
  misc_feature (1)..(25): SEQ ID NO: 2165; WAN024DDC; Start 32; Stop 56
gtttggataaggctttgtcagattt

SEQ ID NO: 317058 - DNA, 25 bp, Artificial
  probe
  misc_feature (1)..(25): SEQ ID NO: 2165; WAN024DDC; Start 38; Stop 62
ataaggctttgtcagatttgtcaga

SEQ ID NO: 317059 - DNA, 25 bp, Artificial
  probe
  misc_feature (1)..(25): SEQ ID NO: 2165; WAN024DDC; Start 39; Stop 63
taaggctttgtcagatttgtcagaa

SEQ ID NO: 317060 - DNA, 25 bp, Artificial
  probe
  misc_feature (1)..(25): SEQ ID NO: 2165; WAN024DDC; Start 800; Stop 824
ttactcatccgagaacaggtaagac

SEQ ID NO: 317061 - DNA, 25 bp, Artificial
  probe
  misc_feature (1)..(25): SEQ ID NO: 2165; WAN024DDC; Start 42; Stop 66
ggctttgtcagatttgtcagaatta

SEQ ID NO: 317062 - DNA, 25 bp, Artificial
  probe
  misc_feature (1)..(25): SEQ ID NO: 2165; WAN024DDC; Start 395; Stop 419
ataaggatacgtcaggtcttctcat

SEQ ID NO: 317063 - DNA, 25 bp, Artificial
  probe
  misc_feature (1)..(25): SEQ ID NO: 2165; WAN024DDC; Start 865; Stop 889
accttggagagattgagaaagtaac

SEQ ID NO: 317064 - DNA, 25 bp, Artificial
  probe
  misc_feature (1)..(25): SEQ ID NO: 2165; WAN024DDC; Start 864; Stop 888
aaccttggagagattgagaaagtaa

SEQ ID NO: 317065 - DNA, 25 bp, Artificial
  probe
  misc_feature (1)..(25): SEQ ID NO: 2166; WAN024F96; Start 536; Stop 560
agaagaatgacactggctactggta

SEQ ID NO: 317066 - DNA, 25 bp, Artificial
  probe
  misc_feature (1)..(25): SEQ ID NO: 2166; WAN024F96; Start 537; Stop 561
gaagaatgacactggctactggtac

SEQ ID NO: 317067 - DNA, 25 bp, Artificial
  probe
  misc_feature (1)..(25): SEQ ID NO: 2166; WAN024F96; Start 622; Stop 646
tactttgacagttcaggctatatgc

SEQ ID NO: 317068 - DNA, 25 bp, Artificial
  probe
  misc_feature (1)..(25): SEQ ID NO: 2166; WAN024F96; Start 624; Stop 648
ctttgacagttcaggctatatgctt

SEQ ID NO: 317069 - DNA, 25 bp, Artificial
  probe
  misc_feature (1)..(25): SEQ ID NO: 2166; WAN024F96; Start 625; Stop 649
tttgacagttcaggctatatgcttg

SEQ ID NO: 317070 - DNA, 25 bp, Artificial
  probe
  misc_feature (1)..(25): SEQ ID NO: 2166; WAN024F96; Start 626; Stop 650
ttgacagttcaggctatatgcttgc

SEQ ID NO: 317071 - DNA, 25 bp, Artificial
  probe
  misc_feature (1)..(25): SEQ ID NO: 2166; WAN024F96; Start 623; Stop 647
actttgacagttcaggctatatgct

SEQ ID NO: 317072 - DNA, 25 bp, Artificial
  probe
  misc_feature (1)..(25): SEQ ID NO: 2166; WAN024F96; Start 538; Stop 562
aagaatgacactggctactggtacg

SEQ ID NO: 317073 - DNA, 25 bp, Artificial
  probe
  misc_feature (1)..(25): SEQ ID NO: 2166; WAN024F96; Start 630; Stop 654
cagttcaggctatatgcttgcagac

SEQ ID NO: 317074 - DNA, 25 bp, Artificial
  probe
  misc_feature (1)..(25): SEQ ID NO: 2166; WAN024F96; Start 628; Stop 652
gacagttcaggctatatgcttgcag

SEQ ID NO: 317075 - DNA, 25 bp, Artificial
  probe
  misc_feature (1)..(25): SEQ ID NO: 2166; WAN024F96; Start 535; Stop 559
cagaagaatgacactggctactggt

SEQ ID NO: 317076 - DNA, 25 bp, Artificial
  probe
  misc_feature (1)..(25): SEQ ID NO: 2166; WAN024F96; Start 629; Stop 653
acagttcaggctatatgcttgcaga

SEQ ID NO: 317077 - DNA, 25 bp, Artificial
  probe
  misc_feature (1)..(25): SEQ ID NO: 2166; WAN024F96; Start 520; Stop 544
attgaaacaggctggcagaagaatg

SEQ ID NO: 317078 - DNA, 25 bp, Artificial
  probe
  misc_feature (1)..(25): SEQ ID NO: 2166; WAN024F96; Start 627; Stop 651
tgacagttcaggctatatgcttgca

SEQ ID NO: 317079 - DNA, 25 bp, Artificial
  probe
  misc_feature (1)..(25): SEQ ID NO: 2166; WAN024F96; Start 631; Stop 655
agttcaggctatatgcttgcagacc

SEQ ID NO: 317080 - DNA, 25 bp, Artificial
  probe
  misc_feature (1)..(25): SEQ ID NO: 2166; WAN024F96; Start 540; Stop 564
gaatgacactggctactggtacgta

SEQ ID NO: 317081 - DNA, 25 bp, Artificial
  probe
  misc_feature (1)..(25): SEQ ID NO: 2166; WAN024F96; Start 575; Stop 599
gctcttatccaaaagacaagtttga

SEQ ID NO: 317082 - DNA, 25 bp, Artificial
  probe
  misc_feature (1)..(25): SEQ ID NO: 2166; WAN024F96; Start 574; Stop 598
ggctcttatccaaaagacaagtttg

SEQ ID NO: 317083 - DNA, 25 bp, Artificial
  probe
  misc_feature (1)..(25): SEQ ID NO: 2166; WAN024F96; Start 592; Stop 616
aagtttgagaaaatcaatggcactt

SEQ ID NO: 317084 - DNA, 25 bp, Artificial
  probe
  misc_feature (1)..(25): SEQ ID NO: 2166; WAN024F96; Start 588; Stop 612
agacaagtttgagaaaatcaatggc

SEQ ID NO: 317085 - DNA, 25 bp, Artificial
  probe
  misc_feature (1)..(25): SEQ ID NO: 2166; WAN024F96; Start 583; Stop 607
ccaaaagacaagtttgagaaaatca

SEQ ID NO: 317086 - DNA, 25 bp, Artificial
  probe
  misc_feature (1)..(25): SEQ ID NO: 2166; WAN024F96; Start 521; Stop 545
ttgaaacaggctggcagaagaatga

SEQ ID NO: 317087 - DNA, 25 bp, Artificial
  probe
  misc_feature (1)..(25): SEQ ID NO: 2166; WAN024F96; Start 593; Stop 617
agtttgagaaaatcaatggcacttg

SEQ ID NO: 317088 - DNA, 25 bp, Artificial
  probe
  misc_feature (1)..(25): SEQ ID NO: 2166; WAN024F96; Start 591; Stop 615
caagtttgagaaaatcaatggcact

SEQ ID NO: 317089 - DNA, 25 bp, Artificial
  probe
  misc_feature (1)..(25): SEQ ID NO: 2166; WAN024F96; Start 589; Stop 613
gacaagtttgagaaaatcaatggca

SEQ ID NO: 317090 - DNA, 25 bp, Artificial
  probe
  misc_feature (1)..(25): SEQ ID NO: 2166; WAN024F96; Start 573; Stop 597
cggctcttatccaaaagacaagttt

SEQ ID NO: 317091 - DNA, 25 bp, Artificial
  probe
  misc_feature (1)..(25): SEQ ID NO: 2166; WAN024F96; Start 590; Stop 614
acaagtttgagaaaatcaatggcac

SEQ ID NO: 317092 - DNA, 25 bp, Artificial
  probe
  misc_feature (1)..(25): SEQ ID NO: 2166; WAN024F96; Start 596; Stop 620
ttgagaaaatcaatggcacttggta

SEQ ID NO: 317093 - DNA, 25 bp, Artificial
  probe
  misc_feature (1)..(25): SEQ ID NO: 2166; WAN024F96; Start 582; Stop 606
tccaaaagacaagtttgagaaaatc

SEQ ID NO: 317094 - DNA, 25 bp, Artificial
  probe
  misc_feature (1)..(25): SEQ ID NO: 2166; WAN024F96; Start 577; Stop 601
tcttatccaaaagacaagtttgaga

SEQ ID NO: 317095 - DNA, 25 bp, Artificial
  probe
  misc_feature (1)..(25): SEQ ID NO: 2166; WAN024F96; Start 587; Stop 611
aagacaagtttgagaaaatcaatgg

SEQ ID NO: 317096 - DNA, 25 bp, Artificial
  probe
  misc_feature (1)..(25): SEQ ID NO: 2166; WAN024F96; Start 576; Stop 600
ctcttatccaaaagacaagtttgag

SEQ ID NO: 317097 - DNA, 25 bp, Artificial
  probe
  misc_feature (1)..(25): SEQ ID NO: 2166; WAN024F96; Start 594; Stop 618
gtttgagaaaatcaatggcacttgg

SEQ ID NO: 317098 - DNA, 25 bp, Artificial
  probe
  misc_feature (1)..(25): SEQ ID NO: 2167; WAN024D7W; Start 12; Stop 36
aattaagatcattcaggcaagcaag

SEQ ID NO: 317099 - DNA, 25 bp, Artificial
  probe
  misc_feature (1)..(25): SEQ ID NO: 2167; WAN024D7W; Start 11; Stop 35
caattaagatcattcaggcaagcaa

SEQ ID NO: 317100 - DNA, 25 bp, Artificial
  probe
  misc_feature (1)..(25): SEQ ID NO: 2167; WAN024D7W; Start 8; Stop 32
ttccaattaagatcattcaggcaag

SEQ ID NO: 317101 - DNA, 25 bp, Artificial
  probe
  misc_feature (1)..(25): SEQ ID NO: 2167; WAN024D7W; Start 13; Stop 37
attaagatcattcaggcaagcaagt

SEQ ID NO: 317102 - DNA, 25 bp, Artificial
  probe
  misc_feature (1)..(25): SEQ ID NO: 2167; WAN024D7W; Start 7; Stop 31
attccaattaagatcattcaggcaa

SEQ ID NO: 317103 - DNA, 25 bp, Artificial
  probe
  misc_feature (1)..(25): SEQ ID NO: 2167; WAN024D7W; Start 6; Stop 30
aattccaattaagatcattcaggca

SEQ ID NO: 317104 - DNA, 25 bp, Artificial
  probe
  misc_feature (1)..(25): SEQ ID NO: 2167; WAN024D7W; Start 14; Stop 38
ttaagatcattcaggcaagcaagtc

SEQ ID NO: 317105 - DNA, 25 bp, Artificial
  probe
  misc_feature (1)..(25): SEQ ID NO: 2167; WAN024D7W; Start 9; Stop 33
tccaattaagatcattcaggcaagc

SEQ ID NO: 317106 - DNA, 25 bp, Artificial
  probe
  misc_feature (1)..(25): SEQ ID NO: 2167; WAN024D7W; Start 10; Stop 34
ccaattaagatcattcaggcaagca

SEQ ID NO: 317107 - DNA, 25 bp, Artificial
  probe
  misc_feature (1)..(25): SEQ ID NO: 2167; WAN024D7W; Start 110; Stop 134
tagaagaaagtatccgtaagtgtgc

SEQ ID NO: 317108 - DNA, 25 bp, Artificial
  probe
  misc_feature (1)..(25): SEQ ID NO: 2167; WAN024D7W; Start 15; Stop 39
taagatcattcaggcaagcaagtct

SEQ ID NO: 317109 - DNA, 25 bp, Artificial
  probe
  misc_feature (1)..(25): SEQ ID NO: 2167; WAN024D7W; Start 126; Stop 150
taagtgtgcggatacctttcttcta

SEQ ID NO: 317110 - DNA, 25 bp, Artificial
  probe
  misc_feature (1)..(25): SEQ ID NO: 2167; WAN024D7W; Start 109; Stop 133
ttagaagaaagtatccgtaagtgtg

SEQ ID NO: 317111 - DNA, 25 bp, Artificial
  probe
  misc_feature (1)..(25): SEQ ID NO: 2167; WAN024D7W; Start 108; Stop 132
tttagaagaaagtatccgtaagtgt

SEQ ID NO: 317112 - DNA, 25 bp, Artificial
  probe
  misc_feature (1)..(25): SEQ ID NO: 2167; WAN024D7W; Start 5; Stop 29
aaattccaattaagatcattcaggc

SEQ ID NO: 317113 - DNA, 25 bp, Artificial
  probe
  misc_feature (1)..(25): SEQ ID NO: 2167; WAN024D7W; Start 125; Stop 149
gtaagtgtgcggatacctttcttct

SEQ ID NO: 317114 - DNA, 25 bp, Artificial
  probe
  misc_feature (1)..(25): SEQ ID NO: 2167; WAN024D7W; Start 127; Stop 151
aagtgtgcggatacctttcttctag

SEQ ID NO: 317115 - DNA, 25 bp, Artificial
  probe
  misc_feature (1)..(25): SEQ ID NO: 2167; WAN024D7W; Start 111; Stop 135
agaagaaagtatccgtaagtgtgcg

SEQ ID NO: 317116 - DNA, 25 bp, Artificial
  probe
  misc_feature (1)..(25): SEQ ID NO: 2167; WAN024D7W; Start 16; Stop 40
aagatcattcaggcaagcaagtctg

SEQ ID NO: 317117 - DNA, 25 bp, Artificial
  probe
  misc_feature (1)..(25): SEQ ID NO: 2167; WAN024D7W; Start 415; Stop 439
cagggctatagtatgatttggttta

SEQ ID NO: 317118 - DNA, 25 bp, Artificial
  probe
  misc_feature (1)..(25): SEQ ID NO: 2167; WAN024D7W; Start 175; Stop 199
ggctatattttatcaagtccccagt

SEQ ID NO: 317119 - DNA, 25 bp, Artificial
  probe
  misc_feature (1)..(25): SEQ ID NO: 2167; WAN024D7W; Start 174; Stop 198
aggctatattttatcaagtccccag

SEQ ID NO: 317120 - DNA, 25 bp, Artificial
  probe
  misc_feature (1)..(25): SEQ ID NO: 2167; WAN024D7W; Start 89; Stop 113
agcagcaactttcccatattttaga

SEQ ID NO: 317121 - DNA, 25 bp, Artificial
  probe
  misc_feature (1)..(25): SEQ ID NO: 2167; WAN024D7W; Start 179; Stop 203
atattttatcaagtccccagtcaga

SEQ ID NO: 317122 - DNA, 25 bp, Artificial
  probe
  misc_feature (1)..(25): SEQ ID NO: 2167; WAN024D7W; Start 90; Stop 114
gcagcaactttcccatattttagaa

SEQ ID NO: 317123 - DNA, 25 bp, Artificial
  probe
  misc_feature (1)..(25): SEQ ID NO: 2167; WAN024D7W; Start 88; Stop 112
aagcagcaactttcccatattttag

SEQ ID NO: 317124 - DNA, 25 bp, Artificial
  probe
  misc_feature (1)..(25): SEQ ID NO: 2167; WAN024D7W; Start 176; Stop 200
gctatattttatcaagtccccagtc

SEQ ID NO: 317125 - DNA, 25 bp, Artificial
  probe
  misc_feature (1)..(25): SEQ ID NO: 2167; WAN024D7W; Start 364; Stop 388
gaaatgaacggttttgttgatgaag

SEQ ID NO: 317126 - DNA, 25 bp, Artificial
  probe
  misc_feature (1)..(25): SEQ ID NO: 2167; WAN024D7W; Start 361; Stop 385
tttgaaatgaacggttttgttgatg

SEQ ID NO: 317127 - DNA, 25 bp, Artificial
  probe
  misc_feature (1)..(25): SEQ ID NO: 2167; WAN024D7W; Start 363; Stop 387
tgaaatgaacggttttgttgatgaa

SEQ ID NO: 317128 - DNA, 25 bp, Artificial
  probe
  misc_feature (1)..(25): SEQ ID NO: 2167; WAN024D7W; Start 362; Stop 386
ttgaaatgaacggttttgttgatga

SEQ ID NO: 317129 - DNA, 25 bp, Artificial
  probe
  misc_feature (1)..(25): SEQ ID NO: 2167; WAN024D7W; Start 414; Stop 438
ccagggctatagtatgatttggttt

SEQ ID NO: 317130 - DNA, 25 bp, Artificial
  probe
  misc_feature (1)..(25): SEQ ID NO: 2167; WAN024D7W; Start 356; Stop 380
cctattttgaaatgaacggttttgt

SEQ ID NO: 317131 - DNA, 25 bp, Artificial
  probe
  misc_feature (1)..(25): SEQ ID NO: 2168; WAN024D8F; Start 254; Stop 278
ctggagagtcagagtatctagtctt

SEQ ID NO: 317132 - DNA, 25 bp, Artificial
  probe
  misc_feature (1)..(25): SEQ ID NO: 2168; WAN024D8F; Start 253; Stop 277
gctggagagtcagagtatctagtct

SEQ ID NO: 317133 - DNA, 25 bp, Artificial
  probe
  misc_feature (1)..(25): SEQ ID NO: 2168; WAN024D8F; Start 268; Stop 292
tatctagtctttcaccgtattgctg

SEQ ID NO: 317134 - DNA, 25 bp, Artificial
  probe
  misc_feature (1)..(25): SEQ ID NO: 2168; WAN024D8F; Start 267; Stop 291
gtatctagtctttcaccgtattgct

SEQ ID NO: 317135 - DNA, 25 bp, Artificial
  probe
  misc_feature (1)..(25): SEQ ID NO: 2168; WAN024D8F; Start 266; Stop 290
agtatctagtctttcaccgtattgc

SEQ ID NO: 317136 - DNA, 25 bp, Artificial
  probe
  misc_feature (1)..(25): SEQ ID NO: 2168; WAN024D8F; Start 262; Stop 286
tcagagtatctagtctttcaccgta

SEQ ID NO: 317137 - DNA, 25 bp, Artificial
  probe
  misc_feature (1)..(25): SEQ ID NO: 2168; WAN024D8F; Start 259; Stop 283
gagtcagagtatctagtctttcacc

SEQ ID NO: 317138 - DNA, 25 bp, Artificial
  probe
  misc_feature (1)..(25): SEQ ID NO: 2168; WAN024D8F; Start 255; Stop 279
tggagagtcagagtatctagtcttt

SEQ ID NO: 317139 - DNA, 25 bp, Artificial
  probe
  misc_feature (1)..(25): SEQ ID NO: 2168; WAN024D8F; Start 263; Stop 287
cagagtatctagtctttcaccgtat

SEQ ID NO: 317140 - DNA, 25 bp, Artificial
  probe
  misc_feature (1)..(25): SEQ ID NO: 2168; WAN024D8F; Start 256; Stop 280
ggagagtcagagtatctagtctttc

SEQ ID NO: 317141 - DNA, 25 bp, Artificial
  probe
  misc_feature (1)..(25): SEQ ID NO: 2168; WAN024D8F; Start 265; Stop 289
gagtatctagtctttcaccgtattg

SEQ ID NO: 317142 - DNA, 25 bp, Artificial
  probe
  misc_feature (1)..(25): SEQ ID NO: 2168; WAN024D8F; Start 250; Stop 274
caagctggagagtcagagtatctag

SEQ ID NO: 317143 - DNA, 25 bp, Artificial
  probe
  misc_feature (1)..(25): SEQ ID NO: 2168; WAN024D8F; Start 230; Stop 254
ctatttatgagggaaactggcaagc

SEQ ID NO: 317144 - DNA, 25 bp, Artificial
  probe
  misc_feature (1)..(25): SEQ ID NO: 2168; WAN024D8F; Start 229; Stop 253
gctatttatgagggaaactggcaag

SEQ ID NO: 317145 - DNA, 25 bp, Artificial
  probe
  misc_feature (1)..(25): SEQ ID NO: 2168; WAN024D8F; Start 260; Stop 284
agtcagagtatctagtctttcaccg

SEQ ID NO: 317146 - DNA, 25 bp, Artificial
  probe
  misc_feature (1)..(25): SEQ ID NO: 2168; WAN024D8F; Start 258; Stop 282
agagtcagagtatctagtctttcac

SEQ ID NO: 317147 - DNA, 25 bp, Artificial
  probe
  misc_feature (1)..(25): SEQ ID NO: 2168; WAN024D8F; Start 332; Stop 356
tcttagagggcttgattgaaggttt

SEQ ID NO: 317148 - DNA, 25 bp, Artificial
  probe
  misc_feature (1)..(25): SEQ ID NO: 2168; WAN024D8F; Start 331; Stop 355
ttcttagagggcttgattgaaggtt

SEQ ID NO: 317149 - DNA, 25 bp, Artificial
  probe
  misc_feature (1)..(25): SEQ ID NO: 2168; WAN024D8F; Start 261; Stop 285
gtcagagtatctagtctttcaccgt

SEQ ID NO: 317150 - DNA, 25 bp, Artificial
  probe
  misc_feature (1)..(25): SEQ ID NO: 2168; WAN024D8F; Start 251; Stop 275
aagctggagagtcagagtatctagt

SEQ ID NO: 317151 - DNA, 25 bp, Artificial
  probe
  misc_feature (1)..(25): SEQ ID NO: 2168; WAN024D8F; Start 257; Stop 281
gagagtcagagtatctagtctttca

SEQ ID NO: 317152 - DNA, 25 bp, Artificial
  probe
  misc_feature (1)..(25): SEQ ID NO: 2168; WAN024D8F; Start 269; Stop 293
atctagtctttcaccgtattgctgt

SEQ ID NO: 317153 - DNA, 25 bp, Artificial
  probe
  misc_feature (1)..(25): SEQ ID NO: 2168; WAN024D8F; Start 264; Stop 288
agagtatctagtctttcaccgtatt

SEQ ID NO: 317154 - DNA, 25 bp, Artificial
  probe
  misc_feature (1)..(25): SEQ ID NO: 2168; WAN024D8F; Start 19; Stop 43
tttccaaatgaagtagatgccatca

SEQ ID NO: 317155 - DNA, 25 bp, Artificial
  probe
  misc_feature (1)..(25): SEQ ID NO: 2168; WAN024D8F; Start 252; Stop 276
agctggagagtcagagtatctagtc

SEQ ID NO: 317156 - DNA, 25 bp, Artificial
  probe
  misc_feature (1)..(25): SEQ ID NO: 2168; WAN024D8F; Start 225; Stop 249
tgaagctatttatgagggaaactgg

SEQ ID NO: 317157 - DNA, 25 bp, Artificial
  probe
  misc_feature (1)..(25): SEQ ID NO: 2168; WAN024D8F; Start 224; Stop 248
atgaagctatttatgagggaaactg

SEQ ID NO: 317158 - DNA, 25 bp, Artificial
  probe
  misc_feature (1)..(25): SEQ ID NO: 2168; WAN024D8F; Start 327; Stop 351
aaccttcttagagggcttgattgaa

SEQ ID NO: 317159 - DNA, 25 bp, Artificial
  probe
  misc_feature (1)..(25): SEQ ID NO: 2168; WAN024D8F; Start 326; Stop 350
aaaccttcttagagggcttgattga

SEQ ID NO: 317160 - DNA, 25 bp, Artificial
  probe
  misc_feature (1)..(25): SEQ ID NO: 2168; WAN024D8F; Start 325; Stop 349
caaaccttcttagagggcttgattg

SEQ ID NO: 317161 - DNA, 25 bp, Artificial
  probe
  misc_feature (1)..(25): SEQ ID NO: 2168; WAN024D8F; Start 106; Stop 130
ggctatccaaatgcagatgttatta

SEQ ID NO: 317162 - DNA, 25 bp, Artificial
  probe
  misc_feature (1)..(25): SEQ ID NO: 2168; WAN024D8F; Start 226; Stop 250
gaagctatttatgagggaaactggc

SEQ ID NO: 317163 - DNA, 25 bp, Artificial
  probe
  misc_feature (1)..(25): SEQ ID NO: 2168; WAN024D8F; Start 110; Stop 134
atccaaatgcagatgttattatcga

SEQ ID NO: 317164 - DNA, 25 bp, Artificial
  probe
  misc_feature (1)..(25): SEQ ID NO: 2169; WAN024CJC; Start 131; Stop 155
atctgctaggtataagtgctacaac

SEQ ID NO: 317165 - DNA, 25 bp, Artificial
  probe
  misc_feature (1)..(25): SEQ ID NO: 2169; WAN024CJC; Start 221; Stop 245
tattctatcgtccgtcagatgtgta

SEQ ID NO: 317166 - DNA, 25 bp, Artificial
  probe
  misc_feature (1)..(25): SEQ ID NO: 2169; WAN024CJC; Start 125; Stop 149
taatggatctgctaggtataagtgc

SEQ ID NO: 317167 - DNA, 25 bp, Artificial
  probe
  misc_feature (1)..(25): SEQ ID NO: 2169; WAN024CJC; Start 127; Stop 151
atggatctgctaggtataagtgcta

SEQ ID NO: 317168 - DNA, 25 bp, Artificial
  probe
  misc_feature (1)..(25): SEQ ID NO: 2169; WAN024CJC; Start 222; Stop 246
attctatcgtccgtcagatgtgtat

SEQ ID NO: 317169 - DNA, 25 bp, Artificial
  probe
  misc_feature (1)..(25): SEQ ID NO: 2169; WAN024CJC; Start 218; Stop 242
aagtattctatcgtccgtcagatgt

SEQ ID NO: 317170 - DNA, 25 bp, Artificial
  probe
  misc_feature (1)..(25): SEQ ID NO: 2169; WAN024CJC; Start 130; Stop 154
gatctgctaggtataagtgctacaa

SEQ ID NO: 317171 - DNA, 25 bp, Artificial
  probe
  misc_feature (1)..(25): SEQ ID NO: 2169; WAN024CJC; Start 223; Stop 247
ttctatcgtccgtcagatgtgtatt

SEQ ID NO: 317172 - DNA, 25 bp, Artificial
  probe
  misc_feature (1)..(25): SEQ ID NO: 2169; WAN024CJC; Start 126; Stop 150
aatggatctgctaggtataagtgct

SEQ ID NO: 317173 - DNA, 25 bp, Artificial
  probe
  misc_feature (1)..(25): SEQ ID NO: 2169; WAN024CJC; Start 129; Stop 153
ggatctgctaggtataagtgctaca

SEQ ID NO: 317174 - DNA, 25 bp, Artificial
  probe
  misc_feature (1)..(25): SEQ ID NO: 2169; WAN024CJC; Start 128; Stop 152
tggatctgctaggtataagtgctac

SEQ ID NO: 317175 - DNA, 25 bp, Artificial
  probe
  misc_feature (1)..(25): SEQ ID NO: 2169; WAN024CJC; Start 219; Stop 243
agtattctatcgtccgtcagatgtg

SEQ ID NO: 317176 - DNA, 25 bp, Artificial
  probe
  misc_feature (1)..(25): SEQ ID NO: 2169; WAN024CJC; Start 220; Stop 244
gtattctatcgtccgtcagatgtgt

SEQ ID NO: 317177 - DNA, 25 bp, Artificial
  probe
  misc_feature (1)..(25): SEQ ID NO: 2169; WAN024CJC; Start 124; Stop 148
ttaatggatctgctaggtataagtg

SEQ ID NO: 317178 - DNA, 25 bp, Artificial
  probe
  misc_feature (1)..(25): SEQ ID NO: 2169; WAN024CJC; Start 18; Stop 42
agaaatacagttacagggcttacaa

SEQ ID NO: 317179 - DNA, 25 bp, Artificial
  probe
  misc_feature (1)..(25): SEQ ID NO: 2169; WAN024CJC; Start 228; Stop 252
tcgtccgtcagatgtgtatttattt

SEQ ID NO: 317180 - DNA, 25 bp, Artificial
  probe
  misc_feature (1)..(25): SEQ ID NO: 2169; WAN024CJC; Start 227; Stop 251
atcgtccgtcagatgtgtatttatt

SEQ ID NO: 317181 - DNA, 25 bp, Artificial
  probe
  misc_feature (1)..(25): SEQ ID NO: 2169; WAN024CJC; Start 225; Stop 249
ctatcgtccgtcagatgtgtattta

SEQ ID NO: 317182 - DNA, 25 bp, Artificial
  probe
  misc_feature (1)..(25): SEQ ID NO: 2169; WAN024CJC; Start 29; Stop 53
tacagggcttacaacttcttaaaca

SEQ ID NO: 317183 - DNA, 25 bp, Artificial
  probe
  misc_feature (1)..(25): SEQ ID NO: 2169; WAN024CJC; Start 226; Stop 250
tatcgtccgtcagatgtgtatttat

SEQ ID NO: 317184 - DNA, 25 bp, Artificial
  probe
  misc_feature (1)..(25): SEQ ID NO: 2169; WAN024CJC; Start 13; Stop 37
tctaaagaaatacagttacagggct

SEQ ID NO: 317185 - DNA, 25 bp, Artificial
  probe
  misc_feature (1)..(25): SEQ ID NO: 2169; WAN024CJC; Start 12; Stop 36
gtctaaagaaatacagttacagggc

SEQ ID NO: 317186 - DNA, 25 bp, Artificial
  probe
  misc_feature (1)..(25): SEQ ID NO: 2169; WAN024CJC; Start 17; Stop 41
aagaaatacagttacagggcttaca

SEQ ID NO: 317187 - DNA, 25 bp, Artificial
  probe
  misc_feature (1)..(25): SEQ ID NO: 2169; WAN024CJC; Start 28; Stop 52
ttacagggcttacaacttcttaaac

SEQ ID NO: 317188 - DNA, 25 bp, Artificial
  probe
  misc_feature (1)..(25): SEQ ID NO: 2169; WAN024CJC; Start 216; Stop 240
gaaagtattctatcgtccgtcagat

SEQ ID NO: 317189 - DNA, 25 bp, Artificial
  probe
  misc_feature (1)..(25): SEQ ID NO: 2169; WAN024CJC; Start 19; Stop 43
gaaatacagttacagggcttacaac

SEQ ID NO: 317190 - DNA, 25 bp, Artificial
  probe
  misc_feature (1)..(25): SEQ ID NO: 2169; WAN024CJC; Start 217; Stop 241
aaagtattctatcgtccgtcagatg

SEQ ID NO: 317191 - DNA, 25 bp, Artificial
  probe
  misc_feature (1)..(25): SEQ ID NO: 2169; WAN024CJC; Start 34; Stop 58
ggcttacaacttcttaaacagactc

SEQ ID NO: 317192 - DNA, 25 bp, Artificial
  probe
  misc_feature (1)..(25): SEQ ID NO: 2169; WAN024CJC; Start 132; Stop 156
tctgctaggtataagtgctacaacc

SEQ ID NO: 317193 - DNA, 25 bp, Artificial
  probe
  misc_feature (1)..(25): SEQ ID NO: 2169; WAN024CJC; Start 30; Stop 54
acagggcttacaacttcttaaacag

SEQ ID NO: 317194 - DNA, 25 bp, Artificial
  probe
  misc_feature (1)..(25): SEQ ID NO: 2169; WAN024CJC; Start 16; Stop 40
aaagaaatacagttacagggcttac

SEQ ID NO: 317195 - DNA, 25 bp, Artificial
  probe
  misc_feature (1)..(25): SEQ ID NO: 2169; WAN024CJC; Start 27; Stop 51
gttacagggcttacaacttcttaaa

SEQ ID NO: 317196 - DNA, 25 bp, Artificial
  probe
  misc_feature (1)..(25): SEQ ID NO: 2169; WAN024CJC; Start 33; Stop 57
gggcttacaacttcttaaacagact

SEQ ID NO: 317197 - DNA, 25 bp, Artificial
  probe
  misc_feature (1)..(25): SEQ ID NO: 2170; WAN024AVX; Start 295; Stop 319
ctgattgactatcgcctctatatcg

SEQ ID NO: 317198 - DNA, 25 bp, Artificial
  probe
  misc_feature (1)..(25): SEQ ID NO: 2170; WAN024AVX; Start 294; Stop 318
tctgattgactatcgcctctatatc

SEQ ID NO: 317199 - DNA, 25 bp, Artificial
  probe
  misc_feature (1)..(25): SEQ ID NO: 2170; WAN024AVX; Start 293; Stop 317
ttctgattgactatcgcctctatat

SEQ ID NO: 317200 - DNA, 25 bp, Artificial
  probe
  misc_feature (1)..(25): SEQ ID NO: 2170; WAN024AVX; Start 422; Stop 446
ccgataataactcagatcacattga

SEQ ID NO: 317201 - DNA, 25 bp, Artificial
  probe
  misc_feature (1)..(25): SEQ ID NO: 2170; WAN024AVX; Start 409; Stop 433
accaataaccaacccgataataact

SEQ ID NO: 317202 - DNA, 25 bp, Artificial
  probe
  misc_feature (1)..(25): SEQ ID NO: 2170; WAN024AVX; Start 408; Stop 432
caccaataaccaacccgataataac

SEQ ID NO: 317203 - DNA, 25 bp, Artificial
  probe
  misc_feature (1)..(25): SEQ ID NO: 2170; WAN024AVX; Start 410; Stop 434
ccaataaccaacccgataataactc

SEQ ID NO: 317204 - DNA, 25 bp, Artificial
  probe
  misc_feature (1)..(25): SEQ ID NO: 2170; WAN024AVX; Start 291; Stop 315
gtttctgattgactatcgcctctat

SEQ ID NO: 317205 - DNA, 25 bp, Artificial
  probe
  misc_feature (1)..(25): SEQ ID NO: 2170; WAN024AVX; Start 414; Stop 438
taaccaacccgataataactcagat

SEQ ID NO: 317206 - DNA, 25 bp, Artificial
  probe
  misc_feature (1)..(25): SEQ ID NO: 2170; WAN024AVX; Start 413; Stop 437
ataaccaacccgataataactcaga

SEQ ID NO: 317207 - DNA, 25 bp, Artificial
  probe
  misc_feature (1)..(25): SEQ ID NO: 2170; WAN024AVX; Start 411; Stop 435
caataaccaacccgataataactca

SEQ ID NO: 317208 - DNA, 25 bp, Artificial
  probe
  misc_feature (1)..(25): SEQ ID NO: 2170; WAN024AVX; Start 292; Stop 316
tttctgattgactatcgcctctata

SEQ ID NO: 317209 - DNA, 25 bp, Artificial
  probe
  misc_feature (1)..(25): SEQ ID NO: 2170; WAN024AVX; Start 412; Stop 436
aataaccaacccgataataactcag

SEQ ID NO: 317210 - DNA, 25 bp, Artificial
  probe
  misc_feature (1)..(25): SEQ ID NO: 2170; WAN024AVX; Start 423; Stop 447
cgataataactcagatcacattgac

SEQ ID NO: 317211 - DNA, 25 bp, Artificial
  probe
  misc_feature (1)..(25): SEQ ID NO: 2170; WAN024AVX; Start 407; Stop 431
gcaccaataaccaacccgataataa

SEQ ID NO: 317212 - DNA, 25 bp, Artificial
  probe
  misc_feature (1)..(25): SEQ ID NO: 2170; WAN024AVX; Start 617; Stop 641
ggtattactttgacggttcaggata

SEQ ID NO: 317213 - DNA, 25 bp, Artificial
  probe
  misc_feature (1)..(25): SEQ ID NO: 2170; WAN024AVX; Start 420; Stop 444
acccgataataactcagatcacatt

SEQ ID NO: 317214 - DNA, 25 bp, Artificial
  probe
  misc_feature (1)..(25): SEQ ID NO: 2170; WAN024AVX; Start 419; Stop 443
aacccgataataactcagatcacat

SEQ ID NO: 317215 - DNA, 25 bp, Artificial
  probe
  misc_feature (1)..(25): SEQ ID NO: 2170; WAN024AVX; Start 418; Stop 442
caacccgataataactcagatcaca

SEQ ID NO: 317216 - DNA, 25 bp, Artificial
  probe
  misc_feature (1)..(25): SEQ ID NO: 2170; WAN024AVX; Start 415; Stop 439
aaccaacccgataataactcagatc

SEQ ID NO: 317217 - DNA, 25 bp, Artificial
  probe
  misc_feature (1)..(25): SEQ ID NO: 2170; WAN024AVX; Start 109; Stop 133
aatgaggctgactaccattacagaa

SEQ ID NO: 317218 - DNA, 25 bp, Artificial
  probe
  misc_feature (1)..(25): SEQ ID NO: 2170; WAN024AVX; Start 421; Stop 445
cccgataataactcagatcacattg

SEQ ID NO: 317219 - DNA, 25 bp, Artificial
  probe
  misc_feature (1)..(25): SEQ ID NO: 2170; WAN024AVX; Start 424; Stop 448
gataataactcagatcacattgacc

SEQ ID NO: 317220 - DNA, 25 bp, Artificial
  probe
  misc_feature (1)..(25): SEQ ID NO: 2170; WAN024AVX; Start 290; Stop 314
agtttctgattgactatcgcctcta

SEQ ID NO: 317221 - DNA, 25 bp, Artificial
  probe
  misc_feature (1)..(25): SEQ ID NO: 2170; WAN024AVX; Start 417; Stop 441
ccaacccgataataactcagatcac

SEQ ID NO: 317222 - DNA, 25 bp, Artificial
  probe
  misc_feature (1)..(25): SEQ ID NO: 2170; WAN024AVX; Start 618; Stop 642
gtattactttgacggttcaggatat

SEQ ID NO: 317223 - DNA, 25 bp, Artificial
  probe
  misc_feature (1)..(25): SEQ ID NO: 2170; WAN024AVX; Start 416; Stop 440
accaacccgataataactcagatca

SEQ ID NO: 317224 - DNA, 25 bp, Artificial
  probe
  misc_feature (1)..(25): SEQ ID NO: 2170; WAN024AVX; Start 286; Stop 310
gaagagtttctgattgactatcgcc

SEQ ID NO: 317225 - DNA, 25 bp, Artificial
  probe
  misc_feature (1)..(25): SEQ ID NO: 2170; WAN024AVX; Start 622; Stop 646
tactttgacggttcaggatatatgc

SEQ ID NO: 317226 - DNA, 25 bp, Artificial
  probe
  misc_feature (1)..(25): SEQ ID NO: 2170; WAN024AVX; Start 616; Stop 640
tggtattactttgacggttcaggat

SEQ ID NO: 317227 - DNA, 25 bp, Artificial
  probe
  misc_feature (1)..(25): SEQ ID NO: 2170; WAN024AVX; Start 624; Stop 648
ctttgacggttcaggatatatgctt

SEQ ID NO: 317228 - DNA, 25 bp, Artificial
  probe
  misc_feature (1)..(25): SEQ ID NO: 2170; WAN024AVX; Start 287; Stop 311
aagagtttctgattgactatcgcct

SEQ ID NO: 317229 - DNA, 25 bp, Artificial
  probe
  misc_feature (1)..(25): SEQ ID NO: 2170; WAN024AVX; Start 625; Stop 649
tttgacggttcaggatatatgcttg

SEQ ID NO: 317230 - DNA, 25 bp, Artificial
  probe
  misc_feature (1)..(25): SEQ ID NO: 2171; WAN024AVY; Start 246; Stop 270
ttatgcacaagttgaactgattgaa

SEQ ID NO: 317231 - DNA, 25 bp, Artificial
  probe
  misc_feature (1)..(25): SEQ ID NO: 2171; WAN024AVY; Start 245; Stop 269
gttatgcacaagttgaactgattga

SEQ ID NO: 317232 - DNA, 25 bp, Artificial
  probe
  misc_feature (1)..(25): SEQ ID NO: 2171; WAN024AVY; Start 244; Stop 268
ggttatgcacaagttgaactgattg

SEQ ID NO: 317233 - DNA, 25 bp, Artificial
  probe
  misc_feature (1)..(25): SEQ ID NO: 2171; WAN024AVY; Start 243; Stop 267
aggttatgcacaagttgaactgatt

SEQ ID NO: 317234 - DNA, 25 bp, Artificial
  probe
  misc_feature (1)..(25): SEQ ID NO: 2171; WAN024AVY; Start 242; Stop 266
aaggttatgcacaagttgaactgat

SEQ ID NO: 317235 - DNA, 25 bp, Artificial
  probe
  misc_feature (1)..(25): SEQ ID NO: 2171; WAN024AVY; Start 256; Stop 280
gttgaactgattgaaagccatgaat

SEQ ID NO: 317236 - DNA, 25 bp, Artificial
  probe
  misc_feature (1)..(25): SEQ ID NO: 2171; WAN024AVY; Start 241; Stop 265
gaaggttatgcacaagttgaactga

SEQ ID NO: 317237 - DNA, 25 bp, Artificial
  probe
  misc_feature (1)..(25): SEQ ID NO: 2171; WAN024AVY; Start 240; Stop 264
agaaggttatgcacaagttgaactg

SEQ ID NO: 317238 - DNA, 25 bp, Artificial
  probe
  misc_feature (1)..(25): SEQ ID NO: 2171; WAN024AVY; Start 239; Stop 263
cagaaggttatgcacaagttgaact

SEQ ID NO: 317239 - DNA, 25 bp, Artificial
  probe
  misc_feature (1)..(25): SEQ ID NO: 2171; WAN024AVY; Start 253; Stop 277
caagttgaactgattgaaagccatg

SEQ ID NO: 317240 - DNA, 25 bp, Artificial
  probe
  misc_feature (1)..(25): SEQ ID NO: 2171; WAN024AVY; Start 252; Stop 276
acaagttgaactgattgaaagccat

SEQ ID NO: 317241 - DNA, 25 bp, Artificial
  probe
  misc_feature (1)..(25): SEQ ID NO: 2171; WAN024AVY; Start 255; Stop 279
agttgaactgattgaaagccatgaa

SEQ ID NO: 317242 - DNA, 25 bp, Artificial
  probe
  misc_feature (1)..(25): SEQ ID NO: 2171; WAN024AVY; Start 254; Stop 278
aagttgaactgattgaaagccatga

SEQ ID NO: 317243 - DNA, 25 bp, Artificial
  probe
  misc_feature (1)..(25): SEQ ID NO: 2171; WAN024AVY; Start 257; Stop 281
ttgaactgattgaaagccatgaatc

SEQ ID NO: 317244 - DNA, 25 bp, Artificial
  probe
  misc_feature (1)..(25): SEQ ID NO: 2171; WAN024AVY; Start 247; Stop 271
tatgcacaagttgaactgattgaaa

SEQ ID NO: 317245 - DNA, 25 bp, Artificial
  probe
  misc_feature (1)..(25): SEQ ID NO: 2171; WAN024AVY; Start 248; Stop 272
atgcacaagttgaactgattgaaag

SEQ ID NO: 317246 - DNA, 25 bp, Artificial
  probe
  misc_feature (1)..(25): SEQ ID NO: 2171; WAN024AVY; Start 251; Stop 275
cacaagttgaactgattgaaagcca

SEQ ID NO: 317247 - DNA, 25 bp, Artificial
  probe
  misc_feature (1)..(25): SEQ ID NO: 2171; WAN024AVY; Start 250; Stop 274
gcacaagttgaactgattgaaagcc

SEQ ID NO: 317248 - DNA, 25 bp, Artificial
  probe
  misc_feature (1)..(25): SEQ ID NO: 2171; WAN024AVY; Start 249; Stop 273
tgcacaagttgaactgattgaaagc

SEQ ID NO: 317249 - DNA, 25 bp, Artificial
  probe
  misc_feature (1)..(25): SEQ ID NO: 2171; WAN024AVY; Start 238; Stop 262
gcagaaggttatgcacaagttgaac

SEQ ID NO: 317250 - DNA, 25 bp, Artificial
  probe
  misc_feature (1)..(25): SEQ ID NO: 2171; WAN024AVY; Start 168; Stop 192
cggtaatggtcgtgttatgcaggta

SEQ ID NO: 317251 - DNA, 25 bp, Artificial
  probe
  misc_feature (1)..(25): SEQ ID NO: 2171; WAN024AVY; Start 49; Stop 73
gtgcaaccatataggcaagtccatg

SEQ ID NO: 317252 - DNA, 25 bp, Artificial
  probe
  misc_feature (1)..(25): SEQ ID NO: 2171; WAN024AVY; Start 494; Stop 518
agcaggatattgaaaacggcttgac

SEQ ID NO: 317253 - DNA, 25 bp, Artificial
  probe
  misc_feature (1)..(25): SEQ ID NO: 2172; WAN024CNR; Start 60; Stop 84
ggcgagtcatggtactacttcaatc

SEQ ID NO: 317254 - DNA, 25 bp, Artificial
  probe
  misc_feature (1)..(25): SEQ ID NO: 2172; WAN024CNR; Start 56; Stop 80
gattggcgagtcatggtactacttc

SEQ ID NO: 317255 - DNA, 25 bp, Artificial
  probe
  misc_feature (1)..(25): SEQ ID NO: 2172; WAN024CNR; Start 59; Stop 83
tggcgagtcatggtactacttcaat

SEQ ID NO: 317256 - DNA, 25 bp, Artificial
  probe
  misc_feature (1)..(25): SEQ ID NO: 2172; WAN024CNR; Start 57; Stop 81
attggcgagtcatggtactacttca

SEQ ID NO: 317257 - DNA, 25 bp, Artificial
  probe
  misc_feature (1)..(25): SEQ ID NO: 2172; WAN024CNR; Start 58; Stop 82
ttggcgagtcatggtactacttcaa

SEQ ID NO: 317258 - DNA, 25 bp, Artificial
  probe
  misc_feature (1)..(25): SEQ ID NO: 2172; WAN024CNR; Start 55; Stop 79
ggattggcgagtcatggtactactt

SEQ ID NO: 317259 - DNA, 25 bp, Artificial
  probe
  misc_feature (1)..(25): SEQ ID NO: 2172; WAN024CNR; Start 62; Stop 86
cgagtcatggtactacttcaatcgc

SEQ ID NO: 317260 - DNA, 25 bp, Artificial
  probe
  misc_feature (1)..(25): SEQ ID NO: 2172; WAN024CNR; Start 61; Stop 85
gcgagtcatggtactacttcaatcg

SEQ ID NO: 317261 - DNA, 25 bp, Artificial
  probe
  misc_feature (1)..(25): SEQ ID NO: 2172; WAN024CNR; Start 63; Stop 87
gagtcatggtactacttcaatcgcg

SEQ ID NO: 317262 - DNA, 25 bp, Artificial
  probe
  misc_feature (1)..(25): SEQ ID NO: 2172; WAN024CNR; Start 4; Stop 28
gaaattggtattggttcgaccgtga

SEQ ID NO: 317263 - DNA, 25 bp, Artificial
  probe
  misc_feature (1)..(25): SEQ ID NO: 2172; WAN024CNR; Start 1; Stop 25
atggaaattggtattggttcgaccg

SEQ ID NO: 317264 - DNA, 25 bp, Artificial
  probe
  misc_feature (1)..(25): SEQ ID NO: 2172; WAN024CNR; Start 5; Stop 29
aaattggtattggttcgaccgtgac

SEQ ID NO: 317265 - DNA, 25 bp, Artificial
  probe
  misc_feature (1)..(25): SEQ ID NO: 2172; WAN024CNR; Start 3; Stop 27
ggaaattggtattggttcgaccgtg

SEQ ID NO: 317266 - DNA, 25 bp, Artificial
  probe
  misc_feature (1)..(25): SEQ ID NO: 2172; WAN024CNR; Start 2; Stop 26
tggaaattggtattggttcgaccgt

SEQ ID NO: 317267 - DNA, 25 bp, Artificial
  probe
  misc_feature (1)..(25): SEQ ID NO: 2172; WAN024CNR; Start 30; Stop 54
ggatacatggctacgtcatggaaac

SEQ ID NO: 317268 - DNA, 25 bp, Artificial
  probe
  misc_feature (1)..(25): SEQ ID NO: 2172; WAN024CNR; Start 31; Stop 55
gatacatggctacgtcatggaaacg

SEQ ID NO: 317269 - DNA, 25 bp, Artificial
  probe
  misc_feature (1)..(25): SEQ ID NO: 2172; WAN024CNR; Start 29; Stop 53
cggatacatggctacgtcatggaaa

SEQ ID NO: 317270 - DNA, 25 bp, Artificial
  probe
  misc_feature (1)..(25): SEQ ID NO: 2172; WAN024CNR; Start 32; Stop 56
atacatggctacgtcatggaaacgg

SEQ ID NO: 317271 - DNA, 25 bp, Artificial
  probe
  misc_feature (1)..(25): SEQ ID NO: 2173; WAN024CXH; Start 301; Stop 325
acgattcatctcttcttccaatact

SEQ ID NO: 317272 - DNA, 25 bp, Artificial
  probe
  misc_feature (1)..(25): SEQ ID NO: 2173; WAN024CXH; Start 300; Stop 324
aacgattcatctcttcttccaatac

SEQ ID NO: 317273 - DNA, 25 bp, Artificial
  probe
  misc_feature (1)..(25): SEQ ID NO: 2173; WAN024CXH; Start 311; Stop 335
tcttcttccaatacttgagcagatt

SEQ ID NO: 317274 - DNA, 25 bp, Artificial
  probe
  misc_feature (1)..(25): SEQ ID NO: 2173; WAN024CXH; Start 302; Stop 326
cgattcatctcttcttccaatactt

SEQ ID NO: 317275 - DNA, 25 bp, Artificial
  probe
  misc_feature (1)..(25): SEQ ID NO: 2173; WAN024CXH; Start 297; Stop 321
gataacgattcatctcttcttccaa

SEQ ID NO: 317276 - DNA, 25 bp, Artificial
  probe
  misc_feature (1)..(25): SEQ ID NO: 2173; WAN024CXH; Start 290; Stop 314
tcaggttgataacgattcatctctt

SEQ ID NO: 317277 - DNA, 25 bp, Artificial
  probe
  misc_feature (1)..(25): SEQ ID NO: 2173; WAN024CXH; Start 287; Stop 311
aagtcaggttgataacgattcatct

SEQ ID NO: 317278 - DNA, 25 bp, Artificial
  probe
  misc_feature (1)..(25): SEQ ID NO: 2173; WAN024CXH; Start 296; Stop 320
tgataacgattcatctcttcttcca

SEQ ID NO: 317279 - DNA, 25 bp, Artificial
  probe
  misc_feature (1)..(25): SEQ ID NO: 2173; WAN024CXH; Start 291; Stop 315
caggttgataacgattcatctcttc

SEQ ID NO: 317280 - DNA, 25 bp, Artificial
  probe
  misc_feature (1)..(25): SEQ ID NO: 2173; WAN024CXH; Start 289; Stop 313
gtcaggttgataacgattcatctct

SEQ ID NO: 317281 - DNA, 25 bp, Artificial
  probe
  misc_feature (1)..(25): SEQ ID NO: 2173; WAN024CXH; Start 288; Stop 312
agtcaggttgataacgattcatctc

SEQ ID NO: 317282 - DNA, 25 bp, Artificial
  probe
  misc_feature (1)..(25): SEQ ID NO: 2173; WAN024CXH; Start 292; Stop 316
aggttgataacgattcatctcttct

SEQ ID NO: 317283 - DNA, 25 bp, Artificial
  probe
  misc_feature (1)..(25): SEQ ID NO: 2173; WAN024CXH; Start 310; Stop 334
ctcttcttccaatacttgagcagat

SEQ ID NO: 317284 - DNA, 25 bp, Artificial
  probe
  misc_feature (1)..(25): SEQ ID NO: 2173; WAN024CXH; Start 308; Stop 332
atctcttcttccaatacttgagcag

SEQ ID NO: 317285 - DNA, 25 bp, Artificial
  probe
  misc_feature (1)..(25): SEQ ID NO: 2173; WAN024CXH; Start 306; Stop 330
tcatctcttcttccaatacttgagc

SEQ ID NO: 317286 - DNA, 25 bp, Artificial
  probe
  misc_feature (1)..(25): SEQ ID NO: 2173; WAN024CXH; Start 307; Stop 331
catctcttcttccaatacttgagca

SEQ ID NO: 317287 - DNA, 25 bp, Artificial
  probe
  misc_feature (1)..(25): SEQ ID NO: 2173; WAN024CXH; Start 293; Stop 317
ggttgataacgattcatctcttctt

SEQ ID NO: 317288 - DNA, 25 bp, Artificial
  probe
  misc_feature (1)..(25): SEQ ID NO: 2173; WAN024CXH; Start 298; Stop 322
ataacgattcatctcttcttccaat

SEQ ID NO: 317289 - DNA, 25 bp, Artificial
  probe
  misc_feature (1)..(25): SEQ ID NO: 2173; WAN024CXH; Start 295; Stop 319
ttgataacgattcatctcttcttcc

SEQ ID NO: 317290 - DNA, 25 bp, Artificial
  probe
  misc_feature (1)..(25): SEQ ID NO: 2173; WAN024CXH; Start 309; Stop 333
tctcttcttccaatacttgagcaga

SEQ ID NO: 317291 - DNA, 25 bp, Artificial
  probe
  misc_feature (1)..(25): SEQ ID NO: 2173; WAN024CXH; Start 305; Stop 329
ttcatctcttcttccaatacttgag

SEQ ID NO: 317292 - DNA, 25 bp, Artificial
  probe
  misc_feature (1)..(25): SEQ ID NO: 2173; WAN024CXH; Start 299; Stop 323
taacgattcatctcttcttccaata

SEQ ID NO: 317293 - DNA, 25 bp, Artificial
  probe
  misc_feature (1)..(25): SEQ ID NO: 2173; WAN024CXH; Start 294; Stop 318
gttgataacgattcatctcttcttc

SEQ ID NO: 317294 - DNA, 25 bp, Artificial
  probe
  misc_feature (1)..(25): SEQ ID NO: 2173; WAN024CXH; Start 304; Stop 328
attcatctcttcttccaatacttga

SEQ ID NO: 317295 - DNA, 25 bp, Artificial
  probe
  misc_feature (1)..(25): SEQ ID NO: 2173; WAN024CXH; Start 303; Stop 327
gattcatctcttcttccaatacttg

SEQ ID NO: 317296 - DNA, 25 bp, Artificial
  probe
  misc_feature (1)..(25): SEQ ID NO: 2173; WAN024CXH; Start 16; Stop 40
ctaccaaatagagagcctgatacat

SEQ ID NO: 317297 - DNA, 25 bp, Artificial
  probe
  misc_feature (1)..(25): SEQ ID NO: 2173; WAN024CXH; Start 17; Stop 41
taccaaatagagagcctgatacatc

SEQ ID NO: 317298 - DNA, 25 bp, Artificial
  probe
  misc_feature (1)..(25): SEQ ID NO: 2173; WAN024CXH; Start 116; Stop 140
atcgctttaatcggcaaactactaa

SEQ ID NO: 317299 - DNA, 25 bp, Artificial
  probe
  misc_feature (1)..(25): SEQ ID NO: 2173; WAN024CXH; Start 318; Stop 342
ccaatacttgagcagatttgtgaaa

SEQ ID NO: 317300 - DNA, 25 bp, Artificial
  probe
  misc_feature (1)..(25): SEQ ID NO: 2173; WAN024CXH; Start 315; Stop 339
cttccaatacttgagcagatttgtg

SEQ ID NO: 317301 - DNA, 25 bp, Artificial
  probe
  misc_feature (1)..(25): SEQ ID NO: 2173; WAN024CXH; Start 314; Stop 338
tcttccaatacttgagcagatttgt

SEQ ID NO: 317302 - DNA, 25 bp, Artificial
  probe
  misc_feature (1)..(25): SEQ ID NO: 2173; WAN024CXH; Start 313; Stop 337
ttcttccaatacttgagcagatttg

SEQ ID NO: 317303 - DNA, 25 bp, Artificial
  probe
  misc_feature (1)..(25): SEQ ID NO: 2173; WAN024CXH; Start 177; Stop 201
caatcggttgattatcttcgttatc

SEQ ID NO: 317304 - DNA, 25 bp, Artificial
  probe
  misc_feature (1)..(25): SEQ ID NO: 2174; WAN024FDY; Start 1129; Stop 1153
ttgagcgatgtctataccttgattc

SEQ ID NO: 317305 - DNA, 25 bp, Artificial
  probe
  misc_feature (1)..(25): SEQ ID NO: 2174; WAN024FDY; Start 934; Stop 958
gtgactattgacgatgcctatgatt

SEQ ID NO: 317306 - DNA, 25 bp, Artificial
  probe
  misc_feature (1)..(25): SEQ ID NO: 2174; WAN024FDY; Start 925; Stop 949
aatcctgaagtgactattgacgatg

SEQ ID NO: 317307 - DNA, 25 bp, Artificial
  probe
  misc_feature (1)..(25): SEQ ID NO: 2174; WAN024FDY; Start 1131; Stop 1155
gagcgatgtctataccttgattcat

SEQ ID NO: 317308 - DNA, 25 bp, Artificial
  probe
  misc_feature (1)..(25): SEQ ID NO: 2174; WAN024FDY; Start 931; Stop 955
gaagtgactattgacgatgcctatg

SEQ ID NO: 317309 - DNA, 25 bp, Artificial
  probe
  misc_feature (1)..(25): SEQ ID NO: 2174; WAN024FDY; Start 1727; Stop 1751
gtgataccatccaattcttgtctga

SEQ ID NO: 317310 - DNA, 25 bp, Artificial
  probe
  misc_feature (1)..(25): SEQ ID NO: 2174; WAN024FDY; Start 933; Stop 957
agtgactattgacgatgcctatgat

SEQ ID NO: 317311 - DNA, 25 bp, Artificial
  probe
  misc_feature (1)..(25): SEQ ID NO: 2174; WAN024FDY; Start 1728; Stop 1752
tgataccatccaattcttgtctgac

SEQ ID NO: 317312 - DNA, 25 bp, Artificial
  probe
  misc_feature (1)..(25): SEQ ID NO: 2174; WAN024FDY; Start 1909; Stop 1933
tgaacttactgtagaactggtattg

SEQ ID NO: 317313 - DNA, 25 bp, Artificial
  probe
  misc_feature (1)..(25): SEQ ID NO: 2174; WAN024FDY; Start 932; Stop 956
aagtgactattgacgatgcctatga

SEQ ID NO: 317314 - DNA, 25 bp, Artificial
  probe
  misc_feature (1)..(25): SEQ ID NO: 2174; WAN024FDY; Start 930; Stop 954
tgaagtgactattgacgatgcctat

SEQ ID NO: 317315 - DNA, 25 bp, Artificial
  probe
  misc_feature (1)..(25): SEQ ID NO: 2174; WAN024FDY; Start 1910; Stop 1934
gaacttactgtagaactggtattga

SEQ ID NO: 317316 - DNA, 25 bp, Artificial
  probe
  misc_feature (1)..(25): SEQ ID NO: 2174; WAN024FDY; Start 1130; Stop 1154
tgagcgatgtctataccttgattca

SEQ ID NO: 317317 - DNA, 25 bp, Artificial
  probe
  misc_feature (1)..(25): SEQ ID NO: 2174; WAN024FDY; Start 1132; Stop 1156
agcgatgtctataccttgattcatg

SEQ ID NO: 317318 - DNA, 25 bp, Artificial
  probe
  misc_feature (1)..(25): SEQ ID NO: 2174; WAN024FDY; Start 1251; Stop 1275
cttcaatgaattgctactcagtgat

SEQ ID NO: 317319 - DNA, 25 bp, Artificial
  probe
  misc_feature (1)..(25): SEQ ID NO: 2174; WAN024FDY; Start 1331; Stop 1355
gcttgacagacacctacttccataa

SEQ ID NO: 317320 - DNA, 25 bp, Artificial
  probe
  misc_feature (1)..(25): SEQ ID NO: 2174; WAN024FDY; Start 1726; Stop 1750
cgtgataccatccaattcttgtctg

SEQ ID NO: 317321 - DNA, 25 bp, Artificial
  probe
  misc_feature (1)..(25): SEQ ID NO: 2174; WAN024FDY; Start 992; Stop 1016
aatattgtcaggaagttgctcgtta

SEQ ID NO: 317322 - DNA, 25 bp, Artificial
  probe
  misc_feature (1)..(25): SEQ ID NO: 2174; WAN024FDY; Start 1252; Stop 1276
ttcaatgaattgctactcagtgatt

SEQ ID NO: 317323 - DNA, 25 bp, Artificial
  probe
  misc_feature (1)..(25): SEQ ID NO: 2174; WAN024FDY; Start 1250; Stop 1274
ccttcaatgaattgctactcagtga

SEQ ID NO: 317324 - DNA, 25 bp, Artificial
  probe
  misc_feature (1)..(25): SEQ ID NO: 2174; WAN024FDY; Start 929; Stop 953
ctgaagtgactattgacgatgccta

SEQ ID NO: 317325 - DNA, 25 bp, Artificial
  probe
  misc_feature (1)..(25): SEQ ID NO: 2174; WAN024FDY; Start 1256; Stop 1280
atgaattgctactcagtgattactt

SEQ ID NO: 317326 - DNA, 25 bp, Artificial
  probe
  misc_feature (1)..(25): SEQ ID NO: 2174; WAN024FDY; Start 1255; Stop 1279
aatgaattgctactcagtgattact

SEQ ID NO: 317327 - DNA, 25 bp, Artificial
  probe
  misc_feature (1)..(25): SEQ ID NO: 2174; WAN024FDY; Start 1908; Stop 1932
ttgaacttactgtagaactggtatt

SEQ ID NO: 317328 - DNA, 25 bp, Artificial
  probe
  misc_feature (1)..(25): SEQ ID NO: 2174; WAN024FDY; Start 1249; Stop 1273
accttcaatgaattgctactcagtg

SEQ ID NO: 317329 - DNA, 25 bp, Artificial
  probe
  misc_feature (1)..(25): SEQ ID NO: 2174; WAN024FDY; Start 988; Stop 1012
caagaatattgtcaggaagttgctc

SEQ ID NO: 317330 - DNA, 25 bp, Artificial
  probe
  misc_feature (1)..(25): SEQ ID NO: 2174; WAN024FDY; Start 1254; Stop 1278
caatgaattgctactcagtgattac

SEQ ID NO: 317331 - DNA, 25 bp, Artificial
  probe
  misc_feature (1)..(25): SEQ ID NO: 2174; WAN024FDY; Start 1253; Stop 1277
tcaatgaattgctactcagtgatta

SEQ ID NO: 317332 - DNA, 25 bp, Artificial
  probe
  misc_feature (1)..(25): SEQ ID NO: 2174; WAN024FDY; Start 989; Stop 1013
aagaatattgtcaggaagttgctcg

SEQ ID NO: 317333 - DNA, 25 bp, Artificial
  probe
  misc_feature (1)..(25): SEQ ID NO: 2174; WAN024FDY; Start 1911; Stop 1935
aacttactgtagaactggtattgat

SEQ ID NO: 317334 - DNA, 25 bp, Artificial
  probe
  misc_feature (1)..(25): SEQ ID NO: 2174; WAN024FDY; Start 194; Stop 218
tctacattcagatgagccatattgg

SEQ ID NO: 317335 - DNA, 25 bp, Artificial
  probe
  misc_feature (1)..(25): SEQ ID NO: 2174; WAN024FDY; Start 991; Stop 1015
gaatattgtcaggaagttgctcgtt

SEQ ID NO: 317336 - DNA, 25 bp, Artificial
  probe
  misc_feature (1)..(25): SEQ ID NO: 2174; WAN024FDY; Start 1729; Stop 1753
gataccatccaattcttgtctgaca

SEQ ID NO: 317337 - DNA, 25 bp, Artificial
  probe
  misc_feature (1)..(25): SEQ ID NO: 2175; WAN024CLS; Start 17; Stop 41
ttgaattagaactacttccagagga

SEQ ID NO: 317338 - DNA, 25 bp, Artificial
  probe
  misc_feature (1)..(25): SEQ ID NO: 2175; WAN024CLS; Start 37; Stop 61
gaggaagatatcattgtcacaggtc

SEQ ID NO: 317339 - DNA, 25 bp, Artificial
  probe
  misc_feature (1)..(25): SEQ ID NO: 2175; WAN024CLS; Start 35; Stop 59
cagaggaagatatcattgtcacagg

SEQ ID NO: 317340 - DNA, 25 bp, Artificial
  probe
  misc_feature (1)..(25): SEQ ID NO: 2175; WAN024CLS; Start 34; Stop 58
ccagaggaagatatcattgtcacag

SEQ ID NO: 317341 - DNA, 25 bp, Artificial
  probe
  misc_feature (1)..(25): SEQ ID NO: 2175; WAN024CLS; Start 36; Stop 60
agaggaagatatcattgtcacaggt

SEQ ID NO: 317342 - DNA, 25 bp, Artificial
  probe
  misc_feature (1)..(25): SEQ ID NO: 2175; WAN024CLS; Start 40; Stop 64
gaagatatcattgtcacaggtctcc

SEQ ID NO: 317343 - DNA, 25 bp, Artificial
  probe
  misc_feature (1)..(25): SEQ ID NO: 2175; WAN024CLS; Start 39; Stop 63
ggaagatatcattgtcacaggtctc

SEQ ID NO: 317344 - DNA, 25 bp, Artificial
  probe
  misc_feature (1)..(25): SEQ ID NO: 2175; WAN024CLS; Start 38; Stop 62
aggaagatatcattgtcacaggtct

SEQ ID NO: 317345 - DNA, 25 bp, Artificial
  probe
  misc_feature (1)..(25): SEQ ID NO: 2175; WAN024CLS; Start 16; Stop 40
tttgaattagaactacttccagagg

SEQ ID NO: 317346 - DNA, 25 bp, Artificial
  probe
  misc_feature (1)..(25): SEQ ID NO: 2175; WAN024CLS; Start 56; Stop 80
caggtctccctaagtattgttcttt

SEQ ID NO: 317347 - DNA, 25 bp, Artificial
  probe
  misc_feature (1)..(25): SEQ ID NO: 2175; WAN024CLS; Start 44; Stop 68
atatcattgtcacaggtctccctaa

SEQ ID NO: 317348 - DNA, 25 bp, Artificial
  probe
  misc_feature (1)..(25): SEQ ID NO: 2175; WAN024CLS; Start 55; Stop 79
acaggtctccctaagtattgttctt

SEQ ID NO: 317349 - DNA, 25 bp, Artificial
  probe
  misc_feature (1)..(25): SEQ ID NO: 2175; WAN024CLS; Start 49; Stop 73
attgtcacaggtctccctaagtatt

SEQ ID NO: 317350 - DNA, 25 bp, Artificial
  probe
  misc_feature (1)..(25): SEQ ID NO: 2175; WAN024CLS; Start 33; Stop 57
tccagaggaagatatcattgtcaca

SEQ ID NO: 317351 - DNA, 25 bp, Artificial
  probe
  misc_feature (1)..(25): SEQ ID NO: 2175; WAN024CLS; Start 14; Stop 38
tgtttgaattagaactacttccaga

SEQ ID NO: 317352 - DNA, 25 bp, Artificial
  probe
  misc_feature (1)..(25): SEQ ID NO: 2175; WAN024CLS; Start 45; Stop 69
tatcattgtcacaggtctccctaag

SEQ ID NO: 317353 - DNA, 25 bp, Artificial
  probe
  misc_feature (1)..(25): SEQ ID NO: 2175; WAN024CLS; Start 79; Stop 103
tttacttgtttaattacaggtcgcc

SEQ ID NO: 317354 - DNA, 25 bp, Artificial
  probe
  misc_feature (1)..(25): SEQ ID NO: 2175; WAN024CLS; Start 54; Stop 78
cacaggtctccctaagtattgttct

SEQ ID NO: 317355 - DNA, 25 bp, Artificial
  probe
  misc_feature (1)..(25): SEQ ID NO: 2175; WAN024CLS; Start 53; Stop 77
tcacaggtctccctaagtattgttc

SEQ ID NO: 317356 - DNA, 25 bp, Artificial
  probe
  misc_feature (1)..(25): SEQ ID NO: 2175; WAN024CLS; Start 48; Stop 72
cattgtcacaggtctccctaagtat

SEQ ID NO: 317357 - DNA, 25 bp, Artificial
  probe
  misc_feature (1)..(25): SEQ ID NO: 2175; WAN024CLS; Start 52; Stop 76
gtcacaggtctccctaagtattgtt

SEQ ID NO: 317358 - DNA, 25 bp, Artificial
  probe
  misc_feature (1)..(25): SEQ ID NO: 2175; WAN024CLS; Start 50; Stop 74
ttgtcacaggtctccctaagtattg

SEQ ID NO: 317359 - DNA, 25 bp, Artificial
  probe
  misc_feature (1)..(25): SEQ ID NO: 2175; WAN024CLS; Start 81; Stop 105
tacttgtttaattacaggtcgccta

SEQ ID NO: 317360 - DNA, 25 bp, Artificial
  probe
  misc_feature (1)..(25): SEQ ID NO: 2175; WAN024CLS; Start 80; Stop 104
ttacttgtttaattacaggtcgcct

SEQ ID NO: 317361 - DNA, 25 bp, Artificial
  probe
  misc_feature (1)..(25): SEQ ID NO: 2175; WAN024CLS; Start 15; Stop 39
gtttgaattagaactacttccagag

SEQ ID NO: 317362 - DNA, 25 bp, Artificial
  probe
  misc_feature (1)..(25): SEQ ID NO: 2175; WAN024CLS; Start 13; Stop 37
ttgtttgaattagaactacttccag

SEQ ID NO: 317363 - DNA, 25 bp, Artificial
  probe
  misc_feature (1)..(25): SEQ ID NO: 2175; WAN024CLS; Start 47; Stop 71
tcattgtcacaggtctccctaagta

SEQ ID NO: 317364 - DNA, 25 bp, Artificial
  probe
  misc_feature (1)..(25): SEQ ID NO: 2175; WAN024CLS; Start 51; Stop 75
tgtcacaggtctccctaagtattgt

SEQ ID NO: 317365 - DNA, 25 bp, Artificial
  probe
  misc_feature (1)..(25): SEQ ID NO: 2175; WAN024CLS; Start 41; Stop 65
aagatatcattgtcacaggtctccc

SEQ ID NO: 317366 - DNA, 25 bp, Artificial
  probe
  misc_feature (1)..(25): SEQ ID NO: 2175; WAN024CLS; Start 12; Stop 36
attgtttgaattagaactacttcca

SEQ ID NO: 317367 - DNA, 25 bp, Artificial
  probe
  misc_feature (1)..(25): SEQ ID NO: 2175; WAN024CLS; Start 46; Stop 70
atcattgtcacaggtctccctaagt

SEQ ID NO: 317368 - DNA, 25 bp, Artificial
  probe
  misc_feature (1)..(25): SEQ ID NO: 2175; WAN024CLS; Start 18; Stop 42
tgaattagaactacttccagaggaa

SEQ ID NO: 317369 - DNA, 25 bp, Artificial
  probe
  misc_feature (1)..(25): SEQ ID NO: 2175; WAN024CLS; Start 43; Stop 67
gatatcattgtcacaggtctcccta

SEQ ID NO: 317370 - DNA, 25 bp, Artificial
  probe
  misc_feature (1)..(25): SEQ ID NO: 2176; WAN024B5C; Start 71; Stop 95
tcaatagggatacacacaaggaaat

SEQ ID NO: 317371 - DNA, 25 bp, Artificial
  probe
  misc_feature (1)..(25): SEQ ID NO: 2176; WAN024B5C; Start 70; Stop 94
gtcaatagggatacacacaaggaaa

SEQ ID NO: 317372 - DNA, 25 bp, Artificial
  probe
  misc_feature (1)..(25): SEQ ID NO: 2176; WAN024B5C; Start 75; Stop 99
tagggatacacacaaggaaatcatc

SEQ ID NO: 317373 - DNA, 25 bp, Artificial
  probe
  misc_feature (1)..(25): SEQ ID NO: 2176; WAN024B5C; Start 73; Stop 97
aatagggatacacacaaggaaatca

SEQ ID NO: 317374 - DNA, 25 bp, Artificial
  probe
  misc_feature (1)..(25): SEQ ID NO: 2176; WAN024B5C; Start 74; Stop 98
atagggatacacacaaggaaatcat

SEQ ID NO: 317375 - DNA, 25 bp, Artificial
  probe
  misc_feature (1)..(25): SEQ ID NO: 2176; WAN024B5C; Start 72; Stop 96
caatagggatacacacaaggaaatc

SEQ ID NO: 317376 - DNA, 25 bp, Artificial
  probe
  misc_feature (1)..(25): SEQ ID NO: 2176; WAN024B5C; Start 61; Stop 85
atagatgtcgtcaatagggatacac

SEQ ID NO: 317377 - DNA, 25 bp, Artificial
  probe
  misc_feature (1)..(25): SEQ ID NO: 2176; WAN024B5C; Start 62; Stop 86
tagatgtcgtcaatagggatacaca

SEQ ID NO: 317378 - DNA, 25 bp, Artificial
  probe
  misc_feature (1)..(25): SEQ ID NO: 2176; WAN024B5C; Start 69; Stop 93
cgtcaatagggatacacacaaggaa

SEQ ID NO: 317379 - DNA, 25 bp, Artificial
  probe
  misc_feature (1)..(25): SEQ ID NO: 2176; WAN024B5C; Start 65; Stop 89
atgtcgtcaatagggatacacacaa

SEQ ID NO: 317380 - DNA, 25 bp, Artificial
  probe
  misc_feature (1)..(25): SEQ ID NO: 2176; WAN024B5C; Start 60; Stop 84
tatagatgtcgtcaatagggataca

SEQ ID NO: 317381 - DNA, 25 bp, Artificial
  probe
  misc_feature (1)..(25): SEQ ID NO: 2176; WAN024B5C; Start 76; Stop 100
agggatacacacaaggaaatcatcg

SEQ ID NO: 317382 - DNA, 25 bp, Artificial
  probe
  misc_feature (1)..(25): SEQ ID NO: 2176; WAN024B5C; Start 63; Stop 87
agatgtcgtcaatagggatacacac

SEQ ID NO: 317383 - DNA, 25 bp, Artificial
  probe
  misc_feature (1)..(25): SEQ ID NO: 2176; WAN024B5C; Start 59; Stop 83
ttatagatgtcgtcaatagggatac

SEQ ID NO: 317384 - DNA, 25 bp, Artificial
  probe
  misc_feature (1)..(25): SEQ ID NO: 2176; WAN024B5C; Start 64; Stop 88
gatgtcgtcaatagggatacacaca

SEQ ID NO: 317385 - DNA, 25 bp, Artificial
  probe
  misc_feature (1)..(25): SEQ ID NO: 2176; WAN024B5C; Start 67; Stop 91
gtcgtcaatagggatacacacaagg

SEQ ID NO: 317386 - DNA, 25 bp, Artificial
  probe
  misc_feature (1)..(25): SEQ ID NO: 2176; WAN024B5C; Start 66; Stop 90
tgtcgtcaatagggatacacacaag

SEQ ID NO: 317387 - DNA, 25 bp, Artificial
  probe
  misc_feature (1)..(25): SEQ ID NO: 2176; WAN024B5C; Start 68; Stop 92
tcgtcaatagggatacacacaagga

SEQ ID NO: 317388 - DNA, 25 bp, Artificial
  probe
  misc_feature (1)..(25): SEQ ID NO: 2176; WAN024B5C; Start 26; Stop 50
aactactcgatatcaaagacacaaa

SEQ ID NO: 317389 - DNA, 25 bp, Artificial
  probe
  misc_feature (1)..(25): SEQ ID NO: 2176; WAN024B5C; Start 25; Stop 49
aaactactcgatatcaaagacacaa

SEQ ID NO: 317390 - DNA, 25 bp, Artificial
  probe
  misc_feature (1)..(25): SEQ ID NO: 2176; WAN024B5C; Start 27; Stop 51
actactcgatatcaaagacacaaat

SEQ ID NO: 317391 - DNA, 25 bp, Artificial
  probe
  misc_feature (1)..(25): SEQ ID NO: 2176; WAN024B5C; Start 58; Stop 82
attatagatgtcgtcaatagggata

SEQ ID NO: 317392 - DNA, 25 bp, Artificial
  probe
  misc_feature (1)..(25): SEQ ID NO: 2176; WAN024B5C; Start 77; Stop 101
gggatacacacaaggaaatcatcgc

SEQ ID NO: 317393 - DNA, 25 bp, Artificial
  probe
  misc_feature (1)..(25): SEQ ID NO: 2176; WAN024B5C; Start 28; Stop 52
ctactcgatatcaaagacacaaata

SEQ ID NO: 317394 - DNA, 25 bp, Artificial
  probe
  misc_feature (1)..(25): SEQ ID NO: 2176; WAN024B5C; Start 24; Stop 48
aaaactactcgatatcaaagacaca

SEQ ID NO: 317395 - DNA, 25 bp, Artificial
  probe
  misc_feature (1)..(25): SEQ ID NO: 2176; WAN024B5C; Start 22; Stop 46
acaaaactactcgatatcaaagaca

SEQ ID NO: 317396 - DNA, 25 bp, Artificial
  probe
  misc_feature (1)..(25): SEQ ID NO: 2176; WAN024B5C; Start 23; Stop 47
caaaactactcgatatcaaagacac

SEQ ID NO: 317397 - DNA, 25 bp, Artificial
  probe
  misc_feature (1)..(25): SEQ ID NO: 2176; WAN024B5C; Start 21; Stop 45
cacaaaactactcgatatcaaagac

SEQ ID NO: 317398 - DNA, 25 bp, Artificial
  probe
  misc_feature (1)..(25): SEQ ID NO: 2176; WAN024B5C; Start 32; Stop 56
tcgatatcaaagacacaaatatcca

SEQ ID NO: 317399 - DNA, 25 bp, Artificial
  probe
  misc_feature (1)..(25): SEQ ID NO: 2176; WAN024B5C; Start 20; Stop 44
tcacaaaactactcgatatcaaaga

SEQ ID NO: 317400 - DNA, 25 bp, Artificial
  probe
  misc_feature (1)..(25): SEQ ID NO: 2176; WAN024B5C; Start 38; Stop 62
tcaaagacacaaatatccaaattat

SEQ ID NO: 317401 - DNA, 25 bp, Artificial
  probe
  misc_feature (1)..(25): SEQ ID NO: 2176; WAN024B5C; Start 37; Stop 61
atcaaagacacaaatatccaaatta

SEQ ID NO: 317402 - DNA, 25 bp, Artificial
  probe
  misc_feature (1)..(25): SEQ ID NO: 2176; WAN024B5C; Start 36; Stop 60
tatcaaagacacaaatatccaaatt

SEQ ID NO: 317403 - DNA, 25 bp, Artificial
  probe
  misc_feature (1)..(25): SEQ ID NO: 2177; WAN024B5E; Start 234; Stop 258
ccgtttcaagtgctatcactgttca

SEQ ID NO: 317404 - DNA, 25 bp, Artificial
  probe
  misc_feature (1)..(25): SEQ ID NO: 2177; WAN024B5E; Start 233; Stop 257
gccgtttcaagtgctatcactgttc

SEQ ID NO: 317405 - DNA, 25 bp, Artificial
  probe
  misc_feature (1)..(25): SEQ ID NO: 2179; WAN024B5K; Start 455; Stop 479
agattatgtcttgggacgttgaaac

SEQ ID NO: 317406 - DNA, 25 bp, Artificial
  probe
  misc_feature (1)..(25): SEQ ID NO: 2179; WAN024B5K; Start 457; Stop 481
attatgtcttgggacgttgaaacag

SEQ ID NO: 317407 - DNA, 25 bp, Artificial
  probe
  misc_feature (1)..(25): SEQ ID NO: 2179; WAN024B5K; Start 456; Stop 480
gattatgtcttgggacgttgaaaca

SEQ ID NO: 317408 - DNA, 25 bp, Artificial
  probe
  misc_feature (1)..(25): SEQ ID NO: 2179; WAN024B5K; Start 458; Stop 482
ttatgtcttgggacgttgaaacagt

SEQ ID NO: 317409 - DNA, 25 bp, Artificial
  probe
  misc_feature (1)..(25): SEQ ID NO: 2179; WAN024B5K; Start 407; Stop 431
gaaagctcaatgacttccactttga

SEQ ID NO: 317410 - DNA, 25 bp, Artificial
  probe
  misc_feature (1)..(25): SEQ ID NO: 2179; WAN024B5K; Start 459; Stop 483
tatgtcttgggacgttgaaacagtc

SEQ ID NO: 317411 - DNA, 25 bp, Artificial
  probe
  misc_feature (1)..(25): SEQ ID NO: 2179; WAN024B5K; Start 406; Stop 430
cgaaagctcaatgacttccactttg

SEQ ID NO: 317412 - DNA, 25 bp, Artificial
  probe
  misc_feature (1)..(25): SEQ ID NO: 2179; WAN024B5K; Start 405; Stop 429
tcgaaagctcaatgacttccacttt

SEQ ID NO: 317413 - DNA, 25 bp, Artificial
  probe
  misc_feature (1)..(25): SEQ ID NO: 2179; WAN024B5K; Start 403; Stop 427
attcgaaagctcaatgacttccact

SEQ ID NO: 317414 - DNA, 25 bp, Artificial
  probe
  misc_feature (1)..(25): SEQ ID NO: 2179; WAN024B5K; Start 404; Stop 428
ttcgaaagctcaatgacttccactt

SEQ ID NO: 317415 - DNA, 25 bp, Artificial
  probe
  misc_feature (1)..(25): SEQ ID NO: 2179; WAN024B5K; Start 402; Stop 426
cattcgaaagctcaatgacttccac

SEQ ID NO: 317416 - DNA, 25 bp, Artificial
  probe
  misc_feature (1)..(25): SEQ ID NO: 2179; WAN024B5K; Start 401; Stop 425
tcattcgaaagctcaatgacttcca

SEQ ID NO: 317417 - DNA, 25 bp, Artificial
  probe
  misc_feature (1)..(25): SEQ ID NO: 2180; WAN024B5D; Start 395; Stop 419
gaatcatctcaggcttggtcattaa

SEQ ID NO: 317418 - DNA, 25 bp, Artificial
  probe
  misc_feature (1)..(25): SEQ ID NO: 2180; WAN024B5D; Start 394; Stop 418
agaatcatctcaggcttggtcatta

SEQ ID NO: 317419 - DNA, 25 bp, Artificial
  probe
  misc_feature (1)..(25): SEQ ID NO: 2180; WAN024B5D; Start 397; Stop 421
atcatctcaggcttggtcattaaat

SEQ ID NO: 317420 - DNA, 25 bp, Artificial
  probe
  misc_feature (1)..(25): SEQ ID NO: 2180; WAN024B5D; Start 396; Stop 420
aatcatctcaggcttggtcattaaa

SEQ ID NO: 317421 - DNA, 25 bp, Artificial
  probe
  misc_feature (1)..(25): SEQ ID NO: 2180; WAN024B5D; Start 398; Stop 422
tcatctcaggcttggtcattaaatt

SEQ ID NO: 317422 - DNA, 25 bp, Artificial
  probe
  misc_feature (1)..(25): SEQ ID NO: 2180; WAN024B5D; Start 337; Stop 361
gctttactagattcaccgctactat

SEQ ID NO: 317423 - DNA, 25 bp, Artificial
  probe
  misc_feature (1)..(25): SEQ ID NO: 2180; WAN024B5D; Start 348; Stop 372
ttcaccgctactatctatttattcg

SEQ ID NO: 317424 - DNA, 25 bp, Artificial
  probe
  misc_feature (1)..(25): SEQ ID NO: 2180; WAN024B5D; Start 338; Stop 362
ctttactagattcaccgctactatc

SEQ ID NO: 317425 - DNA, 25 bp, Artificial
  probe
  misc_feature (1)..(25): SEQ ID NO: 2180; WAN024B5D; Start 399; Stop 423
catctcaggcttggtcattaaattt

SEQ ID NO: 317426 - DNA, 25 bp, Artificial
  probe
  misc_feature (1)..(25): SEQ ID NO: 2180; WAN024B5D; Start 261; Stop 285
aatgatggtcgctgaaacttctgat

SEQ ID NO: 317427 - DNA, 25 bp, Artificial
  probe
  misc_feature (1)..(25): SEQ ID NO: 2180; WAN024B5D; Start 260; Stop 284
aaatgatggtcgctgaaacttctga

SEQ ID NO: 317428 - DNA, 25 bp, Artificial
  probe
  misc_feature (1)..(25): SEQ ID NO: 2180; WAN024B5D; Start 339; Stop 363
tttactagattcaccgctactatct

SEQ ID NO: 317429 - DNA, 25 bp, Artificial
  probe
  misc_feature (1)..(25): SEQ ID NO: 2180; WAN024B5D; Start 342; Stop 366
actagattcaccgctactatctatt

SEQ ID NO: 317430 - DNA, 25 bp, Artificial
  probe
  misc_feature (1)..(25): SEQ ID NO: 2180; WAN024B5D; Start 287; Stop 311
acgtacagtcatatttcttctcttt

SEQ ID NO: 317431 - DNA, 25 bp, Artificial
  probe
  misc_feature (1)..(25): SEQ ID NO: 2180; WAN024B5D; Start 262; Stop 286
atgatggtcgctgaaacttctgatg

SEQ ID NO: 317432 - DNA, 25 bp, Artificial
  probe
  misc_feature (1)..(25): SEQ ID NO: 2180; WAN024B5D; Start 347; Stop 371
attcaccgctactatctatttattc

SEQ ID NO: 317433 - DNA, 25 bp, Artificial
  probe
  misc_feature (1)..(25): SEQ ID NO: 2180; WAN024B5D; Start 272; Stop 296
ctgaaacttctgatgacgtacagtc

SEQ ID NO: 317434 - DNA, 25 bp, Artificial
  probe
  misc_feature (1)..(25): SEQ ID NO: 2180; WAN024B5D; Start 286; Stop 310
gacgtacagtcatatttcttctctt

SEQ ID NO: 317435 - DNA, 25 bp, Artificial
  probe
  misc_feature (1)..(25): SEQ ID NO: 2180; WAN024B5D; Start 346; Stop 370
gattcaccgctactatctatttatt

SEQ ID NO: 317436 - DNA, 25 bp, Artificial
  probe
  misc_feature (1)..(25): SEQ ID NO: 2180; WAN024B5D; Start 340; Stop 364
ttactagattcaccgctactatcta

SEQ ID NO: 317437 - DNA, 25 bp, Artificial
  probe
  misc_feature (1)..(25): SEQ ID NO: 2180; WAN024B5D; Start 341; Stop 365
tactagattcaccgctactatctat

SEQ ID NO: 317438 - DNA, 25 bp, Artificial
  probe
  misc_feature (1)..(25): SEQ ID NO: 2180; WAN024B5D; Start 336; Stop 360
agctttactagattcaccgctacta

SEQ ID NO: 317439 - DNA, 25 bp, Artificial
  probe
  misc_feature (1)..(25): SEQ ID NO: 2180; WAN024B5D; Start 393; Stop 417
gagaatcatctcaggcttggtcatt

SEQ ID NO: 317440 - DNA, 25 bp, Artificial
  probe
  misc_feature (1)..(25): SEQ ID NO: 2180; WAN024B5D; Start 259; Stop 283
aaaatgatggtcgctgaaacttctg

SEQ ID NO: 317441 - DNA, 25 bp, Artificial
  probe
  misc_feature (1)..(25): SEQ ID NO: 2180; WAN024B5D; Start 430; Stop 454
caatatcgaaaagtggagaaagtgg

SEQ ID NO: 317442 - DNA, 25 bp, Artificial
  probe
  misc_feature (1)..(25): SEQ ID NO: 2180; WAN024B5D; Start 431; Stop 455
aatatcgaaaagtggagaaagtggt

SEQ ID NO: 317443 - DNA, 25 bp, Artificial
  probe
  misc_feature (1)..(25): SEQ ID NO: 2180; WAN024B5D; Start 429; Stop 453
tcaatatcgaaaagtggagaaagtg

SEQ ID NO: 317444 - DNA, 25 bp, Artificial
  probe
  misc_feature (1)..(25): SEQ ID NO: 2180; WAN024B5D; Start 432; Stop 456
atatcgaaaagtggagaaagtggtc

SEQ ID NO: 317445 - DNA, 25 bp, Artificial
  probe
  misc_feature (1)..(25): SEQ ID NO: 2180; WAN024B5D; Start 263; Stop 287
tgatggtcgctgaaacttctgatga

SEQ ID NO: 317446 - DNA, 25 bp, Artificial
  probe
  misc_feature (1)..(25): SEQ ID NO: 2180; WAN024B5D; Start 345; Stop 369
agattcaccgctactatctatttat

SEQ ID NO: 317447 - DNA, 25 bp, Artificial
  probe
  misc_feature (1)..(25): SEQ ID NO: 2180; WAN024B5D; Start 350; Stop 374
caccgctactatctatttattcgga

SEQ ID NO: 317448 - DNA, 25 bp, Artificial
  probe
  misc_feature (1)..(25): SEQ ID NO: 2180; WAN024B5D; Start 349; Stop 373
tcaccgctactatctatttattcgg

SEQ ID NO: 317449 - DNA, 25 bp, Artificial
  probe
  misc_feature (1)..(25): SEQ ID NO: 2180; WAN024B5D; Start 400; Stop 424
atctcaggcttggtcattaaatttt

SEQ ID NO: 317450 - DNA, 25 bp, Artificial
  probe
  misc_feature (1)..(25): SEQ ID NO: 2181; WAN024EUY; Start 68; Stop 92
aacgactggtatgcctactagaatt

SEQ ID NO: 317451 - DNA, 25 bp, Artificial
  probe
  misc_feature (1)..(25): SEQ ID NO: 2181; WAN024EUY; Start 114; Stop 138
aagtgctatcattgctctaactaat

SEQ ID NO: 317452 - DNA, 25 bp, Artificial
  probe
  misc_feature (1)..(25): SEQ ID NO: 2181; WAN024EUY; Start 113; Stop 137
taagtgctatcattgctctaactaa

SEQ ID NO: 317453 - DNA, 25 bp, Artificial
  probe
  misc_feature (1)..(25): SEQ ID NO: 2181; WAN024EUY; Start 112; Stop 136
ttaagtgctatcattgctctaacta

SEQ ID NO: 317454 - DNA, 25 bp, Artificial
  probe
  misc_feature (1)..(25): SEQ ID NO: 2181; WAN024EUY; Start 67; Stop 91
aaacgactggtatgcctactagaat

SEQ ID NO: 317455 - DNA, 25 bp, Artificial
  probe
  misc_feature (1)..(25): SEQ ID NO: 2181; WAN024EUY; Start 52; Stop 76
aaattccttaccttgaaacgactgg

SEQ ID NO: 317456 - DNA, 25 bp, Artificial
  probe
  misc_feature (1)..(25): SEQ ID NO: 2181; WAN024EUY; Start 63; Stop 87
cttgaaacgactggtatgcctacta

SEQ ID NO: 317457 - DNA, 25 bp, Artificial
  probe
  misc_feature (1)..(25): SEQ ID NO: 2181; WAN024EUY; Start 111; Stop 135
tttaagtgctatcattgctctaact

SEQ ID NO: 317458 - DNA, 25 bp, Artificial
  probe
  misc_feature (1)..(25): SEQ ID NO: 2181; WAN024EUY; Start 66; Stop 90
gaaacgactggtatgcctactagaa

SEQ ID NO: 317459 - DNA, 25 bp, Artificial
  probe
  misc_feature (1)..(25): SEQ ID NO: 2181; WAN024EUY; Start 64; Stop 88
ttgaaacgactggtatgcctactag

SEQ ID NO: 317460 - DNA, 25 bp, Artificial
  probe
  misc_feature (1)..(25): SEQ ID NO: 2181; WAN024EUY; Start 69; Stop 93
acgactggtatgcctactagaattc

SEQ ID NO: 317461 - DNA, 25 bp, Artificial
  probe
  misc_feature (1)..(25): SEQ ID NO: 2181; WAN024EUY; Start 65; Stop 89
tgaaacgactggtatgcctactaga

SEQ ID NO: 317462 - DNA, 25 bp, Artificial
  probe
  misc_feature (1)..(25): SEQ ID NO: 2181; WAN024EUY; Start 108; Stop 132
cgttttaagtgctatcattgctcta

SEQ ID NO: 317463 - DNA, 25 bp, Artificial
  probe
  misc_feature (1)..(25): SEQ ID NO: 2181; WAN024EUY; Start 107; Stop 131
tcgttttaagtgctatcattgctct

SEQ ID NO: 317464 - DNA, 25 bp, Artificial
  probe
  misc_feature (1)..(25): SEQ ID NO: 2181; WAN024EUY; Start 106; Stop 130
gtcgttttaagtgctatcattgctc

SEQ ID NO: 317465 - DNA, 25 bp, Artificial
  probe
  misc_feature (1)..(25): SEQ ID NO: 2181; WAN024EUY; Start 53; Stop 77
aattccttaccttgaaacgactggt

SEQ ID NO: 317466 - DNA, 25 bp, Artificial
  probe
  misc_feature (1)..(25): SEQ ID NO: 2181; WAN024EUY; Start 51; Stop 75
aaaattccttaccttgaaacgactg

SEQ ID NO: 317467 - DNA, 25 bp, Artificial
  probe
  misc_feature (1)..(25): SEQ ID NO: 2181; WAN024EUY; Start 50; Stop 74
taaaattccttaccttgaaacgact

SEQ ID NO: 317468 - DNA, 25 bp, Artificial
  probe
  misc_feature (1)..(25): SEQ ID NO: 2181; WAN024EUY; Start 43; Stop 67
gaccctataaaattccttaccttga

SEQ ID NO: 317469 - DNA, 25 bp, Artificial
  probe
  misc_feature (1)..(25): SEQ ID NO: 2181; WAN024EUY; Start 42; Stop 66
agaccctataaaattccttaccttg

SEQ ID NO: 317470 - DNA, 25 bp, Artificial
  probe
  misc_feature (1)..(25): SEQ ID NO: 2181; WAN024EUY; Start 105; Stop 129
cgtcgttttaagtgctatcattgct

SEQ ID NO: 317471 - DNA, 25 bp, Artificial
  probe
  misc_feature (1)..(25): SEQ ID NO: 2181; WAN024EUY; Start 110; Stop 134
ttttaagtgctatcattgctctaac

SEQ ID NO: 317472 - DNA, 25 bp, Artificial
  probe
  misc_feature (1)..(25): SEQ ID NO: 2181; WAN024EUY; Start 109; Stop 133
gttttaagtgctatcattgctctaa

SEQ ID NO: 317473 - DNA, 25 bp, Artificial
  probe
  misc_feature (1)..(25): SEQ ID NO: 2181; WAN024EUY; Start 49; Stop 73
ataaaattccttaccttgaaacgac

SEQ ID NO: 317474 - DNA, 25 bp, Artificial
  probe
  misc_feature (1)..(25): SEQ ID NO: 2181; WAN024EUY; Start 55; Stop 79
ttccttaccttgaaacgactggtat

SEQ ID NO: 317475 - DNA, 25 bp, Artificial
  probe
  misc_feature (1)..(25): SEQ ID NO: 2181; WAN024EUY; Start 54; Stop 78
attccttaccttgaaacgactggta

SEQ ID NO: 317476 - DNA, 25 bp, Artificial
  probe
  misc_feature (1)..(25): SEQ ID NO: 2181; WAN024EUY; Start 62; Stop 86
ccttgaaacgactggtatgcctact

SEQ ID NO: 317477 - DNA, 25 bp, Artificial
  probe
  misc_feature (1)..(25): SEQ ID NO: 2181; WAN024EUY; Start 44; Stop 68
accctataaaattccttaccttgaa

SEQ ID NO: 317478 - DNA, 25 bp, Artificial
  probe
  misc_feature (1)..(25): SEQ ID NO: 2181; WAN024EUY; Start 41; Stop 65
aagaccctataaaattccttacctt

SEQ ID NO: 317479 - DNA, 25 bp, Artificial
  probe
  misc_feature (1)..(25): SEQ ID NO: 2181; WAN024EUY; Start 40; Stop 64
aaagaccctataaaattccttacct

SEQ ID NO: 317480 - DNA, 25 bp, Artificial
  probe
  misc_feature (1)..(25): SEQ ID NO: 2181; WAN024EUY; Start 103; Stop 127
aacgtcgttttaagtgctatcattg

SEQ ID NO: 317481 - DNA, 25 bp, Artificial
  probe
  misc_feature (1)..(25): SEQ ID NO: 2181; WAN024EUY; Start 56; Stop 80
tccttaccttgaaacgactggtatg

SEQ ID NO: 317482 - DNA, 25 bp, Artificial
  probe
  misc_feature (1)..(25): SEQ ID NO: 2181; WAN024EUY; Start 45; Stop 69
ccctataaaattccttaccttgaaa

SEQ ID NO: 317483 - DNA, 25 bp, Artificial
  probe
  misc_feature (1)..(25): SEQ ID NO: 2182; WAN024B5F; Start 187; Stop 211
tatcttgaaacgactggtatgcctt

SEQ ID NO: 317484 - DNA, 25 bp, Artificial
  probe
  misc_feature (1)..(25): SEQ ID NO: 2182; WAN024B5F; Start 186; Stop 210
ttatcttgaaacgactggtatgcct

SEQ ID NO: 317485 - DNA, 25 bp, Artificial
  probe
  misc_feature (1)..(25): SEQ ID NO: 2182; WAN024B5F; Start 190; Stop 214
cttgaaacgactggtatgccttcta

SEQ ID NO: 317486 - DNA, 25 bp, Artificial
  probe
  misc_feature (1)..(25): SEQ ID NO: 2182; WAN024B5F; Start 191; Stop 215
ttgaaacgactggtatgccttctag

SEQ ID NO: 317487 - DNA, 25 bp, Artificial
  probe
  misc_feature (1)..(25): SEQ ID NO: 2182; WAN024B5F; Start 188; Stop 212
atcttgaaacgactggtatgccttc

SEQ ID NO: 317488 - DNA, 25 bp, Artificial
  probe
  misc_feature (1)..(25): SEQ ID NO: 2182; WAN024B5F; Start 189; Stop 213
tcttgaaacgactggtatgccttct

SEQ ID NO: 317489 - DNA, 25 bp, Artificial
  probe
  misc_feature (1)..(25): SEQ ID NO: 2182; WAN024B5F; Start 192; Stop 216
tgaaacgactggtatgccttctaga

SEQ ID NO: 317490 - DNA, 25 bp, Artificial
  probe
  misc_feature (1)..(25): SEQ ID NO: 2183; WAN024D85; Start 26; Stop 50
aagaccttgaagtcactacagttgt

SEQ ID NO: 317491 - DNA, 25 bp, Artificial
  probe
  misc_feature (1)..(25): SEQ ID NO: 2183; WAN024D85; Start 27; Stop 51
agaccttgaagtcactacagttgtg

SEQ ID NO: 317492 - DNA, 25 bp, Artificial
  probe
  misc_feature (1)..(25): SEQ ID NO: 2183; WAN024D85; Start 306; Stop 330
ttcaatgtcagcacaagaaatcaaa

SEQ ID NO: 317493 - DNA, 25 bp, Artificial
  probe
  misc_feature (1)..(25): SEQ ID NO: 2183; WAN024D85; Start 268; Stop 292
catattacagatggacaaatcaacg

SEQ ID NO: 317494 - DNA, 25 bp, Artificial
  probe
  misc_feature (1)..(25): SEQ ID NO: 2183; WAN024D85; Start 309; Stop 333
aatgtcagcacaagaaatcaaagat

SEQ ID NO: 317495 - DNA, 25 bp, Artificial
  probe
  misc_feature (1)..(25): SEQ ID NO: 2183; WAN024D85; Start 308; Stop 332
caatgtcagcacaagaaatcaaaga

SEQ ID NO: 317496 - DNA, 25 bp, Artificial
  probe
  misc_feature (1)..(25): SEQ ID NO: 2183; WAN024D85; Start 307; Stop 331
tcaatgtcagcacaagaaatcaaag

SEQ ID NO: 317497 - DNA, 25 bp, Artificial
  probe
  misc_feature (1)..(25): SEQ ID NO: 2183; WAN024D85; Start 305; Stop 329
cttcaatgtcagcacaagaaatcaa

SEQ ID NO: 317498 - DNA, 25 bp, Artificial
  probe
  misc_feature (1)..(25): SEQ ID NO: 2183; WAN024D85; Start 25; Stop 49
aaagaccttgaagtcactacagttg

SEQ ID NO: 317499 - DNA, 25 bp, Artificial
  probe
  misc_feature (1)..(25): SEQ ID NO: 2183; WAN024D85; Start 24; Stop 48
caaagaccttgaagtcactacagtt

SEQ ID NO: 317500 - DNA, 25 bp, Artificial
  probe
  misc_feature (1)..(25): SEQ ID NO: 2183; WAN024D85; Start 164; Stop 188
ccaaagctcacatttacttcatcaa

SEQ ID NO: 317501 - DNA, 25 bp, Artificial
  probe
  misc_feature (1)..(25): SEQ ID NO: 2183; WAN024D85; Start 162; Stop 186
aaccaaagctcacatttacttcatc

SEQ ID NO: 317502 - DNA, 25 bp, Artificial
  probe
  misc_feature (1)..(25): SEQ ID NO: 2183; WAN024D85; Start 160; Stop 184
gaaaccaaagctcacatttacttca

SEQ ID NO: 317503 - DNA, 25 bp, Artificial
  probe
  misc_feature (1)..(25): SEQ ID NO: 2183; WAN024D85; Start 161; Stop 185
aaaccaaagctcacatttacttcat

SEQ ID NO: 317504 - DNA, 25 bp, Artificial
  probe
  misc_feature (1)..(25): SEQ ID NO: 2183; WAN024D85; Start 310; Stop 334
atgtcagcacaagaaatcaaagatt

SEQ ID NO: 317505 - DNA, 25 bp, Artificial
  probe
  misc_feature (1)..(25): SEQ ID NO: 2183; WAN024D85; Start 163; Stop 187
accaaagctcacatttacttcatca

SEQ ID NO: 317506 - DNA, 25 bp, Artificial
  probe
  misc_feature (1)..(25): SEQ ID NO: 2183; WAN024D85; Start 159; Stop 183
tgaaaccaaagctcacatttacttc

SEQ ID NO: 317507 - DNA, 25 bp, Artificial
  probe
  misc_feature (1)..(25): SEQ ID NO: 2183; WAN024D85; Start 158; Stop 182
ctgaaaccaaagctcacatttactt

SEQ ID NO: 317508 - DNA, 25 bp, Artificial
  probe
  misc_feature (1)..(25): SEQ ID NO: 2183; WAN024D85; Start 169; Stop 193
gctcacatttacttcatcaatagtg

SEQ ID NO: 317509 - DNA, 25 bp, Artificial
  probe
  misc_feature (1)..(25): SEQ ID NO: 2183; WAN024D85; Start 125; Stop 149
gtaaatttgcaggtacattgtcagg

SEQ ID NO: 317510 - DNA, 25 bp, Artificial
  probe
  misc_feature (1)..(25): SEQ ID NO: 2183; WAN024D85; Start 126; Stop 150
taaatttgcaggtacattgtcaggt

SEQ ID NO: 317511 - DNA, 25 bp, Artificial
  probe
  misc_feature (1)..(25): SEQ ID NO: 2183; WAN024D85; Start 124; Stop 148
cgtaaatttgcaggtacattgtcag

SEQ ID NO: 317512 - DNA, 25 bp, Artificial
  probe
  misc_feature (1)..(25): SEQ ID NO: 2183; WAN024D85; Start 267; Stop 291
tcatattacagatggacaaatcaac

SEQ ID NO: 317513 - DNA, 25 bp, Artificial
  probe
  misc_feature (1)..(25): SEQ ID NO: 2183; WAN024D85; Start 265; Stop 289
gttcatattacagatggacaaatca

SEQ ID NO: 317514 - DNA, 25 bp, Artificial
  probe
  misc_feature (1)..(25): SEQ ID NO: 2183; WAN024D85; Start 165; Stop 189
caaagctcacatttacttcatcaat

SEQ ID NO: 317515 - DNA, 25 bp, Artificial
  probe
  misc_feature (1)..(25): SEQ ID NO: 2183; WAN024D85; Start 269; Stop 293
atattacagatggacaaatcaacgt

SEQ ID NO: 317516 - DNA, 25 bp, Artificial
  probe
  misc_feature (1)..(25): SEQ ID NO: 2183; WAN024D85; Start 303; Stop 327
ctcttcaatgtcagcacaagaaatc

SEQ ID NO: 317517 - DNA, 25 bp, Artificial
  probe
  misc_feature (1)..(25): SEQ ID NO: 2183; WAN024D85; Start 168; Stop 192
agctcacatttacttcatcaatagt

SEQ ID NO: 317518 - DNA, 25 bp, Artificial
  probe
  misc_feature (1)..(25): SEQ ID NO: 2183; WAN024D85; Start 28; Stop 52
gaccttgaagtcactacagttgtgc

SEQ ID NO: 317519 - DNA, 25 bp, Artificial
  probe
  misc_feature (1)..(25): SEQ ID NO: 2183; WAN024D85; Start 304; Stop 328
tcttcaatgtcagcacaagaaatca

SEQ ID NO: 317520 - DNA, 25 bp, Artificial
  probe
  misc_feature (1)..(25): SEQ ID NO: 2183; WAN024D85; Start 302; Stop 326
actcttcaatgtcagcacaagaaat

SEQ ID NO: 317521 - DNA, 25 bp, Artificial
  probe
  misc_feature (1)..(25): SEQ ID NO: 2183; WAN024D85; Start 264; Stop 288
tgttcatattacagatggacaaatc

SEQ ID NO: 317522 - DNA, 25 bp, Artificial
  probe
  misc_feature (1)..(25): SEQ ID NO: 2183; WAN024D85; Start 270; Stop 294
tattacagatggacaaatcaacgtc

SEQ ID NO: 317523 - DNA, 25 bp, Artificial
  probe
  misc_feature (1)..(25): SEQ ID NO: 2184; WAN024B7R; Start 13; Stop 37
aatcataccacattactcatcggaa

SEQ ID NO: 317524 - DNA, 25 bp, Artificial
  probe
  misc_feature (1)..(25): SEQ ID NO: 2184; WAN024B7R; Start 385; Stop 409
atctctacctctacctctacctcta

SEQ ID NO: 317525 - DNA, 25 bp, Artificial
  probe
  misc_feature (1)..(25): SEQ ID NO: 2184; WAN024B7R; Start 14; Stop 38
atcataccacattactcatcggaat

SEQ ID NO: 317526 - DNA, 25 bp, Artificial
  probe
  misc_feature (1)..(25): SEQ ID NO: 2184; WAN024B7R; Start 386; Stop 410
tctctacctctacctctacctctac

SEQ ID NO: 317527 - DNA, 25 bp, Artificial
  probe
  misc_feature (1)..(25): SEQ ID NO: 2184; WAN024B7R; Start 12; Stop 36
caatcataccacattactcatcgga

SEQ ID NO: 317528 - DNA, 25 bp, Artificial
  probe
  misc_feature (1)..(25): SEQ ID NO: 2184; WAN024B7R; Start 11; Stop 35
tcaatcataccacattactcatcgg

SEQ ID NO: 317529 - DNA, 25 bp, Artificial
  probe
  misc_feature (1)..(25): SEQ ID NO: 2184; WAN024B7R; Start 379; Stop 403
ttagccatctctacctctacctcta

SEQ ID NO: 317530 - DNA, 25 bp, Artificial
  probe
  misc_feature (1)..(25): SEQ ID NO: 2184; WAN024B7R; Start 15; Stop 39
tcataccacattactcatcggaata

SEQ ID NO: 317531 - DNA, 25 bp, Artificial
  probe
  misc_feature (1)..(25): SEQ ID NO: 2184; WAN024B7R; Start 3; Stop 27
ggaacacatcaatcataccacatta

SEQ ID NO: 317532 - DNA, 25 bp, Artificial
  probe
  misc_feature (1)..(25): SEQ ID NO: 2184; WAN024B7R; Start 399; Stop 423
ctctacctctaccgtctatcgtaag

SEQ ID NO: 317533 - DNA, 25 bp, Artificial
  probe
  misc_feature (1)..(25): SEQ ID NO: 2184; WAN024B7R; Start 377; Stop 401
aattagccatctctacctctacctc

SEQ ID NO: 317534 - DNA, 25 bp, Artificial
  probe
  misc_feature (1)..(25): SEQ ID NO: 2184; WAN024B7R; Start 384; Stop 408
catctctacctctacctctacctct

SEQ ID NO: 317535 - DNA, 25 bp, Artificial
  probe
  misc_feature (1)..(25): SEQ ID NO: 2184; WAN024B7R; Start 7; Stop 31
cacatcaatcataccacattactca

SEQ ID NO: 317536 - DNA, 25 bp, Artificial
  probe
  misc_feature (1)..(25): SEQ ID NO: 2184; WAN024B7R; Start 6; Stop 30
acacatcaatcataccacattactc

SEQ ID NO: 317537 - DNA, 25 bp, Artificial
  probe
  misc_feature (1)..(25): SEQ ID NO: 2184; WAN024B7R; Start 394; Stop 418
tctacctctacctctaccgtctatc

SEQ ID NO: 317538 - DNA, 25 bp, Artificial
  probe
  misc_feature (1)..(25): SEQ ID NO: 2184; WAN024B7R; Start 393; Stop 417
ctctacctctacctctaccgtctat

SEQ ID NO: 317539 - DNA, 25 bp, Artificial
  probe
  misc_feature (1)..(25): SEQ ID NO: 2184; WAN024B7R; Start 10; Stop 34
atcaatcataccacattactcatcg

SEQ ID NO: 317540 - DNA, 25 bp, Artificial
  probe
  misc_feature (1)..(25): SEQ ID NO: 2184; WAN024B7R; Start 378; Stop 402
attagccatctctacctctacctct

SEQ ID NO: 317541 - DNA, 25 bp, Artificial
  probe
  misc_feature (1)..(25): SEQ ID NO: 2184; WAN024B7R; Start 387; Stop 411
ctctacctctacctctacctctacc

SEQ ID NO: 317542 - DNA, 25 bp, Artificial
  probe
  misc_feature (1)..(25): SEQ ID NO: 2184; WAN024B7R; Start 380; Stop 404
tagccatctctacctctacctctac

SEQ ID NO: 317543 - DNA, 25 bp, Artificial
  probe
  misc_feature (1)..(25): SEQ ID NO: 2184; WAN024B7R; Start 353; Stop 377
aggctcttacacatatcgcttctaa

SEQ ID NO: 317544 - DNA, 25 bp, Artificial
  probe
  misc_feature (1)..(25): SEQ ID NO: 2184; WAN024B7R; Start 947; Stop 971
actatgacctgtatcaactactcct

SEQ ID NO: 317545 - DNA, 25 bp, Artificial
  probe
  misc_feature (1)..(25): SEQ ID NO: 2184; WAN024B7R; Start 16; Stop 40
cataccacattactcatcggaataa

SEQ ID NO: 317546 - DNA, 25 bp, Artificial
  probe
  misc_feature (1)..(25): SEQ ID NO: 2184; WAN024B7R; Start 5; Stop 29
aacacatcaatcataccacattact

SEQ ID NO: 317547 - DNA, 25 bp, Artificial
  probe
  misc_feature (1)..(25): SEQ ID NO: 2184; WAN024B7R; Start 978; Stop 1002
tctacaagagaagaatactgaccag

SEQ ID NO: 317548 - DNA, 25 bp, Artificial
  probe
  misc_feature (1)..(25): SEQ ID NO: 2184; WAN024B7R; Start 635; Stop 659
tcactgttgatatgtctggaagtta

SEQ ID NO: 317549 - DNA, 25 bp, Artificial
  probe
  misc_feature (1)..(25): SEQ ID NO: 2184; WAN024B7R; Start 1086; Stop 1110
ctacatcactaacgccattgaattg

SEQ ID NO: 317550 - DNA, 25 bp, Artificial
  probe
  misc_feature (1)..(25): SEQ ID NO: 2184; WAN024B7R; Start 1084; Stop 1108
aactacatcactaacgccattgaat

SEQ ID NO: 317551 - DNA, 25 bp, Artificial
  probe
  misc_feature (1)..(25): SEQ ID NO: 2184; WAN024B7R; Start 634; Stop 658
gtcactgttgatatgtctggaagtt

SEQ ID NO: 317552 - DNA, 25 bp, Artificial
  probe
  misc_feature (1)..(25): SEQ ID NO: 2184; WAN024B7R; Start 4; Stop 28
gaacacatcaatcataccacattac

SEQ ID NO: 317553 - DNA, 25 bp, Artificial
  probe
  misc_feature (1)..(25): SEQ ID NO: 2184; WAN024B7R; Start 1093; Stop 1117
actaacgccattgaattgccttatt

SEQ ID NO: 317554 - DNA, 25 bp, Artificial
  probe
  misc_feature (1)..(25): SEQ ID NO: 2184; WAN024B7R; Start 977; Stop 1001
atctacaagagaagaatactgacca

SEQ ID NO: 317555 - DNA, 25 bp, Artificial
  probe
  misc_feature (1)..(25): SEQ ID NO: 2184; WAN024B7R; Start 1085; Stop 1109
actacatcactaacgccattgaatt

SEQ ID NO: 317556 - DNA, 25 bp, Artificial
  probe
  misc_feature (1)..(25): SEQ ID NO: 2185; WAN024ETZ; Start 617; Stop 641
attcctatgctgccattaagaagtt

SEQ ID NO: 317557 - DNA, 25 bp, Artificial
  probe
  misc_feature (1)..(25): SEQ ID NO: 2185; WAN024ETZ; Start 616; Stop 640
aattcctatgctgccattaagaagt

SEQ ID NO: 317558 - DNA, 25 bp, Artificial
  probe
  misc_feature (1)..(25): SEQ ID NO: 2185; WAN024ETZ; Start 613; Stop 637
agtaattcctatgctgccattaaga

SEQ ID NO: 317559 - DNA, 25 bp, Artificial
  probe
  misc_feature (1)..(25): SEQ ID NO: 2185; WAN024ETZ; Start 610; Stop 634
tcaagtaattcctatgctgccatta

SEQ ID NO: 317560 - DNA, 25 bp, Artificial
  probe
  misc_feature (1)..(25): SEQ ID NO: 2185; WAN024ETZ; Start 609; Stop 633
ttcaagtaattcctatgctgccatt

SEQ ID NO: 317561 - DNA, 25 bp, Artificial
  probe
  misc_feature (1)..(25): SEQ ID NO: 2185; WAN024ETZ; Start 611; Stop 635
caagtaattcctatgctgccattaa

SEQ ID NO: 317562 - DNA, 25 bp, Artificial
  probe
  misc_feature (1)..(25): SEQ ID NO: 2185; WAN024ETZ; Start 614; Stop 638
gtaattcctatgctgccattaagaa

SEQ ID NO: 317563 - DNA, 25 bp, Artificial
  probe
  misc_feature (1)..(25): SEQ ID NO: 2185; WAN024ETZ; Start 612; Stop 636
aagtaattcctatgctgccattaag

SEQ ID NO: 317564 - DNA, 25 bp, Artificial
  probe
  misc_feature (1)..(25): SEQ ID NO: 2185; WAN024ETZ; Start 608; Stop 632
cttcaagtaattcctatgctgccat

SEQ ID NO: 317565 - DNA, 25 bp, Artificial
  probe
  misc_feature (1)..(25): SEQ ID NO: 2185; WAN024ETZ; Start 618; Stop 642
ttcctatgctgccattaagaagttg

SEQ ID NO: 317566 - DNA, 25 bp, Artificial
  probe
  misc_feature (1)..(25): SEQ ID NO: 2185; WAN024ETZ; Start 615; Stop 639
taattcctatgctgccattaagaag

SEQ ID NO: 317567 - DNA, 25 bp, Artificial
  probe
  misc_feature (1)..(25): SEQ ID NO: 2185; WAN024ETZ; Start 746; Stop 770
ctcattcggagagaagaagacctaa

SEQ ID NO: 317568 - DNA, 25 bp, Artificial
  probe
  misc_feature (1)..(25): SEQ ID NO: 2185; WAN024ETZ; Start 604; Stop 628
cgtgcttcaagtaattcctatgctg

SEQ ID NO: 317569 - DNA, 25 bp, Artificial
  probe
  misc_feature (1)..(25): SEQ ID NO: 2185; WAN024ETZ; Start 605; Stop 629
gtgcttcaagtaattcctatgctgc

SEQ ID NO: 317570 - DNA, 25 bp, Artificial
  probe
  misc_feature (1)..(25): SEQ ID NO: 2185; WAN024ETZ; Start 676; Stop 700
tacgctactttagaactgaacctac

SEQ ID NO: 317571 - DNA, 25 bp, Artificial
  probe
  misc_feature (1)..(25): SEQ ID NO: 2185; WAN024ETZ; Start 599; Stop 623
taagacgtgcttcaagtaattccta

SEQ ID NO: 317572 - DNA, 25 bp, Artificial
  probe
  misc_feature (1)..(25): SEQ ID NO: 2185; WAN024ETZ; Start 601; Stop 625
agacgtgcttcaagtaattcctatg

SEQ ID NO: 317573 - DNA, 25 bp, Artificial
  probe
  misc_feature (1)..(25): SEQ ID NO: 2185; WAN024ETZ; Start 600; Stop 624
aagacgtgcttcaagtaattcctat

SEQ ID NO: 317574 - DNA, 25 bp, Artificial
  probe
  misc_feature (1)..(25): SEQ ID NO: 2185; WAN024ETZ; Start 675; Stop 699
ttacgctactttagaactgaaccta

SEQ ID NO: 317575 - DNA, 25 bp, Artificial
  probe
  misc_feature (1)..(25): SEQ ID NO: 2185; WAN024ETZ; Start 598; Stop 622
ttaagacgtgcttcaagtaattcct

SEQ ID NO: 317576 - DNA, 25 bp, Artificial
  probe
  misc_feature (1)..(25): SEQ ID NO: 2185; WAN024ETZ; Start 748; Stop 772
cattcggagagaagaagacctaaat

SEQ ID NO: 317577 - DNA, 25 bp, Artificial
  probe
  misc_feature (1)..(25): SEQ ID NO: 2185; WAN024ETZ; Start 715; Stop 739
caaacagaggatttcaaagaaggag

SEQ ID NO: 317578 - DNA, 25 bp, Artificial
  probe
  misc_feature (1)..(25): SEQ ID NO: 2185; WAN024ETZ; Start 597; Stop 621
attaagacgtgcttcaagtaattcc

SEQ ID NO: 317579 - DNA, 25 bp, Artificial
  probe
  misc_feature (1)..(25): SEQ ID NO: 2185; WAN024ETZ; Start 716; Stop 740
aaacagaggatttcaaagaaggagt

SEQ ID NO: 317580 - DNA, 25 bp, Artificial
  probe
  misc_feature (1)..(25): SEQ ID NO: 2185; WAN024ETZ; Start 714; Stop 738
tcaaacagaggatttcaaagaagga

SEQ ID NO: 317581 - DNA, 25 bp, Artificial
  probe
  misc_feature (1)..(25): SEQ ID NO: 2185; WAN024ETZ; Start 674; Stop 698
gttacgctactttagaactgaacct

SEQ ID NO: 317582 - DNA, 25 bp, Artificial
  probe
  misc_feature (1)..(25): SEQ ID NO: 2185; WAN024ETZ; Start 621; Stop 645
ctatgctgccattaagaagttggtt

SEQ ID NO: 317583 - DNA, 25 bp, Artificial
  probe
  misc_feature (1)..(25): SEQ ID NO: 2185; WAN024ETZ; Start 749; Stop 773
attcggagagaagaagacctaaatt

SEQ ID NO: 317584 - DNA, 25 bp, Artificial
  probe
  misc_feature (1)..(25): SEQ ID NO: 2185; WAN024ETZ; Start 747; Stop 771
tcattcggagagaagaagacctaaa

SEQ ID NO: 317585 - DNA, 25 bp, Artificial
  probe
  misc_feature (1)..(25): SEQ ID NO: 2185; WAN024ETZ; Start 717; Stop 741
aacagaggatttcaaagaaggagtg

SEQ ID NO: 317586 - DNA, 25 bp, Artificial
  probe
  misc_feature (1)..(25): SEQ ID NO: 2185; WAN024ETZ; Start 677; Stop 701
acgctactttagaactgaacctaca

SEQ ID NO: 317587 - DNA, 25 bp, Artificial
  probe
  misc_feature (1)..(25): SEQ ID NO: 2185; WAN024ETZ; Start 148; Stop 172
atcttaatcaatgccaatggaaagg

SEQ ID NO: 317588 - DNA, 25 bp, Artificial
  probe
  misc_feature (1)..(25): SEQ ID NO: 2185; WAN024ETZ; Start 152; Stop 176
taatcaatgccaatggaaaggtctt

SEQ ID NO: 317589 - DNA, 25 bp, Artificial
  probe
  misc_feature (1)..(25): SEQ ID NO: 2186; WAN024CTA; Start 193; Stop 217
aagaggattggcaataatatcaacc

SEQ ID NO: 317590 - DNA, 25 bp, Artificial
  probe
  misc_feature (1)..(25): SEQ ID NO: 2186; WAN024CTA; Start 102; Stop 126
ttctgaatatgcgagacgaactcta

SEQ ID NO: 317591 - DNA, 25 bp, Artificial
  probe
  misc_feature (1)..(25): SEQ ID NO: 2186; WAN024CTA; Start 121; Stop 145
actctactcgatcctggtatgaatt

SEQ ID NO: 317592 - DNA, 25 bp, Artificial
  probe
  misc_feature (1)..(25): SEQ ID NO: 2186; WAN024CTA; Start 120; Stop 144
aactctactcgatcctggtatgaat

SEQ ID NO: 317593 - DNA, 25 bp, Artificial
  probe
  misc_feature (1)..(25): SEQ ID NO: 2186; WAN024CTA; Start 105; Stop 129
tgaatatgcgagacgaactctactc

SEQ ID NO: 317594 - DNA, 25 bp, Artificial
  probe
  misc_feature (1)..(25): SEQ ID NO: 2186; WAN024CTA; Start 104; Stop 128
ctgaatatgcgagacgaactctact

SEQ ID NO: 317595 - DNA, 25 bp, Artificial
  probe
  misc_feature (1)..(25): SEQ ID NO: 2186; WAN024CTA; Start 103; Stop 127
tctgaatatgcgagacgaactctac

SEQ ID NO: 317596 - DNA, 25 bp, Artificial
  probe
  misc_feature (1)..(25): SEQ ID NO: 2186; WAN024CTA; Start 224; Stop 248
ctcgaagtgttaatcaatctcagtt

SEQ ID NO: 317597 - DNA, 25 bp, Artificial
  probe
  misc_feature (1)..(25): SEQ ID NO: 2186; WAN024CTA; Start 196; Stop 220
aggattggcaataatatcaaccaga

SEQ ID NO: 317598 - DNA, 25 bp, Artificial
  probe
  misc_feature (1)..(25): SEQ ID NO: 2186; WAN024CTA; Start 195; Stop 219
gaggattggcaataatatcaaccag

SEQ ID NO: 317599 - DNA, 25 bp, Artificial
  probe
  misc_feature (1)..(25): SEQ ID NO: 2186; WAN024CTA; Start 194; Stop 218
agaggattggcaataatatcaacca

SEQ ID NO: 317600 - DNA, 25 bp, Artificial
  probe
  misc_feature (1)..(25): SEQ ID NO: 2186; WAN024CTA; Start 207; Stop 231
taatatcaaccagattgctcgaagt

SEQ ID NO: 317601 - DNA, 25 bp, Artificial
  probe
  misc_feature (1)..(25): SEQ ID NO: 2186; WAN024CTA; Start 223; Stop 247
gctcgaagtgttaatcaatctcagt

SEQ ID NO: 317602 - DNA, 25 bp, Artificial
  probe
  misc_feature (1)..(25): SEQ ID NO: 2186; WAN024CTA; Start 222; Stop 246
tgctcgaagtgttaatcaatctcag

SEQ ID NO: 317603 - DNA, 25 bp, Artificial
  probe
  misc_feature (1)..(25): SEQ ID NO: 2186; WAN024CTA; Start 119; Stop 143
gaactctactcgatcctggtatgaa

SEQ ID NO: 317604 - DNA, 25 bp, Artificial
  probe
  misc_feature (1)..(25): SEQ ID NO: 2186; WAN024CTA; Start 197; Stop 221
ggattggcaataatatcaaccagat

SEQ ID NO: 317605 - DNA, 25 bp, Artificial
  probe
  misc_feature (1)..(25): SEQ ID NO: 2186; WAN024CTA; Start 221; Stop 245
ttgctcgaagtgttaatcaatctca

SEQ ID NO: 317606 - DNA, 25 bp, Artificial
  probe
  misc_feature (1)..(25): SEQ ID NO: 2186; WAN024CTA; Start 226; Stop 250
cgaagtgttaatcaatctcagttaa

SEQ ID NO: 317607 - DNA, 25 bp, Artificial
  probe
  misc_feature (1)..(25): SEQ ID NO: 2186; WAN024CTA; Start 206; Stop 230
ataatatcaaccagattgctcgaag

SEQ ID NO: 317608 - DNA, 25 bp, Artificial
  probe
  misc_feature (1)..(25): SEQ ID NO: 2186; WAN024CTA; Start 157; Stop 181
gacacaaacggttaccaagatttag

SEQ ID NO: 317609 - DNA, 25 bp, Artificial
  probe
  misc_feature (1)..(25): SEQ ID NO: 2186; WAN024CTA; Start 12; Stop 36
ttaccgaaccaatctcaagaaagtg

SEQ ID NO: 317610 - DNA, 25 bp, Artificial
  probe
  misc_feature (1)..(25): SEQ ID NO: 2186; WAN024CTA; Start 208; Stop 232
aatatcaaccagattgctcgaagtg

SEQ ID NO: 317611 - DNA, 25 bp, Artificial
  probe
  misc_feature (1)..(25): SEQ ID NO: 2186; WAN024CTA; Start 205; Stop 229
aataatatcaaccagattgctcgaa

SEQ ID NO: 317612 - DNA, 25 bp, Artificial
  probe
  misc_feature (1)..(25): SEQ ID NO: 2186; WAN024CTA; Start 39; Stop 63
tttgtctgatagtgagttgaaccaa

SEQ ID NO: 317613 - DNA, 25 bp, Artificial
  probe
  misc_feature (1)..(25): SEQ ID NO: 2186; WAN024CTA; Start 179; Stop 203
tagtgtttgagttaaagaggattgg

SEQ ID NO: 317614 - DNA, 25 bp, Artificial
  probe
  misc_feature (1)..(25): SEQ ID NO: 2186; WAN024CTA; Start 158; Stop 182
acacaaacggttaccaagatttagt

SEQ ID NO: 317615 - DNA, 25 bp, Artificial
  probe
  misc_feature (1)..(25): SEQ ID NO: 2186; WAN024CTA; Start 156; Stop 180
tgacacaaacggttaccaagattta

SEQ ID NO: 317616 - DNA, 25 bp, Artificial
  probe
  misc_feature (1)..(25): SEQ ID NO: 2186; WAN024CTA; Start 180; Stop 204
agtgtttgagttaaagaggattggc

SEQ ID NO: 317617 - DNA, 25 bp, Artificial
  probe
  misc_feature (1)..(25): SEQ ID NO: 2186; WAN024CTA; Start 161; Stop 185
caaacggttaccaagatttagtgtt

SEQ ID NO: 317618 - DNA, 25 bp, Artificial
  probe
  misc_feature (1)..(25): SEQ ID NO: 2186; WAN024CTA; Start 225; Stop 249
tcgaagtgttaatcaatctcagtta

SEQ ID NO: 317619 - DNA, 25 bp, Artificial
  probe
  misc_feature (1)..(25): SEQ ID NO: 2186; WAN024CTA; Start 163; Stop 187
aacggttaccaagatttagtgtttg

SEQ ID NO: 317620 - DNA, 25 bp, Artificial
  probe
  misc_feature (1)..(25): SEQ ID NO: 2186; WAN024CTA; Start 11; Stop 35
gttaccgaaccaatctcaagaaagt

SEQ ID NO: 317621 - DNA, 25 bp, Artificial
  probe
  misc_feature (1)..(25): SEQ ID NO: 2186; WAN024CTA; Start 165; Stop 189
cggttaccaagatttagtgtttgag

SEQ ID NO: 317622 - DNA, 25 bp, Artificial
  probe
  misc_feature (1)..(25): SEQ ID NO: 2187; WAN024CQV; Start 59; Stop 83
gaattgtattggcggttggattaag

SEQ ID NO: 317623 - DNA, 25 bp, Artificial
  probe
  misc_feature (1)..(25): SEQ ID NO: 2187; WAN024CQV; Start 58; Stop 82
ggaattgtattggcggttggattaa

SEQ ID NO: 317624 - DNA, 25 bp, Artificial
  probe
  misc_feature (1)..(25): SEQ ID NO: 2187; WAN024CQV; Start 60; Stop 84
aattgtattggcggttggattaagc

SEQ ID NO: 317625 - DNA, 25 bp, Artificial
  probe
  misc_feature (1)..(25): SEQ ID NO: 2187; WAN024CQV; Start 327; Stop 351
taagcatcaaggaaatgtagcagta

SEQ ID NO: 317626 - DNA, 25 bp, Artificial
  probe
  misc_feature (1)..(25): SEQ ID NO: 2187; WAN024CQV; Start 328; Stop 352
aagcatcaaggaaatgtagcagtag

SEQ ID NO: 317627 - DNA, 25 bp, Artificial
  probe
  misc_feature (1)..(25): SEQ ID NO: 2187; WAN024CQV; Start 326; Stop 350
ctaagcatcaaggaaatgtagcagt

SEQ ID NO: 317628 - DNA, 25 bp, Artificial
  probe
  misc_feature (1)..(25): SEQ ID NO: 2187; WAN024CQV; Start 459; Stop 483
tttgacccttcgtgtactaactaat

SEQ ID NO: 317629 - DNA, 25 bp, Artificial
  probe
  misc_feature (1)..(25): SEQ ID NO: 2187; WAN024CQV; Start 239; Stop 263
tgcaattaactccagaacttccttt

SEQ ID NO: 317630 - DNA, 25 bp, Artificial
  probe
  misc_feature (1)..(25): SEQ ID NO: 2187; WAN024CQV; Start 268; Stop 292
aaaggcgttgcttatttctttgtag

SEQ ID NO: 317631 - DNA, 25 bp, Artificial
  probe
  misc_feature (1)..(25): SEQ ID NO: 2187; WAN024CQV; Start 61; Stop 85
attgtattggcggttggattaagcg

SEQ ID NO: 317632 - DNA, 25 bp, Artificial
  probe
  misc_feature (1)..(25): SEQ ID NO: 2187; WAN024CQV; Start 329; Stop 353
agcatcaaggaaatgtagcagtagc

SEQ ID NO: 317633 - DNA, 25 bp, Artificial
  probe
  misc_feature (1)..(25): SEQ ID NO: 2187; WAN024CQV; Start 57; Stop 81
gggaattgtattggcggttggatta

SEQ ID NO: 317634 - DNA, 25 bp, Artificial
  probe
  misc_feature (1)..(25): SEQ ID NO: 2187; WAN024CQV; Start 65; Stop 89
tattggcggttggattaagcggtat

SEQ ID NO: 317635 - DNA, 25 bp, Artificial
  probe
  misc_feature (1)..(25): SEQ ID NO: 2187; WAN024CQV; Start 192; Stop 216
cggaacacaaggattatatggtttt

SEQ ID NO: 317636 - DNA, 25 bp, Artificial
  probe
  misc_feature (1)..(25): SEQ ID NO: 2187; WAN024CQV; Start 23; Stop 47
tttcaacctatggaggagctttctt

SEQ ID NO: 317637 - DNA, 25 bp, Artificial
  probe
  misc_feature (1)..(25): SEQ ID NO: 2187; WAN024CQV; Start 458; Stop 482
ttttgacccttcgtgtactaactaa

SEQ ID NO: 317638 - DNA, 25 bp, Artificial
  probe
  misc_feature (1)..(25): SEQ ID NO: 2187; WAN024CQV; Start 448; Stop 472
gtatcattcattttgacccttcgtg

SEQ ID NO: 317639 - DNA, 25 bp, Artificial
  probe
  misc_feature (1)..(25): SEQ ID NO: 2187; WAN024CQV; Start 457; Stop 481
attttgacccttcgtgtactaacta

SEQ ID NO: 317640 - DNA, 25 bp, Artificial
  probe
  misc_feature (1)..(25): SEQ ID NO: 2187; WAN024CQV; Start 292; Stop 316
gctcttccaattgctattgtaggat

SEQ ID NO: 317641 - DNA, 25 bp, Artificial
  probe
  misc_feature (1)..(25): SEQ ID NO: 2187; WAN024CQV; Start 450; Stop 474
atcattcattttgacccttcgtgta

SEQ ID NO: 317642 - DNA, 25 bp, Artificial
  probe
  misc_feature (1)..(25): SEQ ID NO: 2187; WAN024CQV; Start 449; Stop 473
tatcattcattttgacccttcgtgt

SEQ ID NO: 317643 - DNA, 25 bp, Artificial
  probe
  misc_feature (1)..(25): SEQ ID NO: 2187; WAN024CQV; Start 273; Stop 297
cgttgcttatttctttgtagctctt

SEQ ID NO: 317644 - DNA, 25 bp, Artificial
  probe
  misc_feature (1)..(25): SEQ ID NO: 2187; WAN024CQV; Start 238; Stop 262
ttgcaattaactccagaacttcctt

SEQ ID NO: 317645 - DNA, 25 bp, Artificial
  probe
  misc_feature (1)..(25): SEQ ID NO: 2187; WAN024CQV; Start 277; Stop 301
gcttatttctttgtagctcttccaa

SEQ ID NO: 317646 - DNA, 25 bp, Artificial
  probe
  misc_feature (1)..(25): SEQ ID NO: 2187; WAN024CQV; Start 276; Stop 300
tgcttatttctttgtagctcttcca

SEQ ID NO: 317647 - DNA, 25 bp, Artificial
  probe
  misc_feature (1)..(25): SEQ ID NO: 2187; WAN024CQV; Start 275; Stop 299
ttgcttatttctttgtagctcttcc

SEQ ID NO: 317648 - DNA, 25 bp, Artificial
  probe
  misc_feature (1)..(25): SEQ ID NO: 2187; WAN024CQV; Start 94; Stop 118
tctgcttatggagttggtaaggctg

SEQ ID NO: 317649 - DNA, 25 bp, Artificial
  probe
  misc_feature (1)..(25): SEQ ID NO: 2187; WAN024CQV; Start 93; Stop 117
gtctgcttatggagttggtaaggct

SEQ ID NO: 317650 - DNA, 25 bp, Artificial
  probe
  misc_feature (1)..(25): SEQ ID NO: 2187; WAN024CQV; Start 456; Stop 480
cattttgacccttcgtgtactaact

SEQ ID NO: 317651 - DNA, 25 bp, Artificial
  probe
  misc_feature (1)..(25): SEQ ID NO: 2187; WAN024CQV; Start 331; Stop 355
catcaaggaaatgtagcagtagcgg

SEQ ID NO: 317652 - DNA, 25 bp, Artificial
  probe
  misc_feature (1)..(25): SEQ ID NO: 2187; WAN024CQV; Start 278; Stop 302
cttatttctttgtagctcttccaat

SEQ ID NO: 317653 - DNA, 25 bp, Artificial
  probe
  misc_feature (1)..(25): SEQ ID NO: 2187; WAN024CQV; Start 191; Stop 215
ccggaacacaaggattatatggttt

SEQ ID NO: 317654 - DNA, 25 bp, Artificial
  probe
  misc_feature (1)..(25): SEQ ID NO: 2187; WAN024CQV; Start 24; Stop 48
ttcaacctatggaggagctttcttc

SEQ ID NO: 317655 - DNA, 25 bp, Artificial
  probe
  misc_feature (1)..(25): SEQ ID NO: 2188; WAN024EZW; Start 331; Stop 355
tccaagcctaacatgccatatatac

SEQ ID NO: 317656 - DNA, 25 bp, Artificial
  probe
  misc_feature (1)..(25): SEQ ID NO: 2188; WAN024EZW; Start 330; Stop 354
ctccaagcctaacatgccatatata

SEQ ID NO: 317657 - DNA, 25 bp, Artificial
  probe
  misc_feature (1)..(25): SEQ ID NO: 2188; WAN024EZW; Start 332; Stop 356
ccaagcctaacatgccatatatacc

SEQ ID NO: 317658 - DNA, 25 bp, Artificial
  probe
  misc_feature (1)..(25): SEQ ID NO: 2188; WAN024EZW; Start 329; Stop 353
tctccaagcctaacatgccatatat

SEQ ID NO: 317659 - DNA, 25 bp, Artificial
  probe
  misc_feature (1)..(25): SEQ ID NO: 2188; WAN024EZW; Start 328; Stop 352
ttctccaagcctaacatgccatata

SEQ ID NO: 317660 - DNA, 25 bp, Artificial
  probe
  misc_feature (1)..(25): SEQ ID NO: 2188; WAN024EZW; Start 278; Stop 302
gaatcccaaataccactaactcctt

SEQ ID NO: 317661 - DNA, 25 bp, Artificial
  probe
  misc_feature (1)..(25): SEQ ID NO: 2188; WAN024EZW; Start 276; Stop 300
tagaatcccaaataccactaactcc

SEQ ID NO: 317662 - DNA, 25 bp, Artificial
  probe
  misc_feature (1)..(25): SEQ ID NO: 2188; WAN024EZW; Start 269; Stop 293
caacagttagaatcccaaataccac

SEQ ID NO: 317663 - DNA, 25 bp, Artificial
  probe
  misc_feature (1)..(25): SEQ ID NO: 2188; WAN024EZW; Start 267; Stop 291
tccaacagttagaatcccaaatacc

SEQ ID NO: 317664 - DNA, 25 bp, Artificial
  probe
  misc_feature (1)..(25): SEQ ID NO: 2188; WAN024EZW; Start 266; Stop 290
ctccaacagttagaatcccaaatac

SEQ ID NO: 317665 - DNA, 25 bp, Artificial
  probe
  misc_feature (1)..(25): SEQ ID NO: 2188; WAN024EZW; Start 268; Stop 292
ccaacagttagaatcccaaatacca

SEQ ID NO: 317666 - DNA, 25 bp, Artificial
  probe
  misc_feature (1)..(25): SEQ ID NO: 2188; WAN024EZW; Start 279; Stop 303
aatcccaaataccactaactcctta

SEQ ID NO: 317667 - DNA, 25 bp, Artificial
  probe
  misc_feature (1)..(25): SEQ ID NO: 2188; WAN024EZW; Start 277; Stop 301
agaatcccaaataccactaactcct

SEQ ID NO: 317668 - DNA, 25 bp, Artificial
  probe
  misc_feature (1)..(25): SEQ ID NO: 2188; WAN024EZW; Start 281; Stop 305
tcccaaataccactaactccttaaa

SEQ ID NO: 317669 - DNA, 25 bp, Artificial
  probe
  misc_feature (1)..(25): SEQ ID NO: 2188; WAN024EZW; Start 265; Stop 289
gctccaacagttagaatcccaaata

SEQ ID NO: 317670 - DNA, 25 bp, Artificial
  probe
  misc_feature (1)..(25): SEQ ID NO: 2188; WAN024EZW; Start 282; Stop 306
cccaaataccactaactccttaaag

SEQ ID NO: 317671 - DNA, 25 bp, Artificial
  probe
  misc_feature (1)..(25): SEQ ID NO: 2188; WAN024EZW; Start 280; Stop 304
atcccaaataccactaactccttaa

SEQ ID NO: 317672 - DNA, 25 bp, Artificial
  probe
  misc_feature (1)..(25): SEQ ID NO: 2188; WAN024EZW; Start 270; Stop 294
aacagttagaatcccaaataccact

SEQ ID NO: 317673 - DNA, 25 bp, Artificial
  probe
  misc_feature (1)..(25): SEQ ID NO: 2188; WAN024EZW; Start 327; Stop 351
cttctccaagcctaacatgccatat

SEQ ID NO: 317674 - DNA, 25 bp, Artificial
  probe
  misc_feature (1)..(25): SEQ ID NO: 2188; WAN024EZW; Start 271; Stop 295
acagttagaatcccaaataccacta

SEQ ID NO: 317675 - DNA, 25 bp, Artificial
  probe
  misc_feature (1)..(25): SEQ ID NO: 2188; WAN024EZW; Start 342; Stop 366
catgccatatatacccagttccttg

SEQ ID NO: 317676 - DNA, 25 bp, Artificial
  probe
  misc_feature (1)..(25): SEQ ID NO: 2188; WAN024EZW; Start 339; Stop 363
taacatgccatatatacccagttcc

SEQ ID NO: 317677 - DNA, 25 bp, Artificial
  probe
  misc_feature (1)..(25): SEQ ID NO: 2188; WAN024EZW; Start 337; Stop 361
cctaacatgccatatatacccagtt

SEQ ID NO: 317678 - DNA, 25 bp, Artificial
  probe
  misc_feature (1)..(25): SEQ ID NO: 2188; WAN024EZW; Start 333; Stop 357
caagcctaacatgccatatataccc

SEQ ID NO: 317679 - DNA, 25 bp, Artificial
  probe
  misc_feature (1)..(25): SEQ ID NO: 2188; WAN024EZW; Start 341; Stop 365
acatgccatatatacccagttcctt

SEQ ID NO: 317680 - DNA, 25 bp, Artificial
  probe
  misc_feature (1)..(25): SEQ ID NO: 2188; WAN024EZW; Start 334; Stop 358
aagcctaacatgccatatataccca

SEQ ID NO: 317681 - DNA, 25 bp, Artificial
  probe
  misc_feature (1)..(25): SEQ ID NO: 2188; WAN024EZW; Start 204; Stop 228
cattagtttgagcaggaaagcgaaa

SEQ ID NO: 317682 - DNA, 25 bp, Artificial
  probe
  misc_feature (1)..(25): SEQ ID NO: 2188; WAN024EZW; Start 338; Stop 362
ctaacatgccatatatacccagttc

SEQ ID NO: 317683 - DNA, 25 bp, Artificial
  probe
  misc_feature (1)..(25): SEQ ID NO: 2188; WAN024EZW; Start 340; Stop 364
aacatgccatatatacccagttcct

SEQ ID NO: 317684 - DNA, 25 bp, Artificial
  probe
  misc_feature (1)..(25): SEQ ID NO: 2188; WAN024EZW; Start 335; Stop 359
agcctaacatgccatatatacccag

SEQ ID NO: 317685 - DNA, 25 bp, Artificial
  probe
  misc_feature (1)..(25): SEQ ID NO: 2188; WAN024EZW; Start 272; Stop 296
cagttagaatcccaaataccactaa

SEQ ID NO: 317686 - DNA, 25 bp, Artificial
  probe
  misc_feature (1)..(25): SEQ ID NO: 2188; WAN024EZW; Start 336; Stop 360
gcctaacatgccatatatacccagt

SEQ ID NO: 317687 - DNA, 25 bp, Artificial
  probe
  misc_feature (1)..(25): SEQ ID NO: 2188; WAN024EZW; Start 238; Stop 262
tcaaacaaggctccaataccgatac

SEQ ID NO: 317688 - DNA, 25 bp, Artificial
  probe
  misc_feature (1)..(25): SEQ ID NO: 2189; WAN024G7B; Start 190; Stop 214
cgtattgtacttgtgattgcttgta

SEQ ID NO: 317689 - DNA, 25 bp, Artificial
  probe
  misc_feature (1)..(25): SEQ ID NO: 2189; WAN024G7B; Start 195; Stop 219
tgtacttgtgattgcttgtagattc

SEQ ID NO: 317690 - DNA, 25 bp, Artificial
  probe
  misc_feature (1)..(25): SEQ ID NO: 2189; WAN024G7B; Start 188; Stop 212
gtcgtattgtacttgtgattgcttg

SEQ ID NO: 317691 - DNA, 25 bp, Artificial
  probe
  misc_feature (1)..(25): SEQ ID NO: 2189; WAN024G7B; Start 184; Stop 208
atctgtcgtattgtacttgtgattg

SEQ ID NO: 317692 - DNA, 25 bp, Artificial
  probe
  misc_feature (1)..(25): SEQ ID NO: 2189; WAN024G7B; Start 189; Stop 213
tcgtattgtacttgtgattgcttgt

SEQ ID NO: 317693 - DNA, 25 bp, Artificial
  probe
  misc_feature (1)..(25): SEQ ID NO: 2189; WAN024G7B; Start 187; Stop 211
tgtcgtattgtacttgtgattgctt

SEQ ID NO: 317694 - DNA, 25 bp, Artificial
  probe
  misc_feature (1)..(25): SEQ ID NO: 2189; WAN024G7B; Start 194; Stop 218
ttgtacttgtgattgcttgtagatt

SEQ ID NO: 317695 - DNA, 25 bp, Artificial
  probe
  misc_feature (1)..(25): SEQ ID NO: 2189; WAN024G7B; Start 197; Stop 221
tacttgtgattgcttgtagattcaa

SEQ ID NO: 317696 - DNA, 25 bp, Artificial
  probe
  misc_feature (1)..(25): SEQ ID NO: 2189; WAN024G7B; Start 193; Stop 217
attgtacttgtgattgcttgtagat

SEQ ID NO: 317697 - DNA, 25 bp, Artificial
  probe
  misc_feature (1)..(25): SEQ ID NO: 2189; WAN024G7B; Start 181; Stop 205
gtaatctgtcgtattgtacttgtga

SEQ ID NO: 317698 - DNA, 25 bp, Artificial
  probe
  misc_feature (1)..(25): SEQ ID NO: 2189; WAN024G7B; Start 186; Stop 210
ctgtcgtattgtacttgtgattgct

SEQ ID NO: 317699 - DNA, 25 bp, Artificial
  probe
  misc_feature (1)..(25): SEQ ID NO: 2189; WAN024G7B; Start 185; Stop 209
tctgtcgtattgtacttgtgattgc

SEQ ID NO: 317700 - DNA, 25 bp, Artificial
  probe
  misc_feature (1)..(25): SEQ ID NO: 2189; WAN024G7B; Start 196; Stop 220
gtacttgtgattgcttgtagattca

SEQ ID NO: 317701 - DNA, 25 bp, Artificial
  probe
  misc_feature (1)..(25): SEQ ID NO: 2189; WAN024G7B; Start 191; Stop 215
gtattgtacttgtgattgcttgtag

SEQ ID NO: 317702 - DNA, 25 bp, Artificial
  probe
  misc_feature (1)..(25): SEQ ID NO: 2189; WAN024G7B; Start 192; Stop 216
tattgtacttgtgattgcttgtaga

SEQ ID NO: 317703 - DNA, 25 bp, Artificial
  probe
  misc_feature (1)..(25): SEQ ID NO: 2189; WAN024G7B; Start 182; Stop 206
taatctgtcgtattgtacttgtgat

SEQ ID NO: 317704 - DNA, 25 bp, Artificial
  probe
  misc_feature (1)..(25): SEQ ID NO: 2189; WAN024G7B; Start 168; Stop 192
ggtcaatttcaaagtaatctgtcgt

SEQ ID NO: 317705 - DNA, 25 bp, Artificial
  probe
  misc_feature (1)..(25): SEQ ID NO: 2189; WAN024G7B; Start 166; Stop 190
acggtcaatttcaaagtaatctgtc

SEQ ID NO: 317706 - DNA, 25 bp, Artificial
  probe
  misc_feature (1)..(25): SEQ ID NO: 2189; WAN024G7B; Start 165; Stop 189
gacggtcaatttcaaagtaatctgt

SEQ ID NO: 317707 - DNA, 25 bp, Artificial
  probe
  misc_feature (1)..(25): SEQ ID NO: 2189; WAN024G7B; Start 73; Stop 97
aatatgattaaataccgcatccagc

SEQ ID NO: 317708 - DNA, 25 bp, Artificial
  probe
  misc_feature (1)..(25): SEQ ID NO: 2189; WAN024G7B; Start 75; Stop 99
tatgattaaataccgcatccagcat

SEQ ID NO: 317709 - DNA, 25 bp, Artificial
  probe
  misc_feature (1)..(25): SEQ ID NO: 2189; WAN024G7B; Start 74; Stop 98
atatgattaaataccgcatccagca

SEQ ID NO: 317710 - DNA, 25 bp, Artificial
  probe
  misc_feature (1)..(25): SEQ ID NO: 2189; WAN024G7B; Start 167; Stop 191
cggtcaatttcaaagtaatctgtcg

SEQ ID NO: 317711 - DNA, 25 bp, Artificial
  probe
  misc_feature (1)..(25): SEQ ID NO: 2189; WAN024G7B; Start 212; Stop 236
gtagattcaaagatgggacaaagat

SEQ ID NO: 317712 - DNA, 25 bp, Artificial
  probe
  misc_feature (1)..(25): SEQ ID NO: 2189; WAN024G7B; Start 204; Stop 228
gattgcttgtagattcaaagatggg

SEQ ID NO: 317713 - DNA, 25 bp, Artificial
  probe
  misc_feature (1)..(25): SEQ ID NO: 2189; WAN024G7B; Start 180; Stop 204
agtaatctgtcgtattgtacttgtg

SEQ ID NO: 317714 - DNA, 25 bp, Artificial
  probe
  misc_feature (1)..(25): SEQ ID NO: 2189; WAN024G7B; Start 205; Stop 229
attgcttgtagattcaaagatggga

SEQ ID NO: 317715 - DNA, 25 bp, Artificial
  probe
  misc_feature (1)..(25): SEQ ID NO: 2189; WAN024G7B; Start 183; Stop 207
aatctgtcgtattgtacttgtgatt

SEQ ID NO: 317716 - DNA, 25 bp, Artificial
  probe
  misc_feature (1)..(25): SEQ ID NO: 2189; WAN024G7B; Start 203; Stop 227
tgattgcttgtagattcaaagatgg

SEQ ID NO: 317717 - DNA, 25 bp, Artificial
  probe
  misc_feature (1)..(25): SEQ ID NO: 2189; WAN024G7B; Start 198; Stop 222
acttgtgattgcttgtagattcaaa

SEQ ID NO: 317718 - DNA, 25 bp, Artificial
  probe
  misc_feature (1)..(25): SEQ ID NO: 2189; WAN024G7B; Start 200; Stop 224
ttgtgattgcttgtagattcaaaga

SEQ ID NO: 317719 - DNA, 25 bp, Artificial
  probe
  misc_feature (1)..(25): SEQ ID NO: 2189; WAN024G7B; Start 201; Stop 225
tgtgattgcttgtagattcaaagat

SEQ ID NO: 317720 - DNA, 25 bp, Artificial
  probe
  misc_feature (1)..(25): SEQ ID NO: 2189; WAN024G7B; Start 199; Stop 223
cttgtgattgcttgtagattcaaag

SEQ ID NO: 317721 - DNA, 25 bp, Artificial
  probe
  misc_feature (1)..(25): SEQ ID NO: 2190; WAN024DKQ; Start 242; Stop 266
aagaagcggtcatcatctaactaat

SEQ ID NO: 317722 - DNA, 25 bp, Artificial
  probe
  misc_feature (1)..(25): SEQ ID NO: 2190; WAN024DKQ; Start 241; Stop 265
gaagaagcggtcatcatctaactaa

SEQ ID NO: 317723 - DNA, 25 bp, Artificial
  probe
  misc_feature (1)..(25): SEQ ID NO: 2190; WAN024DKQ; Start 220; Stop 244
ttccgtcttgtagaagttgttgaag

SEQ ID NO: 317724 - DNA, 25 bp, Artificial
  probe
  misc_feature (1)..(25): SEQ ID NO: 2190; WAN024DKQ; Start 240; Stop 264
tgaagaagcggtcatcatctaacta

SEQ ID NO: 317725 - DNA, 25 bp, Artificial
  probe
  misc_feature (1)..(25): SEQ ID NO: 2190; WAN024DKQ; Start 226; Stop 250
cttgtagaagttgttgaagaagcgg

SEQ ID NO: 317726 - DNA, 25 bp, Artificial
  probe
  misc_feature (1)..(25): SEQ ID NO: 2190; WAN024DKQ; Start 239; Stop 263
ttgaagaagcggtcatcatctaact

SEQ ID NO: 317727 - DNA, 25 bp, Artificial
  probe
  misc_feature (1)..(25): SEQ ID NO: 2190; WAN024DKQ; Start 238; Stop 262
gttgaagaagcggtcatcatctaac

SEQ ID NO: 317728 - DNA, 25 bp, Artificial
  probe
  misc_feature (1)..(25): SEQ ID NO: 2190; WAN024DKQ; Start 237; Stop 261
tgttgaagaagcggtcatcatctaa

SEQ ID NO: 317729 - DNA, 25 bp, Artificial
  probe
  misc_feature (1)..(25): SEQ ID NO: 2190; WAN024DKQ; Start 236; Stop 260
ttgttgaagaagcggtcatcatcta

SEQ ID NO: 317730 - DNA, 25 bp, Artificial
  probe
  misc_feature (1)..(25): SEQ ID NO: 2190; WAN024DKQ; Start 227; Stop 251
ttgtagaagttgttgaagaagcggt

SEQ ID NO: 317731 - DNA, 25 bp, Artificial
  probe
  misc_feature (1)..(25): SEQ ID NO: 2190; WAN024DKQ; Start 230; Stop 254
tagaagttgttgaagaagcggtcat

SEQ ID NO: 317732 - DNA, 25 bp, Artificial
  probe
  misc_feature (1)..(25): SEQ ID NO: 2190; WAN024DKQ; Start 219; Stop 243
tttccgtcttgtagaagttgttgaa

SEQ ID NO: 317733 - DNA, 25 bp, Artificial
  probe
  misc_feature (1)..(25): SEQ ID NO: 2190; WAN024DKQ; Start 7; Stop 31
cgcaataatcgtaaagttcttgttg

SEQ ID NO: 317734 - DNA, 25 bp, Artificial
  probe
  misc_feature (1)..(25): SEQ ID NO: 2190; WAN024DKQ; Start 223; Stop 247
cgtcttgtagaagttgttgaagaag

SEQ ID NO: 317735 - DNA, 25 bp, Artificial
  probe
  misc_feature (1)..(25): SEQ ID NO: 2190; WAN024DKQ; Start 8; Stop 32
gcaataatcgtaaagttcttgttgg

SEQ ID NO: 317736 - DNA, 25 bp, Artificial
  probe
  misc_feature (1)..(25): SEQ ID NO: 2190; WAN024DKQ; Start 224; Stop 248
gtcttgtagaagttgttgaagaagc

SEQ ID NO: 317737 - DNA, 25 bp, Artificial
  probe
  misc_feature (1)..(25): SEQ ID NO: 2190; WAN024DKQ; Start 228; Stop 252
tgtagaagttgttgaagaagcggtc

SEQ ID NO: 317738 - DNA, 25 bp, Artificial
  probe
  misc_feature (1)..(25): SEQ ID NO: 2190; WAN024DKQ; Start 20; Stop 44
aagttcttgttggacgtgttgtatc

SEQ ID NO: 317739 - DNA, 25 bp, Artificial
  probe
  misc_feature (1)..(25): SEQ ID NO: 2190; WAN024DKQ; Start 218; Stop 242
gtttccgtcttgtagaagttgttga

SEQ ID NO: 317740 - DNA, 25 bp, Artificial
  probe
  misc_feature (1)..(25): SEQ ID NO: 2190; WAN024DKQ; Start 222; Stop 246
ccgtcttgtagaagttgttgaagaa

SEQ ID NO: 317741 - DNA, 25 bp, Artificial
  probe
  misc_feature (1)..(25): SEQ ID NO: 2190; WAN024DKQ; Start 225; Stop 249
tcttgtagaagttgttgaagaagcg

SEQ ID NO: 317742 - DNA, 25 bp, Artificial
  probe
  misc_feature (1)..(25): SEQ ID NO: 2190; WAN024DKQ; Start 10; Stop 34
aataatcgtaaagttcttgttggac

SEQ ID NO: 317743 - DNA, 25 bp, Artificial
  probe
  misc_feature (1)..(25): SEQ ID NO: 2190; WAN024DKQ; Start 233; Stop 257
aagttgttgaagaagcggtcatcat

SEQ ID NO: 317744 - DNA, 25 bp, Artificial
  probe
  misc_feature (1)..(25): SEQ ID NO: 2190; WAN024DKQ; Start 229; Stop 253
gtagaagttgttgaagaagcggtca

SEQ ID NO: 317745 - DNA, 25 bp, Artificial
  probe
  misc_feature (1)..(25): SEQ ID NO: 2190; WAN024DKQ; Start 22; Stop 46
gttcttgttggacgtgttgtatctg

SEQ ID NO: 317746 - DNA, 25 bp, Artificial
  probe
  misc_feature (1)..(25): SEQ ID NO: 2190; WAN024DKQ; Start 221; Stop 245
tccgtcttgtagaagttgttgaaga

SEQ ID NO: 317747 - DNA, 25 bp, Artificial
  probe
  misc_feature (1)..(25): SEQ ID NO: 2190; WAN024DKQ; Start 23; Stop 47
ttcttgttggacgtgttgtatctga

SEQ ID NO: 317748 - DNA, 25 bp, Artificial
  probe
  misc_feature (1)..(25): SEQ ID NO: 2190; WAN024DKQ; Start 21; Stop 45
agttcttgttggacgtgttgtatct

SEQ ID NO: 317749 - DNA, 25 bp, Artificial
  probe
  misc_feature (1)..(25): SEQ ID NO: 2190; WAN024DKQ; Start 9; Stop 33
caataatcgtaaagttcttgttgga

SEQ ID NO: 317750 - DNA, 25 bp, Artificial
  probe
  misc_feature (1)..(25): SEQ ID NO: 2190; WAN024DKQ; Start 235; Stop 259
gttgttgaagaagcggtcatcatct

SEQ ID NO: 317751 - DNA, 25 bp, Artificial
  probe
  misc_feature (1)..(25): SEQ ID NO: 2190; WAN024DKQ; Start 234; Stop 258
agttgttgaagaagcggtcatcatc

SEQ ID NO: 317752 - DNA, 25 bp, Artificial
  probe
  misc_feature (1)..(25): SEQ ID NO: 2190; WAN024DKQ; Start 231; Stop 255
agaagttgttgaagaagcggtcatc

SEQ ID NO: 317753 - DNA, 25 bp, Artificial
  probe
  misc_feature (1)..(25): SEQ ID NO: 2190; WAN024DKQ; Start 57; Stop 81
caagacaatcacagttgtagttgaa

SEQ ID NO: 317754 - DNA, 25 bp, Artificial
  probe
  misc_feature (1)..(25): SEQ ID NO: 2191; WAN024AUW; Start 11; Stop 35
gtctatttggtttattcacggcttt

SEQ ID NO: 317755 - DNA, 25 bp, Artificial
  probe
  misc_feature (1)..(25): SEQ ID NO: 2191; WAN024AUW; Start 10; Stop 34
agtctatttggtttattcacggctt

SEQ ID NO: 317756 - DNA, 25 bp, Artificial
  probe
  misc_feature (1)..(25): SEQ ID NO: 2191; WAN024AUW; Start 9; Stop 33
gagtctatttggtttattcacggct

SEQ ID NO: 317757 - DNA, 25 bp, Artificial
  probe
  misc_feature (1)..(25): SEQ ID NO: 2191; WAN024AUW; Start 6; Stop 30
acggagtctatttggtttattcacg

SEQ ID NO: 317758 - DNA, 25 bp, Artificial
  probe
  misc_feature (1)..(25): SEQ ID NO: 2191; WAN024AUW; Start 2; Stop 26
tggaacggagtctatttggtttatt

SEQ ID NO: 317759 - DNA, 25 bp, Artificial
  probe
  misc_feature (1)..(25): SEQ ID NO: 2191; WAN024AUW; Start 1; Stop 25
atggaacggagtctatttggtttat

SEQ ID NO: 317760 - DNA, 25 bp, Artificial
  probe
  misc_feature (1)..(25): SEQ ID NO: 2191; WAN024AUW; Start 3; Stop 27
ggaacggagtctatttggtttattc

SEQ ID NO: 317761 - DNA, 25 bp, Artificial
  probe
  misc_feature (1)..(25): SEQ ID NO: 2191; WAN024AUW; Start 5; Stop 29
aacggagtctatttggtttattcac

SEQ ID NO: 317762 - DNA, 25 bp, Artificial
  probe
  misc_feature (1)..(25): SEQ ID NO: 2191; WAN024AUW; Start 4; Stop 28
gaacggagtctatttggtttattca

SEQ ID NO: 317763 - DNA, 25 bp, Artificial
  probe
  misc_feature (1)..(25): SEQ ID NO: 2191; WAN024AUW; Start 7; Stop 31
cggagtctatttggtttattcacgg

SEQ ID NO: 317764 - DNA, 25 bp, Artificial
  probe
  misc_feature (1)..(25): SEQ ID NO: 2191; WAN024AUW; Start 8; Stop 32
ggagtctatttggtttattcacggc

SEQ ID NO: 317765 - DNA, 25 bp, Artificial
  probe
  misc_feature (1)..(25): SEQ ID NO: 2191; WAN024AUW; Start 14; Stop 38
tatttggtttattcacggcttttct

SEQ ID NO: 317766 - DNA, 25 bp, Artificial
  probe
  misc_feature (1)..(25): SEQ ID NO: 2191; WAN024AUW; Start 12; Stop 36
tctatttggtttattcacggctttt

SEQ ID NO: 317767 - DNA, 25 bp, Artificial
  probe
  misc_feature (1)..(25): SEQ ID NO: 2191; WAN024AUW; Start 13; Stop 37
ctatttggtttattcacggcttttc

SEQ ID NO: 317768 - DNA, 25 bp, Artificial
  probe
  misc_feature (1)..(25): SEQ ID NO: 2191; WAN024AUW; Start 15; Stop 39
atttggtttattcacggcttttctg

SEQ ID NO: 317769 - DNA, 25 bp, Artificial
  probe
  misc_feature (1)..(25): SEQ ID NO: 2192; WAN024AUX; Start 11; Stop 35
gtttatttggtctattcacggcttt

SEQ ID NO: 317770 - DNA, 25 bp, Artificial
  probe
  misc_feature (1)..(25): SEQ ID NO: 2192; WAN024AUX; Start 10; Stop 34
agtttatttggtctattcacggctt

SEQ ID NO: 317771 - DNA, 25 bp, Artificial
  probe
  misc_feature (1)..(25): SEQ ID NO: 2192; WAN024AUX; Start 99; Stop 123
tatcctcctttggttaaatgccttt

SEQ ID NO: 317772 - DNA, 25 bp, Artificial
  probe
  misc_feature (1)..(25): SEQ ID NO: 2192; WAN024AUX; Start 98; Stop 122
ctatcctcctttggttaaatgcctt

SEQ ID NO: 317773 - DNA, 25 bp, Artificial
  probe
  misc_feature (1)..(25): SEQ ID NO: 2192; WAN024AUX; Start 95; Stop 119
tttctatcctcctttggttaaatgc

SEQ ID NO: 317774 - DNA, 25 bp, Artificial
  probe
  misc_feature (1)..(25): SEQ ID NO: 2192; WAN024AUX; Start 92; Stop 116
ggctttctatcctcctttggttaaa

SEQ ID NO: 317775 - DNA, 25 bp, Artificial
  probe
  misc_feature (1)..(25): SEQ ID NO: 2192; WAN024AUX; Start 96; Stop 120
ttctatcctcctttggttaaatgcc

SEQ ID NO: 317776 - DNA, 25 bp, Artificial
  probe
  misc_feature (1)..(25): SEQ ID NO: 2192; WAN024AUX; Start 9; Stop 33
gagtttatttggtctattcacggct

SEQ ID NO: 317777 - DNA, 25 bp, Artificial
  probe
  misc_feature (1)..(25): SEQ ID NO: 2192; WAN024AUX; Start 6; Stop 30
acggagtttatttggtctattcacg

SEQ ID NO: 317778 - DNA, 25 bp, Artificial
  probe
  misc_feature (1)..(25): SEQ ID NO: 2192; WAN024AUX; Start 2; Stop 26
tggaacggagtttatttggtctatt

SEQ ID NO: 317779 - DNA, 25 bp, Artificial
  probe
  misc_feature (1)..(25): SEQ ID NO: 2192; WAN024AUX; Start 1; Stop 25
atggaacggagtttatttggtctat

SEQ ID NO: 317780 - DNA, 25 bp, Artificial
  probe
  misc_feature (1)..(25): SEQ ID NO: 2192; WAN024AUX; Start 93; Stop 117
gctttctatcctcctttggttaaat

SEQ ID NO: 317781 - DNA, 25 bp, Artificial
  probe
  misc_feature (1)..(25): SEQ ID NO: 2192; WAN024AUX; Start 3; Stop 27
ggaacggagtttatttggtctattc

SEQ ID NO: 317782 - DNA, 25 bp, Artificial
  probe
  misc_feature (1)..(25): SEQ ID NO: 2192; WAN024AUX; Start 5; Stop 29
aacggagtttatttggtctattcac

SEQ ID NO: 317783 - DNA, 25 bp, Artificial
  probe
  misc_feature (1)..(25): SEQ ID NO: 2192; WAN024AUX; Start 100; Stop 124
atcctcctttggttaaatgccttta

SEQ ID NO: 317784 - DNA, 25 bp, Artificial
  probe
  misc_feature (1)..(25): SEQ ID NO: 2192; WAN024AUX; Start 4; Stop 28
gaacggagtttatttggtctattca

SEQ ID NO: 317785 - DNA, 25 bp, Artificial
  probe
  misc_feature (1)..(25): SEQ ID NO: 2192; WAN024AUX; Start 97; Stop 121
tctatcctcctttggttaaatgcct

SEQ ID NO: 317786 - DNA, 25 bp, Artificial
  probe
  misc_feature (1)..(25): SEQ ID NO: 2192; WAN024AUX; Start 7; Stop 31
cggagtttatttggtctattcacgg

SEQ ID NO: 317787 - DNA, 25 bp, Artificial
  probe
  misc_feature (1)..(25): SEQ ID NO: 2192; WAN024AUX; Start 101; Stop 125
tcctcctttggttaaatgcctttac

SEQ ID NO: 317788 - DNA, 25 bp, Artificial
  probe
  misc_feature (1)..(25): SEQ ID NO: 2192; WAN024AUX; Start 34; Stop 58
tttctgtgtttcatctgctttctgg

SEQ ID NO: 317789 - DNA, 25 bp, Artificial
  probe
  misc_feature (1)..(25): SEQ ID NO: 2192; WAN024AUX; Start 8; Stop 32
ggagtttatttggtctattcacggc

SEQ ID NO: 317790 - DNA, 25 bp, Artificial
  probe
  misc_feature (1)..(25): SEQ ID NO: 2192; WAN024AUX; Start 91; Stop 115
gggctttctatcctcctttggttaa

SEQ ID NO: 317791 - DNA, 25 bp, Artificial
  probe
  misc_feature (1)..(25): SEQ ID NO: 2192; WAN024AUX; Start 94; Stop 118
ctttctatcctcctttggttaaatg

SEQ ID NO: 317792 - DNA, 25 bp, Artificial
  probe
  misc_feature (1)..(25): SEQ ID NO: 2192; WAN024AUX; Start 86; Stop 110
gttacgggctttctatcctcctttg

SEQ ID NO: 317793 - DNA, 25 bp, Artificial
  probe
  misc_feature (1)..(25): SEQ ID NO: 2192; WAN024AUX; Start 102; Stop 126
cctcctttggttaaatgcctttacc

SEQ ID NO: 317794 - DNA, 25 bp, Artificial
  probe
  misc_feature (1)..(25): SEQ ID NO: 2192; WAN024AUX; Start 32; Stop 56
cttttctgtgtttcatctgctttct

SEQ ID NO: 317795 - DNA, 25 bp, Artificial
  probe
  misc_feature (1)..(25): SEQ ID NO: 2192; WAN024AUX; Start 13; Stop 37
ttatttggtctattcacggcttttc

SEQ ID NO: 317796 - DNA, 25 bp, Artificial
  probe
  misc_feature (1)..(25): SEQ ID NO: 2192; WAN024AUX; Start 33; Stop 57
ttttctgtgtttcatctgctttctg

SEQ ID NO: 317797 - DNA, 25 bp, Artificial
  probe
  misc_feature (1)..(25): SEQ ID NO: 2192; WAN024AUX; Start 14; Stop 38
tatttggtctattcacggcttttct

SEQ ID NO: 317798 - DNA, 25 bp, Artificial
  probe
  misc_feature (1)..(25): SEQ ID NO: 2192; WAN024AUX; Start 12; Stop 36
tttatttggtctattcacggctttt

SEQ ID NO: 317799 - DNA, 25 bp, Artificial
  probe
  misc_feature (1)..(25): SEQ ID NO: 2192; WAN024AUX; Start 31; Stop 55
gcttttctgtgtttcatctgctttc

SEQ ID NO: 317800 - DNA, 25 bp, Artificial
  probe
  misc_feature (1)..(25): SEQ ID NO: 2192; WAN024AUX; Start 15; Stop 39
atttggtctattcacggcttttctg

SEQ ID NO: 317801 - DNA, 25 bp, Artificial
  probe
  misc_feature (1)..(25): SEQ ID NO: 2192; WAN024AUX; Start 35; Stop 59
ttctgtgtttcatctgctttctggc

SEQ ID NO: 317802 - DNA, 25 bp, Artificial
  probe
  misc_feature (1)..(25): SEQ ID NO: 2193; WAN024CJB; Start 185; Stop 209
aatcctatattctgaacgagcaaca

SEQ ID NO: 317803 - DNA, 25 bp, Artificial
  probe
  misc_feature (1)..(25): SEQ ID NO: 2193; WAN024CJB; Start 442; Stop 466
atgaacgctaagcagttaagagaag

SEQ ID NO: 317804 - DNA, 25 bp, Artificial
  probe
  misc_feature (1)..(25): SEQ ID NO: 2193; WAN024CJB; Start 186; Stop 210
atcctatattctgaacgagcaacag

SEQ ID NO: 317805 - DNA, 25 bp, Artificial
  probe
  misc_feature (1)..(25): SEQ ID NO: 2193; WAN024CJB; Start 444; Stop 468
gaacgctaagcagttaagagaagag

SEQ ID NO: 317806 - DNA, 25 bp, Artificial
  probe
  misc_feature (1)..(25): SEQ ID NO: 2193; WAN024CJB; Start 68; Stop 92
ctgaagtacaacaccacactatcac

SEQ ID NO: 317807 - DNA, 25 bp, Artificial
  probe
  misc_feature (1)..(25): SEQ ID NO: 2193; WAN024CJB; Start 441; Stop 465
catgaacgctaagcagttaagagaa

SEQ ID NO: 317808 - DNA, 25 bp, Artificial
  probe
  misc_feature (1)..(25): SEQ ID NO: 2193; WAN024CJB; Start 443; Stop 467
tgaacgctaagcagttaagagaaga

SEQ ID NO: 317809 - DNA, 25 bp, Artificial
  probe
  misc_feature (1)..(25): SEQ ID NO: 2193; WAN024CJB; Start 439; Stop 463
gacatgaacgctaagcagttaagag

SEQ ID NO: 317810 - DNA, 25 bp, Artificial
  probe
  misc_feature (1)..(25): SEQ ID NO: 2193; WAN024CJB; Start 184; Stop 208
aaatcctatattctgaacgagcaac

SEQ ID NO: 317811 - DNA, 25 bp, Artificial
  probe
  misc_feature (1)..(25): SEQ ID NO: 2193; WAN024CJB; Start 437; Stop 461
cagacatgaacgctaagcagttaag

SEQ ID NO: 317812 - DNA, 25 bp, Artificial
  probe
  misc_feature (1)..(25): SEQ ID NO: 2193; WAN024CJB; Start 187; Stop 211
tcctatattctgaacgagcaacagg

SEQ ID NO: 317813 - DNA, 25 bp, Artificial
  probe
  misc_feature (1)..(25): SEQ ID NO: 2193; WAN024CJB; Start 440; Stop 464
acatgaacgctaagcagttaagaga

SEQ ID NO: 317814 - DNA, 25 bp, Artificial
  probe
  misc_feature (1)..(25): SEQ ID NO: 2193; WAN024CJB; Start 438; Stop 462
agacatgaacgctaagcagttaaga

SEQ ID NO: 317815 - DNA, 25 bp, Artificial
  probe
  misc_feature (1)..(25): SEQ ID NO: 2193; WAN024CJB; Start 449; Stop 473
ctaagcagttaagagaagagcgtgg

SEQ ID NO: 317816 - DNA, 25 bp, Artificial
  probe
  misc_feature (1)..(25): SEQ ID NO: 2193; WAN024CJB; Start 123; Stop 147
tgaagagttgggaatacttggattt

SEQ ID NO: 317817 - DNA, 25 bp, Artificial
  probe
  misc_feature (1)..(25): SEQ ID NO: 2193; WAN024CJB; Start 122; Stop 146
ttgaagagttgggaatacttggatt

SEQ ID NO: 317818 - DNA, 25 bp, Artificial
  probe
  misc_feature (1)..(25): SEQ ID NO: 2193; WAN024CJB; Start 121; Stop 145
tttgaagagttgggaatacttggat

SEQ ID NO: 317819 - DNA, 25 bp, Artificial
  probe
  misc_feature (1)..(25): SEQ ID NO: 2193; WAN024CJB; Start 117; Stop 141
tgactttgaagagttgggaatactt

SEQ ID NO: 317820 - DNA, 25 bp, Artificial
  probe
  misc_feature (1)..(25): SEQ ID NO: 2193; WAN024CJB; Start 118; Stop 142
gactttgaagagttgggaatacttg

SEQ ID NO: 317821 - DNA, 25 bp, Artificial
  probe
  misc_feature (1)..(25): SEQ ID NO: 2193; WAN024CJB; Start 108; Stop 132
aaataaggctgactttgaagagttg

SEQ ID NO: 317822 - DNA, 25 bp, Artificial
  probe
  misc_feature (1)..(25): SEQ ID NO: 2193; WAN024CJB; Start 116; Stop 140
ctgactttgaagagttgggaatact

SEQ ID NO: 317823 - DNA, 25 bp, Artificial
  probe
  misc_feature (1)..(25): SEQ ID NO: 2193; WAN024CJB; Start 250; Stop 274
gtacggcaattcaaactaaacctag

SEQ ID NO: 317824 - DNA, 25 bp, Artificial
  probe
  misc_feature (1)..(25): SEQ ID NO: 2193; WAN024CJB; Start 120; Stop 144
ctttgaagagttgggaatacttgga

SEQ ID NO: 317825 - DNA, 25 bp, Artificial
  probe
  misc_feature (1)..(25): SEQ ID NO: 2193; WAN024CJB; Start 119; Stop 143
actttgaagagttgggaatacttgg

SEQ ID NO: 317826 - DNA, 25 bp, Artificial
  probe
  misc_feature (1)..(25): SEQ ID NO: 2193; WAN024CJB; Start 109; Stop 133
aataaggctgactttgaagagttgg

SEQ ID NO: 317827 - DNA, 25 bp, Artificial
  probe
  misc_feature (1)..(25): SEQ ID NO: 2193; WAN024CJB; Start 282; Stop 306
attctttgaaatgcgtgaggaactt

SEQ ID NO: 317828 - DNA, 25 bp, Artificial
  probe
  misc_feature (1)..(25): SEQ ID NO: 2193; WAN024CJB; Start 69; Stop 93
tgaagtacaacaccacactatcacg

SEQ ID NO: 317829 - DNA, 25 bp, Artificial
  probe
  misc_feature (1)..(25): SEQ ID NO: 2193; WAN024CJB; Start 67; Stop 91
gctgaagtacaacaccacactatca

SEQ ID NO: 317830 - DNA, 25 bp, Artificial
  probe
  misc_feature (1)..(25): SEQ ID NO: 2193; WAN024CJB; Start 66; Stop 90
tgctgaagtacaacaccacactatc

SEQ ID NO: 317831 - DNA, 25 bp, Artificial
  probe
  misc_feature (1)..(25): SEQ ID NO: 2193; WAN024CJB; Start 436; Stop 460
acagacatgaacgctaagcagttaa

SEQ ID NO: 317832 - DNA, 25 bp, Artificial
  probe
  misc_feature (1)..(25): SEQ ID NO: 2193; WAN024CJB; Start 435; Stop 459
aacagacatgaacgctaagcagtta

SEQ ID NO: 317833 - DNA, 25 bp, Artificial
  probe
  misc_feature (1)..(25): SEQ ID NO: 2193; WAN024CJB; Start 434; Stop 458
taacagacatgaacgctaagcagtt

SEQ ID NO: 317834 - DNA, 25 bp, Artificial
  probe
  misc_feature (1)..(25): SEQ ID NO: 2193; WAN024CJB; Start 296; Stop 320
gtgaggaactttctgaaattcgtct

SEQ ID NO: 317835 - DNA, 25 bp, Artificial
  probe
  misc_feature (1)..(25): SEQ ID NO: 2194; WAN024DEY; Start 677; Stop 701
atgagttatctgaaccttatgaagc

SEQ ID NO: 317836 - DNA, 25 bp, Artificial
  probe
  misc_feature (1)..(25): SEQ ID NO: 2194; WAN024DEY; Start 678; Stop 702
tgagttatctgaaccttatgaagct

SEQ ID NO: 317837 - DNA, 25 bp, Artificial
  probe
  misc_feature (1)..(25): SEQ ID NO: 2194; WAN024DEY; Start 70; Stop 94
taccgaaacaatgataggacaacaa

SEQ ID NO: 317838 - DNA, 25 bp, Artificial
  probe
  misc_feature (1)..(25): SEQ ID NO: 2194; WAN024DEY; Start 68; Stop 92
tctaccgaaacaatgataggacaac

SEQ ID NO: 317839 - DNA, 25 bp, Artificial
  probe
  misc_feature (1)..(25): SEQ ID NO: 2194; WAN024DEY; Start 443; Stop 467
gtggatttggctttgtgattcttaa

SEQ ID NO: 317840 - DNA, 25 bp, Artificial
  probe
  misc_feature (1)..(25): SEQ ID NO: 2194; WAN024DEY; Start 444; Stop 468
tggatttggctttgtgattcttaaa

SEQ ID NO: 317841 - DNA, 25 bp, Artificial
  probe
  misc_feature (1)..(25): SEQ ID NO: 2194; WAN024DEY; Start 469; Stop 493
aataatgaactgattgctgggattt

SEQ ID NO: 317842 - DNA, 25 bp, Artificial
  probe
  misc_feature (1)..(25): SEQ ID NO: 2194; WAN024DEY; Start 468; Stop 492
aaataatgaactgattgctgggatt

SEQ ID NO: 317843 - DNA, 25 bp, Artificial
  probe
  misc_feature (1)..(25): SEQ ID NO: 2194; WAN024DEY; Start 69; Stop 93
ctaccgaaacaatgataggacaaca

SEQ ID NO: 317844 - DNA, 25 bp, Artificial
  probe
  misc_feature (1)..(25): SEQ ID NO: 2194; WAN024DEY; Start 470; Stop 494
ataatgaactgattgctgggatttc

SEQ ID NO: 317845 - DNA, 25 bp, Artificial
  probe
  misc_feature (1)..(25): SEQ ID NO: 2194; WAN024DEY; Start 49; Stop 73
aaatctcaaattggaactgtctacc

SEQ ID NO: 317846 - DNA, 25 bp, Artificial
  probe
  misc_feature (1)..(25): SEQ ID NO: 2194; WAN024DEY; Start 32; Stop 56
tggttctctatggtcttaaatctca

SEQ ID NO: 317847 - DNA, 25 bp, Artificial
  probe
  misc_feature (1)..(25): SEQ ID NO: 2194; WAN024DEY; Start 382; Stop 406
gaagaatggtcacaggatttacagg

SEQ ID NO: 317848 - DNA, 25 bp, Artificial
  probe
  misc_feature (1)..(25): SEQ ID NO: 2194; WAN024DEY; Start 381; Stop 405
ggaagaatggtcacaggatttacag

SEQ ID NO: 317849 - DNA, 25 bp, Artificial
  probe
  misc_feature (1)..(25): SEQ ID NO: 2194; WAN024DEY; Start 50; Stop 74
aatctcaaattggaactgtctaccg

SEQ ID NO: 317850 - DNA, 25 bp, Artificial
  probe
  misc_feature (1)..(25): SEQ ID NO: 2194; WAN024DEY; Start 53; Stop 77
ctcaaattggaactgtctaccgaaa

SEQ ID NO: 317851 - DNA, 25 bp, Artificial
  probe
  misc_feature (1)..(25): SEQ ID NO: 2194; WAN024DEY; Start 537; Stop 561
aactagaccaaacgaacaaggaaat

SEQ ID NO: 317852 - DNA, 25 bp, Artificial
  probe
  misc_feature (1)..(25): SEQ ID NO: 2194; WAN024DEY; Start 378; Stop 402
tacggaagaatggtcacaggattta

SEQ ID NO: 317853 - DNA, 25 bp, Artificial
  probe
  misc_feature (1)..(25): SEQ ID NO: 2194; WAN024DEY; Start 71; Stop 95
accgaaacaatgataggacaacaag

SEQ ID NO: 317854 - DNA, 25 bp, Artificial
  probe
  misc_feature (1)..(25): SEQ ID NO: 2194; WAN024DEY; Start 42; Stop 66
tggtcttaaatctcaaattggaact

SEQ ID NO: 317855 - DNA, 25 bp, Artificial
  probe
  misc_feature (1)..(25): SEQ ID NO: 2194; WAN024DEY; Start 442; Stop 466
ggtggatttggctttgtgattctta

SEQ ID NO: 317856 - DNA, 25 bp, Artificial
  probe
  misc_feature (1)..(25): SEQ ID NO: 2194; WAN024DEY; Start 54; Stop 78
tcaaattggaactgtctaccgaaac

SEQ ID NO: 317857 - DNA, 25 bp, Artificial
  probe
  misc_feature (1)..(25): SEQ ID NO: 2194; WAN024DEY; Start 43; Stop 67
ggtcttaaatctcaaattggaactg

SEQ ID NO: 317858 - DNA, 25 bp, Artificial
  probe
  misc_feature (1)..(25): SEQ ID NO: 2194; WAN024DEY; Start 471; Stop 495
taatgaactgattgctgggatttcc

SEQ ID NO: 317859 - DNA, 25 bp, Artificial
  probe
  misc_feature (1)..(25): SEQ ID NO: 2194; WAN024DEY; Start 51; Stop 75
atctcaaattggaactgtctaccga

SEQ ID NO: 317860 - DNA, 25 bp, Artificial
  probe
  misc_feature (1)..(25): SEQ ID NO: 2194; WAN024DEY; Start 376; Stop 400
tctacggaagaatggtcacaggatt

SEQ ID NO: 317861 - DNA, 25 bp, Artificial
  probe
  misc_feature (1)..(25): SEQ ID NO: 2194; WAN024DEY; Start 62; Stop 86
gaactgtctaccgaaacaatgatag

SEQ ID NO: 317862 - DNA, 25 bp, Artificial
  probe
  misc_feature (1)..(25): SEQ ID NO: 2194; WAN024DEY; Start 538; Stop 562
actagaccaaacgaacaaggaaatg

SEQ ID NO: 317863 - DNA, 25 bp, Artificial
  probe
  misc_feature (1)..(25): SEQ ID NO: 2194; WAN024DEY; Start 63; Stop 87
aactgtctaccgaaacaatgatagg

SEQ ID NO: 317864 - DNA, 25 bp, Artificial
  probe
  misc_feature (1)..(25): SEQ ID NO: 2194; WAN024DEY; Start 61; Stop 85
ggaactgtctaccgaaacaatgata

SEQ ID NO: 317865 - DNA, 25 bp, Artificial
  probe
  misc_feature (1)..(25): SEQ ID NO: 2194; WAN024DEY; Start 536; Stop 560
caactagaccaaacgaacaaggaaa

SEQ ID NO: 317866 - DNA, 25 bp, Artificial
  probe
  misc_feature (1)..(25): SEQ ID NO: 2194; WAN024DEY; Start 52; Stop 76
tctcaaattggaactgtctaccgaa

SEQ ID NO: 317867 - DNA, 25 bp, Artificial
  probe
  misc_feature (1)..(25): SEQ ID NO: 2194; WAN024DEY; Start 33; Stop 57
ggttctctatggtcttaaatctcaa

SEQ ID NO: 317868 - DNA, 25 bp, Artificial
  probe
  misc_feature (1)..(25): SEQ ID NO: 2195; WAN024CBT; Start 133; Stop 157
ggaggagcaatcagtctagttagaa

SEQ ID NO: 317869 - DNA, 25 bp, Artificial
  probe
  misc_feature (1)..(25): SEQ ID NO: 2195; WAN024CBT; Start 299; Stop 323
ttggcgatgctattacaacaatctg

SEQ ID NO: 317870 - DNA, 25 bp, Artificial
  probe
  misc_feature (1)..(25): SEQ ID NO: 2195; WAN024CBT; Start 131; Stop 155
gtggaggagcaatcagtctagttag

SEQ ID NO: 317871 - DNA, 25 bp, Artificial
  probe
  misc_feature (1)..(25): SEQ ID NO: 2195; WAN024CBT; Start 132; Stop 156
tggaggagcaatcagtctagttaga

SEQ ID NO: 317872 - DNA, 25 bp, Artificial
  probe
  misc_feature (1)..(25): SEQ ID NO: 2195; WAN024CBT; Start 330; Stop 354
caatgatgtaaataggagagaccca

SEQ ID NO: 317873 - DNA, 25 bp, Artificial
  probe
  misc_feature (1)..(25): SEQ ID NO: 2195; WAN024CBT; Start 333; Stop 357
tgatgtaaataggagagacccaaat

SEQ ID NO: 317874 - DNA, 25 bp, Artificial
  probe
  misc_feature (1)..(25): SEQ ID NO: 2195; WAN024CBT; Start 332; Stop 356
atgatgtaaataggagagacccaaa

SEQ ID NO: 317875 - DNA, 25 bp, Artificial
  probe
  misc_feature (1)..(25): SEQ ID NO: 2195; WAN024CBT; Start 331; Stop 355
aatgatgtaaataggagagacccaa

SEQ ID NO: 317876 - DNA, 25 bp, Artificial
  probe
  misc_feature (1)..(25): SEQ ID NO: 2195; WAN024CBT; Start 297; Stop 321
aattggcgatgctattacaacaatc

SEQ ID NO: 317877 - DNA, 25 bp, Artificial
  probe
  misc_feature (1)..(25): SEQ ID NO: 2195; WAN024CBT; Start 298; Stop 322
attggcgatgctattacaacaatct

SEQ ID NO: 317878 - DNA, 25 bp, Artificial
  probe
  misc_feature (1)..(25): SEQ ID NO: 2195; WAN024CBT; Start 134; Stop 158
gaggagcaatcagtctagttagaaa

SEQ ID NO: 317879 - DNA, 25 bp, Artificial
  probe
  misc_feature (1)..(25): SEQ ID NO: 2195; WAN024CBT; Start 127; Stop 151
ttaggtggaggagcaatcagtctag

SEQ ID NO: 317880 - DNA, 25 bp, Artificial
  probe
  misc_feature (1)..(25): SEQ ID NO: 2195; WAN024CBT; Start 135; Stop 159
aggagcaatcagtctagttagaaat

SEQ ID NO: 317881 - DNA, 25 bp, Artificial
  probe
  misc_feature (1)..(25): SEQ ID NO: 2195; WAN024CBT; Start 329; Stop 353
acaatgatgtaaataggagagaccc

SEQ ID NO: 317882 - DNA, 25 bp, Artificial
  probe
  misc_feature (1)..(25): SEQ ID NO: 2195; WAN024CBT; Start 325; Stop 349
gccaacaatgatgtaaataggagag

SEQ ID NO: 317883 - DNA, 25 bp, Artificial
  probe
  misc_feature (1)..(25): SEQ ID NO: 2195; WAN024CBT; Start 334; Stop 358
gatgtaaataggagagacccaaatt

SEQ ID NO: 317884 - DNA, 25 bp, Artificial
  probe
  misc_feature (1)..(25): SEQ ID NO: 2195; WAN024CBT; Start 300; Stop 324
tggcgatgctattacaacaatctgg

SEQ ID NO: 317885 - DNA, 25 bp, Artificial
  probe
  misc_feature (1)..(25): SEQ ID NO: 2195; WAN024CBT; Start 136; Stop 160
ggagcaatcagtctagttagaaatt

SEQ ID NO: 317886 - DNA, 25 bp, Artificial
  probe
  misc_feature (1)..(25): SEQ ID NO: 2195; WAN024CBT; Start 130; Stop 154
ggtggaggagcaatcagtctagtta

SEQ ID NO: 317887 - DNA, 25 bp, Artificial
  probe
  misc_feature (1)..(25): SEQ ID NO: 2195; WAN024CBT; Start 260; Stop 284
cactgtctgctattaatggatttgc

SEQ ID NO: 317888 - DNA, 25 bp, Artificial
  probe
  misc_feature (1)..(25): SEQ ID NO: 2195; WAN024CBT; Start 328; Stop 352
aacaatgatgtaaataggagagacc

SEQ ID NO: 317889 - DNA, 25 bp, Artificial
  probe
  misc_feature (1)..(25): SEQ ID NO: 2195; WAN024CBT; Start 326; Stop 350
ccaacaatgatgtaaataggagaga

SEQ ID NO: 317890 - DNA, 25 bp, Artificial
  probe
  misc_feature (1)..(25): SEQ ID NO: 2195; WAN024CBT; Start 126; Stop 150
tttaggtggaggagcaatcagtcta

SEQ ID NO: 317891 - DNA, 25 bp, Artificial
  probe
  misc_feature (1)..(25): SEQ ID NO: 2195; WAN024CBT; Start 270; Stop 294
tattaatggatttgcagcttggatg

SEQ ID NO: 317892 - DNA, 25 bp, Artificial
  probe
  misc_feature (1)..(25): SEQ ID NO: 2195; WAN024CBT; Start 269; Stop 293
ctattaatggatttgcagcttggat

SEQ ID NO: 317893 - DNA, 25 bp, Artificial
  probe
  misc_feature (1)..(25): SEQ ID NO: 2195; WAN024CBT; Start 340; Stop 364
aataggagagacccaaatttaaacg

SEQ ID NO: 317894 - DNA, 25 bp, Artificial
  probe
  misc_feature (1)..(25): SEQ ID NO: 2195; WAN024CBT; Start 341; Stop 365
ataggagagacccaaatttaaacgc

SEQ ID NO: 317895 - DNA, 25 bp, Artificial
  probe
  misc_feature (1)..(25): SEQ ID NO: 2195; WAN024CBT; Start 128; Stop 152
taggtggaggagcaatcagtctagt

SEQ ID NO: 317896 - DNA, 25 bp, Artificial
  probe
  misc_feature (1)..(25): SEQ ID NO: 2195; WAN024CBT; Start 295; Stop 319
tcaattggcgatgctattacaacaa

SEQ ID NO: 317897 - DNA, 25 bp, Artificial
  probe
  misc_feature (1)..(25): SEQ ID NO: 2195; WAN024CBT; Start 327; Stop 351
caacaatgatgtaaataggagagac

SEQ ID NO: 317898 - DNA, 25 bp, Artificial
  probe
  misc_feature (1)..(25): SEQ ID NO: 2195; WAN024CBT; Start 271; Stop 295
attaatggatttgcagcttggatgt

SEQ ID NO: 317899 - DNA, 25 bp, Artificial
  probe
  misc_feature (1)..(25): SEQ ID NO: 2195; WAN024CBT; Start 292; Stop 316
atgtcaattggcgatgctattacaa

SEQ ID NO: 317900 - DNA, 25 bp, Artificial
  probe
  misc_feature (1)..(25): SEQ ID NO: 2195; WAN024CBT; Start 257; Stop 281
ttgcactgtctgctattaatggatt

SEQ ID NO: 317901 - DNA, 25 bp, Artificial
  probe
  misc_feature (1)..(25): SEQ ID NO: 2196; WAN024CBX; Start 81; Stop 105
taactggtggaatagtagaggtagt

SEQ ID NO: 317902 - DNA, 25 bp, Artificial
  probe
  misc_feature (1)..(25): SEQ ID NO: 2196; WAN024CBX; Start 80; Stop 104
gtaactggtggaatagtagaggtag

SEQ ID NO: 317903 - DNA, 25 bp, Artificial
  probe
  misc_feature (1)..(25): SEQ ID NO: 2196; WAN024CBX; Start 79; Stop 103
cgtaactggtggaatagtagaggta

SEQ ID NO: 317904 - DNA, 25 bp, Artificial
  probe
  misc_feature (1)..(25): SEQ ID NO: 2196; WAN024CBX; Start 77; Stop 101
gtcgtaactggtggaatagtagagg

SEQ ID NO: 317905 - DNA, 25 bp, Artificial
  probe
  misc_feature (1)..(25): SEQ ID NO: 2196; WAN024CBX; Start 76; Stop 100
ggtcgtaactggtggaatagtagag

SEQ ID NO: 317906 - DNA, 25 bp, Artificial
  probe
  misc_feature (1)..(25): SEQ ID NO: 2196; WAN024CBX; Start 347; Stop 371
ctgacggtagcttagatggttatat

SEQ ID NO: 317907 - DNA, 25 bp, Artificial
  probe
  misc_feature (1)..(25): SEQ ID NO: 2196; WAN024CBX; Start 348; Stop 372
tgacggtagcttagatggttatatt

SEQ ID NO: 317908 - DNA, 25 bp, Artificial
  probe
  misc_feature (1)..(25): SEQ ID NO: 2196; WAN024CBX; Start 78; Stop 102
tcgtaactggtggaatagtagaggt

SEQ ID NO: 317909 - DNA, 25 bp, Artificial
  probe
  misc_feature (1)..(25): SEQ ID NO: 2196; WAN024CBX; Start 75; Stop 99
tggtcgtaactggtggaatagtaga

SEQ ID NO: 317910 - DNA, 25 bp, Artificial
  probe
  misc_feature (1)..(25): SEQ ID NO: 2196; WAN024CBX; Start 135; Stop 159
catctatagtggtggtgcaacaatt

SEQ ID NO: 317911 - DNA, 25 bp, Artificial
  probe
  misc_feature (1)..(25): SEQ ID NO: 2196; WAN024CBX; Start 152; Stop 176
caacaatttattctgcttatgcgat

SEQ ID NO: 317912 - DNA, 25 bp, Artificial
  probe
  misc_feature (1)..(25): SEQ ID NO: 2196; WAN024CBX; Start 83; Stop 107
actggtggaatagtagaggtagttt

SEQ ID NO: 317913 - DNA, 25 bp, Artificial
  probe
  misc_feature (1)..(25): SEQ ID NO: 2196; WAN024CBX; Start 82; Stop 106
aactggtggaatagtagaggtagtt

SEQ ID NO: 317914 - DNA, 25 bp, Artificial
  probe
  misc_feature (1)..(25): SEQ ID NO: 2196; WAN024CBX; Start 153; Stop 177
aacaatttattctgcttatgcgata

SEQ ID NO: 317915 - DNA, 25 bp, Artificial
  probe
  misc_feature (1)..(25): SEQ ID NO: 2196; WAN024CBX; Start 140; Stop 164
atagtggtggtgcaacaatttattc

SEQ ID NO: 317916 - DNA, 25 bp, Artificial
  probe
  misc_feature (1)..(25): SEQ ID NO: 2196; WAN024CBX; Start 137; Stop 161
tctatagtggtggtgcaacaattta

SEQ ID NO: 317917 - DNA, 25 bp, Artificial
  probe
  misc_feature (1)..(25): SEQ ID NO: 2196; WAN024CBX; Start 138; Stop 162
ctatagtggtggtgcaacaatttat

SEQ ID NO: 317918 - DNA, 25 bp, Artificial
  probe
  misc_feature (1)..(25): SEQ ID NO: 2196; WAN024CBX; Start 154; Stop 178
acaatttattctgcttatgcgataa

SEQ ID NO: 317919 - DNA, 25 bp, Artificial
  probe
  misc_feature (1)..(25): SEQ ID NO: 2196; WAN024CBX; Start 284; Stop 308
acgttgcactaactgttactggatt

SEQ ID NO: 317920 - DNA, 25 bp, Artificial
  probe
  misc_feature (1)..(25): SEQ ID NO: 2196; WAN024CBX; Start 136; Stop 160
atctatagtggtggtgcaacaattt

SEQ ID NO: 317921 - DNA, 25 bp, Artificial
  probe
  misc_feature (1)..(25): SEQ ID NO: 2196; WAN024CBX; Start 141; Stop 165
tagtggtggtgcaacaatttattct

SEQ ID NO: 317922 - DNA, 25 bp, Artificial
  probe
  misc_feature (1)..(25): SEQ ID NO: 2196; WAN024CBX; Start 139; Stop 163
tatagtggtggtgcaacaatttatt

SEQ ID NO: 317923 - DNA, 25 bp, Artificial
  probe
  misc_feature (1)..(25): SEQ ID NO: 2196; WAN024CBX; Start 349; Stop 373
gacggtagcttagatggttatattt

SEQ ID NO: 317924 - DNA, 25 bp, Artificial
  probe
  misc_feature (1)..(25): SEQ ID NO: 2196; WAN024CBX; Start 346; Stop 370
gctgacggtagcttagatggttata

SEQ ID NO: 317925 - DNA, 25 bp, Artificial
  probe
  misc_feature (1)..(25): SEQ ID NO: 2196; WAN024CBX; Start 198; Stop 222
tagaggggctattacgagaacatta

SEQ ID NO: 317926 - DNA, 25 bp, Artificial
  probe
  misc_feature (1)..(25): SEQ ID NO: 2196; WAN024CBX; Start 85; Stop 109
tggtggaatagtagaggtagttttg

SEQ ID NO: 317927 - DNA, 25 bp, Artificial
  probe
  misc_feature (1)..(25): SEQ ID NO: 2196; WAN024CBX; Start 84; Stop 108
ctggtggaatagtagaggtagtttt

SEQ ID NO: 317928 - DNA, 25 bp, Artificial
  probe
  misc_feature (1)..(25): SEQ ID NO: 2196; WAN024CBX; Start 285; Stop 309
cgttgcactaactgttactggattt

SEQ ID NO: 317929 - DNA, 25 bp, Artificial
  probe
  misc_feature (1)..(25): SEQ ID NO: 2196; WAN024CBX; Start 86; Stop 110
ggtggaatagtagaggtagttttgc

SEQ ID NO: 317930 - DNA, 25 bp, Artificial
  probe
  misc_feature (1)..(25): SEQ ID NO: 2196; WAN024CBX; Start 309; Stop 333
ttcactaggtggagcaatcgcatat

SEQ ID NO: 317931 - DNA, 25 bp, Artificial
  probe
  misc_feature (1)..(25): SEQ ID NO: 2196; WAN024CBX; Start 289; Stop 313
gcactaactgttactggattttcac

SEQ ID NO: 317932 - DNA, 25 bp, Artificial
  probe
  misc_feature (1)..(25): SEQ ID NO: 2196; WAN024CBX; Start 142; Stop 166
agtggtggtgcaacaatttattctg

SEQ ID NO: 317933 - DNA, 25 bp, Artificial
  probe
  misc_feature (1)..(25): SEQ ID NO: 2196; WAN024CBX; Start 294; Stop 318
aactgttactggattttcactaggt

SEQ ID NO: 317934 - DNA, 25 bp, Artificial
  probe
  misc_feature (1)..(25): SEQ ID NO: 2197; WAN024CEV; Start 144; Stop 168
aagagcagatgatattgtggtggtg

SEQ ID NO: 317935 - DNA, 25 bp, Artificial
  probe
  misc_feature (1)..(25): SEQ ID NO: 2197; WAN024CEV; Start 217; Stop 241
aagttagtcaatccacgtattaccg

SEQ ID NO: 317936 - DNA, 25 bp, Artificial
  probe
  misc_feature (1)..(25): SEQ ID NO: 2197; WAN024CEV; Start 216; Stop 240
gaagttagtcaatccacgtattacc

SEQ ID NO: 317937 - DNA, 25 bp, Artificial
  probe
  misc_feature (1)..(25): SEQ ID NO: 2197; WAN024CEV; Start 47; Stop 71
atttagaatttgctggcgaggataa

SEQ ID NO: 317938 - DNA, 25 bp, Artificial
  probe
  misc_feature (1)..(25): SEQ ID NO: 2197; WAN024CEV; Start 139; Stop 163
gttcaaagagcagatgatattgtgg

SEQ ID NO: 317939 - DNA, 25 bp, Artificial
  probe
  misc_feature (1)..(25): SEQ ID NO: 2197; WAN024CEV; Start 138; Stop 162
tgttcaaagagcagatgatattgtg

SEQ ID NO: 317940 - DNA, 25 bp, Artificial
  probe
  misc_feature (1)..(25): SEQ ID NO: 2197; WAN024CEV; Start 140; Stop 164
ttcaaagagcagatgatattgtggt

SEQ ID NO: 317941 - DNA, 25 bp, Artificial
  probe
  misc_feature (1)..(25): SEQ ID NO: 2197; WAN024CEV; Start 49; Stop 73
ttagaatttgctggcgaggataaag

SEQ ID NO: 317942 - DNA, 25 bp, Artificial
  probe
  misc_feature (1)..(25): SEQ ID NO: 2197; WAN024CEV; Start 48; Stop 72
tttagaatttgctggcgaggataaa

SEQ ID NO: 317943 - DNA, 25 bp, Artificial
  probe
  misc_feature (1)..(25): SEQ ID NO: 2197; WAN024CEV; Start 215; Stop 239
tgaagttagtcaatccacgtattac

SEQ ID NO: 317944 - DNA, 25 bp, Artificial
  probe
  misc_feature (1)..(25): SEQ ID NO: 2197; WAN024CEV; Start 141; Stop 165
tcaaagagcagatgatattgtggtg

SEQ ID NO: 317945 - DNA, 25 bp, Artificial
  probe
  misc_feature (1)..(25): SEQ ID NO: 2197; WAN024CEV; Start 137; Stop 161
atgttcaaagagcagatgatattgt

SEQ ID NO: 317946 - DNA, 25 bp, Artificial
  probe
  misc_feature (1)..(25): SEQ ID NO: 2197; WAN024CEV; Start 95; Stop 119
gacggctaactgtcttatcaagaag

SEQ ID NO: 317947 - DNA, 25 bp, Artificial
  probe
  misc_feature (1)..(25): SEQ ID NO: 2197; WAN024CEV; Start 213; Stop 237
tgtgaagttagtcaatccacgtatt

SEQ ID NO: 317948 - DNA, 25 bp, Artificial
  probe
  misc_feature (1)..(25): SEQ ID NO: 2197; WAN024CEV; Start 205; Stop 229
gaggaacgtgtgaagttagtcaatc

SEQ ID NO: 317949 - DNA, 25 bp, Artificial
  probe
  misc_feature (1)..(25): SEQ ID NO: 2197; WAN024CEV; Start 46; Stop 70
aatttagaatttgctggcgaggata

SEQ ID NO: 317950 - DNA, 25 bp, Artificial
  probe
  misc_feature (1)..(25): SEQ ID NO: 2197; WAN024CEV; Start 135; Stop 159
tgatgttcaaagagcagatgatatt

SEQ ID NO: 317951 - DNA, 25 bp, Artificial
  probe
  misc_feature (1)..(25): SEQ ID NO: 2197; WAN024CEV; Start 212; Stop 236
gtgtgaagttagtcaatccacgtat

SEQ ID NO: 317952 - DNA, 25 bp, Artificial
  probe
  misc_feature (1)..(25): SEQ ID NO: 2197; WAN024CEV; Start 136; Stop 160
gatgttcaaagagcagatgatattg

SEQ ID NO: 317953 - DNA, 25 bp, Artificial
  probe
  misc_feature (1)..(25): SEQ ID NO: 2197; WAN024CEV; Start 143; Stop 167
aaagagcagatgatattgtggtggt

SEQ ID NO: 317954 - DNA, 25 bp, Artificial
  probe
  misc_feature (1)..(25): SEQ ID NO: 2197; WAN024CEV; Start 134; Stop 158
ctgatgttcaaagagcagatgatat

SEQ ID NO: 317955 - DNA, 25 bp, Artificial
  probe
  misc_feature (1)..(25): SEQ ID NO: 2197; WAN024CEV; Start 151; Stop 175
gatgatattgtggtggtgcttcctg

SEQ ID NO: 317956 - DNA, 25 bp, Artificial
  probe
  misc_feature (1)..(25): SEQ ID NO: 2197; WAN024CEV; Start 149; Stop 173
cagatgatattgtggtggtgcttcc

SEQ ID NO: 317957 - DNA, 25 bp, Artificial
  probe
  misc_feature (1)..(25): SEQ ID NO: 2197; WAN024CEV; Start 142; Stop 166
caaagagcagatgatattgtggtgg

SEQ ID NO: 317958 - DNA, 25 bp, Artificial
  probe
  misc_feature (1)..(25): SEQ ID NO: 2197; WAN024CEV; Start 214; Stop 238
gtgaagttagtcaatccacgtatta

SEQ ID NO: 317959 - DNA, 25 bp, Artificial
  probe
  misc_feature (1)..(25): SEQ ID NO: 2197; WAN024CEV; Start 204; Stop 228
tgaggaacgtgtgaagttagtcaat

SEQ ID NO: 317960 - DNA, 25 bp, Artificial
  probe
  misc_feature (1)..(25): SEQ ID NO: 2197; WAN024CEV; Start 150; Stop 174
agatgatattgtggtggtgcttcct

SEQ ID NO: 317961 - DNA, 25 bp, Artificial
  probe
  misc_feature (1)..(25): SEQ ID NO: 2197; WAN024CEV; Start 98; Stop 122
ggctaactgtcttatcaagaagcta

SEQ ID NO: 317962 - DNA, 25 bp, Artificial
  probe
  misc_feature (1)..(25): SEQ ID NO: 2197; WAN024CEV; Start 50; Stop 74
tagaatttgctggcgaggataaagt

SEQ ID NO: 317963 - DNA, 25 bp, Artificial
  probe
  misc_feature (1)..(25): SEQ ID NO: 2197; WAN024CEV; Start 220; Stop 244
ttagtcaatccacgtattaccgcag

SEQ ID NO: 317964 - DNA, 25 bp, Artificial
  probe
  misc_feature (1)..(25): SEQ ID NO: 2197; WAN024CEV; Start 218; Stop 242
agttagtcaatccacgtattaccgc

SEQ ID NO: 317965 - DNA, 25 bp, Artificial
  probe
  misc_feature (1)..(25): SEQ ID NO: 2197; WAN024CEV; Start 94; Stop 118
ggacggctaactgtcttatcaagaa

SEQ ID NO: 317966 - DNA, 25 bp, Artificial
  probe
  misc_feature (1)..(25): SEQ ID NO: 2197; WAN024CEV; Start 45; Stop 69
caatttagaatttgctggcgaggat

SEQ ID NO: 317967 - DNA, 25 bp, Artificial
  probe
  misc_feature (1)..(25): SEQ ID NO: 2198; WAN024CBU; Start 27; Stop 51
tgttgtgattgatgaagaagagatg

SEQ ID NO: 317968 - DNA, 25 bp, Artificial
  probe
  misc_feature (1)..(25): SEQ ID NO: 2198; WAN024CBU; Start 28; Stop 52
gttgtgattgatgaagaagagatga

SEQ ID NO: 317969 - DNA, 25 bp, Artificial
  probe
  misc_feature (1)..(25): SEQ ID NO: 2198; WAN024CBU; Start 31; Stop 55
gtgattgatgaagaagagatgatgt

SEQ ID NO: 317970 - DNA, 25 bp, Artificial
  probe
  misc_feature (1)..(25): SEQ ID NO: 2198; WAN024CBU; Start 30; Stop 54
tgtgattgatgaagaagagatgatg

SEQ ID NO: 317971 - DNA, 25 bp, Artificial
  probe
  misc_feature (1)..(25): SEQ ID NO: 2198; WAN024CBU; Start 26; Stop 50
atgttgtgattgatgaagaagagat

SEQ ID NO: 317972 - DNA, 25 bp, Artificial
  probe
  misc_feature (1)..(25): SEQ ID NO: 2198; WAN024CBU; Start 29; Stop 53
ttgtgattgatgaagaagagatgat

SEQ ID NO: 317973 - DNA, 25 bp, Artificial
  probe
  misc_feature (1)..(25): SEQ ID NO: 2198; WAN024CBU; Start 35; Stop 59
ttgatgaagaagagatgatgtacct

SEQ ID NO: 317974 - DNA, 25 bp, Artificial
  probe
  misc_feature (1)..(25): SEQ ID NO: 2198; WAN024CBU; Start 41; Stop 65
aagaagagatgatgtaccttgatgg

SEQ ID NO: 317975 - DNA, 25 bp, Artificial
  probe
  misc_feature (1)..(25): SEQ ID NO: 2198; WAN024CBU; Start 39; Stop 63
tgaagaagagatgatgtaccttgat

SEQ ID NO: 317976 - DNA, 25 bp, Artificial
  probe
  misc_feature (1)..(25): SEQ ID NO: 2198; WAN024CBU; Start 38; Stop 62
atgaagaagagatgatgtaccttga

SEQ ID NO: 317977 - DNA, 25 bp, Artificial
  probe
  misc_feature (1)..(25): SEQ ID NO: 2198; WAN024CBU; Start 36; Stop 60
tgatgaagaagagatgatgtacctt

SEQ ID NO: 317978 - DNA, 25 bp, Artificial
  probe
  misc_feature (1)..(25): SEQ ID NO: 2198; WAN024CBU; Start 25; Stop 49
tatgttgtgattgatgaagaagaga

SEQ ID NO: 317979 - DNA, 25 bp, Artificial
  probe
  misc_feature (1)..(25): SEQ ID NO: 2198; WAN024CBU; Start 40; Stop 64
gaagaagagatgatgtaccttgatg

SEQ ID NO: 317980 - DNA, 25 bp, Artificial
  probe
  misc_feature (1)..(25): SEQ ID NO: 2198; WAN024CBU; Start 37; Stop 61
gatgaagaagagatgatgtaccttg

SEQ ID NO: 317981 - DNA, 25 bp, Artificial
  probe
  misc_feature (1)..(25): SEQ ID NO: 2198; WAN024CBU; Start 34; Stop 58
attgatgaagaagagatgatgtacc

SEQ ID NO: 317982 - DNA, 25 bp, Artificial
  probe
  misc_feature (1)..(25): SEQ ID NO: 2198; WAN024CBU; Start 32; Stop 56
tgattgatgaagaagagatgatgta

SEQ ID NO: 317983 - DNA, 25 bp, Artificial
  probe
  misc_feature (1)..(25): SEQ ID NO: 2198; WAN024CBU; Start 24; Stop 48
ttatgttgtgattgatgaagaagag

SEQ ID NO: 317984 - DNA, 25 bp, Artificial
  probe
  misc_feature (1)..(25): SEQ ID NO: 2198; WAN024CBU; Start 200; Stop 224
ctgggattgttaaaggtttaggagt

SEQ ID NO: 317985 - DNA, 25 bp, Artificial
  probe
  misc_feature (1)..(25): SEQ ID NO: 2198; WAN024CBU; Start 267; Stop 291
tagaagtattgcatctgctggaatt

SEQ ID NO: 317986 - DNA, 25 bp, Artificial
  probe
  misc_feature (1)..(25): SEQ ID NO: 2198; WAN024CBU; Start 266; Stop 290
ttagaagtattgcatctgctggaat

SEQ ID NO: 317987 - DNA, 25 bp, Artificial
  probe
  misc_feature (1)..(25): SEQ ID NO: 2198; WAN024CBU; Start 265; Stop 289
attagaagtattgcatctgctggaa

SEQ ID NO: 317988 - DNA, 25 bp, Artificial
  probe
  misc_feature (1)..(25): SEQ ID NO: 2198; WAN024CBU; Start 201; Stop 225
tgggattgttaaaggtttaggagta

SEQ ID NO: 317989 - DNA, 25 bp, Artificial
  probe
  misc_feature (1)..(25): SEQ ID NO: 2198; WAN024CBU; Start 264; Stop 288
tattagaagtattgcatctgctgga

SEQ ID NO: 317990 - DNA, 25 bp, Artificial
  probe
  misc_feature (1)..(25): SEQ ID NO: 2198; WAN024CBU; Start 33; Stop 57
gattgatgaagaagagatgatgtac

SEQ ID NO: 317991 - DNA, 25 bp, Artificial
  probe
  misc_feature (1)..(25): SEQ ID NO: 2198; WAN024CBU; Start 263; Stop 287
ttattagaagtattgcatctgctgg

SEQ ID NO: 317992 - DNA, 25 bp, Artificial
  probe
  misc_feature (1)..(25): SEQ ID NO: 2198; WAN024CBU; Start 161; Stop 185
tagttcttgcatcttatggattacg

SEQ ID NO: 317993 - DNA, 25 bp, Artificial
  probe
  misc_feature (1)..(25): SEQ ID NO: 2198; WAN024CBU; Start 164; Stop 188
ttcttgcatcttatggattacgctc

SEQ ID NO: 317994 - DNA, 25 bp, Artificial
  probe
  misc_feature (1)..(25): SEQ ID NO: 2198; WAN024CBU; Start 163; Stop 187
gttcttgcatcttatggattacgct

SEQ ID NO: 317995 - DNA, 25 bp, Artificial
  probe
  misc_feature (1)..(25): SEQ ID NO: 2198; WAN024CBU; Start 162; Stop 186
agttcttgcatcttatggattacgc

SEQ ID NO: 317996 - DNA, 25 bp, Artificial
  probe
  misc_feature (1)..(25): SEQ ID NO: 2198; WAN024CBU; Start 199; Stop 223
gctgggattgttaaaggtttaggag

SEQ ID NO: 317997 - DNA, 25 bp, Artificial
  probe
  misc_feature (1)..(25): SEQ ID NO: 2198; WAN024CBU; Start 268; Stop 292
agaagtattgcatctgctggaattg

SEQ ID NO: 317998 - DNA, 25 bp, Artificial
  probe
  misc_feature (1)..(25): SEQ ID NO: 2198; WAN024CBU; Start 261; Stop 285
tgttattagaagtattgcatctgct

SEQ ID NO: 317999 - DNA, 25 bp, Artificial
  probe
  misc_feature (1)..(25): SEQ ID NO: 2198; WAN024CBU; Start 202; Stop 226
gggattgttaaaggtttaggagtat

SEQ ID NO: 318000 - DNA, 25 bp, Artificial
  probe
  misc_feature (1)..(25): SEQ ID NO: 2199; WAN024FHH; Start 161; Stop 185
aagtcttgagtgtcgttccttctat

SEQ ID NO: 318001 - DNA, 25 bp, Artificial
  probe
  misc_feature (1)..(25): SEQ ID NO: 2199; WAN024FHH; Start 162; Stop 186
agtcttgagtgtcgttccttctatc

SEQ ID NO: 318002 - DNA, 25 bp, Artificial
  probe
  misc_feature (1)..(25): SEQ ID NO: 2199; WAN024FHH; Start 424; Stop 448
gatactgacaatacgattcgctacg

SEQ ID NO: 318003 - DNA, 25 bp, Artificial
  probe
  misc_feature (1)..(25): SEQ ID NO: 2199; WAN024FHH; Start 456; Stop 480
cgtggataatatcaattctgagcca

SEQ ID NO: 318004 - DNA, 25 bp, Artificial
  probe
  misc_feature (1)..(25): SEQ ID NO: 2199; WAN024FHH; Start 457; Stop 481
gtggataatatcaattctgagccaa

SEQ ID NO: 318005 - DNA, 25 bp, Artificial
  probe
  misc_feature (1)..(25): SEQ ID NO: 2199; WAN024FHH; Start 325; Stop 349
gccattatgctttcagactactttg

SEQ ID NO: 318006 - DNA, 25 bp, Artificial
  probe
  misc_feature (1)..(25): SEQ ID NO: 2199; WAN024FHH; Start 323; Stop 347
atgccattatgctttcagactactt

SEQ ID NO: 318007 - DNA, 25 bp, Artificial
  probe
  misc_feature (1)..(25): SEQ ID NO: 2199; WAN024FHH; Start 324; Stop 348
tgccattatgctttcagactacttt

SEQ ID NO: 318008 - DNA, 25 bp, Artificial
  probe
  misc_feature (1)..(25): SEQ ID NO: 2199; WAN024FHH; Start 163; Stop 187
gtcttgagtgtcgttccttctatcg

SEQ ID NO: 318009 - DNA, 25 bp, Artificial
  probe
  misc_feature (1)..(25): SEQ ID NO: 2199; WAN024FHH; Start 13; Stop 37
agattggagtatcctatggtaactt

SEQ ID NO: 318010 - DNA, 25 bp, Artificial
  probe
  misc_feature (1)..(25): SEQ ID NO: 2199; WAN024FHH; Start 12; Stop 36
aagattggagtatcctatggtaact

SEQ ID NO: 318011 - DNA, 25 bp, Artificial
  probe
  misc_feature (1)..(25): SEQ ID NO: 2199; WAN024FHH; Start 322; Stop 346
aatgccattatgctttcagactact

SEQ ID NO: 318012 - DNA, 25 bp, Artificial
  probe
  misc_feature (1)..(25): SEQ ID NO: 2199; WAN024FHH; Start 321; Stop 345
caatgccattatgctttcagactac

SEQ ID NO: 318013 - DNA, 25 bp, Artificial
  probe
  misc_feature (1)..(25): SEQ ID NO: 2199; WAN024FHH; Start 455; Stop 479
acgtggataatatcaattctgagcc

SEQ ID NO: 318014 - DNA, 25 bp, Artificial
  probe
  misc_feature (1)..(25): SEQ ID NO: 2199; WAN024FHH; Start 330; Stop 354
tatgctttcagactactttgaccat

SEQ ID NO: 318015 - DNA, 25 bp, Artificial
  probe
  misc_feature (1)..(25): SEQ ID NO: 2199; WAN024FHH; Start 329; Stop 353
ttatgctttcagactactttgacca

SEQ ID NO: 318016 - DNA, 25 bp, Artificial
  probe
  misc_feature (1)..(25): SEQ ID NO: 2199; WAN024FHH; Start 463; Stop 487
aatatcaattctgagccaaacttcg

SEQ ID NO: 318017 - DNA, 25 bp, Artificial
  probe
  misc_feature (1)..(25): SEQ ID NO: 2199; WAN024FHH; Start 320; Stop 344
acaatgccattatgctttcagacta

SEQ ID NO: 318018 - DNA, 25 bp, Artificial
  probe
  misc_feature (1)..(25): SEQ ID NO: 2199; WAN024FHH; Start 331; Stop 355
atgctttcagactactttgaccatt

SEQ ID NO: 318019 - DNA, 25 bp, Artificial
  probe
  misc_feature (1)..(25): SEQ ID NO: 2199; WAN024FHH; Start 337; Stop 361
tcagactactttgaccattctttcg

SEQ ID NO: 318020 - DNA, 25 bp, Artificial
  probe
  misc_feature (1)..(25): SEQ ID NO: 2199; WAN024FHH; Start 328; Stop 352
attatgctttcagactactttgacc

SEQ ID NO: 318021 - DNA, 25 bp, Artificial
  probe
  misc_feature (1)..(25): SEQ ID NO: 2199; WAN024FHH; Start 326; Stop 350
ccattatgctttcagactactttga

SEQ ID NO: 318022 - DNA, 25 bp, Artificial
  probe
  misc_feature (1)..(25): SEQ ID NO: 2199; WAN024FHH; Start 336; Stop 360
ttcagactactttgaccattctttc

SEQ ID NO: 318023 - DNA, 25 bp, Artificial
  probe
  misc_feature (1)..(25): SEQ ID NO: 2199; WAN024FHH; Start 334; Stop 358
ctttcagactactttgaccattctt

SEQ ID NO: 318024 - DNA, 25 bp, Artificial
  probe
  misc_feature (1)..(25): SEQ ID NO: 2199; WAN024FHH; Start 333; Stop 357
gctttcagactactttgaccattct

SEQ ID NO: 318025 - DNA, 25 bp, Artificial
  probe
  misc_feature (1)..(25): SEQ ID NO: 2199; WAN024FHH; Start 160; Stop 184
aaagtcttgagtgtcgttccttcta

SEQ ID NO: 318026 - DNA, 25 bp, Artificial
  probe
  misc_feature (1)..(25): SEQ ID NO: 2199; WAN024FHH; Start 59; Stop 83
ttacaggtaaacaactacaagtcgg

SEQ ID NO: 318027 - DNA, 25 bp, Artificial
  probe
  misc_feature (1)..(25): SEQ ID NO: 2199; WAN024FHH; Start 454; Stop 478
tacgtggataatatcaattctgagc

SEQ ID NO: 318028 - DNA, 25 bp, Artificial
  probe
  misc_feature (1)..(25): SEQ ID NO: 2199; WAN024FHH; Start 332; Stop 356
tgctttcagactactttgaccattc

SEQ ID NO: 318029 - DNA, 25 bp, Artificial
  probe
  misc_feature (1)..(25): SEQ ID NO: 2199; WAN024FHH; Start 338; Stop 362
cagactactttgaccattctttcgg

SEQ ID NO: 318030 - DNA, 25 bp, Artificial
  probe
  misc_feature (1)..(25): SEQ ID NO: 2199; WAN024FHH; Start 335; Stop 359
tttcagactactttgaccattcttt

SEQ ID NO: 318031 - DNA, 25 bp, Artificial
  probe
  misc_feature (1)..(25): SEQ ID NO: 2199; WAN024FHH; Start 423; Stop 447
cgatactgacaatacgattcgctac

SEQ ID NO: 318032 - DNA, 25 bp, Artificial
  probe
  misc_feature (1)..(25): SEQ ID NO: 2199; WAN024FHH; Start 316; Stop 340
cttgacaatgccattatgctttcag

SEQ ID NO: 318033 - DNA, 25 bp, Artificial
  probe
  misc_feature (1)..(25): SEQ ID NO: 2200; WAN024DJ4; Start 1237; Stop 1261
ccagtatctaatcaggcaatctcaa

SEQ ID NO: 318034 - DNA, 25 bp, Artificial
  probe
  misc_feature (1)..(25): SEQ ID NO: 2200; WAN024DJ4; Start 1235; Stop 1259
ttccagtatctaatcaggcaatctc

SEQ ID NO: 318035 - DNA, 25 bp, Artificial
  probe
  misc_feature (1)..(25): SEQ ID NO: 2200; WAN024DJ4; Start 1493; Stop 1517
atgctgtagtagttgcttatggtaa

SEQ ID NO: 318036 - DNA, 25 bp, Artificial
  probe
  misc_feature (1)..(25): SEQ ID NO: 2200; WAN024DJ4; Start 1492; Stop 1516
gatgctgtagtagttgcttatggta

SEQ ID NO: 318037 - DNA, 25 bp, Artificial
  probe
  misc_feature (1)..(25): SEQ ID NO: 2200; WAN024DJ4; Start 1489; Stop 1513
attgatgctgtagtagttgcttatg

SEQ ID NO: 318038 - DNA, 25 bp, Artificial
  probe
  misc_feature (1)..(25): SEQ ID NO: 2200; WAN024DJ4; Start 1236; Stop 1260
tccagtatctaatcaggcaatctca

SEQ ID NO: 318039 - DNA, 25 bp, Artificial
  probe
  misc_feature (1)..(25): SEQ ID NO: 2200; WAN024DJ4; Start 1490; Stop 1514
ttgatgctgtagtagttgcttatgg

SEQ ID NO: 318040 - DNA, 25 bp, Artificial
  probe
  misc_feature (1)..(25): SEQ ID NO: 2200; WAN024DJ4; Start 151; Stop 175
gctactgttgttggtcctatgttaa

SEQ ID NO: 318041 - DNA, 25 bp, Artificial
  probe
  misc_feature (1)..(25): SEQ ID NO: 2200; WAN024DJ4; Start 1485; Stop 1509
ccatattgatgctgtagtagttgct

SEQ ID NO: 318042 - DNA, 25 bp, Artificial
  probe
  misc_feature (1)..(25): SEQ ID NO: 2200; WAN024DJ4; Start 892; Stop 916
tcaccaggttctattattgcgatta

SEQ ID NO: 318043 - DNA, 25 bp, Artificial
  probe
  misc_feature (1)..(25): SEQ ID NO: 2200; WAN024DJ4; Start 631; Stop 655
gctggtaagtcaattctcttcctat

SEQ ID NO: 318044 - DNA, 25 bp, Artificial
  probe
  misc_feature (1)..(25): SEQ ID NO: 2200; WAN024DJ4; Start 1486; Stop 1510
catattgatgctgtagtagttgctt

SEQ ID NO: 318045 - DNA, 25 bp, Artificial
  probe
  misc_feature (1)..(25): SEQ ID NO: 2200; WAN024DJ4; Start 891; Stop 915
ttcaccaggttctattattgcgatt

SEQ ID NO: 318046 - DNA, 25 bp, Artificial
  probe
  misc_feature (1)..(25): SEQ ID NO: 2200; WAN024DJ4; Start 1484; Stop 1508
accatattgatgctgtagtagttgc

SEQ ID NO: 318047 - DNA, 25 bp, Artificial
  probe
  misc_feature (1)..(25): SEQ ID NO: 2200; WAN024DJ4; Start 786; Stop 810
tccttatgttatgatgaagcctact

SEQ ID NO: 318048 - DNA, 25 bp, Artificial
  probe
  misc_feature (1)..(25): SEQ ID NO: 2200; WAN024DJ4; Start 890; Stop 914
cttcaccaggttctattattgcgat

SEQ ID NO: 318049 - DNA, 25 bp, Artificial
  probe
  misc_feature (1)..(25): SEQ ID NO: 2200; WAN024DJ4; Start 787; Stop 811
ccttatgttatgatgaagcctactc

SEQ ID NO: 318050 - DNA, 25 bp, Artificial
  probe
  misc_feature (1)..(25): SEQ ID NO: 2200; WAN024DJ4; Start 893; Stop 917
caccaggttctattattgcgattat

SEQ ID NO: 318051 - DNA, 25 bp, Artificial
  probe
  misc_feature (1)..(25): SEQ ID NO: 2200; WAN024DJ4; Start 1483; Stop 1507
aaccatattgatgctgtagtagttg

SEQ ID NO: 318052 - DNA, 25 bp, Artificial
  probe
  misc_feature (1)..(25): SEQ ID NO: 2200; WAN024DJ4; Start 1438; Stop 1462
gatataccaacttcagcaccagtag

SEQ ID NO: 318053 - DNA, 25 bp, Artificial
  probe
  misc_feature (1)..(25): SEQ ID NO: 2200; WAN024DJ4; Start 198; Stop 222
tggttacacaggtggatatatgatc

SEQ ID NO: 318054 - DNA, 25 bp, Artificial
  probe
  misc_feature (1)..(25): SEQ ID NO: 2200; WAN024DJ4; Start 1441; Stop 1465
ataccaacttcagcaccagtagata

SEQ ID NO: 318055 - DNA, 25 bp, Artificial
  probe
  misc_feature (1)..(25): SEQ ID NO: 2200; WAN024DJ4; Start 1440; Stop 1464
tataccaacttcagcaccagtagat

SEQ ID NO: 318056 - DNA, 25 bp, Artificial
  probe
  misc_feature (1)..(25): SEQ ID NO: 2200; WAN024DJ4; Start 1439; Stop 1463
atataccaacttcagcaccagtaga

SEQ ID NO: 318057 - DNA, 25 bp, Artificial
  probe
  misc_feature (1)..(25): SEQ ID NO: 2200; WAN024DJ4; Start 1437; Stop 1461
agatataccaacttcagcaccagta

SEQ ID NO: 318058 - DNA, 25 bp, Artificial
  probe
  misc_feature (1)..(25): SEQ ID NO: 2200; WAN024DJ4; Start 1491; Stop 1515
tgatgctgtagtagttgcttatggt

SEQ ID NO: 318059 - DNA, 25 bp, Artificial
  probe
  misc_feature (1)..(25): SEQ ID NO: 2200; WAN024DJ4; Start 785; Stop 809
ttccttatgttatgatgaagcctac

SEQ ID NO: 318060 - DNA, 25 bp, Artificial
  probe
  misc_feature (1)..(25): SEQ ID NO: 2200; WAN024DJ4; Start 197; Stop 221
ttggttacacaggtggatatatgat

SEQ ID NO: 318061 - DNA, 25 bp, Artificial
  probe
  misc_feature (1)..(25): SEQ ID NO: 2200; WAN024DJ4; Start 196; Stop 220
attggttacacaggtggatatatga

SEQ ID NO: 318062 - DNA, 25 bp, Artificial
  probe
  misc_feature (1)..(25): SEQ ID NO: 2200; WAN024DJ4; Start 194; Stop 218
tgattggttacacaggtggatatat

SEQ ID NO: 318063 - DNA, 25 bp, Artificial
  probe
  misc_feature (1)..(25): SEQ ID NO: 2200; WAN024DJ4; Start 195; Stop 219
gattggttacacaggtggatatatg

SEQ ID NO: 318064 - DNA, 25 bp, Artificial
  probe
  misc_feature (1)..(25): SEQ ID NO: 2200; WAN024DJ4; Start 1488; Stop 1512
tattgatgctgtagtagttgcttat

SEQ ID NO: 318065 - DNA, 25 bp, Artificial
  probe
  misc_feature (1)..(25): SEQ ID NO: 2200; WAN024DJ4; Start 193; Stop 217
ctgattggttacacaggtggatata

SEQ ID NO: 318066 - DNA, 25 bp, Artificial
  probe
  misc_feature (1)..(25): SEQ ID NO: 2201; WAN024B4E; Start 72; Stop 96
atttctagcaactaacttccaacct

SEQ ID NO: 318067 - DNA, 25 bp, Artificial
  probe
  misc_feature (1)..(25): SEQ ID NO: 2201; WAN024B4E; Start 71; Stop 95
gatttctagcaactaacttccaacc

SEQ ID NO: 318068 - DNA, 25 bp, Artificial
  probe
  misc_feature (1)..(25): SEQ ID NO: 2201; WAN024B4E; Start 74; Stop 98
ttctagcaactaacttccaaccttt

SEQ ID NO: 318069 - DNA, 25 bp, Artificial
  probe
  misc_feature (1)..(25): SEQ ID NO: 2201; WAN024B4E; Start 73; Stop 97
tttctagcaactaacttccaacctt

SEQ ID NO: 318070 - DNA, 25 bp, Artificial
  probe
  misc_feature (1)..(25): SEQ ID NO: 2201; WAN024B4E; Start 120; Stop 144
ttctgactctaacacctccacttca

SEQ ID NO: 318071 - DNA, 25 bp, Artificial
  probe
  misc_feature (1)..(25): SEQ ID NO: 2201; WAN024B4E; Start 77; Stop 101
tagcaactaacttccaacctttgag

SEQ ID NO: 318072 - DNA, 25 bp, Artificial
  probe
  misc_feature (1)..(25): SEQ ID NO: 2201; WAN024B4E; Start 119; Stop 143
tttctgactctaacacctccacttc

SEQ ID NO: 318073 - DNA, 25 bp, Artificial
  probe
  misc_feature (1)..(25): SEQ ID NO: 2201; WAN024B4E; Start 76; Stop 100
ctagcaactaacttccaacctttga

SEQ ID NO: 318074 - DNA, 25 bp, Artificial
  probe
  misc_feature (1)..(25): SEQ ID NO: 2201; WAN024B4E; Start 75; Stop 99
tctagcaactaacttccaacctttg

SEQ ID NO: 318075 - DNA, 25 bp, Artificial
  probe
  misc_feature (1)..(25): SEQ ID NO: 2201; WAN024B4E; Start 116; Stop 140
tagtttctgactctaacacctccac

SEQ ID NO: 318076 - DNA, 25 bp, Artificial
  probe
  misc_feature (1)..(25): SEQ ID NO: 2201; WAN024B4E; Start 114; Stop 138
attagtttctgactctaacacctcc

SEQ ID NO: 318077 - DNA, 25 bp, Artificial
  probe
  misc_feature (1)..(25): SEQ ID NO: 2201; WAN024B4E; Start 115; Stop 139
ttagtttctgactctaacacctcca

SEQ ID NO: 318078 - DNA, 25 bp, Artificial
  probe
  misc_feature (1)..(25): SEQ ID NO: 2201; WAN024B4E; Start 81; Stop 105
aactaacttccaacctttgagcaaa

SEQ ID NO: 318079 - DNA, 25 bp, Artificial
  probe
  misc_feature (1)..(25): SEQ ID NO: 2201; WAN024B4E; Start 80; Stop 104
caactaacttccaacctttgagcaa

SEQ ID NO: 318080 - DNA, 25 bp, Artificial
  probe
  misc_feature (1)..(25): SEQ ID NO: 2201; WAN024B4E; Start 112; Stop 136
agattagtttctgactctaacacct

SEQ ID NO: 318081 - DNA, 25 bp, Artificial
  probe
  misc_feature (1)..(25): SEQ ID NO: 2201; WAN024B4E; Start 118; Stop 142
gtttctgactctaacacctccactt

SEQ ID NO: 318082 - DNA, 25 bp, Artificial
  probe
  misc_feature (1)..(25): SEQ ID NO: 2201; WAN024B4E; Start 144; Stop 168
agcgttaggaagaaataacatcaga

SEQ ID NO: 318083 - DNA, 25 bp, Artificial
  probe
  misc_feature (1)..(25): SEQ ID NO: 2201; WAN024B4E; Start 143; Stop 167
cagcgttaggaagaaataacatcag

SEQ ID NO: 318084 - DNA, 25 bp, Artificial
  probe
  misc_feature (1)..(25): SEQ ID NO: 2201; WAN024B4E; Start 113; Stop 137
gattagtttctgactctaacacctc

SEQ ID NO: 318085 - DNA, 25 bp, Artificial
  probe
  misc_feature (1)..(25): SEQ ID NO: 2201; WAN024B4E; Start 142; Stop 166
tcagcgttaggaagaaataacatca

SEQ ID NO: 318086 - DNA, 25 bp, Artificial
  probe
  misc_feature (1)..(25): SEQ ID NO: 2201; WAN024B4E; Start 145; Stop 169
gcgttaggaagaaataacatcagaa

SEQ ID NO: 318087 - DNA, 25 bp, Artificial
  probe
  misc_feature (1)..(25): SEQ ID NO: 2201; WAN024B4E; Start 141; Stop 165
ttcagcgttaggaagaaataacatc

SEQ ID NO: 318088 - DNA, 25 bp, Artificial
  probe
  misc_feature (1)..(25): SEQ ID NO: 2201; WAN024B4E; Start 70; Stop 94
ggatttctagcaactaacttccaac

SEQ ID NO: 318089 - DNA, 25 bp, Artificial
  probe
  misc_feature (1)..(25): SEQ ID NO: 2201; WAN024B4E; Start 69; Stop 93
aggatttctagcaactaacttccaa

SEQ ID NO: 318090 - DNA, 25 bp, Artificial
  probe
  misc_feature (1)..(25): SEQ ID NO: 2201; WAN024B4E; Start 148; Stop 172
ttaggaagaaataacatcagaaagc

SEQ ID NO: 318091 - DNA, 25 bp, Artificial
  probe
  misc_feature (1)..(25): SEQ ID NO: 2201; WAN024B4E; Start 68; Stop 92
taggatttctagcaactaacttcca

SEQ ID NO: 318092 - DNA, 25 bp, Artificial
  probe
  misc_feature (1)..(25): SEQ ID NO: 2201; WAN024B4E; Start 111; Stop 135
aagattagtttctgactctaacacc

SEQ ID NO: 318093 - DNA, 25 bp, Artificial
  probe
  misc_feature (1)..(25): SEQ ID NO: 2201; WAN024B4E; Start 67; Stop 91
ctaggatttctagcaactaacttcc

SEQ ID NO: 318094 - DNA, 25 bp, Artificial
  probe
  misc_feature (1)..(25): SEQ ID NO: 2201; WAN024B4E; Start 117; Stop 141
agtttctgactctaacacctccact

SEQ ID NO: 318095 - DNA, 25 bp, Artificial
  probe
  misc_feature (1)..(25): SEQ ID NO: 2201; WAN024B4E; Start 150; Stop 174
aggaagaaataacatcagaaagcta

SEQ ID NO: 318096 - DNA, 25 bp, Artificial
  probe
  misc_feature (1)..(25): SEQ ID NO: 2201; WAN024B4E; Start 149; Stop 173
taggaagaaataacatcagaaagct

SEQ ID NO: 318097 - DNA, 25 bp, Artificial
  probe
  misc_feature (1)..(25): SEQ ID NO: 2201; WAN024B4E; Start 110; Stop 134
caagattagtttctgactctaacac

SEQ ID NO: 318098 - DNA, 25 bp, Artificial
  probe
  misc_feature (1)..(25): SEQ ID NO: 2201; WAN024B4E; Start 151; Stop 175
ggaagaaataacatcagaaagctag

SEQ ID NO: 318099 - DNA, 25 bp, Artificial
  probe
  misc_feature (1)..(25): SEQ ID NO: 2202; WAN024FKZ; Start 25; Stop 49
atctctattggtcctgttatcttca

SEQ ID NO: 318100 - DNA, 25 bp, Artificial
  probe
  misc_feature (1)..(25): SEQ ID NO: 2202; WAN024FKZ; Start 23; Stop 47
tcatctctattggtcctgttatctt

SEQ ID NO: 318101 - DNA, 25 bp, Artificial
  probe
  misc_feature (1)..(25): SEQ ID NO: 2202; WAN024FKZ; Start 24; Stop 48
catctctattggtcctgttatcttc

SEQ ID NO: 318102 - DNA, 25 bp, Artificial
  probe
  misc_feature (1)..(25): SEQ ID NO: 2202; WAN024FKZ; Start 22; Stop 46
atcatctctattggtcctgttatct

SEQ ID NO: 318103 - DNA, 25 bp, Artificial
  probe
  misc_feature (1)..(25): SEQ ID NO: 2202; WAN024FKZ; Start 44; Stop 68
tcttcaatctgactatgttagccat

SEQ ID NO: 318104 - DNA, 25 bp, Artificial
  probe
  misc_feature (1)..(25): SEQ ID NO: 2202; WAN024FKZ; Start 43; Stop 67
atcttcaatctgactatgttagcca

SEQ ID NO: 318105 - DNA, 25 bp, Artificial
  probe
  misc_feature (1)..(25): SEQ ID NO: 2202; WAN024FKZ; Start 26; Stop 50
tctctattggtcctgttatcttcaa

SEQ ID NO: 318106 - DNA, 25 bp, Artificial
  probe
  misc_feature (1)..(25): SEQ ID NO: 2202; WAN024FKZ; Start 34; Stop 58
ggtcctgttatcttcaatctgacta

SEQ ID NO: 318107 - DNA, 25 bp, Artificial
  probe
  misc_feature (1)..(25): SEQ ID NO: 2202; WAN024FKZ; Start 21; Stop 45
aatcatctctattggtcctgttatc

SEQ ID NO: 318108 - DNA, 25 bp, Artificial
  probe
  misc_feature (1)..(25): SEQ ID NO: 2202; WAN024FKZ; Start 32; Stop 56
ttggtcctgttatcttcaatctgac

SEQ ID NO: 318109 - DNA, 25 bp, Artificial
  probe
  misc_feature (1)..(25): SEQ ID NO: 2202; WAN024FKZ; Start 46; Stop 70
ttcaatctgactatgttagccatga

SEQ ID NO: 318110 - DNA, 25 bp, Artificial
  probe
  misc_feature (1)..(25): SEQ ID NO: 2202; WAN024FKZ; Start 456; Stop 480
cataccgatgaatatcttggaagaa

SEQ ID NO: 318111 - DNA, 25 bp, Artificial
  probe
  misc_feature (1)..(25): SEQ ID NO: 2202; WAN024FKZ; Start 47; Stop 71
tcaatctgactatgttagccatgac

SEQ ID NO: 318112 - DNA, 25 bp, Artificial
  probe
  misc_feature (1)..(25): SEQ ID NO: 2202; WAN024FKZ; Start 45; Stop 69
cttcaatctgactatgttagccatg

SEQ ID NO: 318113 - DNA, 25 bp, Artificial
  probe
  misc_feature (1)..(25): SEQ ID NO: 2202; WAN024FKZ; Start 33; Stop 57
tggtcctgttatcttcaatctgact

SEQ ID NO: 318114 - DNA, 25 bp, Artificial
  probe
  misc_feature (1)..(25): SEQ ID NO: 2202; WAN024FKZ; Start 37; Stop 61
cctgttatcttcaatctgactatgt

SEQ ID NO: 318115 - DNA, 25 bp, Artificial
  probe
  misc_feature (1)..(25): SEQ ID NO: 2202; WAN024FKZ; Start 42; Stop 66
tatcttcaatctgactatgttagcc

SEQ ID NO: 318116 - DNA, 25 bp, Artificial
  probe
  misc_feature (1)..(25): SEQ ID NO: 2202; WAN024FKZ; Start 36; Stop 60
tcctgttatcttcaatctgactatg

SEQ ID NO: 318117 - DNA, 25 bp, Artificial
  probe
  misc_feature (1)..(25): SEQ ID NO: 2202; WAN024FKZ; Start 458; Stop 482
taccgatgaatatcttggaagaatt

SEQ ID NO: 318118 - DNA, 25 bp, Artificial
  probe
  misc_feature (1)..(25): SEQ ID NO: 2202; WAN024FKZ; Start 35; Stop 59
gtcctgttatcttcaatctgactat

SEQ ID NO: 318119 - DNA, 25 bp, Artificial
  probe
  misc_feature (1)..(25): SEQ ID NO: 2202; WAN024FKZ; Start 457; Stop 481
ataccgatgaatatcttggaagaat

SEQ ID NO: 318120 - DNA, 25 bp, Artificial
  probe
  misc_feature (1)..(25): SEQ ID NO: 2202; WAN024FKZ; Start 31; Stop 55
attggtcctgttatcttcaatctga

SEQ ID NO: 318121 - DNA, 25 bp, Artificial
  probe
  misc_feature (1)..(25): SEQ ID NO: 2202; WAN024FKZ; Start 270; Stop 294
caataaccttggcttaatgacaaag

SEQ ID NO: 318122 - DNA, 25 bp, Artificial
  probe
  misc_feature (1)..(25): SEQ ID NO: 2202; WAN024FKZ; Start 379; Stop 403
ttgttgacacatatagaaagcgttc

SEQ ID NO: 318123 - DNA, 25 bp, Artificial
  probe
  misc_feature (1)..(25): SEQ ID NO: 2202; WAN024FKZ; Start 453; Stop 477
tgtcataccgatgaatatcttggaa

SEQ ID NO: 318124 - DNA, 25 bp, Artificial
  probe
  misc_feature (1)..(25): SEQ ID NO: 2202; WAN024FKZ; Start 452; Stop 476
ttgtcataccgatgaatatcttgga

SEQ ID NO: 318125 - DNA, 25 bp, Artificial
  probe
  misc_feature (1)..(25): SEQ ID NO: 2202; WAN024FKZ; Start 378; Stop 402
tttgttgacacatatagaaagcgtt

SEQ ID NO: 318126 - DNA, 25 bp, Artificial
  probe
  misc_feature (1)..(25): SEQ ID NO: 2202; WAN024FKZ; Start 381; Stop 405
gttgacacatatagaaagcgttcgt

SEQ ID NO: 318127 - DNA, 25 bp, Artificial
  probe
  misc_feature (1)..(25): SEQ ID NO: 2202; WAN024FKZ; Start 30; Stop 54
tattggtcctgttatcttcaatctg

SEQ ID NO: 318128 - DNA, 25 bp, Artificial
  probe
  misc_feature (1)..(25): SEQ ID NO: 2202; WAN024FKZ; Start 455; Stop 479
tcataccgatgaatatcttggaaga

SEQ ID NO: 318129 - DNA, 25 bp, Artificial
  probe
  misc_feature (1)..(25): SEQ ID NO: 2202; WAN024FKZ; Start 454; Stop 478
gtcataccgatgaatatcttggaag

SEQ ID NO: 318130 - DNA, 25 bp, Artificial
  probe
  misc_feature (1)..(25): SEQ ID NO: 2202; WAN024FKZ; Start 29; Stop 53
ctattggtcctgttatcttcaatct

SEQ ID NO: 318131 - DNA, 25 bp, Artificial
  probe
  misc_feature (1)..(25): SEQ ID NO: 2202; WAN024FKZ; Start 28; Stop 52
tctattggtcctgttatcttcaatc

SEQ ID NO: 318132 - DNA, 25 bp, Artificial
  probe
  misc_feature (1)..(25): SEQ ID NO: 2203; WAN024FE7; Start 569; Stop 593
atcagaatgtcatcactacttcacg

SEQ ID NO: 318133 - DNA, 25 bp, Artificial
  probe
  misc_feature (1)..(25): SEQ ID NO: 2203; WAN024FE7; Start 568; Stop 592
gatcagaatgtcatcactacttcac

SEQ ID NO: 318134 - DNA, 25 bp, Artificial
  probe
  misc_feature (1)..(25): SEQ ID NO: 2203; WAN024FE7; Start 343; Stop 367
tcagttaagtctggtaagattagcc

SEQ ID NO: 318135 - DNA, 25 bp, Artificial
  probe
  misc_feature (1)..(25): SEQ ID NO: 2203; WAN024FE7; Start 331; Stop 355
atccttcctaagtcagttaagtctg

SEQ ID NO: 318136 - DNA, 25 bp, Artificial
  probe
  misc_feature (1)..(25): SEQ ID NO: 2203; WAN024FE7; Start 330; Stop 354
tatccttcctaagtcagttaagtct

SEQ ID NO: 318137 - DNA, 25 bp, Artificial
  probe
  misc_feature (1)..(25): SEQ ID NO: 2203; WAN024FE7; Start 337; Stop 361
cctaagtcagttaagtctggtaaga

SEQ ID NO: 318138 - DNA, 25 bp, Artificial
  probe
  misc_feature (1)..(25): SEQ ID NO: 2203; WAN024FE7; Start 336; Stop 360
tcctaagtcagttaagtctggtaag

SEQ ID NO: 318139 - DNA, 25 bp, Artificial
  probe
  misc_feature (1)..(25): SEQ ID NO: 2203; WAN024FE7; Start 334; Stop 358
cttcctaagtcagttaagtctggta

SEQ ID NO: 318140 - DNA, 25 bp, Artificial
  probe
  misc_feature (1)..(25): SEQ ID NO: 2203; WAN024FE7; Start 342; Stop 366
gtcagttaagtctggtaagattagc

SEQ ID NO: 318141 - DNA, 25 bp, Artificial
  probe
  misc_feature (1)..(25): SEQ ID NO: 2203; WAN024FE7; Start 335; Stop 359
ttcctaagtcagttaagtctggtaa

SEQ ID NO: 318142 - DNA, 25 bp, Artificial
  probe
  misc_feature (1)..(25): SEQ ID NO: 2203; WAN024FE7; Start 332; Stop 356
tccttcctaagtcagttaagtctgg

SEQ ID NO: 318143 - DNA, 25 bp, Artificial
  probe
  misc_feature (1)..(25): SEQ ID NO: 2203; WAN024FE7; Start 572; Stop 596
agaatgtcatcactacttcacgctt

SEQ ID NO: 318144 - DNA, 25 bp, Artificial
  probe
  misc_feature (1)..(25): SEQ ID NO: 2203; WAN024FE7; Start 333; Stop 357
ccttcctaagtcagttaagtctggt

SEQ ID NO: 318145 - DNA, 25 bp, Artificial
  probe
  misc_feature (1)..(25): SEQ ID NO: 2203; WAN024FE7; Start 344; Stop 368
cagttaagtctggtaagattagcca

SEQ ID NO: 318146 - DNA, 25 bp, Artificial
  probe
  misc_feature (1)..(25): SEQ ID NO: 2203; WAN024FE7; Start 29; Stop 53
gagcaaccattcagacgacagataa

SEQ ID NO: 318147 - DNA, 25 bp, Artificial
  probe
  misc_feature (1)..(25): SEQ ID NO: 2203; WAN024FE7; Start 708; Stop 732
aaacctcaagtatgtcagtcctaaa

SEQ ID NO: 318148 - DNA, 25 bp, Artificial
  probe
  misc_feature (1)..(25): SEQ ID NO: 2203; WAN024FE7; Start 541; Stop 565
aatgctattatccaagaaatcacgg

SEQ ID NO: 318149 - DNA, 25 bp, Artificial
  probe
  misc_feature (1)..(25): SEQ ID NO: 2203; WAN024FE7; Start 735; Stop 759
ggaaatcaagcctaagacctatcag

SEQ ID NO: 318150 - DNA, 25 bp, Artificial
  probe
  misc_feature (1)..(25): SEQ ID NO: 2203; WAN024FE7; Start 329; Stop 353
atatccttcctaagtcagttaagtc

SEQ ID NO: 318151 - DNA, 25 bp, Artificial
  probe
  misc_feature (1)..(25): SEQ ID NO: 2203; WAN024FE7; Start 10; Stop 34
attctctgtattggttgtggagcaa

SEQ ID NO: 318152 - DNA, 25 bp, Artificial
  probe
  misc_feature (1)..(25): SEQ ID NO: 2203; WAN024FE7; Start 9; Stop 33
aattctctgtattggttgtggagca

SEQ ID NO: 318153 - DNA, 25 bp, Artificial
  probe
  misc_feature (1)..(25): SEQ ID NO: 2203; WAN024FE7; Start 542; Stop 566
atgctattatccaagaaatcacggg

SEQ ID NO: 318154 - DNA, 25 bp, Artificial
  probe
  misc_feature (1)..(25): SEQ ID NO: 2203; WAN024FE7; Start 745; Stop 769
cctaagacctatcagcttaatcctg

SEQ ID NO: 318155 - DNA, 25 bp, Artificial
  probe
  misc_feature (1)..(25): SEQ ID NO: 2203; WAN024FE7; Start 736; Stop 760
gaaatcaagcctaagacctatcagc

SEQ ID NO: 318156 - DNA, 25 bp, Artificial
  probe
  misc_feature (1)..(25): SEQ ID NO: 2203; WAN024FE7; Start 571; Stop 595
cagaatgtcatcactacttcacgct

SEQ ID NO: 318157 - DNA, 25 bp, Artificial
  probe
  misc_feature (1)..(25): SEQ ID NO: 2203; WAN024FE7; Start 570; Stop 594
tcagaatgtcatcactacttcacgc

SEQ ID NO: 318158 - DNA, 25 bp, Artificial
  probe
  misc_feature (1)..(25): SEQ ID NO: 2203; WAN024FE7; Start 540; Stop 564
caatgctattatccaagaaatcacg

SEQ ID NO: 318159 - DNA, 25 bp, Artificial
  probe
  misc_feature (1)..(25): SEQ ID NO: 2203; WAN024FE7; Start 849; Stop 873
taatgaactcaaactccatcgtagc

SEQ ID NO: 318160 - DNA, 25 bp, Artificial
  probe
  misc_feature (1)..(25): SEQ ID NO: 2203; WAN024FE7; Start 846; Stop 870
tgataatgaactcaaactccatcgt

SEQ ID NO: 318161 - DNA, 25 bp, Artificial
  probe
  misc_feature (1)..(25): SEQ ID NO: 2203; WAN024FE7; Start 147; Stop 171
caatgaaatcacagatgtccagttg

SEQ ID NO: 318162 - DNA, 25 bp, Artificial
  probe
  misc_feature (1)..(25): SEQ ID NO: 2203; WAN024FE7; Start 914; Stop 938
gaactcttctgacaccaccaaatag

SEQ ID NO: 318163 - DNA, 25 bp, Artificial
  probe
  misc_feature (1)..(25): SEQ ID NO: 2203; WAN024FE7; Start 632; Stop 656
ttgacgacggatcttatatttacga

SEQ ID NO: 318164 - DNA, 25 bp, Artificial
  probe
  misc_feature (1)..(25): SEQ ID NO: 2203; WAN024FE7; Start 630; Stop 654
gcttgacgacggatcttatatttac

SEQ ID NO: 318165 - DNA, 25 bp, Artificial
  probe
  misc_feature (1)..(25): SEQ ID NO: 2204; WAN024FKA; Start 400; Stop 424
tctaatctgaacgagagtgaacatt

SEQ ID NO: 318166 - DNA, 25 bp, Artificial
  probe
  misc_feature (1)..(25): SEQ ID NO: 2204; WAN024FKA; Start 399; Stop 423
ttctaatctgaacgagagtgaacat

SEQ ID NO: 318167 - DNA, 25 bp, Artificial
  probe
  misc_feature (1)..(25): SEQ ID NO: 2204; WAN024FKA; Start 398; Stop 422
attctaatctgaacgagagtgaaca

SEQ ID NO: 318168 - DNA, 25 bp, Artificial
  probe
  misc_feature (1)..(25): SEQ ID NO: 2204; WAN024FKA; Start 404; Stop 428
atctgaacgagagtgaacattatct

SEQ ID NO: 318169 - DNA, 25 bp, Artificial
  probe
  misc_feature (1)..(25): SEQ ID NO: 2204; WAN024FKA; Start 94; Stop 118
tattcggtggatagtgttctcttat

SEQ ID NO: 318170 - DNA, 25 bp, Artificial
  probe
  misc_feature (1)..(25): SEQ ID NO: 2204; WAN024FKA; Start 403; Stop 427
aatctgaacgagagtgaacattatc

SEQ ID NO: 318171 - DNA, 25 bp, Artificial
  probe
  misc_feature (1)..(25): SEQ ID NO: 2204; WAN024FKA; Start 394; Stop 418
ccttattctaatctgaacgagagtg

SEQ ID NO: 318172 - DNA, 25 bp, Artificial
  probe
  misc_feature (1)..(25): SEQ ID NO: 2204; WAN024FKA; Start 393; Stop 417
tccttattctaatctgaacgagagt

SEQ ID NO: 318173 - DNA, 25 bp, Artificial
  probe
  misc_feature (1)..(25): SEQ ID NO: 2204; WAN024FKA; Start 401; Stop 425
ctaatctgaacgagagtgaacatta

SEQ ID NO: 318174 - DNA, 25 bp, Artificial
  probe
  misc_feature (1)..(25): SEQ ID NO: 2204; WAN024FKA; Start 95; Stop 119
attcggtggatagtgttctcttatc

SEQ ID NO: 318175 - DNA, 25 bp, Artificial
  probe
  misc_feature (1)..(25): SEQ ID NO: 2204; WAN024FKA; Start 93; Stop 117
ctattcggtggatagtgttctctta

SEQ ID NO: 318176 - DNA, 25 bp, Artificial
  probe
  misc_feature (1)..(25): SEQ ID NO: 2204; WAN024FKA; Start 694; Stop 718
cacaatgatgatggctcttatacgc

SEQ ID NO: 318177 - DNA, 25 bp, Artificial
  probe
  misc_feature (1)..(25): SEQ ID NO: 2204; WAN024FKA; Start 397; Stop 421
tattctaatctgaacgagagtgaac

SEQ ID NO: 318178 - DNA, 25 bp, Artificial
  probe
  misc_feature (1)..(25): SEQ ID NO: 2204; WAN024FKA; Start 96; Stop 120
ttcggtggatagtgttctcttatca

SEQ ID NO: 318179 - DNA, 25 bp, Artificial
  probe
  misc_feature (1)..(25): SEQ ID NO: 2204; WAN024FKA; Start 217; Stop 241
atattgtctgttgagattcaggagc

SEQ ID NO: 318180 - DNA, 25 bp, Artificial
  probe
  misc_feature (1)..(25): SEQ ID NO: 2204; WAN024FKA; Start 215; Stop 239
agatattgtctgttgagattcagga

SEQ ID NO: 318181 - DNA, 25 bp, Artificial
  probe
  misc_feature (1)..(25): SEQ ID NO: 2204; WAN024FKA; Start 100; Stop 124
gtggatagtgttctcttatcacgat

SEQ ID NO: 318182 - DNA, 25 bp, Artificial
  probe
  misc_feature (1)..(25): SEQ ID NO: 2204; WAN024FKA; Start 216; Stop 240
gatattgtctgttgagattcaggag

SEQ ID NO: 318183 - DNA, 25 bp, Artificial
  probe
  misc_feature (1)..(25): SEQ ID NO: 2204; WAN024FKA; Start 395; Stop 419
cttattctaatctgaacgagagtga

SEQ ID NO: 318184 - DNA, 25 bp, Artificial
  probe
  misc_feature (1)..(25): SEQ ID NO: 2204; WAN024FKA; Start 101; Stop 125
tggatagtgttctcttatcacgatt

SEQ ID NO: 318185 - DNA, 25 bp, Artificial
  probe
  misc_feature (1)..(25): SEQ ID NO: 2204; WAN024FKA; Start 402; Stop 426
taatctgaacgagagtgaacattat

SEQ ID NO: 318186 - DNA, 25 bp, Artificial
  probe
  misc_feature (1)..(25): SEQ ID NO: 2204; WAN024FKA; Start 198; Stop 222
cactcgtactcaagcacagatattg

SEQ ID NO: 318187 - DNA, 25 bp, Artificial
  probe
  misc_feature (1)..(25): SEQ ID NO: 2204; WAN024FKA; Start 392; Stop 416
atccttattctaatctgaacgagag

SEQ ID NO: 318188 - DNA, 25 bp, Artificial
  probe
  misc_feature (1)..(25): SEQ ID NO: 2204; WAN024FKA; Start 692; Stop 716
tccacaatgatgatggctcttatac

SEQ ID NO: 318189 - DNA, 25 bp, Artificial
  probe
  misc_feature (1)..(25): SEQ ID NO: 2204; WAN024FKA; Start 691; Stop 715
gtccacaatgatgatggctcttata

SEQ ID NO: 318190 - DNA, 25 bp, Artificial
  probe
  misc_feature (1)..(25): SEQ ID NO: 2204; WAN024FKA; Start 200; Stop 224
ctcgtactcaagcacagatattgtc

SEQ ID NO: 318191 - DNA, 25 bp, Artificial
  probe
  misc_feature (1)..(25): SEQ ID NO: 2204; WAN024FKA; Start 396; Stop 420
ttattctaatctgaacgagagtgaa

SEQ ID NO: 318192 - DNA, 25 bp, Artificial
  probe
  misc_feature (1)..(25): SEQ ID NO: 2204; WAN024FKA; Start 99; Stop 123
ggtggatagtgttctcttatcacga

SEQ ID NO: 318193 - DNA, 25 bp, Artificial
  probe
  misc_feature (1)..(25): SEQ ID NO: 2204; WAN024FKA; Start 97; Stop 121
tcggtggatagtgttctcttatcac

SEQ ID NO: 318194 - DNA, 25 bp, Artificial
  probe
  misc_feature (1)..(25): SEQ ID NO: 2204; WAN024FKA; Start 201; Stop 225
tcgtactcaagcacagatattgtct

SEQ ID NO: 318195 - DNA, 25 bp, Artificial
  probe
  misc_feature (1)..(25): SEQ ID NO: 2204; WAN024FKA; Start 92; Stop 116
gctattcggtggatagtgttctctt

SEQ ID NO: 318196 - DNA, 25 bp, Artificial
  probe
  misc_feature (1)..(25): SEQ ID NO: 2204; WAN024FKA; Start 199; Stop 223
actcgtactcaagcacagatattgt

SEQ ID NO: 318197 - DNA, 25 bp, Artificial
  probe
  misc_feature (1)..(25): SEQ ID NO: 2204; WAN024FKA; Start 485; Stop 509
gtattctcaagtctaatgggcgttt

SEQ ID NO: 318198 - DNA, 25 bp, Artificial
  probe
  misc_feature (1)..(25): SEQ ID NO: 2205; WAN024FYU; Start 751; Stop 775
accatcagtagaagatagagtagca

SEQ ID NO: 318199 - DNA, 25 bp, Artificial
  probe
  misc_feature (1)..(25): SEQ ID NO: 2205; WAN024FYU; Start 752; Stop 776
ccatcagtagaagatagagtagcac

SEQ ID NO: 318200 - DNA, 25 bp, Artificial
  probe
  misc_feature (1)..(25): SEQ ID NO: 2205; WAN024FYU; Start 175; Stop 199
cggtatgccaagagaagattatgaa

SEQ ID NO: 318201 - DNA, 25 bp, Artificial
  probe
  misc_feature (1)..(25): SEQ ID NO: 2205; WAN024FYU; Start 173; Stop 197
atcggtatgccaagagaagattatg

SEQ ID NO: 318202 - DNA, 25 bp, Artificial
  probe
  misc_feature (1)..(25): SEQ ID NO: 2205; WAN024FYU; Start 753; Stop 777
catcagtagaagatagagtagcaca

SEQ ID NO: 318203 - DNA, 25 bp, Artificial
  probe
  misc_feature (1)..(25): SEQ ID NO: 2205; WAN024FYU; Start 172; Stop 196
tatcggtatgccaagagaagattat

SEQ ID NO: 318204 - DNA, 25 bp, Artificial
  probe
  misc_feature (1)..(25): SEQ ID NO: 2205; WAN024FYU; Start 171; Stop 195
atatcggtatgccaagagaagatta

SEQ ID NO: 318205 - DNA, 25 bp, Artificial
  probe
  misc_feature (1)..(25): SEQ ID NO: 2205; WAN024FYU; Start 174; Stop 198
tcggtatgccaagagaagattatga

SEQ ID NO: 318206 - DNA, 25 bp, Artificial
  probe
  misc_feature (1)..(25): SEQ ID NO: 2205; WAN024FYU; Start 750; Stop 774
taccatcagtagaagatagagtagc

SEQ ID NO: 318207 - DNA, 25 bp, Artificial
  probe
  misc_feature (1)..(25): SEQ ID NO: 2205; WAN024FYU; Start 467; Stop 491
ggcactgtggagaatcttatagtta

SEQ ID NO: 318208 - DNA, 25 bp, Artificial
  probe
  misc_feature (1)..(25): SEQ ID NO: 2205; WAN024FYU; Start 86; Stop 110
aataacctgacctactatgctctag

SEQ ID NO: 318209 - DNA, 25 bp, Artificial
  probe
  misc_feature (1)..(25): SEQ ID NO: 2205; WAN024FYU; Start 595; Stop 619
cgtcggtaatgttctaggtagatat

SEQ ID NO: 318210 - DNA, 25 bp, Artificial
  probe
  misc_feature (1)..(25): SEQ ID NO: 2205; WAN024FYU; Start 754; Stop 778
atcagtagaagatagagtagcacat

SEQ ID NO: 318211 - DNA, 25 bp, Artificial
  probe
  misc_feature (1)..(25): SEQ ID NO: 2205; WAN024FYU; Start 466; Stop 490
tggcactgtggagaatcttatagtt

SEQ ID NO: 318212 - DNA, 25 bp, Artificial
  probe
  misc_feature (1)..(25): SEQ ID NO: 2205; WAN024FYU; Start 755; Stop 779
tcagtagaagatagagtagcacata

SEQ ID NO: 318213 - DNA, 25 bp, Artificial
  probe
  misc_feature (1)..(25): SEQ ID NO: 2205; WAN024FYU; Start 468; Stop 492
gcactgtggagaatcttatagttaa

SEQ ID NO: 318214 - DNA, 25 bp, Artificial
  probe
  misc_feature (1)..(25): SEQ ID NO: 2205; WAN024FYU; Start 465; Stop 489
gtggcactgtggagaatcttatagt

SEQ ID NO: 318215 - DNA, 25 bp, Artificial
  probe
  misc_feature (1)..(25): SEQ ID NO: 2205; WAN024FYU; Start 756; Stop 780
cagtagaagatagagtagcacataa

SEQ ID NO: 318216 - DNA, 25 bp, Artificial
  probe
  misc_feature (1)..(25): SEQ ID NO: 2205; WAN024FYU; Start 594; Stop 618
acgtcggtaatgttctaggtagata

SEQ ID NO: 318217 - DNA, 25 bp, Artificial
  probe
  misc_feature (1)..(25): SEQ ID NO: 2205; WAN024FYU; Start 593; Stop 617
tacgtcggtaatgttctaggtagat

SEQ ID NO: 318218 - DNA, 25 bp, Artificial
  probe
  misc_feature (1)..(25): SEQ ID NO: 2205; WAN024FYU; Start 148; Stop 172
cataccttgggatgacgatattgat

SEQ ID NO: 318219 - DNA, 25 bp, Artificial
  probe
  misc_feature (1)..(25): SEQ ID NO: 2205; WAN024FYU; Start 170; Stop 194
gatatcggtatgccaagagaagatt

SEQ ID NO: 318220 - DNA, 25 bp, Artificial
  probe
  misc_feature (1)..(25): SEQ ID NO: 2205; WAN024FYU; Start 176; Stop 200
ggtatgccaagagaagattatgaaa

SEQ ID NO: 318221 - DNA, 25 bp, Artificial
  probe
  misc_feature (1)..(25): SEQ ID NO: 2205; WAN024FYU; Start 150; Stop 174
taccttgggatgacgatattgatat

SEQ ID NO: 318222 - DNA, 25 bp, Artificial
  probe
  misc_feature (1)..(25): SEQ ID NO: 2205; WAN024FYU; Start 149; Stop 173
ataccttgggatgacgatattgata

SEQ ID NO: 318223 - DNA, 25 bp, Artificial
  probe
  misc_feature (1)..(25): SEQ ID NO: 2205; WAN024FYU; Start 598; Stop 622
cggtaatgttctaggtagatatagg

SEQ ID NO: 318224 - DNA, 25 bp, Artificial
  probe
  misc_feature (1)..(25): SEQ ID NO: 2205; WAN024FYU; Start 674; Stop 698
tttgaggatacgatgataaactgtc

SEQ ID NO: 318225 - DNA, 25 bp, Artificial
  probe
  misc_feature (1)..(25): SEQ ID NO: 2205; WAN024FYU; Start 464; Stop 488
cgtggcactgtggagaatcttatag

SEQ ID NO: 318226 - DNA, 25 bp, Artificial
  probe
  misc_feature (1)..(25): SEQ ID NO: 2205; WAN024FYU; Start 85; Stop 109
aaataacctgacctactatgctcta

SEQ ID NO: 318227 - DNA, 25 bp, Artificial
  probe
  misc_feature (1)..(25): SEQ ID NO: 2205; WAN024FYU; Start 167; Stop 191
attgatatcggtatgccaagagaag

SEQ ID NO: 318228 - DNA, 25 bp, Artificial
  probe
  misc_feature (1)..(25): SEQ ID NO: 2205; WAN024FYU; Start 400; Stop 424
taggctattgtttcaaagaatgctt

SEQ ID NO: 318229 - DNA, 25 bp, Artificial
  probe
  misc_feature (1)..(25): SEQ ID NO: 2205; WAN024FYU; Start 399; Stop 423
ttaggctattgtttcaaagaatgct

SEQ ID NO: 318230 - DNA, 25 bp, Artificial
  probe
  misc_feature (1)..(25): SEQ ID NO: 2205; WAN024FYU; Start 169; Stop 193
tgatatcggtatgccaagagaagat

SEQ ID NO: 318231 - DNA, 25 bp, Artificial
  probe
  misc_feature (1)..(25): SEQ ID NO: 2206; WAN024FES; Start 738; Stop 762
cgccttggtattgatgaactaacta

SEQ ID NO: 318232 - DNA, 25 bp, Artificial
  probe
  misc_feature (1)..(25): SEQ ID NO: 2206; WAN024FES; Start 739; Stop 763
gccttggtattgatgaactaactaa

SEQ ID NO: 318233 - DNA, 25 bp, Artificial
  probe
  misc_feature (1)..(25): SEQ ID NO: 2206; WAN024FES; Start 737; Stop 761
tcgccttggtattgatgaactaact

SEQ ID NO: 318234 - DNA, 25 bp, Artificial
  probe
  misc_feature (1)..(25): SEQ ID NO: 2206; WAN024FES; Start 736; Stop 760
gtcgccttggtattgatgaactaac

SEQ ID NO: 318235 - DNA, 25 bp, Artificial
  probe
  misc_feature (1)..(25): SEQ ID NO: 2206; WAN024FES; Start 84; Stop 108
ccatcgtgtagaagataccatgatt

SEQ ID NO: 318236 - DNA, 25 bp, Artificial
  probe
  misc_feature (1)..(25): SEQ ID NO: 2206; WAN024FES; Start 81; Stop 105
aatccatcgtgtagaagataccatg

SEQ ID NO: 318237 - DNA, 25 bp, Artificial
  probe
  misc_feature (1)..(25): SEQ ID NO: 2206; WAN024FES; Start 86; Stop 110
atcgtgtagaagataccatgattcg

SEQ ID NO: 318238 - DNA, 25 bp, Artificial
  probe
  misc_feature (1)..(25): SEQ ID NO: 2206; WAN024FES; Start 211; Stop 235
gtgacctcctcttcttataacatcg

SEQ ID NO: 318239 - DNA, 25 bp, Artificial
  probe
  misc_feature (1)..(25): SEQ ID NO: 2206; WAN024FES; Start 210; Stop 234
cgtgacctcctcttcttataacatc

SEQ ID NO: 318240 - DNA, 25 bp, Artificial
  probe
  misc_feature (1)..(25): SEQ ID NO: 2206; WAN024FES; Start 85; Stop 109
catcgtgtagaagataccatgattc

SEQ ID NO: 318241 - DNA, 25 bp, Artificial
  probe
  misc_feature (1)..(25): SEQ ID NO: 2206; WAN024FES; Start 735; Stop 759
tgtcgccttggtattgatgaactaa

SEQ ID NO: 318242 - DNA, 25 bp, Artificial
  probe
  misc_feature (1)..(25): SEQ ID NO: 2206; WAN024FES; Start 83; Stop 107
tccatcgtgtagaagataccatgat

SEQ ID NO: 318243 - DNA, 25 bp, Artificial
  probe
  misc_feature (1)..(25): SEQ ID NO: 2206; WAN024FES; Start 82; Stop 106
atccatcgtgtagaagataccatga

SEQ ID NO: 318244 - DNA, 25 bp, Artificial
  probe
  misc_feature (1)..(25): SEQ ID NO: 2206; WAN024FES; Start 645; Stop 669
ccgtgatattatgaccaaccacata

SEQ ID NO: 318245 - DNA, 25 bp, Artificial
  probe
  misc_feature (1)..(25): SEQ ID NO: 2206; WAN024FES; Start 212; Stop 236
tgacctcctcttcttataacatcga

SEQ ID NO: 318246 - DNA, 25 bp, Artificial
  probe
  misc_feature (1)..(25): SEQ ID NO: 2206; WAN024FES; Start 734; Stop 758
ctgtcgccttggtattgatgaacta

SEQ ID NO: 318247 - DNA, 25 bp, Artificial
  probe
  misc_feature (1)..(25): SEQ ID NO: 2206; WAN024FES; Start 213; Stop 237
gacctcctcttcttataacatcgaa

SEQ ID NO: 318248 - DNA, 25 bp, Artificial
  probe
  misc_feature (1)..(25): SEQ ID NO: 2206; WAN024FES; Start 25; Stop 49
gccgtcattgatgtgattatgctag

SEQ ID NO: 318249 - DNA, 25 bp, Artificial
  probe
  misc_feature (1)..(25): SEQ ID NO: 2206; WAN024FES; Start 79; Stop 103
gaaatccatcgtgtagaagatacca

SEQ ID NO: 318250 - DNA, 25 bp, Artificial
  probe
  misc_feature (1)..(25): SEQ ID NO: 2206; WAN024FES; Start 78; Stop 102
agaaatccatcgtgtagaagatacc

SEQ ID NO: 318251 - DNA, 25 bp, Artificial
  probe
  misc_feature (1)..(25): SEQ ID NO: 2206; WAN024FES; Start 75; Stop 99
ctcagaaatccatcgtgtagaagat

SEQ ID NO: 318252 - DNA, 25 bp, Artificial
  probe
  misc_feature (1)..(25): SEQ ID NO: 2206; WAN024FES; Start 644; Stop 668
tccgtgatattatgaccaaccacat

SEQ ID NO: 318253 - DNA, 25 bp, Artificial
  probe
  misc_feature (1)..(25): SEQ ID NO: 2206; WAN024FES; Start 80; Stop 104
aaatccatcgtgtagaagataccat

SEQ ID NO: 318254 - DNA, 25 bp, Artificial
  probe
  misc_feature (1)..(25): SEQ ID NO: 2206; WAN024FES; Start 209; Stop 233
gcgtgacctcctcttcttataacat

SEQ ID NO: 318255 - DNA, 25 bp, Artificial
  probe
  misc_feature (1)..(25): SEQ ID NO: 2206; WAN024FES; Start 676; Stop 700
ggtatgagtaagatgtttgaatccc

SEQ ID NO: 318256 - DNA, 25 bp, Artificial
  probe
  misc_feature (1)..(25): SEQ ID NO: 2206; WAN024FES; Start 283; Stop 307
cagattgacttagaaacagccttta

SEQ ID NO: 318257 - DNA, 25 bp, Artificial
  probe
  misc_feature (1)..(25): SEQ ID NO: 2206; WAN024FES; Start 77; Stop 101
cagaaatccatcgtgtagaagatac

SEQ ID NO: 318258 - DNA, 25 bp, Artificial
  probe
  misc_feature (1)..(25): SEQ ID NO: 2206; WAN024FES; Start 76; Stop 100
tcagaaatccatcgtgtagaagata

SEQ ID NO: 318259 - DNA, 25 bp, Artificial
  probe
  misc_feature (1)..(25): SEQ ID NO: 2206; WAN024FES; Start 24; Stop 48
tgccgtcattgatgtgattatgcta

SEQ ID NO: 318260 - DNA, 25 bp, Artificial
  probe
  misc_feature (1)..(25): SEQ ID NO: 2206; WAN024FES; Start 400; Stop 424
atgtttagcggaaatatctacgacg

SEQ ID NO: 318261 - DNA, 25 bp, Artificial
  probe
  misc_feature (1)..(25): SEQ ID NO: 2206; WAN024FES; Start 679; Stop 703
atgagtaagatgtttgaatccctgc

SEQ ID NO: 318262 - DNA, 25 bp, Artificial
  probe
  misc_feature (1)..(25): SEQ ID NO: 2206; WAN024FES; Start 399; Stop 423
tatgtttagcggaaatatctacgac

SEQ ID NO: 318263 - DNA, 25 bp, Artificial
  probe
  misc_feature (1)..(25): SEQ ID NO: 2206; WAN024FES; Start 728; Stop 752
gaacttctgtcgccttggtattgat

SEQ ID NO: 318264 - DNA, 25 bp, Artificial
  probe
  misc_feature (1)..(25): SEQ ID NO: 2207; WAN024C4W; Start 13; Stop 37
attgaatggctggataacctgatta

SEQ ID NO: 318265 - DNA, 25 bp, Artificial
  probe
  misc_feature (1)..(25): SEQ ID NO: 2207; WAN024C4W; Start 6; Stop 30
agaattgattgaatggctggataac

SEQ ID NO: 318266 - DNA, 25 bp, Artificial
  probe
  misc_feature (1)..(25): SEQ ID NO: 2207; WAN024C4W; Start 7; Stop 31
gaattgattgaatggctggataacc

SEQ ID NO: 318267 - DNA, 25 bp, Artificial
  probe
  misc_feature (1)..(25): SEQ ID NO: 2207; WAN024C4W; Start 4; Stop 28
gaagaattgattgaatggctggata

SEQ ID NO: 318268 - DNA, 25 bp, Artificial
  probe
  misc_feature (1)..(25): SEQ ID NO: 2207; WAN024C4W; Start 8; Stop 32
aattgattgaatggctggataacct

SEQ ID NO: 318269 - DNA, 25 bp, Artificial
  probe
  misc_feature (1)..(25): SEQ ID NO: 2207; WAN024C4W; Start 12; Stop 36
gattgaatggctggataacctgatt

SEQ ID NO: 318270 - DNA, 25 bp, Artificial
  probe
  misc_feature (1)..(25): SEQ ID NO: 2207; WAN024C4W; Start 18; Stop 42
atggctggataacctgattatgatt

SEQ ID NO: 318271 - DNA, 25 bp, Artificial
  probe
  misc_feature (1)..(25): SEQ ID NO: 2207; WAN024C4W; Start 17; Stop 41
aatggctggataacctgattatgat

SEQ ID NO: 318272 - DNA, 25 bp, Artificial
  probe
  misc_feature (1)..(25): SEQ ID NO: 2207; WAN024C4W; Start 14; Stop 38
ttgaatggctggataacctgattat

SEQ ID NO: 318273 - DNA, 25 bp, Artificial
  probe
  misc_feature (1)..(25): SEQ ID NO: 2207; WAN024C4W; Start 16; Stop 40
gaatggctggataacctgattatga

SEQ ID NO: 318274 - DNA, 25 bp, Artificial
  probe
  misc_feature (1)..(25): SEQ ID NO: 2207; WAN024C4W; Start 20; Stop 44
ggctggataacctgattatgattgt

SEQ ID NO: 318275 - DNA, 25 bp, Artificial
  probe
  misc_feature (1)..(25): SEQ ID NO: 2207; WAN024C4W; Start 19; Stop 43
tggctggataacctgattatgattg

SEQ ID NO: 318276 - DNA, 25 bp, Artificial
  probe
  misc_feature (1)..(25): SEQ ID NO: 2207; WAN024C4W; Start 15; Stop 39
tgaatggctggataacctgattatg

SEQ ID NO: 318277 - DNA, 25 bp, Artificial
  probe
  misc_feature (1)..(25): SEQ ID NO: 2207; WAN024C4W; Start 5; Stop 29
aagaattgattgaatggctggataa

SEQ ID NO: 318278 - DNA, 25 bp, Artificial
  probe
  misc_feature (1)..(25): SEQ ID NO: 2207; WAN024C4W; Start 21; Stop 45
gctggataacctgattatgattgtt

SEQ ID NO: 318279 - DNA, 25 bp, Artificial
  probe
  misc_feature (1)..(25): SEQ ID NO: 2207; WAN024C4W; Start 9; Stop 33
attgattgaatggctggataacctg

SEQ ID NO: 318280 - DNA, 25 bp, Artificial
  probe
  misc_feature (1)..(25): SEQ ID NO: 2207; WAN024C4W; Start 233; Stop 257
tctatgaagatatgcggatgaagta

SEQ ID NO: 318281 - DNA, 25 bp, Artificial
  probe
  misc_feature (1)..(25): SEQ ID NO: 2207; WAN024C4W; Start 3; Stop 27
ggaagaattgattgaatggctggat

SEQ ID NO: 318282 - DNA, 25 bp, Artificial
  probe
  misc_feature (1)..(25): SEQ ID NO: 2207; WAN024C4W; Start 234; Stop 258
ctatgaagatatgcggatgaagtat

SEQ ID NO: 318283 - DNA, 25 bp, Artificial
  probe
  misc_feature (1)..(25): SEQ ID NO: 2207; WAN024C4W; Start 236; Stop 260
atgaagatatgcggatgaagtatcg

SEQ ID NO: 318284 - DNA, 25 bp, Artificial
  probe
  misc_feature (1)..(25): SEQ ID NO: 2207; WAN024C4W; Start 1; Stop 25
atggaagaattgattgaatggctgg

SEQ ID NO: 318285 - DNA, 25 bp, Artificial
  probe
  misc_feature (1)..(25): SEQ ID NO: 2207; WAN024C4W; Start 11; Stop 35
tgattgaatggctggataacctgat

SEQ ID NO: 318286 - DNA, 25 bp, Artificial
  probe
  misc_feature (1)..(25): SEQ ID NO: 2207; WAN024C4W; Start 10; Stop 34
ttgattgaatggctggataacctga

SEQ ID NO: 318287 - DNA, 25 bp, Artificial
  probe
  misc_feature (1)..(25): SEQ ID NO: 2207; WAN024C4W; Start 238; Stop 262
gaagatatgcggatgaagtatcgtg

SEQ ID NO: 318288 - DNA, 25 bp, Artificial
  probe
  misc_feature (1)..(25): SEQ ID NO: 2207; WAN024C4W; Start 237; Stop 261
tgaagatatgcggatgaagtatcgt

SEQ ID NO: 318289 - DNA, 25 bp, Artificial
  probe
  misc_feature (1)..(25): SEQ ID NO: 2207; WAN024C4W; Start 235; Stop 259
tatgaagatatgcggatgaagtatc

SEQ ID NO: 318290 - DNA, 25 bp, Artificial
  probe
  misc_feature (1)..(25): SEQ ID NO: 2207; WAN024C4W; Start 155; Stop 179
tagcaaaggactatcgttatgtgac

SEQ ID NO: 318291 - DNA, 25 bp, Artificial
  probe
  misc_feature (1)..(25): SEQ ID NO: 2207; WAN024C4W; Start 2; Stop 26
tggaagaattgattgaatggctgga

SEQ ID NO: 318292 - DNA, 25 bp, Artificial
  probe
  misc_feature (1)..(25): SEQ ID NO: 2207; WAN024C4W; Start 162; Stop 186
ggactatcgttatgtgacccttaaa

SEQ ID NO: 318293 - DNA, 25 bp, Artificial
  probe
  misc_feature (1)..(25): SEQ ID NO: 2207; WAN024C4W; Start 44; Stop 68
ttaaagaactggaaggaagggaatc

SEQ ID NO: 318294 - DNA, 25 bp, Artificial
  probe
  misc_feature (1)..(25): SEQ ID NO: 2207; WAN024C4W; Start 232; Stop 256
atctatgaagatatgcggatgaagt

SEQ ID NO: 318295 - DNA, 25 bp, Artificial
  probe
  misc_feature (1)..(25): SEQ ID NO: 2207; WAN024C4W; Start 39; Stop 63
gattgttaaagaactggaaggaagg

SEQ ID NO: 318296 - DNA, 25 bp, Artificial
  probe
  misc_feature (1)..(25): SEQ ID NO: 2207; WAN024C4W; Start 154; Stop 178
ctagcaaaggactatcgttatgtga

SEQ ID NO: 318297 - DNA, 25 bp, Artificial
  probe
  misc_feature (1)..(25): SEQ ID NO: 2208; WAN024EVH; Start 588; Stop 612
attggatgctgatgagattgagatg

SEQ ID NO: 318298 - DNA, 25 bp, Artificial
  probe
  misc_feature (1)..(25): SEQ ID NO: 2208; WAN024EVH; Start 587; Stop 611
cattggatgctgatgagattgagat

SEQ ID NO: 318299 - DNA, 25 bp, Artificial
  probe
  misc_feature (1)..(25): SEQ ID NO: 2208; WAN024EVH; Start 592; Stop 616
gatgctgatgagattgagatgctac

SEQ ID NO: 318300 - DNA, 25 bp, Artificial
  probe
  misc_feature (1)..(25): SEQ ID NO: 2208; WAN024EVH; Start 688; Stop 712
gatattcaggatgatagtcaagcca

SEQ ID NO: 318301 - DNA, 25 bp, Artificial
  probe
  misc_feature (1)..(25): SEQ ID NO: 2208; WAN024EVH; Start 686; Stop 710
tggatattcaggatgatagtcaagc

SEQ ID NO: 318302 - DNA, 25 bp, Artificial
  probe
  misc_feature (1)..(25): SEQ ID NO: 2208; WAN024EVH; Start 684; Stop 708
ggtggatattcaggatgatagtcaa

SEQ ID NO: 318303 - DNA, 25 bp, Artificial
  probe
  misc_feature (1)..(25): SEQ ID NO: 2208; WAN024EVH; Start 787; Stop 811
atcattcacaccaagagtctcctta

SEQ ID NO: 318304 - DNA, 25 bp, Artificial
  probe
  misc_feature (1)..(25): SEQ ID NO: 2208; WAN024EVH; Start 692; Stop 716
ttcaggatgatagtcaagccattat

SEQ ID NO: 318305 - DNA, 25 bp, Artificial
  probe
  misc_feature (1)..(25): SEQ ID NO: 2208; WAN024EVH; Start 691; Stop 715
attcaggatgatagtcaagccatta

SEQ ID NO: 318306 - DNA, 25 bp, Artificial
  probe
  misc_feature (1)..(25): SEQ ID NO: 2208; WAN024EVH; Start 690; Stop 714
tattcaggatgatagtcaagccatt

SEQ ID NO: 318307 - DNA, 25 bp, Artificial
  probe
  misc_feature (1)..(25): SEQ ID NO: 2208; WAN024EVH; Start 683; Stop 707
tggtggatattcaggatgatagtca

SEQ ID NO: 318308 - DNA, 25 bp, Artificial
  probe
  misc_feature (1)..(25): SEQ ID NO: 2208; WAN024EVH; Start 682; Stop 706
atggtggatattcaggatgatagtc

SEQ ID NO: 318309 - DNA, 25 bp, Artificial
  probe
  misc_feature (1)..(25): SEQ ID NO: 2208; WAN024EVH; Start 689; Stop 713
atattcaggatgatagtcaagccat

SEQ ID NO: 318310 - DNA, 25 bp, Artificial
  probe
  misc_feature (1)..(25): SEQ ID NO: 2208; WAN024EVH; Start 687; Stop 711
ggatattcaggatgatagtcaagcc

SEQ ID NO: 318311 - DNA, 25 bp, Artificial
  probe
  misc_feature (1)..(25): SEQ ID NO: 2208; WAN024EVH; Start 596; Stop 620
ctgatgagattgagatgctacaagg

SEQ ID NO: 318312 - DNA, 25 bp, Artificial
  probe
  misc_feature (1)..(25): SEQ ID NO: 2208; WAN024EVH; Start 585; Stop 609
aacattggatgctgatgagattgag

SEQ ID NO: 318313 - DNA, 25 bp, Artificial
  probe
  misc_feature (1)..(25): SEQ ID NO: 2208; WAN024EVH; Start 788; Stop 812
tcattcacaccaagagtctccttaa

SEQ ID NO: 318314 - DNA, 25 bp, Artificial
  probe
  misc_feature (1)..(25): SEQ ID NO: 2208; WAN024EVH; Start 598; Stop 622
gatgagattgagatgctacaaggtg

SEQ ID NO: 318315 - DNA, 25 bp, Artificial
  probe
  misc_feature (1)..(25): SEQ ID NO: 2208; WAN024EVH; Start 693; Stop 717
tcaggatgatagtcaagccattatc

SEQ ID NO: 318316 - DNA, 25 bp, Artificial
  probe
  misc_feature (1)..(25): SEQ ID NO: 2208; WAN024EVH; Start 593; Stop 617
atgctgatgagattgagatgctaca

SEQ ID NO: 318317 - DNA, 25 bp, Artificial
  probe
  misc_feature (1)..(25): SEQ ID NO: 2208; WAN024EVH; Start 597; Stop 621
tgatgagattgagatgctacaaggt

SEQ ID NO: 318318 - DNA, 25 bp, Artificial
  probe
  misc_feature (1)..(25): SEQ ID NO: 2208; WAN024EVH; Start 685; Stop 709
gtggatattcaggatgatagtcaag

SEQ ID NO: 318319 - DNA, 25 bp, Artificial
  probe
  misc_feature (1)..(25): SEQ ID NO: 2208; WAN024EVH; Start 595; Stop 619
gctgatgagattgagatgctacaag

SEQ ID NO: 318320 - DNA, 25 bp, Artificial
  probe
  misc_feature (1)..(25): SEQ ID NO: 2208; WAN024EVH; Start 786; Stop 810
aatcattcacaccaagagtctcctt

SEQ ID NO: 318321 - DNA, 25 bp, Artificial
  probe
  misc_feature (1)..(25): SEQ ID NO: 2208; WAN024EVH; Start 591; Stop 615
ggatgctgatgagattgagatgcta

SEQ ID NO: 318322 - DNA, 25 bp, Artificial
  probe
  misc_feature (1)..(25): SEQ ID NO: 2208; WAN024EVH; Start 586; Stop 610
acattggatgctgatgagattgaga

SEQ ID NO: 318323 - DNA, 25 bp, Artificial
  probe
  misc_feature (1)..(25): SEQ ID NO: 2208; WAN024EVH; Start 1066; Stop 1090
gaggatacctacattgttcaaggaa

SEQ ID NO: 318324 - DNA, 25 bp, Artificial
  probe
  misc_feature (1)..(25): SEQ ID NO: 2208; WAN024EVH; Start 681; Stop 705
tatggtggatattcaggatgatagt

SEQ ID NO: 318325 - DNA, 25 bp, Artificial
  probe
  misc_feature (1)..(25): SEQ ID NO: 2208; WAN024EVH; Start 594; Stop 618
tgctgatgagattgagatgctacaa

SEQ ID NO: 318326 - DNA, 25 bp, Artificial
  probe
  misc_feature (1)..(25): SEQ ID NO: 2208; WAN024EVH; Start 602; Stop 626
agattgagatgctacaaggtgtctt

SEQ ID NO: 318327 - DNA, 25 bp, Artificial
  probe
  misc_feature (1)..(25): SEQ ID NO: 2208; WAN024EVH; Start 599; Stop 623
atgagattgagatgctacaaggtgt

SEQ ID NO: 318328 - DNA, 25 bp, Artificial
  probe
  misc_feature (1)..(25): SEQ ID NO: 2208; WAN024EVH; Start 785; Stop 809
gaatcattcacaccaagagtctcct

SEQ ID NO: 318329 - DNA, 25 bp, Artificial
  probe
  misc_feature (1)..(25): SEQ ID NO: 2208; WAN024EVH; Start 601; Stop 625
gagattgagatgctacaaggtgtct

SEQ ID NO: 318330 - DNA, 25 bp, Artificial
  probe
  misc_feature (1)..(25): SEQ ID NO: 2209; WAN024FH5; Start 155; Stop 179
aacttgctcatcaccaaattgttca

SEQ ID NO: 318331 - DNA, 25 bp, Artificial
  probe
  misc_feature (1)..(25): SEQ ID NO: 2209; WAN024FH5; Start 153; Stop 177
tgaacttgctcatcaccaaattgtt

SEQ ID NO: 318332 - DNA, 25 bp, Artificial
  probe
  misc_feature (1)..(25): SEQ ID NO: 2209; WAN024FH5; Start 46; Stop 70
ggattactgagtcgtcaagtgaagc

SEQ ID NO: 318333 - DNA, 25 bp, Artificial
  probe
  misc_feature (1)..(25): SEQ ID NO: 2209; WAN024FH5; Start 156; Stop 180
acttgctcatcaccaaattgttcag

SEQ ID NO: 318334 - DNA, 25 bp, Artificial
  probe
  misc_feature (1)..(25): SEQ ID NO: 2209; WAN024FH5; Start 117; Stop 141
tttggaggcaatacatcgtatgaac

SEQ ID NO: 318335 - DNA, 25 bp, Artificial
  probe
  misc_feature (1)..(25): SEQ ID NO: 2209; WAN024FH5; Start 40; Stop 64
catctgggattactgagtcgtcaag

SEQ ID NO: 318336 - DNA, 25 bp, Artificial
  probe
  misc_feature (1)..(25): SEQ ID NO: 2209; WAN024FH5; Start 45; Stop 69
gggattactgagtcgtcaagtgaag

SEQ ID NO: 318337 - DNA, 25 bp, Artificial
  probe
  misc_feature (1)..(25): SEQ ID NO: 2209; WAN024FH5; Start 41; Stop 65
atctgggattactgagtcgtcaagt

SEQ ID NO: 318338 - DNA, 25 bp, Artificial
  probe
  misc_feature (1)..(25): SEQ ID NO: 2209; WAN024FH5; Start 135; Stop 159
tatgaacgacgccagatgtgaactt

SEQ ID NO: 318339 - DNA, 25 bp, Artificial
  probe
  misc_feature (1)..(25): SEQ ID NO: 2209; WAN024FH5; Start 44; Stop 68
tgggattactgagtcgtcaagtgaa

SEQ ID NO: 318340 - DNA, 25 bp, Artificial
  probe
  misc_feature (1)..(25): SEQ ID NO: 2209; WAN024FH5; Start 118; Stop 142
ttggaggcaatacatcgtatgaacg

SEQ ID NO: 318341 - DNA, 25 bp, Artificial
  probe
  misc_feature (1)..(25): SEQ ID NO: 2209; WAN024FH5; Start 27; Stop 51
ttcaagttttcagcatctgggatta

SEQ ID NO: 318342 - DNA, 25 bp, Artificial
  probe
  misc_feature (1)..(25): SEQ ID NO: 2209; WAN024FH5; Start 19; Stop 43
aagtcactttcaagttttcagcatc

SEQ ID NO: 318343 - DNA, 25 bp, Artificial
  probe
  misc_feature (1)..(25): SEQ ID NO: 2209; WAN024FH5; Start 43; Stop 67
ctgggattactgagtcgtcaagtga

SEQ ID NO: 318344 - DNA, 25 bp, Artificial
  probe
  misc_feature (1)..(25): SEQ ID NO: 2209; WAN024FH5; Start 42; Stop 66
tctgggattactgagtcgtcaagtg

SEQ ID NO: 318345 - DNA, 25 bp, Artificial
  probe
  misc_feature (1)..(25): SEQ ID NO: 2209; WAN024FH5; Start 20; Stop 44
agtcactttcaagttttcagcatct

SEQ ID NO: 318346 - DNA, 25 bp, Artificial
  probe
  misc_feature (1)..(25): SEQ ID NO: 2209; WAN024FH5; Start 163; Stop 187
catcaccaaattgttcagcagcttc

SEQ ID NO: 318347 - DNA, 25 bp, Artificial
  probe
  misc_feature (1)..(25): SEQ ID NO: 2209; WAN024FH5; Start 30; Stop 54
aagttttcagcatctgggattactg

SEQ ID NO: 318348 - DNA, 25 bp, Artificial
  probe
  misc_feature (1)..(25): SEQ ID NO: 2209; WAN024FH5; Start 29; Stop 53
caagttttcagcatctgggattact

SEQ ID NO: 318349 - DNA, 25 bp, Artificial
  probe
  misc_feature (1)..(25): SEQ ID NO: 2209; WAN024FH5; Start 28; Stop 52
tcaagttttcagcatctgggattac

SEQ ID NO: 318350 - DNA, 25 bp, Artificial
  probe
  misc_feature (1)..(25): SEQ ID NO: 2209; WAN024FH5; Start 26; Stop 50
tttcaagttttcagcatctgggatt

SEQ ID NO: 318351 - DNA, 25 bp, Artificial
  probe
  misc_feature (1)..(25): SEQ ID NO: 2209; WAN024FH5; Start 11; Stop 35
acgttccaaagtcactttcaagttt

SEQ ID NO: 318352 - DNA, 25 bp, Artificial
  probe
  misc_feature (1)..(25): SEQ ID NO: 2209; WAN024FH5; Start 25; Stop 49
ctttcaagttttcagcatctgggat

SEQ ID NO: 318353 - DNA, 25 bp, Artificial
  probe
  misc_feature (1)..(25): SEQ ID NO: 2209; WAN024FH5; Start 21; Stop 45
gtcactttcaagttttcagcatctg

SEQ ID NO: 318354 - DNA, 25 bp, Artificial
  probe
  misc_feature (1)..(25): SEQ ID NO: 2209; WAN024FH5; Start 154; Stop 178
gaacttgctcatcaccaaattgttc

SEQ ID NO: 318355 - DNA, 25 bp, Artificial
  probe
  misc_feature (1)..(25): SEQ ID NO: 2209; WAN024FH5; Start 164; Stop 188
atcaccaaattgttcagcagcttca

SEQ ID NO: 318356 - DNA, 25 bp, Artificial
  probe
  misc_feature (1)..(25): SEQ ID NO: 2209; WAN024FH5; Start 162; Stop 186
tcatcaccaaattgttcagcagctt

SEQ ID NO: 318357 - DNA, 25 bp, Artificial
  probe
  misc_feature (1)..(25): SEQ ID NO: 2209; WAN024FH5; Start 197; Stop 221
tttaccagtcaaaccaccgtagtga

SEQ ID NO: 318358 - DNA, 25 bp, Artificial
  probe
  misc_feature (1)..(25): SEQ ID NO: 2209; WAN024FH5; Start 10; Stop 34
cacgttccaaagtcactttcaagtt

SEQ ID NO: 318359 - DNA, 25 bp, Artificial
  probe
  misc_feature (1)..(25): SEQ ID NO: 2209; WAN024FH5; Start 22; Stop 46
tcactttcaagttttcagcatctgg

SEQ ID NO: 318360 - DNA, 25 bp, Artificial
  probe
  misc_feature (1)..(25): SEQ ID NO: 2209; WAN024FH5; Start 39; Stop 63
gcatctgggattactgagtcgtcaa

SEQ ID NO: 318361 - DNA, 25 bp, Artificial
  probe
  misc_feature (1)..(25): SEQ ID NO: 2209; WAN024FH5; Start 157; Stop 181
cttgctcatcaccaaattgttcagc

SEQ ID NO: 318362 - DNA, 25 bp, Artificial
  probe
  misc_feature (1)..(25): SEQ ID NO: 2209; WAN024FH5; Start 161; Stop 185
ctcatcaccaaattgttcagcagct

SEQ ID NO: 318363 - DNA, 25 bp, Artificial
  probe
  misc_feature (1)..(25): SEQ ID NO: 2210; WAN024GLU; Start 100; Stop 124
ctctatcgcacagacaatgacatta

SEQ ID NO: 318364 - DNA, 25 bp, Artificial
  probe
  misc_feature (1)..(25): SEQ ID NO: 2210; WAN024GLU; Start 101; Stop 125
tctatcgcacagacaatgacattac

SEQ ID NO: 318365 - DNA, 25 bp, Artificial
  probe
  misc_feature (1)..(25): SEQ ID NO: 2210; WAN024GLU; Start 102; Stop 126
ctatcgcacagacaatgacattacc

SEQ ID NO: 318366 - DNA, 25 bp, Artificial
  probe
  misc_feature (1)..(25): SEQ ID NO: 2210; WAN024GLU; Start 4; Stop 28
gaagagtatcatatcgacacggtta

SEQ ID NO: 318367 - DNA, 25 bp, Artificial
  probe
  misc_feature (1)..(25): SEQ ID NO: 2210; WAN024GLU; Start 5; Stop 29
aagagtatcatatcgacacggttac

SEQ ID NO: 318368 - DNA, 25 bp, Artificial
  probe
  misc_feature (1)..(25): SEQ ID NO: 2210; WAN024GLU; Start 98; Stop 122
ctctctatcgcacagacaatgacat

SEQ ID NO: 318369 - DNA, 25 bp, Artificial
  probe
  misc_feature (1)..(25): SEQ ID NO: 2210; WAN024GLU; Start 103; Stop 127
tatcgcacagacaatgacattacca

SEQ ID NO: 318370 - DNA, 25 bp, Artificial
  probe
  misc_feature (1)..(25): SEQ ID NO: 2210; WAN024GLU; Start 99; Stop 123
tctctatcgcacagacaatgacatt

SEQ ID NO: 318371 - DNA, 25 bp, Artificial
  probe
  misc_feature (1)..(25): SEQ ID NO: 2210; WAN024GLU; Start 71; Stop 95
ccgcttggaatgataatttgatgat

SEQ ID NO: 318372 - DNA, 25 bp, Artificial
  probe
  misc_feature (1)..(25): SEQ ID NO: 2210; WAN024GLU; Start 6; Stop 30
agagtatcatatcgacacggttacc

SEQ ID NO: 318373 - DNA, 25 bp, Artificial
  probe
  misc_feature (1)..(25): SEQ ID NO: 2210; WAN024GLU; Start 64; Stop 88
catgtcaccgcttggaatgataatt

SEQ ID NO: 318374 - DNA, 25 bp, Artificial
  probe
  misc_feature (1)..(25): SEQ ID NO: 2210; WAN024GLU; Start 23; Stop 47
cggttaccagtgacaaagattctat

SEQ ID NO: 318375 - DNA, 25 bp, Artificial
  probe
  misc_feature (1)..(25): SEQ ID NO: 2210; WAN024GLU; Start 8; Stop 32
agtatcatatcgacacggttaccag

SEQ ID NO: 318376 - DNA, 25 bp, Artificial
  probe
  misc_feature (1)..(25): SEQ ID NO: 2210; WAN024GLU; Start 7; Stop 31
gagtatcatatcgacacggttacca

SEQ ID NO: 318377 - DNA, 25 bp, Artificial
  probe
  misc_feature (1)..(25): SEQ ID NO: 2210; WAN024GLU; Start 70; Stop 94
accgcttggaatgataatttgatga

SEQ ID NO: 318378 - DNA, 25 bp, Artificial
  probe
  misc_feature (1)..(25): SEQ ID NO: 2210; WAN024GLU; Start 69; Stop 93
caccgcttggaatgataatttgatg

SEQ ID NO: 318379 - DNA, 25 bp, Artificial
  probe
  misc_feature (1)..(25): SEQ ID NO: 2210; WAN024GLU; Start 107; Stop 131
gcacagacaatgacattaccaaatt

SEQ ID NO: 318380 - DNA, 25 bp, Artificial
  probe
  misc_feature (1)..(25): SEQ ID NO: 2210; WAN024GLU; Start 24; Stop 48
ggttaccagtgacaaagattctatc

SEQ ID NO: 318381 - DNA, 25 bp, Artificial
  probe
  misc_feature (1)..(25): SEQ ID NO: 2210; WAN024GLU; Start 1; Stop 25
atggaagagtatcatatcgacacgg

SEQ ID NO: 318382 - DNA, 25 bp, Artificial
  probe
  misc_feature (1)..(25): SEQ ID NO: 2210; WAN024GLU; Start 3; Stop 27
ggaagagtatcatatcgacacggtt

SEQ ID NO: 318383 - DNA, 25 bp, Artificial
  probe
  misc_feature (1)..(25): SEQ ID NO: 2210; WAN024GLU; Start 9; Stop 33
gtatcatatcgacacggttaccagt

SEQ ID NO: 318384 - DNA, 25 bp, Artificial
  probe
  misc_feature (1)..(25): SEQ ID NO: 2210; WAN024GLU; Start 84; Stop 108
taatttgatgatccctctctatcgc

SEQ ID NO: 318385 - DNA, 25 bp, Artificial
  probe
  misc_feature (1)..(25): SEQ ID NO: 2210; WAN024GLU; Start 104; Stop 128
atcgcacagacaatgacattaccaa

SEQ ID NO: 318386 - DNA, 25 bp, Artificial
  probe
  misc_feature (1)..(25): SEQ ID NO: 2210; WAN024GLU; Start 68; Stop 92
tcaccgcttggaatgataatttgat

SEQ ID NO: 318387 - DNA, 25 bp, Artificial
  probe
  misc_feature (1)..(25): SEQ ID NO: 2210; WAN024GLU; Start 72; Stop 96
cgcttggaatgataatttgatgatc

SEQ ID NO: 318388 - DNA, 25 bp, Artificial
  probe
  misc_feature (1)..(25): SEQ ID NO: 2210; WAN024GLU; Start 22; Stop 46
acggttaccagtgacaaagattcta

SEQ ID NO: 318389 - DNA, 25 bp, Artificial
  probe
  misc_feature (1)..(25): SEQ ID NO: 2210; WAN024GLU; Start 65; Stop 89
atgtcaccgcttggaatgataattt

SEQ ID NO: 318390 - DNA, 25 bp, Artificial
  probe
  misc_feature (1)..(25): SEQ ID NO: 2210; WAN024GLU; Start 85; Stop 109
aatttgatgatccctctctatcgca

SEQ ID NO: 318391 - DNA, 25 bp, Artificial
  probe
  misc_feature (1)..(25): SEQ ID NO: 2210; WAN024GLU; Start 365; Stop 389
acgatagtttctttagctcccattt

SEQ ID NO: 318392 - DNA, 25 bp, Artificial
  probe
  misc_feature (1)..(25): SEQ ID NO: 2210; WAN024GLU; Start 67; Stop 91
gtcaccgcttggaatgataatttga

SEQ ID NO: 318393 - DNA, 25 bp, Artificial
  probe
  misc_feature (1)..(25): SEQ ID NO: 2210; WAN024GLU; Start 10; Stop 34
tatcatatcgacacggttaccagtg

SEQ ID NO: 318394 - DNA, 25 bp, Artificial
  probe
  misc_feature (1)..(25): SEQ ID NO: 2210; WAN024GLU; Start 364; Stop 388
aacgatagtttctttagctcccatt

SEQ ID NO: 318395 - DNA, 25 bp, Artificial
  probe
  misc_feature (1)..(25): SEQ ID NO: 2210; WAN024GLU; Start 66; Stop 90
tgtcaccgcttggaatgataatttg

SEQ ID NO: 318396 - DNA, 25 bp, Artificial
  probe
  misc_feature (1)..(25): SEQ ID NO: 2211; WAN024F2X; Start 3; Stop 27
ggaagagttagtgaccttagattgt

SEQ ID NO: 318397 - DNA, 25 bp, Artificial
  probe
  misc_feature (1)..(25): SEQ ID NO: 2211; WAN024F2X; Start 2; Stop 26
tggaagagttagtgaccttagattg

SEQ ID NO: 318398 - DNA, 25 bp, Artificial
  probe
  misc_feature (1)..(25): SEQ ID NO: 2211; WAN024F2X; Start 1; Stop 25
atggaagagttagtgaccttagatt

SEQ ID NO: 318399 - DNA, 25 bp, Artificial
  probe
  misc_feature (1)..(25): SEQ ID NO: 2211; WAN024F2X; Start 4; Stop 28
gaagagttagtgaccttagattgtt

SEQ ID NO: 318400 - DNA, 25 bp, Artificial
  probe
  misc_feature (1)..(25): SEQ ID NO: 2211; WAN024F2X; Start 52; Stop 76
gaagccaatgccaacaagtatagtt

SEQ ID NO: 318401 - DNA, 25 bp, Artificial
  probe
  misc_feature (1)..(25): SEQ ID NO: 2211; WAN024F2X; Start 50; Stop 74
ttgaagccaatgccaacaagtatag

SEQ ID NO: 318402 - DNA, 25 bp, Artificial
  probe
  misc_feature (1)..(25): SEQ ID NO: 2211; WAN024F2X; Start 51; Stop 75
tgaagccaatgccaacaagtatagt

SEQ ID NO: 318403 - DNA, 25 bp, Artificial
  probe
  misc_feature (1)..(25): SEQ ID NO: 2211; WAN024F2X; Start 7; Stop 31
gagttagtgaccttagattgtttgt

SEQ ID NO: 318404 - DNA, 25 bp, Artificial
  probe
  misc_feature (1)..(25): SEQ ID NO: 2211; WAN024F2X; Start 6; Stop 30
agagttagtgaccttagattgtttg

SEQ ID NO: 318405 - DNA, 25 bp, Artificial
  probe
  misc_feature (1)..(25): SEQ ID NO: 2211; WAN024F2X; Start 49; Stop 73
attgaagccaatgccaacaagtata

SEQ ID NO: 318406 - DNA, 25 bp, Artificial
  probe
  misc_feature (1)..(25): SEQ ID NO: 2211; WAN024F2X; Start 8; Stop 32
agttagtgaccttagattgtttgtt

SEQ ID NO: 318407 - DNA, 25 bp, Artificial
  probe
  misc_feature (1)..(25): SEQ ID NO: 2211; WAN024F2X; Start 53; Stop 77
aagccaatgccaacaagtatagttt

SEQ ID NO: 318408 - DNA, 25 bp, Artificial
  probe
  misc_feature (1)..(25): SEQ ID NO: 2211; WAN024F2X; Start 41; Stop 65
gaactaagattgaagccaatgccaa

SEQ ID NO: 318409 - DNA, 25 bp, Artificial
  probe
  misc_feature (1)..(25): SEQ ID NO: 2211; WAN024F2X; Start 242; Stop 266
ataatgacaaggaggatagctacac

SEQ ID NO: 318410 - DNA, 25 bp, Artificial
  probe
  misc_feature (1)..(25): SEQ ID NO: 2211; WAN024F2X; Start 9; Stop 33
gttagtgaccttagattgtttgttt

SEQ ID NO: 318411 - DNA, 25 bp, Artificial
  probe
  misc_feature (1)..(25): SEQ ID NO: 2211; WAN024F2X; Start 243; Stop 267
taatgacaaggaggatagctacaca

SEQ ID NO: 318412 - DNA, 25 bp, Artificial
  probe
  misc_feature (1)..(25): SEQ ID NO: 2211; WAN024F2X; Start 5; Stop 29
aagagttagtgaccttagattgttt

SEQ ID NO: 318413 - DNA, 25 bp, Artificial
  probe
  misc_feature (1)..(25): SEQ ID NO: 2211; WAN024F2X; Start 48; Stop 72
gattgaagccaatgccaacaagtat

SEQ ID NO: 318414 - DNA, 25 bp, Artificial
  probe
  misc_feature (1)..(25): SEQ ID NO: 2211; WAN024F2X; Start 45; Stop 69
taagattgaagccaatgccaacaag

SEQ ID NO: 318415 - DNA, 25 bp, Artificial
  probe
  misc_feature (1)..(25): SEQ ID NO: 2211; WAN024F2X; Start 44; Stop 68
ctaagattgaagccaatgccaacaa

SEQ ID NO: 318416 - DNA, 25 bp, Artificial
  probe
  misc_feature (1)..(25): SEQ ID NO: 2211; WAN024F2X; Start 42; Stop 66
aactaagattgaagccaatgccaac

SEQ ID NO: 318417 - DNA, 25 bp, Artificial
  probe
  misc_feature (1)..(25): SEQ ID NO: 2211; WAN024F2X; Start 412; Stop 436
aacttgaaagctaaagaatgtcagg

SEQ ID NO: 318418 - DNA, 25 bp, Artificial
  probe
  misc_feature (1)..(25): SEQ ID NO: 2211; WAN024F2X; Start 241; Stop 265
tataatgacaaggaggatagctaca

SEQ ID NO: 318419 - DNA, 25 bp, Artificial
  probe
  misc_feature (1)..(25): SEQ ID NO: 2211; WAN024F2X; Start 13; Stop 37
gtgaccttagattgtttgtttattg

SEQ ID NO: 318420 - DNA, 25 bp, Artificial
  probe
  misc_feature (1)..(25): SEQ ID NO: 2211; WAN024F2X; Start 105; Stop 129
ctccgccaaacttcaagaacagata

SEQ ID NO: 318421 - DNA, 25 bp, Artificial
  probe
  misc_feature (1)..(25): SEQ ID NO: 2211; WAN024F2X; Start 244; Stop 268
aatgacaaggaggatagctacacac

SEQ ID NO: 318422 - DNA, 25 bp, Artificial
  probe
  misc_feature (1)..(25): SEQ ID NO: 2211; WAN024F2X; Start 14; Stop 38
tgaccttagattgtttgtttattga

SEQ ID NO: 318423 - DNA, 25 bp, Artificial
  probe
  misc_feature (1)..(25): SEQ ID NO: 2211; WAN024F2X; Start 12; Stop 36
agtgaccttagattgtttgtttatt

SEQ ID NO: 318424 - DNA, 25 bp, Artificial
  probe
  misc_feature (1)..(25): SEQ ID NO: 2211; WAN024F2X; Start 106; Stop 130
tccgccaaacttcaagaacagatac

SEQ ID NO: 318425 - DNA, 25 bp, Artificial
  probe
  misc_feature (1)..(25): SEQ ID NO: 2211; WAN024F2X; Start 413; Stop 437
acttgaaagctaaagaatgtcaggc

SEQ ID NO: 318426 - DNA, 25 bp, Artificial
  probe
  misc_feature (1)..(25): SEQ ID NO: 2211; WAN024F2X; Start 411; Stop 435
aaacttgaaagctaaagaatgtcag

SEQ ID NO: 318427 - DNA, 25 bp, Artificial
  probe
  misc_feature (1)..(25): SEQ ID NO: 2211; WAN024F2X; Start 47; Stop 71
agattgaagccaatgccaacaagta

SEQ ID NO: 318428 - DNA, 25 bp, Artificial
  probe
  misc_feature (1)..(25): SEQ ID NO: 2211; WAN024F2X; Start 43; Stop 67
actaagattgaagccaatgccaaca

SEQ ID NO: 318429 - DNA, 25 bp, Artificial
  probe
  misc_feature (1)..(25): SEQ ID NO: 2212; WAN024DAB-5; Start 576; Stop 600
tgtaagttcatccgcagattattca

SEQ ID NO: 318430 - DNA, 25 bp, Artificial
  probe
  misc_feature (1)..(25): SEQ ID NO: 2212; WAN024DAB-5; Start 748; Stop 772
atgaagtcagagaacacaggtaatc

SEQ ID NO: 318431 - DNA, 25 bp, Artificial
  probe
  misc_feature (1)..(25): SEQ ID NO: 2212; WAN024DAB-5; Start 747; Stop 771
gatgaagtcagagaacacaggtaat

SEQ ID NO: 318432 - DNA, 25 bp, Artificial
  probe
  misc_feature (1)..(25): SEQ ID NO: 2212; WAN024DAB-5; Start 577; Stop 601
gtaagttcatccgcagattattcaa

SEQ ID NO: 318433 - DNA, 25 bp, Artificial
  probe
  misc_feature (1)..(25): SEQ ID NO: 2212; WAN024DAB-5; Start 575; Stop 599
ttgtaagttcatccgcagattattc

SEQ ID NO: 318434 - DNA, 25 bp, Artificial
  probe
  misc_feature (1)..(25): SEQ ID NO: 2212; WAN024DAB-5; Start 750; Stop 774
gaagtcagagaacacaggtaatcag

SEQ ID NO: 318435 - DNA, 25 bp, Artificial
  probe
  misc_feature (1)..(25): SEQ ID NO: 2212; WAN024DAB-5; Start 751; Stop 775
aagtcagagaacacaggtaatcaga

SEQ ID NO: 318436 - DNA, 25 bp, Artificial
  probe
  misc_feature (1)..(25): SEQ ID NO: 2212; WAN024DAB-5; Start 31; Stop 55
atggatgatgtaaccgaggctataa

SEQ ID NO: 318437 - DNA, 25 bp, Artificial
  probe
  misc_feature (1)..(25): SEQ ID NO: 2212; WAN024DAB-5; Start 754; Stop 778
tcagagaacacaggtaatcagagag

SEQ ID NO: 318438 - DNA, 25 bp, Artificial
  probe
  misc_feature (1)..(25): SEQ ID NO: 2212; WAN024DAB-5; Start 787; Stop 811
cattatagaggtgttgttgaaggat

SEQ ID NO: 318439 - DNA, 25 bp, Artificial
  probe
  misc_feature (1)..(25): SEQ ID NO: 2212; WAN024DAB-5; Start 757; Stop 781
gagaacacaggtaatcagagagttg

SEQ ID NO: 318440 - DNA, 25 bp, Artificial
  probe
  misc_feature (1)..(25): SEQ ID NO: 2212; WAN024DAB-5; Start 756; Stop 780
agagaacacaggtaatcagagagtt

SEQ ID NO: 318441 - DNA, 25 bp, Artificial
  probe
  misc_feature (1)..(25): SEQ ID NO: 2212; WAN024DAB-5; Start 755; Stop 779
cagagaacacaggtaatcagagagt

SEQ ID NO: 318442 - DNA, 25 bp, Artificial
  probe
  misc_feature (1)..(25): SEQ ID NO: 2212; WAN024DAB-5; Start 753; Stop 777
gtcagagaacacaggtaatcagaga

SEQ ID NO: 318443 - DNA, 25 bp, Artificial
  probe
  misc_feature (1)..(25): SEQ ID NO: 2212; WAN024DAB-5; Start 752; Stop 776
agtcagagaacacaggtaatcagag

SEQ ID NO: 318444 - DNA, 25 bp, Artificial
  probe
  misc_feature (1)..(25): SEQ ID NO: 2212; WAN024DAB-5; Start 30; Stop 54
gatggatgatgtaaccgaggctata

SEQ ID NO: 318445 - DNA, 25 bp, Artificial
  probe
  misc_feature (1)..(25): SEQ ID NO: 2212; WAN024DAB-5; Start 732; Stop 756
taagaactatgccttgatgaagtca

SEQ ID NO: 318446 - DNA, 25 bp, Artificial
  probe
  misc_feature (1)..(25): SEQ ID NO: 2212; WAN024DAB-5; Start 730; Stop 754
agtaagaactatgccttgatgaagt

SEQ ID NO: 318447 - DNA, 25 bp, Artificial
  probe
  misc_feature (1)..(25): SEQ ID NO: 2212; WAN024DAB-5; Start 731; Stop 755
gtaagaactatgccttgatgaagtc

SEQ ID NO: 318448 - DNA, 25 bp, Artificial
  probe
  misc_feature (1)..(25): SEQ ID NO: 2212; WAN024DAB-5; Start 733; Stop 757
aagaactatgccttgatgaagtcag

SEQ ID NO: 318449 - DNA, 25 bp, Artificial
  probe
  misc_feature (1)..(25): SEQ ID NO: 2212; WAN024DAB-5; Start 758; Stop 782
agaacacaggtaatcagagagttga

SEQ ID NO: 318450 - DNA, 25 bp, Artificial
  probe
  misc_feature (1)..(25): SEQ ID NO: 2212; WAN024DAB-5; Start 786; Stop 810
acattatagaggtgttgttgaagga

SEQ ID NO: 318451 - DNA, 25 bp, Artificial
  probe
  misc_feature (1)..(25): SEQ ID NO: 2212; WAN024DAB-5; Start 738; Stop 762
ctatgccttgatgaagtcagagaac

SEQ ID NO: 318452 - DNA, 25 bp, Artificial
  probe
  misc_feature (1)..(25): SEQ ID NO: 2212; WAN024DAB-5; Start 735; Stop 759
gaactatgccttgatgaagtcagag

SEQ ID NO: 318453 - DNA, 25 bp, Artificial
  probe
  misc_feature (1)..(25): SEQ ID NO: 2212; WAN024DAB-5; Start 749; Stop 773
tgaagtcagagaacacaggtaatca

SEQ ID NO: 318454 - DNA, 25 bp, Artificial
  probe
  misc_feature (1)..(25): SEQ ID NO: 2212; WAN024DAB-5; Start 746; Stop 770
tgatgaagtcagagaacacaggtaa

SEQ ID NO: 318455 - DNA, 25 bp, Artificial
  probe
  misc_feature (1)..(25): SEQ ID NO: 2212; WAN024DAB-5; Start 745; Stop 769
ttgatgaagtcagagaacacaggta

SEQ ID NO: 318456 - DNA, 25 bp, Artificial
  probe
  misc_feature (1)..(25): SEQ ID NO: 2212; WAN024DAB-5; Start 141; Stop 165
tattaagtattggcaaggacaagtt

SEQ ID NO: 318457 - DNA, 25 bp, Artificial
  probe
  misc_feature (1)..(25): SEQ ID NO: 2212; WAN024DAB-5; Start 140; Stop 164
ttattaagtattggcaaggacaagt

SEQ ID NO: 318458 - DNA, 25 bp, Artificial
  probe
  misc_feature (1)..(25): SEQ ID NO: 2212; WAN024DAB-5; Start 788; Stop 812
attatagaggtgttgttgaaggatt

SEQ ID NO: 318459 - DNA, 25 bp, Artificial
  probe
  misc_feature (1)..(25): SEQ ID NO: 2212; WAN024DAB-5; Start 737; Stop 761
actatgccttgatgaagtcagagaa

SEQ ID NO: 318460 - DNA, 25 bp, Artificial
  probe
  misc_feature (1)..(25): SEQ ID NO: 2212; WAN024DAB-5; Start 736; Stop 760
aactatgccttgatgaagtcagaga

SEQ ID NO: 318461 - DNA, 25 bp, Artificial
  probe
  misc_feature (1)..(25): SEQ ID NO: 2212; WAN024DAB-5; Start 734; Stop 758
agaactatgccttgatgaagtcaga

SEQ ID NO: 318462 - DNA, 25 bp, Artificial
  probe
  misc_feature (1)..(25): SEQ ID NO: 2213; WAN024FU8; Start 286; Stop 310
tctaaggattatgtgtggaagttgt

SEQ ID NO: 318463 - DNA, 25 bp, Artificial
  probe
  misc_feature (1)..(25): SEQ ID NO: 2213; WAN024FU8; Start 290; Stop 314
aggattatgtgtggaagttgtatca

SEQ ID NO: 318464 - DNA, 25 bp, Artificial
  probe
  misc_feature (1)..(25): SEQ ID NO: 2213; WAN024FU8; Start 296; Stop 320
atgtgtggaagttgtatcattctct

SEQ ID NO: 318465 - DNA, 25 bp, Artificial
  probe
  misc_feature (1)..(25): SEQ ID NO: 2213; WAN024FU8; Start 297; Stop 321
tgtgtggaagttgtatcattctcta

SEQ ID NO: 318466 - DNA, 25 bp, Artificial
  probe
  misc_feature (1)..(25): SEQ ID NO: 2213; WAN024FU8; Start 465; Stop 489
ttatcgctatgttgttgcttggaat

SEQ ID NO: 318467 - DNA, 25 bp, Artificial
  probe
  misc_feature (1)..(25): SEQ ID NO: 2213; WAN024FU8; Start 289; Stop 313
aaggattatgtgtggaagttgtatc

SEQ ID NO: 318468 - DNA, 25 bp, Artificial
  probe
  misc_feature (1)..(25): SEQ ID NO: 2213; WAN024FU8; Start 291; Stop 315
ggattatgtgtggaagttgtatcat

SEQ ID NO: 318469 - DNA, 25 bp, Artificial
  probe
  misc_feature (1)..(25): SEQ ID NO: 2213; WAN024FU8; Start 285; Stop 309
atctaaggattatgtgtggaagttg

SEQ ID NO: 318470 - DNA, 25 bp, Artificial
  probe
  misc_feature (1)..(25): SEQ ID NO: 2213; WAN024FU8; Start 115; Stop 139
gatgatggcagtacagatagtagtg

SEQ ID NO: 318471 - DNA, 25 bp, Artificial
  probe
  misc_feature (1)..(25): SEQ ID NO: 2213; WAN024FU8; Start 298; Stop 322
gtgtggaagttgtatcattctctaa

SEQ ID NO: 318472 - DNA, 25 bp, Artificial
  probe
  misc_feature (1)..(25): SEQ ID NO: 2213; WAN024FU8; Start 295; Stop 319
tatgtgtggaagttgtatcattctc

SEQ ID NO: 318473 - DNA, 25 bp, Artificial
  probe
  misc_feature (1)..(25): SEQ ID NO: 2213; WAN024FU8; Start 287; Stop 311
ctaaggattatgtgtggaagttgta

SEQ ID NO: 318474 - DNA, 25 bp, Artificial
  probe
  misc_feature (1)..(25): SEQ ID NO: 2213; WAN024FU8; Start 460; Stop 484
gatggttatcgctatgttgttgctt

SEQ ID NO: 318475 - DNA, 25 bp, Artificial
  probe
  misc_feature (1)..(25): SEQ ID NO: 2213; WAN024FU8; Start 294; Stop 318
ttatgtgtggaagttgtatcattct

SEQ ID NO: 318476 - DNA, 25 bp, Artificial
  probe
  misc_feature (1)..(25): SEQ ID NO: 2213; WAN024FU8; Start 464; Stop 488
gttatcgctatgttgttgcttggaa

SEQ ID NO: 318477 - DNA, 25 bp, Artificial
  probe
  misc_feature (1)..(25): SEQ ID NO: 2213; WAN024FU8; Start 116; Stop 140
atgatggcagtacagatagtagtgg

SEQ ID NO: 318478 - DNA, 25 bp, Artificial
  probe
  misc_feature (1)..(25): SEQ ID NO: 2213; WAN024FU8; Start 461; Stop 485
atggttatcgctatgttgttgcttg

SEQ ID NO: 318479 - DNA, 25 bp, Artificial
  probe
  misc_feature (1)..(25): SEQ ID NO: 2213; WAN024FU8; Start 114; Stop 138
cgatgatggcagtacagatagtagt

SEQ ID NO: 318480 - DNA, 25 bp, Artificial
  probe
  misc_feature (1)..(25): SEQ ID NO: 2213; WAN024FU8; Start 748; Stop 772
cgttcgtgtcaacagtattgtaact

SEQ ID NO: 318481 - DNA, 25 bp, Artificial
  probe
  misc_feature (1)..(25): SEQ ID NO: 2213; WAN024FU8; Start 104; Stop 128
ttctattagtcgatgatggcagtac

SEQ ID NO: 318482 - DNA, 25 bp, Artificial
  probe
  misc_feature (1)..(25): SEQ ID NO: 2213; WAN024FU8; Start 103; Stop 127
gttctattagtcgatgatggcagta

SEQ ID NO: 318483 - DNA, 25 bp, Artificial
  probe
  misc_feature (1)..(25): SEQ ID NO: 2213; WAN024FU8; Start 98; Stop 122
ttgaggttctattagtcgatgatgg

SEQ ID NO: 318484 - DNA, 25 bp, Artificial
  probe
  misc_feature (1)..(25): SEQ ID NO: 2213; WAN024FU8; Start 96; Stop 120
ccttgaggttctattagtcgatgat

SEQ ID NO: 318485 - DNA, 25 bp, Artificial
  probe
  misc_feature (1)..(25): SEQ ID NO: 2213; WAN024FU8; Start 458; Stop 482
cagatggttatcgctatgttgttgc

SEQ ID NO: 318486 - DNA, 25 bp, Artificial
  probe
  misc_feature (1)..(25): SEQ ID NO: 2213; WAN024FU8; Start 457; Stop 481
gcagatggttatcgctatgttgttg

SEQ ID NO: 318487 - DNA, 25 bp, Artificial
  probe
  misc_feature (1)..(25): SEQ ID NO: 2213; WAN024FU8; Start 106; Stop 130
ctattagtcgatgatggcagtacag

SEQ ID NO: 318488 - DNA, 25 bp, Artificial
  probe
  misc_feature (1)..(25): SEQ ID NO: 2213; WAN024FU8; Start 109; Stop 133
ttagtcgatgatggcagtacagata

SEQ ID NO: 318489 - DNA, 25 bp, Artificial
  probe
  misc_feature (1)..(25): SEQ ID NO: 2213; WAN024FU8; Start 107; Stop 131
tattagtcgatgatggcagtacaga

SEQ ID NO: 318490 - DNA, 25 bp, Artificial
  probe
  misc_feature (1)..(25): SEQ ID NO: 2213; WAN024FU8; Start 105; Stop 129
tctattagtcgatgatggcagtaca

SEQ ID NO: 318491 - DNA, 25 bp, Artificial
  probe
  misc_feature (1)..(25): SEQ ID NO: 2213; WAN024FU8; Start 459; Stop 483
agatggttatcgctatgttgttgct

SEQ ID NO: 318492 - DNA, 25 bp, Artificial
  probe
  misc_feature (1)..(25): SEQ ID NO: 2213; WAN024FU8; Start 97; Stop 121
cttgaggttctattagtcgatgatg

SEQ ID NO: 318493 - DNA, 25 bp, Artificial
  probe
  misc_feature (1)..(25): SEQ ID NO: 2213; WAN024FU8; Start 293; Stop 317
attatgtgtggaagttgtatcattc

SEQ ID NO: 318494 - DNA, 25 bp, Artificial
  probe
  misc_feature (1)..(25): SEQ ID NO: 2213; WAN024FU8; Start 292; Stop 316
gattatgtgtggaagttgtatcatt

SEQ ID NO: 318495 - DNA, 25 bp, Artificial
  probe
  misc_feature (1)..(25): SEQ ID NO: 2214; WAN024FU9; Start 11; Stop 35
tgataagcattgttgttccagtcta

SEQ ID NO: 318496 - DNA, 25 bp, Artificial
  probe
  misc_feature (1)..(25): SEQ ID NO: 2214; WAN024FU9; Start 286; Stop 310
tctaaggattatgtctggaagttgt

SEQ ID NO: 318497 - DNA, 25 bp, Artificial
  probe
  misc_feature (1)..(25): SEQ ID NO: 2214; WAN024FU9; Start 12; Stop 36
gataagcattgttgttccagtctat

SEQ ID NO: 318498 - DNA, 25 bp, Artificial
  probe
  misc_feature (1)..(25): SEQ ID NO: 2214; WAN024FU9; Start 10; Stop 34
ttgataagcattgttgttccagtct

SEQ ID NO: 318499 - DNA, 25 bp, Artificial
  probe
  misc_feature (1)..(25): SEQ ID NO: 2214; WAN024FU9; Start 15; Stop 39
aagcattgttgttccagtctataac

SEQ ID NO: 318500 - DNA, 25 bp, Artificial
  probe
  misc_feature (1)..(25): SEQ ID NO: 2214; WAN024FU9; Start 271; Stop 295
agcgatgactacatatctaaggatt

SEQ ID NO: 318501 - DNA, 25 bp, Artificial
  probe
  misc_feature (1)..(25): SEQ ID NO: 2214; WAN024FU9; Start 776; Stop 800
ttgttacagcgactaccaatcatag

SEQ ID NO: 318502 - DNA, 25 bp, Artificial
  probe
  misc_feature (1)..(25): SEQ ID NO: 2214; WAN024FU9; Start 465; Stop 489
ctatcgctatgttgttgcttggaat

SEQ ID NO: 318503 - DNA, 25 bp, Artificial
  probe
  misc_feature (1)..(25): SEQ ID NO: 2214; WAN024FU9; Start 16; Stop 40
agcattgttgttccagtctataacg

SEQ ID NO: 318504 - DNA, 25 bp, Artificial
  probe
  misc_feature (1)..(25): SEQ ID NO: 2214; WAN024FU9; Start 14; Stop 38
taagcattgttgttccagtctataa

SEQ ID NO: 318505 - DNA, 25 bp, Artificial
  probe
  misc_feature (1)..(25): SEQ ID NO: 2214; WAN024FU9; Start 291; Stop 315
ggattatgtctggaagttgtattct

SEQ ID NO: 318506 - DNA, 25 bp, Artificial
  probe
  misc_feature (1)..(25): SEQ ID NO: 2214; WAN024FU9; Start 290; Stop 314
aggattatgtctggaagttgtattc

SEQ ID NO: 318507 - DNA, 25 bp, Artificial
  probe
  misc_feature (1)..(25): SEQ ID NO: 2214; WAN024FU9; Start 285; Stop 309
atctaaggattatgtctggaagttg

SEQ ID NO: 318508 - DNA, 25 bp, Artificial
  probe
  misc_feature (1)..(25): SEQ ID NO: 2214; WAN024FU9; Start 13; Stop 37
ataagcattgttgttccagtctata

SEQ ID NO: 318509 - DNA, 25 bp, Artificial
  probe
  misc_feature (1)..(25): SEQ ID NO: 2214; WAN024FU9; Start 270; Stop 294
tagcgatgactacatatctaaggat

SEQ ID NO: 318510 - DNA, 25 bp, Artificial
  probe
  misc_feature (1)..(25): SEQ ID NO: 2214; WAN024FU9; Start 269; Stop 293
atagcgatgactacatatctaagga

SEQ ID NO: 318511 - DNA, 25 bp, Artificial
  probe
  misc_feature (1)..(25): SEQ ID NO: 2214; WAN024FU9; Start 289; Stop 313
aaggattatgtctggaagttgtatt

SEQ ID NO: 318512 - DNA, 25 bp, Artificial
  probe
  misc_feature (1)..(25): SEQ ID NO: 2214; WAN024FU9; Start 287; Stop 311
ctaaggattatgtctggaagttgta

SEQ ID NO: 318513 - DNA, 25 bp, Artificial
  probe
  misc_feature (1)..(25): SEQ ID NO: 2214; WAN024FU9; Start 113; Stop 137
ttgatgacggaagcacagatagtag

SEQ ID NO: 318514 - DNA, 25 bp, Artificial
  probe
  misc_feature (1)..(25): SEQ ID NO: 2214; WAN024FU9; Start 112; Stop 136
gttgatgacggaagcacagatagta

SEQ ID NO: 318515 - DNA, 25 bp, Artificial
  probe
  misc_feature (1)..(25): SEQ ID NO: 2214; WAN024FU9; Start 272; Stop 296
gcgatgactacatatctaaggatta

SEQ ID NO: 318516 - DNA, 25 bp, Artificial
  probe
  misc_feature (1)..(25): SEQ ID NO: 2214; WAN024FU9; Start 782; Stop 806
cagcgactaccaatcatagtaagat

SEQ ID NO: 318517 - DNA, 25 bp, Artificial
  probe
  misc_feature (1)..(25): SEQ ID NO: 2214; WAN024FU9; Start 778; Stop 802
gttacagcgactaccaatcatagta

SEQ ID NO: 318518 - DNA, 25 bp, Artificial
  probe
  misc_feature (1)..(25): SEQ ID NO: 2214; WAN024FU9; Start 780; Stop 804
tacagcgactaccaatcatagtaag

SEQ ID NO: 318519 - DNA, 25 bp, Artificial
  probe
  misc_feature (1)..(25): SEQ ID NO: 2214; WAN024FU9; Start 268; Stop 292
gatagcgatgactacatatctaagg

SEQ ID NO: 318520 - DNA, 25 bp, Artificial
  probe
  misc_feature (1)..(25): SEQ ID NO: 2214; WAN024FU9; Start 783; Stop 807
agcgactaccaatcatagtaagatt

SEQ ID NO: 318521 - DNA, 25 bp, Artificial
  probe
  misc_feature (1)..(25): SEQ ID NO: 2214; WAN024FU9; Start 779; Stop 803
ttacagcgactaccaatcatagtaa

SEQ ID NO: 318522 - DNA, 25 bp, Artificial
  probe
  misc_feature (1)..(25): SEQ ID NO: 2214; WAN024FU9; Start 257; Stop 281
tagcgtttattgatagcgatgacta

SEQ ID NO: 318523 - DNA, 25 bp, Artificial
  probe
  misc_feature (1)..(25): SEQ ID NO: 2214; WAN024FU9; Start 9; Stop 33
tttgataagcattgttgttccagtc

SEQ ID NO: 318524 - DNA, 25 bp, Artificial
  probe
  misc_feature (1)..(25): SEQ ID NO: 2214; WAN024FU9; Start 8; Stop 32
atttgataagcattgttgttccagt

SEQ ID NO: 318525 - DNA, 25 bp, Artificial
  probe
  misc_feature (1)..(25): SEQ ID NO: 2214; WAN024FU9; Start 781; Stop 805
acagcgactaccaatcatagtaaga

SEQ ID NO: 318526 - DNA, 25 bp, Artificial
  probe
  misc_feature (1)..(25): SEQ ID NO: 2214; WAN024FU9; Start 254; Stop 278
atgtagcgtttattgatagcgatga

SEQ ID NO: 318527 - DNA, 25 bp, Artificial
  probe
  misc_feature (1)..(25): SEQ ID NO: 2214; WAN024FU9; Start 6; Stop 30
agatttgataagcattgttgttcca

SEQ ID NO: 318528 - DNA, 25 bp, Artificial
  probe
  misc_feature (1)..(25): SEQ ID NO: 2215; WAN024CWZ; Start 36; Stop 60
aatcatcgtcatctgtactggtctg

SEQ ID NO: 318529 - DNA, 25 bp, Artificial
  probe
  misc_feature (1)..(25): SEQ ID NO: 2215; WAN024CWZ; Start 257; Stop 281
ggatttatgacttgcctgtaggtag

SEQ ID NO: 318530 - DNA, 25 bp, Artificial
  probe
  misc_feature (1)..(25): SEQ ID NO: 2215; WAN024CWZ; Start 227; Stop 251
tagatgtcaaaggtgctgtcaaatc

SEQ ID NO: 318531 - DNA, 25 bp, Artificial
  probe
  misc_feature (1)..(25): SEQ ID NO: 2215; WAN024CWZ; Start 554; Stop 578
caaatggcaagttcaagtcagtaga

SEQ ID NO: 318532 - DNA, 25 bp, Artificial
  probe
  misc_feature (1)..(25): SEQ ID NO: 2215; WAN024CWZ; Start 226; Stop 250
gtagatgtcaaaggtgctgtcaaat

SEQ ID NO: 318533 - DNA, 25 bp, Artificial
  probe
  misc_feature (1)..(25): SEQ ID NO: 2215; WAN024CWZ; Start 359; Stop 383
aagttagtgatgaggctctggttta

SEQ ID NO: 318534 - DNA, 25 bp, Artificial
  probe
  misc_feature (1)..(25): SEQ ID NO: 2215; WAN024CWZ; Start 258; Stop 282
gatttatgacttgcctgtaggtagt

SEQ ID NO: 318535 - DNA, 25 bp, Artificial
  probe
  misc_feature (1)..(25): SEQ ID NO: 2215; WAN024CWZ; Start 389; Stop 413
ctactaagggagaagaagcagttag

SEQ ID NO: 318536 - DNA, 25 bp, Artificial
  probe
  misc_feature (1)..(25): SEQ ID NO: 2215; WAN024CWZ; Start 256; Stop 280
gggatttatgacttgcctgtaggta

SEQ ID NO: 318537 - DNA, 25 bp, Artificial
  probe
  misc_feature (1)..(25): SEQ ID NO: 2215; WAN024CWZ; Start 624; Stop 648
gcttaaagactatgttacagtggat

SEQ ID NO: 318538 - DNA, 25 bp, Artificial
  probe
  misc_feature (1)..(25): SEQ ID NO: 2215; WAN024CWZ; Start 360; Stop 384
agttagtgatgaggctctggtttac

SEQ ID NO: 318539 - DNA, 25 bp, Artificial
  probe
  misc_feature (1)..(25): SEQ ID NO: 2215; WAN024CWZ; Start 35; Stop 59
aaatcatcgtcatctgtactggtct

SEQ ID NO: 318540 - DNA, 25 bp, Artificial
  probe
  misc_feature (1)..(25): SEQ ID NO: 2215; WAN024CWZ; Start 629; Stop 653
aagactatgttacagtggattaact

SEQ ID NO: 318541 - DNA, 25 bp, Artificial
  probe
  misc_feature (1)..(25): SEQ ID NO: 2215; WAN024CWZ; Start 358; Stop 382
aaagttagtgatgaggctctggttt

SEQ ID NO: 318542 - DNA, 25 bp, Artificial
  probe
  misc_feature (1)..(25): SEQ ID NO: 2215; WAN024CWZ; Start 225; Stop 249
agtagatgtcaaaggtgctgtcaaa

SEQ ID NO: 318543 - DNA, 25 bp, Artificial
  probe
  misc_feature (1)..(25): SEQ ID NO: 2215; WAN024CWZ; Start 218; Stop 242
taatcacagtagatgtcaaaggtgc

SEQ ID NO: 318544 - DNA, 25 bp, Artificial
  probe
  misc_feature (1)..(25): SEQ ID NO: 2215; WAN024CWZ; Start 217; Stop 241
ctaatcacagtagatgtcaaaggtg

SEQ ID NO: 318545 - DNA, 25 bp, Artificial
  probe
  misc_feature (1)..(25): SEQ ID NO: 2215; WAN024CWZ; Start 388; Stop 412
cctactaagggagaagaagcagtta

SEQ ID NO: 318546 - DNA, 25 bp, Artificial
  probe
  misc_feature (1)..(25): SEQ ID NO: 2215; WAN024CWZ; Start 555; Stop 579
aaatggcaagttcaagtcagtagac

SEQ ID NO: 318547 - DNA, 25 bp, Artificial
  probe
  misc_feature (1)..(25): SEQ ID NO: 2215; WAN024CWZ; Start 216; Stop 240
tctaatcacagtagatgtcaaaggt

SEQ ID NO: 318548 - DNA, 25 bp, Artificial
  probe
  misc_feature (1)..(25): SEQ ID NO: 2215; WAN024CWZ; Start 556; Stop 580
aatggcaagttcaagtcagtagacg

SEQ ID NO: 318549 - DNA, 25 bp, Artificial
  probe
  misc_feature (1)..(25): SEQ ID NO: 2215; WAN024CWZ; Start 357; Stop 381
gaaagttagtgatgaggctctggtt

SEQ ID NO: 318550 - DNA, 25 bp, Artificial
  probe
  misc_feature (1)..(25): SEQ ID NO: 2215; WAN024CWZ; Start 37; Stop 61
atcatcgtcatctgtactggtctgg

SEQ ID NO: 318551 - DNA, 25 bp, Artificial
  probe
  misc_feature (1)..(25): SEQ ID NO: 2215; WAN024CWZ; Start 553; Stop 577
gcaaatggcaagttcaagtcagtag

SEQ ID NO: 318552 - DNA, 25 bp, Artificial
  probe
  misc_feature (1)..(25): SEQ ID NO: 2215; WAN024CWZ; Start 623; Stop 647
agcttaaagactatgttacagtgga

SEQ ID NO: 318553 - DNA, 25 bp, Artificial
  probe
  misc_feature (1)..(25): SEQ ID NO: 2215; WAN024CWZ; Start 630; Stop 654
agactatgttacagtggattaacta

SEQ ID NO: 318554 - DNA, 25 bp, Artificial
  probe
  misc_feature (1)..(25): SEQ ID NO: 2215; WAN024CWZ; Start 219; Stop 243
aatcacagtagatgtcaaaggtgct

SEQ ID NO: 318555 - DNA, 25 bp, Artificial
  probe
  misc_feature (1)..(25): SEQ ID NO: 2215; WAN024CWZ; Start 361; Stop 385
gttagtgatgaggctctggtttacg

SEQ ID NO: 318556 - DNA, 25 bp, Artificial
  probe
  misc_feature (1)..(25): SEQ ID NO: 2215; WAN024CWZ; Start 385; Stop 409
gttcctactaagggagaagaagcag

SEQ ID NO: 318557 - DNA, 25 bp, Artificial
  probe
  misc_feature (1)..(25): SEQ ID NO: 2215; WAN024CWZ; Start 356; Stop 380
agaaagttagtgatgaggctctggt

SEQ ID NO: 318558 - DNA, 25 bp, Artificial
  probe
  misc_feature (1)..(25): SEQ ID NO: 2215; WAN024CWZ; Start 557; Stop 581
atggcaagttcaagtcagtagacga

SEQ ID NO: 318559 - DNA, 25 bp, Artificial
  probe
  misc_feature (1)..(25): SEQ ID NO: 2215; WAN024CWZ; Start 387; Stop 411
tcctactaagggagaagaagcagtt

SEQ ID NO: 318560 - DNA, 25 bp, Artificial
  probe
  misc_feature (1)..(25): SEQ ID NO: 2215; WAN024CWZ; Start 386; Stop 410
ttcctactaagggagaagaagcagt

SEQ ID NO: 318561 - DNA, 25 bp, Artificial
  probe
  misc_feature (1)..(25): SEQ ID NO: 2216; WAN024CJ3; Start 176; Stop 200
caatgatattagatacaattcgcca

SEQ ID NO: 318562 - DNA, 25 bp, Artificial
  probe
  misc_feature (1)..(25): SEQ ID NO: 2216; WAN024CJ3; Start 129; Stop 153
agctcaatctgattatggtgtcatt

SEQ ID NO: 318563 - DNA, 25 bp, Artificial
  probe
  misc_feature (1)..(25): SEQ ID NO: 2216; WAN024CJ3; Start 127; Stop 151
ttagctcaatctgattatggtgtca

SEQ ID NO: 318564 - DNA, 25 bp, Artificial
  probe
  misc_feature (1)..(25): SEQ ID NO: 2216; WAN024CJ3; Start 128; Stop 152
tagctcaatctgattatggtgtcat

SEQ ID NO: 318565 - DNA, 25 bp, Artificial
  probe
  misc_feature (1)..(25): SEQ ID NO: 2216; WAN024CJ3; Start 289; Stop 313
gtagagaaagcagtaggacacaata

SEQ ID NO: 318566 - DNA, 25 bp, Artificial
  probe
  misc_feature (1)..(25): SEQ ID NO: 2216; WAN024CJ3; Start 282; Stop 306
ggataatgtagagaaagcagtagga

SEQ ID NO: 318567 - DNA, 25 bp, Artificial
  probe
  misc_feature (1)..(25): SEQ ID NO: 2216; WAN024CJ3; Start 281; Stop 305
aggataatgtagagaaagcagtagg

SEQ ID NO: 318568 - DNA, 25 bp, Artificial
  probe
  misc_feature (1)..(25): SEQ ID NO: 2216; WAN024CJ3; Start 185; Stop 209
tagatacaattcgccattatgattc

SEQ ID NO: 318569 - DNA, 25 bp, Artificial
  probe
  misc_feature (1)..(25): SEQ ID NO: 2216; WAN024CJ3; Start 175; Stop 199
tcaatgatattagatacaattcgcc

SEQ ID NO: 318570 - DNA, 25 bp, Artificial
  probe
  misc_feature (1)..(25): SEQ ID NO: 2216; WAN024CJ3; Start 290; Stop 314
tagagaaagcagtaggacacaatat

SEQ ID NO: 318571 - DNA, 25 bp, Artificial
  probe
  misc_feature (1)..(25): SEQ ID NO: 2216; WAN024CJ3; Start 126; Stop 150
attagctcaatctgattatggtgtc

SEQ ID NO: 318572 - DNA, 25 bp, Artificial
  probe
  misc_feature (1)..(25): SEQ ID NO: 2216; WAN024CJ3; Start 283; Stop 307
gataatgtagagaaagcagtaggac

SEQ ID NO: 318573 - DNA, 25 bp, Artificial
  probe
  misc_feature (1)..(25): SEQ ID NO: 2216; WAN024CJ3; Start 279; Stop 303
agaggataatgtagagaaagcagta

SEQ ID NO: 318574 - DNA, 25 bp, Artificial
  probe
  misc_feature (1)..(25): SEQ ID NO: 2216; WAN024CJ3; Start 278; Stop 302
tagaggataatgtagagaaagcagt

SEQ ID NO: 318575 - DNA, 25 bp, Artificial
  probe
  misc_feature (1)..(25): SEQ ID NO: 2216; WAN024CJ3; Start 125; Stop 149
aattagctcaatctgattatggtgt

SEQ ID NO: 318576 - DNA, 25 bp, Artificial
  probe
  misc_feature (1)..(25): SEQ ID NO: 2216; WAN024CJ3; Start 280; Stop 304
gaggataatgtagagaaagcagtag

SEQ ID NO: 318577 - DNA, 25 bp, Artificial
  probe
  misc_feature (1)..(25): SEQ ID NO: 2216; WAN024CJ3; Start 130; Stop 154
gctcaatctgattatggtgtcattt

SEQ ID NO: 318578 - DNA, 25 bp, Artificial
  probe
  misc_feature (1)..(25): SEQ ID NO: 2216; WAN024CJ3; Start 285; Stop 309
taatgtagagaaagcagtaggacac

SEQ ID NO: 318579 - DNA, 25 bp, Artificial
  probe
  misc_feature (1)..(25): SEQ ID NO: 2216; WAN024CJ3; Start 184; Stop 208
ttagatacaattcgccattatgatt

SEQ ID NO: 318580 - DNA, 25 bp, Artificial
  probe
  misc_feature (1)..(25): SEQ ID NO: 2216; WAN024CJ3; Start 284; Stop 308
ataatgtagagaaagcagtaggaca

SEQ ID NO: 318581 - DNA, 25 bp, Artificial
  probe
  misc_feature (1)..(25): SEQ ID NO: 2216; WAN024CJ3; Start 291; Stop 315
agagaaagcagtaggacacaatatt

SEQ ID NO: 318582 - DNA, 25 bp, Artificial
  probe
  misc_feature (1)..(25): SEQ ID NO: 2216; WAN024CJ3; Start 183; Stop 207
attagatacaattcgccattatgat

SEQ ID NO: 318583 - DNA, 25 bp, Artificial
  probe
  misc_feature (1)..(25): SEQ ID NO: 2216; WAN024CJ3; Start 288; Stop 312
tgtagagaaagcagtaggacacaat

SEQ ID NO: 318584 - DNA, 25 bp, Artificial
  probe
  misc_feature (1)..(25): SEQ ID NO: 2216; WAN024CJ3; Start 287; Stop 311
atgtagagaaagcagtaggacacaa

SEQ ID NO: 318585 - DNA, 25 bp, Artificial
  probe
  misc_feature (1)..(25): SEQ ID NO: 2216; WAN024CJ3; Start 286; Stop 310
aatgtagagaaagcagtaggacaca

SEQ ID NO: 318586 - DNA, 25 bp, Artificial
  probe
  misc_feature (1)..(25): SEQ ID NO: 2216; WAN024CJ3; Start 292; Stop 316
gagaaagcagtaggacacaatattt

SEQ ID NO: 318587 - DNA, 25 bp, Artificial
  probe
  misc_feature (1)..(25): SEQ ID NO: 2216; WAN024CJ3; Start 178; Stop 202
atgatattagatacaattcgccatt

SEQ ID NO: 318588 - DNA, 25 bp, Artificial
  probe
  misc_feature (1)..(25): SEQ ID NO: 2216; WAN024CJ3; Start 177; Stop 201
aatgatattagatacaattcgccat

SEQ ID NO: 318589 - DNA, 25 bp, Artificial
  probe
  misc_feature (1)..(25): SEQ ID NO: 2216; WAN024CJ3; Start 277; Stop 301
atagaggataatgtagagaaagcag

SEQ ID NO: 318590 - DNA, 25 bp, Artificial
  probe
  misc_feature (1)..(25): SEQ ID NO: 2216; WAN024CJ3; Start 150; Stop 174
catttatatcactgaagacattgct

SEQ ID NO: 318591 - DNA, 25 bp, Artificial
  probe
  misc_feature (1)..(25): SEQ ID NO: 2216; WAN024CJ3; Start 144; Stop 168
tggtgtcatttatatcactgaagac

SEQ ID NO: 318592 - DNA, 25 bp, Artificial
  probe
  misc_feature (1)..(25): SEQ ID NO: 2216; WAN024CJ3; Start 149; Stop 173
tcatttatatcactgaagacattgc

SEQ ID NO: 318593 - DNA, 25 bp, Artificial
  probe
  misc_feature (1)..(25): SEQ ID NO: 2216; WAN024CJ3; Start 182; Stop 206
tattagatacaattcgccattatga

SEQ ID NO: 318594 - DNA, 25 bp, Artificial
  probe
  misc_feature (1)..(25): SEQ ID NO: 2217; WAN024GGY; Start 102; Stop 126
aagactgtccttgacttctaacttg

SEQ ID NO: 318595 - DNA, 25 bp, Artificial
  probe
  misc_feature (1)..(25): SEQ ID NO: 2217; WAN024GGY; Start 104; Stop 128
gactgtccttgacttctaacttgtc

SEQ ID NO: 318596 - DNA, 25 bp, Artificial
  probe
  misc_feature (1)..(25): SEQ ID NO: 2217; WAN024GGY; Start 116; Stop 140
cttctaacttgtcctcggtcatctc

SEQ ID NO: 318597 - DNA, 25 bp, Artificial
  probe
  misc_feature (1)..(25): SEQ ID NO: 2217; WAN024GGY; Start 103; Stop 127
agactgtccttgacttctaacttgt

SEQ ID NO: 318598 - DNA, 25 bp, Artificial
  probe
  misc_feature (1)..(25): SEQ ID NO: 2217; WAN024GGY; Start 199; Stop 223
atactctgcctatctttcccttcta

SEQ ID NO: 318599 - DNA, 25 bp, Artificial
  probe
  misc_feature (1)..(25): SEQ ID NO: 2217; WAN024GGY; Start 107; Stop 131
tgtccttgacttctaacttgtcctc

SEQ ID NO: 318600 - DNA, 25 bp, Artificial
  probe
  misc_feature (1)..(25): SEQ ID NO: 2217; WAN024GGY; Start 106; Stop 130
ctgtccttgacttctaacttgtcct

SEQ ID NO: 318601 - DNA, 25 bp, Artificial
  probe
  misc_feature (1)..(25): SEQ ID NO: 2217; WAN024GGY; Start 167; Stop 191
tagtctgggaatacaagtctaacac

SEQ ID NO: 318602 - DNA, 25 bp, Artificial
  probe
  misc_feature (1)..(25): SEQ ID NO: 2217; WAN024GGY; Start 117; Stop 141
ttctaacttgtcctcggtcatctca

SEQ ID NO: 318603 - DNA, 25 bp, Artificial
  probe
  misc_feature (1)..(25): SEQ ID NO: 2217; WAN024GGY; Start 115; Stop 139
acttctaacttgtcctcggtcatct

SEQ ID NO: 318604 - DNA, 25 bp, Artificial
  probe
  misc_feature (1)..(25): SEQ ID NO: 2217; WAN024GGY; Start 105; Stop 129
actgtccttgacttctaacttgtcc

SEQ ID NO: 318605 - DNA, 25 bp, Artificial
  probe
  misc_feature (1)..(25): SEQ ID NO: 2217; WAN024GGY; Start 17; Stop 41
ggagaatcatagtaccaccgtcttg

SEQ ID NO: 318606 - DNA, 25 bp, Artificial
  probe
  misc_feature (1)..(25): SEQ ID NO: 2217; WAN024GGY; Start 200; Stop 224
tactctgcctatctttcccttctag

SEQ ID NO: 318607 - DNA, 25 bp, Artificial
  probe
  misc_feature (1)..(25): SEQ ID NO: 2217; WAN024GGY; Start 166; Stop 190
ctagtctgggaatacaagtctaaca

SEQ ID NO: 318608 - DNA, 25 bp, Artificial
  probe
  misc_feature (1)..(25): SEQ ID NO: 2217; WAN024GGY; Start 168; Stop 192
agtctgggaatacaagtctaacact

SEQ ID NO: 318609 - DNA, 25 bp, Artificial
  probe
  misc_feature (1)..(25): SEQ ID NO: 2217; WAN024GGY; Start 114; Stop 138
gacttctaacttgtcctcggtcatc

SEQ ID NO: 318610 - DNA, 25 bp, Artificial
  probe
  misc_feature (1)..(25): SEQ ID NO: 2217; WAN024GGY; Start 60; Stop 84
ctcaataaagagagaggttgtctgg

SEQ ID NO: 318611 - DNA, 25 bp, Artificial
  probe
  misc_feature (1)..(25): SEQ ID NO: 2217; WAN024GGY; Start 182; Stop 206
agtctaacacttgctcgatactctg

SEQ ID NO: 318612 - DNA, 25 bp, Artificial
  probe
  misc_feature (1)..(25): SEQ ID NO: 2217; WAN024GGY; Start 111; Stop 135
cttgacttctaacttgtcctcggtc

SEQ ID NO: 318613 - DNA, 25 bp, Artificial
  probe
  misc_feature (1)..(25): SEQ ID NO: 2217; WAN024GGY; Start 108; Stop 132
gtccttgacttctaacttgtcctcg

SEQ ID NO: 318614 - DNA, 25 bp, Artificial
  probe
  misc_feature (1)..(25): SEQ ID NO: 2217; WAN024GGY; Start 118; Stop 142
tctaacttgtcctcggtcatctcac

SEQ ID NO: 318615 - DNA, 25 bp, Artificial
  probe
  misc_feature (1)..(25): SEQ ID NO: 2217; WAN024GGY; Start 198; Stop 222
gatactctgcctatctttcccttct

SEQ ID NO: 318616 - DNA, 25 bp, Artificial
  probe
  misc_feature (1)..(25): SEQ ID NO: 2217; WAN024GGY; Start 18; Stop 42
gagaatcatagtaccaccgtcttgc

SEQ ID NO: 318617 - DNA, 25 bp, Artificial
  probe
  misc_feature (1)..(25): SEQ ID NO: 2217; WAN024GGY; Start 3; Stop 27
ggaagctagaaactggagaatcata

SEQ ID NO: 318618 - DNA, 25 bp, Artificial
  probe
  misc_feature (1)..(25): SEQ ID NO: 2217; WAN024GGY; Start 101; Stop 125
gaagactgtccttgacttctaactt

SEQ ID NO: 318619 - DNA, 25 bp, Artificial
  probe
  misc_feature (1)..(25): SEQ ID NO: 2217; WAN024GGY; Start 7; Stop 31
gctagaaactggagaatcatagtac

SEQ ID NO: 318620 - DNA, 25 bp, Artificial
  probe
  misc_feature (1)..(25): SEQ ID NO: 2217; WAN024GGY; Start 61; Stop 85
tcaataaagagagaggttgtctggc

SEQ ID NO: 318621 - DNA, 25 bp, Artificial
  probe
  misc_feature (1)..(25): SEQ ID NO: 2217; WAN024GGY; Start 4; Stop 28
gaagctagaaactggagaatcatag

SEQ ID NO: 318622 - DNA, 25 bp, Artificial
  probe
  misc_feature (1)..(25): SEQ ID NO: 2217; WAN024GGY; Start 186; Stop 210
taacacttgctcgatactctgccta

SEQ ID NO: 318623 - DNA, 25 bp, Artificial
  probe
  misc_feature (1)..(25): SEQ ID NO: 2217; WAN024GGY; Start 16; Stop 40
tggagaatcatagtaccaccgtctt

SEQ ID NO: 318624 - DNA, 25 bp, Artificial
  probe
  misc_feature (1)..(25): SEQ ID NO: 2217; WAN024GGY; Start 2; Stop 26
tggaagctagaaactggagaatcat

SEQ ID NO: 318625 - DNA, 25 bp, Artificial
  probe
  misc_feature (1)..(25): SEQ ID NO: 2217; WAN024GGY; Start 1; Stop 25
atggaagctagaaactggagaatca

SEQ ID NO: 318626 - DNA, 25 bp, Artificial
  probe
  misc_feature (1)..(25): SEQ ID NO: 2217; WAN024GGY; Start 10; Stop 34
agaaactggagaatcatagtaccac

SEQ ID NO: 318627 - DNA, 25 bp, Artificial
  probe
  misc_feature (1)..(25): SEQ ID NO: 2218; WAN024G9O; Start 223; Stop 247
cttgtcaggtgtgatataaacttca

SEQ ID NO: 318628 - DNA, 25 bp, Artificial
  probe
  misc_feature (1)..(25): SEQ ID NO: 2218; WAN024G9O; Start 224; Stop 248
ttgtcaggtgtgatataaacttcaa

SEQ ID NO: 318629 - DNA, 25 bp, Artificial
  probe
  misc_feature (1)..(25): SEQ ID NO: 2218; WAN024G9O; Start 222; Stop 246
ccttgtcaggtgtgatataaacttc

SEQ ID NO: 318630 - DNA, 25 bp, Artificial
  probe
  misc_feature (1)..(25): SEQ ID NO: 2218; WAN024G9O; Start 225; Stop 249
tgtcaggtgtgatataaacttcaat

SEQ ID NO: 318631 - DNA, 25 bp, Artificial
  probe
  misc_feature (1)..(25): SEQ ID NO: 2218; WAN024G9O; Start 226; Stop 250
gtcaggtgtgatataaacttcaatc

SEQ ID NO: 318632 - DNA, 25 bp, Artificial
  probe
  misc_feature (1)..(25): SEQ ID NO: 2218; WAN024G9O; Start 37; Stop 61
aagaacaatgggattgataacaggt

SEQ ID NO: 318633 - DNA, 25 bp, Artificial
  probe
  misc_feature (1)..(25): SEQ ID NO: 2218; WAN024G9O; Start 36; Stop 60
aaagaacaatgggattgataacagg

SEQ ID NO: 318634 - DNA, 25 bp, Artificial
  probe
  misc_feature (1)..(25): SEQ ID NO: 2218; WAN024G9O; Start 38; Stop 62
agaacaatgggattgataacaggtg

SEQ ID NO: 318635 - DNA, 25 bp, Artificial
  probe
  misc_feature (1)..(25): SEQ ID NO: 2218; WAN024G9O; Start 233; Stop 257
gtgatataaacttcaatcagccctg

SEQ ID NO: 318636 - DNA, 25 bp, Artificial
  probe
  misc_feature (1)..(25): SEQ ID NO: 2218; WAN024G9O; Start 232; Stop 256
tgtgatataaacttcaatcagccct

SEQ ID NO: 318637 - DNA, 25 bp, Artificial
  probe
  misc_feature (1)..(25): SEQ ID NO: 2218; WAN024G9O; Start 231; Stop 255
gtgtgatataaacttcaatcagccc

SEQ ID NO: 318638 - DNA, 25 bp, Artificial
  probe
  misc_feature (1)..(25): SEQ ID NO: 2218; WAN024G9O; Start 230; Stop 254
ggtgtgatataaacttcaatcagcc

SEQ ID NO: 318639 - DNA, 25 bp, Artificial
  probe
  misc_feature (1)..(25): SEQ ID NO: 2218; WAN024G9O; Start 229; Stop 253
aggtgtgatataaacttcaatcagc

SEQ ID NO: 318640 - DNA, 25 bp, Artificial
  probe
  misc_feature (1)..(25): SEQ ID NO: 2218; WAN024G9O; Start 138; Stop 162
cacattcacaagaagggaaaagtat

SEQ ID NO: 318641 - DNA, 25 bp, Artificial
  probe
  misc_feature (1)..(25): SEQ ID NO: 2218; WAN024G9O; Start 129; Stop 153
ggacgattccacattcacaagaagg

SEQ ID NO: 318642 - DNA, 25 bp, Artificial
  probe
  misc_feature (1)..(25): SEQ ID NO: 2218; WAN024G9O; Start 234; Stop 258
tgatataaacttcaatcagccctga

SEQ ID NO: 318643 - DNA, 25 bp, Artificial
  probe
  misc_feature (1)..(25): SEQ ID NO: 2218; WAN024G9O; Start 137; Stop 161
ccacattcacaagaagggaaaagta

SEQ ID NO: 318644 - DNA, 25 bp, Artificial
  probe
  misc_feature (1)..(25): SEQ ID NO: 2218; WAN024G9O; Start 206; Stop 230
gggagaaaatgataaaccttgtcag

SEQ ID NO: 318645 - DNA, 25 bp, Artificial
  probe
  misc_feature (1)..(25): SEQ ID NO: 2218; WAN024G9O; Start 39; Stop 63
gaacaatgggattgataacaggtgc

SEQ ID NO: 318646 - DNA, 25 bp, Artificial
  probe
  misc_feature (1)..(25): SEQ ID NO: 2218; WAN024G9O; Start 227; Stop 251
tcaggtgtgatataaacttcaatca

SEQ ID NO: 318647 - DNA, 25 bp, Artificial
  probe
  misc_feature (1)..(25): SEQ ID NO: 2218; WAN024G9O; Start 130; Stop 154
gacgattccacattcacaagaaggg

SEQ ID NO: 318648 - DNA, 25 bp, Artificial
  probe
  misc_feature (1)..(25): SEQ ID NO: 2218; WAN024G9O; Start 139; Stop 163
acattcacaagaagggaaaagtata

SEQ ID NO: 318649 - DNA, 25 bp, Artificial
  probe
  misc_feature (1)..(25): SEQ ID NO: 2218; WAN024G9O; Start 207; Stop 231
ggagaaaatgataaaccttgtcagg

SEQ ID NO: 318650 - DNA, 25 bp, Artificial
  probe
  misc_feature (1)..(25): SEQ ID NO: 2218; WAN024G9O; Start 205; Stop 229
agggagaaaatgataaaccttgtca

SEQ ID NO: 318651 - DNA, 25 bp, Artificial
  probe
  misc_feature (1)..(25): SEQ ID NO: 2218; WAN024G9O; Start 228; Stop 252
caggtgtgatataaacttcaatcag

SEQ ID NO: 318652 - DNA, 25 bp, Artificial
  probe
  misc_feature (1)..(25): SEQ ID NO: 2218; WAN024G9O; Start 204; Stop 228
gagggagaaaatgataaaccttgtc

SEQ ID NO: 318653 - DNA, 25 bp, Artificial
  probe
  misc_feature (1)..(25): SEQ ID NO: 2218; WAN024G9O; Start 40; Stop 64
aacaatgggattgataacaggtgct

SEQ ID NO: 318654 - DNA, 25 bp, Artificial
  probe
  misc_feature (1)..(25): SEQ ID NO: 2218; WAN024G9O; Start 203; Stop 227
cgagggagaaaatgataaaccttgt

SEQ ID NO: 318655 - DNA, 25 bp, Artificial
  probe
  misc_feature (1)..(25): SEQ ID NO: 2218; WAN024G9O; Start 48; Stop 72
gattgataacaggtgctgtcacaag

SEQ ID NO: 318656 - DNA, 25 bp, Artificial
  probe
  misc_feature (1)..(25): SEQ ID NO: 2218; WAN024G9O; Start 156; Stop 180
aaagtataccgacaaaggtcccaaa

SEQ ID NO: 318657 - DNA, 25 bp, Artificial
  probe
  misc_feature (1)..(25): SEQ ID NO: 2218; WAN024G9O; Start 147; Stop 171
aagaagggaaaagtataccgacaaa

SEQ ID NO: 318658 - DNA, 25 bp, Artificial
  probe
  misc_feature (1)..(25): SEQ ID NO: 2218; WAN024G9O; Start 148; Stop 172
agaagggaaaagtataccgacaaag

SEQ ID NO: 318659 - DNA, 25 bp, Artificial
  probe
  misc_feature (1)..(25): SEQ ID NO: 2218; WAN024G9O; Start 49; Stop 73
attgataacaggtgctgtcacaaga

SEQ ID NO: 318660 - DNA, 25 bp, Artificial
  probe
  misc_feature (1)..(25): SEQ ID NO: 2219; WAN024CEJ; Start 230; Stop 254
atatgatggagagtcactacaagga

SEQ ID NO: 318661 - DNA, 25 bp, Artificial
  probe
  misc_feature (1)..(25): SEQ ID NO: 2219; WAN024CEJ; Start 229; Stop 253
gatatgatggagagtcactacaagg

SEQ ID NO: 318662 - DNA, 25 bp, Artificial
  probe
  misc_feature (1)..(25): SEQ ID NO: 2219; WAN024CEJ; Start 226; Stop 250
tcagatatgatggagagtcactaca

SEQ ID NO: 318663 - DNA, 25 bp, Artificial
  probe
  misc_feature (1)..(25): SEQ ID NO: 2219; WAN024CEJ; Start 231; Stop 255
tatgatggagagtcactacaaggaa

SEQ ID NO: 318664 - DNA, 25 bp, Artificial
  probe
  misc_feature (1)..(25): SEQ ID NO: 2219; WAN024CEJ; Start 227; Stop 251
cagatatgatggagagtcactacaa

SEQ ID NO: 318665 - DNA, 25 bp, Artificial
  probe
  misc_feature (1)..(25): SEQ ID NO: 2219; WAN024CEJ; Start 228; Stop 252
agatatgatggagagtcactacaag

SEQ ID NO: 318666 - DNA, 25 bp, Artificial
  probe
  misc_feature (1)..(25): SEQ ID NO: 2219; WAN024CEJ; Start 225; Stop 249
ttcagatatgatggagagtcactac

SEQ ID NO: 318667 - DNA, 25 bp, Artificial
  probe
  misc_feature (1)..(25): SEQ ID NO: 2219; WAN024CEJ; Start 232; Stop 256
atgatggagagtcactacaaggaat

SEQ ID NO: 318668 - DNA, 25 bp, Artificial
  probe
  misc_feature (1)..(25): SEQ ID NO: 2219; WAN024CEJ; Start 233; Stop 257
tgatggagagtcactacaaggaatt

SEQ ID NO: 318669 - DNA, 25 bp, Artificial
  probe
  misc_feature (1)..(25): SEQ ID NO: 2219; WAN024CEJ; Start 234; Stop 258
gatggagagtcactacaaggaattt

SEQ ID NO: 318670 - DNA, 25 bp, Artificial
  probe
  misc_feature (1)..(25): SEQ ID NO: 2219; WAN024CEJ; Start 153; Stop 177
ggatttacaagacatagaccaaaca

SEQ ID NO: 318671 - DNA, 25 bp, Artificial
  probe
  misc_feature (1)..(25): SEQ ID NO: 2219; WAN024CEJ; Start 236; Stop 260
tggagagtcactacaaggaatttat

SEQ ID NO: 318672 - DNA, 25 bp, Artificial
  probe
  misc_feature (1)..(25): SEQ ID NO: 2219; WAN024CEJ; Start 235; Stop 259
atggagagtcactacaaggaattta

SEQ ID NO: 318673 - DNA, 25 bp, Artificial
  probe
  misc_feature (1)..(25): SEQ ID NO: 2219; WAN024CEJ; Start 152; Stop 176
aggatttacaagacatagaccaaac

SEQ ID NO: 318674 - DNA, 25 bp, Artificial
  probe
  misc_feature (1)..(25): SEQ ID NO: 2219; WAN024CEJ; Start 156; Stop 180
tttacaagacatagaccaaacaagt

SEQ ID NO: 318675 - DNA, 25 bp, Artificial
  probe
  misc_feature (1)..(25): SEQ ID NO: 2219; WAN024CEJ; Start 360; Stop 384
tagtgatttagaaaccagtcctcaa

SEQ ID NO: 318676 - DNA, 25 bp, Artificial
  probe
  misc_feature (1)..(25): SEQ ID NO: 2219; WAN024CEJ; Start 223; Stop 247
atttcagatatgatggagagtcact

SEQ ID NO: 318677 - DNA, 25 bp, Artificial
  probe
  misc_feature (1)..(25): SEQ ID NO: 2219; WAN024CEJ; Start 359; Stop 383
ctagtgatttagaaaccagtcctca

SEQ ID NO: 318678 - DNA, 25 bp, Artificial
  probe
  misc_feature (1)..(25): SEQ ID NO: 2219; WAN024CEJ; Start 151; Stop 175
aaggatttacaagacatagaccaaa

SEQ ID NO: 318679 - DNA, 25 bp, Artificial
  probe
  misc_feature (1)..(25): SEQ ID NO: 2219; WAN024CEJ; Start 150; Stop 174
aaaggatttacaagacatagaccaa

SEQ ID NO: 318680 - DNA, 25 bp, Artificial
  probe
  misc_feature (1)..(25): SEQ ID NO: 2219; WAN024CEJ; Start 222; Stop 246
gatttcagatatgatggagagtcac

SEQ ID NO: 318681 - DNA, 25 bp, Artificial
  probe
  misc_feature (1)..(25): SEQ ID NO: 2219; WAN024CEJ; Start 221; Stop 245
agatttcagatatgatggagagtca

SEQ ID NO: 318682 - DNA, 25 bp, Artificial
  probe
  misc_feature (1)..(25): SEQ ID NO: 2219; WAN024CEJ; Start 224; Stop 248
tttcagatatgatggagagtcacta

SEQ ID NO: 318683 - DNA, 25 bp, Artificial
  probe
  misc_feature (1)..(25): SEQ ID NO: 2219; WAN024CEJ; Start 157; Stop 181
ttacaagacatagaccaaacaagta

SEQ ID NO: 318684 - DNA, 25 bp, Artificial
  probe
  misc_feature (1)..(25): SEQ ID NO: 2219; WAN024CEJ; Start 158; Stop 182
tacaagacatagaccaaacaagtat

SEQ ID NO: 318685 - DNA, 25 bp, Artificial
  probe
  misc_feature (1)..(25): SEQ ID NO: 2219; WAN024CEJ; Start 155; Stop 179
atttacaagacatagaccaaacaag

SEQ ID NO: 318686 - DNA, 25 bp, Artificial
  probe
  misc_feature (1)..(25): SEQ ID NO: 2219; WAN024CEJ; Start 154; Stop 178
gatttacaagacatagaccaaacaa

SEQ ID NO: 318687 - DNA, 25 bp, Artificial
  probe
  misc_feature (1)..(25): SEQ ID NO: 2219; WAN024CEJ; Start 358; Stop 382
tctagtgatttagaaaccagtcctc

SEQ ID NO: 318688 - DNA, 25 bp, Artificial
  probe
  misc_feature (1)..(25): SEQ ID NO: 2219; WAN024CEJ; Start 237; Stop 261
ggagagtcactacaaggaatttata

SEQ ID NO: 318689 - DNA, 25 bp, Artificial
  probe
  misc_feature (1)..(25): SEQ ID NO: 2219; WAN024CEJ; Start 220; Stop 244
aagatttcagatatgatggagagtc

SEQ ID NO: 318690 - DNA, 25 bp, Artificial
  probe
  misc_feature (1)..(25): SEQ ID NO: 2219; WAN024CEJ; Start 219; Stop 243
aaagatttcagatatgatggagagt

SEQ ID NO: 318691 - DNA, 25 bp, Artificial
  probe
  misc_feature (1)..(25): SEQ ID NO: 2219; WAN024CEJ; Start 12; Stop 36
ttatcaacgtgattcggatcaagat

SEQ ID NO: 318692 - DNA, 25 bp, Artificial
  probe
  misc_feature (1)..(25): SEQ ID NO: 2219; WAN024CEJ; Start 13; Stop 37
tatcaacgtgattcggatcaagatg

SEQ ID NO: 318693 - DNA, 25 bp, Artificial
  probe
  misc_feature (1)..(25): SEQ ID NO: 2220; WAN024FOE; Start 37; Stop 61
tataatcaagttcaagaccaggacc

SEQ ID NO: 318694 - DNA, 25 bp, Artificial
  probe
  misc_feature (1)..(25): SEQ ID NO: 2220; WAN024FOE; Start 42; Stop 66
tcaagttcaagaccaggacctatat

SEQ ID NO: 318695 - DNA, 25 bp, Artificial
  probe
  misc_feature (1)..(25): SEQ ID NO: 2220; WAN024FOE; Start 41; Stop 65
atcaagttcaagaccaggacctata

SEQ ID NO: 318696 - DNA, 25 bp, Artificial
  probe
  misc_feature (1)..(25): SEQ ID NO: 2220; WAN024FOE; Start 39; Stop 63
taatcaagttcaagaccaggaccta

SEQ ID NO: 318697 - DNA, 25 bp, Artificial
  probe
  misc_feature (1)..(25): SEQ ID NO: 2220; WAN024FOE; Start 43; Stop 67
caagttcaagaccaggacctatata

SEQ ID NO: 318698 - DNA, 25 bp, Artificial
  probe
  misc_feature (1)..(25): SEQ ID NO: 2220; WAN024FOE; Start 40; Stop 64
aatcaagttcaagaccaggacctat

SEQ ID NO: 318699 - DNA, 25 bp, Artificial
  probe
  misc_feature (1)..(25): SEQ ID NO: 2220; WAN024FOE; Start 38; Stop 62
ataatcaagttcaagaccaggacct

SEQ ID NO: 318700 - DNA, 25 bp, Artificial
  probe
  misc_feature (1)..(25): SEQ ID NO: 2220; WAN024FOE; Start 45; Stop 69
agttcaagaccaggacctatatatc

SEQ ID NO: 318701 - DNA, 25 bp, Artificial
  probe
  misc_feature (1)..(25): SEQ ID NO: 2220; WAN024FOE; Start 44; Stop 68
aagttcaagaccaggacctatatat

SEQ ID NO: 318702 - DNA, 25 bp, Artificial
  probe
  misc_feature (1)..(25): SEQ ID NO: 2220; WAN024FOE; Start 166; Stop 190
tgtgaattaacaggattgtattgga

SEQ ID NO: 318703 - DNA, 25 bp, Artificial
  probe
  misc_feature (1)..(25): SEQ ID NO: 2220; WAN024FOE; Start 36; Stop 60
ttataatcaagttcaagaccaggac

SEQ ID NO: 318704 - DNA, 25 bp, Artificial
  probe
  misc_feature (1)..(25): SEQ ID NO: 2220; WAN024FOE; Start 525; Stop 549
aatgatggatgaatattgcagttgg

SEQ ID NO: 318705 - DNA, 25 bp, Artificial
  probe
  misc_feature (1)..(25): SEQ ID NO: 2220; WAN024FOE; Start 46; Stop 70
gttcaagaccaggacctatatatcc

SEQ ID NO: 318706 - DNA, 25 bp, Artificial
  probe
  misc_feature (1)..(25): SEQ ID NO: 2220; WAN024FOE; Start 35; Stop 59
cttataatcaagttcaagaccagga

SEQ ID NO: 318707 - DNA, 25 bp, Artificial
  probe
  misc_feature (1)..(25): SEQ ID NO: 2220; WAN024FOE; Start 339; Stop 363
aaagagtatgaacgagtataacggg

SEQ ID NO: 318708 - DNA, 25 bp, Artificial
  probe
  misc_feature (1)..(25): SEQ ID NO: 2220; WAN024FOE; Start 528; Stop 552
gatggatgaatattgcagttggtta

SEQ ID NO: 318709 - DNA, 25 bp, Artificial
  probe
  misc_feature (1)..(25): SEQ ID NO: 2220; WAN024FOE; Start 342; Stop 366
gagtatgaacgagtataacgggtat

SEQ ID NO: 318710 - DNA, 25 bp, Artificial
  probe
  misc_feature (1)..(25): SEQ ID NO: 2220; WAN024FOE; Start 341; Stop 365
agagtatgaacgagtataacgggta

SEQ ID NO: 318711 - DNA, 25 bp, Artificial
  probe
  misc_feature (1)..(25): SEQ ID NO: 2220; WAN024FOE; Start 338; Stop 362
caaagagtatgaacgagtataacgg

SEQ ID NO: 318712 - DNA, 25 bp, Artificial
  probe
  misc_feature (1)..(25): SEQ ID NO: 2220; WAN024FOE; Start 526; Stop 550
atgatggatgaatattgcagttggt

SEQ ID NO: 318713 - DNA, 25 bp, Artificial
  probe
  misc_feature (1)..(25): SEQ ID NO: 2220; WAN024FOE; Start 165; Stop 189
ttgtgaattaacaggattgtattgg

SEQ ID NO: 318714 - DNA, 25 bp, Artificial
  probe
  misc_feature (1)..(25): SEQ ID NO: 2220; WAN024FOE; Start 527; Stop 551
tgatggatgaatattgcagttggtt

SEQ ID NO: 318715 - DNA, 25 bp, Artificial
  probe
  misc_feature (1)..(25): SEQ ID NO: 2220; WAN024FOE; Start 529; Stop 553
atggatgaatattgcagttggttat

SEQ ID NO: 318716 - DNA, 25 bp, Artificial
  probe
  misc_feature (1)..(25): SEQ ID NO: 2220; WAN024FOE; Start 340; Stop 364
aagagtatgaacgagtataacgggt

SEQ ID NO: 318717 - DNA, 25 bp, Artificial
  probe
  misc_feature (1)..(25): SEQ ID NO: 2220; WAN024FOE; Start 530; Stop 554
tggatgaatattgcagttggttatt

SEQ ID NO: 318718 - DNA, 25 bp, Artificial
  probe
  misc_feature (1)..(25): SEQ ID NO: 2220; WAN024FOE; Start 343; Stop 367
agtatgaacgagtataacgggtata

SEQ ID NO: 318719 - DNA, 25 bp, Artificial
  probe
  misc_feature (1)..(25): SEQ ID NO: 2220; WAN024FOE; Start 331; Stop 355
ttaccatcaaagagtatgaacgagt

SEQ ID NO: 318720 - DNA, 25 bp, Artificial
  probe
  misc_feature (1)..(25): SEQ ID NO: 2220; WAN024FOE; Start 333; Stop 357
accatcaaagagtatgaacgagtat

SEQ ID NO: 318721 - DNA, 25 bp, Artificial
  probe
  misc_feature (1)..(25): SEQ ID NO: 2220; WAN024FOE; Start 167; Stop 191
gtgaattaacaggattgtattggat

SEQ ID NO: 318722 - DNA, 25 bp, Artificial
  probe
  misc_feature (1)..(25): SEQ ID NO: 2220; WAN024FOE; Start 389; Stop 413
agaatcacgatcataaagtttggga

SEQ ID NO: 318723 - DNA, 25 bp, Artificial
  probe
  misc_feature (1)..(25): SEQ ID NO: 2220; WAN024FOE; Start 390; Stop 414
gaatcacgatcataaagtttgggaa

SEQ ID NO: 318724 - DNA, 25 bp, Artificial
  probe
  misc_feature (1)..(25): SEQ ID NO: 2220; WAN024FOE; Start 388; Stop 412
aagaatcacgatcataaagtttggg

SEQ ID NO: 318725 - DNA, 25 bp, Artificial
  probe
  misc_feature (1)..(25): SEQ ID NO: 2220; WAN024FOE; Start 396; Stop 420
cgatcataaagtttgggaaatgtgt

SEQ ID NO: 318726 - DNA, 25 bp, Artificial
  probe
  misc_feature (1)..(25): SEQ ID NO: 2221; WAN024CVY; Start 270; Stop 294
aatgactgaagaagatgtacgcaag

SEQ ID NO: 318727 - DNA, 25 bp, Artificial
  probe
  misc_feature (1)..(25): SEQ ID NO: 2221; WAN024CVY; Start 590; Stop 614
ttgccatgttgagctattctactaa

SEQ ID NO: 318728 - DNA, 25 bp, Artificial
  probe
  misc_feature (1)..(25): SEQ ID NO: 2221; WAN024CVY; Start 589; Stop 613
attgccatgttgagctattctacta

SEQ ID NO: 318729 - DNA, 25 bp, Artificial
  probe
  misc_feature (1)..(25): SEQ ID NO: 2221; WAN024CVY; Start 172; Stop 196
attgaaggaatcatggatggttatg

SEQ ID NO: 318730 - DNA, 25 bp, Artificial
  probe
  misc_feature (1)..(25): SEQ ID NO: 2221; WAN024CVY; Start 588; Stop 612
aattgccatgttgagctattctact

SEQ ID NO: 318731 - DNA, 25 bp, Artificial
  probe
  misc_feature (1)..(25): SEQ ID NO: 2221; WAN024CVY; Start 171; Stop 195
aattgaaggaatcatggatggttat

SEQ ID NO: 318732 - DNA, 25 bp, Artificial
  probe
  misc_feature (1)..(25): SEQ ID NO: 2221; WAN024CVY; Start 602; Stop 626
gctattctactaaaggttcagggtt

SEQ ID NO: 318733 - DNA, 25 bp, Artificial
  probe
  misc_feature (1)..(25): SEQ ID NO: 2221; WAN024CVY; Start 315; Stop 339
ctactttggtgtgatgttggtttac

SEQ ID NO: 318734 - DNA, 25 bp, Artificial
  probe
  misc_feature (1)..(25): SEQ ID NO: 2221; WAN024CVY; Start 605; Stop 629
attctactaaaggttcagggtttgg

SEQ ID NO: 318735 - DNA, 25 bp, Artificial
  probe
  misc_feature (1)..(25): SEQ ID NO: 2221; WAN024CVY; Start 316; Stop 340
tactttggtgtgatgttggtttact

SEQ ID NO: 318736 - DNA, 25 bp, Artificial
  probe
  misc_feature (1)..(25): SEQ ID NO: 2221; WAN024CVY; Start 314; Stop 338
actactttggtgtgatgttggttta

SEQ ID NO: 318737 - DNA, 25 bp, Artificial
  probe
  misc_feature (1)..(25): SEQ ID NO: 2221; WAN024CVY; Start 780; Stop 804
aaatgtcttcatcttcccaggtatc

SEQ ID NO: 318738 - DNA, 25 bp, Artificial
  probe
  misc_feature (1)..(25): SEQ ID NO: 2221; WAN024CVY; Start 318; Stop 342
ctttggtgtgatgttggtttacttg

SEQ ID NO: 318739 - DNA, 25 bp, Artificial
  probe
  misc_feature (1)..(25): SEQ ID NO: 2221; WAN024CVY; Start 779; Stop 803
caaatgtcttcatcttcccaggtat

SEQ ID NO: 318740 - DNA, 25 bp, Artificial
  probe
  misc_feature (1)..(25): SEQ ID NO: 2221; WAN024CVY; Start 921; Stop 945
agatgatgtttacaagttgaccctc

SEQ ID NO: 318741 - DNA, 25 bp, Artificial
  probe
  misc_feature (1)..(25): SEQ ID NO: 2221; WAN024CVY; Start 317; Stop 341
actttggtgtgatgttggtttactt

SEQ ID NO: 318742 - DNA, 25 bp, Artificial
  probe
  misc_feature (1)..(25): SEQ ID NO: 2221; WAN024CVY; Start 920; Stop 944
cagatgatgtttacaagttgaccct

SEQ ID NO: 318743 - DNA, 25 bp, Artificial
  probe
  misc_feature (1)..(25): SEQ ID NO: 2221; WAN024CVY; Start 204; Stop 228
cgaccctcaacattatcctcaattt

SEQ ID NO: 318744 - DNA, 25 bp, Artificial
  probe
  misc_feature (1)..(25): SEQ ID NO: 2221; WAN024CVY; Start 205; Stop 229
gaccctcaacattatcctcaatttg

SEQ ID NO: 318745 - DNA, 25 bp, Artificial
  probe
  misc_feature (1)..(25): SEQ ID NO: 2221; WAN024CVY; Start 606; Stop 630
ttctactaaaggttcagggtttggt

SEQ ID NO: 318746 - DNA, 25 bp, Artificial
  probe
  misc_feature (1)..(25): SEQ ID NO: 2221; WAN024CVY; Start 305; Stop 329
aagatgtcaactactttggtgtgat

SEQ ID NO: 318747 - DNA, 25 bp, Artificial
  probe
  misc_feature (1)..(25): SEQ ID NO: 2221; WAN024CVY; Start 271; Stop 295
atgactgaagaagatgtacgcaagg

SEQ ID NO: 318748 - DNA, 25 bp, Artificial
  probe
  misc_feature (1)..(25): SEQ ID NO: 2221; WAN024CVY; Start 313; Stop 337
aactactttggtgtgatgttggttt

SEQ ID NO: 318749 - DNA, 25 bp, Artificial
  probe
  misc_feature (1)..(25): SEQ ID NO: 2221; WAN024CVY; Start 891; Stop 915
agttaatgatctttctcgtggatgt

SEQ ID NO: 318750 - DNA, 25 bp, Artificial
  probe
  misc_feature (1)..(25): SEQ ID NO: 2221; WAN024CVY; Start 890; Stop 914
cagttaatgatctttctcgtggatg

SEQ ID NO: 318751 - DNA, 25 bp, Artificial
  probe
  misc_feature (1)..(25): SEQ ID NO: 2221; WAN024CVY; Start 308; Stop 332
atgtcaactactttggtgtgatgtt

SEQ ID NO: 318752 - DNA, 25 bp, Artificial
  probe
  misc_feature (1)..(25): SEQ ID NO: 2221; WAN024CVY; Start 304; Stop 328
gaagatgtcaactactttggtgtga

SEQ ID NO: 318753 - DNA, 25 bp, Artificial
  probe
  misc_feature (1)..(25): SEQ ID NO: 2221; WAN024CVY; Start 306; Stop 330
agatgtcaactactttggtgtgatg

SEQ ID NO: 318754 - DNA, 25 bp, Artificial
  probe
  misc_feature (1)..(25): SEQ ID NO: 2221; WAN024CVY; Start 604; Stop 628
tattctactaaaggttcagggtttg

SEQ ID NO: 318755 - DNA, 25 bp, Artificial
  probe
  misc_feature (1)..(25): SEQ ID NO: 2221; WAN024CVY; Start 895; Stop 919
aatgatctttctcgtggatgtaatg

SEQ ID NO: 318756 - DNA, 25 bp, Artificial
  probe
  misc_feature (1)..(25): SEQ ID NO: 2221; WAN024CVY; Start 922; Stop 946
gatgatgtttacaagttgaccctca

SEQ ID NO: 318757 - DNA, 25 bp, Artificial
  probe
  misc_feature (1)..(25): SEQ ID NO: 2221; WAN024CVY; Start 373; Stop 397
attcactcaacagcttcaacagttc

SEQ ID NO: 318758 - DNA, 25 bp, Artificial
  probe
  misc_feature (1)..(25): SEQ ID NO: 2221; WAN024CVY; Start 372; Stop 396
gattcactcaacagcttcaacagtt

SEQ ID NO: 318759 - DNA, 25 bp, Artificial
  probe
  misc_feature (1)..(25): SEQ ID NO: 2222; WAN024B2P; Start 258; Stop 282
aattcaagcatctatgtcacgcaag

SEQ ID NO: 318760 - DNA, 25 bp, Artificial
  probe
  misc_feature (1)..(25): SEQ ID NO: 2222; WAN024B2P; Start 259; Stop 283
attcaagcatctatgtcacgcaagg

SEQ ID NO: 318761 - DNA, 25 bp, Artificial
  probe
  misc_feature (1)..(25): SEQ ID NO: 2222; WAN024B2P; Start 257; Stop 281
gaattcaagcatctatgtcacgcaa

SEQ ID NO: 318762 - DNA, 25 bp, Artificial
  probe
  misc_feature (1)..(25): SEQ ID NO: 2222; WAN024B2P; Start 252; Stop 276
taagggaattcaagcatctatgtca

SEQ ID NO: 318763 - DNA, 25 bp, Artificial
  probe
  misc_feature (1)..(25): SEQ ID NO: 2222; WAN024B2P; Start 253; Stop 277
aagggaattcaagcatctatgtcac

SEQ ID NO: 318764 - DNA, 25 bp, Artificial
  probe
  misc_feature (1)..(25): SEQ ID NO: 2222; WAN024B2P; Start 336; Stop 360
cgaaatgttttatggctatgagaaa

SEQ ID NO: 318765 - DNA, 25 bp, Artificial
  probe
  misc_feature (1)..(25): SEQ ID NO: 2222; WAN024B2P; Start 256; Stop 280
ggaattcaagcatctatgtcacgca

SEQ ID NO: 318766 - DNA, 25 bp, Artificial
  probe
  misc_feature (1)..(25): SEQ ID NO: 2222; WAN024B2P; Start 254; Stop 278
agggaattcaagcatctatgtcacg

SEQ ID NO: 318767 - DNA, 25 bp, Artificial
  probe
  misc_feature (1)..(25): SEQ ID NO: 2222; WAN024B2P; Start 255; Stop 279
gggaattcaagcatctatgtcacgc

SEQ ID NO: 318768 - DNA, 25 bp, Artificial
  probe
  misc_feature (1)..(25): SEQ ID NO: 2223; WAN024CXE; Start 218; Stop 242
ctgaagaacaagatgaataccaagc

SEQ ID NO: 318769 - DNA, 25 bp, Artificial
  probe
  misc_feature (1)..(25): SEQ ID NO: 2223; WAN024CXE; Start 50; Stop 74
aagaacttggaattacacatagcgg

SEQ ID NO: 318770 - DNA, 25 bp, Artificial
  probe
  misc_feature (1)..(25): SEQ ID NO: 2223; WAN024CXE; Start 217; Stop 241
tctgaagaacaagatgaataccaag

SEQ ID NO: 318771 - DNA, 25 bp, Artificial
  probe
  misc_feature (1)..(25): SEQ ID NO: 2223; WAN024CXE; Start 52; Stop 76
gaacttggaattacacatagcggag

SEQ ID NO: 318772 - DNA, 25 bp, Artificial
  probe
  misc_feature (1)..(25): SEQ ID NO: 2223; WAN024CXE; Start 207; Stop 231
acaacctacttctgaagaacaagat

SEQ ID NO: 318773 - DNA, 25 bp, Artificial
  probe
  misc_feature (1)..(25): SEQ ID NO: 2223; WAN024CXE; Start 210; Stop 234
acctacttctgaagaacaagatgaa

SEQ ID NO: 318774 - DNA, 25 bp, Artificial
  probe
  misc_feature (1)..(25): SEQ ID NO: 2223; WAN024CXE; Start 209; Stop 233
aacctacttctgaagaacaagatga

SEQ ID NO: 318775 - DNA, 25 bp, Artificial
  probe
  misc_feature (1)..(25): SEQ ID NO: 2223; WAN024CXE; Start 208; Stop 232
caacctacttctgaagaacaagatg

SEQ ID NO: 318776 - DNA, 25 bp, Artificial
  probe
  misc_feature (1)..(25): SEQ ID NO: 2223; WAN024CXE; Start 206; Stop 230
cacaacctacttctgaagaacaaga

SEQ ID NO: 318777 - DNA, 25 bp, Artificial
  probe
  misc_feature (1)..(25): SEQ ID NO: 2223; WAN024CXE; Start 205; Stop 229
acacaacctacttctgaagaacaag

SEQ ID NO: 318778 - DNA, 25 bp, Artificial
  probe
  misc_feature (1)..(25): SEQ ID NO: 2223; WAN024CXE; Start 204; Stop 228
gacacaacctacttctgaagaacaa

SEQ ID NO: 318779 - DNA, 25 bp, Artificial
  probe
  misc_feature (1)..(25): SEQ ID NO: 2223; WAN024CXE; Start 51; Stop 75
agaacttggaattacacatagcgga

SEQ ID NO: 318780 - DNA, 25 bp, Artificial
  probe
  misc_feature (1)..(25): SEQ ID NO: 2223; WAN024CXE; Start 202; Stop 226
ttgacacaacctacttctgaagaac

SEQ ID NO: 318781 - DNA, 25 bp, Artificial
  probe
  misc_feature (1)..(25): SEQ ID NO: 2223; WAN024CXE; Start 215; Stop 239
cttctgaagaacaagatgaatacca

SEQ ID NO: 318782 - DNA, 25 bp, Artificial
  probe
  misc_feature (1)..(25): SEQ ID NO: 2223; WAN024CXE; Start 214; Stop 238
acttctgaagaacaagatgaatacc

SEQ ID NO: 318783 - DNA, 25 bp, Artificial
  probe
  misc_feature (1)..(25): SEQ ID NO: 2223; WAN024CXE; Start 216; Stop 240
ttctgaagaacaagatgaataccaa

SEQ ID NO: 318784 - DNA, 25 bp, Artificial
  probe
  misc_feature (1)..(25): SEQ ID NO: 2223; WAN024CXE; Start 222; Stop 246
agaacaagatgaataccaagctgat

SEQ ID NO: 318785 - DNA, 25 bp, Artificial
  probe
  misc_feature (1)..(25): SEQ ID NO: 2223; WAN024CXE; Start 220; Stop 244
gaagaacaagatgaataccaagctg

SEQ ID NO: 318786 - DNA, 25 bp, Artificial
  probe
  misc_feature (1)..(25): SEQ ID NO: 2223; WAN024CXE; Start 221; Stop 245
aagaacaagatgaataccaagctga

SEQ ID NO: 318787 - DNA, 25 bp, Artificial
  probe
  misc_feature (1)..(25): SEQ ID NO: 2223; WAN024CXE; Start 219; Stop 243
tgaagaacaagatgaataccaagct

SEQ ID NO: 318788 - DNA, 25 bp, Artificial
  probe
  misc_feature (1)..(25): SEQ ID NO: 2223; WAN024CXE; Start 211; Stop 235
cctacttctgaagaacaagatgaat

SEQ ID NO: 318789 - DNA, 25 bp, Artificial
  probe
  misc_feature (1)..(25): SEQ ID NO: 2223; WAN024CXE; Start 203; Stop 227
tgacacaacctacttctgaagaaca

SEQ ID NO: 318790 - DNA, 25 bp, Artificial
  probe
  misc_feature (1)..(25): SEQ ID NO: 2223; WAN024CXE; Start 223; Stop 247
gaacaagatgaataccaagctgata

SEQ ID NO: 318791 - DNA, 25 bp, Artificial
  probe
  misc_feature (1)..(25): SEQ ID NO: 2223; WAN024CXE; Start 350; Stop 374
cacgattccctggtagataactaat

SEQ ID NO: 318792 - DNA, 25 bp, Artificial
  probe
  misc_feature (1)..(25): SEQ ID NO: 2223; WAN024CXE; Start 224; Stop 248
aacaagatgaataccaagctgataa

SEQ ID NO: 318793 - DNA, 25 bp, Artificial
  probe
  misc_feature (1)..(25): SEQ ID NO: 2223; WAN024CXE; Start 178; Stop 202
cctgacatgaacattgacatcttgt

SEQ ID NO: 318794 - DNA, 25 bp, Artificial
  probe
  misc_feature (1)..(25): SEQ ID NO: 2223; WAN024CXE; Start 53; Stop 77
aacttggaattacacatagcggagg

SEQ ID NO: 318795 - DNA, 25 bp, Artificial
  probe
  misc_feature (1)..(25): SEQ ID NO: 2223; WAN024CXE; Start 49; Stop 73
aaagaacttggaattacacatagcg

SEQ ID NO: 318796 - DNA, 25 bp, Artificial
  probe
  misc_feature (1)..(25): SEQ ID NO: 2223; WAN024CXE; Start 20; Stop 44
aagaatttattaccctccaagcact

SEQ ID NO: 318797 - DNA, 25 bp, Artificial
  probe
  misc_feature (1)..(25): SEQ ID NO: 2223; WAN024CXE; Start 19; Stop 43
gaagaatttattaccctccaagcac

SEQ ID NO: 318798 - DNA, 25 bp, Artificial
  probe
  misc_feature (1)..(25): SEQ ID NO: 2223; WAN024CXE; Start 18; Stop 42
tgaagaatttattaccctccaagca

SEQ ID NO: 318799 - DNA, 25 bp, Artificial
  probe
  misc_feature (1)..(25): SEQ ID NO: 2223; WAN024CXE; Start 21; Stop 45
agaatttattaccctccaagcacta

SEQ ID NO: 318800 - DNA, 25 bp, Artificial
  probe
  misc_feature (1)..(25): SEQ ID NO: 2223; WAN024CXE; Start 55; Stop 79
cttggaattacacatagcggaggag

SEQ ID NO: 318801 - DNA, 25 bp, Artificial
  probe
  misc_feature (1)..(25): SEQ ID NO: 2224; WAN024G8N; Start 1; Stop 25
atggaatacaatcacaaggagagaa

SEQ ID NO: 318802 - DNA, 25 bp, Artificial
  probe
  misc_feature (1)..(25): SEQ ID NO: 2224; WAN024G8N; Start 1027; Stop 1051
gacaactactataccaaccaaccta

SEQ ID NO: 318803 - DNA, 25 bp, Artificial
  probe
  misc_feature (1)..(25): SEQ ID NO: 2224; WAN024G8N; Start 1025; Stop 1049
tagacaactactataccaaccaacc

SEQ ID NO: 318804 - DNA, 25 bp, Artificial
  probe
  misc_feature (1)..(25): SEQ ID NO: 2224; WAN024G8N; Start 2; Stop 26
tggaatacaatcacaaggagagaac

SEQ ID NO: 318805 - DNA, 25 bp, Artificial
  probe
  misc_feature (1)..(25): SEQ ID NO: 2224; WAN024G8N; Start 5; Stop 29
aatacaatcacaaggagagaacgat

SEQ ID NO: 318806 - DNA, 25 bp, Artificial
  probe
  misc_feature (1)..(25): SEQ ID NO: 2224; WAN024G8N; Start 4; Stop 28
gaatacaatcacaaggagagaacga

SEQ ID NO: 318807 - DNA, 25 bp, Artificial
  probe
  misc_feature (1)..(25): SEQ ID NO: 2224; WAN024G8N; Start 1026; Stop 1050
agacaactactataccaaccaacct

SEQ ID NO: 318808 - DNA, 25 bp, Artificial
  probe
  misc_feature (1)..(25): SEQ ID NO: 2224; WAN024G8N; Start 6; Stop 30
atacaatcacaaggagagaacgatg

SEQ ID NO: 318809 - DNA, 25 bp, Artificial
  probe
  misc_feature (1)..(25): SEQ ID NO: 2224; WAN024G8N; Start 1028; Stop 1052
acaactactataccaaccaacctat

SEQ ID NO: 318810 - DNA, 25 bp, Artificial
  probe
  misc_feature (1)..(25): SEQ ID NO: 2224; WAN024G8N; Start 1022; Stop 1046
tcctagacaactactataccaacca

SEQ ID NO: 318811 - DNA, 25 bp, Artificial
  probe
  misc_feature (1)..(25): SEQ ID NO: 2224; WAN024G8N; Start 1030; Stop 1054
aactactataccaaccaacctatca

SEQ ID NO: 318812 - DNA, 25 bp, Artificial
  probe
  misc_feature (1)..(25): SEQ ID NO: 2224; WAN024G8N; Start 3; Stop 27
ggaatacaatcacaaggagagaacg

SEQ ID NO: 318813 - DNA, 25 bp, Artificial
  probe
  misc_feature (1)..(25): SEQ ID NO: 2224; WAN024G8N; Start 1023; Stop 1047
cctagacaactactataccaaccaa

SEQ ID NO: 318814 - DNA, 25 bp, Artificial
  probe
  misc_feature (1)..(25): SEQ ID NO: 2224; WAN024G8N; Start 1029; Stop 1053
caactactataccaaccaacctatc

SEQ ID NO: 318815 - DNA, 25 bp, Artificial
  probe
  misc_feature (1)..(25): SEQ ID NO: 2224; WAN024G8N; Start 49; Stop 73
ttacaccacatagttgaggaattgc

SEQ ID NO: 318816 - DNA, 25 bp, Artificial
  probe
  misc_feature (1)..(25): SEQ ID NO: 2224; WAN024G8N; Start 1031; Stop 1055
actactataccaaccaacctatcat

SEQ ID NO: 318817 - DNA, 25 bp, Artificial
  probe
  misc_feature (1)..(25): SEQ ID NO: 2224; WAN024G8N; Start 1021; Stop 1045
atcctagacaactactataccaacc

SEQ ID NO: 318818 - DNA, 25 bp, Artificial
  probe
  misc_feature (1)..(25): SEQ ID NO: 2224; WAN024G8N; Start 1024; Stop 1048
ctagacaactactataccaaccaac

SEQ ID NO: 318819 - DNA, 25 bp, Artificial
  probe
  misc_feature (1)..(25): SEQ ID NO: 2224; WAN024G8N; Start 1010; Stop 1034
aagaccaggttatcctagacaacta

SEQ ID NO: 318820 - DNA, 25 bp, Artificial
  probe
  misc_feature (1)..(25): SEQ ID NO: 2224; WAN024G8N; Start 362; Stop 386
accatatccaggctaccttgattat

SEQ ID NO: 318821 - DNA, 25 bp, Artificial
  probe
  misc_feature (1)..(25): SEQ ID NO: 2224; WAN024G8N; Start 1013; Stop 1037
accaggttatcctagacaactacta

SEQ ID NO: 318822 - DNA, 25 bp, Artificial
  probe
  misc_feature (1)..(25): SEQ ID NO: 2224; WAN024G8N; Start 67; Stop 91
gaattgcgaagcgaattagtgaatg

SEQ ID NO: 318823 - DNA, 25 bp, Artificial
  probe
  misc_feature (1)..(25): SEQ ID NO: 2224; WAN024G8N; Start 1032; Stop 1056
ctactataccaaccaacctatcatg

SEQ ID NO: 318824 - DNA, 25 bp, Artificial
  probe
  misc_feature (1)..(25): SEQ ID NO: 2224; WAN024G8N; Start 1012; Stop 1036
gaccaggttatcctagacaactact

SEQ ID NO: 318825 - DNA, 25 bp, Artificial
  probe
  misc_feature (1)..(25): SEQ ID NO: 2224; WAN024G8N; Start 1011; Stop 1035
agaccaggttatcctagacaactac

SEQ ID NO: 318826 - DNA, 25 bp, Artificial
  probe
  misc_feature (1)..(25): SEQ ID NO: 2224; WAN024G8N; Start 7; Stop 31
tacaatcacaaggagagaacgatgt

SEQ ID NO: 318827 - DNA, 25 bp, Artificial
  probe
  misc_feature (1)..(25): SEQ ID NO: 2224; WAN024G8N; Start 1313; Stop 1337
tagaacaatatctagcaagcgatgg

SEQ ID NO: 318828 - DNA, 25 bp, Artificial
  probe
  misc_feature (1)..(25): SEQ ID NO: 2224; WAN024G8N; Start 361; Stop 385
gaccatatccaggctaccttgatta

SEQ ID NO: 318829 - DNA, 25 bp, Artificial
  probe
  misc_feature (1)..(25): SEQ ID NO: 2224; WAN024G8N; Start 11; Stop 35
atcacaaggagagaacgatgtcatt

SEQ ID NO: 318830 - DNA, 25 bp, Artificial
  probe
  misc_feature (1)..(25): SEQ ID NO: 2224; WAN024G8N; Start 10; Stop 34
aatcacaaggagagaacgatgtcat

SEQ ID NO: 318831 - DNA, 25 bp, Artificial
  probe
  misc_feature (1)..(25): SEQ ID NO: 2224; WAN024G8N; Start 1014; Stop 1038
ccaggttatcctagacaactactat

SEQ ID NO: 318832 - DNA, 25 bp, Artificial
  probe
  misc_feature (1)..(25): SEQ ID NO: 2224; WAN024G8N; Start 1009; Stop 1033
caagaccaggttatcctagacaact

SEQ ID NO: 318833 - DNA, 25 bp, Artificial
  probe
  misc_feature (1)..(25): SEQ ID NO: 2224; WAN024G8N; Start 1164; Stop 1188
aaccaaagccactattctctatctg

SEQ ID NO: 318834 - DNA, 25 bp, Artificial
  probe
  misc_feature (1)..(25): SEQ ID NO: 2225; WAN024FRA; Start 318; Stop 342
gaatgttccgaataagcaagtgaat

SEQ ID NO: 318835 - DNA, 25 bp, Artificial
  probe
  misc_feature (1)..(25): SEQ ID NO: 2225; WAN024FRA; Start 319; Stop 343
aatgttccgaataagcaagtgaatt

SEQ ID NO: 318836 - DNA, 25 bp, Artificial
  probe
  misc_feature (1)..(25): SEQ ID NO: 2225; WAN024FRA; Start 177; Stop 201
taattggtggttagaagaatggtct

SEQ ID NO: 318837 - DNA, 25 bp, Artificial
  probe
  misc_feature (1)..(25): SEQ ID NO: 2225; WAN024FRA; Start 176; Stop 200
ataattggtggttagaagaatggtc

SEQ ID NO: 318838 - DNA, 25 bp, Artificial
  probe
  misc_feature (1)..(25): SEQ ID NO: 2225; WAN024FRA; Start 320; Stop 344
atgttccgaataagcaagtgaatta

SEQ ID NO: 318839 - DNA, 25 bp, Artificial
  probe
  misc_feature (1)..(25): SEQ ID NO: 2225; WAN024FRA; Start 175; Stop 199
cataattggtggttagaagaatggt

SEQ ID NO: 318840 - DNA, 25 bp, Artificial
  probe
  misc_feature (1)..(25): SEQ ID NO: 2225; WAN024FRA; Start 321; Stop 345
tgttccgaataagcaagtgaattat

SEQ ID NO: 318841 - DNA, 25 bp, Artificial
  probe
  misc_feature (1)..(25): SEQ ID NO: 2225; WAN024FRA; Start 637; Stop 661
ccttatgatgaagtcttggataaca

SEQ ID NO: 318842 - DNA, 25 bp, Artificial
  probe
  misc_feature (1)..(25): SEQ ID NO: 2225; WAN024FRA; Start 178; Stop 202
aattggtggttagaagaatggtcta

SEQ ID NO: 318843 - DNA, 25 bp, Artificial
  probe
  misc_feature (1)..(25): SEQ ID NO: 2225; WAN024FRA; Start 649; Stop 673
gtcttggataacatactagcttcga

SEQ ID NO: 318844 - DNA, 25 bp, Artificial
  probe
  misc_feature (1)..(25): SEQ ID NO: 2225; WAN024FRA; Start 179; Stop 203
attggtggttagaagaatggtctag

SEQ ID NO: 318845 - DNA, 25 bp, Artificial
  probe
  misc_feature (1)..(25): SEQ ID NO: 2225; WAN024FRA; Start 644; Stop 668
atgaagtcttggataacatactagc

SEQ ID NO: 318846 - DNA, 25 bp, Artificial
  probe
  misc_feature (1)..(25): SEQ ID NO: 2225; WAN024FRA; Start 648; Stop 672
agtcttggataacatactagcttcg

SEQ ID NO: 318847 - DNA, 25 bp, Artificial
  probe
  misc_feature (1)..(25): SEQ ID NO: 2225; WAN024FRA; Start 173; Stop 197
tccataattggtggttagaagaatg

SEQ ID NO: 318848 - DNA, 25 bp, Artificial
  probe
  misc_feature (1)..(25): SEQ ID NO: 2225; WAN024FRA; Start 641; Stop 665
atgatgaagtcttggataacatact

SEQ ID NO: 318849 - DNA, 25 bp, Artificial
  probe
  misc_feature (1)..(25): SEQ ID NO: 2225; WAN024FRA; Start 645; Stop 669
tgaagtcttggataacatactagct

SEQ ID NO: 318850 - DNA, 25 bp, Artificial
  probe
  misc_feature (1)..(25): SEQ ID NO: 2225; WAN024FRA; Start 312; Stop 336
gttatggaatgttccgaataagcaa

SEQ ID NO: 318851 - DNA, 25 bp, Artificial
  probe
  misc_feature (1)..(25): SEQ ID NO: 2225; WAN024FRA; Start 313; Stop 337
ttatggaatgttccgaataagcaag

SEQ ID NO: 318852 - DNA, 25 bp, Artificial
  probe
  misc_feature (1)..(25): SEQ ID NO: 2225; WAN024FRA; Start 314; Stop 338
tatggaatgttccgaataagcaagt

SEQ ID NO: 318853 - DNA, 25 bp, Artificial
  probe
  misc_feature (1)..(25): SEQ ID NO: 2225; WAN024FRA; Start 309; Stop 333
atggttatggaatgttccgaataag

SEQ ID NO: 318854 - DNA, 25 bp, Artificial
  probe
  misc_feature (1)..(25): SEQ ID NO: 2225; WAN024FRA; Start 272; Stop 296
tagatgcacataagactcgtagttc

SEQ ID NO: 318855 - DNA, 25 bp, Artificial
  probe
  misc_feature (1)..(25): SEQ ID NO: 2225; WAN024FRA; Start 271; Stop 295
atagatgcacataagactcgtagtt

SEQ ID NO: 318856 - DNA, 25 bp, Artificial
  probe
  misc_feature (1)..(25): SEQ ID NO: 2225; WAN024FRA; Start 231; Stop 255
agtatttgacaatgctatttccctt

SEQ ID NO: 318857 - DNA, 25 bp, Artificial
  probe
  misc_feature (1)..(25): SEQ ID NO: 2225; WAN024FRA; Start 636; Stop 660
cccttatgatgaagtcttggataac

SEQ ID NO: 318858 - DNA, 25 bp, Artificial
  probe
  misc_feature (1)..(25): SEQ ID NO: 2225; WAN024FRA; Start 631; Stop 655
ttactcccttatgatgaagtcttgg

SEQ ID NO: 318859 - DNA, 25 bp, Artificial
  probe
  misc_feature (1)..(25): SEQ ID NO: 2225; WAN024FRA; Start 305; Stop 329
aattatggttatggaatgttccgaa

SEQ ID NO: 318860 - DNA, 25 bp, Artificial
  probe
  misc_feature (1)..(25): SEQ ID NO: 2225; WAN024FRA; Start 274; Stop 298
gatgcacataagactcgtagttcaa

SEQ ID NO: 318861 - DNA, 25 bp, Artificial
  probe
  misc_feature (1)..(25): SEQ ID NO: 2225; WAN024FRA; Start 172; Stop 196
ttccataattggtggttagaagaat

SEQ ID NO: 318862 - DNA, 25 bp, Artificial
  probe
  misc_feature (1)..(25): SEQ ID NO: 2225; WAN024FRA; Start 171; Stop 195
attccataattggtggttagaagaa

SEQ ID NO: 318863 - DNA, 25 bp, Artificial
  probe
  misc_feature (1)..(25): SEQ ID NO: 2225; WAN024FRA; Start 311; Stop 335
ggttatggaatgttccgaataagca

SEQ ID NO: 318864 - DNA, 25 bp, Artificial
  probe
  misc_feature (1)..(25): SEQ ID NO: 2225; WAN024FRA; Start 310; Stop 334
tggttatggaatgttccgaataagc

SEQ ID NO: 318865 - DNA, 25 bp, Artificial
  probe
  misc_feature (1)..(25): SEQ ID NO: 2225; WAN024FRA; Start 306; Stop 330
attatggttatggaatgttccgaat

SEQ ID NO: 318866 - DNA, 25 bp, Artificial
  probe
  misc_feature (1)..(25): SEQ ID NO: 2225; WAN024FRA; Start 279; Stop 303
acataagactcgtagttcaaagttg

SEQ ID NO: 318867 - DNA, 25 bp, Artificial
  probe
  misc_feature (1)..(25): SEQ ID NO: 2226; WAN024CJL; Start 500; Stop 524
tggcaataatagacctactagcatc

SEQ ID NO: 318868 - DNA, 25 bp, Artificial
  probe
  misc_feature (1)..(25): SEQ ID NO: 2226; WAN024CJL; Start 501; Stop 525
ggcaataatagacctactagcatcg

SEQ ID NO: 318869 - DNA, 25 bp, Artificial
  probe
  misc_feature (1)..(25): SEQ ID NO: 2226; WAN024CJL; Start 499; Stop 523
ttggcaataatagacctactagcat

SEQ ID NO: 318870 - DNA, 25 bp, Artificial
  probe
  misc_feature (1)..(25): SEQ ID NO: 2226; WAN024CJL; Start 53; Stop 77
atgaacaattactagcgttgagaga

SEQ ID NO: 318871 - DNA, 25 bp, Artificial
  probe
  misc_feature (1)..(25): SEQ ID NO: 2226; WAN024CJL; Start 56; Stop 80
aacaattactagcgttgagagagag

SEQ ID NO: 318872 - DNA, 25 bp, Artificial
  probe
  misc_feature (1)..(25): SEQ ID NO: 2226; WAN024CJL; Start 55; Stop 79
gaacaattactagcgttgagagaga

SEQ ID NO: 318873 - DNA, 25 bp, Artificial
  probe
  misc_feature (1)..(25): SEQ ID NO: 2226; WAN024CJL; Start 54; Stop 78
tgaacaattactagcgttgagagag

SEQ ID NO: 318874 - DNA, 25 bp, Artificial
  probe
  misc_feature (1)..(25): SEQ ID NO: 2226; WAN024CJL; Start 52; Stop 76
aatgaacaattactagcgttgagag

SEQ ID NO: 318875 - DNA, 25 bp, Artificial
  probe
  misc_feature (1)..(25): SEQ ID NO: 2226; WAN024CJL; Start 58; Stop 82
caattactagcgttgagagagagtt

SEQ ID NO: 318876 - DNA, 25 bp, Artificial
  probe
  misc_feature (1)..(25): SEQ ID NO: 2226; WAN024CJL; Start 57; Stop 81
acaattactagcgttgagagagagt

SEQ ID NO: 318877 - DNA, 25 bp, Artificial
  probe
  misc_feature (1)..(25): SEQ ID NO: 2226; WAN024CJL; Start 360; Stop 384
ttggcttgagcaagaggaatatatc

SEQ ID NO: 318878 - DNA, 25 bp, Artificial
  probe
  misc_feature (1)..(25): SEQ ID NO: 2226; WAN024CJL; Start 362; Stop 386
ggcttgagcaagaggaatatatcat

SEQ ID NO: 318879 - DNA, 25 bp, Artificial
  probe
  misc_feature (1)..(25): SEQ ID NO: 2226; WAN024CJL; Start 739; Stop 763
attgctggtgtagagattcgcttaa

SEQ ID NO: 318880 - DNA, 25 bp, Artificial
  probe
  misc_feature (1)..(25): SEQ ID NO: 2226; WAN024CJL; Start 51; Stop 75
taatgaacaattactagcgttgaga

SEQ ID NO: 318881 - DNA, 25 bp, Artificial
  probe
  misc_feature (1)..(25): SEQ ID NO: 2226; WAN024CJL; Start 738; Stop 762
aattgctggtgtagagattcgctta

SEQ ID NO: 318882 - DNA, 25 bp, Artificial
  probe
  misc_feature (1)..(25): SEQ ID NO: 2226; WAN024CJL; Start 363; Stop 387
gcttgagcaagaggaatatatcatt

SEQ ID NO: 318883 - DNA, 25 bp, Artificial
  probe
  misc_feature (1)..(25): SEQ ID NO: 2226; WAN024CJL; Start 502; Stop 526
gcaataatagacctactagcatcga

SEQ ID NO: 318884 - DNA, 25 bp, Artificial
  probe
  misc_feature (1)..(25): SEQ ID NO: 2226; WAN024CJL; Start 505; Stop 529
ataatagacctactagcatcgacag

SEQ ID NO: 318885 - DNA, 25 bp, Artificial
  probe
  misc_feature (1)..(25): SEQ ID NO: 2226; WAN024CJL; Start 361; Stop 385
tggcttgagcaagaggaatatatca

SEQ ID NO: 318886 - DNA, 25 bp, Artificial
  probe
  misc_feature (1)..(25): SEQ ID NO: 2226; WAN024CJL; Start 608; Stop 632
aaggaaagaaggagagaccagtata

SEQ ID NO: 318887 - DNA, 25 bp, Artificial
  probe
  misc_feature (1)..(25): SEQ ID NO: 2226; WAN024CJL; Start 609; Stop 633
aggaaagaaggagagaccagtatat

SEQ ID NO: 318888 - DNA, 25 bp, Artificial
  probe
  misc_feature (1)..(25): SEQ ID NO: 2226; WAN024CJL; Start 606; Stop 630
taaaggaaagaaggagagaccagta

SEQ ID NO: 318889 - DNA, 25 bp, Artificial
  probe
  misc_feature (1)..(25): SEQ ID NO: 2226; WAN024CJL; Start 504; Stop 528
aataatagacctactagcatcgaca

SEQ ID NO: 318890 - DNA, 25 bp, Artificial
  probe
  misc_feature (1)..(25): SEQ ID NO: 2226; WAN024CJL; Start 601; Stop 625
tttggtaaaggaaagaaggagagac

SEQ ID NO: 318891 - DNA, 25 bp, Artificial
  probe
  misc_feature (1)..(25): SEQ ID NO: 2226; WAN024CJL; Start 82; Stop 106
ttagaacatcatctagtagacggaa

SEQ ID NO: 318892 - DNA, 25 bp, Artificial
  probe
  misc_feature (1)..(25): SEQ ID NO: 2226; WAN024CJL; Start 491; Stop 515
tgagagatttggcaataatagacct

SEQ ID NO: 318893 - DNA, 25 bp, Artificial
  probe
  misc_feature (1)..(25): SEQ ID NO: 2226; WAN024CJL; Start 610; Stop 634
ggaaagaaggagagaccagtatatt

SEQ ID NO: 318894 - DNA, 25 bp, Artificial
  probe
  misc_feature (1)..(25): SEQ ID NO: 2226; WAN024CJL; Start 607; Stop 631
aaaggaaagaaggagagaccagtat

SEQ ID NO: 318895 - DNA, 25 bp, Artificial
  probe
  misc_feature (1)..(25): SEQ ID NO: 2226; WAN024CJL; Start 503; Stop 527
caataatagacctactagcatcgac

SEQ ID NO: 318896 - DNA, 25 bp, Artificial
  probe
  misc_feature (1)..(25): SEQ ID NO: 2226; WAN024CJL; Start 50; Stop 74
ataatgaacaattactagcgttgag

SEQ ID NO: 318897 - DNA, 25 bp, Artificial
  probe
  misc_feature (1)..(25): SEQ ID NO: 2226; WAN024CJL; Start 453; Stop 477
tgaacatttggaaattatgcgtgat

SEQ ID NO: 318898 - DNA, 25 bp, Artificial
  probe
  misc_feature (1)..(25): SEQ ID NO: 2226; WAN024CJL; Start 452; Stop 476
atgaacatttggaaattatgcgtga

SEQ ID NO: 318899 - DNA, 25 bp, Artificial
  probe
  misc_feature (1)..(25): SEQ ID NO: 2226; WAN024CJL; Start 451; Stop 475
gatgaacatttggaaattatgcgtg

SEQ ID NO: 318900 - DNA, 25 bp, Artificial
  probe
  misc_feature (1)..(25): SEQ ID NO: 2227; WAN024GBY; Start 180; Stop 204
gtttgatagcattgacttaatcgca

SEQ ID NO: 318901 - DNA, 25 bp, Artificial
  probe
  misc_feature (1)..(25): SEQ ID NO: 2227; WAN024GBY; Start 182; Stop 206
ttgatagcattgacttaatcgcaat

SEQ ID NO: 318902 - DNA, 25 bp, Artificial
  probe
  misc_feature (1)..(25): SEQ ID NO: 2227; WAN024GBY; Start 2; Stop 26
tggaatcacatttggttagaatcat

SEQ ID NO: 318903 - DNA, 25 bp, Artificial
  probe
  misc_feature (1)..(25): SEQ ID NO: 2227; WAN024GBY; Start 181; Stop 205
tttgatagcattgacttaatcgcaa

SEQ ID NO: 318904 - DNA, 25 bp, Artificial
  probe
  misc_feature (1)..(25): SEQ ID NO: 2227; WAN024GBY; Start 179; Stop 203
cgtttgatagcattgacttaatcgc

SEQ ID NO: 318905 - DNA, 25 bp, Artificial
  probe
  misc_feature (1)..(25): SEQ ID NO: 2227; WAN024GBY; Start 1; Stop 25
atggaatcacatttggttagaatca

SEQ ID NO: 318906 - DNA, 25 bp, Artificial
  probe
  misc_feature (1)..(25): SEQ ID NO: 2227; WAN024GBY; Start 3; Stop 27
ggaatcacatttggttagaatcatc

SEQ ID NO: 318907 - DNA, 25 bp, Artificial
  probe
  misc_feature (1)..(25): SEQ ID NO: 2227; WAN024GBY; Start 4; Stop 28
gaatcacatttggttagaatcatca

SEQ ID NO: 318908 - DNA, 25 bp, Artificial
  probe
  misc_feature (1)..(25): SEQ ID NO: 2227; WAN024GBY; Start 6; Stop 30
atcacatttggttagaatcatcaac

SEQ ID NO: 318909 - DNA, 25 bp, Artificial
  probe
  misc_feature (1)..(25): SEQ ID NO: 2227; WAN024GBY; Start 193; Stop 217
gacttaatcgcaatggaaatttacg

SEQ ID NO: 318910 - DNA, 25 bp, Artificial
  probe
  misc_feature (1)..(25): SEQ ID NO: 2227; WAN024GBY; Start 202; Stop 226
gcaatggaaatttacgaacttctct

SEQ ID NO: 318911 - DNA, 25 bp, Artificial
  probe
  misc_feature (1)..(25): SEQ ID NO: 2227; WAN024GBY; Start 178; Stop 202
acgtttgatagcattgacttaatcg

SEQ ID NO: 318912 - DNA, 25 bp, Artificial
  probe
  misc_feature (1)..(25): SEQ ID NO: 2227; WAN024GBY; Start 85; Stop 109
gaaggagttgttgttgcagaagttg

SEQ ID NO: 318913 - DNA, 25 bp, Artificial
  probe
  misc_feature (1)..(25): SEQ ID NO: 2227; WAN024GBY; Start 192; Stop 216
tgacttaatcgcaatggaaatttac

SEQ ID NO: 318914 - DNA, 25 bp, Artificial
  probe
  misc_feature (1)..(25): SEQ ID NO: 2227; WAN024GBY; Start 201; Stop 225
cgcaatggaaatttacgaacttctc

SEQ ID NO: 318915 - DNA, 25 bp, Artificial
  probe
  misc_feature (1)..(25): SEQ ID NO: 2227; WAN024GBY; Start 5; Stop 29
aatcacatttggttagaatcatcaa

SEQ ID NO: 318916 - DNA, 25 bp, Artificial
  probe
  misc_feature (1)..(25): SEQ ID NO: 2227; WAN024GBY; Start 16; Stop 40
gttagaatcatcaaccgccttgaag

SEQ ID NO: 318917 - DNA, 25 bp, Artificial
  probe
  misc_feature (1)..(25): SEQ ID NO: 2227; WAN024GBY; Start 138; Stop 162
aatctttacccttcgtgacgtagaa

SEQ ID NO: 318918 - DNA, 25 bp, Artificial
  probe
  misc_feature (1)..(25): SEQ ID NO: 2227; WAN024GBY; Start 205; Stop 229
atggaaatttacgaacttctctact

SEQ ID NO: 318919 - DNA, 25 bp, Artificial
  probe
  misc_feature (1)..(25): SEQ ID NO: 2227; WAN024GBY; Start 191; Stop 215
ttgacttaatcgcaatggaaattta

SEQ ID NO: 318920 - DNA, 25 bp, Artificial
  probe
  misc_feature (1)..(25): SEQ ID NO: 2227; WAN024GBY; Start 177; Stop 201
tacgtttgatagcattgacttaatc

SEQ ID NO: 318921 - DNA, 25 bp, Artificial
  probe
  misc_feature (1)..(25): SEQ ID NO: 2227; WAN024GBY; Start 137; Stop 161
caatctttacccttcgtgacgtaga

SEQ ID NO: 318922 - DNA, 25 bp, Artificial
  probe
  misc_feature (1)..(25): SEQ ID NO: 2227; WAN024GBY; Start 206; Stop 230
tggaaatttacgaacttctctacta

SEQ ID NO: 318923 - DNA, 25 bp, Artificial
  probe
  misc_feature (1)..(25): SEQ ID NO: 2227; WAN024GBY; Start 204; Stop 228
aatggaaatttacgaacttctctac

SEQ ID NO: 318924 - DNA, 25 bp, Artificial
  probe
  misc_feature (1)..(25): SEQ ID NO: 2227; WAN024GBY; Start 203; Stop 227
caatggaaatttacgaacttctcta

SEQ ID NO: 318925 - DNA, 25 bp, Artificial
  probe
  misc_feature (1)..(25): SEQ ID NO: 2227; WAN024GBY; Start 198; Stop 222
aatcgcaatggaaatttacgaactt

SEQ ID NO: 318926 - DNA, 25 bp, Artificial
  probe
  misc_feature (1)..(25): SEQ ID NO: 2227; WAN024GBY; Start 197; Stop 221
taatcgcaatggaaatttacgaact

SEQ ID NO: 318927 - DNA, 25 bp, Artificial
  probe
  misc_feature (1)..(25): SEQ ID NO: 2227; WAN024GBY; Start 194; Stop 218
acttaatcgcaatggaaatttacga

SEQ ID NO: 318928 - DNA, 25 bp, Artificial
  probe
  misc_feature (1)..(25): SEQ ID NO: 2227; WAN024GBY; Start 199; Stop 223
atcgcaatggaaatttacgaacttc

SEQ ID NO: 318929 - DNA, 25 bp, Artificial
  probe
  misc_feature (1)..(25): SEQ ID NO: 2227; WAN024GBY; Start 196; Stop 220
ttaatcgcaatggaaatttacgaac

SEQ ID NO: 318930 - DNA, 25 bp, Artificial
  probe
  misc_feature (1)..(25): SEQ ID NO: 2227; WAN024GBY; Start 195; Stop 219
cttaatcgcaatggaaatttacgaa

SEQ ID NO: 318931 - DNA, 25 bp, Artificial
  probe
  misc_feature (1)..(25): SEQ ID NO: 2227; WAN024GBY; Start 84; Stop 108
cgaaggagttgttgttgcagaagtt

SEQ ID NO: 318932 - DNA, 25 bp, Artificial
  probe
  misc_feature (1)..(25): SEQ ID NO: 2227; WAN024GBY; Start 174; Stop 198
gtatacgtttgatagcattgactta

SEQ ID NO: 318933 - DNA, 25 bp, Artificial
  probe
  misc_feature (1)..(25): SEQ ID NO: 2228; WAN024D54; Start 245; Stop 269
ttatcatcctcttggcaatcttgtc

SEQ ID NO: 318934 - DNA, 25 bp, Artificial
  probe
  misc_feature (1)..(25): SEQ ID NO: 2228; WAN024D54; Start 246; Stop 270
tatcatcctcttggcaatcttgtca

SEQ ID NO: 318935 - DNA, 25 bp, Artificial
  probe
  misc_feature (1)..(25): SEQ ID NO: 2228; WAN024D54; Start 243; Stop 267
ctttatcatcctcttggcaatcttg

SEQ ID NO: 318936 - DNA, 25 bp, Artificial
  probe
  misc_feature (1)..(25): SEQ ID NO: 2228; WAN024D54; Start 244; Stop 268
tttatcatcctcttggcaatcttgt

SEQ ID NO: 318937 - DNA, 25 bp, Artificial
  probe
  misc_feature (1)..(25): SEQ ID NO: 2228; WAN024D54; Start 242; Stop 266
cctttatcatcctcttggcaatctt

SEQ ID NO: 318938 - DNA, 25 bp, Artificial
  probe
  misc_feature (1)..(25): SEQ ID NO: 2228; WAN024D54; Start 175; Stop 199
ggtgtcttggagaataaagtcgtat

SEQ ID NO: 318939 - DNA, 25 bp, Artificial
  probe
  misc_feature (1)..(25): SEQ ID NO: 2228; WAN024D54; Start 247; Stop 271
atcatcctcttggcaatcttgtcac

SEQ ID NO: 318940 - DNA, 25 bp, Artificial
  probe
  misc_feature (1)..(25): SEQ ID NO: 2228; WAN024D54; Start 261; Stop 285
aatcttgtcaccactttctcacttg

SEQ ID NO: 318941 - DNA, 25 bp, Artificial
  probe
  misc_feature (1)..(25): SEQ ID NO: 2228; WAN024D54; Start 260; Stop 284
caatcttgtcaccactttctcactt

SEQ ID NO: 318942 - DNA, 25 bp, Artificial
  probe
  misc_feature (1)..(25): SEQ ID NO: 2228; WAN024D54; Start 176; Stop 200
gtgtcttggagaataaagtcgtatt

SEQ ID NO: 318943 - DNA, 25 bp, Artificial
  probe
  misc_feature (1)..(25): SEQ ID NO: 2228; WAN024D54; Start 98; Stop 122
tgacagttctttccttcattatcgg

SEQ ID NO: 318944 - DNA, 25 bp, Artificial
  probe
  misc_feature (1)..(25): SEQ ID NO: 2228; WAN024D54; Start 174; Stop 198
tggtgtcttggagaataaagtcgta

SEQ ID NO: 318945 - DNA, 25 bp, Artificial
  probe
  misc_feature (1)..(25): SEQ ID NO: 2228; WAN024D54; Start 570; Stop 594
cgcttatggatttaaccgctacaat

SEQ ID NO: 318946 - DNA, 25 bp, Artificial
  probe
  misc_feature (1)..(25): SEQ ID NO: 2228; WAN024D54; Start 239; Stop 263
ttccctttatcatcctcttggcaat

SEQ ID NO: 318947 - DNA, 25 bp, Artificial
  probe
  misc_feature (1)..(25): SEQ ID NO: 2228; WAN024D54; Start 264; Stop 288
cttgtcaccactttctcacttgatt

SEQ ID NO: 318948 - DNA, 25 bp, Artificial
  probe
  misc_feature (1)..(25): SEQ ID NO: 2228; WAN024D54; Start 454; Stop 478
ctatcagaaggtcttccagatttga

SEQ ID NO: 318949 - DNA, 25 bp, Artificial
  probe
  misc_feature (1)..(25): SEQ ID NO: 2228; WAN024D54; Start 265; Stop 289
ttgtcaccactttctcacttgattg

SEQ ID NO: 318950 - DNA, 25 bp, Artificial
  probe
  misc_feature (1)..(25): SEQ ID NO: 2228; WAN024D54; Start 108; Stop 132
ttccttcattatcggaggcttcttg

SEQ ID NO: 318951 - DNA, 25 bp, Artificial
  probe
  misc_feature (1)..(25): SEQ ID NO: 2228; WAN024D54; Start 241; Stop 265
ccctttatcatcctcttggcaatct

SEQ ID NO: 318952 - DNA, 25 bp, Artificial
  probe
  misc_feature (1)..(25): SEQ ID NO: 2228; WAN024D54; Start 240; Stop 264
tccctttatcatcctcttggcaatc

SEQ ID NO: 318953 - DNA, 25 bp, Artificial
  probe
  misc_feature (1)..(25): SEQ ID NO: 2228; WAN024D54; Start 567; Stop 591
catcgcttatggatttaaccgctac

SEQ ID NO: 318954 - DNA, 25 bp, Artificial
  probe
  misc_feature (1)..(25): SEQ ID NO: 2228; WAN024D54; Start 171; Stop 195
aggtggtgtcttggagaataaagtc

SEQ ID NO: 318955 - DNA, 25 bp, Artificial
  probe
  misc_feature (1)..(25): SEQ ID NO: 2228; WAN024D54; Start 263; Stop 287
tcttgtcaccactttctcacttgat

SEQ ID NO: 318956 - DNA, 25 bp, Artificial
  probe
  misc_feature (1)..(25): SEQ ID NO: 2228; WAN024D54; Start 262; Stop 286
atcttgtcaccactttctcacttga

SEQ ID NO: 318957 - DNA, 25 bp, Artificial
  probe
  misc_feature (1)..(25): SEQ ID NO: 2228; WAN024D54; Start 100; Stop 124
acagttctttccttcattatcggag

SEQ ID NO: 318958 - DNA, 25 bp, Artificial
  probe
  misc_feature (1)..(25): SEQ ID NO: 2228; WAN024D54; Start 99; Stop 123
gacagttctttccttcattatcgga

SEQ ID NO: 318959 - DNA, 25 bp, Artificial
  probe
  misc_feature (1)..(25): SEQ ID NO: 2228; WAN024D54; Start 568; Stop 592
atcgcttatggatttaaccgctaca

SEQ ID NO: 318960 - DNA, 25 bp, Artificial
  probe
  misc_feature (1)..(25): SEQ ID NO: 2228; WAN024D54; Start 571; Stop 595
gcttatggatttaaccgctacaatc

SEQ ID NO: 318961 - DNA, 25 bp, Artificial
  probe
  misc_feature (1)..(25): SEQ ID NO: 2228; WAN024D54; Start 573; Stop 597
ttatggatttaaccgctacaatcac

SEQ ID NO: 318962 - DNA, 25 bp, Artificial
  probe
  misc_feature (1)..(25): SEQ ID NO: 2228; WAN024D54; Start 170; Stop 194
caggtggtgtcttggagaataaagt

SEQ ID NO: 318963 - DNA, 25 bp, Artificial
  probe
  misc_feature (1)..(25): SEQ ID NO: 2228; WAN024D54; Start 569; Stop 593
tcgcttatggatttaaccgctacaa

SEQ ID NO: 318964 - DNA, 25 bp, Artificial
  probe
  misc_feature (1)..(25): SEQ ID NO: 2228; WAN024D54; Start 453; Stop 477
cctatcagaaggtcttccagatttg

SEQ ID NO: 318965 - DNA, 25 bp, Artificial
  probe
  misc_feature (1)..(25): SEQ ID NO: 2228; WAN024D54; Start 101; Stop 125
cagttctttccttcattatcggagg

SEQ ID NO: 318966 - DNA, 25 bp, Artificial
  probe
  misc_feature (1)..(25): SEQ ID NO: 2229; WAN024GIF; Start 35; Stop 59
ttaccaagcaagaactgataagcat

SEQ ID NO: 318967 - DNA, 25 bp, Artificial
  probe
  misc_feature (1)..(25): SEQ ID NO: 2229; WAN024GIF; Start 36; Stop 60
taccaagcaagaactgataagcatc

SEQ ID NO: 318968 - DNA, 25 bp, Artificial
  probe
  misc_feature (1)..(25): SEQ ID NO: 2229; WAN024GIF; Start 40; Stop 64
aagcaagaactgataagcatccaag

SEQ ID NO: 318969 - DNA, 25 bp, Artificial
  probe
  misc_feature (1)..(25): SEQ ID NO: 2229; WAN024GIF; Start 39; Stop 63
caagcaagaactgataagcatccaa

SEQ ID NO: 318970 - DNA, 25 bp, Artificial
  probe
  misc_feature (1)..(25): SEQ ID NO: 2229; WAN024GIF; Start 32; Stop 56
aacttaccaagcaagaactgataag

SEQ ID NO: 318971 - DNA, 25 bp, Artificial
  probe
  misc_feature (1)..(25): SEQ ID NO: 2229; WAN024GIF; Start 34; Stop 58
cttaccaagcaagaactgataagca

SEQ ID NO: 318972 - DNA, 25 bp, Artificial
  probe
  misc_feature (1)..(25): SEQ ID NO: 2229; WAN024GIF; Start 33; Stop 57
acttaccaagcaagaactgataagc

SEQ ID NO: 318973 - DNA, 25 bp, Artificial
  probe
  misc_feature (1)..(25): SEQ ID NO: 2229; WAN024GIF; Start 27; Stop 51
tttcaaacttaccaagcaagaactg

SEQ ID NO: 318974 - DNA, 25 bp, Artificial
  probe
  misc_feature (1)..(25): SEQ ID NO: 2229; WAN024GIF; Start 30; Stop 54
caaacttaccaagcaagaactgata

SEQ ID NO: 318975 - DNA, 25 bp, Artificial
  probe
  misc_feature (1)..(25): SEQ ID NO: 2229; WAN024GIF; Start 31; Stop 55
aaacttaccaagcaagaactgataa

SEQ ID NO: 318976 - DNA, 25 bp, Artificial
  probe
  misc_feature (1)..(25): SEQ ID NO: 2229; WAN024GIF; Start 29; Stop 53
tcaaacttaccaagcaagaactgat

SEQ ID NO: 318977 - DNA, 25 bp, Artificial
  probe
  misc_feature (1)..(25): SEQ ID NO: 2229; WAN024GIF; Start 28; Stop 52
ttcaaacttaccaagcaagaactga

SEQ ID NO: 318978 - DNA, 25 bp, Artificial
  probe
  misc_feature (1)..(25): SEQ ID NO: 2229; WAN024GIF; Start 38; Stop 62
ccaagcaagaactgataagcatcca

SEQ ID NO: 318979 - DNA, 25 bp, Artificial
  probe
  misc_feature (1)..(25): SEQ ID NO: 2229; WAN024GIF; Start 37; Stop 61
accaagcaagaactgataagcatcc

SEQ ID NO: 318980 - DNA, 25 bp, Artificial
  probe
  misc_feature (1)..(25): SEQ ID NO: 2229; WAN024GIF; Start 44; Stop 68
aagaactgataagcatccaagcgac

SEQ ID NO: 318981 - DNA, 25 bp, Artificial
  probe
  misc_feature (1)..(25): SEQ ID NO: 2229; WAN024GIF; Start 43; Stop 67
caagaactgataagcatccaagcga

SEQ ID NO: 318982 - DNA, 25 bp, Artificial
  probe
  misc_feature (1)..(25): SEQ ID NO: 2229; WAN024GIF; Start 41; Stop 65
agcaagaactgataagcatccaagc

SEQ ID NO: 318983 - DNA, 25 bp, Artificial
  probe
  misc_feature (1)..(25): SEQ ID NO: 2229; WAN024GIF; Start 46; Stop 70
gaactgataagcatccaagcgactc

SEQ ID NO: 318984 - DNA, 25 bp, Artificial
  probe
  misc_feature (1)..(25): SEQ ID NO: 2229; WAN024GIF; Start 188; Stop 212
tccttcataaattcttgttcgtaac

SEQ ID NO: 318985 - DNA, 25 bp, Artificial
  probe
  misc_feature (1)..(25): SEQ ID NO: 2229; WAN024GIF; Start 189; Stop 213
ccttcataaattcttgttcgtaact

SEQ ID NO: 318986 - DNA, 25 bp, Artificial
  probe
  misc_feature (1)..(25): SEQ ID NO: 2229; WAN024GIF; Start 47; Stop 71
aactgataagcatccaagcgactct

SEQ ID NO: 318987 - DNA, 25 bp, Artificial
  probe
  misc_feature (1)..(25): SEQ ID NO: 2229; WAN024GIF; Start 45; Stop 69
agaactgataagcatccaagcgact

SEQ ID NO: 318988 - DNA, 25 bp, Artificial
  probe
  misc_feature (1)..(25): SEQ ID NO: 2229; WAN024GIF; Start 102; Stop 126
cgtcctggtcttcttcgtaaacttt

SEQ ID NO: 318989 - DNA, 25 bp, Artificial
  probe
  misc_feature (1)..(25): SEQ ID NO: 2229; WAN024GIF; Start 187; Stop 211
ttccttcataaattcttgttcgtaa

SEQ ID NO: 318990 - DNA, 25 bp, Artificial
  probe
  misc_feature (1)..(25): SEQ ID NO: 2229; WAN024GIF; Start 185; Stop 209
aattccttcataaattcttgttcgt

SEQ ID NO: 318991 - DNA, 25 bp, Artificial
  probe
  misc_feature (1)..(25): SEQ ID NO: 2229; WAN024GIF; Start 191; Stop 215
ttcataaattcttgttcgtaactca

SEQ ID NO: 318992 - DNA, 25 bp, Artificial
  probe
  misc_feature (1)..(25): SEQ ID NO: 2229; WAN024GIF; Start 186; Stop 210
attccttcataaattcttgttcgta

SEQ ID NO: 318993 - DNA, 25 bp, Artificial
  probe
  misc_feature (1)..(25): SEQ ID NO: 2229; WAN024GIF; Start 26; Stop 50
ttttcaaacttaccaagcaagaact

SEQ ID NO: 318994 - DNA, 25 bp, Artificial
  probe
  misc_feature (1)..(25): SEQ ID NO: 2229; WAN024GIF; Start 192; Stop 216
tcataaattcttgttcgtaactcat

SEQ ID NO: 318995 - DNA, 25 bp, Artificial
  probe
  misc_feature (1)..(25): SEQ ID NO: 2229; WAN024GIF; Start 48; Stop 72
actgataagcatccaagcgactctc

SEQ ID NO: 318996 - DNA, 25 bp, Artificial
  probe
  misc_feature (1)..(25): SEQ ID NO: 2229; WAN024GIF; Start 103; Stop 127
gtcctggtcttcttcgtaaactttt

SEQ ID NO: 318997 - DNA, 25 bp, Artificial
  probe
  misc_feature (1)..(25): SEQ ID NO: 2229; WAN024GIF; Start 101; Stop 125
tcgtcctggtcttcttcgtaaactt

SEQ ID NO: 318998 - DNA, 25 bp, Artificial
  probe
  misc_feature (1)..(25): SEQ ID NO: 2229; WAN024GIF; Start 190; Stop 214
cttcataaattcttgttcgtaactc

SEQ ID NO: 318999 - DNA, 25 bp, Artificial
  probe
  misc_feature (1)..(25): SEQ ID NO: 2230; WAN024DCD; Start 77; Stop 101
ctaagtatgtcaaggctatcagagg

SEQ ID NO: 319000 - DNA, 25 bp, Artificial
  probe
  misc_feature (1)..(25): SEQ ID NO: 2230; WAN024DCD; Start 78; Stop 102
taagtatgtcaaggctatcagagga

SEQ ID NO: 319001 - DNA, 25 bp, Artificial
  probe
  misc_feature (1)..(25): SEQ ID NO: 2230; WAN024DCD; Start 79; Stop 103
aagtatgtcaaggctatcagaggaa

SEQ ID NO: 319002 - DNA, 25 bp, Artificial
  probe
  misc_feature (1)..(25): SEQ ID NO: 2230; WAN024DCD; Start 475; Stop 499
atcagaatcatcaaggaacactatg

SEQ ID NO: 319003 - DNA, 25 bp, Artificial
  probe
  misc_feature (1)..(25): SEQ ID NO: 2230; WAN024DCD; Start 341; Stop 365
ttattcagagcatccttgacaatcc

SEQ ID NO: 319004 - DNA, 25 bp, Artificial
  probe
  misc_feature (1)..(25): SEQ ID NO: 2230; WAN024DCD; Start 340; Stop 364
attattcagagcatccttgacaatc

SEQ ID NO: 319005 - DNA, 25 bp, Artificial
  probe
  misc_feature (1)..(25): SEQ ID NO: 2230; WAN024DCD; Start 338; Stop 362
ctattattcagagcatccttgacaa

SEQ ID NO: 319006 - DNA, 25 bp, Artificial
  probe
  misc_feature (1)..(25): SEQ ID NO: 2230; WAN024DCD; Start 474; Stop 498
aatcagaatcatcaaggaacactat

SEQ ID NO: 319007 - DNA, 25 bp, Artificial
  probe
  misc_feature (1)..(25): SEQ ID NO: 2230; WAN024DCD; Start 901; Stop 925
gttgccatctaccatgtattcctaa

SEQ ID NO: 319008 - DNA, 25 bp, Artificial
  probe
  misc_feature (1)..(25): SEQ ID NO: 2230; WAN024DCD; Start 76; Stop 100
cctaagtatgtcaaggctatcagag

SEQ ID NO: 319009 - DNA, 25 bp, Artificial
  probe
  misc_feature (1)..(25): SEQ ID NO: 2230; WAN024DCD; Start 396; Stop 420
tcacaagagaatgaaggataaggtg

SEQ ID NO: 319010 - DNA, 25 bp, Artificial
  probe
  misc_feature (1)..(25): SEQ ID NO: 2230; WAN024DCD; Start 342; Stop 366
tattcagagcatccttgacaatcca

SEQ ID NO: 319011 - DNA, 25 bp, Artificial
  probe
  misc_feature (1)..(25): SEQ ID NO: 2230; WAN024DCD; Start 339; Stop 363
tattattcagagcatccttgacaat

SEQ ID NO: 319012 - DNA, 25 bp, Artificial
  probe
  misc_feature (1)..(25): SEQ ID NO: 2230; WAN024DCD; Start 227; Stop 251
aattaacacaacttcaagtcagcga

SEQ ID NO: 319013 - DNA, 25 bp, Artificial
  probe
  misc_feature (1)..(25): SEQ ID NO: 2230; WAN024DCD; Start 385; Stop 409
gaacagttgattcacaagagaatga

SEQ ID NO: 319014 - DNA, 25 bp, Artificial
  probe
  misc_feature (1)..(25): SEQ ID NO: 2230; WAN024DCD; Start 397; Stop 421
cacaagagaatgaaggataaggtgc

SEQ ID NO: 319015 - DNA, 25 bp, Artificial
  probe
  misc_feature (1)..(25): SEQ ID NO: 2230; WAN024DCD; Start 228; Stop 252
attaacacaacttcaagtcagcgag

SEQ ID NO: 319016 - DNA, 25 bp, Artificial
  probe
  misc_feature (1)..(25): SEQ ID NO: 2230; WAN024DCD; Start 809; Stop 833
agaagcatcctgaactacgaaataa

SEQ ID NO: 319017 - DNA, 25 bp, Artificial
  probe
  misc_feature (1)..(25): SEQ ID NO: 2230; WAN024DCD; Start 808; Stop 832
gagaagcatcctgaactacgaaata

SEQ ID NO: 319018 - DNA, 25 bp, Artificial
  probe
  misc_feature (1)..(25): SEQ ID NO: 2230; WAN024DCD; Start 810; Stop 834
gaagcatcctgaactacgaaataaa

SEQ ID NO: 319019 - DNA, 25 bp, Artificial
  probe
  misc_feature (1)..(25): SEQ ID NO: 2230; WAN024DCD; Start 400; Stop 424
aagagaatgaaggataaggtgcaag

SEQ ID NO: 319020 - DNA, 25 bp, Artificial
  probe
  misc_feature (1)..(25): SEQ ID NO: 2230; WAN024DCD; Start 82; Stop 106
tatgtcaaggctatcagaggaaaga

SEQ ID NO: 319021 - DNA, 25 bp, Artificial
  probe
  misc_feature (1)..(25): SEQ ID NO: 2230; WAN024DCD; Start 81; Stop 105
gtatgtcaaggctatcagaggaaag

SEQ ID NO: 319022 - DNA, 25 bp, Artificial
  probe
  misc_feature (1)..(25): SEQ ID NO: 2230; WAN024DCD; Start 399; Stop 423
caagagaatgaaggataaggtgcaa

SEQ ID NO: 319023 - DNA, 25 bp, Artificial
  probe
  misc_feature (1)..(25): SEQ ID NO: 2230; WAN024DCD; Start 80; Stop 104
agtatgtcaaggctatcagaggaaa

SEQ ID NO: 319024 - DNA, 25 bp, Artificial
  probe
  misc_feature (1)..(25): SEQ ID NO: 2230; WAN024DCD; Start 833; Stop 857
aatatctcaaactcaagaaacgacg

SEQ ID NO: 319025 - DNA, 25 bp, Artificial
  probe
  misc_feature (1)..(25): SEQ ID NO: 2230; WAN024DCD; Start 811; Stop 835
aagcatcctgaactacgaaataaat

SEQ ID NO: 319026 - DNA, 25 bp, Artificial
  probe
  misc_feature (1)..(25): SEQ ID NO: 2230; WAN024DCD; Start 404; Stop 428
gaatgaaggataaggtgcaagactt

SEQ ID NO: 319027 - DNA, 25 bp, Artificial
  probe
  misc_feature (1)..(25): SEQ ID NO: 2230; WAN024DCD; Start 789; Stop 813
taatgccgtggttaaatcagagaag

SEQ ID NO: 319028 - DNA, 25 bp, Artificial
  probe
  misc_feature (1)..(25): SEQ ID NO: 2230; WAN024DCD; Start 788; Stop 812
ctaatgccgtggttaaatcagagaa

SEQ ID NO: 319029 - DNA, 25 bp, Artificial
  probe
  misc_feature (1)..(25): SEQ ID NO: 2230; WAN024DCD; Start 692; Stop 716
gattagttcctgccaacaatgaaag

SEQ ID NO: 319030 - DNA, 25 bp, Artificial
  probe
  misc_feature (1)..(25): SEQ ID NO: 2230; WAN024DCD; Start 507; Stop 531
tgccgtctgtaaagaagatttagaa

SEQ ID NO: 319031 - DNA, 25 bp, Artificial
  probe
  misc_feature (1)..(25): SEQ ID NO: 2230; WAN024DCD; Start 506; Stop 530
ttgccgtctgtaaagaagatttaga

SEQ ID NO: 319032 - DNA, 25 bp, Artificial
  probe
  misc_feature (1)..(25): SEQ ID NO: 2231; WAN024GGT; Start 84; Stop 108
gattgccatcatcctctctactatc

SEQ ID NO: 319033 - DNA, 25 bp, Artificial
  probe
  misc_feature (1)..(25): SEQ ID NO: 2231; WAN024GGT; Start 86; Stop 110
ttgccatcatcctctctactatcat

SEQ ID NO: 319034 - DNA, 25 bp, Artificial
  probe
  misc_feature (1)..(25): SEQ ID NO: 2231; WAN024GGT; Start 85; Stop 109
attgccatcatcctctctactatca

SEQ ID NO: 319035 - DNA, 25 bp, Artificial
  probe
  misc_feature (1)..(25): SEQ ID NO: 2231; WAN024GGT; Start 446; Stop 470
ttgttaccgtgattaaggataccag

SEQ ID NO: 319036 - DNA, 25 bp, Artificial
  probe
  misc_feature (1)..(25): SEQ ID NO: 2231; WAN024GGT; Start 91; Stop 115
atcatcctctctactatcatcggta

SEQ ID NO: 319037 - DNA, 25 bp, Artificial
  probe
  misc_feature (1)..(25): SEQ ID NO: 2231; WAN024GGT; Start 90; Stop 114
catcatcctctctactatcatcggt

SEQ ID NO: 319038 - DNA, 25 bp, Artificial
  probe
  misc_feature (1)..(25): SEQ ID NO: 2231; WAN024GGT; Start 449; Stop 473
ttaccgtgattaaggataccagtct

SEQ ID NO: 319039 - DNA, 25 bp, Artificial
  probe
  misc_feature (1)..(25): SEQ ID NO: 2231; WAN024GGT; Start 448; Stop 472
gttaccgtgattaaggataccagtc

SEQ ID NO: 319040 - DNA, 25 bp, Artificial
  probe
  misc_feature (1)..(25): SEQ ID NO: 2231; WAN024GGT; Start 87; Stop 111
tgccatcatcctctctactatcatc

SEQ ID NO: 319041 - DNA, 25 bp, Artificial
  probe
  misc_feature (1)..(25): SEQ ID NO: 2231; WAN024GGT; Start 450; Stop 474
taccgtgattaaggataccagtctc

SEQ ID NO: 319042 - DNA, 25 bp, Artificial
  probe
  misc_feature (1)..(25): SEQ ID NO: 2231; WAN024GGT; Start 447; Stop 471
tgttaccgtgattaaggataccagt

SEQ ID NO: 319043 - DNA, 25 bp, Artificial
  probe
  misc_feature (1)..(25): SEQ ID NO: 2231; WAN024GGT; Start 89; Stop 113
ccatcatcctctctactatcatcgg

SEQ ID NO: 319044 - DNA, 25 bp, Artificial
  probe
  misc_feature (1)..(25): SEQ ID NO: 2231; WAN024GGT; Start 92; Stop 116
tcatcctctctactatcatcggtac

SEQ ID NO: 319045 - DNA, 25 bp, Artificial
  probe
  misc_feature (1)..(25): SEQ ID NO: 2231; WAN024GGT; Start 88; Stop 112
gccatcatcctctctactatcatcg

SEQ ID NO: 319046 - DNA, 25 bp, Artificial
  probe
  misc_feature (1)..(25): SEQ ID NO: 2231; WAN024GGT; Start 465; Stop 489
taccagtctcctctactctgttatc

SEQ ID NO: 319047 - DNA, 25 bp, Artificial
  probe
  misc_feature (1)..(25): SEQ ID NO: 2231; WAN024GGT; Start 463; Stop 487
gataccagtctcctctactctgtta

SEQ ID NO: 319048 - DNA, 25 bp, Artificial
  probe
  misc_feature (1)..(25): SEQ ID NO: 2231; WAN024GGT; Start 464; Stop 488
ataccagtctcctctactctgttat

SEQ ID NO: 319049 - DNA, 25 bp, Artificial
  probe
  misc_feature (1)..(25): SEQ ID NO: 2231; WAN024GGT; Start 385; Stop 409
ctctactacatcattctcccacaag

SEQ ID NO: 319050 - DNA, 25 bp, Artificial
  probe
  misc_feature (1)..(25): SEQ ID NO: 2231; WAN024GGT; Start 381; Stop 405
aatcctctactacatcattctccca

SEQ ID NO: 319051 - DNA, 25 bp, Artificial
  probe
  misc_feature (1)..(25): SEQ ID NO: 2231; WAN024GGT; Start 265; Stop 289
acagcctttactctctttacatcag

SEQ ID NO: 319052 - DNA, 25 bp, Artificial
  probe
  misc_feature (1)..(25): SEQ ID NO: 2231; WAN024GGT; Start 68; Stop 92
ccctctatatttctctgattgccat

SEQ ID NO: 319053 - DNA, 25 bp, Artificial
  probe
  misc_feature (1)..(25): SEQ ID NO: 2231; WAN024GGT; Start 65; Stop 89
tgaccctctatatttctctgattgc

SEQ ID NO: 319054 - DNA, 25 bp, Artificial
  probe
  misc_feature (1)..(25): SEQ ID NO: 2231; WAN024GGT; Start 377; Stop 401
cccaaatcctctactacatcattct

SEQ ID NO: 319055 - DNA, 25 bp, Artificial
  probe
  misc_feature (1)..(25): SEQ ID NO: 2231; WAN024GGT; Start 62; Stop 86
gcttgaccctctatatttctctgat

SEQ ID NO: 319056 - DNA, 25 bp, Artificial
  probe
  misc_feature (1)..(25): SEQ ID NO: 2231; WAN024GGT; Start 58; Stop 82
tttggcttgaccctctatatttctc

SEQ ID NO: 319057 - DNA, 25 bp, Artificial
  probe
  misc_feature (1)..(25): SEQ ID NO: 2231; WAN024GGT; Start 57; Stop 81
atttggcttgaccctctatatttct

SEQ ID NO: 319058 - DNA, 25 bp, Artificial
  probe
  misc_feature (1)..(25): SEQ ID NO: 2231; WAN024GGT; Start 445; Stop 469
tttgttaccgtgattaaggatacca

SEQ ID NO: 319059 - DNA, 25 bp, Artificial
  probe
  misc_feature (1)..(25): SEQ ID NO: 2231; WAN024GGT; Start 66; Stop 90
gaccctctatatttctctgattgcc

SEQ ID NO: 319060 - DNA, 25 bp, Artificial
  probe
  misc_feature (1)..(25): SEQ ID NO: 2231; WAN024GGT; Start 56; Stop 80
gatttggcttgaccctctatatttc

SEQ ID NO: 319061 - DNA, 25 bp, Artificial
  probe
  misc_feature (1)..(25): SEQ ID NO: 2231; WAN024GGT; Start 444; Stop 468
gtttgttaccgtgattaaggatacc

SEQ ID NO: 319062 - DNA, 25 bp, Artificial
  probe
  misc_feature (1)..(25): SEQ ID NO: 2231; WAN024GGT; Start 432; Stop 456
catcatttctcagtttgttaccgtg

SEQ ID NO: 319063 - DNA, 25 bp, Artificial
  probe
  misc_feature (1)..(25): SEQ ID NO: 2231; WAN024GGT; Start 428; Stop 452
cagccatcatttctcagtttgttac

SEQ ID NO: 319064 - DNA, 25 bp, Artificial
  probe
  misc_feature (1)..(25): SEQ ID NO: 2231; WAN024GGT; Start 380; Stop 404
aaatcctctactacatcattctccc

SEQ ID NO: 319065 - DNA, 25 bp, Artificial
  probe
  misc_feature (1)..(25): SEQ ID NO: 2232; WAN024FKT; Start 1278; Stop 1302
ggctactactgctacaatcttcatc

SEQ ID NO: 319066 - DNA, 25 bp, Artificial
  probe
  misc_feature (1)..(25): SEQ ID NO: 2232; WAN024FKT; Start 1277; Stop 1301
aggctactactgctacaatcttcat

SEQ ID NO: 319067 - DNA, 25 bp, Artificial
  probe
  misc_feature (1)..(25): SEQ ID NO: 2232; WAN024FKT; Start 1279; Stop 1303
gctactactgctacaatcttcatcg

SEQ ID NO: 319068 - DNA, 25 bp, Artificial
  probe
  misc_feature (1)..(25): SEQ ID NO: 2232; WAN024FKT; Start 810; Stop 834
aatggtagatgtgtctcaacttcaa

SEQ ID NO: 319069 - DNA, 25 bp, Artificial
  probe
  misc_feature (1)..(25): SEQ ID NO: 2232; WAN024FKT; Start 1081; Stop 1105
aagaacacttacgaacttgaactca

SEQ ID NO: 319070 - DNA, 25 bp, Artificial
  probe
  misc_feature (1)..(25): SEQ ID NO: 2232; WAN024FKT; Start 33; Stop 57
ttatcaagattggacgcaagaagaa

SEQ ID NO: 319071 - DNA, 25 bp, Artificial
  probe
  misc_feature (1)..(25): SEQ ID NO: 2232; WAN024FKT; Start 1116; Stop 1140
taatagccagagcgagattgtctta

SEQ ID NO: 319072 - DNA, 25 bp, Artificial
  probe
  misc_feature (1)..(25): SEQ ID NO: 2232; WAN024FKT; Start 1127; Stop 1151
gcgagattgtcttacttgctgataa

SEQ ID NO: 319073 - DNA, 25 bp, Artificial
  probe
  misc_feature (1)..(25): SEQ ID NO: 2232; WAN024FKT; Start 1421; Stop 1445
actatgaattagattatggtcgcaa

SEQ ID NO: 319074 - DNA, 25 bp, Artificial
  probe
  misc_feature (1)..(25): SEQ ID NO: 2232; WAN024FKT; Start 1086; Stop 1110
cacttacgaacttgaactcaacttg

SEQ ID NO: 319075 - DNA, 25 bp, Artificial
  probe
  misc_feature (1)..(25): SEQ ID NO: 2232; WAN024FKT; Start 1083; Stop 1107
gaacacttacgaacttgaactcaac

SEQ ID NO: 319076 - DNA, 25 bp, Artificial
  probe
  misc_feature (1)..(25): SEQ ID NO: 2232; WAN024FKT; Start 1082; Stop 1106
agaacacttacgaacttgaactcaa

SEQ ID NO: 319077 - DNA, 25 bp, Artificial
  probe
  misc_feature (1)..(25): SEQ ID NO: 2232; WAN024FKT; Start 1089; Stop 1113
ttacgaacttgaactcaacttggaa

SEQ ID NO: 319078 - DNA, 25 bp, Artificial
  probe
  misc_feature (1)..(25): SEQ ID NO: 2232; WAN024FKT; Start 1085; Stop 1109
acacttacgaacttgaactcaactt

SEQ ID NO: 319079 - DNA, 25 bp, Artificial
  probe
  misc_feature (1)..(25): SEQ ID NO: 2232; WAN024FKT; Start 1084; Stop 1108
aacacttacgaacttgaactcaact

SEQ ID NO: 319080 - DNA, 25 bp, Artificial
  probe
  misc_feature (1)..(25): SEQ ID NO: 2232; WAN024FKT; Start 1272; Stop 1296
gaatcaggctactactgctacaatc

SEQ ID NO: 319081 - DNA, 25 bp, Artificial
  probe
  misc_feature (1)..(25): SEQ ID NO: 2232; WAN024FKT; Start 1274; Stop 1298
atcaggctactactgctacaatctt

SEQ ID NO: 319082 - DNA, 25 bp, Artificial
  probe
  misc_feature (1)..(25): SEQ ID NO: 2232; WAN024FKT; Start 1273; Stop 1297
aatcaggctactactgctacaatct

SEQ ID NO: 319083 - DNA, 25 bp, Artificial
  probe
  misc_feature (1)..(25): SEQ ID NO: 2232; WAN024FKT; Start 1271; Stop 1295
agaatcaggctactactgctacaat

SEQ ID NO: 319084 - DNA, 25 bp, Artificial
  probe
  misc_feature (1)..(25): SEQ ID NO: 2232; WAN024FKT; Start 1090; Stop 1114
tacgaacttgaactcaacttggaag

SEQ ID NO: 319085 - DNA, 25 bp, Artificial
  probe
  misc_feature (1)..(25): SEQ ID NO: 2232; WAN024FKT; Start 1088; Stop 1112
cttacgaacttgaactcaacttgga

SEQ ID NO: 319086 - DNA, 25 bp, Artificial
  probe
  misc_feature (1)..(25): SEQ ID NO: 2232; WAN024FKT; Start 582; Stop 606
ctacaaggctgtcaataacgactac

SEQ ID NO: 319087 - DNA, 25 bp, Artificial
  probe
  misc_feature (1)..(25): SEQ ID NO: 2232; WAN024FKT; Start 1087; Stop 1111
acttacgaacttgaactcaacttgg

SEQ ID NO: 319088 - DNA, 25 bp, Artificial
  probe
  misc_feature (1)..(25): SEQ ID NO: 2232; WAN024FKT; Start 581; Stop 605
tctacaaggctgtcaataacgacta

SEQ ID NO: 319089 - DNA, 25 bp, Artificial
  probe
  misc_feature (1)..(25): SEQ ID NO: 2232; WAN024FKT; Start 1115; Stop 1139
ctaatagccagagcgagattgtctt

SEQ ID NO: 319090 - DNA, 25 bp, Artificial
  probe
  misc_feature (1)..(25): SEQ ID NO: 2232; WAN024FKT; Start 1280; Stop 1304
ctactactgctacaatcttcatcga

SEQ ID NO: 319091 - DNA, 25 bp, Artificial
  probe
  misc_feature (1)..(25): SEQ ID NO: 2232; WAN024FKT; Start 1275; Stop 1299
tcaggctactactgctacaatcttc

SEQ ID NO: 319092 - DNA, 25 bp, Artificial
  probe
  misc_feature (1)..(25): SEQ ID NO: 2232; WAN024FKT; Start 1270; Stop 1294
gagaatcaggctactactgctacaa

SEQ ID NO: 319093 - DNA, 25 bp, Artificial
  probe
  misc_feature (1)..(25): SEQ ID NO: 2232; WAN024FKT; Start 1420; Stop 1444
tactatgaattagattatggtcgca

SEQ ID NO: 319094 - DNA, 25 bp, Artificial
  probe
  misc_feature (1)..(25): SEQ ID NO: 2232; WAN024FKT; Start 1117; Stop 1141
aatagccagagcgagattgtcttac

SEQ ID NO: 319095 - DNA, 25 bp, Artificial
  probe
  misc_feature (1)..(25): SEQ ID NO: 2232; WAN024FKT; Start 583; Stop 607
tacaaggctgtcaataacgactaca

SEQ ID NO: 319096 - DNA, 25 bp, Artificial
  probe
  misc_feature (1)..(25): SEQ ID NO: 2232; WAN024FKT; Start 1276; Stop 1300
caggctactactgctacaatcttca

SEQ ID NO: 319097 - DNA, 25 bp, Artificial
  probe
  misc_feature (1)..(25): SEQ ID NO: 2232; WAN024FKT; Start 1095; Stop 1119
acttgaactcaacttggaagctaat

SEQ ID NO: 319098 - DNA, 25 bp, Artificial
  probe
  misc_feature (1)..(25): SEQ ID NO: 2233; WAN024D4Q; Start 25; Stop 49
tatccaattatcgctggtctcatag

SEQ ID NO: 319099 - DNA, 25 bp, Artificial
  probe
  misc_feature (1)..(25): SEQ ID NO: 2233; WAN024D4Q; Start 24; Stop 48
atatccaattatcgctggtctcata

SEQ ID NO: 319100 - DNA, 25 bp, Artificial
  probe
  misc_feature (1)..(25): SEQ ID NO: 2233; WAN024D4Q; Start 53; Stop 77
tatttctggcttgtttgattgtctc

SEQ ID NO: 319101 - DNA, 25 bp, Artificial
  probe
  misc_feature (1)..(25): SEQ ID NO: 2233; WAN024D4Q; Start 52; Stop 76
gtatttctggcttgtttgattgtct

SEQ ID NO: 319102 - DNA, 25 bp, Artificial
  probe
  misc_feature (1)..(25): SEQ ID NO: 2233; WAN024D4Q; Start 51; Stop 75
cgtatttctggcttgtttgattgtc

SEQ ID NO: 319103 - DNA, 25 bp, Artificial
  probe
  misc_feature (1)..(25): SEQ ID NO: 2233; WAN024D4Q; Start 66; Stop 90
tttgattgtctcctttggcttcttc

SEQ ID NO: 319104 - DNA, 25 bp, Artificial
  probe
  misc_feature (1)..(25): SEQ ID NO: 2233; WAN024D4Q; Start 26; Stop 50
atccaattatcgctggtctcatagg

SEQ ID NO: 319105 - DNA, 25 bp, Artificial
  probe
  misc_feature (1)..(25): SEQ ID NO: 2233; WAN024D4Q; Start 65; Stop 89
gtttgattgtctcctttggcttctt

SEQ ID NO: 319106 - DNA, 25 bp, Artificial
  probe
  misc_feature (1)..(25): SEQ ID NO: 2233; WAN024D4Q; Start 54; Stop 78
atttctggcttgtttgattgtctcc

SEQ ID NO: 319107 - DNA, 25 bp, Artificial
  probe
  misc_feature (1)..(25): SEQ ID NO: 2233; WAN024D4Q; Start 63; Stop 87
ttgtttgattgtctcctttggcttc

SEQ ID NO: 319108 - DNA, 25 bp, Artificial
  probe
  misc_feature (1)..(25): SEQ ID NO: 2233; WAN024D4Q; Start 62; Stop 86
cttgtttgattgtctcctttggctt

SEQ ID NO: 319109 - DNA, 25 bp, Artificial
  probe
  misc_feature (1)..(25): SEQ ID NO: 2233; WAN024D4Q; Start 23; Stop 47
gatatccaattatcgctggtctcat

SEQ ID NO: 319110 - DNA, 25 bp, Artificial
  probe
  misc_feature (1)..(25): SEQ ID NO: 2233; WAN024D4Q; Start 58; Stop 82
ctggcttgtttgattgtctcctttg

SEQ ID NO: 319111 - DNA, 25 bp, Artificial
  probe
  misc_feature (1)..(25): SEQ ID NO: 2233; WAN024D4Q; Start 45; Stop 69
cataggcgtatttctggcttgtttg

SEQ ID NO: 319112 - DNA, 25 bp, Artificial
  probe
  misc_feature (1)..(25): SEQ ID NO: 2233; WAN024D4Q; Start 64; Stop 88
tgtttgattgtctcctttggcttct

SEQ ID NO: 319113 - DNA, 25 bp, Artificial
  probe
  misc_feature (1)..(25): SEQ ID NO: 2233; WAN024D4Q; Start 57; Stop 81
tctggcttgtttgattgtctccttt

SEQ ID NO: 319114 - DNA, 25 bp, Artificial
  probe
  misc_feature (1)..(25): SEQ ID NO: 2233; WAN024D4Q; Start 56; Stop 80
ttctggcttgtttgattgtctcctt

SEQ ID NO: 319115 - DNA, 25 bp, Artificial
  probe
  misc_feature (1)..(25): SEQ ID NO: 2233; WAN024D4Q; Start 55; Stop 79
tttctggcttgtttgattgtctcct

SEQ ID NO: 319116 - DNA, 25 bp, Artificial
  probe
  misc_feature (1)..(25): SEQ ID NO: 2233; WAN024D4Q; Start 50; Stop 74
gcgtatttctggcttgtttgattgt

SEQ ID NO: 319117 - DNA, 25 bp, Artificial
  probe
  misc_feature (1)..(25): SEQ ID NO: 2233; WAN024D4Q; Start 47; Stop 71
taggcgtatttctggcttgtttgat

SEQ ID NO: 319118 - DNA, 25 bp, Artificial
  probe
  misc_feature (1)..(25): SEQ ID NO: 2233; WAN024D4Q; Start 46; Stop 70
ataggcgtatttctggcttgtttga

SEQ ID NO: 319119 - DNA, 25 bp, Artificial
  probe
  misc_feature (1)..(25): SEQ ID NO: 2233; WAN024D4Q; Start 44; Stop 68
tcataggcgtatttctggcttgttt

SEQ ID NO: 319120 - DNA, 25 bp, Artificial
  probe
  misc_feature (1)..(25): SEQ ID NO: 2233; WAN024D4Q; Start 68; Stop 92
tgattgtctcctttggcttcttcaa

SEQ ID NO: 319121 - DNA, 25 bp, Artificial
  probe
  misc_feature (1)..(25): SEQ ID NO: 2233; WAN024D4Q; Start 67; Stop 91
ttgattgtctcctttggcttcttca

SEQ ID NO: 319122 - DNA, 25 bp, Artificial
  probe
  misc_feature (1)..(25): SEQ ID NO: 2233; WAN024D4Q; Start 43; Stop 67
ctcataggcgtatttctggcttgtt

SEQ ID NO: 319123 - DNA, 25 bp, Artificial
  probe
  misc_feature (1)..(25): SEQ ID NO: 2233; WAN024D4Q; Start 100; Stop 124
tttgtattgattttaggagcactgg

SEQ ID NO: 319124 - DNA, 25 bp, Artificial
  probe
  misc_feature (1)..(25): SEQ ID NO: 2233; WAN024D4Q; Start 49; Stop 73
ggcgtatttctggcttgtttgattg

SEQ ID NO: 319125 - DNA, 25 bp, Artificial
  probe
  misc_feature (1)..(25): SEQ ID NO: 2233; WAN024D4Q; Start 48; Stop 72
aggcgtatttctggcttgtttgatt

SEQ ID NO: 319126 - DNA, 25 bp, Artificial
  probe
  misc_feature (1)..(25): SEQ ID NO: 2233; WAN024D4Q; Start 101; Stop 125
ttgtattgattttaggagcactggg

SEQ ID NO: 319127 - DNA, 25 bp, Artificial
  probe
  misc_feature (1)..(25): SEQ ID NO: 2233; WAN024D4Q; Start 41; Stop 65
gtctcataggcgtatttctggcttg

SEQ ID NO: 319128 - DNA, 25 bp, Artificial
  probe
  misc_feature (1)..(25): SEQ ID NO: 2233; WAN024D4Q; Start 103; Stop 127
gtattgattttaggagcactgggag

SEQ ID NO: 319129 - DNA, 25 bp, Artificial
  probe
  misc_feature (1)..(25): SEQ ID NO: 2233; WAN024D4Q; Start 102; Stop 126
tgtattgattttaggagcactggga

SEQ ID NO: 319130 - DNA, 25 bp, Artificial
  probe
  misc_feature (1)..(25): SEQ ID NO: 2233; WAN024D4Q; Start 69; Stop 93
gattgtctcctttggcttcttcaaa

SEQ ID NO: 319131 - DNA, 25 bp, Artificial
  probe
  misc_feature (1)..(25): SEQ ID NO: 2234; WAN024DDS; Start 247; Stop 271
gaagaattgcgtcagattatcacaa

SEQ ID NO: 319132 - DNA, 25 bp, Artificial
  probe
  misc_feature (1)..(25): SEQ ID NO: 2234; WAN024DDS; Start 248; Stop 272
aagaattgcgtcagattatcacaac

SEQ ID NO: 319133 - DNA, 25 bp, Artificial
  probe
  misc_feature (1)..(25): SEQ ID NO: 2234; WAN024DDS; Start 252; Stop 276
attgcgtcagattatcacaactatc

SEQ ID NO: 319134 - DNA, 25 bp, Artificial
  probe
  misc_feature (1)..(25): SEQ ID NO: 2234; WAN024DDS; Start 250; Stop 274
gaattgcgtcagattatcacaacta

SEQ ID NO: 319135 - DNA, 25 bp, Artificial
  probe
  misc_feature (1)..(25): SEQ ID NO: 2234; WAN024DDS; Start 249; Stop 273
agaattgcgtcagattatcacaact

SEQ ID NO: 319136 - DNA, 25 bp, Artificial
  probe
  misc_feature (1)..(25): SEQ ID NO: 2234; WAN024DDS; Start 251; Stop 275
aattgcgtcagattatcacaactat

SEQ ID NO: 319137 - DNA, 25 bp, Artificial
  probe
  misc_feature (1)..(25): SEQ ID NO: 2234; WAN024DDS; Start 246; Stop 270
cgaagaattgcgtcagattatcaca

SEQ ID NO: 319138 - DNA, 25 bp, Artificial
  probe
  misc_feature (1)..(25): SEQ ID NO: 2234; WAN024DDS; Start 245; Stop 269
gcgaagaattgcgtcagattatcac

SEQ ID NO: 319139 - DNA, 25 bp, Artificial
  probe
  misc_feature (1)..(25): SEQ ID NO: 2234; WAN024DDS; Start 254; Stop 278
tgcgtcagattatcacaactatctt

SEQ ID NO: 319140 - DNA, 25 bp, Artificial
  probe
  misc_feature (1)..(25): SEQ ID NO: 2234; WAN024DDS; Start 253; Stop 277
ttgcgtcagattatcacaactatct

SEQ ID NO: 319141 - DNA, 25 bp, Artificial
  probe
  misc_feature (1)..(25): SEQ ID NO: 2234; WAN024DDS; Start 255; Stop 279
gcgtcagattatcacaactatcttt

SEQ ID NO: 319142 - DNA, 25 bp, Artificial
  probe
  misc_feature (1)..(25): SEQ ID NO: 2234; WAN024DDS; Start 214; Stop 238
caaacaagtggtgagattccagaaa

SEQ ID NO: 319143 - DNA, 25 bp, Artificial
  probe
  misc_feature (1)..(25): SEQ ID NO: 2234; WAN024DDS; Start 213; Stop 237
tcaaacaagtggtgagattccagaa

SEQ ID NO: 319144 - DNA, 25 bp, Artificial
  probe
  misc_feature (1)..(25): SEQ ID NO: 2234; WAN024DDS; Start 29; Stop 53
aacaggaaatgattaagaaaaggct

SEQ ID NO: 319145 - DNA, 25 bp, Artificial
  probe
  misc_feature (1)..(25): SEQ ID NO: 2234; WAN024DDS; Start 28; Stop 52
gaacaggaaatgattaagaaaaggc

SEQ ID NO: 319146 - DNA, 25 bp, Artificial
  probe
  misc_feature (1)..(25): SEQ ID NO: 2234; WAN024DDS; Start 30; Stop 54
acaggaaatgattaagaaaaggctt

SEQ ID NO: 319147 - DNA, 25 bp, Artificial
  probe
  misc_feature (1)..(25): SEQ ID NO: 2234; WAN024DDS; Start 256; Stop 280
cgtcagattatcacaactatctttg

SEQ ID NO: 319148 - DNA, 25 bp, Artificial
  probe
  misc_feature (1)..(25): SEQ ID NO: 2234; WAN024DDS; Start 27; Stop 51
agaacaggaaatgattaagaaaagg

SEQ ID NO: 319149 - DNA, 25 bp, Artificial
  probe
  misc_feature (1)..(25): SEQ ID NO: 2234; WAN024DDS; Start 215; Stop 239
aaacaagtggtgagattccagaaaa

SEQ ID NO: 319150 - DNA, 25 bp, Artificial
  probe
  misc_feature (1)..(25): SEQ ID NO: 2234; WAN024DDS; Start 257; Stop 281
gtcagattatcacaactatctttga

SEQ ID NO: 319151 - DNA, 25 bp, Artificial
  probe
  misc_feature (1)..(25): SEQ ID NO: 2234; WAN024DDS; Start 38; Stop 62
tgattaagaaaaggcttacaatgtc

SEQ ID NO: 319152 - DNA, 25 bp, Artificial
  probe
  misc_feature (1)..(25): SEQ ID NO: 2234; WAN024DDS; Start 33; Stop 57
ggaaatgattaagaaaaggcttaca

SEQ ID NO: 319153 - DNA, 25 bp, Artificial
  probe
  misc_feature (1)..(25): SEQ ID NO: 2234; WAN024DDS; Start 261; Stop 285
gattatcacaactatctttgaacaa

SEQ ID NO: 319154 - DNA, 25 bp, Artificial
  probe
  misc_feature (1)..(25): SEQ ID NO: 2234; WAN024DDS; Start 279; Stop 303
tgaacaaaagatgaataagcatagt

SEQ ID NO: 319155 - DNA, 25 bp, Artificial
  probe
  misc_feature (1)..(25): SEQ ID NO: 2234; WAN024DDS; Start 39; Stop 63
gattaagaaaaggcttacaatgtct

SEQ ID NO: 319156 - DNA, 25 bp, Artificial
  probe
  misc_feature (1)..(25): SEQ ID NO: 2234; WAN024DDS; Start 31; Stop 55
caggaaatgattaagaaaaggctta

SEQ ID NO: 319157 - DNA, 25 bp, Artificial
  probe
  misc_feature (1)..(25): SEQ ID NO: 2234; WAN024DDS; Start 32; Stop 56
aggaaatgattaagaaaaggcttac

SEQ ID NO: 319158 - DNA, 25 bp, Artificial
  probe
  misc_feature (1)..(25): SEQ ID NO: 2234; WAN024DDS; Start 143; Stop 167
tcagaaaacatgctacaacacgtac

SEQ ID NO: 319159 - DNA, 25 bp, Artificial
  probe
  misc_feature (1)..(25): SEQ ID NO: 2234; WAN024DDS; Start 142; Stop 166
gtcagaaaacatgctacaacacgta

SEQ ID NO: 319160 - DNA, 25 bp, Artificial
  probe
  misc_feature (1)..(25): SEQ ID NO: 2234; WAN024DDS; Start 197; Stop 221
aactctacgctgtagctcaaacaag

SEQ ID NO: 319161 - DNA, 25 bp, Artificial
  probe
  misc_feature (1)..(25): SEQ ID NO: 2234; WAN024DDS; Start 196; Stop 220
gaactctacgctgtagctcaaacaa

SEQ ID NO: 319162 - DNA, 25 bp, Artificial
  probe
  misc_feature (1)..(25): SEQ ID NO: 2234; WAN024DDS; Start 37; Stop 61
atgattaagaaaaggcttacaatgt

SEQ ID NO: 319163 - DNA, 25 bp, Artificial
  probe
  misc_feature (1)..(25): SEQ ID NO: 2234; WAN024DDS; Start 260; Stop 284
agattatcacaactatctttgaaca

SEQ ID NO: 319164 - DNA, 25 bp, Artificial
  probe
  misc_feature (1)..(25): SEQ ID NO: 2235; WAN024FZ4; Start 1082; Stop 1106
cacagaatggttacaagtacaacag

SEQ ID NO: 319165 - DNA, 25 bp, Artificial
  probe
  misc_feature (1)..(25): SEQ ID NO: 2235; WAN024FZ4; Start 1083; Stop 1107
acagaatggttacaagtacaacagt

SEQ ID NO: 319166 - DNA, 25 bp, Artificial
  probe
  misc_feature (1)..(25): SEQ ID NO: 2235; WAN024FZ4; Start 1084; Stop 1108
cagaatggttacaagtacaacagta

SEQ ID NO: 319167 - DNA, 25 bp, Artificial
  probe
  misc_feature (1)..(25): SEQ ID NO: 2235; WAN024FZ4; Start 1081; Stop 1105
gcacagaatggttacaagtacaaca

SEQ ID NO: 319168 - DNA, 25 bp, Artificial
  probe
  misc_feature (1)..(25): SEQ ID NO: 2235; WAN024FZ4; Start 443; Stop 467
cactgttagttattagccatgaccg

SEQ ID NO: 319169 - DNA, 25 bp, Artificial
  probe
  misc_feature (1)..(25): SEQ ID NO: 2235; WAN024FZ4; Start 1094; Stop 1118
acaagtacaacagtaatcagaatgt

SEQ ID NO: 319170 - DNA, 25 bp, Artificial
  probe
  misc_feature (1)..(25): SEQ ID NO: 2235; WAN024FZ4; Start 1103; Stop 1127
acagtaatcagaatgttatggagtt

SEQ ID NO: 319171 - DNA, 25 bp, Artificial
  probe
  misc_feature (1)..(25): SEQ ID NO: 2235; WAN024FZ4; Start 442; Stop 466
gcactgttagttattagccatgacc

SEQ ID NO: 319172 - DNA, 25 bp, Artificial
  probe
  misc_feature (1)..(25): SEQ ID NO: 2235; WAN024FZ4; Start 1334; Stop 1358
aggctttggaaatactaatgaagga

SEQ ID NO: 319173 - DNA, 25 bp, Artificial
  probe
  misc_feature (1)..(25): SEQ ID NO: 2235; WAN024FZ4; Start 1089; Stop 1113
tggttacaagtacaacagtaatcag

SEQ ID NO: 319174 - DNA, 25 bp, Artificial
  probe
  misc_feature (1)..(25): SEQ ID NO: 2235; WAN024FZ4; Start 385; Stop 409
catttagaccgtgaaggaattgatt

SEQ ID NO: 319175 - DNA, 25 bp, Artificial
  probe
  misc_feature (1)..(25): SEQ ID NO: 2235; WAN024FZ4; Start 1335; Stop 1359
ggctttggaaatactaatgaaggag

SEQ ID NO: 319176 - DNA, 25 bp, Artificial
  probe
  misc_feature (1)..(25): SEQ ID NO: 2235; WAN024FZ4; Start 1333; Stop 1357
gaggctttggaaatactaatgaagg

SEQ ID NO: 319177 - DNA, 25 bp, Artificial
  probe
  misc_feature (1)..(25): SEQ ID NO: 2235; WAN024FZ4; Start 495; Stop 519
aatatgggaactgaaagatggcaaa

SEQ ID NO: 319178 - DNA, 25 bp, Artificial
  probe
  misc_feature (1)..(25): SEQ ID NO: 2235; WAN024FZ4; Start 494; Stop 518
aaatatgggaactgaaagatggcaa

SEQ ID NO: 319179 - DNA, 25 bp, Artificial
  probe
  misc_feature (1)..(25): SEQ ID NO: 2235; WAN024FZ4; Start 1090; Stop 1114
ggttacaagtacaacagtaatcaga

SEQ ID NO: 319180 - DNA, 25 bp, Artificial
  probe
  misc_feature (1)..(25): SEQ ID NO: 2235; WAN024FZ4; Start 386; Stop 410
atttagaccgtgaaggaattgattt

SEQ ID NO: 319181 - DNA, 25 bp, Artificial
  probe
  misc_feature (1)..(25): SEQ ID NO: 2235; WAN024FZ4; Start 96; Stop 120
tattggtttagtaggagcaaatggt

SEQ ID NO: 319182 - DNA, 25 bp, Artificial
  probe
  misc_feature (1)..(25): SEQ ID NO: 2235; WAN024FZ4; Start 94; Stop 118
cgtattggtttagtaggagcaaatg

SEQ ID NO: 319183 - DNA, 25 bp, Artificial
  probe
  misc_feature (1)..(25): SEQ ID NO: 2235; WAN024FZ4; Start 1316; Stop 1340
ttgacataccaagtttagaggcttt

SEQ ID NO: 319184 - DNA, 25 bp, Artificial
  probe
  misc_feature (1)..(25): SEQ ID NO: 2235; WAN024FZ4; Start 95; Stop 119
gtattggtttagtaggagcaaatgg

SEQ ID NO: 319185 - DNA, 25 bp, Artificial
  probe
  misc_feature (1)..(25): SEQ ID NO: 2235; WAN024FZ4; Start 384; Stop 408
ccatttagaccgtgaaggaattgat

SEQ ID NO: 319186 - DNA, 25 bp, Artificial
  probe
  misc_feature (1)..(25): SEQ ID NO: 2235; WAN024FZ4; Start 1332; Stop 1356
agaggctttggaaatactaatgaag

SEQ ID NO: 319187 - DNA, 25 bp, Artificial
  probe
  misc_feature (1)..(25): SEQ ID NO: 2235; WAN024FZ4; Start 1079; Stop 1103
ttgcacagaatggttacaagtacaa

SEQ ID NO: 319188 - DNA, 25 bp, Artificial
  probe
  misc_feature (1)..(25): SEQ ID NO: 2235; WAN024FZ4; Start 1300; Stop 1324
gaacccagtaacttccttgacatac

SEQ ID NO: 319189 - DNA, 25 bp, Artificial
  probe
  misc_feature (1)..(25): SEQ ID NO: 2235; WAN024FZ4; Start 93; Stop 117
ccgtattggtttagtaggagcaaat

SEQ ID NO: 319190 - DNA, 25 bp, Artificial
  probe
  misc_feature (1)..(25): SEQ ID NO: 2235; WAN024FZ4; Start 1088; Stop 1112
atggttacaagtacaacagtaatca

SEQ ID NO: 319191 - DNA, 25 bp, Artificial
  probe
  misc_feature (1)..(25): SEQ ID NO: 2235; WAN024FZ4; Start 1317; Stop 1341
tgacataccaagtttagaggctttg

SEQ ID NO: 319192 - DNA, 25 bp, Artificial
  probe
  misc_feature (1)..(25): SEQ ID NO: 2235; WAN024FZ4; Start 441; Stop 465
tgcactgttagttattagccatgac

SEQ ID NO: 319193 - DNA, 25 bp, Artificial
  probe
  misc_feature (1)..(25): SEQ ID NO: 2235; WAN024FZ4; Start 1325; Stop 1349
caagtttagaggctttggaaatact

SEQ ID NO: 319194 - DNA, 25 bp, Artificial
  probe
  misc_feature (1)..(25): SEQ ID NO: 2235; WAN024FZ4; Start 1299; Stop 1323
tgaacccagtaacttccttgacata

SEQ ID NO: 319195 - DNA, 25 bp, Artificial
  probe
  misc_feature (1)..(25): SEQ ID NO: 2235; WAN024FZ4; Start 1336; Stop 1360
gctttggaaatactaatgaaggagt

SEQ ID NO: 319196 - DNA, 25 bp, Artificial
  probe
  misc_feature (1)..(25): SEQ ID NO: 2235; WAN024FZ4; Start 1085; Stop 1109
agaatggttacaagtacaacagtaa

SEQ ID NO: 319197 - DNA, 25 bp, Artificial
  probe
  misc_feature (1)..(25): SEQ ID NO: 2236; WAN024FCI; Start 409; Stop 433
ggttggattggttgtaacattgatt

SEQ ID NO: 319198 - DNA, 25 bp, Artificial
  probe
  misc_feature (1)..(25): SEQ ID NO: 2236; WAN024FCI; Start 408; Stop 432
aggttggattggttgtaacattgat

SEQ ID NO: 319199 - DNA, 25 bp, Artificial
  probe
  misc_feature (1)..(25): SEQ ID NO: 2236; WAN024FCI; Start 164; Stop 188
actgtaatcattgtagtgaggagtt

SEQ ID NO: 319200 - DNA, 25 bp, Artificial
  probe
  misc_feature (1)..(25): SEQ ID NO: 2236; WAN024FCI; Start 163; Stop 187
tactgtaatcattgtagtgaggagt

SEQ ID NO: 319201 - DNA, 25 bp, Artificial
  probe
  misc_feature (1)..(25): SEQ ID NO: 2236; WAN024FCI; Start 220; Stop 244
tcaacaatcaatgatggtgcttatg

SEQ ID NO: 319202 - DNA, 25 bp, Artificial
  probe
  misc_feature (1)..(25): SEQ ID NO: 2236; WAN024FCI; Start 549; Stop 573
gtcatcaagaggttggacaatagaa

SEQ ID NO: 319203 - DNA, 25 bp, Artificial
  probe
  misc_feature (1)..(25): SEQ ID NO: 2236; WAN024FCI; Start 407; Stop 431
caggttggattggttgtaacattga

SEQ ID NO: 319204 - DNA, 25 bp, Artificial
  probe
  misc_feature (1)..(25): SEQ ID NO: 2236; WAN024FCI; Start 221; Stop 245
caacaatcaatgatggtgcttatgc

SEQ ID NO: 319205 - DNA, 25 bp, Artificial
  probe
  misc_feature (1)..(25): SEQ ID NO: 2236; WAN024FCI; Start 162; Stop 186
ttactgtaatcattgtagtgaggag

SEQ ID NO: 319206 - DNA, 25 bp, Artificial
  probe
  misc_feature (1)..(25): SEQ ID NO: 2236; WAN024FCI; Start 318; Stop 342
ggtaaataactttcttgtccttccg

SEQ ID NO: 319207 - DNA, 25 bp, Artificial
  probe
  misc_feature (1)..(25): SEQ ID NO: 2236; WAN024FCI; Start 83; Stop 107
tttatcgtcagtcttattgccctaa

SEQ ID NO: 319208 - DNA, 25 bp, Artificial
  probe
  misc_feature (1)..(25): SEQ ID NO: 2236; WAN024FCI; Start 84; Stop 108
ttatcgtcagtcttattgccctaat

SEQ ID NO: 319209 - DNA, 25 bp, Artificial
  probe
  misc_feature (1)..(25): SEQ ID NO: 2236; WAN024FCI; Start 82; Stop 106
gtttatcgtcagtcttattgcccta

SEQ ID NO: 319210 - DNA, 25 bp, Artificial
  probe
  misc_feature (1)..(25): SEQ ID NO: 2236; WAN024FCI; Start 736; Stop 760
aaaggtagaggaaagtatcggaaat

SEQ ID NO: 319211 - DNA, 25 bp, Artificial
  probe
  misc_feature (1)..(25): SEQ ID NO: 2236; WAN024FCI; Start 75; Stop 99
ggattgggtttatcgtcagtcttat

SEQ ID NO: 319212 - DNA, 25 bp, Artificial
  probe
  misc_feature (1)..(25): SEQ ID NO: 2236; WAN024FCI; Start 77; Stop 101
attgggtttatcgtcagtcttattg

SEQ ID NO: 319213 - DNA, 25 bp, Artificial
  probe
  misc_feature (1)..(25): SEQ ID NO: 2236; WAN024FCI; Start 319; Stop 343
gtaaataactttcttgtccttccga

SEQ ID NO: 319214 - DNA, 25 bp, Artificial
  probe
  misc_feature (1)..(25): SEQ ID NO: 2236; WAN024FCI; Start 85; Stop 109
tatcgtcagtcttattgccctaatt

SEQ ID NO: 319215 - DNA, 25 bp, Artificial
  probe
  misc_feature (1)..(25): SEQ ID NO: 2236; WAN024FCI; Start 737; Stop 761
aaggtagaggaaagtatcggaaatt

SEQ ID NO: 319216 - DNA, 25 bp, Artificial
  probe
  misc_feature (1)..(25): SEQ ID NO: 2236; WAN024FCI; Start 735; Stop 759
taaaggtagaggaaagtatcggaaa

SEQ ID NO: 319217 - DNA, 25 bp, Artificial
  probe
  misc_feature (1)..(25): SEQ ID NO: 2236; WAN024FCI; Start 62; Stop 86
gtatcttaacggaggattgggttta

SEQ ID NO: 319218 - DNA, 25 bp, Artificial
  probe
  misc_feature (1)..(25): SEQ ID NO: 2236; WAN024FCI; Start 86; Stop 110
atcgtcagtcttattgccctaattg

SEQ ID NO: 319219 - DNA, 25 bp, Artificial
  probe
  misc_feature (1)..(25): SEQ ID NO: 2236; WAN024FCI; Start 76; Stop 100
gattgggtttatcgtcagtcttatt

SEQ ID NO: 319220 - DNA, 25 bp, Artificial
  probe
  misc_feature (1)..(25): SEQ ID NO: 2236; WAN024FCI; Start 64; Stop 88
atcttaacggaggattgggtttatc

SEQ ID NO: 319221 - DNA, 25 bp, Artificial
  probe
  misc_feature (1)..(25): SEQ ID NO: 2236; WAN024FCI; Start 734; Stop 758
ttaaaggtagaggaaagtatcggaa

SEQ ID NO: 319222 - DNA, 25 bp, Artificial
  probe
  misc_feature (1)..(25): SEQ ID NO: 2236; WAN024FCI; Start 550; Stop 574
tcatcaagaggttggacaatagaaa

SEQ ID NO: 319223 - DNA, 25 bp, Artificial
  probe
  misc_feature (1)..(25): SEQ ID NO: 2236; WAN024FCI; Start 74; Stop 98
aggattgggtttatcgtcagtctta

SEQ ID NO: 319224 - DNA, 25 bp, Artificial
  probe
  misc_feature (1)..(25): SEQ ID NO: 2236; WAN024FCI; Start 469; Stop 493
gtgcaagatggacaagttagagatc

SEQ ID NO: 319225 - DNA, 25 bp, Artificial
  probe
  misc_feature (1)..(25): SEQ ID NO: 2236; WAN024FCI; Start 78; Stop 102
ttgggtttatcgtcagtcttattgc

SEQ ID NO: 319226 - DNA, 25 bp, Artificial
  probe
  misc_feature (1)..(25): SEQ ID NO: 2236; WAN024FCI; Start 63; Stop 87
tatcttaacggaggattgggtttat

SEQ ID NO: 319227 - DNA, 25 bp, Artificial
  probe
  misc_feature (1)..(25): SEQ ID NO: 2236; WAN024FCI; Start 448; Stop 472
tctaaaggaaggatatttcttgtgc

SEQ ID NO: 319228 - DNA, 25 bp, Artificial
  probe
  misc_feature (1)..(25): SEQ ID NO: 2236; WAN024FCI; Start 738; Stop 762
aggtagaggaaagtatcggaaatta

SEQ ID NO: 319229 - DNA, 25 bp, Artificial
  probe
  misc_feature (1)..(25): SEQ ID NO: 2236; WAN024FCI; Start 551; Stop 575
catcaagaggttggacaatagaaat

SEQ ID NO: 319230 - DNA, 25 bp, Artificial
  probe
  misc_feature (1)..(25): SEQ ID NO: 2237; WAN024DKY; Start 484; Stop 508
tggatagaggtagcgaatgaataac

SEQ ID NO: 319231 - DNA, 25 bp, Artificial
  probe
  misc_feature (1)..(25): SEQ ID NO: 2237; WAN024DKY; Start 485; Stop 509
ggatagaggtagcgaatgaataact

SEQ ID NO: 319232 - DNA, 25 bp, Artificial
  probe
  misc_feature (1)..(25): SEQ ID NO: 2237; WAN024DKY; Start 483; Stop 507
ttggatagaggtagcgaatgaataa

SEQ ID NO: 319233 - DNA, 25 bp, Artificial
  probe
  misc_feature (1)..(25): SEQ ID NO: 2237; WAN024DKY; Start 482; Stop 506
attggatagaggtagcgaatgaata

SEQ ID NO: 319234 - DNA, 25 bp, Artificial
  probe
  misc_feature (1)..(25): SEQ ID NO: 2237; WAN024DKY; Start 481; Stop 505
tattggatagaggtagcgaatgaat

SEQ ID NO: 319235 - DNA, 25 bp, Artificial
  probe
  misc_feature (1)..(25): SEQ ID NO: 2237; WAN024DKY; Start 486; Stop 510
gatagaggtagcgaatgaataacta

SEQ ID NO: 319236 - DNA, 25 bp, Artificial
  probe
  misc_feature (1)..(25): SEQ ID NO: 2237; WAN024DKY; Start 488; Stop 512
tagaggtagcgaatgaataactaat

SEQ ID NO: 319237 - DNA, 25 bp, Artificial
  probe
  misc_feature (1)..(25): SEQ ID NO: 2237; WAN024DKY; Start 487; Stop 511
atagaggtagcgaatgaataactaa

SEQ ID NO: 319238 - DNA, 25 bp, Artificial
  probe
  misc_feature (1)..(25): SEQ ID NO: 2237; WAN024DKY; Start 216; Stop 240
aggtcaagcagttggatttcttaat

SEQ ID NO: 319239 - DNA, 25 bp, Artificial
  probe
  misc_feature (1)..(25): SEQ ID NO: 2237; WAN024DKY; Start 215; Stop 239
aaggtcaagcagttggatttcttaa

SEQ ID NO: 319240 - DNA, 25 bp, Artificial
  probe
  misc_feature (1)..(25): SEQ ID NO: 2237; WAN024DKY; Start 214; Stop 238
aaaggtcaagcagttggatttctta

SEQ ID NO: 319241 - DNA, 25 bp, Artificial
  probe
  misc_feature (1)..(25): SEQ ID NO: 2237; WAN024DKY; Start 133; Stop 157
gaaagcaatcaggaacaggaaatgg

SEQ ID NO: 319242 - DNA, 25 bp, Artificial
  probe
  misc_feature (1)..(25): SEQ ID NO: 2237; WAN024DKY; Start 220; Stop 244
caagcagttggatttcttaatctcc

SEQ ID NO: 319243 - DNA, 25 bp, Artificial
  probe
  misc_feature (1)..(25): SEQ ID NO: 2237; WAN024DKY; Start 218; Stop 242
gtcaagcagttggatttcttaatct

SEQ ID NO: 319244 - DNA, 25 bp, Artificial
  probe
  misc_feature (1)..(25): SEQ ID NO: 2237; WAN024DKY; Start 217; Stop 241
ggtcaagcagttggatttcttaatc

SEQ ID NO: 319245 - DNA, 25 bp, Artificial
  probe
  misc_feature (1)..(25): SEQ ID NO: 2237; WAN024DKY; Start 219; Stop 243
tcaagcagttggatttcttaatctc

SEQ ID NO: 319246 - DNA, 25 bp, Artificial
  probe
  misc_feature (1)..(25): SEQ ID NO: 2237; WAN024DKY; Start 221; Stop 245
aagcagttggatttcttaatctccg

SEQ ID NO: 319247 - DNA, 25 bp, Artificial
  probe
  misc_feature (1)..(25): SEQ ID NO: 2237; WAN024DKY; Start 210; Stop 234
tgagaaaggtcaagcagttggattt

SEQ ID NO: 319248 - DNA, 25 bp, Artificial
  probe
  misc_feature (1)..(25): SEQ ID NO: 2237; WAN024DKY; Start 213; Stop 237
gaaaggtcaagcagttggatttctt

SEQ ID NO: 319249 - DNA, 25 bp, Artificial
  probe
  misc_feature (1)..(25): SEQ ID NO: 2237; WAN024DKY; Start 134; Stop 158
aaagcaatcaggaacaggaaatggg

SEQ ID NO: 319250 - DNA, 25 bp, Artificial
  probe
  misc_feature (1)..(25): SEQ ID NO: 2237; WAN024DKY; Start 211; Stop 235
gagaaaggtcaagcagttggatttc

SEQ ID NO: 319251 - DNA, 25 bp, Artificial
  probe
  misc_feature (1)..(25): SEQ ID NO: 2237; WAN024DKY; Start 209; Stop 233
ctgagaaaggtcaagcagttggatt

SEQ ID NO: 319252 - DNA, 25 bp, Artificial
  probe
  misc_feature (1)..(25): SEQ ID NO: 2237; WAN024DKY; Start 208; Stop 232
tctgagaaaggtcaagcagttggat

SEQ ID NO: 319253 - DNA, 25 bp, Artificial
  probe
  misc_feature (1)..(25): SEQ ID NO: 2237; WAN024DKY; Start 225; Stop 249
agttggatttcttaatctccggttg

SEQ ID NO: 319254 - DNA, 25 bp, Artificial
  probe
  misc_feature (1)..(25): SEQ ID NO: 2237; WAN024DKY; Start 224; Stop 248
cagttggatttcttaatctccggtt

SEQ ID NO: 319255 - DNA, 25 bp, Artificial
  probe
  misc_feature (1)..(25): SEQ ID NO: 2237; WAN024DKY; Start 207; Stop 231
ttctgagaaaggtcaagcagttgga

SEQ ID NO: 319256 - DNA, 25 bp, Artificial
  probe
  misc_feature (1)..(25): SEQ ID NO: 2237; WAN024DKY; Start 226; Stop 250
gttggatttcttaatctccggttgc

SEQ ID NO: 319257 - DNA, 25 bp, Artificial
  probe
  misc_feature (1)..(25): SEQ ID NO: 2237; WAN024DKY; Start 206; Stop 230
tttctgagaaaggtcaagcagttgg

SEQ ID NO: 319258 - DNA, 25 bp, Artificial
  probe
  misc_feature (1)..(25): SEQ ID NO: 2237; WAN024DKY; Start 222; Stop 246
agcagttggatttcttaatctccgg

SEQ ID NO: 319259 - DNA, 25 bp, Artificial
  probe
  misc_feature (1)..(25): SEQ ID NO: 2237; WAN024DKY; Start 223; Stop 247
gcagttggatttcttaatctccggt

SEQ ID NO: 319260 - DNA, 25 bp, Artificial
  probe
  misc_feature (1)..(25): SEQ ID NO: 2237; WAN024DKY; Start 205; Stop 229
ttttctgagaaaggtcaagcagttg

SEQ ID NO: 319261 - DNA, 25 bp, Artificial
  probe
  misc_feature (1)..(25): SEQ ID NO: 2237; WAN024DKY; Start 227; Stop 251
ttggatttcttaatctccggttgcg

SEQ ID NO: 319262 - DNA, 25 bp, Artificial
  probe
  misc_feature (1)..(25): SEQ ID NO: 2237; WAN024DKY; Start 212; Stop 236
agaaaggtcaagcagttggatttct

SEQ ID NO: 319263 - DNA, 25 bp, Artificial
  probe
  misc_feature (1)..(25): SEQ ID NO: 2238; WAN024D5I; Start 489; Stop 513
tattacggatgagttagagcaacag

SEQ ID NO: 319264 - DNA, 25 bp, Artificial
  probe
  misc_feature (1)..(25): SEQ ID NO: 2238; WAN024D5I; Start 488; Stop 512
atattacggatgagttagagcaaca

SEQ ID NO: 319265 - DNA, 25 bp, Artificial
  probe
  misc_feature (1)..(25): SEQ ID NO: 2238; WAN024D5I; Start 312; Stop 336
aatcgctccaacctgttatcattac

SEQ ID NO: 319266 - DNA, 25 bp, Artificial
  probe
  misc_feature (1)..(25): SEQ ID NO: 2238; WAN024D5I; Start 311; Stop 335
caatcgctccaacctgttatcatta

SEQ ID NO: 319267 - DNA, 25 bp, Artificial
  probe
  misc_feature (1)..(25): SEQ ID NO: 2238; WAN024D5I; Start 393; Stop 417
cttgcttccttgtccttggttatac

SEQ ID NO: 319268 - DNA, 25 bp, Artificial
  probe
  misc_feature (1)..(25): SEQ ID NO: 2238; WAN024D5I; Start 491; Stop 515
ttacggatgagttagagcaacagat

SEQ ID NO: 319269 - DNA, 25 bp, Artificial
  probe
  misc_feature (1)..(25): SEQ ID NO: 2238; WAN024D5I; Start 490; Stop 514
attacggatgagttagagcaacaga

SEQ ID NO: 319270 - DNA, 25 bp, Artificial
  probe
  misc_feature (1)..(25): SEQ ID NO: 2238; WAN024D5I; Start 487; Stop 511
tatattacggatgagttagagcaac

SEQ ID NO: 319271 - DNA, 25 bp, Artificial
  probe
  misc_feature (1)..(25): SEQ ID NO: 2238; WAN024D5I; Start 496; Stop 520
gatgagttagagcaacagatcagag

SEQ ID NO: 319272 - DNA, 25 bp, Artificial
  probe
  misc_feature (1)..(25): SEQ ID NO: 2238; WAN024D5I; Start 485; Stop 509
cttatattacggatgagttagagca

SEQ ID NO: 319273 - DNA, 25 bp, Artificial
  probe
  misc_feature (1)..(25): SEQ ID NO: 2238; WAN024D5I; Start 497; Stop 521
atgagttagagcaacagatcagaga

SEQ ID NO: 319274 - DNA, 25 bp, Artificial
  probe
  misc_feature (1)..(25): SEQ ID NO: 2238; WAN024D5I; Start 315; Stop 339
cgctccaacctgttatcattacatt

SEQ ID NO: 319275 - DNA, 25 bp, Artificial
  probe
  misc_feature (1)..(25): SEQ ID NO: 2238; WAN024D5I; Start 498; Stop 522
tgagttagagcaacagatcagagag

SEQ ID NO: 319276 - DNA, 25 bp, Artificial
  probe
  misc_feature (1)..(25): SEQ ID NO: 2238; WAN024D5I; Start 486; Stop 510
ttatattacggatgagttagagcaa

SEQ ID NO: 319277 - DNA, 25 bp, Artificial
  probe
  misc_feature (1)..(25): SEQ ID NO: 2238; WAN024D5I; Start 484; Stop 508
acttatattacggatgagttagagc

SEQ ID NO: 319278 - DNA, 25 bp, Artificial
  probe
  misc_feature (1)..(25): SEQ ID NO: 2238; WAN024D5I; Start 492; Stop 516
tacggatgagttagagcaacagatc

SEQ ID NO: 319279 - DNA, 25 bp, Artificial
  probe
  misc_feature (1)..(25): SEQ ID NO: 2238; WAN024D5I; Start 495; Stop 519
ggatgagttagagcaacagatcaga

SEQ ID NO: 319280 - DNA, 25 bp, Artificial
  probe
  misc_feature (1)..(25): SEQ ID NO: 2238; WAN024D5I; Start 233; Stop 257
tagtggagggtgagttatttattcg

SEQ ID NO: 319281 - DNA, 25 bp, Artificial
  probe
  misc_feature (1)..(25): SEQ ID NO: 2238; WAN024D5I; Start 229; Stop 253
ggtttagtggagggtgagttattta

SEQ ID NO: 319282 - DNA, 25 bp, Artificial
  probe
  misc_feature (1)..(25): SEQ ID NO: 2238; WAN024D5I; Start 9; Stop 33
tacagatattgcgatggaattatcc

SEQ ID NO: 319283 - DNA, 25 bp, Artificial
  probe
  misc_feature (1)..(25): SEQ ID NO: 2238; WAN024D5I; Start 452; Stop 476
caccaaatcctctctatcaacaatg

SEQ ID NO: 319284 - DNA, 25 bp, Artificial
  probe
  misc_feature (1)..(25): SEQ ID NO: 2238; WAN024D5I; Start 451; Stop 475
tcaccaaatcctctctatcaacaat

SEQ ID NO: 319285 - DNA, 25 bp, Artificial
  probe
  misc_feature (1)..(25): SEQ ID NO: 2238; WAN024D5I; Start 450; Stop 474
atcaccaaatcctctctatcaacaa

SEQ ID NO: 319286 - DNA, 25 bp, Artificial
  probe
  misc_feature (1)..(25): SEQ ID NO: 2238; WAN024D5I; Start 449; Stop 473
catcaccaaatcctctctatcaaca

SEQ ID NO: 319287 - DNA, 25 bp, Artificial
  probe
  misc_feature (1)..(25): SEQ ID NO: 2238; WAN024D5I; Start 445; Stop 469
aaaccatcaccaaatcctctctatc

SEQ ID NO: 319288 - DNA, 25 bp, Artificial
  probe
  misc_feature (1)..(25): SEQ ID NO: 2238; WAN024D5I; Start 314; Stop 338
tcgctccaacctgttatcattacat

SEQ ID NO: 319289 - DNA, 25 bp, Artificial
  probe
  misc_feature (1)..(25): SEQ ID NO: 2238; WAN024D5I; Start 313; Stop 337
atcgctccaacctgttatcattaca

SEQ ID NO: 319290 - DNA, 25 bp, Artificial
  probe
  misc_feature (1)..(25): SEQ ID NO: 2238; WAN024D5I; Start 440; Stop 464
atcttaaaccatcaccaaatcctct

SEQ ID NO: 319291 - DNA, 25 bp, Artificial
  probe
  misc_feature (1)..(25): SEQ ID NO: 2238; WAN024D5I; Start 501; Stop 525
gttagagcaacagatcagagaggag

SEQ ID NO: 319292 - DNA, 25 bp, Artificial
  probe
  misc_feature (1)..(25): SEQ ID NO: 2238; WAN024D5I; Start 499; Stop 523
gagttagagcaacagatcagagagg

SEQ ID NO: 319293 - DNA, 25 bp, Artificial
  probe
  misc_feature (1)..(25): SEQ ID NO: 2238; WAN024D5I; Start 442; Stop 466
cttaaaccatcaccaaatcctctct

SEQ ID NO: 319294 - DNA, 25 bp, Artificial
  probe
  misc_feature (1)..(25): SEQ ID NO: 2238; WAN024D5I; Start 441; Stop 465
tcttaaaccatcaccaaatcctctc

SEQ ID NO: 319295 - DNA, 25 bp, Artificial
  probe
  misc_feature (1)..(25): SEQ ID NO: 2238; WAN024D5I; Start 444; Stop 468
taaaccatcaccaaatcctctctat

SEQ ID NO: 319296 - DNA, 25 bp, Artificial
  probe
  misc_feature (1)..(25): SEQ ID NO: 2239; WAN024CXL; Start 434; Stop 458
accaagagtacagtaacttccttaa

SEQ ID NO: 319297 - DNA, 25 bp, Artificial
  probe
  misc_feature (1)..(25): SEQ ID NO: 2239; WAN024CXL; Start 433; Stop 457
taccaagagtacagtaacttcctta

SEQ ID NO: 319298 - DNA, 25 bp, Artificial
  probe
  misc_feature (1)..(25): SEQ ID NO: 2239; WAN024CXL; Start 601; Stop 625
ttacgagaggttgaagttcctgtaa

SEQ ID NO: 319299 - DNA, 25 bp, Artificial
  probe
  misc_feature (1)..(25): SEQ ID NO: 2239; WAN024CXL; Start 409; Stop 433
gctattcaaatgtcttatgctcagt

SEQ ID NO: 319300 - DNA, 25 bp, Artificial
  probe
  misc_feature (1)..(25): SEQ ID NO: 2239; WAN024CXL; Start 408; Stop 432
tgctattcaaatgtcttatgctcag

SEQ ID NO: 319301 - DNA, 25 bp, Artificial
  probe
  misc_feature (1)..(25): SEQ ID NO: 2239; WAN024CXL; Start 291; Stop 315
acgctactttggtggtattaaacta

SEQ ID NO: 319302 - DNA, 25 bp, Artificial
  probe
  misc_feature (1)..(25): SEQ ID NO: 2239; WAN024CXL; Start 128; Stop 152
aagaacactacaaagcgacacataa

SEQ ID NO: 319303 - DNA, 25 bp, Artificial
  probe
  misc_feature (1)..(25): SEQ ID NO: 2239; WAN024CXL; Start 127; Stop 151
aaagaacactacaaagcgacacata

SEQ ID NO: 319304 - DNA, 25 bp, Artificial
  probe
  misc_feature (1)..(25): SEQ ID NO: 2239; WAN024CXL; Start 292; Stop 316
cgctactttggtggtattaaactag

SEQ ID NO: 319305 - DNA, 25 bp, Artificial
  probe
  misc_feature (1)..(25): SEQ ID NO: 2239; WAN024CXL; Start 194; Stop 218
gtacaagtgatgatggtgagcctag

SEQ ID NO: 319306 - DNA, 25 bp, Artificial
  probe
  misc_feature (1)..(25): SEQ ID NO: 2239; WAN024CXL; Start 295; Stop 319
tactttggtggtattaaactaggcg

SEQ ID NO: 319307 - DNA, 25 bp, Artificial
  probe
  misc_feature (1)..(25): SEQ ID NO: 2239; WAN024CXL; Start 294; Stop 318
ctactttggtggtattaaactaggc

SEQ ID NO: 319308 - DNA, 25 bp, Artificial
  probe
  misc_feature (1)..(25): SEQ ID NO: 2239; WAN024CXL; Start 293; Stop 317
gctactttggtggtattaaactagg

SEQ ID NO: 319309 - DNA, 25 bp, Artificial
  probe
  misc_feature (1)..(25): SEQ ID NO: 2239; WAN024CXL; Start 414; Stop 438
tcaaatgtcttatgctcagtaccaa

SEQ ID NO: 319310 - DNA, 25 bp, Artificial
  probe
  misc_feature (1)..(25): SEQ ID NO: 2239; WAN024CXL; Start 413; Stop 437
ttcaaatgtcttatgctcagtacca

SEQ ID NO: 319311 - DNA, 25 bp, Artificial
  probe
  misc_feature (1)..(25): SEQ ID NO: 2239; WAN024CXL; Start 407; Stop 431
ttgctattcaaatgtcttatgctca

SEQ ID NO: 319312 - DNA, 25 bp, Artificial
  probe
  misc_feature (1)..(25): SEQ ID NO: 2239; WAN024CXL; Start 130; Stop 154
gaacactacaaagcgacacataact

SEQ ID NO: 319313 - DNA, 25 bp, Artificial
  probe
  misc_feature (1)..(25): SEQ ID NO: 2239; WAN024CXL; Start 129; Stop 153
agaacactacaaagcgacacataac

SEQ ID NO: 319314 - DNA, 25 bp, Artificial
  probe
  misc_feature (1)..(25): SEQ ID NO: 2239; WAN024CXL; Start 417; Stop 441
aatgtcttatgctcagtaccaagag

SEQ ID NO: 319315 - DNA, 25 bp, Artificial
  probe
  misc_feature (1)..(25): SEQ ID NO: 2239; WAN024CXL; Start 195; Stop 219
tacaagtgatgatggtgagcctagt

SEQ ID NO: 319316 - DNA, 25 bp, Artificial
  probe
  misc_feature (1)..(25): SEQ ID NO: 2239; WAN024CXL; Start 585; Stop 609
tttaactgaccaaggtttacgagag

SEQ ID NO: 319317 - DNA, 25 bp, Artificial
  probe
  misc_feature (1)..(25): SEQ ID NO: 2239; WAN024CXL; Start 584; Stop 608
ctttaactgaccaaggtttacgaga

SEQ ID NO: 319318 - DNA, 25 bp, Artificial
  probe
  misc_feature (1)..(25): SEQ ID NO: 2239; WAN024CXL; Start 419; Stop 443
tgtcttatgctcagtaccaagagta

SEQ ID NO: 319319 - DNA, 25 bp, Artificial
  probe
  misc_feature (1)..(25): SEQ ID NO: 2239; WAN024CXL; Start 415; Stop 439
caaatgtcttatgctcagtaccaag

SEQ ID NO: 319320 - DNA, 25 bp, Artificial
  probe
  misc_feature (1)..(25): SEQ ID NO: 2239; WAN024CXL; Start 412; Stop 436
attcaaatgtcttatgctcagtacc

SEQ ID NO: 319321 - DNA, 25 bp, Artificial
  probe
  misc_feature (1)..(25): SEQ ID NO: 2239; WAN024CXL; Start 131; Stop 155
aacactacaaagcgacacataactg

SEQ ID NO: 319322 - DNA, 25 bp, Artificial
  probe
  misc_feature (1)..(25): SEQ ID NO: 2239; WAN024CXL; Start 583; Stop 607
actttaactgaccaaggtttacgag

SEQ ID NO: 319323 - DNA, 25 bp, Artificial
  probe
  misc_feature (1)..(25): SEQ ID NO: 2239; WAN024CXL; Start 582; Stop 606
cactttaactgaccaaggtttacga

SEQ ID NO: 319324 - DNA, 25 bp, Artificial
  probe
  misc_feature (1)..(25): SEQ ID NO: 2239; WAN024CXL; Start 101; Stop 125
ctcgtgacttcattactgccatcaa

SEQ ID NO: 319325 - DNA, 25 bp, Artificial
  probe
  misc_feature (1)..(25): SEQ ID NO: 2239; WAN024CXL; Start 418; Stop 442
atgtcttatgctcagtaccaagagt

SEQ ID NO: 319326 - DNA, 25 bp, Artificial
  probe
  misc_feature (1)..(25): SEQ ID NO: 2239; WAN024CXL; Start 255; Stop 279
aaatcacaatctcaccaatgtctgt

SEQ ID NO: 319327 - DNA, 25 bp, Artificial
  probe
  misc_feature (1)..(25): SEQ ID NO: 2239; WAN024CXL; Start 5; Stop 29
aatttaggacaattaaagaggacgg

SEQ ID NO: 319328 - DNA, 25 bp, Artificial
  probe
  misc_feature (1)..(25): SEQ ID NO: 2239; WAN024CXL; Start 581; Stop 605
tcactttaactgaccaaggtttacg

SEQ ID NO: 319329 - DNA, 25 bp, Artificial
  probe
  misc_feature (1)..(25): SEQ ID NO: 2240; WAN024C7U; Start 229; Stop 253
cgaagacaagcaggagatgatatat

SEQ ID NO: 319330 - DNA, 25 bp, Artificial
  probe
  misc_feature (1)..(25): SEQ ID NO: 2240; WAN024C7U; Start 134; Stop 158
aagatgtaagagaattgattggctc

SEQ ID NO: 319331 - DNA, 25 bp, Artificial
  probe
  misc_feature (1)..(25): SEQ ID NO: 2240; WAN024C7U; Start 230; Stop 254
gaagacaagcaggagatgatatatt

SEQ ID NO: 319332 - DNA, 25 bp, Artificial
  probe
  misc_feature (1)..(25): SEQ ID NO: 2240; WAN024C7U; Start 465; Stop 489
tgatagacagaactctcctagtaag

SEQ ID NO: 319333 - DNA, 25 bp, Artificial
  probe
  misc_feature (1)..(25): SEQ ID NO: 2240; WAN024C7U; Start 466; Stop 490
gatagacagaactctcctagtaaga

SEQ ID NO: 319334 - DNA, 25 bp, Artificial
  probe
  misc_feature (1)..(25): SEQ ID NO: 2240; WAN024C7U; Start 228; Stop 252
tcgaagacaagcaggagatgatata

SEQ ID NO: 319335 - DNA, 25 bp, Artificial
  probe
  misc_feature (1)..(25): SEQ ID NO: 2240; WAN024C7U; Start 464; Stop 488
ttgatagacagaactctcctagtaa

SEQ ID NO: 319336 - DNA, 25 bp, Artificial
  probe
  misc_feature (1)..(25): SEQ ID NO: 2240; WAN024C7U; Start 468; Stop 492
tagacagaactctcctagtaagatt

SEQ ID NO: 319337 - DNA, 25 bp, Artificial
  probe
  misc_feature (1)..(25): SEQ ID NO: 2240; WAN024C7U; Start 147; Stop 171
attgattggctctacaccctctatt

SEQ ID NO: 319338 - DNA, 25 bp, Artificial
  probe
  misc_feature (1)..(25): SEQ ID NO: 2240; WAN024C7U; Start 467; Stop 491
atagacagaactctcctagtaagat

SEQ ID NO: 319339 - DNA, 25 bp, Artificial
  probe
  misc_feature (1)..(25): SEQ ID NO: 2240; WAN024C7U; Start 146; Stop 170
aattgattggctctacaccctctat

SEQ ID NO: 319340 - DNA, 25 bp, Artificial
  probe
  misc_feature (1)..(25): SEQ ID NO: 2240; WAN024C7U; Start 133; Stop 157
aaagatgtaagagaattgattggct

SEQ ID NO: 319341 - DNA, 25 bp, Artificial
  probe
  misc_feature (1)..(25): SEQ ID NO: 2240; WAN024C7U; Start 150; Stop 174
gattggctctacaccctctattcat

SEQ ID NO: 319342 - DNA, 25 bp, Artificial
  probe
  misc_feature (1)..(25): SEQ ID NO: 2240; WAN024C7U; Start 426; Stop 450
tgattcaaattctgtcattcgtcaa

SEQ ID NO: 319343 - DNA, 25 bp, Artificial
  probe
  misc_feature (1)..(25): SEQ ID NO: 2240; WAN024C7U; Start 427; Stop 451
gattcaaattctgtcattcgtcaat

SEQ ID NO: 319344 - DNA, 25 bp, Artificial
  probe
  misc_feature (1)..(25): SEQ ID NO: 2240; WAN024C7U; Start 379; Stop 403
gcggattacctagctccatattata

SEQ ID NO: 319345 - DNA, 25 bp, Artificial
  probe
  misc_feature (1)..(25): SEQ ID NO: 2240; WAN024C7U; Start 148; Stop 172
ttgattggctctacaccctctattc

SEQ ID NO: 319346 - DNA, 25 bp, Artificial
  probe
  misc_feature (1)..(25): SEQ ID NO: 2240; WAN024C7U; Start 173; Stop 197
atgttcaggtgatttctcaagattt

SEQ ID NO: 319347 - DNA, 25 bp, Artificial
  probe
  misc_feature (1)..(25): SEQ ID NO: 2240; WAN024C7U; Start 132; Stop 156
caaagatgtaagagaattgattggc

SEQ ID NO: 319348 - DNA, 25 bp, Artificial
  probe
  misc_feature (1)..(25): SEQ ID NO: 2240; WAN024C7U; Start 315; Stop 339
ctaccatatcactgcaacagctatt

SEQ ID NO: 319349 - DNA, 25 bp, Artificial
  probe
  misc_feature (1)..(25): SEQ ID NO: 2240; WAN024C7U; Start 145; Stop 169
gaattgattggctctacaccctcta

SEQ ID NO: 319350 - DNA, 25 bp, Artificial
  probe
  misc_feature (1)..(25): SEQ ID NO: 2240; WAN024C7U; Start 123; Stop 147
tgaacgaatcaaagatgtaagagaa

SEQ ID NO: 319351 - DNA, 25 bp, Artificial
  probe
  misc_feature (1)..(25): SEQ ID NO: 2240; WAN024C7U; Start 425; Stop 449
ttgattcaaattctgtcattcgtca

SEQ ID NO: 319352 - DNA, 25 bp, Artificial
  probe
  misc_feature (1)..(25): SEQ ID NO: 2240; WAN024C7U; Start 171; Stop 195
tcatgttcaggtgatttctcaagat

SEQ ID NO: 319353 - DNA, 25 bp, Artificial
  probe
  misc_feature (1)..(25): SEQ ID NO: 2240; WAN024C7U; Start 170; Stop 194
ttcatgttcaggtgatttctcaaga

SEQ ID NO: 319354 - DNA, 25 bp, Artificial
  probe
  misc_feature (1)..(25): SEQ ID NO: 2240; WAN024C7U; Start 172; Stop 196
catgttcaggtgatttctcaagatt

SEQ ID NO: 319355 - DNA, 25 bp, Artificial
  probe
  misc_feature (1)..(25): SEQ ID NO: 2240; WAN024C7U; Start 169; Stop 193
attcatgttcaggtgatttctcaag

SEQ ID NO: 319356 - DNA, 25 bp, Artificial
  probe
  misc_feature (1)..(25): SEQ ID NO: 2240; WAN024C7U; Start 469; Stop 493
agacagaactctcctagtaagattt

SEQ ID NO: 319357 - DNA, 25 bp, Artificial
  probe
  misc_feature (1)..(25): SEQ ID NO: 2240; WAN024C7U; Start 423; Stop 447
cattgattcaaattctgtcattcgt

SEQ ID NO: 319358 - DNA, 25 bp, Artificial
  probe
  misc_feature (1)..(25): SEQ ID NO: 2240; WAN024C7U; Start 156; Stop 180
ctctacaccctctattcatgttcag

SEQ ID NO: 319359 - DNA, 25 bp, Artificial
  probe
  misc_feature (1)..(25): SEQ ID NO: 2240; WAN024C7U; Start 424; Stop 448
attgattcaaattctgtcattcgtc

SEQ ID NO: 319360 - DNA, 25 bp, Artificial
  probe
  misc_feature (1)..(25): SEQ ID NO: 2240; WAN024C7U; Start 378; Stop 402
agcggattacctagctccatattat

SEQ ID NO: 319361 - DNA, 25 bp, Artificial
  probe
  misc_feature (1)..(25): SEQ ID NO: 2240; WAN024C7U; Start 167; Stop 191
ctattcatgttcaggtgatttctca

SEQ ID NO: 319362 - DNA, 25 bp, Artificial
  probe
  misc_feature (1)..(25): SEQ ID NO: 2241; WAN024AVS; Start 31; Stop 55
gtagcgattcctcacacagatattg

SEQ ID NO: 319363 - DNA, 25 bp, Artificial
  probe
  misc_feature (1)..(25): SEQ ID NO: 2241; WAN024AVS; Start 35; Stop 59
cgattcctcacacagatattgttca

SEQ ID NO: 319364 - DNA, 25 bp, Artificial
  probe
  misc_feature (1)..(25): SEQ ID NO: 2241; WAN024AVS; Start 32; Stop 56
tagcgattcctcacacagatattgt

SEQ ID NO: 319365 - DNA, 25 bp, Artificial
  probe
  misc_feature (1)..(25): SEQ ID NO: 2241; WAN024AVS; Start 30; Stop 54
cgtagcgattcctcacacagatatt

SEQ ID NO: 319366 - DNA, 25 bp, Artificial
  probe
  misc_feature (1)..(25): SEQ ID NO: 2241; WAN024AVS; Start 110; Stop 134
tccacaatatgatagctcctgataa

SEQ ID NO: 319367 - DNA, 25 bp, Artificial
  probe
  misc_feature (1)..(25): SEQ ID NO: 2241; WAN024AVS; Start 109; Stop 133
ttccacaatatgatagctcctgata

SEQ ID NO: 319368 - DNA, 25 bp, Artificial
  probe
  misc_feature (1)..(25): SEQ ID NO: 2241; WAN024AVS; Start 34; Stop 58
gcgattcctcacacagatattgttc

SEQ ID NO: 319369 - DNA, 25 bp, Artificial
  probe
  misc_feature (1)..(25): SEQ ID NO: 2241; WAN024AVS; Start 111; Stop 135
ccacaatatgatagctcctgataag

SEQ ID NO: 319370 - DNA, 25 bp, Artificial
  probe
  misc_feature (1)..(25): SEQ ID NO: 2241; WAN024AVS; Start 33; Stop 57
agcgattcctcacacagatattgtt

SEQ ID NO: 319371 - DNA, 25 bp, Artificial
  probe
  misc_feature (1)..(25): SEQ ID NO: 2241; WAN024AVS; Start 101; Stop 125
cagtcactttccacaatatgatagc

SEQ ID NO: 319372 - DNA, 25 bp, Artificial
  probe
  misc_feature (1)..(25): SEQ ID NO: 2241; WAN024AVS; Start 99; Stop 123
accagtcactttccacaatatgata

SEQ ID NO: 319373 - DNA, 25 bp, Artificial
  probe
  misc_feature (1)..(25): SEQ ID NO: 2241; WAN024AVS; Start 98; Stop 122
aaccagtcactttccacaatatgat

SEQ ID NO: 319374 - DNA, 25 bp, Artificial
  probe
  misc_feature (1)..(25): SEQ ID NO: 2241; WAN024AVS; Start 97; Stop 121
aaaccagtcactttccacaatatga

SEQ ID NO: 319375 - DNA, 25 bp, Artificial
  probe
  misc_feature (1)..(25): SEQ ID NO: 2241; WAN024AVS; Start 271; Stop 295
aaactttatgcttacattgctgaag

SEQ ID NO: 319376 - DNA, 25 bp, Artificial
  probe
  misc_feature (1)..(25): SEQ ID NO: 2241; WAN024AVS; Start 100; Stop 124
ccagtcactttccacaatatgatag

SEQ ID NO: 319377 - DNA, 25 bp, Artificial
  probe
  misc_feature (1)..(25): SEQ ID NO: 2241; WAN024AVS; Start 127; Stop 151
cctgataaggaagtagaagtatctc

SEQ ID NO: 319378 - DNA, 25 bp, Artificial
  probe
  misc_feature (1)..(25): SEQ ID NO: 2241; WAN024AVS; Start 112; Stop 136
cacaatatgatagctcctgataagg

SEQ ID NO: 319379 - DNA, 25 bp, Artificial
  probe
  misc_feature (1)..(25): SEQ ID NO: 2241; WAN024AVS; Start 107; Stop 131
ctttccacaatatgatagctcctga

SEQ ID NO: 319380 - DNA, 25 bp, Artificial
  probe
  misc_feature (1)..(25): SEQ ID NO: 2241; WAN024AVS; Start 106; Stop 130
actttccacaatatgatagctcctg

SEQ ID NO: 319381 - DNA, 25 bp, Artificial
  probe
  misc_feature (1)..(25): SEQ ID NO: 2241; WAN024AVS; Start 105; Stop 129
cactttccacaatatgatagctcct

SEQ ID NO: 319382 - DNA, 25 bp, Artificial
  probe
  misc_feature (1)..(25): SEQ ID NO: 2241; WAN024AVS; Start 108; Stop 132
tttccacaatatgatagctcctgat

SEQ ID NO: 319383 - DNA, 25 bp, Artificial
  probe
  misc_feature (1)..(25): SEQ ID NO: 2241; WAN024AVS; Start 128; Stop 152
ctgataaggaagtagaagtatctct

SEQ ID NO: 319384 - DNA, 25 bp, Artificial
  probe
  misc_feature (1)..(25): SEQ ID NO: 2241; WAN024AVS; Start 221; Stop 245
tcacaggaaatggtcatcttgaaga

SEQ ID NO: 319385 - DNA, 25 bp, Artificial
  probe
  misc_feature (1)..(25): SEQ ID NO: 2241; WAN024AVS; Start 102; Stop 126
agtcactttccacaatatgatagct

SEQ ID NO: 319386 - DNA, 25 bp, Artificial
  probe
  misc_feature (1)..(25): SEQ ID NO: 2241; WAN024AVS; Start 104; Stop 128
tcactttccacaatatgatagctcc

SEQ ID NO: 319387 - DNA, 25 bp, Artificial
  probe
  misc_feature (1)..(25): SEQ ID NO: 2241; WAN024AVS; Start 103; Stop 127
gtcactttccacaatatgatagctc

SEQ ID NO: 319388 - DNA, 25 bp, Artificial
  probe
  misc_feature (1)..(25): SEQ ID NO: 2241; WAN024AVS; Start 73; Stop 97
aaagtggtggttgttcgattagaaa

SEQ ID NO: 319389 - DNA, 25 bp, Artificial
  probe
  misc_feature (1)..(25): SEQ ID NO: 2241; WAN024AVS; Start 10; Stop 34
ctaggaaaggacttgcataacgtag

SEQ ID NO: 319390 - DNA, 25 bp, Artificial
  probe
  misc_feature (1)..(25): SEQ ID NO: 2241; WAN024AVS; Start 222; Stop 246
cacaggaaatggtcatcttgaagac

SEQ ID NO: 319391 - DNA, 25 bp, Artificial
  probe
  misc_feature (1)..(25): SEQ ID NO: 2241; WAN024AVS; Start 9; Stop 33
tctaggaaaggacttgcataacgta

SEQ ID NO: 319392 - DNA, 25 bp, Artificial
  probe
  misc_feature (1)..(25): SEQ ID NO: 2241; WAN024AVS; Start 72; Stop 96
gaaagtggtggttgttcgattagaa

SEQ ID NO: 319393 - DNA, 25 bp, Artificial
  probe
  misc_feature (1)..(25): SEQ ID NO: 2241; WAN024AVS; Start 1; Stop 25
atggaatttctaggaaaggacttgc

SEQ ID NO: 319394 - DNA, 25 bp, Artificial
  probe
  misc_feature (1)..(25): SEQ ID NO: 2241; WAN024AVS; Start 29; Stop 53
acgtagcgattcctcacacagatat

SEQ ID NO: 319395 - DNA, 25 bp, Artificial
  probe
  misc_feature (1)..(25): SEQ ID NO: 2242; WAN024GE5; Start 24; Stop 48
gaagagccttagacaagtgtgtgat

SEQ ID NO: 319396 - DNA, 25 bp, Artificial
  probe
  misc_feature (1)..(25): SEQ ID NO: 2242; WAN024GE5; Start 25; Stop 49
aagagccttagacaagtgtgtgatg

SEQ ID NO: 319397 - DNA, 25 bp, Artificial
  probe
  misc_feature (1)..(25): SEQ ID NO: 2242; WAN024GE5; Start 62; Stop 86
atagagagttctcccatatccgtac

SEQ ID NO: 319398 - DNA, 25 bp, Artificial
  probe
  misc_feature (1)..(25): SEQ ID NO: 2242; WAN024GE5; Start 61; Stop 85
gatagagagttctcccatatccgta

SEQ ID NO: 319399 - DNA, 25 bp, Artificial
  probe
  misc_feature (1)..(25): SEQ ID NO: 2242; WAN024GE5; Start 58; Stop 82
cttgatagagagttctcccatatcc

SEQ ID NO: 319400 - DNA, 25 bp, Artificial
  probe
  misc_feature (1)..(25): SEQ ID NO: 2242; WAN024GE5; Start 57; Stop 81
ccttgatagagagttctcccatatc

SEQ ID NO: 319401 - DNA, 25 bp, Artificial
  probe
  misc_feature (1)..(25): SEQ ID NO: 2242; WAN024GE5; Start 56; Stop 80
gccttgatagagagttctcccatat

SEQ ID NO: 319402 - DNA, 25 bp, Artificial
  probe
  misc_feature (1)..(25): SEQ ID NO: 2242; WAN024GE5; Start 59; Stop 83
ttgatagagagttctcccatatccg

SEQ ID NO: 319403 - DNA, 25 bp, Artificial
  probe
  misc_feature (1)..(25): SEQ ID NO: 2242; WAN024GE5; Start 5; Stop 29
aatttctcaggaagaggacgaagag

SEQ ID NO: 319404 - DNA, 25 bp, Artificial
  probe
  misc_feature (1)..(25): SEQ ID NO: 2242; WAN024GE5; Start 4; Stop 28
gaatttctcaggaagaggacgaaga

SEQ ID NO: 319405 - DNA, 25 bp, Artificial
  probe
  misc_feature (1)..(25): SEQ ID NO: 2242; WAN024GE5; Start 27; Stop 51
gagccttagacaagtgtgtgatgtg

SEQ ID NO: 319406 - DNA, 25 bp, Artificial
  probe
  misc_feature (1)..(25): SEQ ID NO: 2242; WAN024GE5; Start 26; Stop 50
agagccttagacaagtgtgtgatgt

SEQ ID NO: 319407 - DNA, 25 bp, Artificial
  probe
  misc_feature (1)..(25): SEQ ID NO: 2242; WAN024GE5; Start 60; Stop 84
tgatagagagttctcccatatccgt

SEQ ID NO: 319408 - DNA, 25 bp, Artificial
  probe
  misc_feature (1)..(25): SEQ ID NO: 2242; WAN024GE5; Start 55; Stop 79
tgccttgatagagagttctcccata

SEQ ID NO: 319409 - DNA, 25 bp, Artificial
  probe
  misc_feature (1)..(25): SEQ ID NO: 2242; WAN024GE5; Start 3; Stop 27
ggaatttctcaggaagaggacgaag

SEQ ID NO: 319410 - DNA, 25 bp, Artificial
  probe
  misc_feature (1)..(25): SEQ ID NO: 2242; WAN024GE5; Start 16; Stop 40
aagaggacgaagagccttagacaag

SEQ ID NO: 319411 - DNA, 25 bp, Artificial
  probe
  misc_feature (1)..(25): SEQ ID NO: 2242; WAN024GE5; Start 15; Stop 39
gaagaggacgaagagccttagacaa

SEQ ID NO: 319412 - DNA, 25 bp, Artificial
  probe
  misc_feature (1)..(25): SEQ ID NO: 2242; WAN024GE5; Start 31; Stop 55
cttagacaagtgtgtgatgtgggtt

SEQ ID NO: 319413 - DNA, 25 bp, Artificial
  probe
  misc_feature (1)..(25): SEQ ID NO: 2242; WAN024GE5; Start 47; Stop 71
atgtgggttgccttgatagagagtt

SEQ ID NO: 319414 - DNA, 25 bp, Artificial
  probe
  misc_feature (1)..(25): SEQ ID NO: 2242; WAN024GE5; Start 32; Stop 56
ttagacaagtgtgtgatgtgggttg

SEQ ID NO: 319415 - DNA, 25 bp, Artificial
  probe
  misc_feature (1)..(25): SEQ ID NO: 2242; WAN024GE5; Start 1; Stop 25
atggaatttctcaggaagaggacga

SEQ ID NO: 319416 - DNA, 25 bp, Artificial
  probe
  misc_feature (1)..(25): SEQ ID NO: 2242; WAN024GE5; Start 54; Stop 78
ttgccttgatagagagttctcccat

SEQ ID NO: 319417 - DNA, 25 bp, Artificial
  probe
  misc_feature (1)..(25): SEQ ID NO: 2242; WAN024GE5; Start 2; Stop 26
tggaatttctcaggaagaggacgaa

SEQ ID NO: 319418 - DNA, 25 bp, Artificial
  probe
  misc_feature (1)..(25): SEQ ID NO: 2242; WAN024GE5; Start 23; Stop 47
cgaagagccttagacaagtgtgtga

SEQ ID NO: 319419 - DNA, 25 bp, Artificial
  probe
  misc_feature (1)..(25): SEQ ID NO: 2242; WAN024GE5; Start 21; Stop 45
gacgaagagccttagacaagtgtgt

SEQ ID NO: 319420 - DNA, 25 bp, Artificial
  probe
  misc_feature (1)..(25): SEQ ID NO: 2242; WAN024GE5; Start 46; Stop 70
gatgtgggttgccttgatagagagt

SEQ ID NO: 319421 - DNA, 25 bp, Artificial
  probe
  misc_feature (1)..(25): SEQ ID NO: 2242; WAN024GE5; Start 45; Stop 69
tgatgtgggttgccttgatagagag

SEQ ID NO: 319422 - DNA, 25 bp, Artificial
  probe
  misc_feature (1)..(25): SEQ ID NO: 2242; WAN024GE5; Start 49; Stop 73
gtgggttgccttgatagagagttct

SEQ ID NO: 319423 - DNA, 25 bp, Artificial
  probe
  misc_feature (1)..(25): SEQ ID NO: 2242; WAN024GE5; Start 18; Stop 42
gaggacgaagagccttagacaagtg

SEQ ID NO: 319424 - DNA, 25 bp, Artificial
  probe
  misc_feature (1)..(25): SEQ ID NO: 2242; WAN024GE5; Start 48; Stop 72
tgtgggttgccttgatagagagttc

SEQ ID NO: 319425 - DNA, 25 bp, Artificial
  probe
  misc_feature (1)..(25): SEQ ID NO: 2242; WAN024GE5; Start 44; Stop 68
gtgatgtgggttgccttgatagaga

SEQ ID NO: 319426 - DNA, 25 bp, Artificial
  probe
  misc_feature (1)..(25): SEQ ID NO: 2242; WAN024GE5; Start 28; Stop 52
agccttagacaagtgtgtgatgtgg

SEQ ID NO: 319427 - DNA, 25 bp, Artificial
  probe
  misc_feature (1)..(25): SEQ ID NO: 2242; WAN024GE5; Start 22; Stop 46
acgaagagccttagacaagtgtgtg

SEQ ID NO: 319428 - DNA, 25 bp, Artificial
  probe
  misc_feature (1)..(25): SEQ ID NO: 2243; WAN024DUW; Start 1123; Stop 1147
attgcgactgttgaatcttatctct

SEQ ID NO: 319429 - DNA, 25 bp, Artificial
  probe
  misc_feature (1)..(25): SEQ ID NO: 2243; WAN024DUW; Start 1124; Stop 1148
ttgcgactgttgaatcttatctctc

SEQ ID NO: 319430 - DNA, 25 bp, Artificial
  probe
  misc_feature (1)..(25): SEQ ID NO: 2243; WAN024DUW; Start 1127; Stop 1151
cgactgttgaatcttatctctccaa

SEQ ID NO: 319431 - DNA, 25 bp, Artificial
  probe
  misc_feature (1)..(25): SEQ ID NO: 2243; WAN024DUW; Start 955; Stop 979
gattatctacttggcattgtcaaca

SEQ ID NO: 319432 - DNA, 25 bp, Artificial
  probe
  misc_feature (1)..(25): SEQ ID NO: 2243; WAN024DUW; Start 692; Stop 716
atacaacaggtccttggagtgataa

SEQ ID NO: 319433 - DNA, 25 bp, Artificial
  probe
  misc_feature (1)..(25): SEQ ID NO: 2243; WAN024DUW; Start 691; Stop 715
aatacaacaggtccttggagtgata

SEQ ID NO: 319434 - DNA, 25 bp, Artificial
  probe
  misc_feature (1)..(25): SEQ ID NO: 2243; WAN024DUW; Start 690; Stop 714
taatacaacaggtccttggagtgat

SEQ ID NO: 319435 - DNA, 25 bp, Artificial
  probe
  misc_feature (1)..(25): SEQ ID NO: 2243; WAN024DUW; Start 954; Stop 978
agattatctacttggcattgtcaac

SEQ ID NO: 319436 - DNA, 25 bp, Artificial
  probe
  misc_feature (1)..(25): SEQ ID NO: 2243; WAN024DUW; Start 689; Stop 713
ttaatacaacaggtccttggagtga

SEQ ID NO: 319437 - DNA, 25 bp, Artificial
  probe
  misc_feature (1)..(25): SEQ ID NO: 2243; WAN024DUW; Start 957; Stop 981
ttatctacttggcattgtcaacaac

SEQ ID NO: 319438 - DNA, 25 bp, Artificial
  probe
  misc_feature (1)..(25): SEQ ID NO: 2243; WAN024DUW; Start 894; Stop 918
tacaactgatacagactacacaggt

SEQ ID NO: 319439 - DNA, 25 bp, Artificial
  probe
  misc_feature (1)..(25): SEQ ID NO: 2243; WAN024DUW; Start 898; Stop 922
actgatacagactacacaggtgatt

SEQ ID NO: 319440 - DNA, 25 bp, Artificial
  probe
  misc_feature (1)..(25): SEQ ID NO: 2243; WAN024DUW; Start 897; Stop 921
aactgatacagactacacaggtgat

SEQ ID NO: 319441 - DNA, 25 bp, Artificial
  probe
  misc_feature (1)..(25): SEQ ID NO: 2243; WAN024DUW; Start 956; Stop 980
attatctacttggcattgtcaacaa

SEQ ID NO: 319442 - DNA, 25 bp, Artificial
  probe
  misc_feature (1)..(25): SEQ ID NO: 2243; WAN024DUW; Start 1126; Stop 1150
gcgactgttgaatcttatctctcca

SEQ ID NO: 319443 - DNA, 25 bp, Artificial
  probe
  misc_feature (1)..(25): SEQ ID NO: 2243; WAN024DUW; Start 1125; Stop 1149
tgcgactgttgaatcttatctctcc

SEQ ID NO: 319444 - DNA, 25 bp, Artificial
  probe
  misc_feature (1)..(25): SEQ ID NO: 2243; WAN024DUW; Start 890; Stop 914
ttggtacaactgatacagactacac

SEQ ID NO: 319445 - DNA, 25 bp, Artificial
  probe
  misc_feature (1)..(25): SEQ ID NO: 2243; WAN024DUW; Start 893; Stop 917
gtacaactgatacagactacacagg

SEQ ID NO: 319446 - DNA, 25 bp, Artificial
  probe
  misc_feature (1)..(25): SEQ ID NO: 2243; WAN024DUW; Start 892; Stop 916
ggtacaactgatacagactacacag

SEQ ID NO: 319447 - DNA, 25 bp, Artificial
  probe
  misc_feature (1)..(25): SEQ ID NO: 2243; WAN024DUW; Start 958; Stop 982
tatctacttggcattgtcaacaacc

SEQ ID NO: 319448 - DNA, 25 bp, Artificial
  probe
  misc_feature (1)..(25): SEQ ID NO: 2243; WAN024DUW; Start 688; Stop 712
attaatacaacaggtccttggagtg

SEQ ID NO: 319449 - DNA, 25 bp, Artificial
  probe
  misc_feature (1)..(25): SEQ ID NO: 2243; WAN024DUW; Start 891; Stop 915
tggtacaactgatacagactacaca

SEQ ID NO: 319450 - DNA, 25 bp, Artificial
  probe
  misc_feature (1)..(25): SEQ ID NO: 2243; WAN024DUW; Start 482; Stop 506
taggaggtggagtgtatcttgactt

SEQ ID NO: 319451 - DNA, 25 bp, Artificial
  probe
  misc_feature (1)..(25): SEQ ID NO: 2243; WAN024DUW; Start 1122; Stop 1146
gattgcgactgttgaatcttatctc

SEQ ID NO: 319452 - DNA, 25 bp, Artificial
  probe
  misc_feature (1)..(25): SEQ ID NO: 2243; WAN024DUW; Start 1120; Stop 1144
ttgattgcgactgttgaatcttatc

SEQ ID NO: 319453 - DNA, 25 bp, Artificial
  probe
  misc_feature (1)..(25): SEQ ID NO: 2243; WAN024DUW; Start 1119; Stop 1143
cttgattgcgactgttgaatcttat

SEQ ID NO: 319454 - DNA, 25 bp, Artificial
  probe
  misc_feature (1)..(25): SEQ ID NO: 2243; WAN024DUW; Start 1121; Stop 1145
tgattgcgactgttgaatcttatct

SEQ ID NO: 319455 - DNA, 25 bp, Artificial
  probe
  misc_feature (1)..(25): SEQ ID NO: 2243; WAN024DUW; Start 896; Stop 920
caactgatacagactacacaggtga

SEQ ID NO: 319456 - DNA, 25 bp, Artificial
  probe
  misc_feature (1)..(25): SEQ ID NO: 2243; WAN024DUW; Start 460; Stop 484
aacttgaagaaggaaggcttggtag

SEQ ID NO: 319457 - DNA, 25 bp, Artificial
  probe
  misc_feature (1)..(25): SEQ ID NO: 2243; WAN024DUW; Start 1118; Stop 1142
acttgattgcgactgttgaatctta

SEQ ID NO: 319458 - DNA, 25 bp, Artificial
  probe
  misc_feature (1)..(25): SEQ ID NO: 2243; WAN024DUW; Start 1068; Stop 1092
tgactataatggtggaaataacggt

SEQ ID NO: 319459 - DNA, 25 bp, Artificial
  probe
  misc_feature (1)..(25): SEQ ID NO: 2243; WAN024DUW; Start 1063; Stop 1087
gcctctgactataatggtggaaata

SEQ ID NO: 319460 - DNA, 25 bp, Artificial
  probe
  misc_feature (1)..(25): SEQ ID NO: 2243; WAN024DUW; Start 306; Stop 330
aatgctcttaccagtttacgatgaa

SEQ ID NO: 319461 - DNA, 25 bp, Artificial
  probe
  misc_feature (1)..(25): SEQ ID NO: 2244; WAN024GGV; Start 900; Stop 924
ctcttacatccgtgaacatcctatt

SEQ ID NO: 319462 - DNA, 25 bp, Artificial
  probe
  misc_feature (1)..(25): SEQ ID NO: 2244; WAN024GGV; Start 899; Stop 923
tctcttacatccgtgaacatcctat

SEQ ID NO: 319463 - DNA, 25 bp, Artificial
  probe
  misc_feature (1)..(25): SEQ ID NO: 2244; WAN024GGV; Start 898; Stop 922
atctcttacatccgtgaacatccta

SEQ ID NO: 319464 - DNA, 25 bp, Artificial
  probe
  misc_feature (1)..(25): SEQ ID NO: 2244; WAN024GGV; Start 897; Stop 921
catctcttacatccgtgaacatcct

SEQ ID NO: 319465 - DNA, 25 bp, Artificial
  probe
  misc_feature (1)..(25): SEQ ID NO: 2244; WAN024GGV; Start 896; Stop 920
tcatctcttacatccgtgaacatcc

SEQ ID NO: 319466 - DNA, 25 bp, Artificial
  probe
  misc_feature (1)..(25): SEQ ID NO: 2244; WAN024GGV; Start 901; Stop 925
tcttacatccgtgaacatcctattt

SEQ ID NO: 319467 - DNA, 25 bp, Artificial
  probe
  misc_feature (1)..(25): SEQ ID NO: 2244; WAN024GGV; Start 301; Stop 325
aatcttgccatctatatctttgcca

SEQ ID NO: 319468 - DNA, 25 bp, Artificial
  probe
  misc_feature (1)..(25): SEQ ID NO: 2244; WAN024GGV; Start 1022; Stop 1046
ttgaactccatctaatcgacagtac

SEQ ID NO: 319469 - DNA, 25 bp, Artificial
  probe
  misc_feature (1)..(25): SEQ ID NO: 2244; WAN024GGV; Start 442; Stop 466
ggcaatcgtctccttacatttaatc

SEQ ID NO: 319470 - DNA, 25 bp, Artificial
  probe
  misc_feature (1)..(25): SEQ ID NO: 2244; WAN024GGV; Start 568; Stop 592
attacccatctcaaacgcttaaatc

SEQ ID NO: 319471 - DNA, 25 bp, Artificial
  probe
  misc_feature (1)..(25): SEQ ID NO: 2244; WAN024GGV; Start 346; Stop 370
ttaggcaaatacatccaatacgaag

SEQ ID NO: 319472 - DNA, 25 bp, Artificial
  probe
  misc_feature (1)..(25): SEQ ID NO: 2244; WAN024GGV; Start 302; Stop 326
atcttgccatctatatctttgccag

SEQ ID NO: 319473 - DNA, 25 bp, Artificial
  probe
  misc_feature (1)..(25): SEQ ID NO: 2244; WAN024GGV; Start 566; Stop 590
aaattacccatctcaaacgcttaaa

SEQ ID NO: 319474 - DNA, 25 bp, Artificial
  probe
  misc_feature (1)..(25): SEQ ID NO: 2244; WAN024GGV; Start 443; Stop 467
gcaatcgtctccttacatttaatct

SEQ ID NO: 319475 - DNA, 25 bp, Artificial
  probe
  misc_feature (1)..(25): SEQ ID NO: 2244; WAN024GGV; Start 567; Stop 591
aattacccatctcaaacgcttaaat

SEQ ID NO: 319476 - DNA, 25 bp, Artificial
  probe
  misc_feature (1)..(25): SEQ ID NO: 2244; WAN024GGV; Start 705; Stop 729
ttctatctcaggaggtcatggtcaa

SEQ ID NO: 319477 - DNA, 25 bp, Artificial
  probe
  misc_feature (1)..(25): SEQ ID NO: 2244; WAN024GGV; Start 347; Stop 371
taggcaaatacatccaatacgaagc

SEQ ID NO: 319478 - DNA, 25 bp, Artificial
  probe
  misc_feature (1)..(25): SEQ ID NO: 2244; WAN024GGV; Start 345; Stop 369
tttaggcaaatacatccaatacgaa

SEQ ID NO: 319479 - DNA, 25 bp, Artificial
  probe
  misc_feature (1)..(25): SEQ ID NO: 2244; WAN024GGV; Start 441; Stop 465
gggcaatcgtctccttacatttaat

SEQ ID NO: 319480 - DNA, 25 bp, Artificial
  probe
  misc_feature (1)..(25): SEQ ID NO: 2244; WAN024GGV; Start 936; Stop 960
ggttcacttctactatagcttccgt

SEQ ID NO: 319481 - DNA, 25 bp, Artificial
  probe
  misc_feature (1)..(25): SEQ ID NO: 2244; WAN024GGV; Start 632; Stop 656
tcaactatcaatcaggacaatttgc

SEQ ID NO: 319482 - DNA, 25 bp, Artificial
  probe
  misc_feature (1)..(25): SEQ ID NO: 2244; WAN024GGV; Start 113; Stop 137
ctttaacaagcctatctctgacttt

SEQ ID NO: 319483 - DNA, 25 bp, Artificial
  probe
  misc_feature (1)..(25): SEQ ID NO: 2244; WAN024GGV; Start 633; Stop 657
caactatcaatcaggacaatttgcc

SEQ ID NO: 319484 - DNA, 25 bp, Artificial
  probe
  misc_feature (1)..(25): SEQ ID NO: 2244; WAN024GGV; Start 309; Stop 333
catctatatctttgccagcatcatc

SEQ ID NO: 319485 - DNA, 25 bp, Artificial
  probe
  misc_feature (1)..(25): SEQ ID NO: 2244; WAN024GGV; Start 310; Stop 334
atctatatctttgccagcatcatcc

SEQ ID NO: 319486 - DNA, 25 bp, Artificial
  probe
  misc_feature (1)..(25): SEQ ID NO: 2244; WAN024GGV; Start 433; Stop 457
atgataatgggcaatcgtctcctta

SEQ ID NO: 319487 - DNA, 25 bp, Artificial
  probe
  misc_feature (1)..(25): SEQ ID NO: 2244; WAN024GGV; Start 722; Stop 746
atggtcaaactctttactttactgt

SEQ ID NO: 319488 - DNA, 25 bp, Artificial
  probe
  misc_feature (1)..(25): SEQ ID NO: 2244; WAN024GGV; Start 312; Stop 336
ctatatctttgccagcatcatcctt

SEQ ID NO: 319489 - DNA, 25 bp, Artificial
  probe
  misc_feature (1)..(25): SEQ ID NO: 2244; WAN024GGV; Start 308; Stop 332
ccatctatatctttgccagcatcat

SEQ ID NO: 319490 - DNA, 25 bp, Artificial
  probe
  misc_feature (1)..(25): SEQ ID NO: 2244; WAN024GGV; Start 248; Stop 272
ataactttagtatgggcggtttgtg

SEQ ID NO: 319491 - DNA, 25 bp, Artificial
  probe
  misc_feature (1)..(25): SEQ ID NO: 2244; WAN024GGV; Start 717; Stop 741
aggtcatggtcaaactctttacttt

SEQ ID NO: 319492 - DNA, 25 bp, Artificial
  probe
  misc_feature (1)..(25): SEQ ID NO: 2244; WAN024GGV; Start 723; Stop 747
tggtcaaactctttactttactgtt

SEQ ID NO: 319493 - DNA, 25 bp, Artificial
  probe
  misc_feature (1)..(25): SEQ ID NO: 2244; WAN024GGV; Start 313; Stop 337
tatatctttgccagcatcatccttg

SEQ ID NO: 319494 - DNA, 25 bp, Artificial
  probe
  misc_feature (1)..(25): SEQ ID NO: 2245; WAN024DFZ; Start 611; Stop 635
ggctatcttacttagaacctgtgac

SEQ ID NO: 319495 - DNA, 25 bp, Artificial
  probe
  misc_feature (1)..(25): SEQ ID NO: 2245; WAN024DFZ; Start 612; Stop 636
gctatcttacttagaacctgtgaca

SEQ ID NO: 319496 - DNA, 25 bp, Artificial
  probe
  misc_feature (1)..(25): SEQ ID NO: 2245; WAN024DFZ; Start 224; Stop 248
agataatagaggatgctgagagtca

SEQ ID NO: 319497 - DNA, 25 bp, Artificial
  probe
  misc_feature (1)..(25): SEQ ID NO: 2245; WAN024DFZ; Start 225; Stop 249
gataatagaggatgctgagagtcat

SEQ ID NO: 319498 - DNA, 25 bp, Artificial
  probe
  misc_feature (1)..(25): SEQ ID NO: 2245; WAN024DFZ; Start 226; Stop 250
ataatagaggatgctgagagtcatt

SEQ ID NO: 319499 - DNA, 25 bp, Artificial
  probe
  misc_feature (1)..(25): SEQ ID NO: 2245; WAN024DFZ; Start 223; Stop 247
cagataatagaggatgctgagagtc

SEQ ID NO: 319500 - DNA, 25 bp, Artificial
  probe
  misc_feature (1)..(25): SEQ ID NO: 2245; WAN024DFZ; Start 614; Stop 638
tatcttacttagaacctgtgacaac

SEQ ID NO: 319501 - DNA, 25 bp, Artificial
  probe
  misc_feature (1)..(25): SEQ ID NO: 2245; WAN024DFZ; Start 613; Stop 637
ctatcttacttagaacctgtgacaa

SEQ ID NO: 319502 - DNA, 25 bp, Artificial
  probe
  misc_feature (1)..(25): SEQ ID NO: 2245; WAN024DFZ; Start 217; Stop 241
tctagtcagataatagaggatgctg

SEQ ID NO: 319503 - DNA, 25 bp, Artificial
  probe
  misc_feature (1)..(25): SEQ ID NO: 2245; WAN024DFZ; Start 708; Stop 732
tgttagttgtttggttgtttatggt

SEQ ID NO: 319504 - DNA, 25 bp, Artificial
  probe
  misc_feature (1)..(25): SEQ ID NO: 2245; WAN024DFZ; Start 707; Stop 731
ttgttagttgtttggttgtttatgg

SEQ ID NO: 319505 - DNA, 25 bp, Artificial
  probe
  misc_feature (1)..(25): SEQ ID NO: 2245; WAN024DFZ; Start 216; Stop 240
ttctagtcagataatagaggatgct

SEQ ID NO: 319506 - DNA, 25 bp, Artificial
  probe
  misc_feature (1)..(25): SEQ ID NO: 2245; WAN024DFZ; Start 10; Stop 34
ttcatttgtaatcttgtacgagtcg

SEQ ID NO: 319507 - DNA, 25 bp, Artificial
  probe
  misc_feature (1)..(25): SEQ ID NO: 2245; WAN024DFZ; Start 610; Stop 634
gggctatcttacttagaacctgtga

SEQ ID NO: 319508 - DNA, 25 bp, Artificial
  probe
  misc_feature (1)..(25): SEQ ID NO: 2245; WAN024DFZ; Start 227; Stop 251
taatagaggatgctgagagtcattt

SEQ ID NO: 319509 - DNA, 25 bp, Artificial
  probe
  misc_feature (1)..(25): SEQ ID NO: 2245; WAN024DFZ; Start 709; Stop 733
gttagttgtttggttgtttatggta

SEQ ID NO: 319510 - DNA, 25 bp, Artificial
  probe
  misc_feature (1)..(25): SEQ ID NO: 2245; WAN024DFZ; Start 608; Stop 632
tagggctatcttacttagaacctgt

SEQ ID NO: 319511 - DNA, 25 bp, Artificial
  probe
  misc_feature (1)..(25): SEQ ID NO: 2245; WAN024DFZ; Start 204; Stop 228
tacactgccctattctagtcagata

SEQ ID NO: 319512 - DNA, 25 bp, Artificial
  probe
  misc_feature (1)..(25): SEQ ID NO: 2245; WAN024DFZ; Start 205; Stop 229
acactgccctattctagtcagataa

SEQ ID NO: 319513 - DNA, 25 bp, Artificial
  probe
  misc_feature (1)..(25): SEQ ID NO: 2245; WAN024DFZ; Start 206; Stop 230
cactgccctattctagtcagataat

SEQ ID NO: 319514 - DNA, 25 bp, Artificial
  probe
  misc_feature (1)..(25): SEQ ID NO: 2245; WAN024DFZ; Start 215; Stop 239
attctagtcagataatagaggatgc

SEQ ID NO: 319515 - DNA, 25 bp, Artificial
  probe
  misc_feature (1)..(25): SEQ ID NO: 2245; WAN024DFZ; Start 712; Stop 736
agttgtttggttgtttatggtacat

SEQ ID NO: 319516 - DNA, 25 bp, Artificial
  probe
  misc_feature (1)..(25): SEQ ID NO: 2245; WAN024DFZ; Start 607; Stop 631
ttagggctatcttacttagaacctg

SEQ ID NO: 319517 - DNA, 25 bp, Artificial
  probe
  misc_feature (1)..(25): SEQ ID NO: 2245; WAN024DFZ; Start 710; Stop 734
ttagttgtttggttgtttatggtac

SEQ ID NO: 319518 - DNA, 25 bp, Artificial
  probe
  misc_feature (1)..(25): SEQ ID NO: 2245; WAN024DFZ; Start 711; Stop 735
tagttgtttggttgtttatggtaca

SEQ ID NO: 319519 - DNA, 25 bp, Artificial
  probe
  misc_feature (1)..(25): SEQ ID NO: 2245; WAN024DFZ; Start 609; Stop 633
agggctatcttacttagaacctgtg

SEQ ID NO: 319520 - DNA, 25 bp, Artificial
  probe
  misc_feature (1)..(25): SEQ ID NO: 2245; WAN024DFZ; Start 713; Stop 737
gttgtttggttgtttatggtacatt

SEQ ID NO: 319521 - DNA, 25 bp, Artificial
  probe
  misc_feature (1)..(25): SEQ ID NO: 2245; WAN024DFZ; Start 203; Stop 227
gtacactgccctattctagtcagat

SEQ ID NO: 319522 - DNA, 25 bp, Artificial
  probe
  misc_feature (1)..(25): SEQ ID NO: 2245; WAN024DFZ; Start 606; Stop 630
tttagggctatcttacttagaacct

SEQ ID NO: 319523 - DNA, 25 bp, Artificial
  probe
  misc_feature (1)..(25): SEQ ID NO: 2245; WAN024DFZ; Start 182; Stop 206
gcctagtagctgcacttatctgtac

SEQ ID NO: 319524 - DNA, 25 bp, Artificial
  probe
  misc_feature (1)..(25): SEQ ID NO: 2245; WAN024DFZ; Start 706; Stop 730
tttgttagttgtttggttgtttatg

SEQ ID NO: 319525 - DNA, 25 bp, Artificial
  probe
  misc_feature (1)..(25): SEQ ID NO: 2245; WAN024DFZ; Start 9; Stop 33
tttcatttgtaatcttgtacgagtc

SEQ ID NO: 319526 - DNA, 25 bp, Artificial
  probe
  misc_feature (1)..(25): SEQ ID NO: 2245; WAN024DFZ; Start 177; Stop 201
gattagcctagtagctgcacttatc

SEQ ID NO: 319527 - DNA, 25 bp, Artificial
  probe
  misc_feature (1)..(25): SEQ ID NO: 2247; WAN024DKL; Start 505; Stop 529
attgacaattctctacttgaagcag

SEQ ID NO: 319528 - DNA, 25 bp, Artificial
  probe
  misc_feature (1)..(25): SEQ ID NO: 2247; WAN024DKL; Start 506; Stop 530
ttgacaattctctacttgaagcagc

SEQ ID NO: 319529 - DNA, 25 bp, Artificial
  probe
  misc_feature (1)..(25): SEQ ID NO: 2247; WAN024DKL; Start 295; Stop 319
ttgattatcattgcttccatgtcag

SEQ ID NO: 319530 - DNA, 25 bp, Artificial
  probe
  misc_feature (1)..(25): SEQ ID NO: 2247; WAN024DKL; Start 294; Stop 318
attgattatcattgcttccatgtca

SEQ ID NO: 319531 - DNA, 25 bp, Artificial
  probe
  misc_feature (1)..(25): SEQ ID NO: 2247; WAN024DKL; Start 504; Stop 528
tattgacaattctctacttgaagca

SEQ ID NO: 319532 - DNA, 25 bp, Artificial
  probe
  misc_feature (1)..(25): SEQ ID NO: 2247; WAN024DKL; Start 503; Stop 527
gtattgacaattctctacttgaagc

SEQ ID NO: 319533 - DNA, 25 bp, Artificial
  probe
  misc_feature (1)..(25): SEQ ID NO: 2247; WAN024DKL; Start 244; Stop 268
gcttatctcttctctatgtatgact

SEQ ID NO: 319534 - DNA, 25 bp, Artificial
  probe
  misc_feature (1)..(25): SEQ ID NO: 2247; WAN024DKL; Start 468; Stop 492
actggtatttctatatgttgctgga

SEQ ID NO: 319535 - DNA, 25 bp, Artificial
  probe
  misc_feature (1)..(25): SEQ ID NO: 2247; WAN024DKL; Start 467; Stop 491
cactggtatttctatatgttgctgg

SEQ ID NO: 319536 - DNA, 25 bp, Artificial
  probe
  misc_feature (1)..(25): SEQ ID NO: 2247; WAN024DKL; Start 488; Stop 512
ctggaacaatgaacagtattgacaa

SEQ ID NO: 319537 - DNA, 25 bp, Artificial
  probe
  misc_feature (1)..(25): SEQ ID NO: 2247; WAN024DKL; Start 456; Stop 480
gcaactattcccactggtatttcta

SEQ ID NO: 319538 - DNA, 25 bp, Artificial
  probe
  misc_feature (1)..(25): SEQ ID NO: 2247; WAN024DKL; Start 465; Stop 489
cccactggtatttctatatgttgct

SEQ ID NO: 319539 - DNA, 25 bp, Artificial
  probe
  misc_feature (1)..(25): SEQ ID NO: 2247; WAN024DKL; Start 464; Stop 488
tcccactggtatttctatatgttgc

SEQ ID NO: 319540 - DNA, 25 bp, Artificial
  probe
  misc_feature (1)..(25): SEQ ID NO: 2247; WAN024DKL; Start 466; Stop 490
ccactggtatttctatatgttgctg

SEQ ID NO: 319541 - DNA, 25 bp, Artificial
  probe
  misc_feature (1)..(25): SEQ ID NO: 2247; WAN024DKL; Start 489; Stop 513
tggaacaatgaacagtattgacaat

SEQ ID NO: 319542 - DNA, 25 bp, Artificial
  probe
  misc_feature (1)..(25): SEQ ID NO: 2247; WAN024DKL; Start 485; Stop 509
ttgctggaacaatgaacagtattga

SEQ ID NO: 319543 - DNA, 25 bp, Artificial
  probe
  misc_feature (1)..(25): SEQ ID NO: 2247; WAN024DKL; Start 484; Stop 508
gttgctggaacaatgaacagtattg

SEQ ID NO: 319544 - DNA, 25 bp, Artificial
  probe
  misc_feature (1)..(25): SEQ ID NO: 2247; WAN024DKL; Start 470; Stop 494
tggtatttctatatgttgctggaac

SEQ ID NO: 319545 - DNA, 25 bp, Artificial
  probe
  misc_feature (1)..(25): SEQ ID NO: 2247; WAN024DKL; Start 469; Stop 493
ctggtatttctatatgttgctggaa

SEQ ID NO: 319546 - DNA, 25 bp, Artificial
  probe
  misc_feature (1)..(25): SEQ ID NO: 2247; WAN024DKL; Start 293; Stop 317
tattgattatcattgcttccatgtc

SEQ ID NO: 319547 - DNA, 25 bp, Artificial
  probe
  misc_feature (1)..(25): SEQ ID NO: 2247; WAN024DKL; Start 490; Stop 514
ggaacaatgaacagtattgacaatt

SEQ ID NO: 319548 - DNA, 25 bp, Artificial
  probe
  misc_feature (1)..(25): SEQ ID NO: 2247; WAN024DKL; Start 507; Stop 531
tgacaattctctacttgaagcagct

SEQ ID NO: 319549 - DNA, 25 bp, Artificial
  probe
  misc_feature (1)..(25): SEQ ID NO: 2247; WAN024DKL; Start 496; Stop 520
atgaacagtattgacaattctctac

SEQ ID NO: 319550 - DNA, 25 bp, Artificial
  probe
  misc_feature (1)..(25): SEQ ID NO: 2247; WAN024DKL; Start 487; Stop 511
gctggaacaatgaacagtattgaca

SEQ ID NO: 319551 - DNA, 25 bp, Artificial
  probe
  misc_feature (1)..(25): SEQ ID NO: 2247; WAN024DKL; Start 486; Stop 510
tgctggaacaatgaacagtattgac

SEQ ID NO: 319552 - DNA, 25 bp, Artificial
  probe
  misc_feature (1)..(25): SEQ ID NO: 2247; WAN024DKL; Start 463; Stop 487
ttcccactggtatttctatatgttg

SEQ ID NO: 319553 - DNA, 25 bp, Artificial
  probe
  misc_feature (1)..(25): SEQ ID NO: 2247; WAN024DKL; Start 500; Stop 524
acagtattgacaattctctacttga

SEQ ID NO: 319554 - DNA, 25 bp, Artificial
  probe
  misc_feature (1)..(25): SEQ ID NO: 2247; WAN024DKL; Start 497; Stop 521
tgaacagtattgacaattctctact

SEQ ID NO: 319555 - DNA, 25 bp, Artificial
  probe
  misc_feature (1)..(25): SEQ ID NO: 2247; WAN024DKL; Start 457; Stop 481
caactattcccactggtatttctat

SEQ ID NO: 319556 - DNA, 25 bp, Artificial
  probe
  misc_feature (1)..(25): SEQ ID NO: 2247; WAN024DKL; Start 243; Stop 267
agcttatctcttctctatgtatgac

SEQ ID NO: 319557 - DNA, 25 bp, Artificial
  probe
  misc_feature (1)..(25): SEQ ID NO: 2247; WAN024DKL; Start 493; Stop 517
acaatgaacagtattgacaattctc

SEQ ID NO: 319558 - DNA, 25 bp, Artificial
  probe
  misc_feature (1)..(25): SEQ ID NO: 2247; WAN024DKL; Start 296; Stop 320
tgattatcattgcttccatgtcagc

SEQ ID NO: 319559 - DNA, 25 bp, Artificial
  probe
  misc_feature (1)..(25): SEQ ID NO: 2247; WAN024DKL; Start 494; Stop 518
caatgaacagtattgacaattctct

SEQ ID NO: 319560 - DNA, 25 bp, Artificial
  probe
  misc_feature (1)..(25): SEQ ID NO: 2248; WAN024GLR; Start 706; Stop 730
caacttcctatgctcttctttatcg

SEQ ID NO: 319561 - DNA, 25 bp, Artificial
  probe
  misc_feature (1)..(25): SEQ ID NO: 2248; WAN024GLR; Start 298; Stop 322
aatatgagggaacaaacacaagact

SEQ ID NO: 319562 - DNA, 25 bp, Artificial
  probe
  misc_feature (1)..(25): SEQ ID NO: 2248; WAN024GLR; Start 299; Stop 323
atatgagggaacaaacacaagactt

SEQ ID NO: 319563 - DNA, 25 bp, Artificial
  probe
  misc_feature (1)..(25): SEQ ID NO: 2248; WAN024GLR; Start 703; Stop 727
gctcaacttcctatgctcttcttta

SEQ ID NO: 319564 - DNA, 25 bp, Artificial
  probe
  misc_feature (1)..(25): SEQ ID NO: 2248; WAN024GLR; Start 185; Stop 209
gctttactggctaccgagaatttat

SEQ ID NO: 319565 - DNA, 25 bp, Artificial
  probe
  misc_feature (1)..(25): SEQ ID NO: 2248; WAN024GLR; Start 697; Stop 721
atatccgctcaacttcctatgctct

SEQ ID NO: 319566 - DNA, 25 bp, Artificial
  probe
  misc_feature (1)..(25): SEQ ID NO: 2248; WAN024GLR; Start 186; Stop 210
ctttactggctaccgagaatttatt

SEQ ID NO: 319567 - DNA, 25 bp, Artificial
  probe
  misc_feature (1)..(25): SEQ ID NO: 2248; WAN024GLR; Start 705; Stop 729
tcaacttcctatgctcttctttatc

SEQ ID NO: 319568 - DNA, 25 bp, Artificial
  probe
  misc_feature (1)..(25): SEQ ID NO: 2248; WAN024GLR; Start 704; Stop 728
ctcaacttcctatgctcttctttat

SEQ ID NO: 319569 - DNA, 25 bp, Artificial
  probe
  misc_feature (1)..(25): SEQ ID NO: 2248; WAN024GLR; Start 187; Stop 211
tttactggctaccgagaatttattt

SEQ ID NO: 319570 - DNA, 25 bp, Artificial
  probe
  misc_feature (1)..(25): SEQ ID NO: 2248; WAN024GLR; Start 698; Stop 722
tatccgctcaacttcctatgctctt

SEQ ID NO: 319571 - DNA, 25 bp, Artificial
  probe
  misc_feature (1)..(25): SEQ ID NO: 2248; WAN024GLR; Start 538; Stop 562
ctttcaggctcaactccttctattt

SEQ ID NO: 319572 - DNA, 25 bp, Artificial
  probe
  misc_feature (1)..(25): SEQ ID NO: 2248; WAN024GLR; Start 306; Stop 330
ggaacaaacacaagacttgattgac

SEQ ID NO: 319573 - DNA, 25 bp, Artificial
  probe
  misc_feature (1)..(25): SEQ ID NO: 2248; WAN024GLR; Start 300; Stop 324
tatgagggaacaaacacaagacttg

SEQ ID NO: 319574 - DNA, 25 bp, Artificial
  probe
  misc_feature (1)..(25): SEQ ID NO: 2248; WAN024GLR; Start 707; Stop 731
aacttcctatgctcttctttatcga

SEQ ID NO: 319575 - DNA, 25 bp, Artificial
  probe
  misc_feature (1)..(25): SEQ ID NO: 2248; WAN024GLR; Start 307; Stop 331
gaacaaacacaagacttgattgacg

SEQ ID NO: 319576 - DNA, 25 bp, Artificial
  probe
  misc_feature (1)..(25): SEQ ID NO: 2248; WAN024GLR; Start 309; Stop 333
acaaacacaagacttgattgacgaa

SEQ ID NO: 319577 - DNA, 25 bp, Artificial
  probe
  misc_feature (1)..(25): SEQ ID NO: 2248; WAN024GLR; Start 308; Stop 332
aacaaacacaagacttgattgacga

SEQ ID NO: 319578 - DNA, 25 bp, Artificial
  probe
  misc_feature (1)..(25): SEQ ID NO: 2248; WAN024GLR; Start 303; Stop 327
gagggaacaaacacaagacttgatt

SEQ ID NO: 319579 - DNA, 25 bp, Artificial
  probe
  misc_feature (1)..(25): SEQ ID NO: 2248; WAN024GLR; Start 184; Stop 208
ggctttactggctaccgagaattta

SEQ ID NO: 319580 - DNA, 25 bp, Artificial
  probe
  misc_feature (1)..(25): SEQ ID NO: 2248; WAN024GLR; Start 537; Stop 561
actttcaggctcaactccttctatt

SEQ ID NO: 319581 - DNA, 25 bp, Artificial
  probe
  misc_feature (1)..(25): SEQ ID NO: 2248; WAN024GLR; Start 304; Stop 328
agggaacaaacacaagacttgattg

SEQ ID NO: 319582 - DNA, 25 bp, Artificial
  probe
  misc_feature (1)..(25): SEQ ID NO: 2248; WAN024GLR; Start 305; Stop 329
gggaacaaacacaagacttgattga

SEQ ID NO: 319583 - DNA, 25 bp, Artificial
  probe
  misc_feature (1)..(25): SEQ ID NO: 2248; WAN024GLR; Start 702; Stop 726
cgctcaacttcctatgctcttcttt

SEQ ID NO: 319584 - DNA, 25 bp, Artificial
  probe
  misc_feature (1)..(25): SEQ ID NO: 2248; WAN024GLR; Start 536; Stop 560
cactttcaggctcaactccttctat

SEQ ID NO: 319585 - DNA, 25 bp, Artificial
  probe
  misc_feature (1)..(25): SEQ ID NO: 2248; WAN024GLR; Start 302; Stop 326
tgagggaacaaacacaagacttgat

SEQ ID NO: 319586 - DNA, 25 bp, Artificial
  probe
  misc_feature (1)..(25): SEQ ID NO: 2248; WAN024GLR; Start 301; Stop 325
atgagggaacaaacacaagacttga

SEQ ID NO: 319587 - DNA, 25 bp, Artificial
  probe
  misc_feature (1)..(25): SEQ ID NO: 2248; WAN024GLR; Start 699; Stop 723
atccgctcaacttcctatgctcttc

SEQ ID NO: 319588 - DNA, 25 bp, Artificial
  probe
  misc_feature (1)..(25): SEQ ID NO: 2248; WAN024GLR; Start 701; Stop 725
ccgctcaacttcctatgctcttctt

SEQ ID NO: 319589 - DNA, 25 bp, Artificial
  probe
  misc_feature (1)..(25): SEQ ID NO: 2248; WAN024GLR; Start 193; Stop 217
ggctaccgagaatttattttccaat

SEQ ID NO: 319590 - DNA, 25 bp, Artificial
  probe
  misc_feature (1)..(25): SEQ ID NO: 2248; WAN024GLR; Start 190; Stop 214
actggctaccgagaatttattttcc

SEQ ID NO: 319591 - DNA, 25 bp, Artificial
  probe
  misc_feature (1)..(25): SEQ ID NO: 2248; WAN024GLR; Start 189; Stop 213
tactggctaccgagaatttattttc

SEQ ID NO: 319592 - DNA, 25 bp, Artificial
  probe
  misc_feature (1)..(25): SEQ ID NO: 2248; WAN024GLR; Start 188; Stop 212
ttactggctaccgagaatttatttt

SEQ ID NO: 319593 - DNA, 25 bp, Artificial
  probe
  misc_feature (1)..(25): SEQ ID NO: 2249; WAN024CVC; Start 288; Stop 312
cgtctcagaatatgccaatatgcta

SEQ ID NO: 319594 - DNA, 25 bp, Artificial
  probe
  misc_feature (1)..(25): SEQ ID NO: 2249; WAN024CVC; Start 289; Stop 313
gtctcagaatatgccaatatgctaa

SEQ ID NO: 319595 - DNA, 25 bp, Artificial
  probe
  misc_feature (1)..(25): SEQ ID NO: 2249; WAN024CVC; Start 105; Stop 129
attggtgtctcgttattattatcgt

SEQ ID NO: 319596 - DNA, 25 bp, Artificial
  probe
  misc_feature (1)..(25): SEQ ID NO: 2249; WAN024CVC; Start 104; Stop 128
cattggtgtctcgttattattatcg

SEQ ID NO: 319597 - DNA, 25 bp, Artificial
  probe
  misc_feature (1)..(25): SEQ ID NO: 2249; WAN024CVC; Start 106; Stop 130
ttggtgtctcgttattattatcgta

SEQ ID NO: 319598 - DNA, 25 bp, Artificial
  probe
  misc_feature (1)..(25): SEQ ID NO: 2249; WAN024CVC; Start 107; Stop 131
tggtgtctcgttattattatcgtat

SEQ ID NO: 319599 - DNA, 25 bp, Artificial
  probe
  misc_feature (1)..(25): SEQ ID NO: 2249; WAN024CVC; Start 102; Stop 126
tccattggtgtctcgttattattat

SEQ ID NO: 319600 - DNA, 25 bp, Artificial
  probe
  misc_feature (1)..(25): SEQ ID NO: 2249; WAN024CVC; Start 101; Stop 125
atccattggtgtctcgttattatta

SEQ ID NO: 319601 - DNA, 25 bp, Artificial
  probe
  misc_feature (1)..(25): SEQ ID NO: 2249; WAN024CVC; Start 100; Stop 124
tatccattggtgtctcgttattatt

SEQ ID NO: 319602 - DNA, 25 bp, Artificial
  probe
  misc_feature (1)..(25): SEQ ID NO: 2249; WAN024CVC; Start 103; Stop 127
ccattggtgtctcgttattattatc

SEQ ID NO: 319603 - DNA, 25 bp, Artificial
  probe
  misc_feature (1)..(25): SEQ ID NO: 2249; WAN024CVC; Start 99; Stop 123
atatccattggtgtctcgttattat

SEQ ID NO: 319604 - DNA, 25 bp, Artificial
  probe
  misc_feature (1)..(25): SEQ ID NO: 2249; WAN024CVC; Start 662; Stop 686
gtacaccgtatatgattaacagtca

SEQ ID NO: 319605 - DNA, 25 bp, Artificial
  probe
  misc_feature (1)..(25): SEQ ID NO: 2249; WAN024CVC; Start 177; Stop 201
gatggataaggcagaacttgaggag

SEQ ID NO: 319606 - DNA, 25 bp, Artificial
  probe
  misc_feature (1)..(25): SEQ ID NO: 2249; WAN024CVC; Start 295; Stop 319
gaatatgccaatatgctaaaggtcc

SEQ ID NO: 319607 - DNA, 25 bp, Artificial
  probe
  misc_feature (1)..(25): SEQ ID NO: 2249; WAN024CVC; Start 296; Stop 320
aatatgccaatatgctaaaggtcca

SEQ ID NO: 319608 - DNA, 25 bp, Artificial
  probe
  misc_feature (1)..(25): SEQ ID NO: 2249; WAN024CVC; Start 149; Stop 173
ttaaagagtttgatgagacggtttc

SEQ ID NO: 319609 - DNA, 25 bp, Artificial
  probe
  misc_feature (1)..(25): SEQ ID NO: 2249; WAN024CVC; Start 97; Stop 121
atatatccattggtgtctcgttatt

SEQ ID NO: 319610 - DNA, 25 bp, Artificial
  probe
  misc_feature (1)..(25): SEQ ID NO: 2249; WAN024CVC; Start 297; Stop 321
atatgccaatatgctaaaggtccat

SEQ ID NO: 319611 - DNA, 25 bp, Artificial
  probe
  misc_feature (1)..(25): SEQ ID NO: 2249; WAN024CVC; Start 150; Stop 174
taaagagtttgatgagacggtttcc

SEQ ID NO: 319612 - DNA, 25 bp, Artificial
  probe
  misc_feature (1)..(25): SEQ ID NO: 2249; WAN024CVC; Start 293; Stop 317
cagaatatgccaatatgctaaaggt

SEQ ID NO: 319613 - DNA, 25 bp, Artificial
  probe
  misc_feature (1)..(25): SEQ ID NO: 2249; WAN024CVC; Start 232; Stop 256
accttgaaaccatctgaaattcttg

SEQ ID NO: 319614 - DNA, 25 bp, Artificial
  probe
  misc_feature (1)..(25): SEQ ID NO: 2249; WAN024CVC; Start 233; Stop 257
ccttgaaaccatctgaaattcttga

SEQ ID NO: 319615 - DNA, 25 bp, Artificial
  probe
  misc_feature (1)..(25): SEQ ID NO: 2249; WAN024CVC; Start 231; Stop 255
gaccttgaaaccatctgaaattctt

SEQ ID NO: 319616 - DNA, 25 bp, Artificial
  probe
  misc_feature (1)..(25): SEQ ID NO: 2249; WAN024CVC; Start 176; Stop 200
agatggataaggcagaacttgagga

SEQ ID NO: 319617 - DNA, 25 bp, Artificial
  probe
  misc_feature (1)..(25): SEQ ID NO: 2249; WAN024CVC; Start 175; Stop 199
cagatggataaggcagaacttgagg

SEQ ID NO: 319618 - DNA, 25 bp, Artificial
  probe
  misc_feature (1)..(25): SEQ ID NO: 2249; WAN024CVC; Start 294; Stop 318
agaatatgccaatatgctaaaggtc

SEQ ID NO: 319619 - DNA, 25 bp, Artificial
  probe
  misc_feature (1)..(25): SEQ ID NO: 2249; WAN024CVC; Start 292; Stop 316
tcagaatatgccaatatgctaaagg

SEQ ID NO: 319620 - DNA, 25 bp, Artificial
  probe
  misc_feature (1)..(25): SEQ ID NO: 2249; WAN024CVC; Start 148; Stop 172
attaaagagtttgatgagacggttt

SEQ ID NO: 319621 - DNA, 25 bp, Artificial
  probe
  misc_feature (1)..(25): SEQ ID NO: 2249; WAN024CVC; Start 98; Stop 122
tatatccattggtgtctcgttatta

SEQ ID NO: 319622 - DNA, 25 bp, Artificial
  probe
  misc_feature (1)..(25): SEQ ID NO: 2249; WAN024CVC; Start 174; Stop 198
ccagatggataaggcagaacttgag

SEQ ID NO: 319623 - DNA, 25 bp, Artificial
  probe
  misc_feature (1)..(25): SEQ ID NO: 2249; WAN024CVC; Start 133; Stop 157
gagtcaaacgaggttattaaagagt

SEQ ID NO: 319624 - DNA, 25 bp, Artificial
  probe
  misc_feature (1)..(25): SEQ ID NO: 2249; WAN024CVC; Start 132; Stop 156
tgagtcaaacgaggttattaaagag

SEQ ID NO: 319625 - DNA, 25 bp, Artificial
  probe
  misc_feature (1)..(25): SEQ ID NO: 2249; WAN024CVC; Start 108; Stop 132
ggtgtctcgttattattatcgtatt

SEQ ID NO: 319626 - DNA, 25 bp, Artificial
  probe
  misc_feature (1)..(25): SEQ ID NO: 2250; WAN024D83; Start 270; Stop 294
ttatgatgtgcttgtagattgcttg

SEQ ID NO: 319627 - DNA, 25 bp, Artificial
  probe
  misc_feature (1)..(25): SEQ ID NO: 2250; WAN024D83; Start 271; Stop 295
tatgatgtgcttgtagattgcttga

SEQ ID NO: 319628 - DNA, 25 bp, Artificial
  probe
  misc_feature (1)..(25): SEQ ID NO: 2250; WAN024D83; Start 272; Stop 296
atgatgtgcttgtagattgcttgaa

SEQ ID NO: 319629 - DNA, 25 bp, Artificial
  probe
  misc_feature (1)..(25): SEQ ID NO: 2250; WAN024D83; Start 347; Stop 371
atcctctaactgatgaacagaagac

SEQ ID NO: 319630 - DNA, 25 bp, Artificial
  probe
  misc_feature (1)..(25): SEQ ID NO: 2250; WAN024D83; Start 349; Stop 373
cctctaactgatgaacagaagactc

SEQ ID NO: 319631 - DNA, 25 bp, Artificial
  probe
  misc_feature (1)..(25): SEQ ID NO: 2250; WAN024D83; Start 273; Stop 297
tgatgtgcttgtagattgcttgaac

SEQ ID NO: 319632 - DNA, 25 bp, Artificial
  probe
  misc_feature (1)..(25): SEQ ID NO: 2250; WAN024D83; Start 352; Stop 376
ctaactgatgaacagaagactcgtt

SEQ ID NO: 319633 - DNA, 25 bp, Artificial
  probe
  misc_feature (1)..(25): SEQ ID NO: 2250; WAN024D83; Start 348; Stop 372
tcctctaactgatgaacagaagact

SEQ ID NO: 319634 - DNA, 25 bp, Artificial
  probe
  misc_feature (1)..(25): SEQ ID NO: 2250; WAN024D83; Start 350; Stop 374
ctctaactgatgaacagaagactcg

SEQ ID NO: 319635 - DNA, 25 bp, Artificial
  probe
  misc_feature (1)..(25): SEQ ID NO: 2250; WAN024D83; Start 351; Stop 375
tctaactgatgaacagaagactcgt

SEQ ID NO: 319636 - DNA, 25 bp, Artificial
  probe
  misc_feature (1)..(25): SEQ ID NO: 2250; WAN024D83; Start 280; Stop 304
cttgtagattgcttgaaccgacttg

SEQ ID NO: 319637 - DNA, 25 bp, Artificial
  probe
  misc_feature (1)..(25): SEQ ID NO: 2250; WAN024D83; Start 274; Stop 298
gatgtgcttgtagattgcttgaacc

SEQ ID NO: 319638 - DNA, 25 bp, Artificial
  probe
  misc_feature (1)..(25): SEQ ID NO: 2250; WAN024D83; Start 282; Stop 306
tgtagattgcttgaaccgacttgaa

SEQ ID NO: 319639 - DNA, 25 bp, Artificial
  probe
  misc_feature (1)..(25): SEQ ID NO: 2250; WAN024D83; Start 281; Stop 305
ttgtagattgcttgaaccgacttga

SEQ ID NO: 319640 - DNA, 25 bp, Artificial
  probe
  misc_feature (1)..(25): SEQ ID NO: 2250; WAN024D83; Start 269; Stop 293
tttatgatgtgcttgtagattgctt

SEQ ID NO: 319641 - DNA, 25 bp, Artificial
  probe
  misc_feature (1)..(25): SEQ ID NO: 2250; WAN024D83; Start 398; Stop 422
aaatgtctctgaaagtaaggagtgt

SEQ ID NO: 319642 - DNA, 25 bp, Artificial
  probe
  misc_feature (1)..(25): SEQ ID NO: 2250; WAN024D83; Start 333; Stop 357
gattacgtctgctcatcctctaact

SEQ ID NO: 319643 - DNA, 25 bp, Artificial
  probe
  misc_feature (1)..(25): SEQ ID NO: 2250; WAN024D83; Start 401; Stop 425
tgtctctgaaagtaaggagtgtaaa

SEQ ID NO: 319644 - DNA, 25 bp, Artificial
  probe
  misc_feature (1)..(25): SEQ ID NO: 2250; WAN024D83; Start 283; Stop 307
gtagattgcttgaaccgacttgaaa

SEQ ID NO: 319645 - DNA, 25 bp, Artificial
  probe
  misc_feature (1)..(25): SEQ ID NO: 2250; WAN024D83; Start 334; Stop 358
attacgtctgctcatcctctaactg

SEQ ID NO: 319646 - DNA, 25 bp, Artificial
  probe
  misc_feature (1)..(25): SEQ ID NO: 2250; WAN024D83; Start 400; Stop 424
atgtctctgaaagtaaggagtgtaa

SEQ ID NO: 319647 - DNA, 25 bp, Artificial
  probe
  misc_feature (1)..(25): SEQ ID NO: 2250; WAN024D83; Start 399; Stop 423
aatgtctctgaaagtaaggagtgta

SEQ ID NO: 319648 - DNA, 25 bp, Artificial
  probe
  misc_feature (1)..(25): SEQ ID NO: 2250; WAN024D83; Start 353; Stop 377
taactgatgaacagaagactcgttt

SEQ ID NO: 319649 - DNA, 25 bp, Artificial
  probe
  misc_feature (1)..(25): SEQ ID NO: 2250; WAN024D83; Start 244; Stop 268
gcctacaatcacagagcaaatcttt

SEQ ID NO: 319650 - DNA, 25 bp, Artificial
  probe
  misc_feature (1)..(25): SEQ ID NO: 2250; WAN024D83; Start 346; Stop 370
catcctctaactgatgaacagaaga

SEQ ID NO: 319651 - DNA, 25 bp, Artificial
  probe
  misc_feature (1)..(25): SEQ ID NO: 2250; WAN024D83; Start 354; Stop 378
aactgatgaacagaagactcgtttg

SEQ ID NO: 319652 - DNA, 25 bp, Artificial
  probe
  misc_feature (1)..(25): SEQ ID NO: 2250; WAN024D83; Start 279; Stop 303
gcttgtagattgcttgaaccgactt

SEQ ID NO: 319653 - DNA, 25 bp, Artificial
  probe
  misc_feature (1)..(25): SEQ ID NO: 2250; WAN024D83; Start 332; Stop 356
cgattacgtctgctcatcctctaac

SEQ ID NO: 319654 - DNA, 25 bp, Artificial
  probe
  misc_feature (1)..(25): SEQ ID NO: 2250; WAN024D83; Start 275; Stop 299
atgtgcttgtagattgcttgaaccg

SEQ ID NO: 319655 - DNA, 25 bp, Artificial
  probe
  misc_feature (1)..(25): SEQ ID NO: 2250; WAN024D83; Start 336; Stop 360
tacgtctgctcatcctctaactgat

SEQ ID NO: 319656 - DNA, 25 bp, Artificial
  probe
  misc_feature (1)..(25): SEQ ID NO: 2250; WAN024D83; Start 335; Stop 359
ttacgtctgctcatcctctaactga

SEQ ID NO: 319657 - DNA, 25 bp, Artificial
  probe
  misc_feature (1)..(25): SEQ ID NO: 2250; WAN024D83; Start 486; Stop 510
tgatgtgagtattaaacaacaactt

SEQ ID NO: 319658 - DNA, 25 bp, Artificial
  probe
  misc_feature (1)..(25): SEQ ID NO: 2250; WAN024D83; Start 485; Stop 509
ttgatgtgagtattaaacaacaact

SEQ ID NO: 319659 - DNA, 25 bp, Artificial
  probe
  misc_feature (1)..(25): SEQ ID NO: 2251; WAN024FCJ; Start 132; Stop 156
agaggataatcagaacagtaatagc

SEQ ID NO: 319660 - DNA, 25 bp, Artificial
  probe
  misc_feature (1)..(25): SEQ ID NO: 2251; WAN024FCJ; Start 129; Stop 153
tcaagaggataatcagaacagtaat

SEQ ID NO: 319661 - DNA, 25 bp, Artificial
  probe
  misc_feature (1)..(25): SEQ ID NO: 2251; WAN024FCJ; Start 127; Stop 151
gatcaagaggataatcagaacagta

SEQ ID NO: 319662 - DNA, 25 bp, Artificial
  probe
  misc_feature (1)..(25): SEQ ID NO: 2251; WAN024FCJ; Start 128; Stop 152
atcaagaggataatcagaacagtaa

SEQ ID NO: 319663 - DNA, 25 bp, Artificial
  probe
  misc_feature (1)..(25): SEQ ID NO: 2251; WAN024FCJ; Start 196; Stop 220
atttcccatatttccaatagcgaca

SEQ ID NO: 319664 - DNA, 25 bp, Artificial
  probe
  misc_feature (1)..(25): SEQ ID NO: 2251; WAN024FCJ; Start 135; Stop 159
ggataatcagaacagtaatagctgc

SEQ ID NO: 319665 - DNA, 25 bp, Artificial
  probe
  misc_feature (1)..(25): SEQ ID NO: 2251; WAN024FCJ; Start 195; Stop 219
tatttcccatatttccaatagcgac

SEQ ID NO: 319666 - DNA, 25 bp, Artificial
  probe
  misc_feature (1)..(25): SEQ ID NO: 2251; WAN024FCJ; Start 197; Stop 221
tttcccatatttccaatagcgacag

SEQ ID NO: 319667 - DNA, 25 bp, Artificial
  probe
  misc_feature (1)..(25): SEQ ID NO: 2251; WAN024FCJ; Start 133; Stop 157
gaggataatcagaacagtaatagct

SEQ ID NO: 319668 - DNA, 25 bp, Artificial
  probe
  misc_feature (1)..(25): SEQ ID NO: 2251; WAN024FCJ; Start 194; Stop 218
ttatttcccatatttccaatagcga

SEQ ID NO: 319669 - DNA, 25 bp, Artificial
  probe
  misc_feature (1)..(25): SEQ ID NO: 2251; WAN024FCJ; Start 193; Stop 217
gttatttcccatatttccaatagcg

SEQ ID NO: 319670 - DNA, 25 bp, Artificial
  probe
  misc_feature (1)..(25): SEQ ID NO: 2251; WAN024FCJ; Start 192; Stop 216
cgttatttcccatatttccaatagc

SEQ ID NO: 319671 - DNA, 25 bp, Artificial
  probe
  misc_feature (1)..(25): SEQ ID NO: 2251; WAN024FCJ; Start 138; Stop 162
taatcagaacagtaatagctgcaag

SEQ ID NO: 319672 - DNA, 25 bp, Artificial
  probe
  misc_feature (1)..(25): SEQ ID NO: 2251; WAN024FCJ; Start 136; Stop 160
gataatcagaacagtaatagctgca

SEQ ID NO: 319673 - DNA, 25 bp, Artificial
  probe
  misc_feature (1)..(25): SEQ ID NO: 2251; WAN024FCJ; Start 134; Stop 158
aggataatcagaacagtaatagctg

SEQ ID NO: 319674 - DNA, 25 bp, Artificial
  probe
  misc_feature (1)..(25): SEQ ID NO: 2251; WAN024FCJ; Start 137; Stop 161
ataatcagaacagtaatagctgcaa

SEQ ID NO: 319675 - DNA, 25 bp, Artificial
  probe
  misc_feature (1)..(25): SEQ ID NO: 2251; WAN024FCJ; Start 63; Stop 87
cagttccaacaaccagaccaatcaa

SEQ ID NO: 319676 - DNA, 25 bp, Artificial
  probe
  misc_feature (1)..(25): SEQ ID NO: 2251; WAN024FCJ; Start 93; Stop 117
agatagacttgataaatcctttggt

SEQ ID NO: 319677 - DNA, 25 bp, Artificial
  probe
  misc_feature (1)..(25): SEQ ID NO: 2251; WAN024FCJ; Start 198; Stop 222
ttcccatatttccaatagcgacagg

SEQ ID NO: 319678 - DNA, 25 bp, Artificial
  probe
  misc_feature (1)..(25): SEQ ID NO: 2251; WAN024FCJ; Start 130; Stop 154
caagaggataatcagaacagtaata

SEQ ID NO: 319679 - DNA, 25 bp, Artificial
  probe
  misc_feature (1)..(25): SEQ ID NO: 2251; WAN024FCJ; Start 202; Stop 226
catatttccaatagcgacagggatc

SEQ ID NO: 319680 - DNA, 25 bp, Artificial
  probe
  misc_feature (1)..(25): SEQ ID NO: 2251; WAN024FCJ; Start 210; Stop 234
caatagcgacagggatcaaggttaa

SEQ ID NO: 319681 - DNA, 25 bp, Artificial
  probe
  misc_feature (1)..(25): SEQ ID NO: 2251; WAN024FCJ; Start 92; Stop 116
gagatagacttgataaatcctttgg

SEQ ID NO: 319682 - DNA, 25 bp, Artificial
  probe
  misc_feature (1)..(25): SEQ ID NO: 2251; WAN024FCJ; Start 203; Stop 227
atatttccaatagcgacagggatca

SEQ ID NO: 319683 - DNA, 25 bp, Artificial
  probe
  misc_feature (1)..(25): SEQ ID NO: 2251; WAN024FCJ; Start 139; Stop 163
aatcagaacagtaatagctgcaagc

SEQ ID NO: 319684 - DNA, 25 bp, Artificial
  probe
  misc_feature (1)..(25): SEQ ID NO: 2251; WAN024FCJ; Start 64; Stop 88
agttccaacaaccagaccaatcaaa

SEQ ID NO: 319685 - DNA, 25 bp, Artificial
  probe
  misc_feature (1)..(25): SEQ ID NO: 2251; WAN024FCJ; Start 204; Stop 228
tatttccaatagcgacagggatcaa

SEQ ID NO: 319686 - DNA, 25 bp, Artificial
  probe
  misc_feature (1)..(25): SEQ ID NO: 2251; WAN024FCJ; Start 71; Stop 95
acaaccagaccaatcaaaatagaga

SEQ ID NO: 319687 - DNA, 25 bp, Artificial
  probe
  misc_feature (1)..(25): SEQ ID NO: 2251; WAN024FCJ; Start 69; Stop 93
caacaaccagaccaatcaaaataga

SEQ ID NO: 319688 - DNA, 25 bp, Artificial
  probe
  misc_feature (1)..(25): SEQ ID NO: 2251; WAN024FCJ; Start 70; Stop 94
aacaaccagaccaatcaaaatagag

SEQ ID NO: 319689 - DNA, 25 bp, Artificial
  probe
  misc_feature (1)..(25): SEQ ID NO: 2251; WAN024FCJ; Start 68; Stop 92
ccaacaaccagaccaatcaaaatag

SEQ ID NO: 319690 - DNA, 25 bp, Artificial
  probe
  misc_feature (1)..(25): SEQ ID NO: 2251; WAN024FCJ; Start 131; Stop 155
aagaggataatcagaacagtaatag

SEQ ID NO: 319691 - DNA, 25 bp, Artificial
  probe
  misc_feature (1)..(25): SEQ ID NO: 2251; WAN024FCJ; Start 67; Stop 91
tccaacaaccagaccaatcaaaata

SEQ ID NO: 319692 - DNA, 25 bp, Artificial
  probe
  misc_feature (1)..(25): SEQ ID NO: 2252; WAN0249MO; Start 74; Stop 98
gtggataatgataatgaacaaggtg

SEQ ID NO: 319693 - DNA, 25 bp, Artificial
  probe
  misc_feature (1)..(25): SEQ ID NO: 2252; WAN0249MO; Start 73; Stop 97
agtggataatgataatgaacaaggt

SEQ ID NO: 319694 - DNA, 25 bp, Artificial
  probe
  misc_feature (1)..(25): SEQ ID NO: 2252; WAN0249MO; Start 75; Stop 99
tggataatgataatgaacaaggtgt

SEQ ID NO: 319695 - DNA, 25 bp, Artificial
  probe
  misc_feature (1)..(25): SEQ ID NO: 2252; WAN0249MO; Start 47; Stop 71
ttgcttctatcctttctttgagttt

SEQ ID NO: 319696 - DNA, 25 bp, Artificial
  probe
  misc_feature (1)..(25): SEQ ID NO: 2252; WAN0249MO; Start 46; Stop 70
tttgcttctatcctttctttgagtt

SEQ ID NO: 319697 - DNA, 25 bp, Artificial
  probe
  misc_feature (1)..(25): SEQ ID NO: 2252; WAN0249MO; Start 72; Stop 96
tagtggataatgataatgaacaagg

SEQ ID NO: 319698 - DNA, 25 bp, Artificial
  probe
  misc_feature (1)..(25): SEQ ID NO: 2252; WAN0249MO; Start 43; Stop 67
cgttttgcttctatcctttctttga

SEQ ID NO: 319699 - DNA, 25 bp, Artificial
  probe
  misc_feature (1)..(25): SEQ ID NO: 2252; WAN0249MO; Start 7; Stop 31
acttaaggcaaattgttcagaactg

SEQ ID NO: 319700 - DNA, 25 bp, Artificial
  probe
  misc_feature (1)..(25): SEQ ID NO: 2252; WAN0249MO; Start 6; Stop 30
cacttaaggcaaattgttcagaact

SEQ ID NO: 319701 - DNA, 25 bp, Artificial
  probe
  misc_feature (1)..(25): SEQ ID NO: 2252; WAN0249MO; Start 8; Stop 32
cttaaggcaaattgttcagaactga

SEQ ID NO: 319702 - DNA, 25 bp, Artificial
  probe
  misc_feature (1)..(25): SEQ ID NO: 2252; WAN0249MO; Start 48; Stop 72
tgcttctatcctttctttgagtttt

SEQ ID NO: 319703 - DNA, 25 bp, Artificial
  probe
  misc_feature (1)..(25): SEQ ID NO: 2252; WAN0249MO; Start 45; Stop 69
ttttgcttctatcctttctttgagt

SEQ ID NO: 319704 - DNA, 25 bp, Artificial
  probe
  misc_feature (1)..(25): SEQ ID NO: 2252; WAN0249MO; Start 44; Stop 68
gttttgcttctatcctttctttgag

SEQ ID NO: 319705 - DNA, 25 bp, Artificial
  probe
  misc_feature (1)..(25): SEQ ID NO: 2252; WAN0249MO; Start 4; Stop 28
gacacttaaggcaaattgttcagaa

SEQ ID NO: 319706 - DNA, 25 bp, Artificial
  probe
  misc_feature (1)..(25): SEQ ID NO: 2252; WAN0249MO; Start 5; Stop 29
acacttaaggcaaattgttcagaac

SEQ ID NO: 319707 - DNA, 25 bp, Artificial
  probe
  misc_feature (1)..(25): SEQ ID NO: 2252; WAN0249MO; Start 76; Stop 100
ggataatgataatgaacaaggtgtt

SEQ ID NO: 319708 - DNA, 25 bp, Artificial
  probe
  misc_feature (1)..(25): SEQ ID NO: 2252; WAN0249MO; Start 1; Stop 25
atggacacttaaggcaaattgttca

SEQ ID NO: 319709 - DNA, 25 bp, Artificial
  probe
  misc_feature (1)..(25): SEQ ID NO: 2252; WAN0249MO; Start 3; Stop 27
ggacacttaaggcaaattgttcaga

SEQ ID NO: 319710 - DNA, 25 bp, Artificial
  probe
  misc_feature (1)..(25): SEQ ID NO: 2252; WAN0249MO; Start 2; Stop 26
tggacacttaaggcaaattgttcag

SEQ ID NO: 319711 - DNA, 25 bp, Artificial
  probe
  misc_feature (1)..(25): SEQ ID NO: 2252; WAN0249MO; Start 53; Stop 77
ctatcctttctttgagttttagtgg

SEQ ID NO: 319712 - DNA, 25 bp, Artificial
  probe
  misc_feature (1)..(25): SEQ ID NO: 2252; WAN0249MO; Start 49; Stop 73
gcttctatcctttctttgagtttta

SEQ ID NO: 319713 - DNA, 25 bp, Artificial
  probe
  misc_feature (1)..(25): SEQ ID NO: 2252; WAN0249MO; Start 9; Stop 33
ttaaggcaaattgttcagaactgaa

SEQ ID NO: 319714 - DNA, 25 bp, Artificial
  probe
  misc_feature (1)..(25): SEQ ID NO: 2252; WAN0249MO; Start 12; Stop 36
aggcaaattgttcagaactgaataa

SEQ ID NO: 319715 - DNA, 25 bp, Artificial
  probe
  misc_feature (1)..(25): SEQ ID NO: 2252; WAN0249MO; Start 11; Stop 35
aaggcaaattgttcagaactgaata

SEQ ID NO: 319716 - DNA, 25 bp, Artificial
  probe
  misc_feature (1)..(25): SEQ ID NO: 2252; WAN0249MO; Start 10; Stop 34
taaggcaaattgttcagaactgaat

SEQ ID NO: 319717 - DNA, 25 bp, Artificial
  probe
  misc_feature (1)..(25): SEQ ID NO: 2252; WAN0249MO; Start 41; Stop 65
gacgttttgcttctatcctttcttt

SEQ ID NO: 319718 - DNA, 25 bp, Artificial
  probe
  misc_feature (1)..(25): SEQ ID NO: 2252; WAN0249MO; Start 42; Stop 66
acgttttgcttctatcctttctttg

SEQ ID NO: 319719 - DNA, 25 bp, Artificial
  probe
  misc_feature (1)..(25): SEQ ID NO: 2252; WAN0249MO; Start 57; Stop 81
cctttctttgagttttagtggataa

SEQ ID NO: 319720 - DNA, 25 bp, Artificial
  probe
  misc_feature (1)..(25): SEQ ID NO: 2252; WAN0249MO; Start 40; Stop 64
tgacgttttgcttctatcctttctt

SEQ ID NO: 319721 - DNA, 25 bp, Artificial
  probe
  misc_feature (1)..(25): SEQ ID NO: 2252; WAN0249MO; Start 13; Stop 37
ggcaaattgttcagaactgaataaa

SEQ ID NO: 319722 - DNA, 25 bp, Artificial
  probe
  misc_feature (1)..(25): SEQ ID NO: 2252; WAN0249MO; Start 25; Stop 49
agaactgaataaagctgacgttttg

SEQ ID NO: 319723 - DNA, 25 bp, Artificial
  probe
  misc_feature (1)..(25): SEQ ID NO: 2252; WAN0249MO; Start 39; Stop 63
ctgacgttttgcttctatcctttct

SEQ ID NO: 319724 - DNA, 25 bp, Artificial
  probe
  misc_feature (1)..(25): SEQ ID NO: 2252; WAN0249MO; Start 17; Stop 41
aattgttcagaactgaataaagctg

SEQ ID NO: 319725 - DNA, 25 bp, Artificial
  probe
  misc_feature (1)..(25): SEQ ID NO: 2253; WAN024FSR; Start 58; Stop 82
gatattccagttagaccagtcaaga

SEQ ID NO: 319726 - DNA, 25 bp, Artificial
  probe
  misc_feature (1)..(25): SEQ ID NO: 2253; WAN024FSR; Start 59; Stop 83
atattccagttagaccagtcaagag

SEQ ID NO: 319727 - DNA, 25 bp, Artificial
  probe
  misc_feature (1)..(25): SEQ ID NO: 2253; WAN024FSR; Start 60; Stop 84
tattccagttagaccagtcaagagc

SEQ ID NO: 319728 - DNA, 25 bp, Artificial
  probe
  misc_feature (1)..(25): SEQ ID NO: 2253; WAN024FSR; Start 16; Stop 40
ttctgcttgacggaagatagagatg

SEQ ID NO: 319729 - DNA, 25 bp, Artificial
  probe
  misc_feature (1)..(25): SEQ ID NO: 2253; WAN024FSR; Start 57; Stop 81
ggatattccagttagaccagtcaag

SEQ ID NO: 319730 - DNA, 25 bp, Artificial
  probe
  misc_feature (1)..(25): SEQ ID NO: 2253; WAN024FSR; Start 186; Stop 210
gaataacaacatgaaccactgtctc

SEQ ID NO: 319731 - DNA, 25 bp, Artificial
  probe
  misc_feature (1)..(25): SEQ ID NO: 2253; WAN024FSR; Start 56; Stop 80
aggatattccagttagaccagtcaa

SEQ ID NO: 319732 - DNA, 25 bp, Artificial
  probe
  misc_feature (1)..(25): SEQ ID NO: 2253; WAN024FSR; Start 55; Stop 79
gaggatattccagttagaccagtca

SEQ ID NO: 319733 - DNA, 25 bp, Artificial
  probe
  misc_feature (1)..(25): SEQ ID NO: 2253; WAN024FSR; Start 54; Stop 78
tgaggatattccagttagaccagtc

SEQ ID NO: 319734 - DNA, 25 bp, Artificial
  probe
  misc_feature (1)..(25): SEQ ID NO: 2253; WAN024FSR; Start 53; Stop 77
ctgaggatattccagttagaccagt

SEQ ID NO: 319735 - DNA, 25 bp, Artificial
  probe
  misc_feature (1)..(25): SEQ ID NO: 2253; WAN024FSR; Start 187; Stop 211
aataacaacatgaaccactgtctcc

SEQ ID NO: 319736 - DNA, 25 bp, Artificial
  probe
  misc_feature (1)..(25): SEQ ID NO: 2253; WAN024FSR; Start 185; Stop 209
ggaataacaacatgaaccactgtct

SEQ ID NO: 319737 - DNA, 25 bp, Artificial
  probe
  misc_feature (1)..(25): SEQ ID NO: 2253; WAN024FSR; Start 265; Stop 289
tttcaaactatcctctacattacgc

SEQ ID NO: 319738 - DNA, 25 bp, Artificial
  probe
  misc_feature (1)..(25): SEQ ID NO: 2253; WAN024FSR; Start 43; Stop 67
gctagtcacactgaggatattccag

SEQ ID NO: 319739 - DNA, 25 bp, Artificial
  probe
  misc_feature (1)..(25): SEQ ID NO: 2253; WAN024FSR; Start 15; Stop 39
tttctgcttgacggaagatagagat

SEQ ID NO: 319740 - DNA, 25 bp, Artificial
  probe
  misc_feature (1)..(25): SEQ ID NO: 2253; WAN024FSR; Start 292; Stop 316
catctgaggcaagttaaagactgtc

SEQ ID NO: 319741 - DNA, 25 bp, Artificial
  probe
  misc_feature (1)..(25): SEQ ID NO: 2253; WAN024FSR; Start 261; Stop 285
cgtgtttcaaactatcctctacatt

SEQ ID NO: 319742 - DNA, 25 bp, Artificial
  probe
  misc_feature (1)..(25): SEQ ID NO: 2253; WAN024FSR; Start 295; Stop 319
ctgaggcaagttaaagactgtcaag

SEQ ID NO: 319743 - DNA, 25 bp, Artificial
  probe
  misc_feature (1)..(25): SEQ ID NO: 2253; WAN024FSR; Start 291; Stop 315
tcatctgaggcaagttaaagactgt

SEQ ID NO: 319744 - DNA, 25 bp, Artificial
  probe
  misc_feature (1)..(25): SEQ ID NO: 2253; WAN024FSR; Start 293; Stop 317
atctgaggcaagttaaagactgtca

SEQ ID NO: 319745 - DNA, 25 bp, Artificial
  probe
  misc_feature (1)..(25): SEQ ID NO: 2253; WAN024FSR; Start 17; Stop 41
tctgcttgacggaagatagagatgg

SEQ ID NO: 319746 - DNA, 25 bp, Artificial
  probe
  misc_feature (1)..(25): SEQ ID NO: 2253; WAN024FSR; Start 14; Stop 38
gtttctgcttgacggaagatagaga

SEQ ID NO: 319747 - DNA, 25 bp, Artificial
  probe
  misc_feature (1)..(25): SEQ ID NO: 2253; WAN024FSR; Start 290; Stop 314
gtcatctgaggcaagttaaagactg

SEQ ID NO: 319748 - DNA, 25 bp, Artificial
  probe
  misc_feature (1)..(25): SEQ ID NO: 2253; WAN024FSR; Start 294; Stop 318
tctgaggcaagttaaagactgtcaa

SEQ ID NO: 319749 - DNA, 25 bp, Artificial
  probe
  misc_feature (1)..(25): SEQ ID NO: 2253; WAN024FSR; Start 61; Stop 85
attccagttagaccagtcaagagct

SEQ ID NO: 319750 - DNA, 25 bp, Artificial
  probe
  misc_feature (1)..(25): SEQ ID NO: 2253; WAN024FSR; Start 258; Stop 282
gaacgtgtttcaaactatcctctac

SEQ ID NO: 319751 - DNA, 25 bp, Artificial
  probe
  misc_feature (1)..(25): SEQ ID NO: 2253; WAN024FSR; Start 264; Stop 288
gtttcaaactatcctctacattacg

SEQ ID NO: 319752 - DNA, 25 bp, Artificial
  probe
  misc_feature (1)..(25): SEQ ID NO: 2253; WAN024FSR; Start 11; Stop 35
aaggtttctgcttgacggaagatag

SEQ ID NO: 319753 - DNA, 25 bp, Artificial
  probe
  misc_feature (1)..(25): SEQ ID NO: 2253; WAN024FSR; Start 42; Stop 66
ggctagtcacactgaggatattcca

SEQ ID NO: 319754 - DNA, 25 bp, Artificial
  probe
  misc_feature (1)..(25): SEQ ID NO: 2253; WAN024FSR; Start 260; Stop 284
acgtgtttcaaactatcctctacat

SEQ ID NO: 319755 - DNA, 25 bp, Artificial
  probe
  misc_feature (1)..(25): SEQ ID NO: 2253; WAN024FSR; Start 259; Stop 283
aacgtgtttcaaactatcctctaca

SEQ ID NO: 319756 - DNA, 25 bp, Artificial
  probe
  misc_feature (1)..(25): SEQ ID NO: 2253; WAN024FSR; Start 13; Stop 37
ggtttctgcttgacggaagatagag

SEQ ID NO: 319757 - DNA, 25 bp, Artificial
  probe
  misc_feature (1)..(25): SEQ ID NO: 2253; WAN024FSR; Start 296; Stop 320
tgaggcaagttaaagactgtcaagg

SEQ ID NO: 319758 - DNA, 25 bp, Artificial
  probe
  misc_feature (1)..(25): SEQ ID NO: 2254; WAN024GMV; Start 36; Stop 60
ctgtctcacgaacttggtaattgta

SEQ ID NO: 319759 - DNA, 25 bp, Artificial
  probe
  misc_feature (1)..(25): SEQ ID NO: 2254; WAN024GMV; Start 50; Stop 74
tggtaattgtacttagtgattggca

SEQ ID NO: 319760 - DNA, 25 bp, Artificial
  probe
  misc_feature (1)..(25): SEQ ID NO: 2254; WAN024GMV; Start 39; Stop 63
tctcacgaacttggtaattgtactt

SEQ ID NO: 319761 - DNA, 25 bp, Artificial
  probe
  misc_feature (1)..(25): SEQ ID NO: 2254; WAN024GMV; Start 49; Stop 73
ttggtaattgtacttagtgattggc

SEQ ID NO: 319762 - DNA, 25 bp, Artificial
  probe
  misc_feature (1)..(25): SEQ ID NO: 2254; WAN024GMV; Start 38; Stop 62
gtctcacgaacttggtaattgtact

SEQ ID NO: 319763 - DNA, 25 bp, Artificial
  probe
  misc_feature (1)..(25): SEQ ID NO: 2254; WAN024GMV; Start 57; Stop 81
tgtacttagtgattggcatggtaat

SEQ ID NO: 319764 - DNA, 25 bp, Artificial
  probe
  misc_feature (1)..(25): SEQ ID NO: 2254; WAN024GMV; Start 55; Stop 79
attgtacttagtgattggcatggta

SEQ ID NO: 319765 - DNA, 25 bp, Artificial
  probe
  misc_feature (1)..(25): SEQ ID NO: 2254; WAN024GMV; Start 51; Stop 75
ggtaattgtacttagtgattggcat

SEQ ID NO: 319766 - DNA, 25 bp, Artificial
  probe
  misc_feature (1)..(25): SEQ ID NO: 2254; WAN024GMV; Start 56; Stop 80
ttgtacttagtgattggcatggtaa

SEQ ID NO: 319767 - DNA, 25 bp, Artificial
  probe
  misc_feature (1)..(25): SEQ ID NO: 2254; WAN024GMV; Start 37; Stop 61
tgtctcacgaacttggtaattgtac

SEQ ID NO: 319768 - DNA, 25 bp, Artificial
  probe
  misc_feature (1)..(25): SEQ ID NO: 2254; WAN024GMV; Start 41; Stop 65
tcacgaacttggtaattgtacttag

SEQ ID NO: 319769 - DNA, 25 bp, Artificial
  probe
  misc_feature (1)..(25): SEQ ID NO: 2254; WAN024GMV; Start 40; Stop 64
ctcacgaacttggtaattgtactta

SEQ ID NO: 319770 - DNA, 25 bp, Artificial
  probe
  misc_feature (1)..(25): SEQ ID NO: 2254; WAN024GMV; Start 54; Stop 78
aattgtacttagtgattggcatggt

SEQ ID NO: 319771 - DNA, 25 bp, Artificial
  probe
  misc_feature (1)..(25): SEQ ID NO: 2254; WAN024GMV; Start 53; Stop 77
taattgtacttagtgattggcatgg

SEQ ID NO: 319772 - DNA, 25 bp, Artificial
  probe
  misc_feature (1)..(25): SEQ ID NO: 2254; WAN024GMV; Start 58; Stop 82
gtacttagtgattggcatggtaatt

SEQ ID NO: 319773 - DNA, 25 bp, Artificial
  probe
  misc_feature (1)..(25): SEQ ID NO: 2254; WAN024GMV; Start 60; Stop 84
acttagtgattggcatggtaattcc

SEQ ID NO: 319774 - DNA, 25 bp, Artificial
  probe
  misc_feature (1)..(25): SEQ ID NO: 2254; WAN024GMV; Start 59; Stop 83
tacttagtgattggcatggtaattc

SEQ ID NO: 319775 - DNA, 25 bp, Artificial
  probe
  misc_feature (1)..(25): SEQ ID NO: 2254; WAN024GMV; Start 43; Stop 67
acgaacttggtaattgtacttagtg

SEQ ID NO: 319776 - DNA, 25 bp, Artificial
  probe
  misc_feature (1)..(25): SEQ ID NO: 2254; WAN024GMV; Start 42; Stop 66
cacgaacttggtaattgtacttagt

SEQ ID NO: 319777 - DNA, 25 bp, Artificial
  probe
  misc_feature (1)..(25): SEQ ID NO: 2254; WAN024GMV; Start 44; Stop 68
cgaacttggtaattgtacttagtga

SEQ ID NO: 319778 - DNA, 25 bp, Artificial
  probe
  misc_feature (1)..(25): SEQ ID NO: 2254; WAN024GMV; Start 52; Stop 76
gtaattgtacttagtgattggcatg

SEQ ID NO: 319779 - DNA, 25 bp, Artificial
  probe
  misc_feature (1)..(25): SEQ ID NO: 2254; WAN024GMV; Start 48; Stop 72
cttggtaattgtacttagtgattgg

SEQ ID NO: 319780 - DNA, 25 bp, Artificial
  probe
  misc_feature (1)..(25): SEQ ID NO: 2254; WAN024GMV; Start 47; Stop 71
acttggtaattgtacttagtgattg

SEQ ID NO: 319781 - DNA, 25 bp, Artificial
  probe
  misc_feature (1)..(25): SEQ ID NO: 2254; WAN024GMV; Start 35; Stop 59
gctgtctcacgaacttggtaattgt

SEQ ID NO: 319782 - DNA, 25 bp, Artificial
  probe
  misc_feature (1)..(25): SEQ ID NO: 2254; WAN024GMV; Start 45; Stop 69
gaacttggtaattgtacttagtgat

SEQ ID NO: 319783 - DNA, 25 bp, Artificial
  probe
  misc_feature (1)..(25): SEQ ID NO: 2254; WAN024GMV; Start 34; Stop 58
agctgtctcacgaacttggtaattg

SEQ ID NO: 319784 - DNA, 25 bp, Artificial
  probe
  misc_feature (1)..(25): SEQ ID NO: 2254; WAN024GMV; Start 46; Stop 70
aacttggtaattgtacttagtgatt

SEQ ID NO: 319785 - DNA, 25 bp, Artificial
  probe
  misc_feature (1)..(25): SEQ ID NO: 2254; WAN024GMV; Start 182; Stop 206
gcaatccctgtaatggcatttgttg

SEQ ID NO: 319786 - DNA, 25 bp, Artificial
  probe
  misc_feature (1)..(25): SEQ ID NO: 2254; WAN024GMV; Start 144; Stop 168
taaagaccaaaaggggaacgctatc

SEQ ID NO: 319787 - DNA, 25 bp, Artificial
  probe
  misc_feature (1)..(25): SEQ ID NO: 2254; WAN024GMV; Start 143; Stop 167
gtaaagaccaaaaggggaacgctat

SEQ ID NO: 319788 - DNA, 25 bp, Artificial
  probe
  misc_feature (1)..(25): SEQ ID NO: 2254; WAN024GMV; Start 132; Stop 156
ccacctgacctgtaaagaccaaaag

SEQ ID NO: 319789 - DNA, 25 bp, Artificial
  probe
  misc_feature (1)..(25): SEQ ID NO: 2254; WAN024GMV; Start 181; Stop 205
cgcaatccctgtaatggcatttgtt

SEQ ID NO: 319790 - DNA, 25 bp, Artificial
  probe
  misc_feature (1)..(25): SEQ ID NO: 2254; WAN024GMV; Start 184; Stop 208
aatccctgtaatggcatttgttgct

SEQ ID NO: 319791 - DNA, 25 bp, Artificial
  probe
  misc_feature (1)..(25): SEQ ID NO: 2255; WAN024G8H; Start 219; Stop 243
tttgctccttatcagtcgtgtaaat

SEQ ID NO: 319792 - DNA, 25 bp, Artificial
  probe
  misc_feature (1)..(25): SEQ ID NO: 2255; WAN024G8H; Start 218; Stop 242
atttgctccttatcagtcgtgtaaa

SEQ ID NO: 319793 - DNA, 25 bp, Artificial
  probe
  misc_feature (1)..(25): SEQ ID NO: 2255; WAN024G8H; Start 220; Stop 244
ttgctccttatcagtcgtgtaaatt

SEQ ID NO: 319794 - DNA, 25 bp, Artificial
  probe
  misc_feature (1)..(25): SEQ ID NO: 2255; WAN024G8H; Start 217; Stop 241
aatttgctccttatcagtcgtgtaa

SEQ ID NO: 319795 - DNA, 25 bp, Artificial
  probe
  misc_feature (1)..(25): SEQ ID NO: 2255; WAN024G8H; Start 225; Stop 249
ccttatcagtcgtgtaaattcccat

SEQ ID NO: 319796 - DNA, 25 bp, Artificial
  probe
  misc_feature (1)..(25): SEQ ID NO: 2255; WAN024G8H; Start 221; Stop 245
tgctccttatcagtcgtgtaaattc

SEQ ID NO: 319797 - DNA, 25 bp, Artificial
  probe
  misc_feature (1)..(25): SEQ ID NO: 2255; WAN024G8H; Start 223; Stop 247
ctccttatcagtcgtgtaaattccc

SEQ ID NO: 319798 - DNA, 25 bp, Artificial
  probe
  misc_feature (1)..(25): SEQ ID NO: 2255; WAN024G8H; Start 216; Stop 240
caatttgctccttatcagtcgtgta

SEQ ID NO: 319799 - DNA, 25 bp, Artificial
  probe
  misc_feature (1)..(25): SEQ ID NO: 2255; WAN024G8H; Start 51; Stop 75
ccttgagacgctcgataatcatatc

SEQ ID NO: 319800 - DNA, 25 bp, Artificial
  probe
  misc_feature (1)..(25): SEQ ID NO: 2255; WAN024G8H; Start 224; Stop 248
tccttatcagtcgtgtaaattccca

SEQ ID NO: 319801 - DNA, 25 bp, Artificial
  probe
  misc_feature (1)..(25): SEQ ID NO: 2255; WAN024G8H; Start 222; Stop 246
gctccttatcagtcgtgtaaattcc

SEQ ID NO: 319802 - DNA, 25 bp, Artificial
  probe
  misc_feature (1)..(25): SEQ ID NO: 2255; WAN024G8H; Start 226; Stop 250
cttatcagtcgtgtaaattcccatg

SEQ ID NO: 319803 - DNA, 25 bp, Artificial
  probe
  misc_feature (1)..(25): SEQ ID NO: 2255; WAN024G8H; Start 210; Stop 234
taaagacaatttgctccttatcagt

SEQ ID NO: 319804 - DNA, 25 bp, Artificial
  probe
  misc_feature (1)..(25): SEQ ID NO: 2255; WAN024G8H; Start 211; Stop 235
aaagacaatttgctccttatcagtc

SEQ ID NO: 319805 - DNA, 25 bp, Artificial
  probe
  misc_feature (1)..(25): SEQ ID NO: 2255; WAN024G8H; Start 227; Stop 251
ttatcagtcgtgtaaattcccatga

SEQ ID NO: 319806 - DNA, 25 bp, Artificial
  probe
  misc_feature (1)..(25): SEQ ID NO: 2255; WAN024G8H; Start 212; Stop 236
aagacaatttgctccttatcagtcg

SEQ ID NO: 319807 - DNA, 25 bp, Artificial
  probe
  misc_feature (1)..(25): SEQ ID NO: 2255; WAN024G8H; Start 230; Stop 254
tcagtcgtgtaaattcccatgattt

SEQ ID NO: 319808 - DNA, 25 bp, Artificial
  probe
  misc_feature (1)..(25): SEQ ID NO: 2255; WAN024G8H; Start 50; Stop 74
gccttgagacgctcgataatcatat

SEQ ID NO: 319809 - DNA, 25 bp, Artificial
  probe
  misc_feature (1)..(25): SEQ ID NO: 2255; WAN024G8H; Start 209; Stop 233
ataaagacaatttgctccttatcag

SEQ ID NO: 319810 - DNA, 25 bp, Artificial
  probe
  misc_feature (1)..(25): SEQ ID NO: 2255; WAN024G8H; Start 141; Stop 165
tactgtaggcagactcaaccatgaa

SEQ ID NO: 319811 - DNA, 25 bp, Artificial
  probe
  misc_feature (1)..(25): SEQ ID NO: 2255; WAN024G8H; Start 214; Stop 238
gacaatttgctccttatcagtcgtg

SEQ ID NO: 319812 - DNA, 25 bp, Artificial
  probe
  misc_feature (1)..(25): SEQ ID NO: 2255; WAN024G8H; Start 213; Stop 237
agacaatttgctccttatcagtcgt

SEQ ID NO: 319813 - DNA, 25 bp, Artificial
  probe
  misc_feature (1)..(25): SEQ ID NO: 2255; WAN024G8H; Start 206; Stop 230
tcgataaagacaatttgctccttat

SEQ ID NO: 319814 - DNA, 25 bp, Artificial
  probe
  misc_feature (1)..(25): SEQ ID NO: 2255; WAN024G8H; Start 205; Stop 229
gtcgataaagacaatttgctcctta

SEQ ID NO: 319815 - DNA, 25 bp, Artificial
  probe
  misc_feature (1)..(25): SEQ ID NO: 2255; WAN024G8H; Start 146; Stop 170
taggcagactcaaccatgaaatctc

SEQ ID NO: 319816 - DNA, 25 bp, Artificial
  probe
  misc_feature (1)..(25): SEQ ID NO: 2255; WAN024G8H; Start 215; Stop 239
acaatttgctccttatcagtcgtgt

SEQ ID NO: 319817 - DNA, 25 bp, Artificial
  probe
  misc_feature (1)..(25): SEQ ID NO: 2255; WAN024G8H; Start 145; Stop 169
gtaggcagactcaaccatgaaatct

SEQ ID NO: 319818 - DNA, 25 bp, Artificial
  probe
  misc_feature (1)..(25): SEQ ID NO: 2255; WAN024G8H; Start 16; Stop 40
tttattcaccaccaaaatcacagga

SEQ ID NO: 319819 - DNA, 25 bp, Artificial
  probe
  misc_feature (1)..(25): SEQ ID NO: 2255; WAN024G8H; Start 228; Stop 252
tatcagtcgtgtaaattcccatgat

SEQ ID NO: 319820 - DNA, 25 bp, Artificial
  probe
  misc_feature (1)..(25): SEQ ID NO: 2255; WAN024G8H; Start 17; Stop 41
ttattcaccaccaaaatcacaggaa

SEQ ID NO: 319821 - DNA, 25 bp, Artificial
  probe
  misc_feature (1)..(25): SEQ ID NO: 2255; WAN024G8H; Start 229; Stop 253
atcagtcgtgtaaattcccatgatt

SEQ ID NO: 319822 - DNA, 25 bp, Artificial
  probe
  misc_feature (1)..(25): SEQ ID NO: 2255; WAN024G8H; Start 140; Stop 164
gtactgtaggcagactcaaccatga

SEQ ID NO: 319823 - DNA, 25 bp, Artificial
  probe
  misc_feature (1)..(25): SEQ ID NO: 2255; WAN024G8H; Start 144; Stop 168
tgtaggcagactcaaccatgaaatc

SEQ ID NO: 319824 - DNA, 25 bp, Artificial
  probe
  misc_feature (1)..(25): SEQ ID NO: 2256; WAN024ARL; Start 38; Stop 62
ctattataacagaaagcaggcagaa

SEQ ID NO: 319825 - DNA, 25 bp, Artificial
  probe
  misc_feature (1)..(25): SEQ ID NO: 2256; WAN024ARL; Start 37; Stop 61
tctattataacagaaagcaggcaga

SEQ ID NO: 319826 - DNA, 25 bp, Artificial
  probe
  misc_feature (1)..(25): SEQ ID NO: 2256; WAN024ARL; Start 39; Stop 63
tattataacagaaagcaggcagaaa

SEQ ID NO: 319827 - DNA, 25 bp, Artificial
  probe
  misc_feature (1)..(25): SEQ ID NO: 2256; WAN024ARL; Start 36; Stop 60
ttctattataacagaaagcaggcag

SEQ ID NO: 319828 - DNA, 25 bp, Artificial
  probe
  misc_feature (1)..(25): SEQ ID NO: 2256; WAN024ARL; Start 35; Stop 59
cttctattataacagaaagcaggca

SEQ ID NO: 319829 - DNA, 25 bp, Artificial
  probe
  misc_feature (1)..(25): SEQ ID NO: 2256; WAN024ARL; Start 1; Stop 25
atggacctttctagtgtgttttcag

SEQ ID NO: 319830 - DNA, 25 bp, Artificial
  probe
  misc_feature (1)..(25): SEQ ID NO: 2256; WAN024ARL; Start 57; Stop 81
gcagaaaagcagattccaaacaaaa

SEQ ID NO: 319831 - DNA, 25 bp, Artificial
  probe
  misc_feature (1)..(25): SEQ ID NO: 2256; WAN024ARL; Start 34; Stop 58
tcttctattataacagaaagcaggc

SEQ ID NO: 319832 - DNA, 25 bp, Artificial
  probe
  misc_feature (1)..(25): SEQ ID NO: 2256; WAN024ARL; Start 3; Stop 27
ggacctttctagtgtgttttcagat

SEQ ID NO: 319833 - DNA, 25 bp, Artificial
  probe
  misc_feature (1)..(25): SEQ ID NO: 2256; WAN024ARL; Start 42; Stop 66
tataacagaaagcaggcagaaaagc

SEQ ID NO: 319834 - DNA, 25 bp, Artificial
  probe
  misc_feature (1)..(25): SEQ ID NO: 2256; WAN024ARL; Start 41; Stop 65
ttataacagaaagcaggcagaaaag

SEQ ID NO: 319835 - DNA, 25 bp, Artificial
  probe
  misc_feature (1)..(25): SEQ ID NO: 2256; WAN024ARL; Start 40; Stop 64
attataacagaaagcaggcagaaaa

SEQ ID NO: 319836 - DNA, 25 bp, Artificial
  probe
  misc_feature (1)..(25): SEQ ID NO: 2256; WAN024ARL; Start 4; Stop 28
gacctttctagtgtgttttcagata

SEQ ID NO: 319837 - DNA, 25 bp, Artificial
  probe
  misc_feature (1)..(25): SEQ ID NO: 2256; WAN024ARL; Start 2; Stop 26
tggacctttctagtgtgttttcaga

SEQ ID NO: 319838 - DNA, 25 bp, Artificial
  probe
  misc_feature (1)..(25): SEQ ID NO: 2256; WAN024ARL; Start 13; Stop 37
agtgtgttttcagataagatgtctt

SEQ ID NO: 319839 - DNA, 25 bp, Artificial
  probe
  misc_feature (1)..(25): SEQ ID NO: 2256; WAN024ARL; Start 15; Stop 39
tgtgttttcagataagatgtcttct

SEQ ID NO: 319840 - DNA, 25 bp, Artificial
  probe
  misc_feature (1)..(25): SEQ ID NO: 2256; WAN024ARL; Start 14; Stop 38
gtgtgttttcagataagatgtcttc

SEQ ID NO: 319841 - DNA, 25 bp, Artificial
  probe
  misc_feature (1)..(25): SEQ ID NO: 2256; WAN024ARL; Start 5; Stop 29
acctttctagtgtgttttcagataa

SEQ ID NO: 319842 - DNA, 25 bp, Artificial
  probe
  misc_feature (1)..(25): SEQ ID NO: 2256; WAN024ARL; Start 12; Stop 36
tagtgtgttttcagataagatgtct

SEQ ID NO: 319843 - DNA, 25 bp, Artificial
  probe
  misc_feature (1)..(25): SEQ ID NO: 2256; WAN024ARL; Start 11; Stop 35
ctagtgtgttttcagataagatgtc

SEQ ID NO: 319844 - DNA, 25 bp, Artificial
  probe
  misc_feature (1)..(25): SEQ ID NO: 2256; WAN024ARL; Start 10; Stop 34
tctagtgtgttttcagataagatgt

SEQ ID NO: 319845 - DNA, 25 bp, Artificial
  probe
  misc_feature (1)..(25): SEQ ID NO: 2256; WAN024ARL; Start 6; Stop 30
cctttctagtgtgttttcagataag

SEQ ID NO: 319846 - DNA, 25 bp, Artificial
  probe
  misc_feature (1)..(25): SEQ ID NO: 2256; WAN024ARL; Start 102; Stop 126
ttaaacaaatcaaacaaagacattg

SEQ ID NO: 319847 - DNA, 25 bp, Artificial
  probe
  misc_feature (1)..(25): SEQ ID NO: 2256; WAN024ARL; Start 33; Stop 57
gtcttctattataacagaaagcagg

SEQ ID NO: 319848 - DNA, 25 bp, Artificial
  probe
  misc_feature (1)..(25): SEQ ID NO: 2256; WAN024ARL; Start 56; Stop 80
ggcagaaaagcagattccaaacaaa

SEQ ID NO: 319849 - DNA, 25 bp, Artificial
  probe
  misc_feature (1)..(25): SEQ ID NO: 2256; WAN024ARL; Start 105; Stop 129
aacaaatcaaacaaagacattgaaa

SEQ ID NO: 319850 - DNA, 25 bp, Artificial
  probe
  misc_feature (1)..(25): SEQ ID NO: 2256; WAN024ARL; Start 104; Stop 128
aaacaaatcaaacaaagacattgaa

SEQ ID NO: 319851 - DNA, 25 bp, Artificial
  probe
  misc_feature (1)..(25): SEQ ID NO: 2256; WAN024ARL; Start 101; Stop 125
cttaaacaaatcaaacaaagacatt

SEQ ID NO: 319852 - DNA, 25 bp, Artificial
  probe
  misc_feature (1)..(25): SEQ ID NO: 2256; WAN024ARL; Start 43; Stop 67
ataacagaaagcaggcagaaaagca

SEQ ID NO: 319853 - DNA, 25 bp, Artificial
  probe
  misc_feature (1)..(25): SEQ ID NO: 2256; WAN024ARL; Start 32; Stop 56
tgtcttctattataacagaaagcag

SEQ ID NO: 319854 - DNA, 25 bp, Artificial
  probe
  misc_feature (1)..(25): SEQ ID NO: 2256; WAN024ARL; Start 9; Stop 33
ttctagtgtgttttcagataagatg

SEQ ID NO: 319855 - DNA, 25 bp, Artificial
  probe
  misc_feature (1)..(25): SEQ ID NO: 2256; WAN024ARL; Start 99; Stop 123
ttcttaaacaaatcaaacaaagaca

SEQ ID NO: 319856 - DNA, 25 bp, Artificial
  probe
  misc_feature (1)..(25): SEQ ID NO: 2256; WAN024ARL; Start 7; Stop 31
ctttctagtgtgttttcagataaga

SEQ ID NO: 319857 - DNA, 25 bp, Artificial
  probe
  misc_feature (1)..(25): SEQ ID NO: 2257; WAN024GNM; Start 165; Stop 189
gcttggaaatcttctgtgtttgaac

SEQ ID NO: 319858 - DNA, 25 bp, Artificial
  probe
  misc_feature (1)..(25): SEQ ID NO: 2257; WAN024GNM; Start 191; Stop 215
gcttgagatttcacggtaattgttt

SEQ ID NO: 319859 - DNA, 25 bp, Artificial
  probe
  misc_feature (1)..(25): SEQ ID NO: 2257; WAN024GNM; Start 164; Stop 188
ggcttggaaatcttctgtgtttgaa

SEQ ID NO: 319860 - DNA, 25 bp, Artificial
  probe
  misc_feature (1)..(25): SEQ ID NO: 2257; WAN024GNM; Start 166; Stop 190
cttggaaatcttctgtgtttgaaca

SEQ ID NO: 319861 - DNA, 25 bp, Artificial
  probe
  misc_feature (1)..(25): SEQ ID NO: 2257; WAN024GNM; Start 190; Stop 214
agcttgagatttcacggtaattgtt

SEQ ID NO: 319862 - DNA, 25 bp, Artificial
  probe
  misc_feature (1)..(25): SEQ ID NO: 2257; WAN024GNM; Start 187; Stop 211
aacagcttgagatttcacggtaatt

SEQ ID NO: 319863 - DNA, 25 bp, Artificial
  probe
  misc_feature (1)..(25): SEQ ID NO: 2257; WAN024GNM; Start 186; Stop 210
gaacagcttgagatttcacggtaat

SEQ ID NO: 319864 - DNA, 25 bp, Artificial
  probe
  misc_feature (1)..(25): SEQ ID NO: 2257; WAN024GNM; Start 189; Stop 213
cagcttgagatttcacggtaattgt

SEQ ID NO: 319865 - DNA, 25 bp, Artificial
  probe
  misc_feature (1)..(25): SEQ ID NO: 2257; WAN024GNM; Start 188; Stop 212
acagcttgagatttcacggtaattg

SEQ ID NO: 319866 - DNA, 25 bp, Artificial
  probe
  misc_feature (1)..(25): SEQ ID NO: 2257; WAN024GNM; Start 128; Stop 152
atctgcttcatcacggtaacggatt

SEQ ID NO: 319867 - DNA, 25 bp, Artificial
  probe
  misc_feature (1)..(25): SEQ ID NO: 2257; WAN024GNM; Start 224; Stop 248
aatccacacttccaagtcgtaagtc

SEQ ID NO: 319868 - DNA, 25 bp, Artificial
  probe
  misc_feature (1)..(25): SEQ ID NO: 2257; WAN024GNM; Start 223; Stop 247
gaatccacacttccaagtcgtaagt

SEQ ID NO: 319869 - DNA, 25 bp, Artificial
  probe
  misc_feature (1)..(25): SEQ ID NO: 2257; WAN024GNM; Start 93; Stop 117
gaaccgttcaaggtatgaaggagtt

SEQ ID NO: 319870 - DNA, 25 bp, Artificial
  probe
  misc_feature (1)..(25): SEQ ID NO: 2257; WAN024GNM; Start 85; Stop 109
caagtccagaaccgttcaaggtatg

SEQ ID NO: 319871 - DNA, 25 bp, Artificial
  probe
  misc_feature (1)..(25): SEQ ID NO: 2257; WAN024GNM; Start 194; Stop 218
tgagatttcacggtaattgttttgt

SEQ ID NO: 319872 - DNA, 25 bp, Artificial
  probe
  misc_feature (1)..(25): SEQ ID NO: 2257; WAN024GNM; Start 163; Stop 187
gggcttggaaatcttctgtgtttga

SEQ ID NO: 319873 - DNA, 25 bp, Artificial
  probe
  misc_feature (1)..(25): SEQ ID NO: 2257; WAN024GNM; Start 86; Stop 110
aagtccagaaccgttcaaggtatga

SEQ ID NO: 319874 - DNA, 25 bp, Artificial
  probe
  misc_feature (1)..(25): SEQ ID NO: 2257; WAN024GNM; Start 193; Stop 217
ttgagatttcacggtaattgttttg

SEQ ID NO: 319875 - DNA, 25 bp, Artificial
  probe
  misc_feature (1)..(25): SEQ ID NO: 2257; WAN024GNM; Start 98; Stop 122
gttcaaggtatgaaggagtttcacc

SEQ ID NO: 319876 - DNA, 25 bp, Artificial
  probe
  misc_feature (1)..(25): SEQ ID NO: 2257; WAN024GNM; Start 91; Stop 115
cagaaccgttcaaggtatgaaggag

SEQ ID NO: 319877 - DNA, 25 bp, Artificial
  probe
  misc_feature (1)..(25): SEQ ID NO: 2257; WAN024GNM; Start 192; Stop 216
cttgagatttcacggtaattgtttt

SEQ ID NO: 319878 - DNA, 25 bp, Artificial
  probe
  misc_feature (1)..(25): SEQ ID NO: 2257; WAN024GNM; Start 227; Stop 251
ccacacttccaagtcgtaagtcttc

SEQ ID NO: 319879 - DNA, 25 bp, Artificial
  probe
  misc_feature (1)..(25): SEQ ID NO: 2257; WAN024GNM; Start 97; Stop 121
cgttcaaggtatgaaggagtttcac

SEQ ID NO: 319880 - DNA, 25 bp, Artificial
  probe
  misc_feature (1)..(25): SEQ ID NO: 2257; WAN024GNM; Start 195; Stop 219
gagatttcacggtaattgttttgtg

SEQ ID NO: 319881 - DNA, 25 bp, Artificial
  probe
  misc_feature (1)..(25): SEQ ID NO: 2257; WAN024GNM; Start 225; Stop 249
atccacacttccaagtcgtaagtct

SEQ ID NO: 319882 - DNA, 25 bp, Artificial
  probe
  misc_feature (1)..(25): SEQ ID NO: 2257; WAN024GNM; Start 127; Stop 151
catctgcttcatcacggtaacggat

SEQ ID NO: 319883 - DNA, 25 bp, Artificial
  probe
  misc_feature (1)..(25): SEQ ID NO: 2257; WAN024GNM; Start 88; Stop 112
gtccagaaccgttcaaggtatgaag

SEQ ID NO: 319884 - DNA, 25 bp, Artificial
  probe
  misc_feature (1)..(25): SEQ ID NO: 2257; WAN024GNM; Start 197; Stop 221
gatttcacggtaattgttttgtgct

SEQ ID NO: 319885 - DNA, 25 bp, Artificial
  probe
  misc_feature (1)..(25): SEQ ID NO: 2257; WAN024GNM; Start 196; Stop 220
agatttcacggtaattgttttgtgc

SEQ ID NO: 319886 - DNA, 25 bp, Artificial
  probe
  misc_feature (1)..(25): SEQ ID NO: 2257; WAN024GNM; Start 92; Stop 116
agaaccgttcaaggtatgaaggagt

SEQ ID NO: 319887 - DNA, 25 bp, Artificial
  probe
  misc_feature (1)..(25): SEQ ID NO: 2257; WAN024GNM; Start 198; Stop 222
atttcacggtaattgttttgtgctg

SEQ ID NO: 319888 - DNA, 25 bp, Artificial
  probe
  misc_feature (1)..(25): SEQ ID NO: 2257; WAN024GNM; Start 180; Stop 204
gtgtttgaacagcttgagatttcac

SEQ ID NO: 319889 - DNA, 25 bp, Artificial
  probe
  misc_feature (1)..(25): SEQ ID NO: 2257; WAN024GNM; Start 228; Stop 252
cacacttccaagtcgtaagtcttcg

SEQ ID NO: 319890 - DNA, 25 bp, Artificial
  probe
  misc_feature (1)..(25): SEQ ID NO: 2258; WAN024CF6; Start 118; Stop 142
aatgatgaatatgaggaatacgcca

SEQ ID NO: 319891 - DNA, 25 bp, Artificial
  probe
  misc_feature (1)..(25): SEQ ID NO: 2258; WAN024CF6; Start 117; Stop 141
gaatgatgaatatgaggaatacgcc

SEQ ID NO: 319892 - DNA, 25 bp, Artificial
  probe
  misc_feature (1)..(25): SEQ ID NO: 2258; WAN024CF6; Start 288; Stop 312
actaagcgaacatcaagaggatatt

SEQ ID NO: 319893 - DNA, 25 bp, Artificial
  probe
  misc_feature (1)..(25): SEQ ID NO: 2258; WAN024CF6; Start 287; Stop 311
aactaagcgaacatcaagaggatat

SEQ ID NO: 319894 - DNA, 25 bp, Artificial
  probe
  misc_feature (1)..(25): SEQ ID NO: 2258; WAN024CF6; Start 322; Stop 346
tccgattgtgatgatatgtatgacg

SEQ ID NO: 319895 - DNA, 25 bp, Artificial
  probe
  misc_feature (1)..(25): SEQ ID NO: 2258; WAN024CF6; Start 286; Stop 310
gaactaagcgaacatcaagaggata

SEQ ID NO: 319896 - DNA, 25 bp, Artificial
  probe
  misc_feature (1)..(25): SEQ ID NO: 2258; WAN024CF6; Start 108; Stop 132
aatcggcttgaatgatgaatatgag

SEQ ID NO: 319897 - DNA, 25 bp, Artificial
  probe
  misc_feature (1)..(25): SEQ ID NO: 2258; WAN024CF6; Start 112; Stop 136
ggcttgaatgatgaatatgaggaat

SEQ ID NO: 319898 - DNA, 25 bp, Artificial
  probe
  misc_feature (1)..(25): SEQ ID NO: 2258; WAN024CF6; Start 120; Stop 144
tgatgaatatgaggaatacgccatt

SEQ ID NO: 319899 - DNA, 25 bp, Artificial
  probe
  misc_feature (1)..(25): SEQ ID NO: 2258; WAN024CF6; Start 119; Stop 143
atgatgaatatgaggaatacgccat

SEQ ID NO: 319900 - DNA, 25 bp, Artificial
  probe
  misc_feature (1)..(25): SEQ ID NO: 2258; WAN024CF6; Start 116; Stop 140
tgaatgatgaatatgaggaatacgc

SEQ ID NO: 319901 - DNA, 25 bp, Artificial
  probe
  misc_feature (1)..(25): SEQ ID NO: 2258; WAN024CF6; Start 292; Stop 316
agcgaacatcaagaggatattatca

SEQ ID NO: 319902 - DNA, 25 bp, Artificial
  probe
  misc_feature (1)..(25): SEQ ID NO: 2258; WAN024CF6; Start 109; Stop 133
atcggcttgaatgatgaatatgagg

SEQ ID NO: 319903 - DNA, 25 bp, Artificial
  probe
  misc_feature (1)..(25): SEQ ID NO: 2258; WAN024CF6; Start 321; Stop 345
ttccgattgtgatgatatgtatgac

SEQ ID NO: 319904 - DNA, 25 bp, Artificial
  probe
  misc_feature (1)..(25): SEQ ID NO: 2258; WAN024CF6; Start 111; Stop 135
cggcttgaatgatgaatatgaggaa

SEQ ID NO: 319905 - DNA, 25 bp, Artificial
  probe
  misc_feature (1)..(25): SEQ ID NO: 2258; WAN024CF6; Start 293; Stop 317
gcgaacatcaagaggatattatcat

SEQ ID NO: 319906 - DNA, 25 bp, Artificial
  probe
  misc_feature (1)..(25): SEQ ID NO: 2258; WAN024CF6; Start 276; Stop 300
aagcattgaagaactaagcgaacat

SEQ ID NO: 319907 - DNA, 25 bp, Artificial
  probe
  misc_feature (1)..(25): SEQ ID NO: 2258; WAN024CF6; Start 291; Stop 315
aagcgaacatcaagaggatattatc

SEQ ID NO: 319908 - DNA, 25 bp, Artificial
  probe
  misc_feature (1)..(25): SEQ ID NO: 2258; WAN024CF6; Start 283; Stop 307
gaagaactaagcgaacatcaagagg

SEQ ID NO: 319909 - DNA, 25 bp, Artificial
  probe
  misc_feature (1)..(25): SEQ ID NO: 2258; WAN024CF6; Start 289; Stop 313
ctaagcgaacatcaagaggatatta

SEQ ID NO: 319910 - DNA, 25 bp, Artificial
  probe
  misc_feature (1)..(25): SEQ ID NO: 2258; WAN024CF6; Start 282; Stop 306
tgaagaactaagcgaacatcaagag

SEQ ID NO: 319911 - DNA, 25 bp, Artificial
  probe
  misc_feature (1)..(25): SEQ ID NO: 2258; WAN024CF6; Start 285; Stop 309
agaactaagcgaacatcaagaggat

SEQ ID NO: 319912 - DNA, 25 bp, Artificial
  probe
  misc_feature (1)..(25): SEQ ID NO: 2258; WAN024CF6; Start 284; Stop 308
aagaactaagcgaacatcaagagga

SEQ ID NO: 319913 - DNA, 25 bp, Artificial
  probe
  misc_feature (1)..(25): SEQ ID NO: 2258; WAN024CF6; Start 277; Stop 301
agcattgaagaactaagcgaacatc

SEQ ID NO: 319914 - DNA, 25 bp, Artificial
  probe
  misc_feature (1)..(25): SEQ ID NO: 2258; WAN024CF6; Start 110; Stop 134
tcggcttgaatgatgaatatgagga

SEQ ID NO: 319915 - DNA, 25 bp, Artificial
  probe
  misc_feature (1)..(25): SEQ ID NO: 2258; WAN024CF6; Start 320; Stop 344
attccgattgtgatgatatgtatga

SEQ ID NO: 319916 - DNA, 25 bp, Artificial
  probe
  misc_feature (1)..(25): SEQ ID NO: 2258; WAN024CF6; Start 319; Stop 343
cattccgattgtgatgatatgtatg

SEQ ID NO: 319917 - DNA, 25 bp, Artificial
  probe
  misc_feature (1)..(25): SEQ ID NO: 2258; WAN024CF6; Start 290; Stop 314
taagcgaacatcaagaggatattat

SEQ ID NO: 319918 - DNA, 25 bp, Artificial
  probe
  misc_feature (1)..(25): SEQ ID NO: 2258; WAN024CF6; Start 165; Stop 189
tacggttgacgaatacacttccatt

SEQ ID NO: 319919 - DNA, 25 bp, Artificial
  probe
  misc_feature (1)..(25): SEQ ID NO: 2258; WAN024CF6; Start 164; Stop 188
ttacggttgacgaatacacttccat

SEQ ID NO: 319920 - DNA, 25 bp, Artificial
  probe
  misc_feature (1)..(25): SEQ ID NO: 2258; WAN024CF6; Start 278; Stop 302
gcattgaagaactaagcgaacatca

SEQ ID NO: 319921 - DNA, 25 bp, Artificial
  probe
  misc_feature (1)..(25): SEQ ID NO: 2258; WAN024CF6; Start 121; Stop 145
gatgaatatgaggaatacgccattc

SEQ ID NO: 319922 - DNA, 25 bp, Artificial
  probe
  misc_feature (1)..(25): SEQ ID NO: 2258; WAN024CF6; Start 275; Stop 299
caagcattgaagaactaagcgaaca

SEQ ID NO: 319923 - DNA, 25 bp, Artificial
  probe
  misc_feature (1)..(25): SEQ ID NO: 2259; WAN024FK6; Start 1356; Stop 1380
gccagttgaagatgttgtaattgaa

SEQ ID NO: 319924 - DNA, 25 bp, Artificial
  probe
  misc_feature (1)..(25): SEQ ID NO: 2259; WAN024FK6; Start 1354; Stop 1378
aagccagttgaagatgttgtaattg

SEQ ID NO: 319925 - DNA, 25 bp, Artificial
  probe
  misc_feature (1)..(25): SEQ ID NO: 2259; WAN024FK6; Start 858; Stop 882
gactattaagaccaatcacggagac

SEQ ID NO: 319926 - DNA, 25 bp, Artificial
  probe
  misc_feature (1)..(25): SEQ ID NO: 2259; WAN024FK6; Start 860; Stop 884
ctattaagaccaatcacggagactt

SEQ ID NO: 319927 - DNA, 25 bp, Artificial
  probe
  misc_feature (1)..(25): SEQ ID NO: 2259; WAN024FK6; Start 859; Stop 883
actattaagaccaatcacggagact

SEQ ID NO: 319928 - DNA, 25 bp, Artificial
  probe
  misc_feature (1)..(25): SEQ ID NO: 2259; WAN024FK6; Start 1355; Stop 1379
agccagttgaagatgttgtaattga

SEQ ID NO: 319929 - DNA, 25 bp, Artificial
  probe
  misc_feature (1)..(25): SEQ ID NO: 2259; WAN024FK6; Start 50; Stop 74
ttgatattgatgatacattgcggaa

SEQ ID NO: 319930 - DNA, 25 bp, Artificial
  probe
  misc_feature (1)..(25): SEQ ID NO: 2259; WAN024FK6; Start 1353; Stop 1377
caagccagttgaagatgttgtaatt

SEQ ID NO: 319931 - DNA, 25 bp, Artificial
  probe
  misc_feature (1)..(25): SEQ ID NO: 2259; WAN024FK6; Start 314; Stop 338
ctaagcaagaaggaattgagtatgg

SEQ ID NO: 319932 - DNA, 25 bp, Artificial
  probe
  misc_feature (1)..(25): SEQ ID NO: 2259; WAN024FK6; Start 51; Stop 75
tgatattgatgatacattgcggaat

SEQ ID NO: 319933 - DNA, 25 bp, Artificial
  probe
  misc_feature (1)..(25): SEQ ID NO: 2259; WAN024FK6; Start 315; Stop 339
taagcaagaaggaattgagtatggc

SEQ ID NO: 319934 - DNA, 25 bp, Artificial
  probe
  misc_feature (1)..(25): SEQ ID NO: 2259; WAN024FK6; Start 313; Stop 337
gctaagcaagaaggaattgagtatg

SEQ ID NO: 319935 - DNA, 25 bp, Artificial
  probe
  misc_feature (1)..(25): SEQ ID NO: 2259; WAN024FK6; Start 857; Stop 881
cgactattaagaccaatcacggaga

SEQ ID NO: 319936 - DNA, 25 bp, Artificial
  probe
  misc_feature (1)..(25): SEQ ID NO: 2259; WAN024FK6; Start 312; Stop 336
ggctaagcaagaaggaattgagtat

SEQ ID NO: 319937 - DNA, 25 bp, Artificial
  probe
  misc_feature (1)..(25): SEQ ID NO: 2259; WAN024FK6; Start 862; Stop 886
attaagaccaatcacggagacttac

SEQ ID NO: 319938 - DNA, 25 bp, Artificial
  probe
  misc_feature (1)..(25): SEQ ID NO: 2259; WAN024FK6; Start 842; Stop 866
tagaaggtcctcttgcgactattaa

SEQ ID NO: 319939 - DNA, 25 bp, Artificial
  probe
  misc_feature (1)..(25): SEQ ID NO: 2259; WAN024FK6; Start 861; Stop 885
tattaagaccaatcacggagactta

SEQ ID NO: 319940 - DNA, 25 bp, Artificial
  probe
  misc_feature (1)..(25): SEQ ID NO: 2259; WAN024FK6; Start 322; Stop 346
gaaggaattgagtatggcttggttg

SEQ ID NO: 319941 - DNA, 25 bp, Artificial
  probe
  misc_feature (1)..(25): SEQ ID NO: 2259; WAN024FK6; Start 321; Stop 345
agaaggaattgagtatggcttggtt

SEQ ID NO: 319942 - DNA, 25 bp, Artificial
  probe
  misc_feature (1)..(25): SEQ ID NO: 2259; WAN024FK6; Start 320; Stop 344
aagaaggaattgagtatggcttggt

SEQ ID NO: 319943 - DNA, 25 bp, Artificial
  probe
  misc_feature (1)..(25): SEQ ID NO: 2259; WAN024FK6; Start 52; Stop 76
gatattgatgatacattgcggaatt

SEQ ID NO: 319944 - DNA, 25 bp, Artificial
  probe
  misc_feature (1)..(25): SEQ ID NO: 2259; WAN024FK6; Start 853; Stop 877
cttgcgactattaagaccaatcacg

SEQ ID NO: 319945 - DNA, 25 bp, Artificial
  probe
  misc_feature (1)..(25): SEQ ID NO: 2259; WAN024FK6; Start 841; Stop 865
gtagaaggtcctcttgcgactatta

SEQ ID NO: 319946 - DNA, 25 bp, Artificial
  probe
  misc_feature (1)..(25): SEQ ID NO: 2259; WAN024FK6; Start 843; Stop 867
agaaggtcctcttgcgactattaag

SEQ ID NO: 319947 - DNA, 25 bp, Artificial
  probe
  misc_feature (1)..(25): SEQ ID NO: 2259; WAN024FK6; Start 661; Stop 685
gacttggaactctttgattatgctg

SEQ ID NO: 319948 - DNA, 25 bp, Artificial
  probe
  misc_feature (1)..(25): SEQ ID NO: 2259; WAN024FK6; Start 665; Stop 689
tggaactctttgattatgctggaat

SEQ ID NO: 319949 - DNA, 25 bp, Artificial
  probe
  misc_feature (1)..(25): SEQ ID NO: 2259; WAN024FK6; Start 664; Stop 688
ttggaactctttgattatgctggaa

SEQ ID NO: 319950 - DNA, 25 bp, Artificial
  probe
  misc_feature (1)..(25): SEQ ID NO: 2259; WAN024FK6; Start 256; Stop 280
caggtcatttatcagcatcagattg

SEQ ID NO: 319951 - DNA, 25 bp, Artificial
  probe
  misc_feature (1)..(25): SEQ ID NO: 2259; WAN024FK6; Start 255; Stop 279
tcaggtcatttatcagcatcagatt

SEQ ID NO: 319952 - DNA, 25 bp, Artificial
  probe
  misc_feature (1)..(25): SEQ ID NO: 2259; WAN024FK6; Start 825; Stop 849
agtagacattgaaacagtagaaggt

SEQ ID NO: 319953 - DNA, 25 bp, Artificial
  probe
  misc_feature (1)..(25): SEQ ID NO: 2259; WAN024FK6; Start 384; Stop 408
gatgagtgaagctatcaatccaatt

SEQ ID NO: 319954 - DNA, 25 bp, Artificial
  probe
  misc_feature (1)..(25): SEQ ID NO: 2259; WAN024FK6; Start 975; Stop 999
ccaccgtattatcaaggactttatg

SEQ ID NO: 319955 - DNA, 25 bp, Artificial
  probe
  misc_feature (1)..(25): SEQ ID NO: 2259; WAN024FK6; Start 7; Stop 31
gcgaaattaagatacaaggcaaaga

SEQ ID NO: 319956 - DNA, 25 bp, Artificial
  probe
  misc_feature (1)..(25): SEQ ID NO: 2260; WAN024CL6; Start 824; Stop 848
cgtataatctcaactaccaaggaca

SEQ ID NO: 319957 - DNA, 25 bp, Artificial
  probe
  misc_feature (1)..(25): SEQ ID NO: 2260; WAN024CL6; Start 821; Stop 845
atccgtataatctcaactaccaagg

SEQ ID NO: 319958 - DNA, 25 bp, Artificial
  probe
  misc_feature (1)..(25): SEQ ID NO: 2260; WAN024CL6; Start 1015; Stop 1039
attaccaagcagattaagcaacaag

SEQ ID NO: 319959 - DNA, 25 bp, Artificial
  probe
  misc_feature (1)..(25): SEQ ID NO: 2260; WAN024CL6; Start 1014; Stop 1038
gattaccaagcagattaagcaacaa

SEQ ID NO: 319960 - DNA, 25 bp, Artificial
  probe
  misc_feature (1)..(25): SEQ ID NO: 2260; WAN024CL6; Start 823; Stop 847
ccgtataatctcaactaccaaggac

SEQ ID NO: 319961 - DNA, 25 bp, Artificial
  probe
  misc_feature (1)..(25): SEQ ID NO: 2260; WAN024CL6; Start 1011; Stop 1035
tacgattaccaagcagattaagcaa

SEQ ID NO: 319962 - DNA, 25 bp, Artificial
  probe
  misc_feature (1)..(25): SEQ ID NO: 2260; WAN024CL6; Start 1017; Stop 1041
taccaagcagattaagcaacaagat

SEQ ID NO: 319963 - DNA, 25 bp, Artificial
  probe
  misc_feature (1)..(25): SEQ ID NO: 2260; WAN024CL6; Start 1016; Stop 1040
ttaccaagcagattaagcaacaaga

SEQ ID NO: 319964 - DNA, 25 bp, Artificial
  probe
  misc_feature (1)..(25): SEQ ID NO: 2260; WAN024CL6; Start 326; Stop 350
cacttgaacttatggacggtatgtt

SEQ ID NO: 319965 - DNA, 25 bp, Artificial
  probe
  misc_feature (1)..(25): SEQ ID NO: 2260; WAN024CL6; Start 315; Stop 339
caacacaaccacacttgaacttatg

SEQ ID NO: 319966 - DNA, 25 bp, Artificial
  probe
  misc_feature (1)..(25): SEQ ID NO: 2260; WAN024CL6; Start 324; Stop 348
cacacttgaacttatggacggtatg

SEQ ID NO: 319967 - DNA, 25 bp, Artificial
  probe
  misc_feature (1)..(25): SEQ ID NO: 2260; WAN024CL6; Start 818; Stop 842
actatccgtataatctcaactacca

SEQ ID NO: 319968 - DNA, 25 bp, Artificial
  probe
  misc_feature (1)..(25): SEQ ID NO: 2260; WAN024CL6; Start 684; Stop 708
tggtatcacttgtaagacggataag

SEQ ID NO: 319969 - DNA, 25 bp, Artificial
  probe
  misc_feature (1)..(25): SEQ ID NO: 2260; WAN024CL6; Start 683; Stop 707
ctggtatcacttgtaagacggataa

SEQ ID NO: 319970 - DNA, 25 bp, Artificial
  probe
  misc_feature (1)..(25): SEQ ID NO: 2260; WAN024CL6; Start 685; Stop 709
ggtatcacttgtaagacggataaga

SEQ ID NO: 319971 - DNA, 25 bp, Artificial
  probe
  misc_feature (1)..(25): SEQ ID NO: 2260; WAN024CL6; Start 1013; Stop 1037
cgattaccaagcagattaagcaaca

SEQ ID NO: 319972 - DNA, 25 bp, Artificial
  probe
  misc_feature (1)..(25): SEQ ID NO: 2260; WAN024CL6; Start 1012; Stop 1036
acgattaccaagcagattaagcaac

SEQ ID NO: 319973 - DNA, 25 bp, Artificial
  probe
  misc_feature (1)..(25): SEQ ID NO: 2260; WAN024CL6; Start 1010; Stop 1034
gtacgattaccaagcagattaagca

SEQ ID NO: 319974 - DNA, 25 bp, Artificial
  probe
  misc_feature (1)..(25): SEQ ID NO: 2260; WAN024CL6; Start 1018; Stop 1042
accaagcagattaagcaacaagatg

SEQ ID NO: 319975 - DNA, 25 bp, Artificial
  probe
  misc_feature (1)..(25): SEQ ID NO: 2260; WAN024CL6; Start 825; Stop 849
gtataatctcaactaccaaggacat

SEQ ID NO: 319976 - DNA, 25 bp, Artificial
  probe
  misc_feature (1)..(25): SEQ ID NO: 2260; WAN024CL6; Start 621; Stop 645
gattaacgctgacagttacttcttg

SEQ ID NO: 319977 - DNA, 25 bp, Artificial
  probe
  misc_feature (1)..(25): SEQ ID NO: 2260; WAN024CL6; Start 822; Stop 846
tccgtataatctcaactaccaagga

SEQ ID NO: 319978 - DNA, 25 bp, Artificial
  probe
  misc_feature (1)..(25): SEQ ID NO: 2260; WAN024CL6; Start 820; Stop 844
tatccgtataatctcaactaccaag

SEQ ID NO: 319979 - DNA, 25 bp, Artificial
  probe
  misc_feature (1)..(25): SEQ ID NO: 2260; WAN024CL6; Start 819; Stop 843
ctatccgtataatctcaactaccaa

SEQ ID NO: 319980 - DNA, 25 bp, Artificial
  probe
  misc_feature (1)..(25): SEQ ID NO: 2260; WAN024CL6; Start 686; Stop 710
gtatcacttgtaagacggataagaa

SEQ ID NO: 319981 - DNA, 25 bp, Artificial
  probe
  misc_feature (1)..(25): SEQ ID NO: 2260; WAN024CL6; Start 682; Stop 706
gctggtatcacttgtaagacggata

SEQ ID NO: 319982 - DNA, 25 bp, Artificial
  probe
  misc_feature (1)..(25): SEQ ID NO: 2260; WAN024CL6; Start 325; Stop 349
acacttgaacttatggacggtatgt

SEQ ID NO: 319983 - DNA, 25 bp, Artificial
  probe
  misc_feature (1)..(25): SEQ ID NO: 2260; WAN024CL6; Start 687; Stop 711
tatcacttgtaagacggataagaag

SEQ ID NO: 319984 - DNA, 25 bp, Artificial
  probe
  misc_feature (1)..(25): SEQ ID NO: 2260; WAN024CL6; Start 314; Stop 338
gcaacacaaccacacttgaacttat

SEQ ID NO: 319985 - DNA, 25 bp, Artificial
  probe
  misc_feature (1)..(25): SEQ ID NO: 2260; WAN024CL6; Start 747; Stop 771
ggaacttgataatgtcttcataacc

SEQ ID NO: 319986 - DNA, 25 bp, Artificial
  probe
  misc_feature (1)..(25): SEQ ID NO: 2260; WAN024CL6; Start 184; Stop 208
accagtatcattaccacgttcaata

SEQ ID NO: 319987 - DNA, 25 bp, Artificial
  probe
  misc_feature (1)..(25): SEQ ID NO: 2260; WAN024CL6; Start 183; Stop 207
taccagtatcattaccacgttcaat

SEQ ID NO: 319988 - DNA, 25 bp, Artificial
  probe
  misc_feature (1)..(25): SEQ ID NO: 2260; WAN024CL6; Start 182; Stop 206
ttaccagtatcattaccacgttcaa

SEQ ID NO: 319989 - DNA, 25 bp, Artificial
  probe
  misc_feature (1)..(25): SEQ ID NO: 2261; WAN024CLF; Start 87; Stop 111
gattgaataccaacgtccagaagaa

SEQ ID NO: 319990 - DNA, 25 bp, Artificial
  probe
  misc_feature (1)..(25): SEQ ID NO: 2261; WAN024CLF; Start 125; Stop 149
tcttgaagagtgtcaacctaactaa

SEQ ID NO: 319991 - DNA, 25 bp, Artificial
  probe
  misc_feature (1)..(25): SEQ ID NO: 2261; WAN024CLF; Start 59; Stop 83
ccttctactgtggtttactgggttt

SEQ ID NO: 319992 - DNA, 25 bp, Artificial
  probe
  misc_feature (1)..(25): SEQ ID NO: 2261; WAN024CLF; Start 84; Stop 108
taggattgaataccaacgtccagaa

SEQ ID NO: 319993 - DNA, 25 bp, Artificial
  probe
  misc_feature (1)..(25): SEQ ID NO: 2261; WAN024CLF; Start 83; Stop 107
ttaggattgaataccaacgtccaga

SEQ ID NO: 319994 - DNA, 25 bp, Artificial
  probe
  misc_feature (1)..(25): SEQ ID NO: 2261; WAN024CLF; Start 126; Stop 150
cttgaagagtgtcaacctaactaat

SEQ ID NO: 319995 - DNA, 25 bp, Artificial
  probe
  misc_feature (1)..(25): SEQ ID NO: 2261; WAN024CLF; Start 58; Stop 82
tccttctactgtggtttactgggtt

SEQ ID NO: 319996 - DNA, 25 bp, Artificial
  probe
  misc_feature (1)..(25): SEQ ID NO: 2261; WAN024CLF; Start 88; Stop 112
attgaataccaacgtccagaagaaa

SEQ ID NO: 319997 - DNA, 25 bp, Artificial
  probe
  misc_feature (1)..(25): SEQ ID NO: 2261; WAN024CLF; Start 86; Stop 110
ggattgaataccaacgtccagaaga

SEQ ID NO: 319998 - DNA, 25 bp, Artificial
  probe
  misc_feature (1)..(25): SEQ ID NO: 2261; WAN024CLF; Start 85; Stop 109
aggattgaataccaacgtccagaag

SEQ ID NO: 319999 - DNA, 25 bp, Artificial
  probe
  misc_feature (1)..(25): SEQ ID NO: 2261; WAN024CLF; Start 69; Stop 93
tggtttactgggttttaggattgaa

SEQ ID NO: 320000 - DNA, 25 bp, Artificial
  probe
  misc_feature (1)..(25): SEQ ID NO: 2261; WAN024CLF; Start 62; Stop 86
tctactgtggtttactgggttttag

SEQ ID NO: 320001 - DNA, 25 bp, Artificial
  probe
  misc_feature (1)..(25): SEQ ID NO: 2261; WAN024CLF; Start 61; Stop 85
ttctactgtggtttactgggtttta

SEQ ID NO: 320002 - DNA, 25 bp, Artificial
  probe
  misc_feature (1)..(25): SEQ ID NO: 2261; WAN024CLF; Start 124; Stop 148
ctcttgaagagtgtcaacctaacta

SEQ ID NO: 320003 - DNA, 25 bp, Artificial
  probe
  misc_feature (1)..(25): SEQ ID NO: 2261; WAN024CLF; Start 70; Stop 94
ggtttactgggttttaggattgaat

SEQ ID NO: 320004 - DNA, 25 bp, Artificial
  probe
  misc_feature (1)..(25): SEQ ID NO: 2261; WAN024CLF; Start 60; Stop 84
cttctactgtggtttactgggtttt

SEQ ID NO: 320005 - DNA, 25 bp, Artificial
  probe
  misc_feature (1)..(25): SEQ ID NO: 2261; WAN024CLF; Start 122; Stop 146
ttctcttgaagagtgtcaacctaac

SEQ ID NO: 320006 - DNA, 25 bp, Artificial
  probe
  misc_feature (1)..(25): SEQ ID NO: 2261; WAN024CLF; Start 68; Stop 92
gtggtttactgggttttaggattga

SEQ ID NO: 320007 - DNA, 25 bp, Artificial
  probe
  misc_feature (1)..(25): SEQ ID NO: 2261; WAN024CLF; Start 66; Stop 90
ctgtggtttactgggttttaggatt

SEQ ID NO: 320008 - DNA, 25 bp, Artificial
  probe
  misc_feature (1)..(25): SEQ ID NO: 2261; WAN024CLF; Start 63; Stop 87
ctactgtggtttactgggttttagg

SEQ ID NO: 320009 - DNA, 25 bp, Artificial
  probe
  misc_feature (1)..(25): SEQ ID NO: 2261; WAN024CLF; Start 67; Stop 91
tgtggtttactgggttttaggattg

SEQ ID NO: 320010 - DNA, 25 bp, Artificial
  probe
  misc_feature (1)..(25): SEQ ID NO: 2261; WAN024CLF; Start 64; Stop 88
tactgtggtttactgggttttagga

SEQ ID NO: 320011 - DNA, 25 bp, Artificial
  probe
  misc_feature (1)..(25): SEQ ID NO: 2261; WAN024CLF; Start 123; Stop 147
tctcttgaagagtgtcaacctaact

SEQ ID NO: 320012 - DNA, 25 bp, Artificial
  probe
  misc_feature (1)..(25): SEQ ID NO: 2261; WAN024CLF; Start 82; Stop 106
tttaggattgaataccaacgtccag

SEQ ID NO: 320013 - DNA, 25 bp, Artificial
  probe
  misc_feature (1)..(25): SEQ ID NO: 2261; WAN024CLF; Start 57; Stop 81
gtccttctactgtggtttactgggt

SEQ ID NO: 320014 - DNA, 25 bp, Artificial
  probe
  misc_feature (1)..(25): SEQ ID NO: 2261; WAN024CLF; Start 65; Stop 89
actgtggtttactgggttttaggat

SEQ ID NO: 320015 - DNA, 25 bp, Artificial
  probe
  misc_feature (1)..(25): SEQ ID NO: 2261; WAN024CLF; Start 56; Stop 80
ggtccttctactgtggtttactggg

SEQ ID NO: 320016 - DNA, 25 bp, Artificial
  probe
  misc_feature (1)..(25): SEQ ID NO: 2261; WAN024CLF; Start 75; Stop 99
actgggttttaggattgaataccaa

SEQ ID NO: 320017 - DNA, 25 bp, Artificial
  probe
  misc_feature (1)..(25): SEQ ID NO: 2261; WAN024CLF; Start 76; Stop 100
ctgggttttaggattgaataccaac

SEQ ID NO: 320018 - DNA, 25 bp, Artificial
  probe
  misc_feature (1)..(25): SEQ ID NO: 2261; WAN024CLF; Start 74; Stop 98
tactgggttttaggattgaatacca

SEQ ID NO: 320019 - DNA, 25 bp, Artificial
  probe
  misc_feature (1)..(25): SEQ ID NO: 2261; WAN024CLF; Start 20; Stop 44
ttcccgagttgcttgtatcgaatat

SEQ ID NO: 320020 - DNA, 25 bp, Artificial
  probe
  misc_feature (1)..(25): SEQ ID NO: 2261; WAN024CLF; Start 19; Stop 43
attcccgagttgcttgtatcgaata

SEQ ID NO: 320021 - DNA, 25 bp, Artificial
  probe
  misc_feature (1)..(25): SEQ ID NO: 2261; WAN024CLF; Start 121; Stop 145
tttctcttgaagagtgtcaacctaa

SEQ ID NO: 320022 - DNA, 25 bp, Artificial
  probe
  misc_feature (1)..(25): SEQ ID NO: 2262; WAN024DIU; Start 3; Stop 27
ggactaccaacgaatcaatgaatat

SEQ ID NO: 320023 - DNA, 25 bp, Artificial
  probe
  misc_feature (1)..(25): SEQ ID NO: 2262; WAN024DIU; Start 174; Stop 198
gttgatggtaactcttggaactgtt

SEQ ID NO: 320024 - DNA, 25 bp, Artificial
  probe
  misc_feature (1)..(25): SEQ ID NO: 2262; WAN024DIU; Start 56; Stop 80
taattgaggaagtgaacttgagagg

SEQ ID NO: 320025 - DNA, 25 bp, Artificial
  probe
  misc_feature (1)..(25): SEQ ID NO: 2262; WAN024DIU; Start 54; Stop 78
tgtaattgaggaagtgaacttgaga

SEQ ID NO: 320026 - DNA, 25 bp, Artificial
  probe
  misc_feature (1)..(25): SEQ ID NO: 2262; WAN024DIU; Start 55; Stop 79
gtaattgaggaagtgaacttgagag

SEQ ID NO: 320027 - DNA, 25 bp, Artificial
  probe
  misc_feature (1)..(25): SEQ ID NO: 2262; WAN024DIU; Start 53; Stop 77
ttgtaattgaggaagtgaacttgag

SEQ ID NO: 320028 - DNA, 25 bp, Artificial
  probe
  misc_feature (1)..(25): SEQ ID NO: 2262; WAN024DIU; Start 52; Stop 76
cttgtaattgaggaagtgaacttga

SEQ ID NO: 320029 - DNA, 25 bp, Artificial
  probe
  misc_feature (1)..(25): SEQ ID NO: 2262; WAN024DIU; Start 58; Stop 82
attgaggaagtgaacttgagaggta

SEQ ID NO: 320030 - DNA, 25 bp, Artificial
  probe
  misc_feature (1)..(25): SEQ ID NO: 2262; WAN024DIU; Start 175; Stop 199
ttgatggtaactcttggaactgtta

SEQ ID NO: 320031 - DNA, 25 bp, Artificial
  probe
  misc_feature (1)..(25): SEQ ID NO: 2262; WAN024DIU; Start 59; Stop 83
ttgaggaagtgaacttgagaggtag

SEQ ID NO: 320032 - DNA, 25 bp, Artificial
  probe
  misc_feature (1)..(25): SEQ ID NO: 2262; WAN024DIU; Start 57; Stop 81
aattgaggaagtgaacttgagaggt

SEQ ID NO: 320033 - DNA, 25 bp, Artificial
  probe
  misc_feature (1)..(25): SEQ ID NO: 2262; WAN024DIU; Start 51; Stop 75
ccttgtaattgaggaagtgaacttg

SEQ ID NO: 320034 - DNA, 25 bp, Artificial
  probe
  misc_feature (1)..(25): SEQ ID NO: 2262; WAN024DIU; Start 2; Stop 26
tggactaccaacgaatcaatgaata

SEQ ID NO: 320035 - DNA, 25 bp, Artificial
  probe
  misc_feature (1)..(25): SEQ ID NO: 2262; WAN024DIU; Start 1; Stop 25
atggactaccaacgaatcaatgaat

SEQ ID NO: 320036 - DNA, 25 bp, Artificial
  probe
  misc_feature (1)..(25): SEQ ID NO: 2262; WAN024DIU; Start 61; Stop 85
gaggaagtgaacttgagaggtagtc

SEQ ID NO: 320037 - DNA, 25 bp, Artificial
  probe
  misc_feature (1)..(25): SEQ ID NO: 2262; WAN024DIU; Start 205; Stop 229
agtttgaacaatttagagcgtaagg

SEQ ID NO: 320038 - DNA, 25 bp, Artificial
  probe
  misc_feature (1)..(25): SEQ ID NO: 2262; WAN024DIU; Start 202; Stop 226
acaagtttgaacaatttagagcgta

SEQ ID NO: 320039 - DNA, 25 bp, Artificial
  probe
  misc_feature (1)..(25): SEQ ID NO: 2262; WAN024DIU; Start 201; Stop 225
gacaagtttgaacaatttagagcgt

SEQ ID NO: 320040 - DNA, 25 bp, Artificial
  probe
  misc_feature (1)..(25): SEQ ID NO: 2262; WAN024DIU; Start 199; Stop 223
acgacaagtttgaacaatttagagc

SEQ ID NO: 320041 - DNA, 25 bp, Artificial
  probe
  misc_feature (1)..(25): SEQ ID NO: 2262; WAN024DIU; Start 206; Stop 230
gtttgaacaatttagagcgtaaggg

SEQ ID NO: 320042 - DNA, 25 bp, Artificial
  probe
  misc_feature (1)..(25): SEQ ID NO: 2262; WAN024DIU; Start 64; Stop 88
gaagtgaacttgagaggtagtcgtt

SEQ ID NO: 320043 - DNA, 25 bp, Artificial
  probe
  misc_feature (1)..(25): SEQ ID NO: 2262; WAN024DIU; Start 203; Stop 227
caagtttgaacaatttagagcgtaa

SEQ ID NO: 320044 - DNA, 25 bp, Artificial
  probe
  misc_feature (1)..(25): SEQ ID NO: 2262; WAN024DIU; Start 60; Stop 84
tgaggaagtgaacttgagaggtagt

SEQ ID NO: 320045 - DNA, 25 bp, Artificial
  probe
  misc_feature (1)..(25): SEQ ID NO: 2262; WAN024DIU; Start 200; Stop 224
cgacaagtttgaacaatttagagcg

SEQ ID NO: 320046 - DNA, 25 bp, Artificial
  probe
  misc_feature (1)..(25): SEQ ID NO: 2262; WAN024DIU; Start 4; Stop 28
gactaccaacgaatcaatgaatatt

SEQ ID NO: 320047 - DNA, 25 bp, Artificial
  probe
  misc_feature (1)..(25): SEQ ID NO: 2262; WAN024DIU; Start 204; Stop 228
aagtttgaacaatttagagcgtaag

SEQ ID NO: 320048 - DNA, 25 bp, Artificial
  probe
  misc_feature (1)..(25): SEQ ID NO: 2262; WAN024DIU; Start 370; Stop 394
gaagaaattgctgtcatgggtaaag

SEQ ID NO: 320049 - DNA, 25 bp, Artificial
  probe
  misc_feature (1)..(25): SEQ ID NO: 2262; WAN024DIU; Start 348; Stop 372
aattattgatggcatgagcgaggaa

SEQ ID NO: 320050 - DNA, 25 bp, Artificial
  probe
  misc_feature (1)..(25): SEQ ID NO: 2262; WAN024DIU; Start 207; Stop 231
tttgaacaatttagagcgtaagggc

SEQ ID NO: 320051 - DNA, 25 bp, Artificial
  probe
  misc_feature (1)..(25): SEQ ID NO: 2262; WAN024DIU; Start 296; Stop 320
gtcgcttgattcatagactgcataa

SEQ ID NO: 320052 - DNA, 25 bp, Artificial
  probe
  misc_feature (1)..(25): SEQ ID NO: 2262; WAN024DIU; Start 198; Stop 222
tacgacaagtttgaacaatttagag

SEQ ID NO: 320053 - DNA, 25 bp, Artificial
  probe
  misc_feature (1)..(25): SEQ ID NO: 2262; WAN024DIU; Start 288; Stop 312
aaagaagggtcgcttgattcataga

SEQ ID NO: 320054 - DNA, 25 bp, Artificial
  probe
  misc_feature (1)..(25): SEQ ID NO: 2262; WAN024DIU; Start 349; Stop 373
attattgatggcatgagcgaggaag

SEQ ID NO: 320055 - DNA, 25 bp, Artificial
  probe
  misc_feature (1)..(25): SEQ ID NO: 2263; WAN024FP4; Start 1; Stop 25
atggactcacaagacaataaacgaa

SEQ ID NO: 320056 - DNA, 25 bp, Artificial
  probe
  misc_feature (1)..(25): SEQ ID NO: 2263; WAN024FP4; Start 2; Stop 26
tggactcacaagacaataaacgaaa

SEQ ID NO: 320057 - DNA, 25 bp, Artificial
  probe
  misc_feature (1)..(25): SEQ ID NO: 2263; WAN024FP4; Start 170; Stop 194
gaatcgaatggctctttctcctatt

SEQ ID NO: 320058 - DNA, 25 bp, Artificial
  probe
  misc_feature (1)..(25): SEQ ID NO: 2263; WAN024FP4; Start 171; Stop 195
aatcgaatggctctttctcctattg

SEQ ID NO: 320059 - DNA, 25 bp, Artificial
  probe
  misc_feature (1)..(25): SEQ ID NO: 2263; WAN024FP4; Start 172; Stop 196
atcgaatggctctttctcctattga

SEQ ID NO: 320060 - DNA, 25 bp, Artificial
  probe
  misc_feature (1)..(25): SEQ ID NO: 2263; WAN024FP4; Start 3; Stop 27
ggactcacaagacaataaacgaaaa

SEQ ID NO: 320061 - DNA, 25 bp, Artificial
  probe
  misc_feature (1)..(25): SEQ ID NO: 2263; WAN024FP4; Start 7; Stop 31
tcacaagacaataaacgaaaatgga

SEQ ID NO: 320062 - DNA, 25 bp, Artificial
  probe
  misc_feature (1)..(25): SEQ ID NO: 2263; WAN024FP4; Start 6; Stop 30
ctcacaagacaataaacgaaaatgg

SEQ ID NO: 320063 - DNA, 25 bp, Artificial
  probe
  misc_feature (1)..(25): SEQ ID NO: 2263; WAN024FP4; Start 8; Stop 32
cacaagacaataaacgaaaatggaa

SEQ ID NO: 320064 - DNA, 25 bp, Artificial
  probe
  misc_feature (1)..(25): SEQ ID NO: 2263; WAN024FP4; Start 173; Stop 197
tcgaatggctctttctcctattgag

SEQ ID NO: 320065 - DNA, 25 bp, Artificial
  probe
  misc_feature (1)..(25): SEQ ID NO: 2263; WAN024FP4; Start 5; Stop 29
actcacaagacaataaacgaaaatg

SEQ ID NO: 320066 - DNA, 25 bp, Artificial
  probe
  misc_feature (1)..(25): SEQ ID NO: 2263; WAN024FP4; Start 169; Stop 193
cgaatcgaatggctctttctcctat

SEQ ID NO: 320067 - DNA, 25 bp, Artificial
  probe
  misc_feature (1)..(25): SEQ ID NO: 2263; WAN024FP4; Start 4; Stop 28
gactcacaagacaataaacgaaaat

SEQ ID NO: 320068 - DNA, 25 bp, Artificial
  probe
  misc_feature (1)..(25): SEQ ID NO: 2263; WAN024FP4; Start 9; Stop 33
acaagacaataaacgaaaatggaaa

SEQ ID NO: 320069 - DNA, 25 bp, Artificial
  probe
  misc_feature (1)..(25): SEQ ID NO: 2263; WAN024FP4; Start 10; Stop 34
caagacaataaacgaaaatggaaaa

SEQ ID NO: 320070 - DNA, 25 bp, Artificial
  probe
  misc_feature (1)..(25): SEQ ID NO: 2263; WAN024FP4; Start 168; Stop 192
acgaatcgaatggctctttctccta

SEQ ID NO: 320071 - DNA, 25 bp, Artificial
  probe
  misc_feature (1)..(25): SEQ ID NO: 2263; WAN024FP4; Start 268; Stop 292
tatcacttttccatgctggctaaaa

SEQ ID NO: 320072 - DNA, 25 bp, Artificial
  probe
  misc_feature (1)..(25): SEQ ID NO: 2263; WAN024FP4; Start 261; Stop 285
cagtcactatcacttttccatgctg

SEQ ID NO: 320073 - DNA, 25 bp, Artificial
  probe
  misc_feature (1)..(25): SEQ ID NO: 2263; WAN024FP4; Start 267; Stop 291
ctatcacttttccatgctggctaaa

SEQ ID NO: 320074 - DNA, 25 bp, Artificial
  probe
  misc_feature (1)..(25): SEQ ID NO: 2263; WAN024FP4; Start 165; Stop 189
gtcacgaatcgaatggctctttctc

SEQ ID NO: 320075 - DNA, 25 bp, Artificial
  probe
  misc_feature (1)..(25): SEQ ID NO: 2263; WAN024FP4; Start 370; Stop 394
ccacgaatctgggatttattatttt

SEQ ID NO: 320076 - DNA, 25 bp, Artificial
  probe
  misc_feature (1)..(25): SEQ ID NO: 2263; WAN024FP4; Start 260; Stop 284
ccagtcactatcacttttccatgct

SEQ ID NO: 320077 - DNA, 25 bp, Artificial
  probe
  misc_feature (1)..(25): SEQ ID NO: 2263; WAN024FP4; Start 266; Stop 290
actatcacttttccatgctggctaa

SEQ ID NO: 320078 - DNA, 25 bp, Artificial
  probe
  misc_feature (1)..(25): SEQ ID NO: 2263; WAN024FP4; Start 163; Stop 187
gtgtcacgaatcgaatggctctttc

SEQ ID NO: 320079 - DNA, 25 bp, Artificial
  probe
  misc_feature (1)..(25): SEQ ID NO: 2263; WAN024FP4; Start 164; Stop 188
tgtcacgaatcgaatggctctttct

SEQ ID NO: 320080 - DNA, 25 bp, Artificial
  probe
  misc_feature (1)..(25): SEQ ID NO: 2263; WAN024FP4; Start 265; Stop 289
cactatcacttttccatgctggcta

SEQ ID NO: 320081 - DNA, 25 bp, Artificial
  probe
  misc_feature (1)..(25): SEQ ID NO: 2263; WAN024FP4; Start 262; Stop 286
agtcactatcacttttccatgctgg

SEQ ID NO: 320082 - DNA, 25 bp, Artificial
  probe
  misc_feature (1)..(25): SEQ ID NO: 2263; WAN024FP4; Start 128; Stop 152
ctctagtggtcatccttgcaggttt

SEQ ID NO: 320083 - DNA, 25 bp, Artificial
  probe
  misc_feature (1)..(25): SEQ ID NO: 2263; WAN024FP4; Start 167; Stop 191
cacgaatcgaatggctctttctcct

SEQ ID NO: 320084 - DNA, 25 bp, Artificial
  probe
  misc_feature (1)..(25): SEQ ID NO: 2263; WAN024FP4; Start 166; Stop 190
tcacgaatcgaatggctctttctcc

SEQ ID NO: 320085 - DNA, 25 bp, Artificial
  probe
  misc_feature (1)..(25): SEQ ID NO: 2263; WAN024FP4; Start 156; Stop 180
ttttcaggtgtcacgaatcgaatgg

SEQ ID NO: 320086 - DNA, 25 bp, Artificial
  probe
  misc_feature (1)..(25): SEQ ID NO: 2263; WAN024FP4; Start 259; Stop 283
gccagtcactatcacttttccatgc

SEQ ID NO: 320087 - DNA, 25 bp, Artificial
  probe
  misc_feature (1)..(25): SEQ ID NO: 2263; WAN024FP4; Start 130; Stop 154
ctagtggtcatccttgcaggttttg

SEQ ID NO: 320088 - DNA, 25 bp, Artificial
  probe
  misc_feature (1)..(25): SEQ ID NO: 2264; WAN024F4M; Start 106; Stop 130
accaacttgataatctctgctaact

SEQ ID NO: 320089 - DNA, 25 bp, Artificial
  probe
  misc_feature (1)..(25): SEQ ID NO: 2264; WAN024F4M; Start 104; Stop 128
tgaccaacttgataatctctgctaa

SEQ ID NO: 320090 - DNA, 25 bp, Artificial
  probe
  misc_feature (1)..(25): SEQ ID NO: 2264; WAN024F4M; Start 103; Stop 127
ttgaccaacttgataatctctgcta

SEQ ID NO: 320091 - DNA, 25 bp, Artificial
  probe
  misc_feature (1)..(25): SEQ ID NO: 2264; WAN024F4M; Start 105; Stop 129
gaccaacttgataatctctgctaac

SEQ ID NO: 320092 - DNA, 25 bp, Artificial
  probe
  misc_feature (1)..(25): SEQ ID NO: 2264; WAN024F4M; Start 107; Stop 131
ccaacttgataatctctgctaactc

SEQ ID NO: 320093 - DNA, 25 bp, Artificial
  probe
  misc_feature (1)..(25): SEQ ID NO: 2264; WAN024F4M; Start 251; Stop 275
gattaaccacttcataggctgtcag

SEQ ID NO: 320094 - DNA, 25 bp, Artificial
  probe
  misc_feature (1)..(25): SEQ ID NO: 2264; WAN024F4M; Start 252; Stop 276
attaaccacttcataggctgtcaga

SEQ ID NO: 320095 - DNA, 25 bp, Artificial
  probe
  misc_feature (1)..(25): SEQ ID NO: 2264; WAN024F4M; Start 108; Stop 132
caacttgataatctctgctaactca

SEQ ID NO: 320096 - DNA, 25 bp, Artificial
  probe
  misc_feature (1)..(25): SEQ ID NO: 2264; WAN024F4M; Start 114; Stop 138
gataatctctgctaactcagtcgtt

SEQ ID NO: 320097 - DNA, 25 bp, Artificial
  probe
  misc_feature (1)..(25): SEQ ID NO: 2264; WAN024F4M; Start 112; Stop 136
ttgataatctctgctaactcagtcg

SEQ ID NO: 320098 - DNA, 25 bp, Artificial
  probe
  misc_feature (1)..(25): SEQ ID NO: 2264; WAN024F4M; Start 115; Stop 139
ataatctctgctaactcagtcgttg

SEQ ID NO: 320099 - DNA, 25 bp, Artificial
  probe
  misc_feature (1)..(25): SEQ ID NO: 2264; WAN024F4M; Start 110; Stop 134
acttgataatctctgctaactcagt

SEQ ID NO: 320100 - DNA, 25 bp, Artificial
  probe
  misc_feature (1)..(25): SEQ ID NO: 2264; WAN024F4M; Start 250; Stop 274
tgattaaccacttcataggctgtca

SEQ ID NO: 320101 - DNA, 25 bp, Artificial
  probe
  misc_feature (1)..(25): SEQ ID NO: 2264; WAN024F4M; Start 113; Stop 137
tgataatctctgctaactcagtcgt

SEQ ID NO: 320102 - DNA, 25 bp, Artificial
  probe
  misc_feature (1)..(25): SEQ ID NO: 2264; WAN024F4M; Start 111; Stop 135
cttgataatctctgctaactcagtc

SEQ ID NO: 320103 - DNA, 25 bp, Artificial
  probe
  misc_feature (1)..(25): SEQ ID NO: 2264; WAN024F4M; Start 253; Stop 277
ttaaccacttcataggctgtcagac

SEQ ID NO: 320104 - DNA, 25 bp, Artificial
  probe
  misc_feature (1)..(25): SEQ ID NO: 2264; WAN024F4M; Start 116; Stop 140
taatctctgctaactcagtcgttgt

SEQ ID NO: 320105 - DNA, 25 bp, Artificial
  probe
  misc_feature (1)..(25): SEQ ID NO: 2264; WAN024F4M; Start 109; Stop 133
aacttgataatctctgctaactcag

SEQ ID NO: 320106 - DNA, 25 bp, Artificial
  probe
  misc_feature (1)..(25): SEQ ID NO: 2264; WAN024F4M; Start 102; Stop 126
tttgaccaacttgataatctctgct

SEQ ID NO: 320107 - DNA, 25 bp, Artificial
  probe
  misc_feature (1)..(25): SEQ ID NO: 2264; WAN024F4M; Start 365; Stop 389
ctcccaagtcataacaaattccatc

SEQ ID NO: 320108 - DNA, 25 bp, Artificial
  probe
  misc_feature (1)..(25): SEQ ID NO: 2264; WAN024F4M; Start 367; Stop 391
cccaagtcataacaaattccatcaa

SEQ ID NO: 320109 - DNA, 25 bp, Artificial
  probe
  misc_feature (1)..(25): SEQ ID NO: 2264; WAN024F4M; Start 366; Stop 390
tcccaagtcataacaaattccatca

SEQ ID NO: 320110 - DNA, 25 bp, Artificial
  probe
  misc_feature (1)..(25): SEQ ID NO: 2264; WAN024F4M; Start 255; Stop 279
aaccacttcataggctgtcagacta

SEQ ID NO: 320111 - DNA, 25 bp, Artificial
  probe
  misc_feature (1)..(25): SEQ ID NO: 2264; WAN024F4M; Start 254; Stop 278
taaccacttcataggctgtcagact

SEQ ID NO: 320112 - DNA, 25 bp, Artificial
  probe
  misc_feature (1)..(25): SEQ ID NO: 2264; WAN024F4M; Start 101; Stop 125
gtttgaccaacttgataatctctgc

SEQ ID NO: 320113 - DNA, 25 bp, Artificial
  probe
  misc_feature (1)..(25): SEQ ID NO: 2264; WAN024F4M; Start 123; Stop 147
tgctaactcagtcgttgtctcaatc

SEQ ID NO: 320114 - DNA, 25 bp, Artificial
  probe
  misc_feature (1)..(25): SEQ ID NO: 2264; WAN024F4M; Start 364; Stop 388
actcccaagtcataacaaattccat

SEQ ID NO: 320115 - DNA, 25 bp, Artificial
  probe
  misc_feature (1)..(25): SEQ ID NO: 2264; WAN024F4M; Start 117; Stop 141
aatctctgctaactcagtcgttgtc

SEQ ID NO: 320116 - DNA, 25 bp, Artificial
  probe
  misc_feature (1)..(25): SEQ ID NO: 2264; WAN024F4M; Start 248; Stop 272
aatgattaaccacttcataggctgt

SEQ ID NO: 320117 - DNA, 25 bp, Artificial
  probe
  misc_feature (1)..(25): SEQ ID NO: 2264; WAN024F4M; Start 249; Stop 273
atgattaaccacttcataggctgtc

SEQ ID NO: 320118 - DNA, 25 bp, Artificial
  probe
  misc_feature (1)..(25): SEQ ID NO: 2264; WAN024F4M; Start 363; Stop 387
cactcccaagtcataacaaattcca

SEQ ID NO: 320119 - DNA, 25 bp, Artificial
  probe
  misc_feature (1)..(25): SEQ ID NO: 2264; WAN024F4M; Start 362; Stop 386
acactcccaagtcataacaaattcc

SEQ ID NO: 320120 - DNA, 25 bp, Artificial
  probe
  misc_feature (1)..(25): SEQ ID NO: 2264; WAN024F4M; Start 361; Stop 385
gacactcccaagtcataacaaattc

SEQ ID NO: 320121 - DNA, 25 bp, Artificial
  probe
  misc_feature (1)..(25): SEQ ID NO: 2265; WAN024GBH; Start 184; Stop 208
ccagtcttaaccatattcatcgtta

SEQ ID NO: 320122 - DNA, 25 bp, Artificial
  probe
  misc_feature (1)..(25): SEQ ID NO: 2265; WAN024GBH; Start 180; Stop 204
ttgcccagtcttaaccatattcatc

SEQ ID NO: 320123 - DNA, 25 bp, Artificial
  probe
  misc_feature (1)..(25): SEQ ID NO: 2265; WAN024GBH; Start 179; Stop 203
cttgcccagtcttaaccatattcat

SEQ ID NO: 320124 - DNA, 25 bp, Artificial
  probe
  misc_feature (1)..(25): SEQ ID NO: 2265; WAN024GBH; Start 183; Stop 207
cccagtcttaaccatattcatcgtt

SEQ ID NO: 320125 - DNA, 25 bp, Artificial
  probe
  misc_feature (1)..(25): SEQ ID NO: 2265; WAN024GBH; Start 177; Stop 201
ctcttgcccagtcttaaccatattc

SEQ ID NO: 320126 - DNA, 25 bp, Artificial
  probe
  misc_feature (1)..(25): SEQ ID NO: 2265; WAN024GBH; Start 178; Stop 202
tcttgcccagtcttaaccatattca

SEQ ID NO: 320127 - DNA, 25 bp, Artificial
  probe
  misc_feature (1)..(25): SEQ ID NO: 2265; WAN024GBH; Start 193; Stop 217
accatattcatcgttaaatcagaga

SEQ ID NO: 320128 - DNA, 25 bp, Artificial
  probe
  misc_feature (1)..(25): SEQ ID NO: 2265; WAN024GBH; Start 176; Stop 200
actcttgcccagtcttaaccatatt

SEQ ID NO: 320129 - DNA, 25 bp, Artificial
  probe
  misc_feature (1)..(25): SEQ ID NO: 2265; WAN024GBH; Start 175; Stop 199
aactcttgcccagtcttaaccatat

SEQ ID NO: 320130 - DNA, 25 bp, Artificial
  probe
  misc_feature (1)..(25): SEQ ID NO: 2265; WAN024GBH; Start 174; Stop 198
aaactcttgcccagtcttaaccata

SEQ ID NO: 320131 - DNA, 25 bp, Artificial
  probe
  misc_feature (1)..(25): SEQ ID NO: 2265; WAN024GBH; Start 182; Stop 206
gcccagtcttaaccatattcatcgt

SEQ ID NO: 320132 - DNA, 25 bp, Artificial
  probe
  misc_feature (1)..(25): SEQ ID NO: 2265; WAN024GBH; Start 181; Stop 205
tgcccagtcttaaccatattcatcg

SEQ ID NO: 320133 - DNA, 25 bp, Artificial
  probe
  misc_feature (1)..(25): SEQ ID NO: 2265; WAN024GBH; Start 192; Stop 216
aaccatattcatcgttaaatcagag

SEQ ID NO: 320134 - DNA, 25 bp, Artificial
  probe
  misc_feature (1)..(25): SEQ ID NO: 2265; WAN024GBH; Start 194; Stop 218
ccatattcatcgttaaatcagagat

SEQ ID NO: 320135 - DNA, 25 bp, Artificial
  probe
  misc_feature (1)..(25): SEQ ID NO: 2265; WAN024GBH; Start 173; Stop 197
caaactcttgcccagtcttaaccat

SEQ ID NO: 320136 - DNA, 25 bp, Artificial
  probe
  misc_feature (1)..(25): SEQ ID NO: 2265; WAN024GBH; Start 11; Stop 35
atttatcaattgttccgcctgtatg

SEQ ID NO: 320137 - DNA, 25 bp, Artificial
  probe
  misc_feature (1)..(25): SEQ ID NO: 2265; WAN024GBH; Start 171; Stop 195
gtcaaactcttgcccagtcttaacc

SEQ ID NO: 320138 - DNA, 25 bp, Artificial
  probe
  misc_feature (1)..(25): SEQ ID NO: 2265; WAN024GBH; Start 170; Stop 194
ggtcaaactcttgcccagtcttaac

SEQ ID NO: 320139 - DNA, 25 bp, Artificial
  probe
  misc_feature (1)..(25): SEQ ID NO: 2265; WAN024GBH; Start 12; Stop 36
tttatcaattgttccgcctgtatgg

SEQ ID NO: 320140 - DNA, 25 bp, Artificial
  probe
  misc_feature (1)..(25): SEQ ID NO: 2265; WAN024GBH; Start 169; Stop 193
aggtcaaactcttgcccagtcttaa

SEQ ID NO: 320141 - DNA, 25 bp, Artificial
  probe
  misc_feature (1)..(25): SEQ ID NO: 2265; WAN024GBH; Start 10; Stop 34
aatttatcaattgttccgcctgtat

SEQ ID NO: 320142 - DNA, 25 bp, Artificial
  probe
  misc_feature (1)..(25): SEQ ID NO: 2265; WAN024GBH; Start 172; Stop 196
tcaaactcttgcccagtcttaacca

SEQ ID NO: 320143 - DNA, 25 bp, Artificial
  probe
  misc_feature (1)..(25): SEQ ID NO: 2265; WAN024GBH; Start 222; Stop 246
tcgagtcgtcattcctttaaaataa

SEQ ID NO: 320144 - DNA, 25 bp, Artificial
  probe
  misc_feature (1)..(25): SEQ ID NO: 2265; WAN024GBH; Start 191; Stop 215
taaccatattcatcgttaaatcaga

SEQ ID NO: 320145 - DNA, 25 bp, Artificial
  probe
  misc_feature (1)..(25): SEQ ID NO: 2265; WAN024GBH; Start 185; Stop 209
cagtcttaaccatattcatcgttaa

SEQ ID NO: 320146 - DNA, 25 bp, Artificial
  probe
  misc_feature (1)..(25): SEQ ID NO: 2265; WAN024GBH; Start 168; Stop 192
caggtcaaactcttgcccagtctta

SEQ ID NO: 320147 - DNA, 25 bp, Artificial
  probe
  misc_feature (1)..(25): SEQ ID NO: 2265; WAN024GBH; Start 155; Stop 179
catcaatggctgacaggtcaaactc

SEQ ID NO: 320148 - DNA, 25 bp, Artificial
  probe
  misc_feature (1)..(25): SEQ ID NO: 2265; WAN024GBH; Start 156; Stop 180
atcaatggctgacaggtcaaactct

SEQ ID NO: 320149 - DNA, 25 bp, Artificial
  probe
  misc_feature (1)..(25): SEQ ID NO: 2265; WAN024GBH; Start 158; Stop 182
caatggctgacaggtcaaactcttg

SEQ ID NO: 320150 - DNA, 25 bp, Artificial
  probe
  misc_feature (1)..(25): SEQ ID NO: 2265; WAN024GBH; Start 200; Stop 224
tcatcgttaaatcagagatttctcg

SEQ ID NO: 320151 - DNA, 25 bp, Artificial
  probe
  misc_feature (1)..(25): SEQ ID NO: 2265; WAN024GBH; Start 157; Stop 181
tcaatggctgacaggtcaaactctt

SEQ ID NO: 320152 - DNA, 25 bp, Artificial
  probe
  misc_feature (1)..(25): SEQ ID NO: 2265; WAN024GBH; Start 144; Stop 168
aactttcacaccatcaatggctgac

SEQ ID NO: 320153 - DNA, 25 bp, Artificial
  probe
  misc_feature (1)..(25): SEQ ID NO: 2265; WAN024GBH; Start 217; Stop 241
atttctcgagtcgtcattcctttaa

SEQ ID NO: 320154 - DNA, 25 bp, Artificial
  probe
  misc_feature (1)..(25): SEQ ID NO: 2266; WAN024ET8; Start 92; Stop 116
caaatacaaatggcgggaaaataat

SEQ ID NO: 320155 - DNA, 25 bp, Artificial
  probe
  misc_feature (1)..(25): SEQ ID NO: 2266; WAN024ET8; Start 91; Stop 115
gcaaatacaaatggcgggaaaataa

SEQ ID NO: 320156 - DNA, 25 bp, Artificial
  probe
  misc_feature (1)..(25): SEQ ID NO: 2266; WAN024ET8; Start 96; Stop 120
tacaaatggcgggaaaataattctc

SEQ ID NO: 320157 - DNA, 25 bp, Artificial
  probe
  misc_feature (1)..(25): SEQ ID NO: 2266; WAN024ET8; Start 67; Stop 91
ttctgggaaacctactcagcatttg

SEQ ID NO: 320158 - DNA, 25 bp, Artificial
  probe
  misc_feature (1)..(25): SEQ ID NO: 2266; WAN024ET8; Start 95; Stop 119
atacaaatggcgggaaaataattct

SEQ ID NO: 320159 - DNA, 25 bp, Artificial
  probe
  misc_feature (1)..(25): SEQ ID NO: 2266; WAN024ET8; Start 13; Stop 37
tttgaaggggttgatttagaataca

SEQ ID NO: 320160 - DNA, 25 bp, Artificial
  probe
  misc_feature (1)..(25): SEQ ID NO: 2266; WAN024ET8; Start 94; Stop 118
aatacaaatggcgggaaaataattc

SEQ ID NO: 320161 - DNA, 25 bp, Artificial
  probe
  misc_feature (1)..(25): SEQ ID NO: 2266; WAN024ET8; Start 66; Stop 90
tttctgggaaacctactcagcattt

SEQ ID NO: 320162 - DNA, 25 bp, Artificial
  probe
  misc_feature (1)..(25): SEQ ID NO: 2266; WAN024ET8; Start 93; Stop 117
aaatacaaatggcgggaaaataatt

SEQ ID NO: 320163 - DNA, 25 bp, Artificial
  probe
  misc_feature (1)..(25): SEQ ID NO: 2266; WAN024ET8; Start 15; Stop 39
tgaaggggttgatttagaatacaaa

SEQ ID NO: 320164 - DNA, 25 bp, Artificial
  probe
  misc_feature (1)..(25): SEQ ID NO: 2266; WAN024ET8; Start 14; Stop 38
ttgaaggggttgatttagaatacaa

SEQ ID NO: 320165 - DNA, 25 bp, Artificial
  probe
  misc_feature (1)..(25): SEQ ID NO: 2266; WAN024ET8; Start 65; Stop 89
ctttctgggaaacctactcagcatt

SEQ ID NO: 320166 - DNA, 25 bp, Artificial
  probe
  misc_feature (1)..(25): SEQ ID NO: 2266; WAN024ET8; Start 97; Stop 121
acaaatggcgggaaaataattctcg

SEQ ID NO: 320167 - DNA, 25 bp, Artificial
  probe
  misc_feature (1)..(25): SEQ ID NO: 2266; WAN024ET8; Start 12; Stop 36
atttgaaggggttgatttagaatac

SEQ ID NO: 320168 - DNA, 25 bp, Artificial
  probe
  misc_feature (1)..(25): SEQ ID NO: 2266; WAN024ET8; Start 1; Stop 25
atggacttaaaatttgaaggggttg

SEQ ID NO: 320169 - DNA, 25 bp, Artificial
  probe
  misc_feature (1)..(25): SEQ ID NO: 2266; WAN024ET8; Start 16; Stop 40
gaaggggttgatttagaatacaaaa

SEQ ID NO: 320170 - DNA, 25 bp, Artificial
  probe
  misc_feature (1)..(25): SEQ ID NO: 2266; WAN024ET8; Start 3; Stop 27
ggacttaaaatttgaaggggttgat

SEQ ID NO: 320171 - DNA, 25 bp, Artificial
  probe
  misc_feature (1)..(25): SEQ ID NO: 2266; WAN024ET8; Start 2; Stop 26
tggacttaaaatttgaaggggttga

SEQ ID NO: 320172 - DNA, 25 bp, Artificial
  probe
  misc_feature (1)..(25): SEQ ID NO: 2266; WAN024ET8; Start 64; Stop 88
tctttctgggaaacctactcagcat

SEQ ID NO: 320173 - DNA, 25 bp, Artificial
  probe
  misc_feature (1)..(25): SEQ ID NO: 2266; WAN024ET8; Start 98; Stop 122
caaatggcgggaaaataattctcgg

SEQ ID NO: 320174 - DNA, 25 bp, Artificial
  probe
  misc_feature (1)..(25): SEQ ID NO: 2266; WAN024ET8; Start 4; Stop 28
gacttaaaatttgaaggggttgatt

SEQ ID NO: 320175 - DNA, 25 bp, Artificial
  probe
  misc_feature (1)..(25): SEQ ID NO: 2266; WAN024ET8; Start 90; Stop 114
tgcaaatacaaatggcgggaaaata

SEQ ID NO: 320176 - DNA, 25 bp, Artificial
  probe
  misc_feature (1)..(25): SEQ ID NO: 2266; WAN024ET8; Start 61; Stop 85
gagtctttctgggaaacctactcag

SEQ ID NO: 320177 - DNA, 25 bp, Artificial
  probe
  misc_feature (1)..(25): SEQ ID NO: 2266; WAN024ET8; Start 59; Stop 83
cagagtctttctgggaaacctactc

SEQ ID NO: 320178 - DNA, 25 bp, Artificial
  probe
  misc_feature (1)..(25): SEQ ID NO: 2266; WAN024ET8; Start 11; Stop 35
aatttgaaggggttgatttagaata

SEQ ID NO: 320179 - DNA, 25 bp, Artificial
  probe
  misc_feature (1)..(25): SEQ ID NO: 2266; WAN024ET8; Start 62; Stop 86
agtctttctgggaaacctactcagc

SEQ ID NO: 320180 - DNA, 25 bp, Artificial
  probe
  misc_feature (1)..(25): SEQ ID NO: 2266; WAN024ET8; Start 60; Stop 84
agagtctttctgggaaacctactca

SEQ ID NO: 320181 - DNA, 25 bp, Artificial
  probe
  misc_feature (1)..(25): SEQ ID NO: 2266; WAN024ET8; Start 63; Stop 87
gtctttctgggaaacctactcagca

SEQ ID NO: 320182 - DNA, 25 bp, Artificial
  probe
  misc_feature (1)..(25): SEQ ID NO: 2266; WAN024ET8; Start 5; Stop 29
acttaaaatttgaaggggttgattt

SEQ ID NO: 320183 - DNA, 25 bp, Artificial
  probe
  misc_feature (1)..(25): SEQ ID NO: 2266; WAN024ET8; Start 9; Stop 33
aaaatttgaaggggttgatttagaa

SEQ ID NO: 320184 - DNA, 25 bp, Artificial
  probe
  misc_feature (1)..(25): SEQ ID NO: 2266; WAN024ET8; Start 10; Stop 34
aaatttgaaggggttgatttagaat

SEQ ID NO: 320185 - DNA, 25 bp, Artificial
  probe
  misc_feature (1)..(25): SEQ ID NO: 2266; WAN024ET8; Start 47; Stop 71
aaaacaatcttccagagtctttctg

SEQ ID NO: 320186 - DNA, 25 bp, Artificial
  probe
  misc_feature (1)..(25): SEQ ID NO: 2266; WAN024ET8; Start 68; Stop 92
tctgggaaacctactcagcatttgc

SEQ ID NO: 320187 - DNA, 25 bp, Artificial
  probe
  misc_feature (1)..(25): SEQ ID NO: 2267; WAN024CQD; Start 669; Stop 693
gatgttgagagaccaggctattatt

SEQ ID NO: 320188 - DNA, 25 bp, Artificial
  probe
  misc_feature (1)..(25): SEQ ID NO: 2267; WAN024CQD; Start 509; Stop 533
ttattctcaactatccagccaatcc

SEQ ID NO: 320189 - DNA, 25 bp, Artificial
  probe
  misc_feature (1)..(25): SEQ ID NO: 2267; WAN024CQD; Start 671; Stop 695
tgttgagagaccaggctattattat

SEQ ID NO: 320190 - DNA, 25 bp, Artificial
  probe
  misc_feature (1)..(25): SEQ ID NO: 2267; WAN024CQD; Start 670; Stop 694
atgttgagagaccaggctattatta

SEQ ID NO: 320191 - DNA, 25 bp, Artificial
  probe
  misc_feature (1)..(25): SEQ ID NO: 2267; WAN024CQD; Start 508; Stop 532
gttattctcaactatccagccaatc

SEQ ID NO: 320192 - DNA, 25 bp, Artificial
  probe
  misc_feature (1)..(25): SEQ ID NO: 2267; WAN024CQD; Start 507; Stop 531
ggttattctcaactatccagccaat

SEQ ID NO: 320193 - DNA, 25 bp, Artificial
  probe
  misc_feature (1)..(25): SEQ ID NO: 2267; WAN024CQD; Start 672; Stop 696
gttgagagaccaggctattattatc

SEQ ID NO: 320194 - DNA, 25 bp, Artificial
  probe
  misc_feature (1)..(25): SEQ ID NO: 2267; WAN024CQD; Start 414; Stop 438
aattgttgagattgatacgactgaa

SEQ ID NO: 320195 - DNA, 25 bp, Artificial
  probe
  misc_feature (1)..(25): SEQ ID NO: 2267; WAN024CQD; Start 499; Stop 523
ctcaaggcggttattctcaactatc

SEQ ID NO: 320196 - DNA, 25 bp, Artificial
  probe
  misc_feature (1)..(25): SEQ ID NO: 2267; WAN024CQD; Start 373; Stop 397
tatccaggctatgaaccgattgtta

SEQ ID NO: 320197 - DNA, 25 bp, Artificial
  probe
  misc_feature (1)..(25): SEQ ID NO: 2267; WAN024CQD; Start 674; Stop 698
tgagagaccaggctattattatcaa

SEQ ID NO: 320198 - DNA, 25 bp, Artificial
  probe
  misc_feature (1)..(25): SEQ ID NO: 2267; WAN024CQD; Start 673; Stop 697
ttgagagaccaggctattattatca

SEQ ID NO: 320199 - DNA, 25 bp, Artificial
  probe
  misc_feature (1)..(25): SEQ ID NO: 2267; WAN024CQD; Start 676; Stop 700
agagaccaggctattattatcaatg

SEQ ID NO: 320200 - DNA, 25 bp, Artificial
  probe
  misc_feature (1)..(25): SEQ ID NO: 2267; WAN024CQD; Start 668; Stop 692
cgatgttgagagaccaggctattat

SEQ ID NO: 320201 - DNA, 25 bp, Artificial
  probe
  misc_feature (1)..(25): SEQ ID NO: 2267; WAN024CQD; Start 510; Stop 534
tattctcaactatccagccaatccg

SEQ ID NO: 320202 - DNA, 25 bp, Artificial
  probe
  misc_feature (1)..(25): SEQ ID NO: 2267; WAN024CQD; Start 675; Stop 699
gagagaccaggctattattatcaat

SEQ ID NO: 320203 - DNA, 25 bp, Artificial
  probe
  misc_feature (1)..(25): SEQ ID NO: 2267; WAN024CQD; Start 372; Stop 396
ttatccaggctatgaaccgattgtt

SEQ ID NO: 320204 - DNA, 25 bp, Artificial
  probe
  misc_feature (1)..(25): SEQ ID NO: 2267; WAN024CQD; Start 374; Stop 398
atccaggctatgaaccgattgttaa

SEQ ID NO: 320205 - DNA, 25 bp, Artificial
  probe
  misc_feature (1)..(25): SEQ ID NO: 2267; WAN024CQD; Start 170; Stop 194
atcagaaccaatcctactatacagg

SEQ ID NO: 320206 - DNA, 25 bp, Artificial
  probe
  misc_feature (1)..(25): SEQ ID NO: 2267; WAN024CQD; Start 371; Stop 395
cttatccaggctatgaaccgattgt

SEQ ID NO: 320207 - DNA, 25 bp, Artificial
  probe
  misc_feature (1)..(25): SEQ ID NO: 2267; WAN024CQD; Start 169; Stop 193
gatcagaaccaatcctactatacag

SEQ ID NO: 320208 - DNA, 25 bp, Artificial
  probe
  misc_feature (1)..(25): SEQ ID NO: 2267; WAN024CQD; Start 502; Stop 526
aaggcggttattctcaactatccag

SEQ ID NO: 320209 - DNA, 25 bp, Artificial
  probe
  misc_feature (1)..(25): SEQ ID NO: 2267; WAN024CQD; Start 500; Stop 524
tcaaggcggttattctcaactatcc

SEQ ID NO: 320210 - DNA, 25 bp, Artificial
  probe
  misc_feature (1)..(25): SEQ ID NO: 2267; WAN024CQD; Start 540; Stop 564
aattacctacagtcgagagcagtta

SEQ ID NO: 320211 - DNA, 25 bp, Artificial
  probe
  misc_feature (1)..(25): SEQ ID NO: 2267; WAN024CQD; Start 506; Stop 530
cggttattctcaactatccagccaa

SEQ ID NO: 320212 - DNA, 25 bp, Artificial
  probe
  misc_feature (1)..(25): SEQ ID NO: 2267; WAN024CQD; Start 501; Stop 525
caaggcggttattctcaactatcca

SEQ ID NO: 320213 - DNA, 25 bp, Artificial
  probe
  misc_feature (1)..(25): SEQ ID NO: 2267; WAN024CQD; Start 601; Stop 625
tttgttgtctgtgatgaggtttact

SEQ ID NO: 320214 - DNA, 25 bp, Artificial
  probe
  misc_feature (1)..(25): SEQ ID NO: 2267; WAN024CQD; Start 677; Stop 701
gagaccaggctattattatcaatgg

SEQ ID NO: 320215 - DNA, 25 bp, Artificial
  probe
  misc_feature (1)..(25): SEQ ID NO: 2267; WAN024CQD; Start 653; Stop 677
atgtgtctctaggaacgatgttgag

SEQ ID NO: 320216 - DNA, 25 bp, Artificial
  probe
  misc_feature (1)..(25): SEQ ID NO: 2267; WAN024CQD; Start 541; Stop 565
attacctacagtcgagagcagttag

SEQ ID NO: 320217 - DNA, 25 bp, Artificial
  probe
  misc_feature (1)..(25): SEQ ID NO: 2267; WAN024CQD; Start 409; Stop 433
gcagaaattgttgagattgatacga

SEQ ID NO: 320218 - DNA, 25 bp, Artificial
  probe
  misc_feature (1)..(25): SEQ ID NO: 2267; WAN024CQD; Start 407; Stop 431
gggcagaaattgttgagattgatac

SEQ ID NO: 320219 - DNA, 25 bp, Artificial
  probe
  misc_feature (1)..(25): SEQ ID NO: 2267; WAN024CQD; Start 667; Stop 691
acgatgttgagagaccaggctatta

SEQ ID NO: 320220 - DNA, 25 bp, Artificial
  probe
  misc_feature (1)..(25): SEQ ID NO: 2268; WAN024G95; Start 49; Stop 73
tatatcaatgttatcggtgctggtt

SEQ ID NO: 320221 - DNA, 25 bp, Artificial
  probe
  misc_feature (1)..(25): SEQ ID NO: 2268; WAN024G95; Start 48; Stop 72
ttatatcaatgttatcggtgctggt

SEQ ID NO: 320222 - DNA, 25 bp, Artificial
  probe
  misc_feature (1)..(25): SEQ ID NO: 2268; WAN024G95; Start 25; Stop 49
ggtattagtgtcgtgtctcaatctt

SEQ ID NO: 320223 - DNA, 25 bp, Artificial
  probe
  misc_feature (1)..(25): SEQ ID NO: 2268; WAN024G95; Start 47; Stop 71
cttatatcaatgttatcggtgctgg

SEQ ID NO: 320224 - DNA, 25 bp, Artificial
  probe
  misc_feature (1)..(25): SEQ ID NO: 2268; WAN024G95; Start 31; Stop 55
agtgtcgtgtctcaatcttatatca

SEQ ID NO: 320225 - DNA, 25 bp, Artificial
  probe
  misc_feature (1)..(25): SEQ ID NO: 2268; WAN024G95; Start 24; Stop 48
aggtattagtgtcgtgtctcaatct

SEQ ID NO: 320226 - DNA, 25 bp, Artificial
  probe
  misc_feature (1)..(25): SEQ ID NO: 2268; WAN024G95; Start 46; Stop 70
tcttatatcaatgttatcggtgctg

SEQ ID NO: 320227 - DNA, 25 bp, Artificial
  probe
  misc_feature (1)..(25): SEQ ID NO: 2268; WAN024G95; Start 32; Stop 56
gtgtcgtgtctcaatcttatatcaa

SEQ ID NO: 320228 - DNA, 25 bp, Artificial
  probe
  misc_feature (1)..(25): SEQ ID NO: 2268; WAN024G95; Start 26; Stop 50
gtattagtgtcgtgtctcaatctta

SEQ ID NO: 320229 - DNA, 25 bp, Artificial
  probe
  misc_feature (1)..(25): SEQ ID NO: 2268; WAN024G95; Start 23; Stop 47
gaggtattagtgtcgtgtctcaatc

SEQ ID NO: 320230 - DNA, 25 bp, Artificial
  probe
  misc_feature (1)..(25): SEQ ID NO: 2268; WAN024G95; Start 22; Stop 46
agaggtattagtgtcgtgtctcaat

SEQ ID NO: 320231 - DNA, 25 bp, Artificial
  probe
  misc_feature (1)..(25): SEQ ID NO: 2268; WAN024G95; Start 45; Stop 69
atcttatatcaatgttatcggtgct

SEQ ID NO: 320232 - DNA, 25 bp, Artificial
  probe
  misc_feature (1)..(25): SEQ ID NO: 2268; WAN024G95; Start 21; Stop 45
aagaggtattagtgtcgtgtctcaa

SEQ ID NO: 320233 - DNA, 25 bp, Artificial
  probe
  misc_feature (1)..(25): SEQ ID NO: 2268; WAN024G95; Start 35; Stop 59
tcgtgtctcaatcttatatcaatgt

SEQ ID NO: 320234 - DNA, 25 bp, Artificial
  probe
  misc_feature (1)..(25): SEQ ID NO: 2268; WAN024G95; Start 33; Stop 57
tgtcgtgtctcaatcttatatcaat

SEQ ID NO: 320235 - DNA, 25 bp, Artificial
  probe
  misc_feature (1)..(25): SEQ ID NO: 2268; WAN024G95; Start 994; Stop 1018
catcgcaattcttacatggattcac

SEQ ID NO: 320236 - DNA, 25 bp, Artificial
  probe
  misc_feature (1)..(25): SEQ ID NO: 2268; WAN024G95; Start 1293; Stop 1317
tatccgtgataagaaggctcgttat

SEQ ID NO: 320237 - DNA, 25 bp, Artificial
  probe
  misc_feature (1)..(25): SEQ ID NO: 2268; WAN024G95; Start 30; Stop 54
tagtgtcgtgtctcaatcttatatc

SEQ ID NO: 320238 - DNA, 25 bp, Artificial
  probe
  misc_feature (1)..(25): SEQ ID NO: 2268; WAN024G95; Start 34; Stop 58
gtcgtgtctcaatcttatatcaatg

SEQ ID NO: 320239 - DNA, 25 bp, Artificial
  probe
  misc_feature (1)..(25): SEQ ID NO: 2268; WAN024G95; Start 1021; Stop 1045
aatcttcttgagcagacttaccgtt

SEQ ID NO: 320240 - DNA, 25 bp, Artificial
  probe
  misc_feature (1)..(25): SEQ ID NO: 2268; WAN024G95; Start 995; Stop 1019
atcgcaattcttacatggattcacc

SEQ ID NO: 320241 - DNA, 25 bp, Artificial
  probe
  misc_feature (1)..(25): SEQ ID NO: 2268; WAN024G95; Start 28; Stop 52
attagtgtcgtgtctcaatcttata

SEQ ID NO: 320242 - DNA, 25 bp, Artificial
  probe
  misc_feature (1)..(25): SEQ ID NO: 2268; WAN024G95; Start 27; Stop 51
tattagtgtcgtgtctcaatcttat

SEQ ID NO: 320243 - DNA, 25 bp, Artificial
  probe
  misc_feature (1)..(25): SEQ ID NO: 2268; WAN024G95; Start 44; Stop 68
aatcttatatcaatgttatcggtgc

SEQ ID NO: 320244 - DNA, 25 bp, Artificial
  probe
  misc_feature (1)..(25): SEQ ID NO: 2268; WAN024G95; Start 29; Stop 53
ttagtgtcgtgtctcaatcttatat

SEQ ID NO: 320245 - DNA, 25 bp, Artificial
  probe
  misc_feature (1)..(25): SEQ ID NO: 2268; WAN024G95; Start 36; Stop 60
cgtgtctcaatcttatatcaatgtt

SEQ ID NO: 320246 - DNA, 25 bp, Artificial
  probe
  misc_feature (1)..(25): SEQ ID NO: 2268; WAN024G95; Start 1294; Stop 1318
atccgtgataagaaggctcgttatg

SEQ ID NO: 320247 - DNA, 25 bp, Artificial
  probe
  misc_feature (1)..(25): SEQ ID NO: 2268; WAN024G95; Start 1292; Stop 1316
gtatccgtgataagaaggctcgtta

SEQ ID NO: 320248 - DNA, 25 bp, Artificial
  probe
  misc_feature (1)..(25): SEQ ID NO: 2268; WAN024G95; Start 1022; Stop 1046
atcttcttgagcagacttaccgttc

SEQ ID NO: 320249 - DNA, 25 bp, Artificial
  probe
  misc_feature (1)..(25): SEQ ID NO: 2268; WAN024G95; Start 1296; Stop 1320
ccgtgataagaaggctcgttatgaa

SEQ ID NO: 320250 - DNA, 25 bp, Artificial
  probe
  misc_feature (1)..(25): SEQ ID NO: 2268; WAN024G95; Start 50; Stop 74
atatcaatgttatcggtgctggttt

SEQ ID NO: 320251 - DNA, 25 bp, Artificial
  probe
  misc_feature (1)..(25): SEQ ID NO: 2268; WAN024G95; Start 993; Stop 1017
gcatcgcaattcttacatggattca

SEQ ID NO: 320252 - DNA, 25 bp, Artificial
  probe
  misc_feature (1)..(25): SEQ ID NO: 2268; WAN024G95; Start 1297; Stop 1321
cgtgataagaaggctcgttatgaaa

SEQ ID NO: 320253 - DNA, 25 bp, Artificial
  probe
  misc_feature (1)..(25): SEQ ID NO: 2269; WAN024DOQ; Start 155; Stop 179
agaataactggatagacaaggaagg

SEQ ID NO: 320254 - DNA, 25 bp, Artificial
  probe
  misc_feature (1)..(25): SEQ ID NO: 2269; WAN024DOQ; Start 156; Stop 180
gaataactggatagacaaggaaggc

SEQ ID NO: 320255 - DNA, 25 bp, Artificial
  probe
  misc_feature (1)..(25): SEQ ID NO: 2269; WAN024DOQ; Start 157; Stop 181
aataactggatagacaaggaaggca

SEQ ID NO: 320256 - DNA, 25 bp, Artificial
  probe
  misc_feature (1)..(25): SEQ ID NO: 2269; WAN024DOQ; Start 93; Stop 117
cttatcagcagaagcaattatcctt

SEQ ID NO: 320257 - DNA, 25 bp, Artificial
  probe
  misc_feature (1)..(25): SEQ ID NO: 2269; WAN024DOQ; Start 164; Stop 188
ggatagacaaggaaggcagagtatt

SEQ ID NO: 320258 - DNA, 25 bp, Artificial
  probe
  misc_feature (1)..(25): SEQ ID NO: 2269; WAN024DOQ; Start 154; Stop 178
aagaataactggatagacaaggaag

SEQ ID NO: 320259 - DNA, 25 bp, Artificial
  probe
  misc_feature (1)..(25): SEQ ID NO: 2269; WAN024DOQ; Start 163; Stop 187
tggatagacaaggaaggcagagtat

SEQ ID NO: 320260 - DNA, 25 bp, Artificial
  probe
  misc_feature (1)..(25): SEQ ID NO: 2269; WAN024DOQ; Start 602; Stop 626
cacagcttgagaattacattagact

SEQ ID NO: 320261 - DNA, 25 bp, Artificial
  probe
  misc_feature (1)..(25): SEQ ID NO: 2269; WAN024DOQ; Start 297; Stop 321
aagagtaaggcttggacttggtaag

SEQ ID NO: 320262 - DNA, 25 bp, Artificial
  probe
  misc_feature (1)..(25): SEQ ID NO: 2269; WAN024DOQ; Start 158; Stop 182
ataactggatagacaaggaaggcag

SEQ ID NO: 320263 - DNA, 25 bp, Artificial
  probe
  misc_feature (1)..(25): SEQ ID NO: 2269; WAN024DOQ; Start 168; Stop 192
agacaaggaaggcagagtatttatc

SEQ ID NO: 320264 - DNA, 25 bp, Artificial
  probe
  misc_feature (1)..(25): SEQ ID NO: 2269; WAN024DOQ; Start 165; Stop 189
gatagacaaggaaggcagagtattt

SEQ ID NO: 320265 - DNA, 25 bp, Artificial
  probe
  misc_feature (1)..(25): SEQ ID NO: 2269; WAN024DOQ; Start 21; Stop 45
taacagagaagcggaaagatttaac

SEQ ID NO: 320266 - DNA, 25 bp, Artificial
  probe
  misc_feature (1)..(25): SEQ ID NO: 2269; WAN024DOQ; Start 22; Stop 46
aacagagaagcggaaagatttaact

SEQ ID NO: 320267 - DNA, 25 bp, Artificial
  probe
  misc_feature (1)..(25): SEQ ID NO: 2269; WAN024DOQ; Start 601; Stop 625
tcacagcttgagaattacattagac

SEQ ID NO: 320268 - DNA, 25 bp, Artificial
  probe
  misc_feature (1)..(25): SEQ ID NO: 2269; WAN024DOQ; Start 167; Stop 191
tagacaaggaaggcagagtatttat

SEQ ID NO: 320269 - DNA, 25 bp, Artificial
  probe
  misc_feature (1)..(25): SEQ ID NO: 2269; WAN024DOQ; Start 166; Stop 190
atagacaaggaaggcagagtattta

SEQ ID NO: 320270 - DNA, 25 bp, Artificial
  probe
  misc_feature (1)..(25): SEQ ID NO: 2269; WAN024DOQ; Start 313; Stop 337
cttggtaagccgaacatcatttatg

SEQ ID NO: 320271 - DNA, 25 bp, Artificial
  probe
  misc_feature (1)..(25): SEQ ID NO: 2269; WAN024DOQ; Start 603; Stop 627
acagcttgagaattacattagactt

SEQ ID NO: 320272 - DNA, 25 bp, Artificial
  probe
  misc_feature (1)..(25): SEQ ID NO: 2269; WAN024DOQ; Start 169; Stop 193
gacaaggaaggcagagtatttatct

SEQ ID NO: 320273 - DNA, 25 bp, Artificial
  probe
  misc_feature (1)..(25): SEQ ID NO: 2269; WAN024DOQ; Start 59; Stop 83
cggagatattagttgatagagaaga

SEQ ID NO: 320274 - DNA, 25 bp, Artificial
  probe
  misc_feature (1)..(25): SEQ ID NO: 2269; WAN024DOQ; Start 312; Stop 336
acttggtaagccgaacatcatttat

SEQ ID NO: 320275 - DNA, 25 bp, Artificial
  probe
  misc_feature (1)..(25): SEQ ID NO: 2269; WAN024DOQ; Start 23; Stop 47
acagagaagcggaaagatttaactt

SEQ ID NO: 320276 - DNA, 25 bp, Artificial
  probe
  misc_feature (1)..(25): SEQ ID NO: 2269; WAN024DOQ; Start 100; Stop 124
gcagaagcaattatcctttattcca

SEQ ID NO: 320277 - DNA, 25 bp, Artificial
  probe
  misc_feature (1)..(25): SEQ ID NO: 2269; WAN024DOQ; Start 99; Stop 123
agcagaagcaattatcctttattcc

SEQ ID NO: 320278 - DNA, 25 bp, Artificial
  probe
  misc_feature (1)..(25): SEQ ID NO: 2269; WAN024DOQ; Start 153; Stop 177
taagaataactggatagacaaggaa

SEQ ID NO: 320279 - DNA, 25 bp, Artificial
  probe
  misc_feature (1)..(25): SEQ ID NO: 2269; WAN024DOQ; Start 152; Stop 176
ttaagaataactggatagacaagga

SEQ ID NO: 320280 - DNA, 25 bp, Artificial
  probe
  misc_feature (1)..(25): SEQ ID NO: 2269; WAN024DOQ; Start 170; Stop 194
acaaggaaggcagagtatttatcta

SEQ ID NO: 320281 - DNA, 25 bp, Artificial
  probe
  misc_feature (1)..(25): SEQ ID NO: 2269; WAN024DOQ; Start 20; Stop 44
ataacagagaagcggaaagatttaa

SEQ ID NO: 320282 - DNA, 25 bp, Artificial
  probe
  misc_feature (1)..(25): SEQ ID NO: 2269; WAN024DOQ; Start 311; Stop 335
gacttggtaagccgaacatcattta

SEQ ID NO: 320283 - DNA, 25 bp, Artificial
  probe
  misc_feature (1)..(25): SEQ ID NO: 2269; WAN024DOQ; Start 97; Stop 121
tcagcagaagcaattatcctttatt

SEQ ID NO: 320284 - DNA, 25 bp, Artificial
  probe
  misc_feature (1)..(25): SEQ ID NO: 2269; WAN024DOQ; Start 94; Stop 118
ttatcagcagaagcaattatccttt

SEQ ID NO: 320285 - DNA, 25 bp, Artificial
  probe
  misc_feature (1)..(25): SEQ ID NO: 2269; WAN024DOQ; Start 98; Stop 122
cagcagaagcaattatcctttattc

SEQ ID NO: 320286 - DNA, 25 bp, Artificial
  probe
  misc_feature (1)..(25): SEQ ID NO: 2270; WAN024GMX; Start 400; Stop 424
tacaattaccaagttcgtgagacag

SEQ ID NO: 320287 - DNA, 25 bp, Artificial
  probe
  misc_feature (1)..(25): SEQ ID NO: 2270; WAN024GMX; Start 1117; Stop 1141
gcagttattgaacgaattggtgaat

SEQ ID NO: 320288 - DNA, 25 bp, Artificial
  probe
  misc_feature (1)..(25): SEQ ID NO: 2270; WAN024GMX; Start 397; Stop 421
aagtacaattaccaagttcgtgaga

SEQ ID NO: 320289 - DNA, 25 bp, Artificial
  probe
  misc_feature (1)..(25): SEQ ID NO: 2270; WAN024GMX; Start 386; Stop 410
tgccaatcactaagtacaattacca

SEQ ID NO: 320290 - DNA, 25 bp, Artificial
  probe
  misc_feature (1)..(25): SEQ ID NO: 2270; WAN024GMX; Start 387; Stop 411
gccaatcactaagtacaattaccaa

SEQ ID NO: 320291 - DNA, 25 bp, Artificial
  probe
  misc_feature (1)..(25): SEQ ID NO: 2270; WAN024GMX; Start 1132; Stop 1156
attggtgaattgacgaatggagatg

SEQ ID NO: 320292 - DNA, 25 bp, Artificial
  probe
  misc_feature (1)..(25): SEQ ID NO: 2270; WAN024GMX; Start 659; Stop 683
gaattagttatgctgaggctgctac

SEQ ID NO: 320293 - DNA, 25 bp, Artificial
  probe
  misc_feature (1)..(25): SEQ ID NO: 2270; WAN024GMX; Start 398; Stop 422
agtacaattaccaagttcgtgagac

SEQ ID NO: 320294 - DNA, 25 bp, Artificial
  probe
  misc_feature (1)..(25): SEQ ID NO: 2270; WAN024GMX; Start 385; Stop 409
atgccaatcactaagtacaattacc

SEQ ID NO: 320295 - DNA, 25 bp, Artificial
  probe
  misc_feature (1)..(25): SEQ ID NO: 2270; WAN024GMX; Start 381; Stop 405
taccatgccaatcactaagtacaat

SEQ ID NO: 320296 - DNA, 25 bp, Artificial
  probe
  misc_feature (1)..(25): SEQ ID NO: 2270; WAN024GMX; Start 379; Stop 403
attaccatgccaatcactaagtaca

SEQ ID NO: 320297 - DNA, 25 bp, Artificial
  probe
  misc_feature (1)..(25): SEQ ID NO: 2270; WAN024GMX; Start 380; Stop 404
ttaccatgccaatcactaagtacaa

SEQ ID NO: 320298 - DNA, 25 bp, Artificial
  probe
  misc_feature (1)..(25): SEQ ID NO: 2270; WAN024GMX; Start 1122; Stop 1146
tattgaacgaattggtgaattgacg

SEQ ID NO: 320299 - DNA, 25 bp, Artificial
  probe
  misc_feature (1)..(25): SEQ ID NO: 2270; WAN024GMX; Start 1116; Stop 1140
agcagttattgaacgaattggtgaa

SEQ ID NO: 320300 - DNA, 25 bp, Artificial
  probe
  misc_feature (1)..(25): SEQ ID NO: 2270; WAN024GMX; Start 1115; Stop 1139
aagcagttattgaacgaattggtga

SEQ ID NO: 320301 - DNA, 25 bp, Artificial
  probe
  misc_feature (1)..(25): SEQ ID NO: 2270; WAN024GMX; Start 399; Stop 423
gtacaattaccaagttcgtgagaca

SEQ ID NO: 320302 - DNA, 25 bp, Artificial
  probe
  misc_feature (1)..(25): SEQ ID NO: 2270; WAN024GMX; Start 1396; Stop 1420
aaggtggttatgctgaacaatcatt

SEQ ID NO: 320303 - DNA, 25 bp, Artificial
  probe
  misc_feature (1)..(25): SEQ ID NO: 2270; WAN024GMX; Start 1392; Stop 1416
aatcaaggtggttatgctgaacaat

SEQ ID NO: 320304 - DNA, 25 bp, Artificial
  probe
  misc_feature (1)..(25): SEQ ID NO: 2270; WAN024GMX; Start 396; Stop 420
taagtacaattaccaagttcgtgag

SEQ ID NO: 320305 - DNA, 25 bp, Artificial
  probe
  misc_feature (1)..(25): SEQ ID NO: 2270; WAN024GMX; Start 395; Stop 419
ctaagtacaattaccaagttcgtga

SEQ ID NO: 320306 - DNA, 25 bp, Artificial
  probe
  misc_feature (1)..(25): SEQ ID NO: 2270; WAN024GMX; Start 382; Stop 406
accatgccaatcactaagtacaatt

SEQ ID NO: 320307 - DNA, 25 bp, Artificial
  probe
  misc_feature (1)..(25): SEQ ID NO: 2270; WAN024GMX; Start 1114; Stop 1138
caagcagttattgaacgaattggtg

SEQ ID NO: 320308 - DNA, 25 bp, Artificial
  probe
  misc_feature (1)..(25): SEQ ID NO: 2270; WAN024GMX; Start 383; Stop 407
ccatgccaatcactaagtacaatta

SEQ ID NO: 320309 - DNA, 25 bp, Artificial
  probe
  misc_feature (1)..(25): SEQ ID NO: 2270; WAN024GMX; Start 378; Stop 402
aattaccatgccaatcactaagtac

SEQ ID NO: 320310 - DNA, 25 bp, Artificial
  probe
  misc_feature (1)..(25): SEQ ID NO: 2270; WAN024GMX; Start 1131; Stop 1155
aattggtgaattgacgaatggagat

SEQ ID NO: 320311 - DNA, 25 bp, Artificial
  probe
  misc_feature (1)..(25): SEQ ID NO: 2270; WAN024GMX; Start 376; Stop 400
ggaattaccatgccaatcactaagt

SEQ ID NO: 320312 - DNA, 25 bp, Artificial
  probe
  misc_feature (1)..(25): SEQ ID NO: 2270; WAN024GMX; Start 377; Stop 401
gaattaccatgccaatcactaagta

SEQ ID NO: 320313 - DNA, 25 bp, Artificial
  probe
  misc_feature (1)..(25): SEQ ID NO: 2270; WAN024GMX; Start 1397; Stop 1421
aggtggttatgctgaacaatcattc

SEQ ID NO: 320314 - DNA, 25 bp, Artificial
  probe
  misc_feature (1)..(25): SEQ ID NO: 2270; WAN024GMX; Start 1393; Stop 1417
atcaaggtggttatgctgaacaatc

SEQ ID NO: 320315 - DNA, 25 bp, Artificial
  probe
  misc_feature (1)..(25): SEQ ID NO: 2270; WAN024GMX; Start 394; Stop 418
actaagtacaattaccaagttcgtg

SEQ ID NO: 320316 - DNA, 25 bp, Artificial
  probe
  misc_feature (1)..(25): SEQ ID NO: 2270; WAN024GMX; Start 393; Stop 417
cactaagtacaattaccaagttcgt

SEQ ID NO: 320317 - DNA, 25 bp, Artificial
  probe
  misc_feature (1)..(25): SEQ ID NO: 2270; WAN024GMX; Start 1121; Stop 1145
ttattgaacgaattggtgaattgac

SEQ ID NO: 320318 - DNA, 25 bp, Artificial
  probe
  misc_feature (1)..(25): SEQ ID NO: 2270; WAN024GMX; Start 1120; Stop 1144
gttattgaacgaattggtgaattga

SEQ ID NO: 320319 - DNA, 25 bp, Artificial
  probe
  misc_feature (1)..(25): SEQ ID NO: 2271; WAN024FJH; Start 206; Stop 230
tcattagtggaacaatctcacaagt

SEQ ID NO: 320320 - DNA, 25 bp, Artificial
  probe
  misc_feature (1)..(25): SEQ ID NO: 2271; WAN024FJH; Start 205; Stop 229
gtcattagtggaacaatctcacaag

SEQ ID NO: 320321 - DNA, 25 bp, Artificial
  probe
  misc_feature (1)..(25): SEQ ID NO: 2271; WAN024FJH; Start 204; Stop 228
tgtcattagtggaacaatctcacaa

SEQ ID NO: 320322 - DNA, 25 bp, Artificial
  probe
  misc_feature (1)..(25): SEQ ID NO: 2271; WAN024FJH; Start 207; Stop 231
cattagtggaacaatctcacaagta

SEQ ID NO: 320323 - DNA, 25 bp, Artificial
  probe
  misc_feature (1)..(25): SEQ ID NO: 2271; WAN024FJH; Start 156; Stop 180
gacttccttgattgtcatcttgagc

SEQ ID NO: 320324 - DNA, 25 bp, Artificial
  probe
  misc_feature (1)..(25): SEQ ID NO: 2271; WAN024FJH; Start 217; Stop 241
acaatctcacaagtaaaccatatcg

SEQ ID NO: 320325 - DNA, 25 bp, Artificial
  probe
  misc_feature (1)..(25): SEQ ID NO: 2271; WAN024FJH; Start 208; Stop 232
attagtggaacaatctcacaagtaa

SEQ ID NO: 320326 - DNA, 25 bp, Artificial
  probe
  misc_feature (1)..(25): SEQ ID NO: 2271; WAN024FJH; Start 214; Stop 238
ggaacaatctcacaagtaaaccata

SEQ ID NO: 320327 - DNA, 25 bp, Artificial
  probe
  misc_feature (1)..(25): SEQ ID NO: 2271; WAN024FJH; Start 158; Stop 182
cttccttgattgtcatcttgagctt

SEQ ID NO: 320328 - DNA, 25 bp, Artificial
  probe
  misc_feature (1)..(25): SEQ ID NO: 2271; WAN024FJH; Start 350; Stop 374
ttgcattagacttaccaggaattaa

SEQ ID NO: 320329 - DNA, 25 bp, Artificial
  probe
  misc_feature (1)..(25): SEQ ID NO: 2271; WAN024FJH; Start 349; Stop 373
attgcattagacttaccaggaatta

SEQ ID NO: 320330 - DNA, 25 bp, Artificial
  probe
  misc_feature (1)..(25): SEQ ID NO: 2271; WAN024FJH; Start 348; Stop 372
aattgcattagacttaccaggaatt

SEQ ID NO: 320331 - DNA, 25 bp, Artificial
  probe
  misc_feature (1)..(25): SEQ ID NO: 2271; WAN024FJH; Start 267; Stop 291
tgaattgaaccaagaagaggtggaa

SEQ ID NO: 320332 - DNA, 25 bp, Artificial
  probe
  misc_feature (1)..(25): SEQ ID NO: 2271; WAN024FJH; Start 157; Stop 181
acttccttgattgtcatcttgagct

SEQ ID NO: 320333 - DNA, 25 bp, Artificial
  probe
  misc_feature (1)..(25): SEQ ID NO: 2271; WAN024FJH; Start 351; Stop 375
tgcattagacttaccaggaattaat

SEQ ID NO: 320334 - DNA, 25 bp, Artificial
  probe
  misc_feature (1)..(25): SEQ ID NO: 2271; WAN024FJH; Start 210; Stop 234
tagtggaacaatctcacaagtaaac

SEQ ID NO: 320335 - DNA, 25 bp, Artificial
  probe
  misc_feature (1)..(25): SEQ ID NO: 2271; WAN024FJH; Start 195; Stop 219
tgataagtttgtcattagtggaaca

SEQ ID NO: 320336 - DNA, 25 bp, Artificial
  probe
  misc_feature (1)..(25): SEQ ID NO: 2271; WAN024FJH; Start 211; Stop 235
agtggaacaatctcacaagtaaacc

SEQ ID NO: 320337 - DNA, 25 bp, Artificial
  probe
  misc_feature (1)..(25): SEQ ID NO: 2271; WAN024FJH; Start 216; Stop 240
aacaatctcacaagtaaaccatatc

SEQ ID NO: 320338 - DNA, 25 bp, Artificial
  probe
  misc_feature (1)..(25): SEQ ID NO: 2271; WAN024FJH; Start 215; Stop 239
gaacaatctcacaagtaaaccatat

SEQ ID NO: 320339 - DNA, 25 bp, Artificial
  probe
  misc_feature (1)..(25): SEQ ID NO: 2271; WAN024FJH; Start 213; Stop 237
tggaacaatctcacaagtaaaccat

SEQ ID NO: 320340 - DNA, 25 bp, Artificial
  probe
  misc_feature (1)..(25): SEQ ID NO: 2271; WAN024FJH; Start 218; Stop 242
caatctcacaagtaaaccatatcga

SEQ ID NO: 320341 - DNA, 25 bp, Artificial
  probe
  misc_feature (1)..(25): SEQ ID NO: 2271; WAN024FJH; Start 345; Stop 369
tgaaattgcattagacttaccagga

SEQ ID NO: 320342 - DNA, 25 bp, Artificial
  probe
  misc_feature (1)..(25): SEQ ID NO: 2271; WAN024FJH; Start 334; Stop 358
tacgaagtgactgaaattgcattag

SEQ ID NO: 320343 - DNA, 25 bp, Artificial
  probe
  misc_feature (1)..(25): SEQ ID NO: 2271; WAN024FJH; Start 203; Stop 227
ttgtcattagtggaacaatctcaca

SEQ ID NO: 320344 - DNA, 25 bp, Artificial
  probe
  misc_feature (1)..(25): SEQ ID NO: 2271; WAN024FJH; Start 160; Stop 184
tccttgattgtcatcttgagcttta

SEQ ID NO: 320345 - DNA, 25 bp, Artificial
  probe
  misc_feature (1)..(25): SEQ ID NO: 2271; WAN024FJH; Start 209; Stop 233
ttagtggaacaatctcacaagtaaa

SEQ ID NO: 320346 - DNA, 25 bp, Artificial
  probe
  misc_feature (1)..(25): SEQ ID NO: 2271; WAN024FJH; Start 161; Stop 185
ccttgattgtcatcttgagctttat

SEQ ID NO: 320347 - DNA, 25 bp, Artificial
  probe
  misc_feature (1)..(25): SEQ ID NO: 2271; WAN024FJH; Start 346; Stop 370
gaaattgcattagacttaccaggaa

SEQ ID NO: 320348 - DNA, 25 bp, Artificial
  probe
  misc_feature (1)..(25): SEQ ID NO: 2271; WAN024FJH; Start 342; Stop 366
gactgaaattgcattagacttacca

SEQ ID NO: 320349 - DNA, 25 bp, Artificial
  probe
  misc_feature (1)..(25): SEQ ID NO: 2271; WAN024FJH; Start 341; Stop 365
tgactgaaattgcattagacttacc

SEQ ID NO: 320350 - DNA, 25 bp, Artificial
  probe
  misc_feature (1)..(25): SEQ ID NO: 2271; WAN024FJH; Start 333; Stop 357
ttacgaagtgactgaaattgcatta

SEQ ID NO: 320351 - DNA, 25 bp, Artificial
  probe
  misc_feature (1)..(25): SEQ ID NO: 2271; WAN024FJH; Start 336; Stop 360
cgaagtgactgaaattgcattagac

SEQ ID NO: 320352 - DNA, 25 bp, Artificial
  probe
  misc_feature (1)..(25): SEQ ID NO: 2272; WAN024FW5; Start 24; Stop 48
aagaatggagtgtgattggatgaat

SEQ ID NO: 320353 - DNA, 25 bp, Artificial
  probe
  misc_feature (1)..(25): SEQ ID NO: 2272; WAN024FW5; Start 57; Stop 81
agaagttagatggaaggataagcaa

SEQ ID NO: 320354 - DNA, 25 bp, Artificial
  probe
  misc_feature (1)..(25): SEQ ID NO: 2272; WAN024FW5; Start 56; Stop 80
aagaagttagatggaaggataagca

SEQ ID NO: 320355 - DNA, 25 bp, Artificial
  probe
  misc_feature (1)..(25): SEQ ID NO: 2272; WAN024FW5; Start 1523; Stop 1547
atggaccgacagttagatatgaatt

SEQ ID NO: 320356 - DNA, 25 bp, Artificial
  probe
  misc_feature (1)..(25): SEQ ID NO: 2272; WAN024FW5; Start 25; Stop 49
agaatggagtgtgattggatgaatt

SEQ ID NO: 320357 - DNA, 25 bp, Artificial
  probe
  misc_feature (1)..(25): SEQ ID NO: 2272; WAN024FW5; Start 23; Stop 47
gaagaatggagtgtgattggatgaa

SEQ ID NO: 320358 - DNA, 25 bp, Artificial
  probe
  misc_feature (1)..(25): SEQ ID NO: 2272; WAN024FW5; Start 58; Stop 82
gaagttagatggaaggataagcaat

SEQ ID NO: 320359 - DNA, 25 bp, Artificial
  probe
  misc_feature (1)..(25): SEQ ID NO: 2272; WAN024FW5; Start 21; Stop 45
cagaagaatggagtgtgattggatg

SEQ ID NO: 320360 - DNA, 25 bp, Artificial
  probe
  misc_feature (1)..(25): SEQ ID NO: 2272; WAN024FW5; Start 730; Stop 754
actgtgagtcctaacgatattgtaa

SEQ ID NO: 320361 - DNA, 25 bp, Artificial
  probe
  misc_feature (1)..(25): SEQ ID NO: 2272; WAN024FW5; Start 22; Stop 46
agaagaatggagtgtgattggatga

SEQ ID NO: 320362 - DNA, 25 bp, Artificial
  probe
  misc_feature (1)..(25): SEQ ID NO: 2272; WAN024FW5; Start 14; Stop 38
attacatcagaagaatggagtgtga

SEQ ID NO: 320363 - DNA, 25 bp, Artificial
  probe
  misc_feature (1)..(25): SEQ ID NO: 2272; WAN024FW5; Start 1261; Stop 1285
tctgtaggagttgagaatgacaatt

SEQ ID NO: 320364 - DNA, 25 bp, Artificial
  probe
  misc_feature (1)..(25): SEQ ID NO: 2272; WAN024FW5; Start 1518; Stop 1542
agatcatggaccgacagttagatat

SEQ ID NO: 320365 - DNA, 25 bp, Artificial
  probe
  misc_feature (1)..(25): SEQ ID NO: 2272; WAN024FW5; Start 1522; Stop 1546
catggaccgacagttagatatgaat

SEQ ID NO: 320366 - DNA, 25 bp, Artificial
  probe
  misc_feature (1)..(25): SEQ ID NO: 2272; WAN024FW5; Start 1260; Stop 1284
gtctgtaggagttgagaatgacaat

SEQ ID NO: 320367 - DNA, 25 bp, Artificial
  probe
  misc_feature (1)..(25): SEQ ID NO: 2272; WAN024FW5; Start 1519; Stop 1543
gatcatggaccgacagttagatatg

SEQ ID NO: 320368 - DNA, 25 bp, Artificial
  probe
  misc_feature (1)..(25): SEQ ID NO: 2272; WAN024FW5; Start 20; Stop 44
tcagaagaatggagtgtgattggat

SEQ ID NO: 320369 - DNA, 25 bp, Artificial
  probe
  misc_feature (1)..(25): SEQ ID NO: 2272; WAN024FW5; Start 1259; Stop 1283
agtctgtaggagttgagaatgacaa

SEQ ID NO: 320370 - DNA, 25 bp, Artificial
  probe
  misc_feature (1)..(25): SEQ ID NO: 2272; WAN024FW5; Start 1258; Stop 1282
aagtctgtaggagttgagaatgaca

SEQ ID NO: 320371 - DNA, 25 bp, Artificial
  probe
  misc_feature (1)..(25): SEQ ID NO: 2272; WAN024FW5; Start 1517; Stop 1541
cagatcatggaccgacagttagata

SEQ ID NO: 320372 - DNA, 25 bp, Artificial
  probe
  misc_feature (1)..(25): SEQ ID NO: 2272; WAN024FW5; Start 13; Stop 37
tattacatcagaagaatggagtgtg

SEQ ID NO: 320373 - DNA, 25 bp, Artificial
  probe
  misc_feature (1)..(25): SEQ ID NO: 2272; WAN024FW5; Start 59; Stop 83
aagttagatggaaggataagcaata

SEQ ID NO: 320374 - DNA, 25 bp, Artificial
  probe
  misc_feature (1)..(25): SEQ ID NO: 2272; WAN024FW5; Start 1262; Stop 1286
ctgtaggagttgagaatgacaattc

SEQ ID NO: 320375 - DNA, 25 bp, Artificial
  probe
  misc_feature (1)..(25): SEQ ID NO: 2272; WAN024FW5; Start 60; Stop 84
agttagatggaaggataagcaatat

SEQ ID NO: 320376 - DNA, 25 bp, Artificial
  probe
  misc_feature (1)..(25): SEQ ID NO: 2272; WAN024FW5; Start 1421; Stop 1445
ataagacgggaatactgtttactga

SEQ ID NO: 320377 - DNA, 25 bp, Artificial
  probe
  misc_feature (1)..(25): SEQ ID NO: 2272; WAN024FW5; Start 322; Stop 346
gatgttaccgactataatcttgaag

SEQ ID NO: 320378 - DNA, 25 bp, Artificial
  probe
  misc_feature (1)..(25): SEQ ID NO: 2272; WAN024FW5; Start 1524; Stop 1548
tggaccgacagttagatatgaattt

SEQ ID NO: 320379 - DNA, 25 bp, Artificial
  probe
  misc_feature (1)..(25): SEQ ID NO: 2272; WAN024FW5; Start 26; Stop 50
gaatggagtgtgattggatgaattt

SEQ ID NO: 320380 - DNA, 25 bp, Artificial
  probe
  misc_feature (1)..(25): SEQ ID NO: 2272; WAN024FW5; Start 12; Stop 36
ttattacatcagaagaatggagtgt

SEQ ID NO: 320381 - DNA, 25 bp, Artificial
  probe
  misc_feature (1)..(25): SEQ ID NO: 2272; WAN024FW5; Start 303; Stop 327
tttaagtcgtttgaagtcagatgtt

SEQ ID NO: 320382 - DNA, 25 bp, Artificial
  probe
  misc_feature (1)..(25): SEQ ID NO: 2272; WAN024FW5; Start 305; Stop 329
taagtcgtttgaagtcagatgttac

SEQ ID NO: 320383 - DNA, 25 bp, Artificial
  probe
  misc_feature (1)..(25): SEQ ID NO: 2272; WAN024FW5; Start 1892; Stop 1916
aagcgtatggaaagaatagattgtt

SEQ ID NO: 320384 - DNA, 25 bp, Artificial
  probe
  misc_feature (1)..(25): SEQ ID NO: 2272; WAN024FW5; Start 1891; Stop 1915
aaagcgtatggaaagaatagattgt

SEQ ID NO: 320385 - DNA, 25 bp, Artificial
  probe
  misc_feature (1)..(25): SEQ ID NO: 2273; WAN024FX7; Start 484; Stop 508
aatcaagaagaagagacctatcacc

SEQ ID NO: 320386 - DNA, 25 bp, Artificial
  probe
  misc_feature (1)..(25): SEQ ID NO: 2273; WAN024FX7; Start 629; Stop 653
caatggttgatattcggtcagttaa

SEQ ID NO: 320387 - DNA, 25 bp, Artificial
  probe
  misc_feature (1)..(25): SEQ ID NO: 2273; WAN024FX7; Start 619; Stop 643
gactatgtgccaatggttgatattc

SEQ ID NO: 320388 - DNA, 25 bp, Artificial
  probe
  misc_feature (1)..(25): SEQ ID NO: 2273; WAN024FX7; Start 473; Stop 497
aggtgactcataatcaagaagaaga

SEQ ID NO: 320389 - DNA, 25 bp, Artificial
  probe
  misc_feature (1)..(25): SEQ ID NO: 2273; WAN024FX7; Start 618; Stop 642
tgactatgtgccaatggttgatatt

SEQ ID NO: 320390 - DNA, 25 bp, Artificial
  probe
  misc_feature (1)..(25): SEQ ID NO: 2273; WAN024FX7; Start 617; Stop 641
ttgactatgtgccaatggttgatat

SEQ ID NO: 320391 - DNA, 25 bp, Artificial
  probe
  misc_feature (1)..(25): SEQ ID NO: 2273; WAN024FX7; Start 148; Stop 172
gttgagacttgtggagatactcttc

SEQ ID NO: 320392 - DNA, 25 bp, Artificial
  probe
  misc_feature (1)..(25): SEQ ID NO: 2273; WAN024FX7; Start 708; Stop 732
taagccgattaagttagatgttgaa

SEQ ID NO: 320393 - DNA, 25 bp, Artificial
  probe
  misc_feature (1)..(25): SEQ ID NO: 2273; WAN024FX7; Start 474; Stop 498
ggtgactcataatcaagaagaagag

SEQ ID NO: 320394 - DNA, 25 bp, Artificial
  probe
  misc_feature (1)..(25): SEQ ID NO: 2273; WAN024FX7; Start 472; Stop 496
gaggtgactcataatcaagaagaag

SEQ ID NO: 320395 - DNA, 25 bp, Artificial
  probe
  misc_feature (1)..(25): SEQ ID NO: 2273; WAN024FX7; Start 628; Stop 652
ccaatggttgatattcggtcagtta

SEQ ID NO: 320396 - DNA, 25 bp, Artificial
  probe
  misc_feature (1)..(25): SEQ ID NO: 2273; WAN024FX7; Start 478; Stop 502
actcataatcaagaagaagagacct

SEQ ID NO: 320397 - DNA, 25 bp, Artificial
  probe
  misc_feature (1)..(25): SEQ ID NO: 2273; WAN024FX7; Start 616; Stop 640
gttgactatgtgccaatggttgata

SEQ ID NO: 320398 - DNA, 25 bp, Artificial
  probe
  misc_feature (1)..(25): SEQ ID NO: 2273; WAN024FX7; Start 477; Stop 501
gactcataatcaagaagaagagacc

SEQ ID NO: 320399 - DNA, 25 bp, Artificial
  probe
  misc_feature (1)..(25): SEQ ID NO: 2273; WAN024FX7; Start 707; Stop 731
ttaagccgattaagttagatgttga

SEQ ID NO: 320400 - DNA, 25 bp, Artificial
  probe
  misc_feature (1)..(25): SEQ ID NO: 2273; WAN024FX7; Start 620; Stop 644
actatgtgccaatggttgatattcg

SEQ ID NO: 320401 - DNA, 25 bp, Artificial
  probe
  misc_feature (1)..(25): SEQ ID NO: 2273; WAN024FX7; Start 703; Stop 727
ccaattaagccgattaagttagatg

SEQ ID NO: 320402 - DNA, 25 bp, Artificial
  probe
  misc_feature (1)..(25): SEQ ID NO: 2273; WAN024FX7; Start 702; Stop 726
tccaattaagccgattaagttagat

SEQ ID NO: 320403 - DNA, 25 bp, Artificial
  probe
  misc_feature (1)..(25): SEQ ID NO: 2273; WAN024FX7; Start 701; Stop 725
atccaattaagccgattaagttaga

SEQ ID NO: 320404 - DNA, 25 bp, Artificial
  probe
  misc_feature (1)..(25): SEQ ID NO: 2273; WAN024FX7; Start 483; Stop 507
taatcaagaagaagagacctatcac

SEQ ID NO: 320405 - DNA, 25 bp, Artificial
  probe
  misc_feature (1)..(25): SEQ ID NO: 2273; WAN024FX7; Start 234; Stop 258
attgtgtcctatgtgtaattggaga

SEQ ID NO: 320406 - DNA, 25 bp, Artificial
  probe
  misc_feature (1)..(25): SEQ ID NO: 2273; WAN024FX7; Start 149; Stop 173
ttgagacttgtggagatactcttcg

SEQ ID NO: 320407 - DNA, 25 bp, Artificial
  probe
  misc_feature (1)..(25): SEQ ID NO: 2273; WAN024FX7; Start 235; Stop 259
ttgtgtcctatgtgtaattggagac

SEQ ID NO: 320408 - DNA, 25 bp, Artificial
  probe
  misc_feature (1)..(25): SEQ ID NO: 2273; WAN024FX7; Start 476; Stop 500
tgactcataatcaagaagaagagac

SEQ ID NO: 320409 - DNA, 25 bp, Artificial
  probe
  misc_feature (1)..(25): SEQ ID NO: 2273; WAN024FX7; Start 475; Stop 499
gtgactcataatcaagaagaagaga

SEQ ID NO: 320410 - DNA, 25 bp, Artificial
  probe
  misc_feature (1)..(25): SEQ ID NO: 2273; WAN024FX7; Start 285; Stop 309
atctcagatagttgatgaagcaatt

SEQ ID NO: 320411 - DNA, 25 bp, Artificial
  probe
  misc_feature (1)..(25): SEQ ID NO: 2273; WAN024FX7; Start 233; Stop 257
aattgtgtcctatgtgtaattggag

SEQ ID NO: 320412 - DNA, 25 bp, Artificial
  probe
  misc_feature (1)..(25): SEQ ID NO: 2273; WAN024FX7; Start 147; Stop 171
cgttgagacttgtggagatactctt

SEQ ID NO: 320413 - DNA, 25 bp, Artificial
  probe
  misc_feature (1)..(25): SEQ ID NO: 2273; WAN024FX7; Start 621; Stop 645
ctatgtgccaatggttgatattcgg

SEQ ID NO: 320414 - DNA, 25 bp, Artificial
  probe
  misc_feature (1)..(25): SEQ ID NO: 2273; WAN024FX7; Start 286; Stop 310
tctcagatagttgatgaagcaatta

SEQ ID NO: 320415 - DNA, 25 bp, Artificial
  probe
  misc_feature (1)..(25): SEQ ID NO: 2273; WAN024FX7; Start 241; Stop 265
cctatgtgtaattggagacggtcaa

SEQ ID NO: 320416 - DNA, 25 bp, Artificial
  probe
  misc_feature (1)..(25): SEQ ID NO: 2273; WAN024FX7; Start 742; Stop 766
gttgttggtgatttgtataatgggt

SEQ ID NO: 320417 - DNA, 25 bp, Artificial
  probe
  misc_feature (1)..(25): SEQ ID NO: 2273; WAN024FX7; Start 706; Stop 730
attaagccgattaagttagatgttg

SEQ ID NO: 320418 - DNA, 25 bp, Artificial
  probe
  misc_feature (1)..(25): SEQ ID NO: 2274; WAN024DSD; Start 477; Stop 501
gatcctccactaaaccagaaactcc

SEQ ID NO: 320419 - DNA, 25 bp, Artificial
  probe
  misc_feature (1)..(25): SEQ ID NO: 2274; WAN024DSD; Start 163; Stop 187
tttaataggggaaatggaagtcagg

SEQ ID NO: 320420 - DNA, 25 bp, Artificial
  probe
  misc_feature (1)..(25): SEQ ID NO: 2274; WAN024DSD; Start 154; Stop 178
gccacttcttttaataggggaaatg

SEQ ID NO: 320421 - DNA, 25 bp, Artificial
  probe
  misc_feature (1)..(25): SEQ ID NO: 2274; WAN024DSD; Start 153; Stop 177
agccacttcttttaataggggaaat

SEQ ID NO: 320422 - DNA, 25 bp, Artificial
  probe
  misc_feature (1)..(25): SEQ ID NO: 2274; WAN024DSD; Start 455; Stop 479
tcattttcttcgtcaagttcaggat

SEQ ID NO: 320423 - DNA, 25 bp, Artificial
  probe
  misc_feature (1)..(25): SEQ ID NO: 2274; WAN024DSD; Start 152; Stop 176
cagccacttcttttaataggggaaa

SEQ ID NO: 320424 - DNA, 25 bp, Artificial
  probe
  misc_feature (1)..(25): SEQ ID NO: 2274; WAN024DSD; Start 162; Stop 186
ttttaataggggaaatggaagtcag

SEQ ID NO: 320425 - DNA, 25 bp, Artificial
  probe
  misc_feature (1)..(25): SEQ ID NO: 2274; WAN024DSD; Start 454; Stop 478
ctcattttcttcgtcaagttcagga

SEQ ID NO: 320426 - DNA, 25 bp, Artificial
  probe
  misc_feature (1)..(25): SEQ ID NO: 2274; WAN024DSD; Start 161; Stop 185
cttttaataggggaaatggaagtca

SEQ ID NO: 320427 - DNA, 25 bp, Artificial
  probe
  misc_feature (1)..(25): SEQ ID NO: 2274; WAN024DSD; Start 156; Stop 180
cacttcttttaataggggaaatgga

SEQ ID NO: 320428 - DNA, 25 bp, Artificial
  probe
  misc_feature (1)..(25): SEQ ID NO: 2274; WAN024DSD; Start 160; Stop 184
tcttttaataggggaaatggaagtc

SEQ ID NO: 320429 - DNA, 25 bp, Artificial
  probe
  misc_feature (1)..(25): SEQ ID NO: 2274; WAN024DSD; Start 456; Stop 480
cattttcttcgtcaagttcaggatc

SEQ ID NO: 320430 - DNA, 25 bp, Artificial
  probe
  misc_feature (1)..(25): SEQ ID NO: 2274; WAN024DSD; Start 452; Stop 476
gactcattttcttcgtcaagttcag

SEQ ID NO: 320431 - DNA, 25 bp, Artificial
  probe
  misc_feature (1)..(25): SEQ ID NO: 2274; WAN024DSD; Start 453; Stop 477
actcattttcttcgtcaagttcagg

SEQ ID NO: 320432 - DNA, 25 bp, Artificial
  probe
  misc_feature (1)..(25): SEQ ID NO: 2274; WAN024DSD; Start 449; Stop 473
aaggactcattttcttcgtcaagtt

SEQ ID NO: 320433 - DNA, 25 bp, Artificial
  probe
  misc_feature (1)..(25): SEQ ID NO: 2274; WAN024DSD; Start 448; Stop 472
aaaggactcattttcttcgtcaagt

SEQ ID NO: 320434 - DNA, 25 bp, Artificial
  probe
  misc_feature (1)..(25): SEQ ID NO: 2274; WAN024DSD; Start 447; Stop 471
aaaaggactcattttcttcgtcaag

SEQ ID NO: 320435 - DNA, 25 bp, Artificial
  probe
  misc_feature (1)..(25): SEQ ID NO: 2274; WAN024DSD; Start 159; Stop 183
ttcttttaataggggaaatggaagt

SEQ ID NO: 320436 - DNA, 25 bp, Artificial
  probe
  misc_feature (1)..(25): SEQ ID NO: 2274; WAN024DSD; Start 157; Stop 181
acttcttttaataggggaaatggaa

SEQ ID NO: 320437 - DNA, 25 bp, Artificial
  probe
  misc_feature (1)..(25): SEQ ID NO: 2274; WAN024DSD; Start 478; Stop 502
atcctccactaaaccagaaactccg

SEQ ID NO: 320438 - DNA, 25 bp, Artificial
  probe
  misc_feature (1)..(25): SEQ ID NO: 2274; WAN024DSD; Start 148; Stop 172
caagcagccacttcttttaataggg

SEQ ID NO: 320439 - DNA, 25 bp, Artificial
  probe
  misc_feature (1)..(25): SEQ ID NO: 2274; WAN024DSD; Start 147; Stop 171
ccaagcagccacttcttttaatagg

SEQ ID NO: 320440 - DNA, 25 bp, Artificial
  probe
  misc_feature (1)..(25): SEQ ID NO: 2274; WAN024DSD; Start 146; Stop 170
cccaagcagccacttcttttaatag

SEQ ID NO: 320441 - DNA, 25 bp, Artificial
  probe
  misc_feature (1)..(25): SEQ ID NO: 2274; WAN024DSD; Start 450; Stop 474
aggactcattttcttcgtcaagttc

SEQ ID NO: 320442 - DNA, 25 bp, Artificial
  probe
  misc_feature (1)..(25): SEQ ID NO: 2274; WAN024DSD; Start 164; Stop 188
ttaataggggaaatggaagtcaggc

SEQ ID NO: 320443 - DNA, 25 bp, Artificial
  probe
  misc_feature (1)..(25): SEQ ID NO: 2274; WAN024DSD; Start 451; Stop 475
ggactcattttcttcgtcaagttca

SEQ ID NO: 320444 - DNA, 25 bp, Artificial
  probe
  misc_feature (1)..(25): SEQ ID NO: 2274; WAN024DSD; Start 172; Stop 196
ggaaatggaagtcaggcagaacaac

SEQ ID NO: 320445 - DNA, 25 bp, Artificial
  probe
  misc_feature (1)..(25): SEQ ID NO: 2274; WAN024DSD; Start 155; Stop 179
ccacttcttttaataggggaaatgg

SEQ ID NO: 320446 - DNA, 25 bp, Artificial
  probe
  misc_feature (1)..(25): SEQ ID NO: 2274; WAN024DSD; Start 122; Stop 146
atgcgacagagaaagagggaagtac

SEQ ID NO: 320447 - DNA, 25 bp, Artificial
  probe
  misc_feature (1)..(25): SEQ ID NO: 2274; WAN024DSD; Start 145; Stop 169
acccaagcagccacttcttttaata

SEQ ID NO: 320448 - DNA, 25 bp, Artificial
  probe
  misc_feature (1)..(25): SEQ ID NO: 2274; WAN024DSD; Start 144; Stop 168
tacccaagcagccacttcttttaat

SEQ ID NO: 320449 - DNA, 25 bp, Artificial
  probe
  misc_feature (1)..(25): SEQ ID NO: 2274; WAN024DSD; Start 121; Stop 145
catgcgacagagaaagagggaagta

SEQ ID NO: 320450 - DNA, 25 bp, Artificial
  probe
  misc_feature (1)..(25): SEQ ID NO: 2274; WAN024DSD; Start 119; Stop 143
tacatgcgacagagaaagagggaag

SEQ ID NO: 320451 - DNA, 25 bp, Artificial
  probe
  misc_feature (1)..(25): SEQ ID NO: 2275; WAN024FO7; Start 693; Stop 717
agcaggtcttgatatgttgtatgta

SEQ ID NO: 320452 - DNA, 25 bp, Artificial
  probe
  misc_feature (1)..(25): SEQ ID NO: 2275; WAN024FO7; Start 692; Stop 716
aagcaggtcttgatatgttgtatgt

SEQ ID NO: 320453 - DNA, 25 bp, Artificial
  probe
  misc_feature (1)..(25): SEQ ID NO: 2275; WAN024FO7; Start 694; Stop 718
gcaggtcttgatatgttgtatgtac

SEQ ID NO: 320454 - DNA, 25 bp, Artificial
  probe
  misc_feature (1)..(25): SEQ ID NO: 2275; WAN024FO7; Start 854; Stop 878
tctctatactggtgaaggagtcaat

SEQ ID NO: 320455 - DNA, 25 bp, Artificial
  probe
  misc_feature (1)..(25): SEQ ID NO: 2275; WAN024FO7; Start 853; Stop 877
ctctctatactggtgaaggagtcaa

SEQ ID NO: 320456 - DNA, 25 bp, Artificial
  probe
  misc_feature (1)..(25): SEQ ID NO: 2275; WAN024FO7; Start 855; Stop 879
ctctatactggtgaaggagtcaata

SEQ ID NO: 320457 - DNA, 25 bp, Artificial
  probe
  misc_feature (1)..(25): SEQ ID NO: 2275; WAN024FO7; Start 856; Stop 880
tctatactggtgaaggagtcaataa

SEQ ID NO: 320458 - DNA, 25 bp, Artificial
  probe
  misc_feature (1)..(25): SEQ ID NO: 2275; WAN024FO7; Start 699; Stop 723
tcttgatatgttgtatgtacctgac

SEQ ID NO: 320459 - DNA, 25 bp, Artificial
  probe
  misc_feature (1)..(25): SEQ ID NO: 2275; WAN024FO7; Start 698; Stop 722
gtcttgatatgttgtatgtacctga

SEQ ID NO: 320460 - DNA, 25 bp, Artificial
  probe
  misc_feature (1)..(25): SEQ ID NO: 2275; WAN024FO7; Start 849; Stop 873
tagactctctatactggtgaaggag

SEQ ID NO: 320461 - DNA, 25 bp, Artificial
  probe
  misc_feature (1)..(25): SEQ ID NO: 2275; WAN024FO7; Start 700; Stop 724
cttgatatgttgtatgtacctgact

SEQ ID NO: 320462 - DNA, 25 bp, Artificial
  probe
  misc_feature (1)..(25): SEQ ID NO: 2275; WAN024FO7; Start 701; Stop 725
ttgatatgttgtatgtacctgactt

SEQ ID NO: 320463 - DNA, 25 bp, Artificial
  probe
  misc_feature (1)..(25): SEQ ID NO: 2275; WAN024FO7; Start 620; Stop 644
ataggtttatgggattgtatggagg

SEQ ID NO: 320464 - DNA, 25 bp, Artificial
  probe
  misc_feature (1)..(25): SEQ ID NO: 2275; WAN024FO7; Start 697; Stop 721
ggtcttgatatgttgtatgtacctg

SEQ ID NO: 320465 - DNA, 25 bp, Artificial
  probe
  misc_feature (1)..(25): SEQ ID NO: 2275; WAN024FO7; Start 695; Stop 719
caggtcttgatatgttgtatgtacc

SEQ ID NO: 320466 - DNA, 25 bp, Artificial
  probe
  misc_feature (1)..(25): SEQ ID NO: 2275; WAN024FO7; Start 626; Stop 650
ttatgggattgtatggagggacttt

SEQ ID NO: 320467 - DNA, 25 bp, Artificial
  probe
  misc_feature (1)..(25): SEQ ID NO: 2275; WAN024FO7; Start 625; Stop 649
tttatgggattgtatggagggactt

SEQ ID NO: 320468 - DNA, 25 bp, Artificial
  probe
  misc_feature (1)..(25): SEQ ID NO: 2275; WAN024FO7; Start 691; Stop 715
aaagcaggtcttgatatgttgtatg

SEQ ID NO: 320469 - DNA, 25 bp, Artificial
  probe
  misc_feature (1)..(25): SEQ ID NO: 2275; WAN024FO7; Start 573; Stop 597
atacttcctacatggatcagtcatt

SEQ ID NO: 320470 - DNA, 25 bp, Artificial
  probe
  misc_feature (1)..(25): SEQ ID NO: 2275; WAN024FO7; Start 572; Stop 596
aatacttcctacatggatcagtcat

SEQ ID NO: 320471 - DNA, 25 bp, Artificial
  probe
  misc_feature (1)..(25): SEQ ID NO: 2275; WAN024FO7; Start 621; Stop 645
taggtttatgggattgtatggaggg

SEQ ID NO: 320472 - DNA, 25 bp, Artificial
  probe
  misc_feature (1)..(25): SEQ ID NO: 2275; WAN024FO7; Start 618; Stop 642
agataggtttatgggattgtatgga

SEQ ID NO: 320473 - DNA, 25 bp, Artificial
  probe
  misc_feature (1)..(25): SEQ ID NO: 2275; WAN024FO7; Start 619; Stop 643
gataggtttatgggattgtatggag

SEQ ID NO: 320474 - DNA, 25 bp, Artificial
  probe
  misc_feature (1)..(25): SEQ ID NO: 2275; WAN024FO7; Start 863; Stop 887
tggtgaaggagtcaataaagtatga

SEQ ID NO: 320475 - DNA, 25 bp, Artificial
  probe
  misc_feature (1)..(25): SEQ ID NO: 2275; WAN024FO7; Start 861; Stop 885
actggtgaaggagtcaataaagtat

SEQ ID NO: 320476 - DNA, 25 bp, Artificial
  probe
  misc_feature (1)..(25): SEQ ID NO: 2275; WAN024FO7; Start 859; Stop 883
atactggtgaaggagtcaataaagt

SEQ ID NO: 320477 - DNA, 25 bp, Artificial
  probe
  misc_feature (1)..(25): SEQ ID NO: 2275; WAN024FO7; Start 862; Stop 886
ctggtgaaggagtcaataaagtatg

SEQ ID NO: 320478 - DNA, 25 bp, Artificial
  probe
  misc_feature (1)..(25): SEQ ID NO: 2275; WAN024FO7; Start 624; Stop 648
gtttatgggattgtatggagggact

SEQ ID NO: 320479 - DNA, 25 bp, Artificial
  probe
  misc_feature (1)..(25): SEQ ID NO: 2275; WAN024FO7; Start 51; Stop 75
taattgggaggatactttagaatgc

SEQ ID NO: 320480 - DNA, 25 bp, Artificial
  probe
  misc_feature (1)..(25): SEQ ID NO: 2275; WAN024FO7; Start 454; Stop 478
tcacttcttattaacttattggcat

SEQ ID NO: 320481 - DNA, 25 bp, Artificial
  probe
  misc_feature (1)..(25): SEQ ID NO: 2275; WAN024FO7; Start 453; Stop 477
atcacttcttattaacttattggca

SEQ ID NO: 320482 - DNA, 25 bp, Artificial
  probe
  misc_feature (1)..(25): SEQ ID NO: 2275; WAN024FO7; Start 864; Stop 888
ggtgaaggagtcaataaagtatgat

SEQ ID NO: 320483 - DNA, 25 bp, Artificial
  probe
  misc_feature (1)..(25): SEQ ID NO: 2275; WAN024FO7; Start 623; Stop 647
ggtttatgggattgtatggagggac

SEQ ID NO: 320484 - DNA, 25 bp, Artificial
  probe
  misc_feature (1)..(25): SEQ ID NO: 2276; WAN024G22; Start 307; Stop 331
tactatgattattaccagccagagg

SEQ ID NO: 320485 - DNA, 25 bp, Artificial
  probe
  misc_feature (1)..(25): SEQ ID NO: 2276; WAN024G22; Start 305; Stop 329
cctactatgattattaccagccaga

SEQ ID NO: 320486 - DNA, 25 bp, Artificial
  probe
  misc_feature (1)..(25): SEQ ID NO: 2276; WAN024G22; Start 304; Stop 328
tcctactatgattattaccagccag

SEQ ID NO: 320487 - DNA, 25 bp, Artificial
  probe
  misc_feature (1)..(25): SEQ ID NO: 2276; WAN024G22; Start 303; Stop 327
atcctactatgattattaccagcca

SEQ ID NO: 320488 - DNA, 25 bp, Artificial
  probe
  misc_feature (1)..(25): SEQ ID NO: 2276; WAN024G22; Start 451; Stop 475
gcctcagtctcttgtatctatggtt

SEQ ID NO: 320489 - DNA, 25 bp, Artificial
  probe
  misc_feature (1)..(25): SEQ ID NO: 2276; WAN024G22; Start 62; Stop 86
aatatcaaccatcaggagatcaacc

SEQ ID NO: 320490 - DNA, 25 bp, Artificial
  probe
  misc_feature (1)..(25): SEQ ID NO: 2276; WAN024G22; Start 424; Stop 448
ttggagcgtaatgatgttattgtcg

SEQ ID NO: 320491 - DNA, 25 bp, Artificial
  probe
  misc_feature (1)..(25): SEQ ID NO: 2276; WAN024G22; Start 306; Stop 330
ctactatgattattaccagccagag

SEQ ID NO: 320492 - DNA, 25 bp, Artificial
  probe
  misc_feature (1)..(25): SEQ ID NO: 2276; WAN024G22; Start 340; Stop 364
ccttctagcgatacctatattgaga

SEQ ID NO: 320493 - DNA, 25 bp, Artificial
  probe
  misc_feature (1)..(25): SEQ ID NO: 2276; WAN024G22; Start 427; Stop 451
gagcgtaatgatgttattgtcgtgg

SEQ ID NO: 320494 - DNA, 25 bp, Artificial
  probe
  misc_feature (1)..(25): SEQ ID NO: 2276; WAN024G22; Start 426; Stop 450
ggagcgtaatgatgttattgtcgtg

SEQ ID NO: 320495 - DNA, 25 bp, Artificial
  probe
  misc_feature (1)..(25): SEQ ID NO: 2276; WAN024G22; Start 425; Stop 449
tggagcgtaatgatgttattgtcgt

SEQ ID NO: 320496 - DNA, 25 bp, Artificial
  probe
  misc_feature (1)..(25): SEQ ID NO: 2276; WAN024G22; Start 344; Stop 368
ctagcgatacctatattgagaagga

SEQ ID NO: 320497 - DNA, 25 bp, Artificial
  probe
  misc_feature (1)..(25): SEQ ID NO: 2276; WAN024G22; Start 343; Stop 367
tctagcgatacctatattgagaagg

SEQ ID NO: 320498 - DNA, 25 bp, Artificial
  probe
  misc_feature (1)..(25): SEQ ID NO: 2276; WAN024G22; Start 538; Stop 562
cgtgataaactcttgaatgacttgg

SEQ ID NO: 320499 - DNA, 25 bp, Artificial
  probe
  misc_feature (1)..(25): SEQ ID NO: 2276; WAN024G22; Start 535; Stop 559
tctcgtgataaactcttgaatgact

SEQ ID NO: 320500 - DNA, 25 bp, Artificial
  probe
  misc_feature (1)..(25): SEQ ID NO: 2276; WAN024G22; Start 458; Stop 482
tctcttgtatctatggtttgggttc

SEQ ID NO: 320501 - DNA, 25 bp, Artificial
  probe
  misc_feature (1)..(25): SEQ ID NO: 2276; WAN024G22; Start 457; Stop 481
gtctcttgtatctatggtttgggtt

SEQ ID NO: 320502 - DNA, 25 bp, Artificial
  probe
  misc_feature (1)..(25): SEQ ID NO: 2276; WAN024G22; Start 454; Stop 478
tcagtctcttgtatctatggtttgg

SEQ ID NO: 320503 - DNA, 25 bp, Artificial
  probe
  misc_feature (1)..(25): SEQ ID NO: 2276; WAN024G22; Start 423; Stop 447
tttggagcgtaatgatgttattgtc

SEQ ID NO: 320504 - DNA, 25 bp, Artificial
  probe
  misc_feature (1)..(25): SEQ ID NO: 2276; WAN024G22; Start 366; Stop 390
ggatagttctgtcaatgacgagatt

SEQ ID NO: 320505 - DNA, 25 bp, Artificial
  probe
  misc_feature (1)..(25): SEQ ID NO: 2276; WAN024G22; Start 452; Stop 476
cctcagtctcttgtatctatggttt

SEQ ID NO: 320506 - DNA, 25 bp, Artificial
  probe
  misc_feature (1)..(25): SEQ ID NO: 2276; WAN024G22; Start 537; Stop 561
tcgtgataaactcttgaatgacttg

SEQ ID NO: 320507 - DNA, 25 bp, Artificial
  probe
  misc_feature (1)..(25): SEQ ID NO: 2276; WAN024G22; Start 455; Stop 479
cagtctcttgtatctatggtttggg

SEQ ID NO: 320508 - DNA, 25 bp, Artificial
  probe
  misc_feature (1)..(25): SEQ ID NO: 2276; WAN024G22; Start 346; Stop 370
agcgatacctatattgagaaggata

SEQ ID NO: 320509 - DNA, 25 bp, Artificial
  probe
  misc_feature (1)..(25): SEQ ID NO: 2276; WAN024G22; Start 345; Stop 369
tagcgatacctatattgagaaggat

SEQ ID NO: 320510 - DNA, 25 bp, Artificial
  probe
  misc_feature (1)..(25): SEQ ID NO: 2276; WAN024G22; Start 539; Stop 563
gtgataaactcttgaatgacttggt

SEQ ID NO: 320511 - DNA, 25 bp, Artificial
  probe
  misc_feature (1)..(25): SEQ ID NO: 2276; WAN024G22; Start 536; Stop 560
ctcgtgataaactcttgaatgactt

SEQ ID NO: 320512 - DNA, 25 bp, Artificial
  probe
  misc_feature (1)..(25): SEQ ID NO: 2276; WAN024G22; Start 456; Stop 480
agtctcttgtatctatggtttgggt

SEQ ID NO: 320513 - DNA, 25 bp, Artificial
  probe
  misc_feature (1)..(25): SEQ ID NO: 2276; WAN024G22; Start 363; Stop 387
gaaggatagttctgtcaatgacgag

SEQ ID NO: 320514 - DNA, 25 bp, Artificial
  probe
  misc_feature (1)..(25): SEQ ID NO: 2276; WAN024G22; Start 365; Stop 389
aggatagttctgtcaatgacgagat

SEQ ID NO: 320515 - DNA, 25 bp, Artificial
  probe
  misc_feature (1)..(25): SEQ ID NO: 2276; WAN024G22; Start 347; Stop 371
gcgatacctatattgagaaggatag

SEQ ID NO: 320516 - DNA, 25 bp, Artificial
  probe
  misc_feature (1)..(25): SEQ ID NO: 2276; WAN024G22; Start 364; Stop 388
aaggatagttctgtcaatgacgaga

SEQ ID NO: 320517 - DNA, 25 bp, Artificial
  probe
  misc_feature (1)..(25): SEQ ID NO: 2277; WAN024E2G; Start 86; Stop 110
tatacaaagaggaagggagagtcaa

SEQ ID NO: 320518 - DNA, 25 bp, Artificial
  probe
  misc_feature (1)..(25): SEQ ID NO: 2277; WAN024E2G; Start 85; Stop 109
atatacaaagaggaagggagagtca

SEQ ID NO: 320519 - DNA, 25 bp, Artificial
  probe
  misc_feature (1)..(25): SEQ ID NO: 2277; WAN024E2G; Start 84; Stop 108
gatatacaaagaggaagggagagtc

SEQ ID NO: 320520 - DNA, 25 bp, Artificial
  probe
  misc_feature (1)..(25): SEQ ID NO: 2277; WAN024E2G; Start 83; Stop 107
ggatatacaaagaggaagggagagt

SEQ ID NO: 320521 - DNA, 25 bp, Artificial
  probe
  misc_feature (1)..(25): SEQ ID NO: 2277; WAN024E2G; Start 82; Stop 106
tggatatacaaagaggaagggagag

SEQ ID NO: 320522 - DNA, 25 bp, Artificial
  probe
  misc_feature (1)..(25): SEQ ID NO: 2277; WAN024E2G; Start 81; Stop 105
ctggatatacaaagaggaagggaga

SEQ ID NO: 320523 - DNA, 25 bp, Artificial
  probe
  misc_feature (1)..(25): SEQ ID NO: 2277; WAN024E2G; Start 87; Stop 111
atacaaagaggaagggagagtcaat

SEQ ID NO: 320524 - DNA, 25 bp, Artificial
  probe
  misc_feature (1)..(25): SEQ ID NO: 2277; WAN024E2G; Start 79; Stop 103
atctggatatacaaagaggaaggga

SEQ ID NO: 320525 - DNA, 25 bp, Artificial
  probe
  misc_feature (1)..(25): SEQ ID NO: 2277; WAN024E2G; Start 58; Stop 82
ccatgcagacacattaccaatatct

SEQ ID NO: 320526 - DNA, 25 bp, Artificial
  probe
  misc_feature (1)..(25): SEQ ID NO: 2277; WAN024E2G; Start 80; Stop 104
tctggatatacaaagaggaagggag

SEQ ID NO: 320527 - DNA, 25 bp, Artificial
  probe
  misc_feature (1)..(25): SEQ ID NO: 2277; WAN024E2G; Start 88; Stop 112
tacaaagaggaagggagagtcaatc

SEQ ID NO: 320528 - DNA, 25 bp, Artificial
  probe
  misc_feature (1)..(25): SEQ ID NO: 2277; WAN024E2G; Start 78; Stop 102
tatctggatatacaaagaggaaggg

SEQ ID NO: 320529 - DNA, 25 bp, Artificial
  probe
  misc_feature (1)..(25): SEQ ID NO: 2277; WAN024E2G; Start 165; Stop 189
taatttcaatagcaagtaccacctg

SEQ ID NO: 320530 - DNA, 25 bp, Artificial
  probe
  misc_feature (1)..(25): SEQ ID NO: 2277; WAN024E2G; Start 166; Stop 190
aatttcaatagcaagtaccacctga

SEQ ID NO: 320531 - DNA, 25 bp, Artificial
  probe
  misc_feature (1)..(25): SEQ ID NO: 2277; WAN024E2G; Start 167; Stop 191
atttcaatagcaagtaccacctgag

SEQ ID NO: 320532 - DNA, 25 bp, Artificial
  probe
  misc_feature (1)..(25): SEQ ID NO: 2277; WAN024E2G; Start 163; Stop 187
cataatttcaatagcaagtaccacc

SEQ ID NO: 320533 - DNA, 25 bp, Artificial
  probe
  misc_feature (1)..(25): SEQ ID NO: 2277; WAN024E2G; Start 162; Stop 186
ccataatttcaatagcaagtaccac

SEQ ID NO: 320534 - DNA, 25 bp, Artificial
  probe
  misc_feature (1)..(25): SEQ ID NO: 2277; WAN024E2G; Start 57; Stop 81
gccatgcagacacattaccaatatc

SEQ ID NO: 320535 - DNA, 25 bp, Artificial
  probe
  misc_feature (1)..(25): SEQ ID NO: 2277; WAN024E2G; Start 164; Stop 188
ataatttcaatagcaagtaccacct

SEQ ID NO: 320536 - DNA, 25 bp, Artificial
  probe
  misc_feature (1)..(25): SEQ ID NO: 2277; WAN024E2G; Start 161; Stop 185
tccataatttcaatagcaagtacca

SEQ ID NO: 320537 - DNA, 25 bp, Artificial
  probe
  misc_feature (1)..(25): SEQ ID NO: 2277; WAN024E2G; Start 39; Stop 63
cactatagatatcattatgccatgc

SEQ ID NO: 320538 - DNA, 25 bp, Artificial
  probe
  misc_feature (1)..(25): SEQ ID NO: 2277; WAN024E2G; Start 89; Stop 113
acaaagaggaagggagagtcaatct

SEQ ID NO: 320539 - DNA, 25 bp, Artificial
  probe
  misc_feature (1)..(25): SEQ ID NO: 2277; WAN024E2G; Start 64; Stop 88
agacacattaccaatatctggatat

SEQ ID NO: 320540 - DNA, 25 bp, Artificial
  probe
  misc_feature (1)..(25): SEQ ID NO: 2277; WAN024E2G; Start 47; Stop 71
atatcattatgccatgcagacacat

SEQ ID NO: 320541 - DNA, 25 bp, Artificial
  probe
  misc_feature (1)..(25): SEQ ID NO: 2277; WAN024E2G; Start 160; Stop 184
atccataatttcaatagcaagtacc

SEQ ID NO: 320542 - DNA, 25 bp, Artificial
  probe
  misc_feature (1)..(25): SEQ ID NO: 2277; WAN024E2G; Start 49; Stop 73
atcattatgccatgcagacacatta

SEQ ID NO: 320543 - DNA, 25 bp, Artificial
  probe
  misc_feature (1)..(25): SEQ ID NO: 2277; WAN024E2G; Start 48; Stop 72
tatcattatgccatgcagacacatt

SEQ ID NO: 320544 - DNA, 25 bp, Artificial
  probe
  misc_feature (1)..(25): SEQ ID NO: 2277; WAN024E2G; Start 44; Stop 68
tagatatcattatgccatgcagaca

SEQ ID NO: 320545 - DNA, 25 bp, Artificial
  probe
  misc_feature (1)..(25): SEQ ID NO: 2277; WAN024E2G; Start 157; Stop 181
atcatccataatttcaatagcaagt

SEQ ID NO: 320546 - DNA, 25 bp, Artificial
  probe
  misc_feature (1)..(25): SEQ ID NO: 2277; WAN024E2G; Start 62; Stop 86
gcagacacattaccaatatctggat

SEQ ID NO: 320547 - DNA, 25 bp, Artificial
  probe
  misc_feature (1)..(25): SEQ ID NO: 2277; WAN024E2G; Start 36; Stop 60
actcactatagatatcattatgcca

SEQ ID NO: 320548 - DNA, 25 bp, Artificial
  probe
  misc_feature (1)..(25): SEQ ID NO: 2277; WAN024E2G; Start 154; Stop 178
aggatcatccataatttcaatagca

SEQ ID NO: 320549 - DNA, 25 bp, Artificial
  probe
  misc_feature (1)..(25): SEQ ID NO: 2277; WAN024E2G; Start 45; Stop 69
agatatcattatgccatgcagacac

SEQ ID NO: 320550 - DNA, 25 bp, Artificial
  probe
  misc_feature (1)..(25): SEQ ID NO: 2278; WAN024EV2; Start 42; Stop 66
tatcatcactgttcttgagggtaga

SEQ ID NO: 320551 - DNA, 25 bp, Artificial
  probe
  misc_feature (1)..(25): SEQ ID NO: 2278; WAN024EV2; Start 41; Stop 65
atatcatcactgttcttgagggtag

SEQ ID NO: 320552 - DNA, 25 bp, Artificial
  probe
  misc_feature (1)..(25): SEQ ID NO: 2278; WAN024EV2; Start 37; Stop 61
ctcgatatcatcactgttcttgagg

SEQ ID NO: 320553 - DNA, 25 bp, Artificial
  probe
  misc_feature (1)..(25): SEQ ID NO: 2278; WAN024EV2; Start 36; Stop 60
gctcgatatcatcactgttcttgag

SEQ ID NO: 320554 - DNA, 25 bp, Artificial
  probe
  misc_feature (1)..(25): SEQ ID NO: 2278; WAN024EV2; Start 33; Stop 57
aaagctcgatatcatcactgttctt

SEQ ID NO: 320555 - DNA, 25 bp, Artificial
  probe
  misc_feature (1)..(25): SEQ ID NO: 2278; WAN024EV2; Start 40; Stop 64
gatatcatcactgttcttgagggta

SEQ ID NO: 320556 - DNA, 25 bp, Artificial
  probe
  misc_feature (1)..(25): SEQ ID NO: 2278; WAN024EV2; Start 43; Stop 67
atcatcactgttcttgagggtagaa

SEQ ID NO: 320557 - DNA, 25 bp, Artificial
  probe
  misc_feature (1)..(25): SEQ ID NO: 2278; WAN024EV2; Start 38; Stop 62
tcgatatcatcactgttcttgaggg

SEQ ID NO: 320558 - DNA, 25 bp, Artificial
  probe
  misc_feature (1)..(25): SEQ ID NO: 2278; WAN024EV2; Start 39; Stop 63
cgatatcatcactgttcttgagggt

SEQ ID NO: 320559 - DNA, 25 bp, Artificial
  probe
  misc_feature (1)..(25): SEQ ID NO: 2278; WAN024EV2; Start 171; Stop 195
taaacagcttcgctttcacattgta

SEQ ID NO: 320560 - DNA, 25 bp, Artificial
  probe
  misc_feature (1)..(25): SEQ ID NO: 2278; WAN024EV2; Start 194; Stop 218
tacaacatcttagccgtgctatgag

SEQ ID NO: 320561 - DNA, 25 bp, Artificial
  probe
  misc_feature (1)..(25): SEQ ID NO: 2278; WAN024EV2; Start 20; Stop 44
cgcaagattttgaaaagctcgatat

SEQ ID NO: 320562 - DNA, 25 bp, Artificial
  probe
  misc_feature (1)..(25): SEQ ID NO: 2278; WAN024EV2; Start 32; Stop 56
aaaagctcgatatcatcactgttct

SEQ ID NO: 320563 - DNA, 25 bp, Artificial
  probe
  misc_feature (1)..(25): SEQ ID NO: 2278; WAN024EV2; Start 170; Stop 194
ctaaacagcttcgctttcacattgt

SEQ ID NO: 320564 - DNA, 25 bp, Artificial
  probe
  misc_feature (1)..(25): SEQ ID NO: 2278; WAN024EV2; Start 31; Stop 55
gaaaagctcgatatcatcactgttc

SEQ ID NO: 320565 - DNA, 25 bp, Artificial
  probe
  misc_feature (1)..(25): SEQ ID NO: 2278; WAN024EV2; Start 21; Stop 45
gcaagattttgaaaagctcgatatc

SEQ ID NO: 320566 - DNA, 25 bp, Artificial
  probe
  misc_feature (1)..(25): SEQ ID NO: 2278; WAN024EV2; Start 28; Stop 52
tttgaaaagctcgatatcatcactg

SEQ ID NO: 320567 - DNA, 25 bp, Artificial
  probe
  misc_feature (1)..(25): SEQ ID NO: 2278; WAN024EV2; Start 30; Stop 54
tgaaaagctcgatatcatcactgtt

SEQ ID NO: 320568 - DNA, 25 bp, Artificial
  probe
  misc_feature (1)..(25): SEQ ID NO: 2278; WAN024EV2; Start 29; Stop 53
ttgaaaagctcgatatcatcactgt

SEQ ID NO: 320569 - DNA, 25 bp, Artificial
  probe
  misc_feature (1)..(25): SEQ ID NO: 2278; WAN024EV2; Start 172; Stop 196
aaacagcttcgctttcacattgtac

SEQ ID NO: 320570 - DNA, 25 bp, Artificial
  probe
  misc_feature (1)..(25): SEQ ID NO: 2278; WAN024EV2; Start 27; Stop 51
ttttgaaaagctcgatatcatcact

SEQ ID NO: 320571 - DNA, 25 bp, Artificial
  probe
  misc_feature (1)..(25): SEQ ID NO: 2278; WAN024EV2; Start 56; Stop 80
ttgagggtagaacacaagctgtcat

SEQ ID NO: 320572 - DNA, 25 bp, Artificial
  probe
  misc_feature (1)..(25): SEQ ID NO: 2278; WAN024EV2; Start 26; Stop 50
attttgaaaagctcgatatcatcac

SEQ ID NO: 320573 - DNA, 25 bp, Artificial
  probe
  misc_feature (1)..(25): SEQ ID NO: 2278; WAN024EV2; Start 22; Stop 46
caagattttgaaaagctcgatatca

SEQ ID NO: 320574 - DNA, 25 bp, Artificial
  probe
  misc_feature (1)..(25): SEQ ID NO: 2278; WAN024EV2; Start 25; Stop 49
gattttgaaaagctcgatatcatca

SEQ ID NO: 320575 - DNA, 25 bp, Artificial
  probe
  misc_feature (1)..(25): SEQ ID NO: 2278; WAN024EV2; Start 24; Stop 48
agattttgaaaagctcgatatcatc

SEQ ID NO: 320576 - DNA, 25 bp, Artificial
  probe
  misc_feature (1)..(25): SEQ ID NO: 2278; WAN024EV2; Start 57; Stop 81
tgagggtagaacacaagctgtcatc

SEQ ID NO: 320577 - DNA, 25 bp, Artificial
  probe
  misc_feature (1)..(25): SEQ ID NO: 2278; WAN024EV2; Start 169; Stop 193
gctaaacagcttcgctttcacattg

SEQ ID NO: 320578 - DNA, 25 bp, Artificial
  probe
  misc_feature (1)..(25): SEQ ID NO: 2278; WAN024EV2; Start 23; Stop 47
aagattttgaaaagctcgatatcat

SEQ ID NO: 320579 - DNA, 25 bp, Artificial
  probe
  misc_feature (1)..(25): SEQ ID NO: 2278; WAN024EV2; Start 195; Stop 219
acaacatcttagccgtgctatgagt

SEQ ID NO: 320580 - DNA, 25 bp, Artificial
  probe
  misc_feature (1)..(25): SEQ ID NO: 2278; WAN024EV2; Start 58; Stop 82
gagggtagaacacaagctgtcatcc

SEQ ID NO: 320581 - DNA, 25 bp, Artificial
  probe
  misc_feature (1)..(25): SEQ ID NO: 2278; WAN024EV2; Start 53; Stop 77
ttcttgagggtagaacacaagctgt

SEQ ID NO: 320582 - DNA, 25 bp, Artificial
  probe
  misc_feature (1)..(25): SEQ ID NO: 2278; WAN024EV2; Start 168; Stop 192
ggctaaacagcttcgctttcacatt

SEQ ID NO: 320583 - DNA, 25 bp, Artificial
  probe
  misc_feature (1)..(25): SEQ ID NO: 2279; WAN024EUU; Start 42; Stop 66
tatcataactgttcttgagagcaga

SEQ ID NO: 320584 - DNA, 25 bp, Artificial
  probe
  misc_feature (1)..(25): SEQ ID NO: 2279; WAN024EUU; Start 120; Stop 144
aagctcattcaacaagatagtcaga

SEQ ID NO: 320585 - DNA, 25 bp, Artificial
  probe
  misc_feature (1)..(25): SEQ ID NO: 2279; WAN024EUU; Start 40; Stop 64
aatatcataactgttcttgagagca

SEQ ID NO: 320586 - DNA, 25 bp, Artificial
  probe
  misc_feature (1)..(25): SEQ ID NO: 2279; WAN024EUU; Start 41; Stop 65
atatcataactgttcttgagagcag

SEQ ID NO: 320587 - DNA, 25 bp, Artificial
  probe
  misc_feature (1)..(25): SEQ ID NO: 2279; WAN024EUU; Start 121; Stop 145
agctcattcaacaagatagtcagaa

SEQ ID NO: 320588 - DNA, 25 bp, Artificial
  probe
  misc_feature (1)..(25): SEQ ID NO: 2279; WAN024EUU; Start 119; Stop 143
gaagctcattcaacaagatagtcag

SEQ ID NO: 320589 - DNA, 25 bp, Artificial
  probe
  misc_feature (1)..(25): SEQ ID NO: 2279; WAN024EUU; Start 114; Stop 138
tactggaagctcattcaacaagata

SEQ ID NO: 320590 - DNA, 25 bp, Artificial
  probe
  misc_feature (1)..(25): SEQ ID NO: 2279; WAN024EUU; Start 39; Stop 63
caatatcataactgttcttgagagc

SEQ ID NO: 320591 - DNA, 25 bp, Artificial
  probe
  misc_feature (1)..(25): SEQ ID NO: 2279; WAN024EUU; Start 118; Stop 142
ggaagctcattcaacaagatagtca

SEQ ID NO: 320592 - DNA, 25 bp, Artificial
  probe
  misc_feature (1)..(25): SEQ ID NO: 2279; WAN024EUU; Start 117; Stop 141
tggaagctcattcaacaagatagtc

SEQ ID NO: 320593 - DNA, 25 bp, Artificial
  probe
  misc_feature (1)..(25): SEQ ID NO: 2279; WAN024EUU; Start 116; Stop 140
ctggaagctcattcaacaagatagt

SEQ ID NO: 320594 - DNA, 25 bp, Artificial
  probe
  misc_feature (1)..(25): SEQ ID NO: 2279; WAN024EUU; Start 115; Stop 139
actggaagctcattcaacaagatag

SEQ ID NO: 320595 - DNA, 25 bp, Artificial
  probe
  misc_feature (1)..(25): SEQ ID NO: 2279; WAN024EUU; Start 113; Stop 137
ctactggaagctcattcaacaagat

SEQ ID NO: 320596 - DNA, 25 bp, Artificial
  probe
  misc_feature (1)..(25): SEQ ID NO: 2279; WAN024EUU; Start 122; Stop 146
gctcattcaacaagatagtcagaaa

SEQ ID NO: 320597 - DNA, 25 bp, Artificial
  probe
  misc_feature (1)..(25): SEQ ID NO: 2279; WAN024EUU; Start 43; Stop 67
atcataactgttcttgagagcagaa

SEQ ID NO: 320598 - DNA, 25 bp, Artificial
  probe
  misc_feature (1)..(25): SEQ ID NO: 2279; WAN024EUU; Start 16; Stop 40
attgctcaggactttgataaactca

SEQ ID NO: 320599 - DNA, 25 bp, Artificial
  probe
  misc_feature (1)..(25): SEQ ID NO: 2279; WAN024EUU; Start 11; Stop 35
gctttattgctcaggactttgataa

SEQ ID NO: 320600 - DNA, 25 bp, Artificial
  probe
  misc_feature (1)..(25): SEQ ID NO: 2279; WAN024EUU; Start 15; Stop 39
tattgctcaggactttgataaactc

SEQ ID NO: 320601 - DNA, 25 bp, Artificial
  probe
  misc_feature (1)..(25): SEQ ID NO: 2279; WAN024EUU; Start 83; Stop 107
gaaatcccatgaatacaaggctatc

SEQ ID NO: 320602 - DNA, 25 bp, Artificial
  probe
  misc_feature (1)..(25): SEQ ID NO: 2279; WAN024EUU; Start 82; Stop 106
cgaaatcccatgaatacaaggctat

SEQ ID NO: 320603 - DNA, 25 bp, Artificial
  probe
  misc_feature (1)..(25): SEQ ID NO: 2279; WAN024EUU; Start 14; Stop 38
ttattgctcaggactttgataaact

SEQ ID NO: 320604 - DNA, 25 bp, Artificial
  probe
  misc_feature (1)..(25): SEQ ID NO: 2279; WAN024EUU; Start 123; Stop 147
ctcattcaacaagatagtcagaaac

SEQ ID NO: 320605 - DNA, 25 bp, Artificial
  probe
  misc_feature (1)..(25): SEQ ID NO: 2279; WAN024EUU; Start 85; Stop 109
aatcccatgaatacaaggctatcaa

SEQ ID NO: 320606 - DNA, 25 bp, Artificial
  probe
  misc_feature (1)..(25): SEQ ID NO: 2279; WAN024EUU; Start 84; Stop 108
aaatcccatgaatacaaggctatca

SEQ ID NO: 320607 - DNA, 25 bp, Artificial
  probe
  misc_feature (1)..(25): SEQ ID NO: 2279; WAN024EUU; Start 86; Stop 110
atcccatgaatacaaggctatcaag

SEQ ID NO: 320608 - DNA, 25 bp, Artificial
  probe
  misc_feature (1)..(25): SEQ ID NO: 2279; WAN024EUU; Start 78; Stop 102
catccgaaatcccatgaatacaagg

SEQ ID NO: 320609 - DNA, 25 bp, Artificial
  probe
  misc_feature (1)..(25): SEQ ID NO: 2279; WAN024EUU; Start 81; Stop 105
ccgaaatcccatgaatacaaggcta

SEQ ID NO: 320610 - DNA, 25 bp, Artificial
  probe
  misc_feature (1)..(25): SEQ ID NO: 2279; WAN024EUU; Start 76; Stop 100
atcatccgaaatcccatgaatacaa

SEQ ID NO: 320611 - DNA, 25 bp, Artificial
  probe
  misc_feature (1)..(25): SEQ ID NO: 2279; WAN024EUU; Start 18; Stop 42
tgctcaggactttgataaactcaat

SEQ ID NO: 320612 - DNA, 25 bp, Artificial
  probe
  misc_feature (1)..(25): SEQ ID NO: 2279; WAN024EUU; Start 64; Stop 88
agaacacaagccatcatccgaaatc

SEQ ID NO: 320613 - DNA, 25 bp, Artificial
  probe
  misc_feature (1)..(25): SEQ ID NO: 2279; WAN024EUU; Start 17; Stop 41
ttgctcaggactttgataaactcaa

SEQ ID NO: 320614 - DNA, 25 bp, Artificial
  probe
  misc_feature (1)..(25): SEQ ID NO: 2279; WAN024EUU; Start 77; Stop 101
tcatccgaaatcccatgaatacaag

SEQ ID NO: 320615 - DNA, 25 bp, Artificial
  probe
  misc_feature (1)..(25): SEQ ID NO: 2279; WAN024EUU; Start 75; Stop 99
catcatccgaaatcccatgaataca

SEQ ID NO: 320616 - DNA, 25 bp, Artificial
  probe
  misc_feature (1)..(25): SEQ ID NO: 2280; WAN024DYO; Start 246; Stop 270
ggtaatatcaatcgtaacttctgga

SEQ ID NO: 320617 - DNA, 25 bp, Artificial
  probe
  misc_feature (1)..(25): SEQ ID NO: 2280; WAN024DYO; Start 245; Stop 269
aggtaatatcaatcgtaacttctgg

SEQ ID NO: 320618 - DNA, 25 bp, Artificial
  probe
  misc_feature (1)..(25): SEQ ID NO: 2280; WAN024DYO; Start 80; Stop 104
cttggcttgccttattgtcattatt

SEQ ID NO: 320619 - DNA, 25 bp, Artificial
  probe
  misc_feature (1)..(25): SEQ ID NO: 2280; WAN024DYO; Start 81; Stop 105
ttggcttgccttattgtcattattg

SEQ ID NO: 320620 - DNA, 25 bp, Artificial
  probe
  misc_feature (1)..(25): SEQ ID NO: 2280; WAN024DYO; Start 79; Stop 103
acttggcttgccttattgtcattat

SEQ ID NO: 320621 - DNA, 25 bp, Artificial
  probe
  misc_feature (1)..(25): SEQ ID NO: 2280; WAN024DYO; Start 82; Stop 106
tggcttgccttattgtcattattga

SEQ ID NO: 320622 - DNA, 25 bp, Artificial
  probe
  misc_feature (1)..(25): SEQ ID NO: 2280; WAN024DYO; Start 153; Stop 177
cttaccttcttcaggagttaattcc

SEQ ID NO: 320623 - DNA, 25 bp, Artificial
  probe
  misc_feature (1)..(25): SEQ ID NO: 2280; WAN024DYO; Start 118; Stop 142
ataccgtctaaagcaatagcatcat

SEQ ID NO: 320624 - DNA, 25 bp, Artificial
  probe
  misc_feature (1)..(25): SEQ ID NO: 2280; WAN024DYO; Start 116; Stop 140
caataccgtctaaagcaatagcatc

SEQ ID NO: 320625 - DNA, 25 bp, Artificial
  probe
  misc_feature (1)..(25): SEQ ID NO: 2280; WAN024DYO; Start 244; Stop 268
gaggtaatatcaatcgtaacttctg

SEQ ID NO: 320626 - DNA, 25 bp, Artificial
  probe
  misc_feature (1)..(25): SEQ ID NO: 2280; WAN024DYO; Start 117; Stop 141
aataccgtctaaagcaatagcatca

SEQ ID NO: 320627 - DNA, 25 bp, Artificial
  probe
  misc_feature (1)..(25): SEQ ID NO: 2280; WAN024DYO; Start 145; Stop 169
gtgagactcttaccttcttcaggag

SEQ ID NO: 320628 - DNA, 25 bp, Artificial
  probe
  misc_feature (1)..(25): SEQ ID NO: 2280; WAN024DYO; Start 111; Stop 135
aacagcaataccgtctaaagcaata

SEQ ID NO: 320629 - DNA, 25 bp, Artificial
  probe
  misc_feature (1)..(25): SEQ ID NO: 2280; WAN024DYO; Start 72; Stop 96
catactgacttggcttgccttattg

SEQ ID NO: 320630 - DNA, 25 bp, Artificial
  probe
  misc_feature (1)..(25): SEQ ID NO: 2280; WAN024DYO; Start 152; Stop 176
tcttaccttcttcaggagttaattc

SEQ ID NO: 320631 - DNA, 25 bp, Artificial
  probe
  misc_feature (1)..(25): SEQ ID NO: 2280; WAN024DYO; Start 151; Stop 175
ctcttaccttcttcaggagttaatt

SEQ ID NO: 320632 - DNA, 25 bp, Artificial
  probe
  misc_feature (1)..(25): SEQ ID NO: 2280; WAN024DYO; Start 20; Stop 44
taatcttgtcccaggtggttaattt

SEQ ID NO: 320633 - DNA, 25 bp, Artificial
  probe
  misc_feature (1)..(25): SEQ ID NO: 2280; WAN024DYO; Start 15; Stop 39
ttatttaatcttgtcccaggtggtt

SEQ ID NO: 320634 - DNA, 25 bp, Artificial
  probe
  misc_feature (1)..(25): SEQ ID NO: 2280; WAN024DYO; Start 14; Stop 38
tttatttaatcttgtcccaggtggt

SEQ ID NO: 320635 - DNA, 25 bp, Artificial
  probe
  misc_feature (1)..(25): SEQ ID NO: 2280; WAN024DYO; Start 112; Stop 136
acagcaataccgtctaaagcaatag

SEQ ID NO: 320636 - DNA, 25 bp, Artificial
  probe
  misc_feature (1)..(25): SEQ ID NO: 2280; WAN024DYO; Start 221; Stop 245
taatacctgctgaagacccattaga

SEQ ID NO: 320637 - DNA, 25 bp, Artificial
  probe
  misc_feature (1)..(25): SEQ ID NO: 2280; WAN024DYO; Start 220; Stop 244
gtaatacctgctgaagacccattag

SEQ ID NO: 320638 - DNA, 25 bp, Artificial
  probe
  misc_feature (1)..(25): SEQ ID NO: 2280; WAN024DYO; Start 243; Stop 267
agaggtaatatcaatcgtaacttct

SEQ ID NO: 320639 - DNA, 25 bp, Artificial
  probe
  misc_feature (1)..(25): SEQ ID NO: 2280; WAN024DYO; Start 16; Stop 40
tatttaatcttgtcccaggtggtta

SEQ ID NO: 320640 - DNA, 25 bp, Artificial
  probe
  misc_feature (1)..(25): SEQ ID NO: 2280; WAN024DYO; Start 73; Stop 97
atactgacttggcttgccttattgt

SEQ ID NO: 320641 - DNA, 25 bp, Artificial
  probe
  misc_feature (1)..(25): SEQ ID NO: 2280; WAN024DYO; Start 176; Stop 200
ccctagaaaccataccaatatcagc

SEQ ID NO: 320642 - DNA, 25 bp, Artificial
  probe
  misc_feature (1)..(25): SEQ ID NO: 2280; WAN024DYO; Start 175; Stop 199
tccctagaaaccataccaatatcag

SEQ ID NO: 320643 - DNA, 25 bp, Artificial
  probe
  misc_feature (1)..(25): SEQ ID NO: 2280; WAN024DYO; Start 78; Stop 102
gacttggcttgccttattgtcatta

SEQ ID NO: 320644 - DNA, 25 bp, Artificial
  probe
  misc_feature (1)..(25): SEQ ID NO: 2280; WAN024DYO; Start 19; Stop 43
ttaatcttgtcccaggtggttaatt

SEQ ID NO: 320645 - DNA, 25 bp, Artificial
  probe
  misc_feature (1)..(25): SEQ ID NO: 2280; WAN024DYO; Start 18; Stop 42
tttaatcttgtcccaggtggttaat

SEQ ID NO: 320646 - DNA, 25 bp, Artificial
  probe
  misc_feature (1)..(25): SEQ ID NO: 2280; WAN024DYO; Start 17; Stop 41
atttaatcttgtcccaggtggttaa

SEQ ID NO: 320647 - DNA, 25 bp, Artificial
  probe
  misc_feature (1)..(25): SEQ ID NO: 2280; WAN024DYO; Start 178; Stop 202
ctagaaaccataccaatatcagcgg

SEQ ID NO: 320648 - DNA, 25 bp, Artificial
  probe
  misc_feature (1)..(25): SEQ ID NO: 2280; WAN024DYO; Start 177; Stop 201
cctagaaaccataccaatatcagcg

SEQ ID NO: 320649 - DNA, 25 bp, Artificial
  probe
  misc_feature (1)..(25): SEQ ID NO: 2281; WAN024DN5; Start 732; Stop 756
tgatagcaagcaaggtagagtcaag

SEQ ID NO: 320650 - DNA, 25 bp, Artificial
  probe
  misc_feature (1)..(25): SEQ ID NO: 2281; WAN024DN5; Start 794; Stop 818
ttgagatgcttggctgtaataaatc

SEQ ID NO: 320651 - DNA, 25 bp, Artificial
  probe
  misc_feature (1)..(25): SEQ ID NO: 2281; WAN024DN5; Start 793; Stop 817
tttgagatgcttggctgtaataaat

SEQ ID NO: 320652 - DNA, 25 bp, Artificial
  probe
  misc_feature (1)..(25): SEQ ID NO: 2281; WAN024DN5; Start 733; Stop 757
gatagcaagcaaggtagagtcaagg

SEQ ID NO: 320653 - DNA, 25 bp, Artificial
  probe
  misc_feature (1)..(25): SEQ ID NO: 2281; WAN024DN5; Start 204; Stop 228
ccagtatgatacagattctgagttg

SEQ ID NO: 320654 - DNA, 25 bp, Artificial
  probe
  misc_feature (1)..(25): SEQ ID NO: 2281; WAN024DN5; Start 203; Stop 227
tccagtatgatacagattctgagtt

SEQ ID NO: 320655 - DNA, 25 bp, Artificial
  probe
  misc_feature (1)..(25): SEQ ID NO: 2281; WAN024DN5; Start 202; Stop 226
ttccagtatgatacagattctgagt

SEQ ID NO: 320656 - DNA, 25 bp, Artificial
  probe
  misc_feature (1)..(25): SEQ ID NO: 2281; WAN024DN5; Start 694; Stop 718
tatttccgaattgtttatctgtggg

SEQ ID NO: 320657 - DNA, 25 bp, Artificial
  probe
  misc_feature (1)..(25): SEQ ID NO: 2281; WAN024DN5; Start 806; Stop 830
gctgtaataaatctgccgaatacta

SEQ ID NO: 320658 - DNA, 25 bp, Artificial
  probe
  misc_feature (1)..(25): SEQ ID NO: 2281; WAN024DN5; Start 685; Stop 709
aatgagacctatttccgaattgttt

SEQ ID NO: 320659 - DNA, 25 bp, Artificial
  probe
  misc_feature (1)..(25): SEQ ID NO: 2281; WAN024DN5; Start 280; Stop 304
gacttatatcgcagggagtatcaaa

SEQ ID NO: 320660 - DNA, 25 bp, Artificial
  probe
  misc_feature (1)..(25): SEQ ID NO: 2281; WAN024DN5; Start 198; Stop 222
aggtttccagtatgatacagattct

SEQ ID NO: 320661 - DNA, 25 bp, Artificial
  probe
  misc_feature (1)..(25): SEQ ID NO: 2281; WAN024DN5; Start 196; Stop 220
agaggtttccagtatgatacagatt

SEQ ID NO: 320662 - DNA, 25 bp, Artificial
  probe
  misc_feature (1)..(25): SEQ ID NO: 2281; WAN024DN5; Start 234; Stop 258
agaaattacagatgtcttggaacca

SEQ ID NO: 320663 - DNA, 25 bp, Artificial
  probe
  misc_feature (1)..(25): SEQ ID NO: 2281; WAN024DN5; Start 734; Stop 758
atagcaagcaaggtagagtcaagga

SEQ ID NO: 320664 - DNA, 25 bp, Artificial
  probe
  misc_feature (1)..(25): SEQ ID NO: 2281; WAN024DN5; Start 197; Stop 221
gaggtttccagtatgatacagattc

SEQ ID NO: 320665 - DNA, 25 bp, Artificial
  probe
  misc_feature (1)..(25): SEQ ID NO: 2281; WAN024DN5; Start 691; Stop 715
acctatttccgaattgtttatctgt

SEQ ID NO: 320666 - DNA, 25 bp, Artificial
  probe
  misc_feature (1)..(25): SEQ ID NO: 2281; WAN024DN5; Start 266; Stop 290
tagcacctcttgaggacttatatcg

SEQ ID NO: 320667 - DNA, 25 bp, Artificial
  probe
  misc_feature (1)..(25): SEQ ID NO: 2281; WAN024DN5; Start 693; Stop 717
ctatttccgaattgtttatctgtgg

SEQ ID NO: 320668 - DNA, 25 bp, Artificial
  probe
  misc_feature (1)..(25): SEQ ID NO: 2281; WAN024DN5; Start 692; Stop 716
cctatttccgaattgtttatctgtg

SEQ ID NO: 320669 - DNA, 25 bp, Artificial
  probe
  misc_feature (1)..(25): SEQ ID NO: 2281; WAN024DN5; Start 687; Stop 711
tgagacctatttccgaattgtttat

SEQ ID NO: 320670 - DNA, 25 bp, Artificial
  probe
  misc_feature (1)..(25): SEQ ID NO: 2281; WAN024DN5; Start 686; Stop 710
atgagacctatttccgaattgttta

SEQ ID NO: 320671 - DNA, 25 bp, Artificial
  probe
  misc_feature (1)..(25): SEQ ID NO: 2281; WAN024DN5; Start 205; Stop 229
cagtatgatacagattctgagttga

SEQ ID NO: 320672 - DNA, 25 bp, Artificial
  probe
  misc_feature (1)..(25): SEQ ID NO: 2281; WAN024DN5; Start 735; Stop 759
tagcaagcaaggtagagtcaaggaa

SEQ ID NO: 320673 - DNA, 25 bp, Artificial
  probe
  misc_feature (1)..(25): SEQ ID NO: 2281; WAN024DN5; Start 690; Stop 714
gacctatttccgaattgtttatctg

SEQ ID NO: 320674 - DNA, 25 bp, Artificial
  probe
  misc_feature (1)..(25): SEQ ID NO: 2281; WAN024DN5; Start 684; Stop 708
aaatgagacctatttccgaattgtt

SEQ ID NO: 320675 - DNA, 25 bp, Artificial
  probe
  misc_feature (1)..(25): SEQ ID NO: 2281; WAN024DN5; Start 279; Stop 303
ggacttatatcgcagggagtatcaa

SEQ ID NO: 320676 - DNA, 25 bp, Artificial
  probe
  misc_feature (1)..(25): SEQ ID NO: 2281; WAN024DN5; Start 207; Stop 231
gtatgatacagattctgagttgaga

SEQ ID NO: 320677 - DNA, 25 bp, Artificial
  probe
  misc_feature (1)..(25): SEQ ID NO: 2281; WAN024DN5; Start 206; Stop 230
agtatgatacagattctgagttgag

SEQ ID NO: 320678 - DNA, 25 bp, Artificial
  probe
  misc_feature (1)..(25): SEQ ID NO: 2281; WAN024DN5; Start 277; Stop 301
gaggacttatatcgcagggagtatc

SEQ ID NO: 320679 - DNA, 25 bp, Artificial
  probe
  misc_feature (1)..(25): SEQ ID NO: 2281; WAN024DN5; Start 695; Stop 719
atttccgaattgtttatctgtgggc

SEQ ID NO: 320680 - DNA, 25 bp, Artificial
  probe
  misc_feature (1)..(25): SEQ ID NO: 2281; WAN024DN5; Start 688; Stop 712
gagacctatttccgaattgtttatc

SEQ ID NO: 320681 - DNA, 25 bp, Artificial
  probe
  misc_feature (1)..(25): SEQ ID NO: 2281; WAN024DN5; Start 689; Stop 713
agacctatttccgaattgtttatct

SEQ ID NO: 320682 - DNA, 25 bp, Artificial
  probe
  misc_feature (1)..(25): SEQ ID NO: 2282; WAN024FV3; Start 89; Stop 113
aaccgattatgagacaacaagacag

SEQ ID NO: 320683 - DNA, 25 bp, Artificial
  probe
  misc_feature (1)..(25): SEQ ID NO: 2282; WAN024FV3; Start 88; Stop 112
gaaccgattatgagacaacaagaca

SEQ ID NO: 320684 - DNA, 25 bp, Artificial
  probe
  misc_feature (1)..(25): SEQ ID NO: 2282; WAN024FV3; Start 87; Stop 111
tgaaccgattatgagacaacaagac

SEQ ID NO: 320685 - DNA, 25 bp, Artificial
  probe
  misc_feature (1)..(25): SEQ ID NO: 2282; WAN024FV3; Start 86; Stop 110
ttgaaccgattatgagacaacaaga

SEQ ID NO: 320686 - DNA, 25 bp, Artificial
  probe
  misc_feature (1)..(25): SEQ ID NO: 2282; WAN024FV3; Start 401; Stop 425
gtagaatactataccgttacgcaga

SEQ ID NO: 320687 - DNA, 25 bp, Artificial
  probe
  misc_feature (1)..(25): SEQ ID NO: 2282; WAN024FV3; Start 403; Stop 427
agaatactataccgttacgcagata

SEQ ID NO: 320688 - DNA, 25 bp, Artificial
  probe
  misc_feature (1)..(25): SEQ ID NO: 2282; WAN024FV3; Start 402; Stop 426
tagaatactataccgttacgcagat

SEQ ID NO: 320689 - DNA, 25 bp, Artificial
  probe
  misc_feature (1)..(25): SEQ ID NO: 2282; WAN024FV3; Start 84; Stop 108
gcttgaaccgattatgagacaacaa

SEQ ID NO: 320690 - DNA, 25 bp, Artificial
  probe
  misc_feature (1)..(25): SEQ ID NO: 2282; WAN024FV3; Start 408; Stop 432
actataccgttacgcagatagattc

SEQ ID NO: 320691 - DNA, 25 bp, Artificial
  probe
  misc_feature (1)..(25): SEQ ID NO: 2282; WAN024FV3; Start 409; Stop 433
ctataccgttacgcagatagattct

SEQ ID NO: 320692 - DNA, 25 bp, Artificial
  probe
  misc_feature (1)..(25): SEQ ID NO: 2282; WAN024FV3; Start 410; Stop 434
tataccgttacgcagatagattcta

SEQ ID NO: 320693 - DNA, 25 bp, Artificial
  probe
  misc_feature (1)..(25): SEQ ID NO: 2282; WAN024FV3; Start 412; Stop 436
taccgttacgcagatagattctatg

SEQ ID NO: 320694 - DNA, 25 bp, Artificial
  probe
  misc_feature (1)..(25): SEQ ID NO: 2282; WAN024FV3; Start 92; Stop 116
cgattatgagacaacaagacagcta

SEQ ID NO: 320695 - DNA, 25 bp, Artificial
  probe
  misc_feature (1)..(25): SEQ ID NO: 2282; WAN024FV3; Start 407; Stop 431
tactataccgttacgcagatagatt

SEQ ID NO: 320696 - DNA, 25 bp, Artificial
  probe
  misc_feature (1)..(25): SEQ ID NO: 2282; WAN024FV3; Start 405; Stop 429
aatactataccgttacgcagataga

SEQ ID NO: 320697 - DNA, 25 bp, Artificial
  probe
  misc_feature (1)..(25): SEQ ID NO: 2282; WAN024FV3; Start 411; Stop 435
ataccgttacgcagatagattctat

SEQ ID NO: 320698 - DNA, 25 bp, Artificial
  probe
  misc_feature (1)..(25): SEQ ID NO: 2282; WAN024FV3; Start 406; Stop 430
atactataccgttacgcagatagat

SEQ ID NO: 320699 - DNA, 25 bp, Artificial
  probe
  misc_feature (1)..(25): SEQ ID NO: 2282; WAN024FV3; Start 404; Stop 428
gaatactataccgttacgcagatag

SEQ ID NO: 320700 - DNA, 25 bp, Artificial
  probe
  misc_feature (1)..(25): SEQ ID NO: 2282; WAN024FV3; Start 93; Stop 117
gattatgagacaacaagacagctat

SEQ ID NO: 320701 - DNA, 25 bp, Artificial
  probe
  misc_feature (1)..(25): SEQ ID NO: 2282; WAN024FV3; Start 414; Stop 438
ccgttacgcagatagattctatgtg

SEQ ID NO: 320702 - DNA, 25 bp, Artificial
  probe
  misc_feature (1)..(25): SEQ ID NO: 2282; WAN024FV3; Start 413; Stop 437
accgttacgcagatagattctatgt

SEQ ID NO: 320703 - DNA, 25 bp, Artificial
  probe
  misc_feature (1)..(25): SEQ ID NO: 2282; WAN024FV3; Start 94; Stop 118
attatgagacaacaagacagctatt

SEQ ID NO: 320704 - DNA, 25 bp, Artificial
  probe
  misc_feature (1)..(25): SEQ ID NO: 2282; WAN024FV3; Start 144; Stop 168
caaaggagagtctgagaagaaagat

SEQ ID NO: 320705 - DNA, 25 bp, Artificial
  probe
  misc_feature (1)..(25): SEQ ID NO: 2282; WAN024FV3; Start 142; Stop 166
aacaaaggagagtctgagaagaaag

SEQ ID NO: 320706 - DNA, 25 bp, Artificial
  probe
  misc_feature (1)..(25): SEQ ID NO: 2282; WAN024FV3; Start 141; Stop 165
taacaaaggagagtctgagaagaaa

SEQ ID NO: 320707 - DNA, 25 bp, Artificial
  probe
  misc_feature (1)..(25): SEQ ID NO: 2282; WAN024FV3; Start 90; Stop 114
accgattatgagacaacaagacagc

SEQ ID NO: 320708 - DNA, 25 bp, Artificial
  probe
  misc_feature (1)..(25): SEQ ID NO: 2282; WAN024FV3; Start 140; Stop 164
ataacaaaggagagtctgagaagaa

SEQ ID NO: 320709 - DNA, 25 bp, Artificial
  probe
  misc_feature (1)..(25): SEQ ID NO: 2282; WAN024FV3; Start 143; Stop 167
acaaaggagagtctgagaagaaaga

SEQ ID NO: 320710 - DNA, 25 bp, Artificial
  probe
  misc_feature (1)..(25): SEQ ID NO: 2282; WAN024FV3; Start 145; Stop 169
aaaggagagtctgagaagaaagata

SEQ ID NO: 320711 - DNA, 25 bp, Artificial
  probe
  misc_feature (1)..(25): SEQ ID NO: 2282; WAN024FV3; Start 146; Stop 170
aaggagagtctgagaagaaagatat

SEQ ID NO: 320712 - DNA, 25 bp, Artificial
  probe
  misc_feature (1)..(25): SEQ ID NO: 2282; WAN024FV3; Start 139; Stop 163
tataacaaaggagagtctgagaaga

SEQ ID NO: 320713 - DNA, 25 bp, Artificial
  probe
  misc_feature (1)..(25): SEQ ID NO: 2282; WAN024FV3; Start 257; Stop 281
atatactgttaagaatacgcccaaa

SEQ ID NO: 320714 - DNA, 25 bp, Artificial
  probe
  misc_feature (1)..(25): SEQ ID NO: 2282; WAN024FV3; Start 83; Stop 107
agcttgaaccgattatgagacaaca

SEQ ID NO: 320715 - DNA, 25 bp, Artificial
  probe
  misc_feature (1)..(25): SEQ ID NO: 2283; WAN024FU2; Start 588; Stop 612
tactatgtacgaacagatggacttg

SEQ ID NO: 320716 - DNA, 25 bp, Artificial
  probe
  misc_feature (1)..(25): SEQ ID NO: 2283; WAN024FU2; Start 585; Stop 609
ggatactatgtacgaacagatggac

SEQ ID NO: 320717 - DNA, 25 bp, Artificial
  probe
  misc_feature (1)..(25): SEQ ID NO: 2283; WAN024FU2; Start 586; Stop 610
gatactatgtacgaacagatggact

SEQ ID NO: 320718 - DNA, 25 bp, Artificial
  probe
  misc_feature (1)..(25): SEQ ID NO: 2283; WAN024FU2; Start 584; Stop 608
tggatactatgtacgaacagatgga

SEQ ID NO: 320719 - DNA, 25 bp, Artificial
  probe
  misc_feature (1)..(25): SEQ ID NO: 2283; WAN024FU2; Start 583; Stop 607
ctggatactatgtacgaacagatgg

SEQ ID NO: 320720 - DNA, 25 bp, Artificial
  probe
  misc_feature (1)..(25): SEQ ID NO: 2283; WAN024FU2; Start 587; Stop 611
atactatgtacgaacagatggactt

SEQ ID NO: 320721 - DNA, 25 bp, Artificial
  probe
  misc_feature (1)..(25): SEQ ID NO: 2283; WAN024FU2; Start 590; Stop 614
ctatgtacgaacagatggacttgac

SEQ ID NO: 320722 - DNA, 25 bp, Artificial
  probe
  misc_feature (1)..(25): SEQ ID NO: 2283; WAN024FU2; Start 589; Stop 613
actatgtacgaacagatggacttga

SEQ ID NO: 320723 - DNA, 25 bp, Artificial
  probe
  misc_feature (1)..(25): SEQ ID NO: 2283; WAN024FU2; Start 779; Stop 803
ttggaaagaagtatggacagagttt

SEQ ID NO: 320724 - DNA, 25 bp, Artificial
  probe
  misc_feature (1)..(25): SEQ ID NO: 2283; WAN024FU2; Start 778; Stop 802
tttggaaagaagtatggacagagtt

SEQ ID NO: 320725 - DNA, 25 bp, Artificial
  probe
  misc_feature (1)..(25): SEQ ID NO: 2283; WAN024FU2; Start 648; Stop 672
gcgagttagtgagttgttgtttaat

SEQ ID NO: 320726 - DNA, 25 bp, Artificial
  probe
  misc_feature (1)..(25): SEQ ID NO: 2283; WAN024FU2; Start 395; Stop 419
attcacattatgcccatacccttaa

SEQ ID NO: 320727 - DNA, 25 bp, Artificial
  probe
  misc_feature (1)..(25): SEQ ID NO: 2283; WAN024FU2; Start 393; Stop 417
ttattcacattatgcccataccctt

SEQ ID NO: 320728 - DNA, 25 bp, Artificial
  probe
  misc_feature (1)..(25): SEQ ID NO: 2283; WAN024FU2; Start 392; Stop 416
tttattcacattatgcccataccct

SEQ ID NO: 320729 - DNA, 25 bp, Artificial
  probe
  misc_feature (1)..(25): SEQ ID NO: 2283; WAN024FU2; Start 391; Stop 415
ctttattcacattatgcccataccc

SEQ ID NO: 320730 - DNA, 25 bp, Artificial
  probe
  misc_feature (1)..(25): SEQ ID NO: 2283; WAN024FU2; Start 386; Stop 410
aaactctttattcacattatgccca

SEQ ID NO: 320731 - DNA, 25 bp, Artificial
  probe
  misc_feature (1)..(25): SEQ ID NO: 2283; WAN024FU2; Start 394; Stop 418
tattcacattatgcccataccctta

SEQ ID NO: 320732 - DNA, 25 bp, Artificial
  probe
  misc_feature (1)..(25): SEQ ID NO: 2283; WAN024FU2; Start 387; Stop 411
aactctttattcacattatgcccat

SEQ ID NO: 320733 - DNA, 25 bp, Artificial
  probe
  misc_feature (1)..(25): SEQ ID NO: 2283; WAN024FU2; Start 550; Stop 574
ttagatgattatttaccgtggcttt

SEQ ID NO: 320734 - DNA, 25 bp, Artificial
  probe
  misc_feature (1)..(25): SEQ ID NO: 2283; WAN024FU2; Start 649; Stop 673
cgagttagtgagttgttgtttaatg

SEQ ID NO: 320735 - DNA, 25 bp, Artificial
  probe
  misc_feature (1)..(25): SEQ ID NO: 2283; WAN024FU2; Start 390; Stop 414
tctttattcacattatgcccatacc

SEQ ID NO: 320736 - DNA, 25 bp, Artificial
  probe
  misc_feature (1)..(25): SEQ ID NO: 2283; WAN024FU2; Start 357; Stop 381
agttccaaagaagcgaaagtattat

SEQ ID NO: 320737 - DNA, 25 bp, Artificial
  probe
  misc_feature (1)..(25): SEQ ID NO: 2283; WAN024FU2; Start 355; Stop 379
atagttccaaagaagcgaaagtatt

SEQ ID NO: 320738 - DNA, 25 bp, Artificial
  probe
  misc_feature (1)..(25): SEQ ID NO: 2283; WAN024FU2; Start 354; Stop 378
aatagttccaaagaagcgaaagtat

SEQ ID NO: 320739 - DNA, 25 bp, Artificial
  probe
  misc_feature (1)..(25): SEQ ID NO: 2283; WAN024FU2; Start 549; Stop 573
attagatgattatttaccgtggctt

SEQ ID NO: 320740 - DNA, 25 bp, Artificial
  probe
  misc_feature (1)..(25): SEQ ID NO: 2283; WAN024FU2; Start 577; Stop 601
tctattctggatactatgtacgaac

SEQ ID NO: 320741 - DNA, 25 bp, Artificial
  probe
  misc_feature (1)..(25): SEQ ID NO: 2283; WAN024FU2; Start 385; Stop 409
gaaactctttattcacattatgccc

SEQ ID NO: 320742 - DNA, 25 bp, Artificial
  probe
  misc_feature (1)..(25): SEQ ID NO: 2283; WAN024FU2; Start 463; Stop 487
agttcagagtatctttcatcctttg

SEQ ID NO: 320743 - DNA, 25 bp, Artificial
  probe
  misc_feature (1)..(25): SEQ ID NO: 2283; WAN024FU2; Start 578; Stop 602
ctattctggatactatgtacgaaca

SEQ ID NO: 320744 - DNA, 25 bp, Artificial
  probe
  misc_feature (1)..(25): SEQ ID NO: 2283; WAN024FU2; Start 356; Stop 380
tagttccaaagaagcgaaagtatta

SEQ ID NO: 320745 - DNA, 25 bp, Artificial
  probe
  misc_feature (1)..(25): SEQ ID NO: 2283; WAN024FU2; Start 353; Stop 377
taatagttccaaagaagcgaaagta

SEQ ID NO: 320746 - DNA, 25 bp, Artificial
  probe
  misc_feature (1)..(25): SEQ ID NO: 2283; WAN024FU2; Start 464; Stop 488
gttcagagtatctttcatcctttga

SEQ ID NO: 320747 - DNA, 25 bp, Artificial
  probe
  misc_feature (1)..(25): SEQ ID NO: 2283; WAN024FU2; Start 579; Stop 603
tattctggatactatgtacgaacag

SEQ ID NO: 320748 - DNA, 25 bp, Artificial
  probe
  misc_feature (1)..(25): SEQ ID NO: 2284; WAN024EUW; Start 88; Stop 112
aagacttctatgaccgacattgatc

SEQ ID NO: 320749 - DNA, 25 bp, Artificial
  probe
  misc_feature (1)..(25): SEQ ID NO: 2284; WAN024EUW; Start 183; Stop 207
gcgtcttcctgagattatgtcctag

SEQ ID NO: 320750 - DNA, 25 bp, Artificial
  probe
  misc_feature (1)..(25): SEQ ID NO: 2284; WAN024EUW; Start 123; Stop 147
tatttcaacttcaactgtcattcgc

SEQ ID NO: 320751 - DNA, 25 bp, Artificial
  probe
  misc_feature (1)..(25): SEQ ID NO: 2284; WAN024EUW; Start 87; Stop 111
aaagacttctatgaccgacattgat

SEQ ID NO: 320752 - DNA, 25 bp, Artificial
  probe
  misc_feature (1)..(25): SEQ ID NO: 2284; WAN024EUW; Start 122; Stop 146
ctatttcaacttcaactgtcattcg

SEQ ID NO: 320753 - DNA, 25 bp, Artificial
  probe
  misc_feature (1)..(25): SEQ ID NO: 2284; WAN024EUW; Start 119; Stop 143
tgtctatttcaacttcaactgtcat

SEQ ID NO: 320754 - DNA, 25 bp, Artificial
  probe
  misc_feature (1)..(25): SEQ ID NO: 2284; WAN024EUW; Start 127; Stop 151
tcaacttcaactgtcattcgcaaga

SEQ ID NO: 320755 - DNA, 25 bp, Artificial
  probe
  misc_feature (1)..(25): SEQ ID NO: 2284; WAN024EUW; Start 118; Stop 142
ttgtctatttcaacttcaactgtca

SEQ ID NO: 320756 - DNA, 25 bp, Artificial
  probe
  misc_feature (1)..(25): SEQ ID NO: 2284; WAN024EUW; Start 39; Stop 63
tcaaattccttgtatcatcaaccaa

SEQ ID NO: 320757 - DNA, 25 bp, Artificial
  probe
  misc_feature (1)..(25): SEQ ID NO: 2284; WAN024EUW; Start 38; Stop 62
atcaaattccttgtatcatcaacca

SEQ ID NO: 320758 - DNA, 25 bp, Artificial
  probe
  misc_feature (1)..(25): SEQ ID NO: 2284; WAN024EUW; Start 37; Stop 61
catcaaattccttgtatcatcaacc

SEQ ID NO: 320759 - DNA, 25 bp, Artificial
  probe
  misc_feature (1)..(25): SEQ ID NO: 2284; WAN024EUW; Start 120; Stop 144
gtctatttcaacttcaactgtcatt

SEQ ID NO: 320760 - DNA, 25 bp, Artificial
  probe
  misc_feature (1)..(25): SEQ ID NO: 2284; WAN024EUW; Start 40; Stop 64
caaattccttgtatcatcaaccaaa

SEQ ID NO: 320761 - DNA, 25 bp, Artificial
  probe
  misc_feature (1)..(25): SEQ ID NO: 2284; WAN024EUW; Start 121; Stop 145
tctatttcaacttcaactgtcattc

SEQ ID NO: 320762 - DNA, 25 bp, Artificial
  probe
  misc_feature (1)..(25): SEQ ID NO: 2284; WAN024EUW; Start 36; Stop 60
tcatcaaattccttgtatcatcaac

SEQ ID NO: 320763 - DNA, 25 bp, Artificial
  probe
  misc_feature (1)..(25): SEQ ID NO: 2284; WAN024EUW; Start 7; Stop 31
ctcgctgagacttctatcgtcaaga

SEQ ID NO: 320764 - DNA, 25 bp, Artificial
  probe
  misc_feature (1)..(25): SEQ ID NO: 2284; WAN024EUW; Start 89; Stop 113
agacttctatgaccgacattgatca

SEQ ID NO: 320765 - DNA, 25 bp, Artificial
  probe
  misc_feature (1)..(25): SEQ ID NO: 2284; WAN024EUW; Start 25; Stop 49
gtcaagaagaatcatcaaattcctt

SEQ ID NO: 320766 - DNA, 25 bp, Artificial
  probe
  misc_feature (1)..(25): SEQ ID NO: 2284; WAN024EUW; Start 86; Stop 110
aaaagacttctatgaccgacattga

SEQ ID NO: 320767 - DNA, 25 bp, Artificial
  probe
  misc_feature (1)..(25): SEQ ID NO: 2284; WAN024EUW; Start 35; Stop 59
atcatcaaattccttgtatcatcaa

SEQ ID NO: 320768 - DNA, 25 bp, Artificial
  probe
  misc_feature (1)..(25): SEQ ID NO: 2284; WAN024EUW; Start 34; Stop 58
aatcatcaaattccttgtatcatca

SEQ ID NO: 320769 - DNA, 25 bp, Artificial
  probe
  misc_feature (1)..(25): SEQ ID NO: 2284; WAN024EUW; Start 49; Stop 73
tgtatcatcaaccaaaagattgctc

SEQ ID NO: 320770 - DNA, 25 bp, Artificial
  probe
  misc_feature (1)..(25): SEQ ID NO: 2284; WAN024EUW; Start 51; Stop 75
tatcatcaaccaaaagattgctcag

SEQ ID NO: 320771 - DNA, 25 bp, Artificial
  probe
  misc_feature (1)..(25): SEQ ID NO: 2284; WAN024EUW; Start 48; Stop 72
ttgtatcatcaaccaaaagattgct

SEQ ID NO: 320772 - DNA, 25 bp, Artificial
  probe
  misc_feature (1)..(25): SEQ ID NO: 2284; WAN024EUW; Start 8; Stop 32
tcgctgagacttctatcgtcaagaa

SEQ ID NO: 320773 - DNA, 25 bp, Artificial
  probe
  misc_feature (1)..(25): SEQ ID NO: 2284; WAN024EUW; Start 47; Stop 71
cttgtatcatcaaccaaaagattgc

SEQ ID NO: 320774 - DNA, 25 bp, Artificial
  probe
  misc_feature (1)..(25): SEQ ID NO: 2284; WAN024EUW; Start 54; Stop 78
catcaaccaaaagattgctcagaag

SEQ ID NO: 320775 - DNA, 25 bp, Artificial
  probe
  misc_feature (1)..(25): SEQ ID NO: 2284; WAN024EUW; Start 52; Stop 76
atcatcaaccaaaagattgctcaga

SEQ ID NO: 320776 - DNA, 25 bp, Artificial
  probe
  misc_feature (1)..(25): SEQ ID NO: 2284; WAN024EUW; Start 53; Stop 77
tcatcaaccaaaagattgctcagaa

SEQ ID NO: 320777 - DNA, 25 bp, Artificial
  probe
  misc_feature (1)..(25): SEQ ID NO: 2284; WAN024EUW; Start 46; Stop 70
ccttgtatcatcaaccaaaagattg

SEQ ID NO: 320778 - DNA, 25 bp, Artificial
  probe
  misc_feature (1)..(25): SEQ ID NO: 2284; WAN024EUW; Start 45; Stop 69
tccttgtatcatcaaccaaaagatt

SEQ ID NO: 320779 - DNA, 25 bp, Artificial
  probe
  misc_feature (1)..(25): SEQ ID NO: 2284; WAN024EUW; Start 44; Stop 68
ttccttgtatcatcaaccaaaagat

SEQ ID NO: 320780 - DNA, 25 bp, Artificial
  probe
  misc_feature (1)..(25): SEQ ID NO: 2284; WAN024EUW; Start 43; Stop 67
attccttgtatcatcaaccaaaaga

SEQ ID NO: 320781 - DNA, 25 bp, Artificial
  probe
  misc_feature (1)..(25): SEQ ID NO: 2285; WAN024COW; Start 365; Stop 389
ttgtctcaatctctgtcaaggataa

SEQ ID NO: 320782 - DNA, 25 bp, Artificial
  probe
  misc_feature (1)..(25): SEQ ID NO: 2285; WAN024COW; Start 621; Stop 645
tcctgaagatgttgaagatgtactg

SEQ ID NO: 320783 - DNA, 25 bp, Artificial
  probe
  misc_feature (1)..(25): SEQ ID NO: 2285; WAN024COW; Start 620; Stop 644
gtcctgaagatgttgaagatgtact

SEQ ID NO: 320784 - DNA, 25 bp, Artificial
  probe
  misc_feature (1)..(25): SEQ ID NO: 2285; WAN024COW; Start 468; Stop 492
atctgatgtaacgacacttgaagaa

SEQ ID NO: 320785 - DNA, 25 bp, Artificial
  probe
  misc_feature (1)..(25): SEQ ID NO: 2285; WAN024COW; Start 465; Stop 489
agtatctgatgtaacgacacttgaa

SEQ ID NO: 320786 - DNA, 25 bp, Artificial
  probe
  misc_feature (1)..(25): SEQ ID NO: 2285; WAN024COW; Start 464; Stop 488
gagtatctgatgtaacgacacttga

SEQ ID NO: 320787 - DNA, 25 bp, Artificial
  probe
  misc_feature (1)..(25): SEQ ID NO: 2285; WAN024COW; Start 466; Stop 490
gtatctgatgtaacgacacttgaag

SEQ ID NO: 320788 - DNA, 25 bp, Artificial
  probe
  misc_feature (1)..(25): SEQ ID NO: 2285; WAN024COW; Start 467; Stop 491
tatctgatgtaacgacacttgaaga

SEQ ID NO: 320789 - DNA, 25 bp, Artificial
  probe
  misc_feature (1)..(25): SEQ ID NO: 2285; WAN024COW; Start 469; Stop 493
tctgatgtaacgacacttgaagaag

SEQ ID NO: 320790 - DNA, 25 bp, Artificial
  probe
  misc_feature (1)..(25): SEQ ID NO: 2285; WAN024COW; Start 619; Stop 643
cgtcctgaagatgttgaagatgtac

SEQ ID NO: 320791 - DNA, 25 bp, Artificial
  probe
  misc_feature (1)..(25): SEQ ID NO: 2285; WAN024COW; Start 463; Stop 487
cgagtatctgatgtaacgacacttg

SEQ ID NO: 320792 - DNA, 25 bp, Artificial
  probe
  misc_feature (1)..(25): SEQ ID NO: 2285; WAN024COW; Start 622; Stop 646
cctgaagatgttgaagatgtactgc

SEQ ID NO: 320793 - DNA, 25 bp, Artificial
  probe
  misc_feature (1)..(25): SEQ ID NO: 2285; WAN024COW; Start 470; Stop 494
ctgatgtaacgacacttgaagaagc

SEQ ID NO: 320794 - DNA, 25 bp, Artificial
  probe
  misc_feature (1)..(25): SEQ ID NO: 2285; WAN024COW; Start 366; Stop 390
tgtctcaatctctgtcaaggataaa

SEQ ID NO: 320795 - DNA, 25 bp, Artificial
  probe
  misc_feature (1)..(25): SEQ ID NO: 2285; WAN024COW; Start 623; Stop 647
ctgaagatgttgaagatgtactgca

SEQ ID NO: 320796 - DNA, 25 bp, Artificial
  probe
  misc_feature (1)..(25): SEQ ID NO: 2285; WAN024COW; Start 367; Stop 391
gtctcaatctctgtcaaggataaac

SEQ ID NO: 320797 - DNA, 25 bp, Artificial
  probe
  misc_feature (1)..(25): SEQ ID NO: 2285; WAN024COW; Start 362; Stop 386
gtattgtctcaatctctgtcaagga

SEQ ID NO: 320798 - DNA, 25 bp, Artificial
  probe
  misc_feature (1)..(25): SEQ ID NO: 2285; WAN024COW; Start 624; Stop 648
tgaagatgttgaagatgtactgcaa

SEQ ID NO: 320799 - DNA, 25 bp, Artificial
  probe
  misc_feature (1)..(25): SEQ ID NO: 2285; WAN024COW; Start 364; Stop 388
attgtctcaatctctgtcaaggata

SEQ ID NO: 320800 - DNA, 25 bp, Artificial
  probe
  misc_feature (1)..(25): SEQ ID NO: 2285; WAN024COW; Start 363; Stop 387
tattgtctcaatctctgtcaaggat

SEQ ID NO: 320801 - DNA, 25 bp, Artificial
  probe
  misc_feature (1)..(25): SEQ ID NO: 2285; WAN024COW; Start 220; Stop 244
gcaggaacatacttggttaaagact

SEQ ID NO: 320802 - DNA, 25 bp, Artificial
  probe
  misc_feature (1)..(25): SEQ ID NO: 2285; WAN024COW; Start 361; Stop 385
cgtattgtctcaatctctgtcaagg

SEQ ID NO: 320803 - DNA, 25 bp, Artificial
  probe
  misc_feature (1)..(25): SEQ ID NO: 2285; WAN024COW; Start 360; Stop 384
ccgtattgtctcaatctctgtcaag

SEQ ID NO: 320804 - DNA, 25 bp, Artificial
  probe
  misc_feature (1)..(25): SEQ ID NO: 2285; WAN024COW; Start 618; Stop 642
acgtcctgaagatgttgaagatgta

SEQ ID NO: 320805 - DNA, 25 bp, Artificial
  probe
  misc_feature (1)..(25): SEQ ID NO: 2285; WAN024COW; Start 226; Stop 250
acatacttggttaaagactatcgtg

SEQ ID NO: 320806 - DNA, 25 bp, Artificial
  probe
  misc_feature (1)..(25): SEQ ID NO: 2285; WAN024COW; Start 462; Stop 486
gcgagtatctgatgtaacgacactt

SEQ ID NO: 320807 - DNA, 25 bp, Artificial
  probe
  misc_feature (1)..(25): SEQ ID NO: 2285; WAN024COW; Start 230; Stop 254
acttggttaaagactatcgtgaaat

SEQ ID NO: 320808 - DNA, 25 bp, Artificial
  probe
  misc_feature (1)..(25): SEQ ID NO: 2285; WAN024COW; Start 227; Stop 251
catacttggttaaagactatcgtga

SEQ ID NO: 320809 - DNA, 25 bp, Artificial
  probe
  misc_feature (1)..(25): SEQ ID NO: 2285; WAN024COW; Start 368; Stop 392
tctcaatctctgtcaaggataaaca

SEQ ID NO: 320810 - DNA, 25 bp, Artificial
  probe
  misc_feature (1)..(25): SEQ ID NO: 2285; WAN024COW; Start 221; Stop 245
caggaacatacttggttaaagacta

SEQ ID NO: 320811 - DNA, 25 bp, Artificial
  probe
  misc_feature (1)..(25): SEQ ID NO: 2285; WAN024COW; Start 219; Stop 243
ggcaggaacatacttggttaaagac

SEQ ID NO: 320812 - DNA, 25 bp, Artificial
  probe
  misc_feature (1)..(25): SEQ ID NO: 2285; WAN024COW; Start 218; Stop 242
aggcaggaacatacttggttaaaga

SEQ ID NO: 320813 - DNA, 25 bp, Artificial
  probe
  misc_feature (1)..(25): SEQ ID NO: 2285; WAN024COW; Start 217; Stop 241
caggcaggaacatacttggttaaag

SEQ ID NO: 320814 - DNA, 25 bp, Artificial
  probe
  misc_feature (1)..(25): SEQ ID NO: 2286; WAN024D7G; Start 53; Stop 77
gactgctcgctttgaagataggttt

SEQ ID NO: 320815 - DNA, 25 bp, Artificial
  probe
  misc_feature (1)..(25): SEQ ID NO: 2286; WAN024D7G; Start 25; Stop 49
tatttgatggttgcttcaatgctac

SEQ ID NO: 320816 - DNA, 25 bp, Artificial
  probe
  misc_feature (1)..(25): SEQ ID NO: 2286; WAN024D7G; Start 23; Stop 47
tttatttgatggttgcttcaatgct

SEQ ID NO: 320817 - DNA, 25 bp, Artificial
  probe
  misc_feature (1)..(25): SEQ ID NO: 2286; WAN024D7G; Start 24; Stop 48
ttatttgatggttgcttcaatgcta

SEQ ID NO: 320818 - DNA, 25 bp, Artificial
  probe
  misc_feature (1)..(25): SEQ ID NO: 2286; WAN024D7G; Start 26; Stop 50
atttgatggttgcttcaatgctact

SEQ ID NO: 320819 - DNA, 25 bp, Artificial
  probe
  misc_feature (1)..(25): SEQ ID NO: 2286; WAN024D7G; Start 27; Stop 51
tttgatggttgcttcaatgctactc

SEQ ID NO: 320820 - DNA, 25 bp, Artificial
  probe
  misc_feature (1)..(25): SEQ ID NO: 2286; WAN024D7G; Start 28; Stop 52
ttgatggttgcttcaatgctactcg

SEQ ID NO: 320821 - DNA, 25 bp, Artificial
  probe
  misc_feature (1)..(25): SEQ ID NO: 2286; WAN024D7G; Start 54; Stop 78
actgctcgctttgaagataggtttt

SEQ ID NO: 320822 - DNA, 25 bp, Artificial
  probe
  misc_feature (1)..(25): SEQ ID NO: 2286; WAN024D7G; Start 110; Stop 134
tatctatcttaacaagtttagctgg

SEQ ID NO: 320823 - DNA, 25 bp, Artificial
  probe
  misc_feature (1)..(25): SEQ ID NO: 2286; WAN024D7G; Start 52; Stop 76
ggactgctcgctttgaagataggtt

SEQ ID NO: 320824 - DNA, 25 bp, Artificial
  probe
  misc_feature (1)..(25): SEQ ID NO: 2286; WAN024D7G; Start 22; Stop 46
ttttatttgatggttgcttcaatgc

SEQ ID NO: 320825 - DNA, 25 bp, Artificial
  probe
  misc_feature (1)..(25): SEQ ID NO: 2286; WAN024D7G; Start 156; Stop 180
tgtctggttaggatggcccaaataa

SEQ ID NO: 320826 - DNA, 25 bp, Artificial
  probe
  misc_feature (1)..(25): SEQ ID NO: 2286; WAN024D7G; Start 155; Stop 179
ctgtctggttaggatggcccaaata

SEQ ID NO: 320827 - DNA, 25 bp, Artificial
  probe
  misc_feature (1)..(25): SEQ ID NO: 2287; WAN024FRS; Start 224; Stop 248
acaatccacagtcttatcgttactt

SEQ ID NO: 320828 - DNA, 25 bp, Artificial
  probe
  misc_feature (1)..(25): SEQ ID NO: 2287; WAN024FRS; Start 226; Stop 250
aatccacagtcttatcgttacttca

SEQ ID NO: 320829 - DNA, 25 bp, Artificial
  probe
  misc_feature (1)..(25): SEQ ID NO: 2287; WAN024FRS; Start 227; Stop 251
atccacagtcttatcgttacttcat

SEQ ID NO: 320830 - DNA, 25 bp, Artificial
  probe
  misc_feature (1)..(25): SEQ ID NO: 2287; WAN024FRS; Start 225; Stop 249
caatccacagtcttatcgttacttc

SEQ ID NO: 320831 - DNA, 25 bp, Artificial
  probe
  misc_feature (1)..(25): SEQ ID NO: 2287; WAN024FRS; Start 223; Stop 247
gacaatccacagtcttatcgttact

SEQ ID NO: 320832 - DNA, 25 bp, Artificial
  probe
  misc_feature (1)..(25): SEQ ID NO: 2287; WAN024FRS; Start 228; Stop 252
tccacagtcttatcgttacttcatg

SEQ ID NO: 320833 - DNA, 25 bp, Artificial
  probe
  misc_feature (1)..(25): SEQ ID NO: 2287; WAN024FRS; Start 178; Stop 202
aatctaaccagtgtcaaccttgatg

SEQ ID NO: 320834 - DNA, 25 bp, Artificial
  probe
  misc_feature (1)..(25): SEQ ID NO: 2287; WAN024FRS; Start 447; Stop 471
gcatctagtagaacttgaccagtct

SEQ ID NO: 320835 - DNA, 25 bp, Artificial
  probe
  misc_feature (1)..(25): SEQ ID NO: 2287; WAN024FRS; Start 182; Stop 206
taaccagtgtcaaccttgatgagta

SEQ ID NO: 320836 - DNA, 25 bp, Artificial
  probe
  misc_feature (1)..(25): SEQ ID NO: 2287; WAN024FRS; Start 186; Stop 210
cagtgtcaaccttgatgagtatgtg

SEQ ID NO: 320837 - DNA, 25 bp, Artificial
  probe
  misc_feature (1)..(25): SEQ ID NO: 2287; WAN024FRS; Start 179; Stop 203
atctaaccagtgtcaaccttgatga

SEQ ID NO: 320838 - DNA, 25 bp, Artificial
  probe
  misc_feature (1)..(25): SEQ ID NO: 2287; WAN024FRS; Start 222; Stop 246
ggacaatccacagtcttatcgttac

SEQ ID NO: 320839 - DNA, 25 bp, Artificial
  probe
  misc_feature (1)..(25): SEQ ID NO: 2287; WAN024FRS; Start 448; Stop 472
catctagtagaacttgaccagtcta

SEQ ID NO: 320840 - DNA, 25 bp, Artificial
  probe
  misc_feature (1)..(25): SEQ ID NO: 2287; WAN024FRS; Start 183; Stop 207
aaccagtgtcaaccttgatgagtat

SEQ ID NO: 320841 - DNA, 25 bp, Artificial
  probe
  misc_feature (1)..(25): SEQ ID NO: 2287; WAN024FRS; Start 229; Stop 253
ccacagtcttatcgttacttcatgc

SEQ ID NO: 320842 - DNA, 25 bp, Artificial
  probe
  misc_feature (1)..(25): SEQ ID NO: 2287; WAN024FRS; Start 174; Stop 198
ttcaaatctaaccagtgtcaacctt

SEQ ID NO: 320843 - DNA, 25 bp, Artificial
  probe
  misc_feature (1)..(25): SEQ ID NO: 2287; WAN024FRS; Start 173; Stop 197
tttcaaatctaaccagtgtcaacct

SEQ ID NO: 320844 - DNA, 25 bp, Artificial
  probe
  misc_feature (1)..(25): SEQ ID NO: 2287; WAN024FRS; Start 457; Stop 481
gaacttgaccagtctactatcgaag

SEQ ID NO: 320845 - DNA, 25 bp, Artificial
  probe
  misc_feature (1)..(25): SEQ ID NO: 2287; WAN024FRS; Start 456; Stop 480
agaacttgaccagtctactatcgaa

SEQ ID NO: 320846 - DNA, 25 bp, Artificial
  probe
  misc_feature (1)..(25): SEQ ID NO: 2287; WAN024FRS; Start 444; Stop 468
aacgcatctagtagaacttgaccag

SEQ ID NO: 320847 - DNA, 25 bp, Artificial
  probe
  misc_feature (1)..(25): SEQ ID NO: 2287; WAN024FRS; Start 180; Stop 204
tctaaccagtgtcaaccttgatgag

SEQ ID NO: 320848 - DNA, 25 bp, Artificial
  probe
  misc_feature (1)..(25): SEQ ID NO: 2287; WAN024FRS; Start 232; Stop 256
cagtcttatcgttacttcatgcaag

SEQ ID NO: 320849 - DNA, 25 bp, Artificial
  probe
  misc_feature (1)..(25): SEQ ID NO: 2287; WAN024FRS; Start 231; Stop 255
acagtcttatcgttacttcatgcaa

SEQ ID NO: 320850 - DNA, 25 bp, Artificial
  probe
  misc_feature (1)..(25): SEQ ID NO: 2287; WAN024FRS; Start 181; Stop 205
ctaaccagtgtcaaccttgatgagt

SEQ ID NO: 320851 - DNA, 25 bp, Artificial
  probe
  misc_feature (1)..(25): SEQ ID NO: 2287; WAN024FRS; Start 187; Stop 211
agtgtcaaccttgatgagtatgtgg

SEQ ID NO: 320852 - DNA, 25 bp, Artificial
  probe
  misc_feature (1)..(25): SEQ ID NO: 2287; WAN024FRS; Start 185; Stop 209
ccagtgtcaaccttgatgagtatgt

SEQ ID NO: 320853 - DNA, 25 bp, Artificial
  probe
  misc_feature (1)..(25): SEQ ID NO: 2287; WAN024FRS; Start 184; Stop 208
accagtgtcaaccttgatgagtatg

SEQ ID NO: 320854 - DNA, 25 bp, Artificial
  probe
  misc_feature (1)..(25): SEQ ID NO: 2287; WAN024FRS; Start 446; Stop 470
cgcatctagtagaacttgaccagtc

SEQ ID NO: 320855 - DNA, 25 bp, Artificial
  probe
  misc_feature (1)..(25): SEQ ID NO: 2287; WAN024FRS; Start 230; Stop 254
cacagtcttatcgttacttcatgca

SEQ ID NO: 320856 - DNA, 25 bp, Artificial
  probe
  misc_feature (1)..(25): SEQ ID NO: 2287; WAN024FRS; Start 455; Stop 479
tagaacttgaccagtctactatcga

SEQ ID NO: 320857 - DNA, 25 bp, Artificial
  probe
  misc_feature (1)..(25): SEQ ID NO: 2287; WAN024FRS; Start 175; Stop 199
tcaaatctaaccagtgtcaaccttg

SEQ ID NO: 320858 - DNA, 25 bp, Artificial
  probe
  misc_feature (1)..(25): SEQ ID NO: 2287; WAN024FRS; Start 307; Stop 331
gttaaggacaatgctgaagctgaag

SEQ ID NO: 320859 - DNA, 25 bp, Artificial
  probe
  misc_feature (1)..(25): SEQ ID NO: 2287; WAN024FRS; Start 439; Stop 463
agtcaaacgcatctagtagaacttg

SEQ ID NO: 320860 - DNA, 25 bp, Artificial
  probe
  misc_feature (1)..(25): SEQ ID NO: 2288; WAN024DTQ; Start 604; Stop 628
caaggtatcgtatccagtctcaata

SEQ ID NO: 320861 - DNA, 25 bp, Artificial
  probe
  misc_feature (1)..(25): SEQ ID NO: 2288; WAN024DTQ; Start 1101; Stop 1125
cggagacaccattaagataacctac

SEQ ID NO: 320862 - DNA, 25 bp, Artificial
  probe
  misc_feature (1)..(25): SEQ ID NO: 2288; WAN024DTQ; Start 1100; Stop 1124
tcggagacaccattaagataaccta

SEQ ID NO: 320863 - DNA, 25 bp, Artificial
  probe
  misc_feature (1)..(25): SEQ ID NO: 2288; WAN024DTQ; Start 605; Stop 629
aaggtatcgtatccagtctcaatag

SEQ ID NO: 320864 - DNA, 25 bp, Artificial
  probe
  misc_feature (1)..(25): SEQ ID NO: 2288; WAN024DTQ; Start 603; Stop 627
tcaaggtatcgtatccagtctcaat

SEQ ID NO: 320865 - DNA, 25 bp, Artificial
  probe
  misc_feature (1)..(25): SEQ ID NO: 2288; WAN024DTQ; Start 1102; Stop 1126
ggagacaccattaagataacctact

SEQ ID NO: 320866 - DNA, 25 bp, Artificial
  probe
  misc_feature (1)..(25): SEQ ID NO: 2288; WAN024DTQ; Start 920; Stop 944
caagcgacatcagaagactcaatat

SEQ ID NO: 320867 - DNA, 25 bp, Artificial
  probe
  misc_feature (1)..(25): SEQ ID NO: 2288; WAN024DTQ; Start 606; Stop 630
aggtatcgtatccagtctcaataga

SEQ ID NO: 320868 - DNA, 25 bp, Artificial
  probe
  misc_feature (1)..(25): SEQ ID NO: 2288; WAN024DTQ; Start 1093; Stop 1117
cattctatcggagacaccattaaga

SEQ ID NO: 320869 - DNA, 25 bp, Artificial
  probe
  misc_feature (1)..(25): SEQ ID NO: 2288; WAN024DTQ; Start 1099; Stop 1123
atcggagacaccattaagataacct

SEQ ID NO: 320870 - DNA, 25 bp, Artificial
  probe
  misc_feature (1)..(25): SEQ ID NO: 2288; WAN024DTQ; Start 594; Stop 618
tactgtcactcaaggtatcgtatcc

SEQ ID NO: 320871 - DNA, 25 bp, Artificial
  probe
  misc_feature (1)..(25): SEQ ID NO: 2288; WAN024DTQ; Start 1053; Stop 1077
gattgcttcatcaacagacttacaa

SEQ ID NO: 320872 - DNA, 25 bp, Artificial
  probe
  misc_feature (1)..(25): SEQ ID NO: 2288; WAN024DTQ; Start 1051; Stop 1075
gagattgcttcatcaacagacttac

SEQ ID NO: 320873 - DNA, 25 bp, Artificial
  probe
  misc_feature (1)..(25): SEQ ID NO: 2288; WAN024DTQ; Start 1050; Stop 1074
agagattgcttcatcaacagactta

SEQ ID NO: 320874 - DNA, 25 bp, Artificial
  probe
  misc_feature (1)..(25): SEQ ID NO: 2288; WAN024DTQ; Start 1052; Stop 1076
agattgcttcatcaacagacttaca

SEQ ID NO: 320875 - DNA, 25 bp, Artificial
  probe
  misc_feature (1)..(25): SEQ ID NO: 2288; WAN024DTQ; Start 607; Stop 631
ggtatcgtatccagtctcaatagaa

SEQ ID NO: 320876 - DNA, 25 bp, Artificial
  probe
  misc_feature (1)..(25): SEQ ID NO: 2288; WAN024DTQ; Start 602; Stop 626
ctcaaggtatcgtatccagtctcaa

SEQ ID NO: 320877 - DNA, 25 bp, Artificial
  probe
  misc_feature (1)..(25): SEQ ID NO: 2288; WAN024DTQ; Start 1092; Stop 1116
ccattctatcggagacaccattaag

SEQ ID NO: 320878 - DNA, 25 bp, Artificial
  probe
  misc_feature (1)..(25): SEQ ID NO: 2288; WAN024DTQ; Start 1094; Stop 1118
attctatcggagacaccattaagat

SEQ ID NO: 320879 - DNA, 25 bp, Artificial
  probe
  misc_feature (1)..(25): SEQ ID NO: 2288; WAN024DTQ; Start 1049; Stop 1073
aagagattgcttcatcaacagactt

SEQ ID NO: 320880 - DNA, 25 bp, Artificial
  probe
  misc_feature (1)..(25): SEQ ID NO: 2288; WAN024DTQ; Start 1090; Stop 1114
aaccattctatcggagacaccatta

SEQ ID NO: 320881 - DNA, 25 bp, Artificial
  probe
  misc_feature (1)..(25): SEQ ID NO: 2288; WAN024DTQ; Start 1091; Stop 1115
accattctatcggagacaccattaa

SEQ ID NO: 320882 - DNA, 25 bp, Artificial
  probe
  misc_feature (1)..(25): SEQ ID NO: 2288; WAN024DTQ; Start 1098; Stop 1122
tatcggagacaccattaagataacc

SEQ ID NO: 320883 - DNA, 25 bp, Artificial
  probe
  misc_feature (1)..(25): SEQ ID NO: 2288; WAN024DTQ; Start 919; Stop 943
acaagcgacatcagaagactcaata

SEQ ID NO: 320884 - DNA, 25 bp, Artificial
  probe
  misc_feature (1)..(25): SEQ ID NO: 2288; WAN024DTQ; Start 918; Stop 942
tacaagcgacatcagaagactcaat

SEQ ID NO: 320885 - DNA, 25 bp, Artificial
  probe
  misc_feature (1)..(25): SEQ ID NO: 2288; WAN024DTQ; Start 778; Stop 802
aatggaggaacatctgtagaaggtc

SEQ ID NO: 320886 - DNA, 25 bp, Artificial
  probe
  misc_feature (1)..(25): SEQ ID NO: 2288; WAN024DTQ; Start 278; Stop 302
atgatgatactgacacagattctca

SEQ ID NO: 320887 - DNA, 25 bp, Artificial
  probe
  misc_feature (1)..(25): SEQ ID NO: 2288; WAN024DTQ; Start 921; Stop 945
aagcgacatcagaagactcaatatt

SEQ ID NO: 320888 - DNA, 25 bp, Artificial
  probe
  misc_feature (1)..(25): SEQ ID NO: 2288; WAN024DTQ; Start 308; Stop 332
tctctagtgaaggatctggagttat

SEQ ID NO: 320889 - DNA, 25 bp, Artificial
  probe
  misc_feature (1)..(25): SEQ ID NO: 2288; WAN024DTQ; Start 307; Stop 331
atctctagtgaaggatctggagtta

SEQ ID NO: 320890 - DNA, 25 bp, Artificial
  probe
  misc_feature (1)..(25): SEQ ID NO: 2288; WAN024DTQ; Start 306; Stop 330
aatctctagtgaaggatctggagtt

SEQ ID NO: 320891 - DNA, 25 bp, Artificial
  probe
  misc_feature (1)..(25): SEQ ID NO: 2288; WAN024DTQ; Start 593; Stop 617
atactgtcactcaaggtatcgtatc

SEQ ID NO: 320892 - DNA, 25 bp, Artificial
  probe
  misc_feature (1)..(25): SEQ ID NO: 2288; WAN024DTQ; Start 904; Stop 928
ttatctaatgtgagtacaagcgaca

SEQ ID NO: 320893 - DNA, 25 bp, Artificial
  probe
  misc_feature (1)..(25): SEQ ID NO: 2289; WAN024DPU; Start 121; Stop 145
gaagcaaacccatctgaagaacttt

SEQ ID NO: 320894 - DNA, 25 bp, Artificial
  probe
  misc_feature (1)..(25): SEQ ID NO: 2289; WAN024DPU; Start 17; Stop 41
tggcaaacattaaatcagctatcaa

SEQ ID NO: 320895 - DNA, 25 bp, Artificial
  probe
  misc_feature (1)..(25): SEQ ID NO: 2289; WAN024DPU; Start 16; Stop 40
ttggcaaacattaaatcagctatca

SEQ ID NO: 320896 - DNA, 25 bp, Artificial
  probe
  misc_feature (1)..(25): SEQ ID NO: 2289; WAN024DPU; Start 21; Stop 45
aaacattaaatcagctatcaaacgc

SEQ ID NO: 320897 - DNA, 25 bp, Artificial
  probe
  misc_feature (1)..(25): SEQ ID NO: 2289; WAN024DPU; Start 18; Stop 42
ggcaaacattaaatcagctatcaaa

SEQ ID NO: 320898 - DNA, 25 bp, Artificial
  probe
  misc_feature (1)..(25): SEQ ID NO: 2289; WAN024DPU; Start 14; Stop 38
cattggcaaacattaaatcagctat

SEQ ID NO: 320899 - DNA, 25 bp, Artificial
  probe
  misc_feature (1)..(25): SEQ ID NO: 2289; WAN024DPU; Start 15; Stop 39
attggcaaacattaaatcagctatc

SEQ ID NO: 320900 - DNA, 25 bp, Artificial
  probe
  misc_feature (1)..(25): SEQ ID NO: 2289; WAN024DPU; Start 174; Stop 198
agcagaaactaaaggtttgattcac

SEQ ID NO: 320901 - DNA, 25 bp, Artificial
  probe
  misc_feature (1)..(25): SEQ ID NO: 2289; WAN024DPU; Start 175; Stop 199
gcagaaactaaaggtttgattcaca

SEQ ID NO: 320902 - DNA, 25 bp, Artificial
  probe
  misc_feature (1)..(25): SEQ ID NO: 2289; WAN024DPU; Start 19; Stop 43
gcaaacattaaatcagctatcaaac

SEQ ID NO: 320903 - DNA, 25 bp, Artificial
  probe
  misc_feature (1)..(25): SEQ ID NO: 2289; WAN024DPU; Start 173; Stop 197
aagcagaaactaaaggtttgattca

SEQ ID NO: 320904 - DNA, 25 bp, Artificial
  probe
  misc_feature (1)..(25): SEQ ID NO: 2289; WAN024DPU; Start 168; Stop 192
cgataaagcagaaactaaaggtttg

SEQ ID NO: 320905 - DNA, 25 bp, Artificial
  probe
  misc_feature (1)..(25): SEQ ID NO: 2289; WAN024DPU; Start 20; Stop 44
caaacattaaatcagctatcaaacg

SEQ ID NO: 320906 - DNA, 25 bp, Artificial
  probe
  misc_feature (1)..(25): SEQ ID NO: 2289; WAN024DPU; Start 172; Stop 196
aaagcagaaactaaaggtttgattc

SEQ ID NO: 320907 - DNA, 25 bp, Artificial
  probe
  misc_feature (1)..(25): SEQ ID NO: 2289; WAN024DPU; Start 176; Stop 200
cagaaactaaaggtttgattcacaa

SEQ ID NO: 320908 - DNA, 25 bp, Artificial
  probe
  misc_feature (1)..(25): SEQ ID NO: 2289; WAN024DPU; Start 89; Stop 113
aatcagctatgcgtactgctataaa

SEQ ID NO: 320909 - DNA, 25 bp, Artificial
  probe
  misc_feature (1)..(25): SEQ ID NO: 2289; WAN024DPU; Start 88; Stop 112
aaatcagctatgcgtactgctataa

SEQ ID NO: 320910 - DNA, 25 bp, Artificial
  probe
  misc_feature (1)..(25): SEQ ID NO: 2289; WAN024DPU; Start 122; Stop 146
aagcaaacccatctgaagaactttt

SEQ ID NO: 320911 - DNA, 25 bp, Artificial
  probe
  misc_feature (1)..(25): SEQ ID NO: 2289; WAN024DPU; Start 120; Stop 144
cgaagcaaacccatctgaagaactt

SEQ ID NO: 320912 - DNA, 25 bp, Artificial
  probe
  misc_feature (1)..(25): SEQ ID NO: 2289; WAN024DPU; Start 169; Stop 193
gataaagcagaaactaaaggtttga

SEQ ID NO: 320913 - DNA, 25 bp, Artificial
  probe
  misc_feature (1)..(25): SEQ ID NO: 2289; WAN024DPU; Start 167; Stop 191
tcgataaagcagaaactaaaggttt

SEQ ID NO: 320914 - DNA, 25 bp, Artificial
  probe
  misc_feature (1)..(25): SEQ ID NO: 2289; WAN024DPU; Start 123; Stop 147
agcaaacccatctgaagaacttttc

SEQ ID NO: 320915 - DNA, 25 bp, Artificial
  probe
  misc_feature (1)..(25): SEQ ID NO: 2289; WAN024DPU; Start 171; Stop 195
taaagcagaaactaaaggtttgatt

SEQ ID NO: 320916 - DNA, 25 bp, Artificial
  probe
  misc_feature (1)..(25): SEQ ID NO: 2289; WAN024DPU; Start 177; Stop 201
agaaactaaaggtttgattcacaaa

SEQ ID NO: 320917 - DNA, 25 bp, Artificial
  probe
  misc_feature (1)..(25): SEQ ID NO: 2289; WAN024DPU; Start 125; Stop 149
caaacccatctgaagaacttttccg

SEQ ID NO: 320918 - DNA, 25 bp, Artificial
  probe
  misc_feature (1)..(25): SEQ ID NO: 2289; WAN024DPU; Start 170; Stop 194
ataaagcagaaactaaaggtttgat

SEQ ID NO: 320919 - DNA, 25 bp, Artificial
  probe
  misc_feature (1)..(25): SEQ ID NO: 2289; WAN024DPU; Start 22; Stop 46
aacattaaatcagctatcaaacgcg

SEQ ID NO: 320920 - DNA, 25 bp, Artificial
  probe
  misc_feature (1)..(25): SEQ ID NO: 2289; WAN024DPU; Start 166; Stop 190
atcgataaagcagaaactaaaggtt

SEQ ID NO: 320921 - DNA, 25 bp, Artificial
  probe
  misc_feature (1)..(25): SEQ ID NO: 2289; WAN024DPU; Start 124; Stop 148
gcaaacccatctgaagaacttttcc

SEQ ID NO: 320922 - DNA, 25 bp, Artificial
  probe
  misc_feature (1)..(25): SEQ ID NO: 2289; WAN024DPU; Start 126; Stop 150
aaacccatctgaagaacttttccgt

SEQ ID NO: 320923 - DNA, 25 bp, Artificial
  probe
  misc_feature (1)..(25): SEQ ID NO: 2289; WAN024DPU; Start 127; Stop 151
aacccatctgaagaacttttccgtg

SEQ ID NO: 320924 - DNA, 25 bp, Artificial
  probe
  misc_feature (1)..(25): SEQ ID NO: 2289; WAN024DPU; Start 90; Stop 114
atcagctatgcgtactgctataaaa

SEQ ID NO: 320925 - DNA, 25 bp, Artificial
  probe
  misc_feature (1)..(25): SEQ ID NO: 2289; WAN024DPU; Start 87; Stop 111
aaaatcagctatgcgtactgctata

SEQ ID NO: 320926 - DNA, 25 bp, Artificial
  probe
  misc_feature (1)..(25): SEQ ID NO: 2290; WAN024DL9; Start 274; Stop 298
gcctatggtaacaatgctagtaagt

SEQ ID NO: 320927 - DNA, 25 bp, Artificial
  probe
  misc_feature (1)..(25): SEQ ID NO: 2290; WAN024DL9; Start 273; Stop 297
tgcctatggtaacaatgctagtaag

SEQ ID NO: 320928 - DNA, 25 bp, Artificial
  probe
  misc_feature (1)..(25): SEQ ID NO: 2290; WAN024DL9; Start 275; Stop 299
cctatggtaacaatgctagtaagtg

SEQ ID NO: 320929 - DNA, 25 bp, Artificial
  probe
  misc_feature (1)..(25): SEQ ID NO: 2290; WAN024DL9; Start 272; Stop 296
ttgcctatggtaacaatgctagtaa

SEQ ID NO: 320930 - DNA, 25 bp, Artificial
  probe
  misc_feature (1)..(25): SEQ ID NO: 2290; WAN024DL9; Start 333; Stop 357
taataaccaatactgcctaacagcc

SEQ ID NO: 320931 - DNA, 25 bp, Artificial
  probe
  misc_feature (1)..(25): SEQ ID NO: 2290; WAN024DL9; Start 332; Stop 356
ttaataaccaatactgcctaacagc

SEQ ID NO: 320932 - DNA, 25 bp, Artificial
  probe
  misc_feature (1)..(25): SEQ ID NO: 2290; WAN024DL9; Start 349; Stop 373
ctaacagccaagcaatacagtcaac

SEQ ID NO: 320933 - DNA, 25 bp, Artificial
  probe
  misc_feature (1)..(25): SEQ ID NO: 2290; WAN024DL9; Start 276; Stop 300
ctatggtaacaatgctagtaagtgt

SEQ ID NO: 320934 - DNA, 25 bp, Artificial
  probe
  misc_feature (1)..(25): SEQ ID NO: 2290; WAN024DL9; Start 447; Stop 471
tatcgcagatttgtatgagttggaa

SEQ ID NO: 320935 - DNA, 25 bp, Artificial
  probe
  misc_feature (1)..(25): SEQ ID NO: 2290; WAN024DL9; Start 446; Stop 470
ttatcgcagatttgtatgagttgga

SEQ ID NO: 320936 - DNA, 25 bp, Artificial
  probe
  misc_feature (1)..(25): SEQ ID NO: 2290; WAN024DL9; Start 312; Stop 336
tgggtcaggaaatcgtaactttaat

SEQ ID NO: 320937 - DNA, 25 bp, Artificial
  probe
  misc_feature (1)..(25): SEQ ID NO: 2290; WAN024DL9; Start 445; Stop 469
attatcgcagatttgtatgagttgg

SEQ ID NO: 320938 - DNA, 25 bp, Artificial
  probe
  misc_feature (1)..(25): SEQ ID NO: 2290; WAN024DL9; Start 311; Stop 335
ttgggtcaggaaatcgtaactttaa

SEQ ID NO: 320939 - DNA, 25 bp, Artificial
  probe
  misc_feature (1)..(25): SEQ ID NO: 2290; WAN024DL9; Start 442; Stop 466
gctattatcgcagatttgtatgagt

SEQ ID NO: 320940 - DNA, 25 bp, Artificial
  probe
  misc_feature (1)..(25): SEQ ID NO: 2290; WAN024DL9; Start 271; Stop 295
attgcctatggtaacaatgctagta

SEQ ID NO: 320941 - DNA, 25 bp, Artificial
  probe
  misc_feature (1)..(25): SEQ ID NO: 2290; WAN024DL9; Start 270; Stop 294
tattgcctatggtaacaatgctagt

SEQ ID NO: 320942 - DNA, 25 bp, Artificial
  probe
  misc_feature (1)..(25): SEQ ID NO: 2290; WAN024DL9; Start 335; Stop 359
ataaccaatactgcctaacagccaa

SEQ ID NO: 320943 - DNA, 25 bp, Artificial
  probe
  misc_feature (1)..(25): SEQ ID NO: 2290; WAN024DL9; Start 334; Stop 358
aataaccaatactgcctaacagcca

SEQ ID NO: 320944 - DNA, 25 bp, Artificial
  probe
  misc_feature (1)..(25): SEQ ID NO: 2290; WAN024DL9; Start 448; Stop 472
atcgcagatttgtatgagttggaaa

SEQ ID NO: 320945 - DNA, 25 bp, Artificial
  probe
  misc_feature (1)..(25): SEQ ID NO: 2290; WAN024DL9; Start 126; Stop 150
tcatatcaaggatttggtcaaggaa

SEQ ID NO: 320946 - DNA, 25 bp, Artificial
  probe
  misc_feature (1)..(25): SEQ ID NO: 2290; WAN024DL9; Start 125; Stop 149
ttcatatcaaggatttggtcaagga

SEQ ID NO: 320947 - DNA, 25 bp, Artificial
  probe
  misc_feature (1)..(25): SEQ ID NO: 2290; WAN024DL9; Start 127; Stop 151
catatcaaggatttggtcaaggaag

SEQ ID NO: 320948 - DNA, 25 bp, Artificial
  probe
  misc_feature (1)..(25): SEQ ID NO: 2290; WAN024DL9; Start 128; Stop 152
atatcaaggatttggtcaaggaagg

SEQ ID NO: 320949 - DNA, 25 bp, Artificial
  probe
  misc_feature (1)..(25): SEQ ID NO: 2290; WAN024DL9; Start 310; Stop 334
gttgggtcaggaaatcgtaacttta

SEQ ID NO: 320950 - DNA, 25 bp, Artificial
  probe
  misc_feature (1)..(25): SEQ ID NO: 2290; WAN024DL9; Start 313; Stop 337
gggtcaggaaatcgtaactttaata

SEQ ID NO: 320951 - DNA, 25 bp, Artificial
  probe
  misc_feature (1)..(25): SEQ ID NO: 2290; WAN024DL9; Start 269; Stop 293
ttattgcctatggtaacaatgctag

SEQ ID NO: 320952 - DNA, 25 bp, Artificial
  probe
  misc_feature (1)..(25): SEQ ID NO: 2290; WAN024DL9; Start 348; Stop 372
cctaacagccaagcaatacagtcaa

SEQ ID NO: 320953 - DNA, 25 bp, Artificial
  probe
  misc_feature (1)..(25): SEQ ID NO: 2290; WAN024DL9; Start 124; Stop 148
attcatatcaaggatttggtcaagg

SEQ ID NO: 320954 - DNA, 25 bp, Artificial
  probe
  misc_feature (1)..(25): SEQ ID NO: 2290; WAN024DL9; Start 325; Stop 349
cgtaactttaataaccaatactgcc

SEQ ID NO: 320955 - DNA, 25 bp, Artificial
  probe
  misc_feature (1)..(25): SEQ ID NO: 2290; WAN024DL9; Start 336; Stop 360
taaccaatactgcctaacagccaag

SEQ ID NO: 320956 - DNA, 25 bp, Artificial
  probe
  misc_feature (1)..(25): SEQ ID NO: 2290; WAN024DL9; Start 122; Stop 146
agattcatatcaaggatttggtcaa

SEQ ID NO: 320957 - DNA, 25 bp, Artificial
  probe
  misc_feature (1)..(25): SEQ ID NO: 2290; WAN024DL9; Start 121; Stop 145
aagattcatatcaaggatttggtca

SEQ ID NO: 320958 - DNA, 25 bp, Artificial
  probe
  misc_feature (1)..(25): SEQ ID NO: 2290; WAN024DL9; Start 384; Stop 408
ccctgtattggctgactttgaaatg

SEQ ID NO: 320959 - DNA, 25 bp, Artificial
  probe
  misc_feature (1)..(25): SEQ ID NO: 2291; WAN024G6G; Start 1090; Stop 1114
cgtattagtccgattgagttctaca

SEQ ID NO: 320960 - DNA, 25 bp, Artificial
  probe
  misc_feature (1)..(25): SEQ ID NO: 2291; WAN024G6G; Start 1269; Stop 1293
ccagattgagcagattgttaatgag

SEQ ID NO: 320961 - DNA, 25 bp, Artificial
  probe
  misc_feature (1)..(25): SEQ ID NO: 2291; WAN024G6G; Start 1273; Stop 1297
attgagcagattgttaatgagagtc

SEQ ID NO: 320962 - DNA, 25 bp, Artificial
  probe
  misc_feature (1)..(25): SEQ ID NO: 2291; WAN024G6G; Start 1272; Stop 1296
gattgagcagattgttaatgagagt

SEQ ID NO: 320963 - DNA, 25 bp, Artificial
  probe
  misc_feature (1)..(25): SEQ ID NO: 2291; WAN024G6G; Start 1270; Stop 1294
cagattgagcagattgttaatgaga

SEQ ID NO: 320964 - DNA, 25 bp, Artificial
  probe
  misc_feature (1)..(25): SEQ ID NO: 2291; WAN024G6G; Start 57; Stop 81
caacattgtggaagtcataggagat

SEQ ID NO: 320965 - DNA, 25 bp, Artificial
  probe
  misc_feature (1)..(25): SEQ ID NO: 2291; WAN024G6G; Start 1400; Stop 1424
atctactctatcggatgatggaatc

SEQ ID NO: 320966 - DNA, 25 bp, Artificial
  probe
  misc_feature (1)..(25): SEQ ID NO: 2291; WAN024G6G; Start 1271; Stop 1295
agattgagcagattgttaatgagag

SEQ ID NO: 320967 - DNA, 25 bp, Artificial
  probe
  misc_feature (1)..(25): SEQ ID NO: 2291; WAN024G6G; Start 1274; Stop 1298
ttgagcagattgttaatgagagtcg

SEQ ID NO: 320968 - DNA, 25 bp, Artificial
  probe
  misc_feature (1)..(25): SEQ ID NO: 2291; WAN024G6G; Start 58; Stop 82
aacattgtggaagtcataggagatg

SEQ ID NO: 320969 - DNA, 25 bp, Artificial
  probe
  misc_feature (1)..(25): SEQ ID NO: 2291; WAN024G6G; Start 1093; Stop 1117
attagtccgattgagttctacattc

SEQ ID NO: 320970 - DNA, 25 bp, Artificial
  probe
  misc_feature (1)..(25): SEQ ID NO: 2291; WAN024G6G; Start 60; Stop 84
cattgtggaagtcataggagatgtg

SEQ ID NO: 320971 - DNA, 25 bp, Artificial
  probe
  misc_feature (1)..(25): SEQ ID NO: 2291; WAN024G6G; Start 1098; Stop 1122
tccgattgagttctacattcatcag

SEQ ID NO: 320972 - DNA, 25 bp, Artificial
  probe
  misc_feature (1)..(25): SEQ ID NO: 2291; WAN024G6G; Start 1096; Stop 1120
agtccgattgagttctacattcatc

SEQ ID NO: 320973 - DNA, 25 bp, Artificial
  probe
  misc_feature (1)..(25): SEQ ID NO: 2291; WAN024G6G; Start 1094; Stop 1118
ttagtccgattgagttctacattca

SEQ ID NO: 320974 - DNA, 25 bp, Artificial
  probe
  misc_feature (1)..(25): SEQ ID NO: 2291; WAN024G6G; Start 1276; Stop 1300
gagcagattgttaatgagagtcgtc

SEQ ID NO: 320975 - DNA, 25 bp, Artificial
  probe
  misc_feature (1)..(25): SEQ ID NO: 2291; WAN024G6G; Start 1099; Stop 1123
ccgattgagttctacattcatcagt

SEQ ID NO: 320976 - DNA, 25 bp, Artificial
  probe
  misc_feature (1)..(25): SEQ ID NO: 2291; WAN024G6G; Start 1097; Stop 1121
gtccgattgagttctacattcatca

SEQ ID NO: 320977 - DNA, 25 bp, Artificial
  probe
  misc_feature (1)..(25): SEQ ID NO: 2291; WAN024G6G; Start 1095; Stop 1119
tagtccgattgagttctacattcat

SEQ ID NO: 320978 - DNA, 25 bp, Artificial
  probe
  misc_feature (1)..(25): SEQ ID NO: 2291; WAN024G6G; Start 1279; Stop 1303
cagattgttaatgagagtcgtcagg

SEQ ID NO: 320979 - DNA, 25 bp, Artificial
  probe
  misc_feature (1)..(25): SEQ ID NO: 2291; WAN024G6G; Start 63; Stop 87
tgtggaagtcataggagatgtgatt

SEQ ID NO: 320980 - DNA, 25 bp, Artificial
  probe
  misc_feature (1)..(25): SEQ ID NO: 2291; WAN024G6G; Start 62; Stop 86
ttgtggaagtcataggagatgtgat

SEQ ID NO: 320981 - DNA, 25 bp, Artificial
  probe
  misc_feature (1)..(25): SEQ ID NO: 2291; WAN024G6G; Start 61; Stop 85
attgtggaagtcataggagatgtga

SEQ ID NO: 320982 - DNA, 25 bp, Artificial
  probe
  misc_feature (1)..(25): SEQ ID NO: 2291; WAN024G6G; Start 1091; Stop 1115
gtattagtccgattgagttctacat

SEQ ID NO: 320983 - DNA, 25 bp, Artificial
  probe
  misc_feature (1)..(25): SEQ ID NO: 2291; WAN024G6G; Start 1275; Stop 1299
tgagcagattgttaatgagagtcgt

SEQ ID NO: 320984 - DNA, 25 bp, Artificial
  probe
  misc_feature (1)..(25): SEQ ID NO: 2291; WAN024G6G; Start 1281; Stop 1305
gattgttaatgagagtcgtcaggtg

SEQ ID NO: 320985 - DNA, 25 bp, Artificial
  probe
  misc_feature (1)..(25): SEQ ID NO: 2291; WAN024G6G; Start 1280; Stop 1304
agattgttaatgagagtcgtcaggt

SEQ ID NO: 320986 - DNA, 25 bp, Artificial
  probe
  misc_feature (1)..(25): SEQ ID NO: 2291; WAN024G6G; Start 1100; Stop 1124
cgattgagttctacattcatcagta

SEQ ID NO: 320987 - DNA, 25 bp, Artificial
  probe
  misc_feature (1)..(25): SEQ ID NO: 2291; WAN024G6G; Start 799; Stop 823
atggaaggattcatggatgttattg

SEQ ID NO: 320988 - DNA, 25 bp, Artificial
  probe
  misc_feature (1)..(25): SEQ ID NO: 2291; WAN024G6G; Start 797; Stop 821
tgatggaaggattcatggatgttat

SEQ ID NO: 320989 - DNA, 25 bp, Artificial
  probe
  misc_feature (1)..(25): SEQ ID NO: 2291; WAN024G6G; Start 798; Stop 822
gatggaaggattcatggatgttatt

SEQ ID NO: 320990 - DNA, 25 bp, Artificial
  probe
  misc_feature (1)..(25): SEQ ID NO: 2291; WAN024G6G; Start 1278; Stop 1302
gcagattgttaatgagagtcgtcag

SEQ ID NO: 320991 - DNA, 25 bp, Artificial
  probe
  misc_feature (1)..(25): SEQ ID NO: 2291; WAN024G6G; Start 800; Stop 824
tggaaggattcatggatgttattgc

SEQ ID NO: 320992 - DNA, 25 bp, Artificial
  probe
  misc_feature (1)..(25): SEQ ID NO: 2292; WAN024CK4; Start 44; Stop 68
tcttgagtagtgtgttggatattct

SEQ ID NO: 320993 - DNA, 25 bp, Artificial
  probe
  misc_feature (1)..(25): SEQ ID NO: 2292; WAN024CK4; Start 45; Stop 69
cttgagtagtgtgttggatattctt

SEQ ID NO: 320994 - DNA, 25 bp, Artificial
  probe
  misc_feature (1)..(25): SEQ ID NO: 2292; WAN024CK4; Start 43; Stop 67
ttcttgagtagtgtgttggatattc

SEQ ID NO: 320995 - DNA, 25 bp, Artificial
  probe
  misc_feature (1)..(25): SEQ ID NO: 2292; WAN024CK4; Start 98; Stop 122
tatctattgggtggcttgttcttta

SEQ ID NO: 320996 - DNA, 25 bp, Artificial
  probe
  misc_feature (1)..(25): SEQ ID NO: 2292; WAN024CK4; Start 87; Stop 111
aatctctatcgtatctattgggtgg

SEQ ID NO: 320997 - DNA, 25 bp, Artificial
  probe
  misc_feature (1)..(25): SEQ ID NO: 2292; WAN024CK4; Start 351; Stop 375
attatctagtagtcaggttagcctt

SEQ ID NO: 320998 - DNA, 25 bp, Artificial
  probe
  misc_feature (1)..(25): SEQ ID NO: 2292; WAN024CK4; Start 349; Stop 373
ctattatctagtagtcaggttagcc

SEQ ID NO: 320999 - DNA, 25 bp, Artificial
  probe
  misc_feature (1)..(25): SEQ ID NO: 2292; WAN024CK4; Start 99; Stop 123
atctattgggtggcttgttctttac

SEQ ID NO: 321000 - DNA, 25 bp, Artificial
  probe
  misc_feature (1)..(25): SEQ ID NO: 2292; WAN024CK4; Start 97; Stop 121
gtatctattgggtggcttgttcttt

SEQ ID NO: 321001 - DNA, 25 bp, Artificial
  probe
  misc_feature (1)..(25): SEQ ID NO: 2292; WAN024CK4; Start 88; Stop 112
atctctatcgtatctattgggtggc

SEQ ID NO: 321002 - DNA, 25 bp, Artificial
  probe
  misc_feature (1)..(25): SEQ ID NO: 2292; WAN024CK4; Start 90; Stop 114
ctctatcgtatctattgggtggctt

SEQ ID NO: 321003 - DNA, 25 bp, Artificial
  probe
  misc_feature (1)..(25): SEQ ID NO: 2292; WAN024CK4; Start 93; Stop 117
tatcgtatctattgggtggcttgtt

SEQ ID NO: 321004 - DNA, 25 bp, Artificial
  probe
  misc_feature (1)..(25): SEQ ID NO: 2292; WAN024CK4; Start 91; Stop 115
tctatcgtatctattgggtggcttg

SEQ ID NO: 321005 - DNA, 25 bp, Artificial
  probe
  misc_feature (1)..(25): SEQ ID NO: 2292; WAN024CK4; Start 353; Stop 377
tatctagtagtcaggttagccttaa

SEQ ID NO: 321006 - DNA, 25 bp, Artificial
  probe
  misc_feature (1)..(25): SEQ ID NO: 2292; WAN024CK4; Start 352; Stop 376
ttatctagtagtcaggttagcctta

SEQ ID NO: 321007 - DNA, 25 bp, Artificial
  probe
  misc_feature (1)..(25): SEQ ID NO: 2292; WAN024CK4; Start 114; Stop 138
tgttctttacagtggtttgtttgaa

SEQ ID NO: 321008 - DNA, 25 bp, Artificial
  probe
  misc_feature (1)..(25): SEQ ID NO: 2292; WAN024CK4; Start 113; Stop 137
ttgttctttacagtggtttgtttga

SEQ ID NO: 321009 - DNA, 25 bp, Artificial
  probe
  misc_feature (1)..(25): SEQ ID NO: 2292; WAN024CK4; Start 92; Stop 116
ctatcgtatctattgggtggcttgt

SEQ ID NO: 321010 - DNA, 25 bp, Artificial
  probe
  misc_feature (1)..(25): SEQ ID NO: 2292; WAN024CK4; Start 112; Stop 136
cttgttctttacagtggtttgtttg

SEQ ID NO: 321011 - DNA, 25 bp, Artificial
  probe
  misc_feature (1)..(25): SEQ ID NO: 2292; WAN024CK4; Start 46; Stop 70
ttgagtagtgtgttggatattcttt

SEQ ID NO: 321012 - DNA, 25 bp, Artificial
  probe
  misc_feature (1)..(25): SEQ ID NO: 2292; WAN024CK4; Start 42; Stop 66
tttcttgagtagtgtgttggatatt

SEQ ID NO: 321013 - DNA, 25 bp, Artificial
  probe
  misc_feature (1)..(25): SEQ ID NO: 2292; WAN024CK4; Start 116; Stop 140
ttctttacagtggtttgtttgaagc

SEQ ID NO: 321014 - DNA, 25 bp, Artificial
  probe
  misc_feature (1)..(25): SEQ ID NO: 2292; WAN024CK4; Start 115; Stop 139
gttctttacagtggtttgtttgaag

SEQ ID NO: 321015 - DNA, 25 bp, Artificial
  probe
  misc_feature (1)..(25): SEQ ID NO: 2292; WAN024CK4; Start 350; Stop 374
tattatctagtagtcaggttagcct

SEQ ID NO: 321016 - DNA, 25 bp, Artificial
  probe
  misc_feature (1)..(25): SEQ ID NO: 2292; WAN024CK4; Start 111; Stop 135
gcttgttctttacagtggtttgttt

SEQ ID NO: 321017 - DNA, 25 bp, Artificial
  probe
  misc_feature (1)..(25): SEQ ID NO: 2292; WAN024CK4; Start 89; Stop 113
tctctatcgtatctattgggtggct

SEQ ID NO: 321018 - DNA, 25 bp, Artificial
  probe
  misc_feature (1)..(25): SEQ ID NO: 2292; WAN024CK4; Start 272; Stop 296
aactttatcttggtttggatgcgag

SEQ ID NO: 321019 - DNA, 25 bp, Artificial
  probe
  misc_feature (1)..(25): SEQ ID NO: 2292; WAN024CK4; Start 86; Stop 110
aaatctctatcgtatctattgggtg

SEQ ID NO: 321020 - DNA, 25 bp, Artificial
  probe
  misc_feature (1)..(25): SEQ ID NO: 2292; WAN024CK4; Start 118; Stop 142
ctttacagtggtttgtttgaagcag

SEQ ID NO: 321021 - DNA, 25 bp, Artificial
  probe
  misc_feature (1)..(25): SEQ ID NO: 2292; WAN024CK4; Start 117; Stop 141
tctttacagtggtttgtttgaagca

SEQ ID NO: 321022 - DNA, 25 bp, Artificial
  probe
  misc_feature (1)..(25): SEQ ID NO: 2292; WAN024CK4; Start 348; Stop 372
tctattatctagtagtcaggttagc

SEQ ID NO: 321023 - DNA, 25 bp, Artificial
  probe
  misc_feature (1)..(25): SEQ ID NO: 2292; WAN024CK4; Start 85; Stop 109
caaatctctatcgtatctattgggt

SEQ ID NO: 321024 - DNA, 25 bp, Artificial
  probe
  misc_feature (1)..(25): SEQ ID NO: 2292; WAN024CK4; Start 84; Stop 108
acaaatctctatcgtatctattggg

SEQ ID NO: 321025 - DNA, 25 bp, Artificial
  probe
  misc_feature (1)..(25): SEQ ID NO: 2293; WAN024GIL; Start 217; Stop 241
aatggctacgaagtgattggattag

SEQ ID NO: 321026 - DNA, 25 bp, Artificial
  probe
  misc_feature (1)..(25): SEQ ID NO: 2293; WAN024GIL; Start 216; Stop 240
gaatggctacgaagtgattggatta

SEQ ID NO: 321027 - DNA, 25 bp, Artificial
  probe
  misc_feature (1)..(25): SEQ ID NO: 2293; WAN024GIL; Start 221; Stop 245
gctacgaagtgattggattagacta

SEQ ID NO: 321028 - DNA, 25 bp, Artificial
  probe
  misc_feature (1)..(25): SEQ ID NO: 2293; WAN024GIL; Start 218; Stop 242
atggctacgaagtgattggattaga

SEQ ID NO: 321029 - DNA, 25 bp, Artificial
  probe
  misc_feature (1)..(25): SEQ ID NO: 2293; WAN024GIL; Start 224; Stop 248
acgaagtgattggattagactaact

SEQ ID NO: 321030 - DNA, 25 bp, Artificial
  probe
  misc_feature (1)..(25): SEQ ID NO: 2293; WAN024GIL; Start 219; Stop 243
tggctacgaagtgattggattagac

SEQ ID NO: 321031 - DNA, 25 bp, Artificial
  probe
  misc_feature (1)..(25): SEQ ID NO: 2293; WAN024GIL; Start 223; Stop 247
tacgaagtgattggattagactaac

SEQ ID NO: 321032 - DNA, 25 bp, Artificial
  probe
  misc_feature (1)..(25): SEQ ID NO: 2293; WAN024GIL; Start 225; Stop 249
cgaagtgattggattagactaacta

SEQ ID NO: 321033 - DNA, 25 bp, Artificial
  probe
  misc_feature (1)..(25): SEQ ID NO: 2293; WAN024GIL; Start 222; Stop 246
ctacgaagtgattggattagactaa

SEQ ID NO: 321034 - DNA, 25 bp, Artificial
  probe
  misc_feature (1)..(25): SEQ ID NO: 2293; WAN024GIL; Start 220; Stop 244
ggctacgaagtgattggattagact

SEQ ID NO: 321035 - DNA, 25 bp, Artificial
  probe
  misc_feature (1)..(25): SEQ ID NO: 2293; WAN024GIL; Start 178; Stop 202
ggaactcctatggacaagattgtac

SEQ ID NO: 321036 - DNA, 25 bp, Artificial
  probe
  misc_feature (1)..(25): SEQ ID NO: 2293; WAN024GIL; Start 179; Stop 203
gaactcctatggacaagattgtacg

SEQ ID NO: 321037 - DNA, 25 bp, Artificial
  probe
  misc_feature (1)..(25): SEQ ID NO: 2293; WAN024GIL; Start 177; Stop 201
aggaactcctatggacaagattgta

SEQ ID NO: 321038 - DNA, 25 bp, Artificial
  probe
  misc_feature (1)..(25): SEQ ID NO: 2293; WAN024GIL; Start 215; Stop 239
cgaatggctacgaagtgattggatt

SEQ ID NO: 321039 - DNA, 25 bp, Artificial
  probe
  misc_feature (1)..(25): SEQ ID NO: 2293; WAN024GIL; Start 128; Stop 152
gcaatacagttggtcgtaaagtatc

SEQ ID NO: 321040 - DNA, 25 bp, Artificial
  probe
  misc_feature (1)..(25): SEQ ID NO: 2293; WAN024GIL; Start 176; Stop 200
caggaactcctatggacaagattgt

SEQ ID NO: 321041 - DNA, 25 bp, Artificial
  probe
  misc_feature (1)..(25): SEQ ID NO: 2293; WAN024GIL; Start 131; Stop 155
atacagttggtcgtaaagtatcact

SEQ ID NO: 321042 - DNA, 25 bp, Artificial
  probe
  misc_feature (1)..(25): SEQ ID NO: 2293; WAN024GIL; Start 185; Stop 209
ctatggacaagattgtacgcacact

SEQ ID NO: 321043 - DNA, 25 bp, Artificial
  probe
  misc_feature (1)..(25): SEQ ID NO: 2293; WAN024GIL; Start 130; Stop 154
aatacagttggtcgtaaagtatcac

SEQ ID NO: 321044 - DNA, 25 bp, Artificial
  probe
  misc_feature (1)..(25): SEQ ID NO: 2293; WAN024GIL; Start 129; Stop 153
caatacagttggtcgtaaagtatca

SEQ ID NO: 321045 - DNA, 25 bp, Artificial
  probe
  misc_feature (1)..(25): SEQ ID NO: 2293; WAN024GIL; Start 180; Stop 204
aactcctatggacaagattgtacgc

SEQ ID NO: 321046 - DNA, 25 bp, Artificial
  probe
  misc_feature (1)..(25): SEQ ID NO: 2293; WAN024GIL; Start 3; Stop 27
ggaggtcgtcatggacaatatcatc

SEQ ID NO: 321047 - DNA, 25 bp, Artificial
  probe
  misc_feature (1)..(25): SEQ ID NO: 2293; WAN024GIL; Start 127; Stop 151
cgcaatacagttggtcgtaaagtat

SEQ ID NO: 321048 - DNA, 25 bp, Artificial
  probe
  misc_feature (1)..(25): SEQ ID NO: 2293; WAN024GIL; Start 173; Stop 197
tagcaggaactcctatggacaagat

SEQ ID NO: 321049 - DNA, 25 bp, Artificial
  probe
  misc_feature (1)..(25): SEQ ID NO: 2293; WAN024GIL; Start 186; Stop 210
tatggacaagattgtacgcacactg

SEQ ID NO: 321050 - DNA, 25 bp, Artificial
  probe
  misc_feature (1)..(25): SEQ ID NO: 2293; WAN024GIL; Start 4; Stop 28
gaggtcgtcatggacaatatcatcg

SEQ ID NO: 321051 - DNA, 25 bp, Artificial
  probe
  misc_feature (1)..(25): SEQ ID NO: 2293; WAN024GIL; Start 2; Stop 26
tggaggtcgtcatggacaatatcat

SEQ ID NO: 321052 - DNA, 25 bp, Artificial
  probe
  misc_feature (1)..(25): SEQ ID NO: 2293; WAN024GIL; Start 1; Stop 25
atggaggtcgtcatggacaatatca

SEQ ID NO: 321053 - DNA, 25 bp, Artificial
  probe
  misc_feature (1)..(25): SEQ ID NO: 2293; WAN024GIL; Start 28; Stop 52
gatgtgtcaattcctgttgcagaag

SEQ ID NO: 321054 - DNA, 25 bp, Artificial
  probe
  misc_feature (1)..(25): SEQ ID NO: 2293; WAN024GIL; Start 69; Stop 93
agaagtcttggaaattctagtggag

SEQ ID NO: 321055 - DNA, 25 bp, Artificial
  probe
  misc_feature (1)..(25): SEQ ID NO: 2293; WAN024GIL; Start 68; Stop 92
cagaagtcttggaaattctagtgga

SEQ ID NO: 321056 - DNA, 25 bp, Artificial
  probe
  misc_feature (1)..(25): SEQ ID NO: 2293; WAN024GIL; Start 182; Stop 206
ctcctatggacaagattgtacgcac

SEQ ID NO: 321057 - DNA, 25 bp, Artificial
  probe
  misc_feature (1)..(25): SEQ ID NO: 2293; WAN024GIL; Start 172; Stop 196
ctagcaggaactcctatggacaaga

SEQ ID NO: 321058 - DNA, 25 bp, Artificial
  probe
  misc_feature (1)..(25): SEQ ID NO: 2294; WAN024FJJ; Start 159; Stop 183
tgataagaatgcggtacaattagga

SEQ ID NO: 321059 - DNA, 25 bp, Artificial
  probe
  misc_feature (1)..(25): SEQ ID NO: 2294; WAN024FJJ; Start 161; Stop 185
ataagaatgcggtacaattaggatg

SEQ ID NO: 321060 - DNA, 25 bp, Artificial
  probe
  misc_feature (1)..(25): SEQ ID NO: 2294; WAN024FJJ; Start 158; Stop 182
atgataagaatgcggtacaattagg

SEQ ID NO: 321061 - DNA, 25 bp, Artificial
  probe
  misc_feature (1)..(25): SEQ ID NO: 2294; WAN024FJJ; Start 160; Stop 184
gataagaatgcggtacaattaggat

SEQ ID NO: 321062 - DNA, 25 bp, Artificial
  probe
  misc_feature (1)..(25): SEQ ID NO: 2294; WAN024FJJ; Start 162; Stop 186
taagaatgcggtacaattaggatgt

SEQ ID NO: 321063 - DNA, 25 bp, Artificial
  probe
  misc_feature (1)..(25): SEQ ID NO: 2294; WAN024FJJ; Start 163; Stop 187
aagaatgcggtacaattaggatgtt

SEQ ID NO: 321064 - DNA, 25 bp, Artificial
  probe
  misc_feature (1)..(25): SEQ ID NO: 2294; WAN024FJJ; Start 164; Stop 188
agaatgcggtacaattaggatgttc

SEQ ID NO: 321065 - DNA, 25 bp, Artificial
  probe
  misc_feature (1)..(25): SEQ ID NO: 2294; WAN024FJJ; Start 165; Stop 189
gaatgcggtacaattaggatgttca

SEQ ID NO: 321066 - DNA, 25 bp, Artificial
  probe
  misc_feature (1)..(25): SEQ ID NO: 2294; WAN024FJJ; Start 166; Stop 190
aatgcggtacaattaggatgttcac

SEQ ID NO: 321067 - DNA, 25 bp, Artificial
  probe
  misc_feature (1)..(25): SEQ ID NO: 2294; WAN024FJJ; Start 157; Stop 181
aatgataagaatgcggtacaattag

SEQ ID NO: 321068 - DNA, 25 bp, Artificial
  probe
  misc_feature (1)..(25): SEQ ID NO: 2294; WAN024FJJ; Start 56; Stop 80
ataaagatttagttgcgattggttt

SEQ ID NO: 321069 - DNA, 25 bp, Artificial
  probe
  misc_feature (1)..(25): SEQ ID NO: 2294; WAN024FJJ; Start 172; Stop 196
gtacaattaggatgttcacctttcg

SEQ ID NO: 321070 - DNA, 25 bp, Artificial
  probe
  misc_feature (1)..(25): SEQ ID NO: 2294; WAN024FJJ; Start 54; Stop 78
ctataaagatttagttgcgattggt

SEQ ID NO: 321071 - DNA, 25 bp, Artificial
  probe
  misc_feature (1)..(25): SEQ ID NO: 2294; WAN024FJJ; Start 82; Stop 106
ccagagcacacatcgagaaatatta

SEQ ID NO: 321072 - DNA, 25 bp, Artificial
  probe
  misc_feature (1)..(25): SEQ ID NO: 2294; WAN024FJJ; Start 83; Stop 107
cagagcacacatcgagaaatattat

SEQ ID NO: 321073 - DNA, 25 bp, Artificial
  probe
  misc_feature (1)..(25): SEQ ID NO: 2294; WAN024FJJ; Start 171; Stop 195
ggtacaattaggatgttcacctttc

SEQ ID NO: 321074 - DNA, 25 bp, Artificial
  probe
  misc_feature (1)..(25): SEQ ID NO: 2294; WAN024FJJ; Start 55; Stop 79
tataaagatttagttgcgattggtt

SEQ ID NO: 321075 - DNA, 25 bp, Artificial
  probe
  misc_feature (1)..(25): SEQ ID NO: 2294; WAN024FJJ; Start 84; Stop 108
agagcacacatcgagaaatattatt

SEQ ID NO: 321076 - DNA, 25 bp, Artificial
  probe
  misc_feature (1)..(25): SEQ ID NO: 2294; WAN024FJJ; Start 170; Stop 194
cggtacaattaggatgttcaccttt

SEQ ID NO: 321077 - DNA, 25 bp, Artificial
  probe
  misc_feature (1)..(25): SEQ ID NO: 2294; WAN024FJJ; Start 169; Stop 193
gcggtacaattaggatgttcacctt

SEQ ID NO: 321078 - DNA, 25 bp, Artificial
  probe
  misc_feature (1)..(25): SEQ ID NO: 2294; WAN024FJJ; Start 167; Stop 191
atgcggtacaattaggatgttcacc

SEQ ID NO: 321079 - DNA, 25 bp, Artificial
  probe
  misc_feature (1)..(25): SEQ ID NO: 2294; WAN024FJJ; Start 173; Stop 197
tacaattaggatgttcacctttcga

SEQ ID NO: 321080 - DNA, 25 bp, Artificial
  probe
  misc_feature (1)..(25): SEQ ID NO: 2294; WAN024FJJ; Start 156; Stop 180
aaatgataagaatgcggtacaatta

SEQ ID NO: 321081 - DNA, 25 bp, Artificial
  probe
  misc_feature (1)..(25): SEQ ID NO: 2294; WAN024FJJ; Start 174; Stop 198
acaattaggatgttcacctttcgat

SEQ ID NO: 321082 - DNA, 25 bp, Artificial
  probe
  misc_feature (1)..(25): SEQ ID NO: 2294; WAN024FJJ; Start 81; Stop 105
tccagagcacacatcgagaaatatt

SEQ ID NO: 321083 - DNA, 25 bp, Artificial
  probe
  misc_feature (1)..(25): SEQ ID NO: 2294; WAN024FJJ; Start 59; Stop 83
aagatttagttgcgattggttttcc

SEQ ID NO: 321084 - DNA, 25 bp, Artificial
  probe
  misc_feature (1)..(25): SEQ ID NO: 2294; WAN024FJJ; Start 80; Stop 104
ttccagagcacacatcgagaaatat

SEQ ID NO: 321085 - DNA, 25 bp, Artificial
  probe
  misc_feature (1)..(25): SEQ ID NO: 2294; WAN024FJJ; Start 175; Stop 199
caattaggatgttcacctttcgata

SEQ ID NO: 321086 - DNA, 25 bp, Artificial
  probe
  misc_feature (1)..(25): SEQ ID NO: 2294; WAN024FJJ; Start 58; Stop 82
aaagatttagttgcgattggttttc

SEQ ID NO: 321087 - DNA, 25 bp, Artificial
  probe
  misc_feature (1)..(25): SEQ ID NO: 2294; WAN024FJJ; Start 53; Stop 77
actataaagatttagttgcgattgg

SEQ ID NO: 321088 - DNA, 25 bp, Artificial
  probe
  misc_feature (1)..(25): SEQ ID NO: 2294; WAN024FJJ; Start 180; Stop 204
aggatgttcacctttcgataataaa

SEQ ID NO: 321089 - DNA, 25 bp, Artificial
  probe
  misc_feature (1)..(25): SEQ ID NO: 2294; WAN024FJJ; Start 176; Stop 200
aattaggatgttcacctttcgataa

SEQ ID NO: 321090 - DNA, 25 bp, Artificial
  probe
  misc_feature (1)..(25): SEQ ID NO: 2294; WAN024FJJ; Start 195; Stop 219
cgataataaaaggttaggcattgct

SEQ ID NO: 321091 - DNA, 25 bp, Artificial
  probe
  misc_feature (1)..(25): SEQ ID NO: 2295; WAN024FGY; Start 5; Stop 29
aggtgtatccaattcatcttcatct

SEQ ID NO: 321092 - DNA, 25 bp, Artificial
  probe
  misc_feature (1)..(25): SEQ ID NO: 2295; WAN024FGY; Start 4; Stop 28
gaggtgtatccaattcatcttcatc

SEQ ID NO: 321093 - DNA, 25 bp, Artificial
  probe
  misc_feature (1)..(25): SEQ ID NO: 2295; WAN024FGY; Start 6; Stop 30
ggtgtatccaattcatcttcatctt

SEQ ID NO: 321094 - DNA, 25 bp, Artificial
  probe
  misc_feature (1)..(25): SEQ ID NO: 2295; WAN024FGY; Start 8; Stop 32
tgtatccaattcatcttcatcttgt

SEQ ID NO: 321095 - DNA, 25 bp, Artificial
  probe
  misc_feature (1)..(25): SEQ ID NO: 2295; WAN024FGY; Start 9; Stop 33
gtatccaattcatcttcatcttgtg

SEQ ID NO: 321096 - DNA, 25 bp, Artificial
  probe
  misc_feature (1)..(25): SEQ ID NO: 2295; WAN024FGY; Start 7; Stop 31
gtgtatccaattcatcttcatcttg

SEQ ID NO: 321097 - DNA, 25 bp, Artificial
  probe
  misc_feature (1)..(25): SEQ ID NO: 2295; WAN024FGY; Start 3; Stop 27
ggaggtgtatccaattcatcttcat

SEQ ID NO: 321098 - DNA, 25 bp, Artificial
  probe
  misc_feature (1)..(25): SEQ ID NO: 2295; WAN024FGY; Start 10; Stop 34
tatccaattcatcttcatcttgtga

SEQ ID NO: 321099 - DNA, 25 bp, Artificial
  probe
  misc_feature (1)..(25): SEQ ID NO: 2295; WAN024FGY; Start 169; Stop 193
attcaactgtttctgccatatcaaa

SEQ ID NO: 321100 - DNA, 25 bp, Artificial
  probe
  misc_feature (1)..(25): SEQ ID NO: 2295; WAN024FGY; Start 167; Stop 191
caattcaactgtttctgccatatca

SEQ ID NO: 321101 - DNA, 25 bp, Artificial
  probe
  misc_feature (1)..(25): SEQ ID NO: 2295; WAN024FGY; Start 168; Stop 192
aattcaactgtttctgccatatcaa

SEQ ID NO: 321102 - DNA, 25 bp, Artificial
  probe
  misc_feature (1)..(25): SEQ ID NO: 2295; WAN024FGY; Start 59; Stop 83
tggagaaacgactgaatctgttgta

SEQ ID NO: 321103 - DNA, 25 bp, Artificial
  probe
  misc_feature (1)..(25): SEQ ID NO: 2295; WAN024FGY; Start 63; Stop 87
gaaacgactgaatctgttgtacgaa

SEQ ID NO: 321104 - DNA, 25 bp, Artificial
  probe
  misc_feature (1)..(25): SEQ ID NO: 2295; WAN024FGY; Start 60; Stop 84
ggagaaacgactgaatctgttgtac

SEQ ID NO: 321105 - DNA, 25 bp, Artificial
  probe
  misc_feature (1)..(25): SEQ ID NO: 2295; WAN024FGY; Start 11; Stop 35
atccaattcatcttcatcttgtgaa

SEQ ID NO: 321106 - DNA, 25 bp, Artificial
  probe
  misc_feature (1)..(25): SEQ ID NO: 2295; WAN024FGY; Start 64; Stop 88
aaacgactgaatctgttgtacgaac

SEQ ID NO: 321107 - DNA, 25 bp, Artificial
  probe
  misc_feature (1)..(25): SEQ ID NO: 2295; WAN024FGY; Start 61; Stop 85
gagaaacgactgaatctgttgtacg

SEQ ID NO: 321108 - DNA, 25 bp, Artificial
  probe
  misc_feature (1)..(25): SEQ ID NO: 2295; WAN024FGY; Start 68; Stop 92
gactgaatctgttgtacgaacaatc

SEQ ID NO: 321109 - DNA, 25 bp, Artificial
  probe
  misc_feature (1)..(25): SEQ ID NO: 2295; WAN024FGY; Start 192; Stop 216
aaatgacgatcaaagccatgtgaat

SEQ ID NO: 321110 - DNA, 25 bp, Artificial
  probe
  misc_feature (1)..(25): SEQ ID NO: 2295; WAN024FGY; Start 62; Stop 86
agaaacgactgaatctgttgtacga

SEQ ID NO: 321111 - DNA, 25 bp, Artificial
  probe
  misc_feature (1)..(25): SEQ ID NO: 2295; WAN024FGY; Start 56; Stop 80
gactggagaaacgactgaatctgtt

SEQ ID NO: 321112 - DNA, 25 bp, Artificial
  probe
  misc_feature (1)..(25): SEQ ID NO: 2295; WAN024FGY; Start 222; Stop 246
ggtttcactgtctcacggtagttag

SEQ ID NO: 321113 - DNA, 25 bp, Artificial
  probe
  misc_feature (1)..(25): SEQ ID NO: 2295; WAN024FGY; Start 69; Stop 93
actgaatctgttgtacgaacaatcg

SEQ ID NO: 321114 - DNA, 25 bp, Artificial
  probe
  misc_feature (1)..(25): SEQ ID NO: 2295; WAN024FGY; Start 67; Stop 91
cgactgaatctgttgtacgaacaat

SEQ ID NO: 321115 - DNA, 25 bp, Artificial
  probe
  misc_feature (1)..(25): SEQ ID NO: 2295; WAN024FGY; Start 58; Stop 82
ctggagaaacgactgaatctgttgt

SEQ ID NO: 321116 - DNA, 25 bp, Artificial
  probe
  misc_feature (1)..(25): SEQ ID NO: 2295; WAN024FGY; Start 57; Stop 81
actggagaaacgactgaatctgttg

SEQ ID NO: 321117 - DNA, 25 bp, Artificial
  probe
  misc_feature (1)..(25): SEQ ID NO: 2295; WAN024FGY; Start 193; Stop 217
aatgacgatcaaagccatgtgaatg

SEQ ID NO: 321118 - DNA, 25 bp, Artificial
  probe
  misc_feature (1)..(25): SEQ ID NO: 2295; WAN024FGY; Start 170; Stop 194
ttcaactgtttctgccatatcaaaa

SEQ ID NO: 321119 - DNA, 25 bp, Artificial
  probe
  misc_feature (1)..(25): SEQ ID NO: 2295; WAN024FGY; Start 171; Stop 195
tcaactgtttctgccatatcaaaat

SEQ ID NO: 321120 - DNA, 25 bp, Artificial
  probe
  misc_feature (1)..(25): SEQ ID NO: 2295; WAN024FGY; Start 172; Stop 196
caactgtttctgccatatcaaaatg

SEQ ID NO: 321121 - DNA, 25 bp, Artificial
  probe
  misc_feature (1)..(25): SEQ ID NO: 2295; WAN024FGY; Start 70; Stop 94
ctgaatctgttgtacgaacaatcga

SEQ ID NO: 321122 - DNA, 25 bp, Artificial
  probe
  misc_feature (1)..(25): SEQ ID NO: 2295; WAN024FGY; Start 17; Stop 41
ttcatcttcatcttgtgaaattggg

SEQ ID NO: 321123 - DNA, 25 bp, Artificial
  probe
  misc_feature (1)..(25): SEQ ID NO: 2295; WAN024FGY; Start 157; Stop 181
tttgttttggcaattcaactgtttc

SEQ ID NO: 321124 - DNA, 25 bp, Artificial
  probe
  misc_feature (1)..(25): SEQ ID NO: 2296; WAN024FZ9; Start 714; Stop 738
ggcttattatatcgctatcaatcgc

SEQ ID NO: 321125 - DNA, 25 bp, Artificial
  probe
  misc_feature (1)..(25): SEQ ID NO: 2296; WAN024FZ9; Start 597; Stop 621
gttcttgtcctatcttgtgattgtg

SEQ ID NO: 321126 - DNA, 25 bp, Artificial
  probe
  misc_feature (1)..(25): SEQ ID NO: 2296; WAN024FZ9; Start 594; Stop 618
ttcgttcttgtcctatcttgtgatt

SEQ ID NO: 321127 - DNA, 25 bp, Artificial
  probe
  misc_feature (1)..(25): SEQ ID NO: 2296; WAN024FZ9; Start 705; Stop 729
ttcctacttggcttattatatcgct

SEQ ID NO: 321128 - DNA, 25 bp, Artificial
  probe
  misc_feature (1)..(25): SEQ ID NO: 2296; WAN024FZ9; Start 607; Stop 631
tatcttgtgattgtgctcttctctc

SEQ ID NO: 321129 - DNA, 25 bp, Artificial
  probe
  misc_feature (1)..(25): SEQ ID NO: 2296; WAN024FZ9; Start 606; Stop 630
ctatcttgtgattgtgctcttctct

SEQ ID NO: 321130 - DNA, 25 bp, Artificial
  probe
  misc_feature (1)..(25): SEQ ID NO: 2296; WAN024FZ9; Start 593; Stop 617
cttcgttcttgtcctatcttgtgat

SEQ ID NO: 321131 - DNA, 25 bp, Artificial
  probe
  misc_feature (1)..(25): SEQ ID NO: 2296; WAN024FZ9; Start 715; Stop 739
gcttattatatcgctatcaatcgct

SEQ ID NO: 321132 - DNA, 25 bp, Artificial
  probe
  misc_feature (1)..(25): SEQ ID NO: 2296; WAN024FZ9; Start 595; Stop 619
tcgttcttgtcctatcttgtgattg

SEQ ID NO: 321133 - DNA, 25 bp, Artificial
  probe
  misc_feature (1)..(25): SEQ ID NO: 2296; WAN024FZ9; Start 219; Stop 243
tattcgcaatgtcagtgttatcatc

SEQ ID NO: 321134 - DNA, 25 bp, Artificial
  probe
  misc_feature (1)..(25): SEQ ID NO: 2296; WAN024FZ9; Start 713; Stop 737
tggcttattatatcgctatcaatcg

SEQ ID NO: 321135 - DNA, 25 bp, Artificial
  probe
  misc_feature (1)..(25): SEQ ID NO: 2296; WAN024FZ9; Start 596; Stop 620
cgttcttgtcctatcttgtgattgt

SEQ ID NO: 321136 - DNA, 25 bp, Artificial
  probe
  misc_feature (1)..(25): SEQ ID NO: 2296; WAN024FZ9; Start 706; Stop 730
tcctacttggcttattatatcgcta

SEQ ID NO: 321137 - DNA, 25 bp, Artificial
  probe
  misc_feature (1)..(25): SEQ ID NO: 2296; WAN024FZ9; Start 605; Stop 629
cctatcttgtgattgtgctcttctc

SEQ ID NO: 321138 - DNA, 25 bp, Artificial
  probe
  misc_feature (1)..(25): SEQ ID NO: 2296; WAN024FZ9; Start 218; Stop 242
atattcgcaatgtcagtgttatcat

SEQ ID NO: 321139 - DNA, 25 bp, Artificial
  probe
  misc_feature (1)..(25): SEQ ID NO: 2296; WAN024FZ9; Start 598; Stop 622
ttcttgtcctatcttgtgattgtgc

SEQ ID NO: 321140 - DNA, 25 bp, Artificial
  probe
  misc_feature (1)..(25): SEQ ID NO: 2296; WAN024FZ9; Start 718; Stop 742
tattatatcgctatcaatcgcttgc

SEQ ID NO: 321141 - DNA, 25 bp, Artificial
  probe
  misc_feature (1)..(25): SEQ ID NO: 2296; WAN024FZ9; Start 603; Stop 627
gtcctatcttgtgattgtgctcttc

SEQ ID NO: 321142 - DNA, 25 bp, Artificial
  probe
  misc_feature (1)..(25): SEQ ID NO: 2296; WAN024FZ9; Start 604; Stop 628
tcctatcttgtgattgtgctcttct

SEQ ID NO: 321143 - DNA, 25 bp, Artificial
  probe
  misc_feature (1)..(25): SEQ ID NO: 2296; WAN024FZ9; Start 289; Stop 313
gcagttaagtatatcggaagttctt

SEQ ID NO: 321144 - DNA, 25 bp, Artificial
  probe
  misc_feature (1)..(25): SEQ ID NO: 2296; WAN024FZ9; Start 592; Stop 616
acttcgttcttgtcctatcttgtga

SEQ ID NO: 321145 - DNA, 25 bp, Artificial
  probe
  misc_feature (1)..(25): SEQ ID NO: 2296; WAN024FZ9; Start 600; Stop 624
cttgtcctatcttgtgattgtgctc

SEQ ID NO: 321146 - DNA, 25 bp, Artificial
  probe
  misc_feature (1)..(25): SEQ ID NO: 2296; WAN024FZ9; Start 616; Stop 640
attgtgctcttctctcatcagtcat

SEQ ID NO: 321147 - DNA, 25 bp, Artificial
  probe
  misc_feature (1)..(25): SEQ ID NO: 2296; WAN024FZ9; Start 617; Stop 641
ttgtgctcttctctcatcagtcatt

SEQ ID NO: 321148 - DNA, 25 bp, Artificial
  probe
  misc_feature (1)..(25): SEQ ID NO: 2296; WAN024FZ9; Start 602; Stop 626
tgtcctatcttgtgattgtgctctt

SEQ ID NO: 321149 - DNA, 25 bp, Artificial
  probe
  misc_feature (1)..(25): SEQ ID NO: 2296; WAN024FZ9; Start 601; Stop 625
ttgtcctatcttgtgattgtgctct

SEQ ID NO: 321150 - DNA, 25 bp, Artificial
  probe
  misc_feature (1)..(25): SEQ ID NO: 2296; WAN024FZ9; Start 599; Stop 623
tcttgtcctatcttgtgattgtgct

SEQ ID NO: 321151 - DNA, 25 bp, Artificial
  probe
  misc_feature (1)..(25): SEQ ID NO: 2296; WAN024FZ9; Start 707; Stop 731
cctacttggcttattatatcgctat

SEQ ID NO: 321152 - DNA, 25 bp, Artificial
  probe
  misc_feature (1)..(25): SEQ ID NO: 2296; WAN024FZ9; Start 220; Stop 244
attcgcaatgtcagtgttatcatcg

SEQ ID NO: 321153 - DNA, 25 bp, Artificial
  probe
  misc_feature (1)..(25): SEQ ID NO: 2296; WAN024FZ9; Start 610; Stop 634
cttgtgattgtgctcttctctcatc

SEQ ID NO: 321154 - DNA, 25 bp, Artificial
  probe
  misc_feature (1)..(25): SEQ ID NO: 2296; WAN024FZ9; Start 773; Stop 797
gctatgtagtatggacggtcttgtt

SEQ ID NO: 321155 - DNA, 25 bp, Artificial
  probe
  misc_feature (1)..(25): SEQ ID NO: 2296; WAN024FZ9; Start 217; Stop 241
aatattcgcaatgtcagtgttatca

SEQ ID NO: 321156 - DNA, 25 bp, Artificial
  probe
  misc_feature (1)..(25): SEQ ID NO: 2296; WAN024FZ9; Start 615; Stop 639
gattgtgctcttctctcatcagtca

SEQ ID NO: 321157 - DNA, 25 bp, Artificial
  probe
  misc_feature (1)..(25): SEQ ID NO: 2297; WAN024GF3; Start 3; Stop 27
ggaggttgttgatgaagtagaagaa

SEQ ID NO: 321158 - DNA, 25 bp, Artificial
  probe
  misc_feature (1)..(25): SEQ ID NO: 2297; WAN024GF3; Start 1; Stop 25
atggaggttgttgatgaagtagaag

SEQ ID NO: 321159 - DNA, 25 bp, Artificial
  probe
  misc_feature (1)..(25): SEQ ID NO: 2297; WAN024GF3; Start 4; Stop 28
gaggttgttgatgaagtagaagaac

SEQ ID NO: 321160 - DNA, 25 bp, Artificial
  probe
  misc_feature (1)..(25): SEQ ID NO: 2297; WAN024GF3; Start 2; Stop 26
tggaggttgttgatgaagtagaaga

SEQ ID NO: 321161 - DNA, 25 bp, Artificial
  probe
  misc_feature (1)..(25): SEQ ID NO: 2297; WAN024GF3; Start 5; Stop 29
aggttgttgatgaagtagaagaact

SEQ ID NO: 321162 - DNA, 25 bp, Artificial
  probe
  misc_feature (1)..(25): SEQ ID NO: 2297; WAN024GF3; Start 369; Stop 393
agtcattccagtagtgaacattgta

SEQ ID NO: 321163 - DNA, 25 bp, Artificial
  probe
  misc_feature (1)..(25): SEQ ID NO: 2297; WAN024GF3; Start 368; Stop 392
cagtcattccagtagtgaacattgt

SEQ ID NO: 321164 - DNA, 25 bp, Artificial
  probe
  misc_feature (1)..(25): SEQ ID NO: 2297; WAN024GF3; Start 370; Stop 394
gtcattccagtagtgaacattgtac

SEQ ID NO: 321165 - DNA, 25 bp, Artificial
  probe
  misc_feature (1)..(25): SEQ ID NO: 2297; WAN024GF3; Start 387; Stop 411
cattgtacttgtcattaagcacttc

SEQ ID NO: 321166 - DNA, 25 bp, Artificial
  probe
  misc_feature (1)..(25): SEQ ID NO: 2297; WAN024GF3; Start 367; Stop 391
ccagtcattccagtagtgaacattg

SEQ ID NO: 321167 - DNA, 25 bp, Artificial
  probe
  misc_feature (1)..(25): SEQ ID NO: 2297; WAN024GF3; Start 388; Stop 412
attgtacttgtcattaagcacttct

SEQ ID NO: 321168 - DNA, 25 bp, Artificial
  probe
  misc_feature (1)..(25): SEQ ID NO: 2297; WAN024GF3; Start 386; Stop 410
acattgtacttgtcattaagcactt

SEQ ID NO: 321169 - DNA, 25 bp, Artificial
  probe
  misc_feature (1)..(25): SEQ ID NO: 2297; WAN024GF3; Start 385; Stop 409
aacattgtacttgtcattaagcact

SEQ ID NO: 321170 - DNA, 25 bp, Artificial
  probe
  misc_feature (1)..(25): SEQ ID NO: 2297; WAN024GF3; Start 383; Stop 407
tgaacattgtacttgtcattaagca

SEQ ID NO: 321171 - DNA, 25 bp, Artificial
  probe
  misc_feature (1)..(25): SEQ ID NO: 2297; WAN024GF3; Start 384; Stop 408
gaacattgtacttgtcattaagcac

SEQ ID NO: 321172 - DNA, 25 bp, Artificial
  probe
  misc_feature (1)..(25): SEQ ID NO: 2297; WAN024GF3; Start 382; Stop 406
gtgaacattgtacttgtcattaagc

SEQ ID NO: 321173 - DNA, 25 bp, Artificial
  probe
  misc_feature (1)..(25): SEQ ID NO: 2297; WAN024GF3; Start 390; Stop 414
tgtacttgtcattaagcacttctaa

SEQ ID NO: 321174 - DNA, 25 bp, Artificial
  probe
  misc_feature (1)..(25): SEQ ID NO: 2297; WAN024GF3; Start 389; Stop 413
ttgtacttgtcattaagcacttcta

SEQ ID NO: 321175 - DNA, 25 bp, Artificial
  probe
  misc_feature (1)..(25): SEQ ID NO: 2297; WAN024GF3; Start 374; Stop 398
ttccagtagtgaacattgtacttgt

SEQ ID NO: 321176 - DNA, 25 bp, Artificial
  probe
  misc_feature (1)..(25): SEQ ID NO: 2297; WAN024GF3; Start 371; Stop 395
tcattccagtagtgaacattgtact

SEQ ID NO: 321177 - DNA, 25 bp, Artificial
  probe
  misc_feature (1)..(25): SEQ ID NO: 2297; WAN024GF3; Start 375; Stop 399
tccagtagtgaacattgtacttgtc

SEQ ID NO: 321178 - DNA, 25 bp, Artificial
  probe
  misc_feature (1)..(25): SEQ ID NO: 2297; WAN024GF3; Start 376; Stop 400
ccagtagtgaacattgtacttgtca

SEQ ID NO: 321179 - DNA, 25 bp, Artificial
  probe
  misc_feature (1)..(25): SEQ ID NO: 2297; WAN024GF3; Start 377; Stop 401
cagtagtgaacattgtacttgtcat

SEQ ID NO: 321180 - DNA, 25 bp, Artificial
  probe
  misc_feature (1)..(25): SEQ ID NO: 2297; WAN024GF3; Start 373; Stop 397
attccagtagtgaacattgtacttg

SEQ ID NO: 321181 - DNA, 25 bp, Artificial
  probe
  misc_feature (1)..(25): SEQ ID NO: 2297; WAN024GF3; Start 372; Stop 396
cattccagtagtgaacattgtactt

SEQ ID NO: 321182 - DNA, 25 bp, Artificial
  probe
  misc_feature (1)..(25): SEQ ID NO: 2297; WAN024GF3; Start 378; Stop 402
agtagtgaacattgtacttgtcatt

SEQ ID NO: 321183 - DNA, 25 bp, Artificial
  probe
  misc_feature (1)..(25): SEQ ID NO: 2297; WAN024GF3; Start 294; Stop 318
gcttattgataatgtcgtgtttctt

SEQ ID NO: 321184 - DNA, 25 bp, Artificial
  probe
  misc_feature (1)..(25): SEQ ID NO: 2297; WAN024GF3; Start 381; Stop 405
agtgaacattgtacttgtcattaag

SEQ ID NO: 321185 - DNA, 25 bp, Artificial
  probe
  misc_feature (1)..(25): SEQ ID NO: 2297; WAN024GF3; Start 233; Stop 257
taatcccagagcgaaataatattgc

SEQ ID NO: 321186 - DNA, 25 bp, Artificial
  probe
  misc_feature (1)..(25): SEQ ID NO: 2297; WAN024GF3; Start 6; Stop 30
ggttgttgatgaagtagaagaactt

SEQ ID NO: 321187 - DNA, 25 bp, Artificial
  probe
  misc_feature (1)..(25): SEQ ID NO: 2297; WAN024GF3; Start 379; Stop 403
gtagtgaacattgtacttgtcatta

SEQ ID NO: 321188 - DNA, 25 bp, Artificial
  probe
  misc_feature (1)..(25): SEQ ID NO: 2297; WAN024GF3; Start 132; Stop 156
tcaaggtcgcatccagatagatttc

SEQ ID NO: 321189 - DNA, 25 bp, Artificial
  probe
  misc_feature (1)..(25): SEQ ID NO: 2297; WAN024GF3; Start 231; Stop 255
ggtaatcccagagcgaaataatatt

SEQ ID NO: 321190 - DNA, 25 bp, Artificial
  probe
  misc_feature (1)..(25): SEQ ID NO: 2298; WAN024CO9; Start 67; Stop 91
ctgcctcagtattgtccaaggttac

SEQ ID NO: 321191 - DNA, 25 bp, Artificial
  probe
  misc_feature (1)..(25): SEQ ID NO: 2298; WAN024CO9; Start 68; Stop 92
tgcctcagtattgtccaaggttaca

SEQ ID NO: 321192 - DNA, 25 bp, Artificial
  probe
  misc_feature (1)..(25): SEQ ID NO: 2298; WAN024CO9; Start 84; Stop 108
aaggttacaatttcatccggcttaa

SEQ ID NO: 321193 - DNA, 25 bp, Artificial
  probe
  misc_feature (1)..(25): SEQ ID NO: 2298; WAN024CO9; Start 69; Stop 93
gcctcagtattgtccaaggttacaa

SEQ ID NO: 321194 - DNA, 25 bp, Artificial
  probe
  misc_feature (1)..(25): SEQ ID NO: 2298; WAN024CO9; Start 83; Stop 107
caaggttacaatttcatccggctta

SEQ ID NO: 321195 - DNA, 25 bp, Artificial
  probe
  misc_feature (1)..(25): SEQ ID NO: 2298; WAN024CO9; Start 66; Stop 90
gctgcctcagtattgtccaaggtta

SEQ ID NO: 321196 - DNA, 25 bp, Artificial
  probe
  misc_feature (1)..(25): SEQ ID NO: 2298; WAN024CO9; Start 78; Stop 102
ttgtccaaggttacaatttcatccg

SEQ ID NO: 321197 - DNA, 25 bp, Artificial
  probe
  misc_feature (1)..(25): SEQ ID NO: 2298; WAN024CO9; Start 70; Stop 94
cctcagtattgtccaaggttacaat

SEQ ID NO: 321198 - DNA, 25 bp, Artificial
  probe
  misc_feature (1)..(25): SEQ ID NO: 2298; WAN024CO9; Start 71; Stop 95
ctcagtattgtccaaggttacaatt

SEQ ID NO: 321199 - DNA, 25 bp, Artificial
  probe
  misc_feature (1)..(25): SEQ ID NO: 2298; WAN024CO9; Start 79; Stop 103
tgtccaaggttacaatttcatccgg

SEQ ID NO: 321200 - DNA, 25 bp, Artificial
  probe
  misc_feature (1)..(25): SEQ ID NO: 2298; WAN024CO9; Start 82; Stop 106
ccaaggttacaatttcatccggctt

SEQ ID NO: 321201 - DNA, 25 bp, Artificial
  probe
  misc_feature (1)..(25): SEQ ID NO: 2298; WAN024CO9; Start 80; Stop 104
gtccaaggttacaatttcatccggc

SEQ ID NO: 321202 - DNA, 25 bp, Artificial
  probe
  misc_feature (1)..(25): SEQ ID NO: 2298; WAN024CO9; Start 77; Stop 101
attgtccaaggttacaatttcatcc

SEQ ID NO: 321203 - DNA, 25 bp, Artificial
  probe
  misc_feature (1)..(25): SEQ ID NO: 2298; WAN024CO9; Start 81; Stop 105
tccaaggttacaatttcatccggct

SEQ ID NO: 321204 - DNA, 25 bp, Artificial
  probe
  misc_feature (1)..(25): SEQ ID NO: 2298; WAN024CO9; Start 74; Stop 98
agtattgtccaaggttacaatttca

SEQ ID NO: 321205 - DNA, 25 bp, Artificial
  probe
  misc_feature (1)..(25): SEQ ID NO: 2298; WAN024CO9; Start 72; Stop 96
tcagtattgtccaaggttacaattt

SEQ ID NO: 321206 - DNA, 25 bp, Artificial
  probe
  misc_feature (1)..(25): SEQ ID NO: 2298; WAN024CO9; Start 73; Stop 97
cagtattgtccaaggttacaatttc

SEQ ID NO: 321207 - DNA, 25 bp, Artificial
  probe
  misc_feature (1)..(25): SEQ ID NO: 2298; WAN024CO9; Start 75; Stop 99
gtattgtccaaggttacaatttcat

SEQ ID NO: 321208 - DNA, 25 bp, Artificial
  probe
  misc_feature (1)..(25): SEQ ID NO: 2298; WAN024CO9; Start 76; Stop 100
tattgtccaaggttacaatttcatc

SEQ ID NO: 321209 - DNA, 25 bp, Artificial
  probe
  misc_feature (1)..(25): SEQ ID NO: 2299; WAN024D33; Start 165; Stop 189
ttcggacaatcagataaccttactt

SEQ ID NO: 321210 - DNA, 25 bp, Artificial
  probe
  misc_feature (1)..(25): SEQ ID NO: 2299; WAN024D33; Start 164; Stop 188
gttcggacaatcagataaccttact

SEQ ID NO: 321211 - DNA, 25 bp, Artificial
  probe
  misc_feature (1)..(25): SEQ ID NO: 2299; WAN024D33; Start 163; Stop 187
agttcggacaatcagataaccttac

SEQ ID NO: 321212 - DNA, 25 bp, Artificial
  probe
  misc_feature (1)..(25): SEQ ID NO: 2299; WAN024D33; Start 166; Stop 190
tcggacaatcagataaccttacttg

SEQ ID NO: 321213 - DNA, 25 bp, Artificial
  probe
  misc_feature (1)..(25): SEQ ID NO: 2299; WAN024D33; Start 162; Stop 186
tagttcggacaatcagataacctta

SEQ ID NO: 321214 - DNA, 25 bp, Artificial
  probe
  misc_feature (1)..(25): SEQ ID NO: 2299; WAN024D33; Start 161; Stop 185
ctagttcggacaatcagataacctt

SEQ ID NO: 321215 - DNA, 25 bp, Artificial
  probe
  misc_feature (1)..(25): SEQ ID NO: 2299; WAN024D33; Start 167; Stop 191
cggacaatcagataaccttacttgc

SEQ ID NO: 321216 - DNA, 25 bp, Artificial
  probe
  misc_feature (1)..(25): SEQ ID NO: 2299; WAN024D33; Start 243; Stop 267
taagagagtccgtcatattggagat

SEQ ID NO: 321217 - DNA, 25 bp, Artificial
  probe
  misc_feature (1)..(25): SEQ ID NO: 2299; WAN024D33; Start 141; Stop 165
aatattcctcaacaagcaagctagt

SEQ ID NO: 321218 - DNA, 25 bp, Artificial
  probe
  misc_feature (1)..(25): SEQ ID NO: 2299; WAN024D33; Start 157; Stop 181
caagctagttcggacaatcagataa

SEQ ID NO: 321219 - DNA, 25 bp, Artificial
  probe
  misc_feature (1)..(25): SEQ ID NO: 2299; WAN024D33; Start 160; Stop 184
gctagttcggacaatcagataacct

SEQ ID NO: 321220 - DNA, 25 bp, Artificial
  probe
  misc_feature (1)..(25): SEQ ID NO: 2299; WAN024D33; Start 142; Stop 166
atattcctcaacaagcaagctagtt

SEQ ID NO: 321221 - DNA, 25 bp, Artificial
  probe
  misc_feature (1)..(25): SEQ ID NO: 2299; WAN024D33; Start 242; Stop 266
gtaagagagtccgtcatattggaga

SEQ ID NO: 321222 - DNA, 25 bp, Artificial
  probe
  misc_feature (1)..(25): SEQ ID NO: 2299; WAN024D33; Start 158; Stop 182
aagctagttcggacaatcagataac

SEQ ID NO: 321223 - DNA, 25 bp, Artificial
  probe
  misc_feature (1)..(25): SEQ ID NO: 2299; WAN024D33; Start 289; Stop 313
agatattggaataatggcttgggaa

SEQ ID NO: 321224 - DNA, 25 bp, Artificial
  probe
  misc_feature (1)..(25): SEQ ID NO: 2299; WAN024D33; Start 143; Stop 167
tattcctcaacaagcaagctagttc

SEQ ID NO: 321225 - DNA, 25 bp, Artificial
  probe
  misc_feature (1)..(25): SEQ ID NO: 2299; WAN024D33; Start 393; Stop 417
taatcaagcagcagtccatctttat

SEQ ID NO: 321226 - DNA, 25 bp, Artificial
  probe
  misc_feature (1)..(25): SEQ ID NO: 2299; WAN024D33; Start 288; Stop 312
aagatattggaataatggcttggga

SEQ ID NO: 321227 - DNA, 25 bp, Artificial
  probe
  misc_feature (1)..(25): SEQ ID NO: 2299; WAN024D33; Start 291; Stop 315
atattggaataatggcttgggaagt

SEQ ID NO: 321228 - DNA, 25 bp, Artificial
  probe
  misc_feature (1)..(25): SEQ ID NO: 2299; WAN024D33; Start 290; Stop 314
gatattggaataatggcttgggaag

SEQ ID NO: 321229 - DNA, 25 bp, Artificial
  probe
  misc_feature (1)..(25): SEQ ID NO: 2299; WAN024D33; Start 292; Stop 316
tattggaataatggcttgggaagtt

SEQ ID NO: 321230 - DNA, 25 bp, Artificial
  probe
  misc_feature (1)..(25): SEQ ID NO: 2299; WAN024D33; Start 244; Stop 268
aagagagtccgtcatattggagatc

SEQ ID NO: 321231 - DNA, 25 bp, Artificial
  probe
  misc_feature (1)..(25): SEQ ID NO: 2299; WAN024D33; Start 238; Stop 262
cagcgtaagagagtccgtcatattg

SEQ ID NO: 321232 - DNA, 25 bp, Artificial
  probe
  misc_feature (1)..(25): SEQ ID NO: 2299; WAN024D33; Start 287; Stop 311
aaagatattggaataatggcttggg

SEQ ID NO: 321233 - DNA, 25 bp, Artificial
  probe
  misc_feature (1)..(25): SEQ ID NO: 2299; WAN024D33; Start 168; Stop 192
ggacaatcagataaccttacttgca

SEQ ID NO: 321234 - DNA, 25 bp, Artificial
  probe
  misc_feature (1)..(25): SEQ ID NO: 2299; WAN024D33; Start 169; Stop 193
gacaatcagataaccttacttgcat

SEQ ID NO: 321235 - DNA, 25 bp, Artificial
  probe
  misc_feature (1)..(25): SEQ ID NO: 2299; WAN024D33; Start 392; Stop 416
gtaatcaagcagcagtccatcttta

SEQ ID NO: 321236 - DNA, 25 bp, Artificial
  probe
  misc_feature (1)..(25): SEQ ID NO: 2299; WAN024D33; Start 297; Stop 321
gaataatggcttgggaagtttgttg

SEQ ID NO: 321237 - DNA, 25 bp, Artificial
  probe
  misc_feature (1)..(25): SEQ ID NO: 2299; WAN024D33; Start 293; Stop 317
attggaataatggcttgggaagttt

SEQ ID NO: 321238 - DNA, 25 bp, Artificial
  probe
  misc_feature (1)..(25): SEQ ID NO: 2299; WAN024D33; Start 170; Stop 194
acaatcagataaccttacttgcatt

SEQ ID NO: 321239 - DNA, 25 bp, Artificial
  probe
  misc_feature (1)..(25): SEQ ID NO: 2299; WAN024D33; Start 394; Stop 418
aatcaagcagcagtccatctttatc

SEQ ID NO: 321240 - DNA, 25 bp, Artificial
  probe
  misc_feature (1)..(25): SEQ ID NO: 2299; WAN024D33; Start 241; Stop 265
cgtaagagagtccgtcatattggag

SEQ ID NO: 321241 - DNA, 25 bp, Artificial
  probe
  misc_feature (1)..(25): SEQ ID NO: 2299; WAN024D33; Start 159; Stop 183
agctagttcggacaatcagataacc

SEQ ID NO: 321242 - DNA, 25 bp, Artificial
  probe
  misc_feature (1)..(25): SEQ ID NO: 2300; WAN024AXO; Start 890; Stop 914
cggttattactcgtgaatatccagc

SEQ ID NO: 321243 - DNA, 25 bp, Artificial
  probe
  misc_feature (1)..(25): SEQ ID NO: 2300; WAN024AXO; Start 938; Stop 962
cctactatccgatcaacgatgagaa

SEQ ID NO: 321244 - DNA, 25 bp, Artificial
  probe
  misc_feature (1)..(25): SEQ ID NO: 2300; WAN024AXO; Start 891; Stop 915
ggttattactcgtgaatatccagct

SEQ ID NO: 321245 - DNA, 25 bp, Artificial
  probe
  misc_feature (1)..(25): SEQ ID NO: 2300; WAN024AXO; Start 173; Stop 197
gtgcccatatcttccatacttctaa

SEQ ID NO: 321246 - DNA, 25 bp, Artificial
  probe
  misc_feature (1)..(25): SEQ ID NO: 2300; WAN024AXO; Start 785; Stop 809
aggagaattatcaaggaaatgctgt

SEQ ID NO: 321247 - DNA, 25 bp, Artificial
  probe
  misc_feature (1)..(25): SEQ ID NO: 2300; WAN024AXO; Start 784; Stop 808
gaggagaattatcaaggaaatgctg

SEQ ID NO: 321248 - DNA, 25 bp, Artificial
  probe
  misc_feature (1)..(25): SEQ ID NO: 2300; WAN024AXO; Start 1085; Stop 1109
aggttgtggagaaagagttaggtaa

SEQ ID NO: 321249 - DNA, 25 bp, Artificial
  probe
  misc_feature (1)..(25): SEQ ID NO: 2300; WAN024AXO; Start 174; Stop 198
tgcccatatcttccatacttctaat

SEQ ID NO: 321250 - DNA, 25 bp, Artificial
  probe
  misc_feature (1)..(25): SEQ ID NO: 2300; WAN024AXO; Start 524; Stop 548
ttccagttcgtctaacctttgataa

SEQ ID NO: 321251 - DNA, 25 bp, Artificial
  probe
  misc_feature (1)..(25): SEQ ID NO: 2300; WAN024AXO; Start 525; Stop 549
tccagttcgtctaacctttgataat

SEQ ID NO: 321252 - DNA, 25 bp, Artificial
  probe
  misc_feature (1)..(25): SEQ ID NO: 2300; WAN024AXO; Start 523; Stop 547
cttccagttcgtctaacctttgata

SEQ ID NO: 321253 - DNA, 25 bp, Artificial
  probe
  misc_feature (1)..(25): SEQ ID NO: 2300; WAN024AXO; Start 827; Stop 851
gtgaaatcccttatactcgcattat

SEQ ID NO: 321254 - DNA, 25 bp, Artificial
  probe
  misc_feature (1)..(25): SEQ ID NO: 2300; WAN024AXO; Start 783; Stop 807
cgaggagaattatcaaggaaatgct

SEQ ID NO: 321255 - DNA, 25 bp, Artificial
  probe
  misc_feature (1)..(25): SEQ ID NO: 2300; WAN024AXO; Start 250; Stop 274
aactcacctgtcgcaaactataaag

SEQ ID NO: 321256 - DNA, 25 bp, Artificial
  probe
  misc_feature (1)..(25): SEQ ID NO: 2300; WAN024AXO; Start 1081; Stop 1105
cttgaggttgtggagaaagagttag

SEQ ID NO: 321257 - DNA, 25 bp, Artificial
  probe
  misc_feature (1)..(25): SEQ ID NO: 2300; WAN024AXO; Start 786; Stop 810
ggagaattatcaaggaaatgctgta

SEQ ID NO: 321258 - DNA, 25 bp, Artificial
  probe
  misc_feature (1)..(25): SEQ ID NO: 2300; WAN024AXO; Start 1084; Stop 1108
gaggttgtggagaaagagttaggta

SEQ ID NO: 321259 - DNA, 25 bp, Artificial
  probe
  misc_feature (1)..(25): SEQ ID NO: 2300; WAN024AXO; Start 172; Stop 196
ggtgcccatatcttccatacttcta

SEQ ID NO: 321260 - DNA, 25 bp, Artificial
  probe
  misc_feature (1)..(25): SEQ ID NO: 2300; WAN024AXO; Start 782; Stop 806
acgaggagaattatcaaggaaatgc

SEQ ID NO: 321261 - DNA, 25 bp, Artificial
  probe
  misc_feature (1)..(25): SEQ ID NO: 2300; WAN024AXO; Start 249; Stop 273
caactcacctgtcgcaaactataaa

SEQ ID NO: 321262 - DNA, 25 bp, Artificial
  probe
  misc_feature (1)..(25): SEQ ID NO: 2300; WAN024AXO; Start 259; Stop 283
gtcgcaaactataaaggaagtctct

SEQ ID NO: 321263 - DNA, 25 bp, Artificial
  probe
  misc_feature (1)..(25): SEQ ID NO: 2300; WAN024AXO; Start 260; Stop 284
tcgcaaactataaaggaagtctcta

SEQ ID NO: 321264 - DNA, 25 bp, Artificial
  probe
  misc_feature (1)..(25): SEQ ID NO: 2300; WAN024AXO; Start 257; Stop 281
ctgtcgcaaactataaaggaagtct

SEQ ID NO: 321265 - DNA, 25 bp, Artificial
  probe
  misc_feature (1)..(25): SEQ ID NO: 2300; WAN024AXO; Start 258; Stop 282
tgtcgcaaactataaaggaagtctc

SEQ ID NO: 321266 - DNA, 25 bp, Artificial
  probe
  misc_feature (1)..(25): SEQ ID NO: 2300; WAN024AXO; Start 1086; Stop 1110
ggttgtggagaaagagttaggtaac

SEQ ID NO: 321267 - DNA, 25 bp, Artificial
  probe
  misc_feature (1)..(25): SEQ ID NO: 2300; WAN024AXO; Start 832; Stop 856
atcccttatactcgcattattgagc

SEQ ID NO: 321268 - DNA, 25 bp, Artificial
  probe
  misc_feature (1)..(25): SEQ ID NO: 2300; WAN024AXO; Start 834; Stop 858
cccttatactcgcattattgagcat

SEQ ID NO: 321269 - DNA, 25 bp, Artificial
  probe
  misc_feature (1)..(25): SEQ ID NO: 2300; WAN024AXO; Start 830; Stop 854
aaatcccttatactcgcattattga

SEQ ID NO: 321270 - DNA, 25 bp, Artificial
  probe
  misc_feature (1)..(25): SEQ ID NO: 2300; WAN024AXO; Start 828; Stop 852
tgaaatcccttatactcgcattatt

SEQ ID NO: 321271 - DNA, 25 bp, Artificial
  probe
  misc_feature (1)..(25): SEQ ID NO: 2300; WAN024AXO; Start 789; Stop 813
gaattatcaaggaaatgctgtagtg

SEQ ID NO: 321272 - DNA, 25 bp, Artificial
  probe
  misc_feature (1)..(25): SEQ ID NO: 2300; WAN024AXO; Start 526; Stop 550
ccagttcgtctaacctttgataata

SEQ ID NO: 321273 - DNA, 25 bp, Artificial
  probe
  misc_feature (1)..(25): SEQ ID NO: 2300; WAN024AXO; Start 788; Stop 812
agaattatcaaggaaatgctgtagt

SEQ ID NO: 321274 - DNA, 25 bp, Artificial
  probe
  misc_feature (1)..(25): SEQ ID NO: 2300; WAN024AXO; Start 829; Stop 853
gaaatcccttatactcgcattattg

SEQ ID NO: 321275 - DNA, 25 bp, Artificial
  probe
  misc_feature (1)..(25): SEQ ID NO: 2301; WAN024AXN; Start 984; Stop 1008
atatcaagaagaagcagcacagaat

SEQ ID NO: 321276 - DNA, 25 bp, Artificial
  probe
  misc_feature (1)..(25): SEQ ID NO: 2301; WAN024AXN; Start 989; Stop 1013
aagaagaagcagcacagaatgataa

SEQ ID NO: 321277 - DNA, 25 bp, Artificial
  probe
  misc_feature (1)..(25): SEQ ID NO: 2301; WAN024AXN; Start 983; Stop 1007
aatatcaagaagaagcagcacagaa

SEQ ID NO: 321278 - DNA, 25 bp, Artificial
  probe
  misc_feature (1)..(25): SEQ ID NO: 2301; WAN024AXN; Start 990; Stop 1014
agaagaagcagcacagaatgataag

SEQ ID NO: 321279 - DNA, 25 bp, Artificial
  probe
  misc_feature (1)..(25): SEQ ID NO: 2301; WAN024AXN; Start 137; Stop 161
gtgagaatgtagaaggtgttaatgt

SEQ ID NO: 321280 - DNA, 25 bp, Artificial
  probe
  misc_feature (1)..(25): SEQ ID NO: 2301; WAN024AXN; Start 136; Stop 160
tgtgagaatgtagaaggtgttaatg

SEQ ID NO: 321281 - DNA, 25 bp, Artificial
  probe
  misc_feature (1)..(25): SEQ ID NO: 2301; WAN024AXN; Start 988; Stop 1012
caagaagaagcagcacagaatgata

SEQ ID NO: 321282 - DNA, 25 bp, Artificial
  probe
  misc_feature (1)..(25): SEQ ID NO: 2301; WAN024AXN; Start 985; Stop 1009
tatcaagaagaagcagcacagaatg

SEQ ID NO: 321283 - DNA, 25 bp, Artificial
  probe
  misc_feature (1)..(25): SEQ ID NO: 2301; WAN024AXN; Start 132; Stop 156
ctattgtgagaatgtagaaggtgtt

SEQ ID NO: 321284 - DNA, 25 bp, Artificial
  probe
  misc_feature (1)..(25): SEQ ID NO: 2301; WAN024AXN; Start 727; Stop 751
tacaagcatggagagttagaatacc

SEQ ID NO: 321285 - DNA, 25 bp, Artificial
  probe
  misc_feature (1)..(25): SEQ ID NO: 2301; WAN024AXN; Start 991; Stop 1015
gaagaagcagcacagaatgataagg

SEQ ID NO: 321286 - DNA, 25 bp, Artificial
  probe
  misc_feature (1)..(25): SEQ ID NO: 2301; WAN024AXN; Start 138; Stop 162
tgagaatgtagaaggtgttaatgtt

SEQ ID NO: 321287 - DNA, 25 bp, Artificial
  probe
  misc_feature (1)..(25): SEQ ID NO: 2301; WAN024AXN; Start 135; Stop 159
ttgtgagaatgtagaaggtgttaat

SEQ ID NO: 321288 - DNA, 25 bp, Artificial
  probe
  misc_feature (1)..(25): SEQ ID NO: 2301; WAN024AXN; Start 134; Stop 158
attgtgagaatgtagaaggtgttaa

SEQ ID NO: 321289 - DNA, 25 bp, Artificial
  probe
  misc_feature (1)..(25): SEQ ID NO: 2301; WAN024AXN; Start 730; Stop 754
aagcatggagagttagaataccgta

SEQ ID NO: 321290 - DNA, 25 bp, Artificial
  probe
  misc_feature (1)..(25): SEQ ID NO: 2301; WAN024AXN; Start 140; Stop 164
agaatgtagaaggtgttaatgttca

SEQ ID NO: 321291 - DNA, 25 bp, Artificial
  probe
  misc_feature (1)..(25): SEQ ID NO: 2301; WAN024AXN; Start 726; Stop 750
ctacaagcatggagagttagaatac

SEQ ID NO: 321292 - DNA, 25 bp, Artificial
  probe
  misc_feature (1)..(25): SEQ ID NO: 2301; WAN024AXN; Start 724; Stop 748
gactacaagcatggagagttagaat

SEQ ID NO: 321293 - DNA, 25 bp, Artificial
  probe
  misc_feature (1)..(25): SEQ ID NO: 2301; WAN024AXN; Start 734; Stop 758
atggagagttagaataccgtagcct

SEQ ID NO: 321294 - DNA, 25 bp, Artificial
  probe
  misc_feature (1)..(25): SEQ ID NO: 2301; WAN024AXN; Start 731; Stop 755
agcatggagagttagaataccgtag

SEQ ID NO: 321295 - DNA, 25 bp, Artificial
  probe
  misc_feature (1)..(25): SEQ ID NO: 2301; WAN024AXN; Start 992; Stop 1016
aagaagcagcacagaatgataaggt

SEQ ID NO: 321296 - DNA, 25 bp, Artificial
  probe
  misc_feature (1)..(25): SEQ ID NO: 2301; WAN024AXN; Start 725; Stop 749
actacaagcatggagagttagaata

SEQ ID NO: 321297 - DNA, 25 bp, Artificial
  probe
  misc_feature (1)..(25): SEQ ID NO: 2301; WAN024AXN; Start 735; Stop 759
tggagagttagaataccgtagcctt

SEQ ID NO: 321298 - DNA, 25 bp, Artificial
  probe
  misc_feature (1)..(25): SEQ ID NO: 2301; WAN024AXN; Start 139; Stop 163
gagaatgtagaaggtgttaatgttc

SEQ ID NO: 321299 - DNA, 25 bp, Artificial
  probe
  misc_feature (1)..(25): SEQ ID NO: 2301; WAN024AXN; Start 926; Stop 950
gcggagatgaaccttattatccaat

SEQ ID NO: 321300 - DNA, 25 bp, Artificial
  probe
  misc_feature (1)..(25): SEQ ID NO: 2301; WAN024AXN; Start 131; Stop 155
tctattgtgagaatgtagaaggtgt

SEQ ID NO: 321301 - DNA, 25 bp, Artificial
  probe
  misc_feature (1)..(25): SEQ ID NO: 2301; WAN024AXN; Start 723; Stop 747
tgactacaagcatggagagttagaa

SEQ ID NO: 321302 - DNA, 25 bp, Artificial
  probe
  misc_feature (1)..(25): SEQ ID NO: 2301; WAN024AXN; Start 722; Stop 746
ttgactacaagcatggagagttaga

SEQ ID NO: 321303 - DNA, 25 bp, Artificial
  probe
  misc_feature (1)..(25): SEQ ID NO: 2301; WAN024AXN; Start 927; Stop 951
cggagatgaaccttattatccaatc

SEQ ID NO: 321304 - DNA, 25 bp, Artificial
  probe
  misc_feature (1)..(25): SEQ ID NO: 2301; WAN024AXN; Start 133; Stop 157
tattgtgagaatgtagaaggtgtta

SEQ ID NO: 321305 - DNA, 25 bp, Artificial
  probe
  misc_feature (1)..(25): SEQ ID NO: 2301; WAN024AXN; Start 423; Stop 447
gttgatcggtccagatgtctatgaa

SEQ ID NO: 321306 - DNA, 25 bp, Artificial
  probe
  misc_feature (1)..(25): SEQ ID NO: 2301; WAN024AXN; Start 421; Stop 445
aagttgatcggtccagatgtctatg

SEQ ID NO: 321307 - DNA, 25 bp, Artificial
  probe
  misc_feature (1)..(25): SEQ ID NO: 2301; WAN024AXN; Start 420; Stop 444
caagttgatcggtccagatgtctat

SEQ ID NO: 321308 - DNA, 25 bp, Artificial
  probe
  misc_feature (1)..(25): SEQ ID NO: 2302; WAN024DTZ; Start 920; Stop 944
gattcttgaggatgtatgctggtat

SEQ ID NO: 321309 - DNA, 25 bp, Artificial
  probe
  misc_feature (1)..(25): SEQ ID NO: 2302; WAN024DTZ; Start 914; Stop 938
ttagtggattcttgaggatgtatgc

SEQ ID NO: 321310 - DNA, 25 bp, Artificial
  probe
  misc_feature (1)..(25): SEQ ID NO: 2302; WAN024DTZ; Start 921; Stop 945
attcttgaggatgtatgctggtatc

SEQ ID NO: 321311 - DNA, 25 bp, Artificial
  probe
  misc_feature (1)..(25): SEQ ID NO: 2302; WAN024DTZ; Start 915; Stop 939
tagtggattcttgaggatgtatgct

SEQ ID NO: 321312 - DNA, 25 bp, Artificial
  probe
  misc_feature (1)..(25): SEQ ID NO: 2302; WAN024DTZ; Start 1047; Stop 1071
aatgattcgttggtcgttgttactt

SEQ ID NO: 321313 - DNA, 25 bp, Artificial
  probe
  misc_feature (1)..(25): SEQ ID NO: 2302; WAN024DTZ; Start 125; Stop 149
caagtatgctagagactgctaatca

SEQ ID NO: 321314 - DNA, 25 bp, Artificial
  probe
  misc_feature (1)..(25): SEQ ID NO: 2302; WAN024DTZ; Start 919; Stop 943
ggattcttgaggatgtatgctggta

SEQ ID NO: 321315 - DNA, 25 bp, Artificial
  probe
  misc_feature (1)..(25): SEQ ID NO: 2302; WAN024DTZ; Start 922; Stop 946
ttcttgaggatgtatgctggtatca

SEQ ID NO: 321316 - DNA, 25 bp, Artificial
  probe
  misc_feature (1)..(25): SEQ ID NO: 2302; WAN024DTZ; Start 670; Stop 694
gatgtgaaggttcagtattgtcaac

SEQ ID NO: 321317 - DNA, 25 bp, Artificial
  probe
  misc_feature (1)..(25): SEQ ID NO: 2302; WAN024DTZ; Start 669; Stop 693
agatgtgaaggttcagtattgtcaa

SEQ ID NO: 321318 - DNA, 25 bp, Artificial
  probe
  misc_feature (1)..(25): SEQ ID NO: 2302; WAN024DTZ; Start 668; Stop 692
gagatgtgaaggttcagtattgtca

SEQ ID NO: 321319 - DNA, 25 bp, Artificial
  probe
  misc_feature (1)..(25): SEQ ID NO: 2302; WAN024DTZ; Start 665; Stop 689
aaggagatgtgaaggttcagtattg

SEQ ID NO: 321320 - DNA, 25 bp, Artificial
  probe
  misc_feature (1)..(25): SEQ ID NO: 2302; WAN024DTZ; Start 127; Stop 151
agtatgctagagactgctaatcaga

SEQ ID NO: 321321 - DNA, 25 bp, Artificial
  probe
  misc_feature (1)..(25): SEQ ID NO: 2302; WAN024DTZ; Start 126; Stop 150
aagtatgctagagactgctaatcag

SEQ ID NO: 321322 - DNA, 25 bp, Artificial
  probe
  misc_feature (1)..(25): SEQ ID NO: 2302; WAN024DTZ; Start 129; Stop 153
tatgctagagactgctaatcagatg

SEQ ID NO: 321323 - DNA, 25 bp, Artificial
  probe
  misc_feature (1)..(25): SEQ ID NO: 2302; WAN024DTZ; Start 128; Stop 152
gtatgctagagactgctaatcagat

SEQ ID NO: 321324 - DNA, 25 bp, Artificial
  probe
  misc_feature (1)..(25): SEQ ID NO: 2302; WAN024DTZ; Start 916; Stop 940
agtggattcttgaggatgtatgctg

SEQ ID NO: 321325 - DNA, 25 bp, Artificial
  probe
  misc_feature (1)..(25): SEQ ID NO: 2302; WAN024DTZ; Start 131; Stop 155
tgctagagactgctaatcagatgta

SEQ ID NO: 321326 - DNA, 25 bp, Artificial
  probe
  misc_feature (1)..(25): SEQ ID NO: 2302; WAN024DTZ; Start 188; Stop 212
ccagtctatacggtacagatatgtc

SEQ ID NO: 321327 - DNA, 25 bp, Artificial
  probe
  misc_feature (1)..(25): SEQ ID NO: 2302; WAN024DTZ; Start 667; Stop 691
ggagatgtgaaggttcagtattgtc

SEQ ID NO: 321328 - DNA, 25 bp, Artificial
  probe
  misc_feature (1)..(25): SEQ ID NO: 2302; WAN024DTZ; Start 133; Stop 157
ctagagactgctaatcagatgtacc

SEQ ID NO: 321329 - DNA, 25 bp, Artificial
  probe
  misc_feature (1)..(25): SEQ ID NO: 2302; WAN024DTZ; Start 132; Stop 156
gctagagactgctaatcagatgtac

SEQ ID NO: 321330 - DNA, 25 bp, Artificial
  probe
  misc_feature (1)..(25): SEQ ID NO: 2302; WAN024DTZ; Start 130; Stop 154
atgctagagactgctaatcagatgt

SEQ ID NO: 321331 - DNA, 25 bp, Artificial
  probe
  misc_feature (1)..(25): SEQ ID NO: 2302; WAN024DTZ; Start 666; Stop 690
aggagatgtgaaggttcagtattgt

SEQ ID NO: 321332 - DNA, 25 bp, Artificial
  probe
  misc_feature (1)..(25): SEQ ID NO: 2302; WAN024DTZ; Start 189; Stop 213
cagtctatacggtacagatatgtca

SEQ ID NO: 321333 - DNA, 25 bp, Artificial
  probe
  misc_feature (1)..(25): SEQ ID NO: 2302; WAN024DTZ; Start 930; Stop 954
gatgtatgctggtatcaatcgagaa

SEQ ID NO: 321334 - DNA, 25 bp, Artificial
  probe
  misc_feature (1)..(25): SEQ ID NO: 2302; WAN024DTZ; Start 187; Stop 211
gccagtctatacggtacagatatgt

SEQ ID NO: 321335 - DNA, 25 bp, Artificial
  probe
  misc_feature (1)..(25): SEQ ID NO: 2302; WAN024DTZ; Start 926; Stop 950
tgaggatgtatgctggtatcaatcg

SEQ ID NO: 321336 - DNA, 25 bp, Artificial
  probe
  misc_feature (1)..(25): SEQ ID NO: 2302; WAN024DTZ; Start 814; Stop 838
atgaatggtttacttggtggatttg

SEQ ID NO: 321337 - DNA, 25 bp, Artificial
  probe
  misc_feature (1)..(25): SEQ ID NO: 2302; WAN024DTZ; Start 191; Stop 215
gtctatacggtacagatatgtcaac

SEQ ID NO: 321338 - DNA, 25 bp, Artificial
  probe
  misc_feature (1)..(25): SEQ ID NO: 2302; WAN024DTZ; Start 190; Stop 214
agtctatacggtacagatatgtcaa

SEQ ID NO: 321339 - DNA, 25 bp, Artificial
  probe
  misc_feature (1)..(25): SEQ ID NO: 2302; WAN024DTZ; Start 196; Stop 220
tacggtacagatatgtcaaccaatt

SEQ ID NO: 321340 - DNA, 25 bp, Artificial
  probe
  misc_feature (1)..(25): SEQ ID NO: 2302; WAN024DTZ; Start 195; Stop 219
atacggtacagatatgtcaaccaat

SEQ ID NO: 321341 - DNA, 25 bp, Artificial
  probe
  misc_feature (1)..(25): SEQ ID NO: 2303; WAN024CTH; Start 685; Stop 709
aagatgcgttcaggtagtctcatta

SEQ ID NO: 321342 - DNA, 25 bp, Artificial
  probe
  misc_feature (1)..(25): SEQ ID NO: 2303; WAN024CTH; Start 684; Stop 708
taagatgcgttcaggtagtctcatt

SEQ ID NO: 321343 - DNA, 25 bp, Artificial
  probe
  misc_feature (1)..(25): SEQ ID NO: 2303; WAN024CTH; Start 683; Stop 707
ctaagatgcgttcaggtagtctcat

SEQ ID NO: 321344 - DNA, 25 bp, Artificial
  probe
  misc_feature (1)..(25): SEQ ID NO: 2303; WAN024CTH; Start 686; Stop 710
agatgcgttcaggtagtctcattac

SEQ ID NO: 321345 - DNA, 25 bp, Artificial
  probe
  misc_feature (1)..(25): SEQ ID NO: 2303; WAN024CTH; Start 834; Stop 858
agatgttcttgcggaatttgaattt

SEQ ID NO: 321346 - DNA, 25 bp, Artificial
  probe
  misc_feature (1)..(25): SEQ ID NO: 2303; WAN024CTH; Start 790; Stop 814
catcatttgattcaagaaggagcaa

SEQ ID NO: 321347 - DNA, 25 bp, Artificial
  probe
  misc_feature (1)..(25): SEQ ID NO: 2303; WAN024CTH; Start 308; Stop 332
gaaatcttgacctcctgaaattccc

SEQ ID NO: 321348 - DNA, 25 bp, Artificial
  probe
  misc_feature (1)..(25): SEQ ID NO: 2303; WAN024CTH; Start 785; Stop 809
gttgccatcatttgattcaagaagg

SEQ ID NO: 321349 - DNA, 25 bp, Artificial
  probe
  misc_feature (1)..(25): SEQ ID NO: 2303; WAN024CTH; Start 784; Stop 808
ggttgccatcatttgattcaagaag

SEQ ID NO: 321350 - DNA, 25 bp, Artificial
  probe
  misc_feature (1)..(25): SEQ ID NO: 2303; WAN024CTH; Start 786; Stop 810
ttgccatcatttgattcaagaagga

SEQ ID NO: 321351 - DNA, 25 bp, Artificial
  probe
  misc_feature (1)..(25): SEQ ID NO: 2303; WAN024CTH; Start 765; Stop 789
tttagatggactatcagacggttgc

SEQ ID NO: 321352 - DNA, 25 bp, Artificial
  probe
  misc_feature (1)..(25): SEQ ID NO: 2303; WAN024CTH; Start 789; Stop 813
ccatcatttgattcaagaaggagca

SEQ ID NO: 321353 - DNA, 25 bp, Artificial
  probe
  misc_feature (1)..(25): SEQ ID NO: 2303; WAN024CTH; Start 787; Stop 811
tgccatcatttgattcaagaaggag

SEQ ID NO: 321354 - DNA, 25 bp, Artificial
  probe
  misc_feature (1)..(25): SEQ ID NO: 2303; WAN024CTH; Start 553; Stop 577
caagactacatcggcaatgaccatc

SEQ ID NO: 321355 - DNA, 25 bp, Artificial
  probe
  misc_feature (1)..(25): SEQ ID NO: 2303; WAN024CTH; Start 766; Stop 790
ttagatggactatcagacggttgcc

SEQ ID NO: 321356 - DNA, 25 bp, Artificial
  probe
  misc_feature (1)..(25): SEQ ID NO: 2303; WAN024CTH; Start 261; Stop 285
ggatttgagtgaaatatatgatgcg

SEQ ID NO: 321357 - DNA, 25 bp, Artificial
  probe
  misc_feature (1)..(25): SEQ ID NO: 2303; WAN024CTH; Start 554; Stop 578
aagactacatcggcaatgaccatct

SEQ ID NO: 321358 - DNA, 25 bp, Artificial
  probe
  misc_feature (1)..(25): SEQ ID NO: 2303; WAN024CTH; Start 306; Stop 330
gggaaatcttgacctcctgaaattc

SEQ ID NO: 321359 - DNA, 25 bp, Artificial
  probe
  misc_feature (1)..(25): SEQ ID NO: 2303; WAN024CTH; Start 305; Stop 329
agggaaatcttgacctcctgaaatt

SEQ ID NO: 321360 - DNA, 25 bp, Artificial
  probe
  misc_feature (1)..(25): SEQ ID NO: 2303; WAN024CTH; Start 304; Stop 328
aagggaaatcttgacctcctgaaat

SEQ ID NO: 321361 - DNA, 25 bp, Artificial
  probe
  misc_feature (1)..(25): SEQ ID NO: 2303; WAN024CTH; Start 260; Stop 284
gggatttgagtgaaatatatgatgc

SEQ ID NO: 321362 - DNA, 25 bp, Artificial
  probe
  misc_feature (1)..(25): SEQ ID NO: 2303; WAN024CTH; Start 773; Stop 797
gactatcagacggttgccatcattt

SEQ ID NO: 321363 - DNA, 25 bp, Artificial
  probe
  misc_feature (1)..(25): SEQ ID NO: 2303; WAN024CTH; Start 309; Stop 333
aaatcttgacctcctgaaattcccg

SEQ ID NO: 321364 - DNA, 25 bp, Artificial
  probe
  misc_feature (1)..(25): SEQ ID NO: 2303; WAN024CTH; Start 833; Stop 857
aagatgttcttgcggaatttgaatt

SEQ ID NO: 321365 - DNA, 25 bp, Artificial
  probe
  misc_feature (1)..(25): SEQ ID NO: 2303; WAN024CTH; Start 682; Stop 706
gctaagatgcgttcaggtagtctca

SEQ ID NO: 321366 - DNA, 25 bp, Artificial
  probe
  misc_feature (1)..(25): SEQ ID NO: 2303; WAN024CTH; Start 256; Stop 280
ccttgggatttgagtgaaatatatg

SEQ ID NO: 321367 - DNA, 25 bp, Artificial
  probe
  misc_feature (1)..(25): SEQ ID NO: 2303; WAN024CTH; Start 783; Stop 807
cggttgccatcatttgattcaagaa

SEQ ID NO: 321368 - DNA, 25 bp, Artificial
  probe
  misc_feature (1)..(25): SEQ ID NO: 2303; WAN024CTH; Start 774; Stop 798
actatcagacggttgccatcatttg

SEQ ID NO: 321369 - DNA, 25 bp, Artificial
  probe
  misc_feature (1)..(25): SEQ ID NO: 2303; WAN024CTH; Start 788; Stop 812
gccatcatttgattcaagaaggagc

SEQ ID NO: 321370 - DNA, 25 bp, Artificial
  probe
  misc_feature (1)..(25): SEQ ID NO: 2303; WAN024CTH; Start 764; Stop 788
ttttagatggactatcagacggttg

SEQ ID NO: 321371 - DNA, 25 bp, Artificial
  probe
  misc_feature (1)..(25): SEQ ID NO: 2303; WAN024CTH; Start 404; Stop 428
gcttggaaaatgaactggttattgt

SEQ ID NO: 321372 - DNA, 25 bp, Artificial
  probe
  misc_feature (1)..(25): SEQ ID NO: 2303; WAN024CTH; Start 763; Stop 787
attttagatggactatcagacggtt

SEQ ID NO: 321373 - DNA, 25 bp, Artificial
  probe
  misc_feature (1)..(25): SEQ ID NO: 2303; WAN024CTH; Start 775; Stop 799
ctatcagacggttgccatcatttga

SEQ ID NO: 321374 - DNA, 25 bp, Artificial
  probe
  misc_feature (1)..(25): SEQ ID NO: 2304; WAN024ETC; Start 486; Stop 510
tcatatctgtgatgccaagacaatt

SEQ ID NO: 321375 - DNA, 25 bp, Artificial
  probe
  misc_feature (1)..(25): SEQ ID NO: 2304; WAN024ETC; Start 501; Stop 525
caagacaattatggctgttcagtat

SEQ ID NO: 321376 - DNA, 25 bp, Artificial
  probe
  misc_feature (1)..(25): SEQ ID NO: 2304; WAN024ETC; Start 489; Stop 513
tatctgtgatgccaagacaattatg

SEQ ID NO: 321377 - DNA, 25 bp, Artificial
  probe
  misc_feature (1)..(25): SEQ ID NO: 2304; WAN024ETC; Start 487; Stop 511
catatctgtgatgccaagacaatta

SEQ ID NO: 321378 - DNA, 25 bp, Artificial
  probe
  misc_feature (1)..(25): SEQ ID NO: 2304; WAN024ETC; Start 473; Stop 497
taatccaatcaggtcatatctgtga

SEQ ID NO: 321379 - DNA, 25 bp, Artificial
  probe
  misc_feature (1)..(25): SEQ ID NO: 2304; WAN024ETC; Start 502; Stop 526
aagacaattatggctgttcagtatt

SEQ ID NO: 321380 - DNA, 25 bp, Artificial
  probe
  misc_feature (1)..(25): SEQ ID NO: 2304; WAN024ETC; Start 485; Stop 509
gtcatatctgtgatgccaagacaat

SEQ ID NO: 321381 - DNA, 25 bp, Artificial
  probe
  misc_feature (1)..(25): SEQ ID NO: 2304; WAN024ETC; Start 488; Stop 512
atatctgtgatgccaagacaattat

SEQ ID NO: 321382 - DNA, 25 bp, Artificial
  probe
  misc_feature (1)..(25): SEQ ID NO: 2304; WAN024ETC; Start 472; Stop 496
ttaatccaatcaggtcatatctgtg

SEQ ID NO: 321383 - DNA, 25 bp, Artificial
  probe
  misc_feature (1)..(25): SEQ ID NO: 2304; WAN024ETC; Start 61; Stop 85
ctggtccaagatcaggttgaattac

SEQ ID NO: 321384 - DNA, 25 bp, Artificial
  probe
  misc_feature (1)..(25): SEQ ID NO: 2304; WAN024ETC; Start 439; Stop 463
gtccttgaagtgagcttagaagaag

SEQ ID NO: 321385 - DNA, 25 bp, Artificial
  probe
  misc_feature (1)..(25): SEQ ID NO: 2304; WAN024ETC; Start 436; Stop 460
gaagtccttgaagtgagcttagaag

SEQ ID NO: 321386 - DNA, 25 bp, Artificial
  probe
  misc_feature (1)..(25): SEQ ID NO: 2304; WAN024ETC; Start 500; Stop 524
ccaagacaattatggctgttcagta

SEQ ID NO: 321387 - DNA, 25 bp, Artificial
  probe
  misc_feature (1)..(25): SEQ ID NO: 2304; WAN024ETC; Start 67; Stop 91
caagatcaggttgaattaccagaag

SEQ ID NO: 321388 - DNA, 25 bp, Artificial
  probe
  misc_feature (1)..(25): SEQ ID NO: 2304; WAN024ETC; Start 438; Stop 462
agtccttgaagtgagcttagaagaa

SEQ ID NO: 321389 - DNA, 25 bp, Artificial
  probe
  misc_feature (1)..(25): SEQ ID NO: 2304; WAN024ETC; Start 437; Stop 461
aagtccttgaagtgagcttagaaga

SEQ ID NO: 321390 - DNA, 25 bp, Artificial
  probe
  misc_feature (1)..(25): SEQ ID NO: 2304; WAN024ETC; Start 68; Stop 92
aagatcaggttgaattaccagaagg

SEQ ID NO: 321391 - DNA, 25 bp, Artificial
  probe
  misc_feature (1)..(25): SEQ ID NO: 2304; WAN024ETC; Start 66; Stop 90
ccaagatcaggttgaattaccagaa

SEQ ID NO: 321392 - DNA, 25 bp, Artificial
  probe
  misc_feature (1)..(25): SEQ ID NO: 2304; WAN024ETC; Start 60; Stop 84
actggtccaagatcaggttgaatta

SEQ ID NO: 321393 - DNA, 25 bp, Artificial
  probe
  misc_feature (1)..(25): SEQ ID NO: 2304; WAN024ETC; Start 490; Stop 514
atctgtgatgccaagacaattatgg

SEQ ID NO: 321394 - DNA, 25 bp, Artificial
  probe
  misc_feature (1)..(25): SEQ ID NO: 2304; WAN024ETC; Start 504; Stop 528
gacaattatggctgttcagtattgg

SEQ ID NO: 321395 - DNA, 25 bp, Artificial
  probe
  misc_feature (1)..(25): SEQ ID NO: 2304; WAN024ETC; Start 503; Stop 527
agacaattatggctgttcagtattg

SEQ ID NO: 321396 - DNA, 25 bp, Artificial
  probe
  misc_feature (1)..(25): SEQ ID NO: 2304; WAN024ETC; Start 507; Stop 531
aattatggctgttcagtattgggag

SEQ ID NO: 321397 - DNA, 25 bp, Artificial
  probe
  misc_feature (1)..(25): SEQ ID NO: 2304; WAN024ETC; Start 64; Stop 88
gtccaagatcaggttgaattaccag

SEQ ID NO: 321398 - DNA, 25 bp, Artificial
  probe
  misc_feature (1)..(25): SEQ ID NO: 2304; WAN024ETC; Start 65; Stop 89
tccaagatcaggttgaattaccaga

SEQ ID NO: 321399 - DNA, 25 bp, Artificial
  probe
  misc_feature (1)..(25): SEQ ID NO: 2304; WAN024ETC; Start 305; Stop 329
cagggaaattagaactcttgtacga

SEQ ID NO: 321400 - DNA, 25 bp, Artificial
  probe
  misc_feature (1)..(25): SEQ ID NO: 2304; WAN024ETC; Start 306; Stop 330
agggaaattagaactcttgtacgat

SEQ ID NO: 321401 - DNA, 25 bp, Artificial
  probe
  misc_feature (1)..(25): SEQ ID NO: 2304; WAN024ETC; Start 369; Stop 393
actatatttagcaagcgatttgaca

SEQ ID NO: 321402 - DNA, 25 bp, Artificial
  probe
  misc_feature (1)..(25): SEQ ID NO: 2304; WAN024ETC; Start 275; Stop 299
ttcgtgaattagaggaagaaacagc

SEQ ID NO: 321403 - DNA, 25 bp, Artificial
  probe
  misc_feature (1)..(25): SEQ ID NO: 2304; WAN024ETC; Start 59; Stop 83
aactggtccaagatcaggttgaatt

SEQ ID NO: 321404 - DNA, 25 bp, Artificial
  probe
  misc_feature (1)..(25): SEQ ID NO: 2304; WAN024ETC; Start 475; Stop 499
atccaatcaggtcatatctgtgatg

SEQ ID NO: 321405 - DNA, 25 bp, Artificial
  probe
  misc_feature (1)..(25): SEQ ID NO: 2304; WAN024ETC; Start 435; Stop 459
ggaagtccttgaagtgagcttagaa

SEQ ID NO: 321406 - DNA, 25 bp, Artificial
  probe
  misc_feature (1)..(25): SEQ ID NO: 2304; WAN024ETC; Start 508; Stop 532
attatggctgttcagtattgggagt

SEQ ID NO: 321407 - DNA, 25 bp, Artificial
  probe
  misc_feature (1)..(25): SEQ ID NO: 2305; WAN024DHP; Start 122; Stop 146
ttgtaagtcttcttgtaacctcgct

SEQ ID NO: 321408 - DNA, 25 bp, Artificial
  probe
  misc_feature (1)..(25): SEQ ID NO: 2305; WAN024DHP; Start 230; Stop 254
ttcttctaagtgtacttgagacgct

SEQ ID NO: 321409 - DNA, 25 bp, Artificial
  probe
  misc_feature (1)..(25): SEQ ID NO: 2305; WAN024DHP; Start 64; Stop 88
acagttccttatacgattaaccatg

SEQ ID NO: 321410 - DNA, 25 bp, Artificial
  probe
  misc_feature (1)..(25): SEQ ID NO: 2305; WAN024DHP; Start 124; Stop 148
gtaagtcttcttgtaacctcgctga

SEQ ID NO: 321411 - DNA, 25 bp, Artificial
  probe
  misc_feature (1)..(25): SEQ ID NO: 2305; WAN024DHP; Start 125; Stop 149
taagtcttcttgtaacctcgctgag

SEQ ID NO: 321412 - DNA, 25 bp, Artificial
  probe
  misc_feature (1)..(25): SEQ ID NO: 2305; WAN024DHP; Start 123; Stop 147
tgtaagtcttcttgtaacctcgctg

SEQ ID NO: 321413 - DNA, 25 bp, Artificial
  probe
  misc_feature (1)..(25): SEQ ID NO: 2305; WAN024DHP; Start 62; Stop 86
ttacagttccttatacgattaacca

SEQ ID NO: 321414 - DNA, 25 bp, Artificial
  probe
  misc_feature (1)..(25): SEQ ID NO: 2305; WAN024DHP; Start 471; Stop 495
accttctaatgtcccttcgtttatt

SEQ ID NO: 321415 - DNA, 25 bp, Artificial
  probe
  misc_feature (1)..(25): SEQ ID NO: 2305; WAN024DHP; Start 252; Stop 276
gctggtttatattcatttcttcgct

SEQ ID NO: 321416 - DNA, 25 bp, Artificial
  probe
  misc_feature (1)..(25): SEQ ID NO: 2305; WAN024DHP; Start 250; Stop 274
acgctggtttatattcatttcttcg

SEQ ID NO: 321417 - DNA, 25 bp, Artificial
  probe
  misc_feature (1)..(25): SEQ ID NO: 2305; WAN024DHP; Start 231; Stop 255
tcttctaagtgtacttgagacgctg

SEQ ID NO: 321418 - DNA, 25 bp, Artificial
  probe
  misc_feature (1)..(25): SEQ ID NO: 2305; WAN024DHP; Start 262; Stop 286
attcatttcttcgctgtttcttctg

SEQ ID NO: 321419 - DNA, 25 bp, Artificial
  probe
  misc_feature (1)..(25): SEQ ID NO: 2305; WAN024DHP; Start 57; Stop 81
tgtcattacagttccttatacgatt

SEQ ID NO: 321420 - DNA, 25 bp, Artificial
  probe
  misc_feature (1)..(25): SEQ ID NO: 2305; WAN024DHP; Start 56; Stop 80
ttgtcattacagttccttatacgat

SEQ ID NO: 321421 - DNA, 25 bp, Artificial
  probe
  misc_feature (1)..(25): SEQ ID NO: 2305; WAN024DHP; Start 55; Stop 79
attgtcattacagttccttatacga

SEQ ID NO: 321422 - DNA, 25 bp, Artificial
  probe
  misc_feature (1)..(25): SEQ ID NO: 2305; WAN024DHP; Start 472; Stop 496
ccttctaatgtcccttcgtttattt

SEQ ID NO: 321423 - DNA, 25 bp, Artificial
  probe
  misc_feature (1)..(25): SEQ ID NO: 2305; WAN024DHP; Start 63; Stop 87
tacagttccttatacgattaaccat

SEQ ID NO: 321424 - DNA, 25 bp, Artificial
  probe
  misc_feature (1)..(25): SEQ ID NO: 2305; WAN024DHP; Start 254; Stop 278
tggtttatattcatttcttcgctgt

SEQ ID NO: 321425 - DNA, 25 bp, Artificial
  probe
  misc_feature (1)..(25): SEQ ID NO: 2305; WAN024DHP; Start 261; Stop 285
tattcatttcttcgctgtttcttct

SEQ ID NO: 321426 - DNA, 25 bp, Artificial
  probe
  misc_feature (1)..(25): SEQ ID NO: 2305; WAN024DHP; Start 251; Stop 275
cgctggtttatattcatttcttcgc

SEQ ID NO: 321427 - DNA, 25 bp, Artificial
  probe
  misc_feature (1)..(25): SEQ ID NO: 2305; WAN024DHP; Start 247; Stop 271
gagacgctggtttatattcatttct

SEQ ID NO: 321428 - DNA, 25 bp, Artificial
  probe
  misc_feature (1)..(25): SEQ ID NO: 2305; WAN024DHP; Start 253; Stop 277
ctggtttatattcatttcttcgctg

SEQ ID NO: 321429 - DNA, 25 bp, Artificial
  probe
  misc_feature (1)..(25): SEQ ID NO: 2305; WAN024DHP; Start 249; Stop 273
gacgctggtttatattcatttcttc

SEQ ID NO: 321430 - DNA, 25 bp, Artificial
  probe
  misc_feature (1)..(25): SEQ ID NO: 2305; WAN024DHP; Start 243; Stop 267
acttgagacgctggtttatattcat

SEQ ID NO: 321431 - DNA, 25 bp, Artificial
  probe
  misc_feature (1)..(25): SEQ ID NO: 2305; WAN024DHP; Start 242; Stop 266
tacttgagacgctggtttatattca

SEQ ID NO: 321432 - DNA, 25 bp, Artificial
  probe
  misc_feature (1)..(25): SEQ ID NO: 2305; WAN024DHP; Start 149; Stop 173
gtgttgcttatgctagaaagtttga

SEQ ID NO: 321433 - DNA, 25 bp, Artificial
  probe
  misc_feature (1)..(25): SEQ ID NO: 2305; WAN024DHP; Start 148; Stop 172
agtgttgcttatgctagaaagtttg

SEQ ID NO: 321434 - DNA, 25 bp, Artificial
  probe
  misc_feature (1)..(25): SEQ ID NO: 2305; WAN024DHP; Start 147; Stop 171
gagtgttgcttatgctagaaagttt

SEQ ID NO: 321435 - DNA, 25 bp, Artificial
  probe
  misc_feature (1)..(25): SEQ ID NO: 2305; WAN024DHP; Start 246; Stop 270
tgagacgctggtttatattcatttc

SEQ ID NO: 321436 - DNA, 25 bp, Artificial
  probe
  misc_feature (1)..(25): SEQ ID NO: 2305; WAN024DHP; Start 244; Stop 268
cttgagacgctggtttatattcatt

SEQ ID NO: 321437 - DNA, 25 bp, Artificial
  probe
  misc_feature (1)..(25): SEQ ID NO: 2305; WAN024DHP; Start 240; Stop 264
tgtacttgagacgctggtttatatt

SEQ ID NO: 321438 - DNA, 25 bp, Artificial
  probe
  misc_feature (1)..(25): SEQ ID NO: 2305; WAN024DHP; Start 150; Stop 174
tgttgcttatgctagaaagtttgaa

SEQ ID NO: 321439 - DNA, 25 bp, Artificial
  probe
  misc_feature (1)..(25): SEQ ID NO: 2305; WAN024DHP; Start 248; Stop 272
agacgctggtttatattcatttctt

SEQ ID NO: 321440 - DNA, 25 bp, Artificial
  probe
  misc_feature (1)..(25): SEQ ID NO: 2306; WAN024EX9; Start 599; Stop 623
gcagtgagattcgtgatattgtaac

SEQ ID NO: 321441 - DNA, 25 bp, Artificial
  probe
  misc_feature (1)..(25): SEQ ID NO: 2306; WAN024EX9; Start 605; Stop 629
agattcgtgatattgtaaccagtga

SEQ ID NO: 321442 - DNA, 25 bp, Artificial
  probe
  misc_feature (1)..(25): SEQ ID NO: 2306; WAN024EX9; Start 603; Stop 627
tgagattcgtgatattgtaaccagt

SEQ ID NO: 321443 - DNA, 25 bp, Artificial
  probe
  misc_feature (1)..(25): SEQ ID NO: 2306; WAN024EX9; Start 601; Stop 625
agtgagattcgtgatattgtaacca

SEQ ID NO: 321444 - DNA, 25 bp, Artificial
  probe
  misc_feature (1)..(25): SEQ ID NO: 2306; WAN024EX9; Start 604; Stop 628
gagattcgtgatattgtaaccagtg

SEQ ID NO: 321445 - DNA, 25 bp, Artificial
  probe
  misc_feature (1)..(25): SEQ ID NO: 2306; WAN024EX9; Start 602; Stop 626
gtgagattcgtgatattgtaaccag

SEQ ID NO: 321446 - DNA, 25 bp, Artificial
  probe
  misc_feature (1)..(25): SEQ ID NO: 2306; WAN024EX9; Start 600; Stop 624
cagtgagattcgtgatattgtaacc

SEQ ID NO: 321447 - DNA, 25 bp, Artificial
  probe
  misc_feature (1)..(25): SEQ ID NO: 2306; WAN024EX9; Start 326; Stop 350
atcaggctatctatgctcatattgg

SEQ ID NO: 321448 - DNA, 25 bp, Artificial
  probe
  misc_feature (1)..(25): SEQ ID NO: 2306; WAN024EX9; Start 606; Stop 630
gattcgtgatattgtaaccagtgat

SEQ ID NO: 321449 - DNA, 25 bp, Artificial
  probe
  misc_feature (1)..(25): SEQ ID NO: 2306; WAN024EX9; Start 598; Stop 622
ggcagtgagattcgtgatattgtaa

SEQ ID NO: 321450 - DNA, 25 bp, Artificial
  probe
  misc_feature (1)..(25): SEQ ID NO: 2306; WAN024EX9; Start 377; Stop 401
gagaagaataccatcagttgacgag

SEQ ID NO: 321451 - DNA, 25 bp, Artificial
  probe
  misc_feature (1)..(25): SEQ ID NO: 2306; WAN024EX9; Start 328; Stop 352
caggctatctatgctcatattggtg

SEQ ID NO: 321452 - DNA, 25 bp, Artificial
  probe
  misc_feature (1)..(25): SEQ ID NO: 2306; WAN024EX9; Start 327; Stop 351
tcaggctatctatgctcatattggt

SEQ ID NO: 321453 - DNA, 25 bp, Artificial
  probe
  misc_feature (1)..(25): SEQ ID NO: 2306; WAN024EX9; Start 597; Stop 621
aggcagtgagattcgtgatattgta

SEQ ID NO: 321454 - DNA, 25 bp, Artificial
  probe
  misc_feature (1)..(25): SEQ ID NO: 2306; WAN024EX9; Start 330; Stop 354
ggctatctatgctcatattggtgat

SEQ ID NO: 321455 - DNA, 25 bp, Artificial
  probe
  misc_feature (1)..(25): SEQ ID NO: 2306; WAN024EX9; Start 329; Stop 353
aggctatctatgctcatattggtga

SEQ ID NO: 321456 - DNA, 25 bp, Artificial
  probe
  misc_feature (1)..(25): SEQ ID NO: 2306; WAN024EX9; Start 56; Stop 80
atgtcaaccactatgtcaatagagc

SEQ ID NO: 321457 - DNA, 25 bp, Artificial
  probe
  misc_feature (1)..(25): SEQ ID NO: 2306; WAN024EX9; Start 325; Stop 349
aatcaggctatctatgctcatattg

SEQ ID NO: 321458 - DNA, 25 bp, Artificial
  probe
  misc_feature (1)..(25): SEQ ID NO: 2306; WAN024EX9; Start 334; Stop 358
atctatgctcatattggtgattcgc

SEQ ID NO: 321459 - DNA, 25 bp, Artificial
  probe
  misc_feature (1)..(25): SEQ ID NO: 2306; WAN024EX9; Start 43; Stop 67
aataaccaagactatgtcaaccact

SEQ ID NO: 321460 - DNA, 25 bp, Artificial
  probe
  misc_feature (1)..(25): SEQ ID NO: 2306; WAN024EX9; Start 50; Stop 74
aagactatgtcaaccactatgtcaa

SEQ ID NO: 321461 - DNA, 25 bp, Artificial
  probe
  misc_feature (1)..(25): SEQ ID NO: 2306; WAN024EX9; Start 49; Stop 73
caagactatgtcaaccactatgtca

SEQ ID NO: 321462 - DNA, 25 bp, Artificial
  probe
  misc_feature (1)..(25): SEQ ID NO: 2306; WAN024EX9; Start 51; Stop 75
agactatgtcaaccactatgtcaat

SEQ ID NO: 321463 - DNA, 25 bp, Artificial
  probe
  misc_feature (1)..(25): SEQ ID NO: 2306; WAN024EX9; Start 46; Stop 70
aaccaagactatgtcaaccactatg

SEQ ID NO: 321464 - DNA, 25 bp, Artificial
  probe
  misc_feature (1)..(25): SEQ ID NO: 2306; WAN024EX9; Start 607; Stop 631
attcgtgatattgtaaccagtgata

SEQ ID NO: 321465 - DNA, 25 bp, Artificial
  probe
  misc_feature (1)..(25): SEQ ID NO: 2306; WAN024EX9; Start 331; Stop 355
gctatctatgctcatattggtgatt

SEQ ID NO: 321466 - DNA, 25 bp, Artificial
  probe
  misc_feature (1)..(25): SEQ ID NO: 2306; WAN024EX9; Start 376; Stop 400
ggagaagaataccatcagttgacga

SEQ ID NO: 321467 - DNA, 25 bp, Artificial
  probe
  misc_feature (1)..(25): SEQ ID NO: 2306; WAN024EX9; Start 45; Stop 69
taaccaagactatgtcaaccactat

SEQ ID NO: 321468 - DNA, 25 bp, Artificial
  probe
  misc_feature (1)..(25): SEQ ID NO: 2306; WAN024EX9; Start 44; Stop 68
ataaccaagactatgtcaaccacta

SEQ ID NO: 321469 - DNA, 25 bp, Artificial
  probe
  misc_feature (1)..(25): SEQ ID NO: 2306; WAN024EX9; Start 609; Stop 633
tcgtgatattgtaaccagtgatatt

SEQ ID NO: 321470 - DNA, 25 bp, Artificial
  probe
  misc_feature (1)..(25): SEQ ID NO: 2306; WAN024EX9; Start 608; Stop 632
ttcgtgatattgtaaccagtgatat

SEQ ID NO: 321471 - DNA, 25 bp, Artificial
  probe
  misc_feature (1)..(25): SEQ ID NO: 2306; WAN024EX9; Start 48; Stop 72
ccaagactatgtcaaccactatgtc

SEQ ID NO: 321472 - DNA, 25 bp, Artificial
  probe
  misc_feature (1)..(25): SEQ ID NO: 2306; WAN024EX9; Start 193; Stop 217
gatacagtcaatgaagtgcgtgaat

SEQ ID NO: 321473 - DNA, 25 bp, Artificial
  probe
  misc_feature (1)..(25): SEQ ID NO: 2307; WAN024EYA; Start 1786; Stop 1810
aagaccatctattccttcctgttag

SEQ ID NO: 321474 - DNA, 25 bp, Artificial
  probe
  misc_feature (1)..(25): SEQ ID NO: 2307; WAN024EYA; Start 343; Stop 367
gaagaattagtgctaggagatgtca

SEQ ID NO: 321475 - DNA, 25 bp, Artificial
  probe
  misc_feature (1)..(25): SEQ ID NO: 2307; WAN024EYA; Start 342; Stop 366
tgaagaattagtgctaggagatgtc

SEQ ID NO: 321476 - DNA, 25 bp, Artificial
  probe
  misc_feature (1)..(25): SEQ ID NO: 2307; WAN024EYA; Start 341; Stop 365
ctgaagaattagtgctaggagatgt

SEQ ID NO: 321477 - DNA, 25 bp, Artificial
  probe
  misc_feature (1)..(25): SEQ ID NO: 2307; WAN024EYA; Start 347; Stop 371
aattagtgctaggagatgtcattcg

SEQ ID NO: 321478 - DNA, 25 bp, Artificial
  probe
  misc_feature (1)..(25): SEQ ID NO: 2307; WAN024EYA; Start 345; Stop 369
agaattagtgctaggagatgtcatt

SEQ ID NO: 321479 - DNA, 25 bp, Artificial
  probe
  misc_feature (1)..(25): SEQ ID NO: 2307; WAN024EYA; Start 344; Stop 368
aagaattagtgctaggagatgtcat

SEQ ID NO: 321480 - DNA, 25 bp, Artificial
  probe
  misc_feature (1)..(25): SEQ ID NO: 2307; WAN024EYA; Start 316; Stop 340
gatggtcaggaagttgctcttaatc

SEQ ID NO: 321481 - DNA, 25 bp, Artificial
  probe
  misc_feature (1)..(25): SEQ ID NO: 2307; WAN024EYA; Start 1788; Stop 1812
gaccatctattccttcctgttagca

SEQ ID NO: 321482 - DNA, 25 bp, Artificial
  probe
  misc_feature (1)..(25): SEQ ID NO: 2307; WAN024EYA; Start 348; Stop 372
attagtgctaggagatgtcattcgt

SEQ ID NO: 321483 - DNA, 25 bp, Artificial
  probe
  misc_feature (1)..(25): SEQ ID NO: 2307; WAN024EYA; Start 1370; Stop 1394
gactcaagattatctctggtgacaa

SEQ ID NO: 321484 - DNA, 25 bp, Artificial
  probe
  misc_feature (1)..(25): SEQ ID NO: 2307; WAN024EYA; Start 1787; Stop 1811
agaccatctattccttcctgttagc

SEQ ID NO: 321485 - DNA, 25 bp, Artificial
  probe
  misc_feature (1)..(25): SEQ ID NO: 2307; WAN024EYA; Start 1371; Stop 1395
actcaagattatctctggtgacaat

SEQ ID NO: 321486 - DNA, 25 bp, Artificial
  probe
  misc_feature (1)..(25): SEQ ID NO: 2307; WAN024EYA; Start 349; Stop 373
ttagtgctaggagatgtcattcgtt

SEQ ID NO: 321487 - DNA, 25 bp, Artificial
  probe
  misc_feature (1)..(25): SEQ ID NO: 2307; WAN024EYA; Start 1873; Stop 1897
attccgatccagattaccatgattg

SEQ ID NO: 321488 - DNA, 25 bp, Artificial
  probe
  misc_feature (1)..(25): SEQ ID NO: 2307; WAN024EYA; Start 1800; Stop 1824
cttcctgttagcagtcatctgtatt

SEQ ID NO: 321489 - DNA, 25 bp, Artificial
  probe
  misc_feature (1)..(25): SEQ ID NO: 2307; WAN024EYA; Start 1872; Stop 1896
cattccgatccagattaccatgatt

SEQ ID NO: 321490 - DNA, 25 bp, Artificial
  probe
  misc_feature (1)..(25): SEQ ID NO: 2307; WAN024EYA; Start 1801; Stop 1825
ttcctgttagcagtcatctgtattg

SEQ ID NO: 321491 - DNA, 25 bp, Artificial
  probe
  misc_feature (1)..(25): SEQ ID NO: 2307; WAN024EYA; Start 1878; Stop 1902
gatccagattaccatgattgaccag

SEQ ID NO: 321492 - DNA, 25 bp, Artificial
  probe
  misc_feature (1)..(25): SEQ ID NO: 2307; WAN024EYA; Start 1794; Stop 1818
ctattccttcctgttagcagtcatc

SEQ ID NO: 321493 - DNA, 25 bp, Artificial
  probe
  misc_feature (1)..(25): SEQ ID NO: 2307; WAN024EYA; Start 1791; Stop 1815
catctattccttcctgttagcagtc

SEQ ID NO: 321494 - DNA, 25 bp, Artificial
  probe
  misc_feature (1)..(25): SEQ ID NO: 2307; WAN024EYA; Start 1795; Stop 1819
tattccttcctgttagcagtcatct

SEQ ID NO: 321495 - DNA, 25 bp, Artificial
  probe
  misc_feature (1)..(25): SEQ ID NO: 2307; WAN024EYA; Start 1793; Stop 1817
tctattccttcctgttagcagtcat

SEQ ID NO: 321496 - DNA, 25 bp, Artificial
  probe
  misc_feature (1)..(25): SEQ ID NO: 2307; WAN024EYA; Start 1792; Stop 1816
atctattccttcctgttagcagtca

SEQ ID NO: 321497 - DNA, 25 bp, Artificial
  probe
  misc_feature (1)..(25): SEQ ID NO: 2307; WAN024EYA; Start 1869; Stop 1893
cttcattccgatccagattaccatg

SEQ ID NO: 321498 - DNA, 25 bp, Artificial
  probe
  misc_feature (1)..(25): SEQ ID NO: 2307; WAN024EYA; Start 1369; Stop 1393
ggactcaagattatctctggtgaca

SEQ ID NO: 321499 - DNA, 25 bp, Artificial
  probe
  misc_feature (1)..(25): SEQ ID NO: 2307; WAN024EYA; Start 340; Stop 364
cctgaagaattagtgctaggagatg

SEQ ID NO: 321500 - DNA, 25 bp, Artificial
  probe
  misc_feature (1)..(25): SEQ ID NO: 2307; WAN024EYA; Start 315; Stop 339
tgatggtcaggaagttgctcttaat

SEQ ID NO: 321501 - DNA, 25 bp, Artificial
  probe
  misc_feature (1)..(25): SEQ ID NO: 2307; WAN024EYA; Start 1879; Stop 1903
atccagattaccatgattgaccagt

SEQ ID NO: 321502 - DNA, 25 bp, Artificial
  probe
  misc_feature (1)..(25): SEQ ID NO: 2307; WAN024EYA; Start 1708; Stop 1732
aatgatgttcctgagattctcttcg

SEQ ID NO: 321503 - DNA, 25 bp, Artificial
  probe
  misc_feature (1)..(25): SEQ ID NO: 2307; WAN024EYA; Start 1874; Stop 1898
ttccgatccagattaccatgattga

SEQ ID NO: 321504 - DNA, 25 bp, Artificial
  probe
  misc_feature (1)..(25): SEQ ID NO: 2307; WAN024EYA; Start 1880; Stop 1904
tccagattaccatgattgaccagtt

SEQ ID NO: 321505 - DNA, 25 bp, Artificial
  probe
  misc_feature (1)..(25): SEQ ID NO: 2307; WAN024EYA; Start 1373; Stop 1397
tcaagattatctctggtgacaatcc

SEQ ID NO: 321506 - DNA, 25 bp, Artificial
  probe
  misc_feature (1)..(25): SEQ ID NO: 2308; WAN024DQX; Start 83; Stop 107
gtggttatgtcttagaatatcatgg

SEQ ID NO: 321507 - DNA, 25 bp, Artificial
  probe
  misc_feature (1)..(25): SEQ ID NO: 2308; WAN024DQX; Start 129; Stop 153
tgatgcttttatggctctactaact

SEQ ID NO: 321508 - DNA, 25 bp, Artificial
  probe
  misc_feature (1)..(25): SEQ ID NO: 2308; WAN024DQX; Start 126; Stop 150
tgttgatgcttttatggctctacta

SEQ ID NO: 321509 - DNA, 25 bp, Artificial
  probe
  misc_feature (1)..(25): SEQ ID NO: 2308; WAN024DQX; Start 124; Stop 148
gatgttgatgcttttatggctctac

SEQ ID NO: 321510 - DNA, 25 bp, Artificial
  probe
  misc_feature (1)..(25): SEQ ID NO: 2308; WAN024DQX; Start 125; Stop 149
atgttgatgcttttatggctctact

SEQ ID NO: 321511 - DNA, 25 bp, Artificial
  probe
  misc_feature (1)..(25): SEQ ID NO: 2308; WAN024DQX; Start 128; Stop 152
ttgatgcttttatggctctactaac

SEQ ID NO: 321512 - DNA, 25 bp, Artificial
  probe
  misc_feature (1)..(25): SEQ ID NO: 2308; WAN024DQX; Start 127; Stop 151
gttgatgcttttatggctctactaa

SEQ ID NO: 321513 - DNA, 25 bp, Artificial
  probe
  misc_feature (1)..(25): SEQ ID NO: 2308; WAN024DQX; Start 123; Stop 147
agatgttgatgcttttatggctcta

SEQ ID NO: 321514 - DNA, 25 bp, Artificial
  probe
  misc_feature (1)..(25): SEQ ID NO: 2308; WAN024DQX; Start 122; Stop 146
aagatgttgatgcttttatggctct

SEQ ID NO: 321515 - DNA, 25 bp, Artificial
  probe
  misc_feature (1)..(25): SEQ ID NO: 2308; WAN024DQX; Start 121; Stop 145
caagatgttgatgcttttatggctc

SEQ ID NO: 321516 - DNA, 25 bp, Artificial
  probe
  misc_feature (1)..(25): SEQ ID NO: 2308; WAN024DQX; Start 130; Stop 154
gatgcttttatggctctactaacta

SEQ ID NO: 321517 - DNA, 25 bp, Artificial
  probe
  misc_feature (1)..(25): SEQ ID NO: 2308; WAN024DQX; Start 118; Stop 142
acacaagatgttgatgcttttatgg

SEQ ID NO: 321518 - DNA, 25 bp, Artificial
  probe
  misc_feature (1)..(25): SEQ ID NO: 2308; WAN024DQX; Start 116; Stop 140
ccacacaagatgttgatgcttttat

SEQ ID NO: 321519 - DNA, 25 bp, Artificial
  probe
  misc_feature (1)..(25): SEQ ID NO: 2308; WAN024DQX; Start 117; Stop 141
cacacaagatgttgatgcttttatg

SEQ ID NO: 321520 - DNA, 25 bp, Artificial
  probe
  misc_feature (1)..(25): SEQ ID NO: 2308; WAN024DQX; Start 132; Stop 156
tgcttttatggctctactaactaat

SEQ ID NO: 321521 - DNA, 25 bp, Artificial
  probe
  misc_feature (1)..(25): SEQ ID NO: 2308; WAN024DQX; Start 131; Stop 155
atgcttttatggctctactaactaa

SEQ ID NO: 321522 - DNA, 25 bp, Artificial
  probe
  misc_feature (1)..(25): SEQ ID NO: 2308; WAN024DQX; Start 120; Stop 144
acaagatgttgatgcttttatggct

SEQ ID NO: 321523 - DNA, 25 bp, Artificial
  probe
  misc_feature (1)..(25): SEQ ID NO: 2308; WAN024DQX; Start 119; Stop 143
cacaagatgttgatgcttttatggc

SEQ ID NO: 321524 - DNA, 25 bp, Artificial
  probe
  misc_feature (1)..(25): SEQ ID NO: 2308; WAN024DQX; Start 115; Stop 139
gccacacaagatgttgatgctttta

SEQ ID NO: 321525 - DNA, 25 bp, Artificial
  probe
  misc_feature (1)..(25): SEQ ID NO: 2309; WAN024DUR; Start 588; Stop 612
aatgccagctatctctactcttctc

SEQ ID NO: 321526 - DNA, 25 bp, Artificial
  probe
  misc_feature (1)..(25): SEQ ID NO: 2309; WAN024DUR; Start 760; Stop 784
ttacaggaaatgaaagaggaagacc

SEQ ID NO: 321527 - DNA, 25 bp, Artificial
  probe
  misc_feature (1)..(25): SEQ ID NO: 2309; WAN024DUR; Start 804; Stop 828
tcaattctgccaaactacttacaac

SEQ ID NO: 321528 - DNA, 25 bp, Artificial
  probe
  misc_feature (1)..(25): SEQ ID NO: 2309; WAN024DUR; Start 803; Stop 827
gtcaattctgccaaactacttacaa

SEQ ID NO: 321529 - DNA, 25 bp, Artificial
  probe
  misc_feature (1)..(25): SEQ ID NO: 2309; WAN024DUR; Start 805; Stop 829
caattctgccaaactacttacaact

SEQ ID NO: 321530 - DNA, 25 bp, Artificial
  probe
  misc_feature (1)..(25): SEQ ID NO: 2309; WAN024DUR; Start 807; Stop 831
attctgccaaactacttacaacttt

SEQ ID NO: 321531 - DNA, 25 bp, Artificial
  probe
  misc_feature (1)..(25): SEQ ID NO: 2309; WAN024DUR; Start 431; Stop 455
tttaccttactgaaagccaacaaac

SEQ ID NO: 321532 - DNA, 25 bp, Artificial
  probe
  misc_feature (1)..(25): SEQ ID NO: 2309; WAN024DUR; Start 755; Stop 779
cagacttacaggaaatgaaagagga

SEQ ID NO: 321533 - DNA, 25 bp, Artificial
  probe
  misc_feature (1)..(25): SEQ ID NO: 2309; WAN024DUR; Start 758; Stop 782
acttacaggaaatgaaagaggaaga

SEQ ID NO: 321534 - DNA, 25 bp, Artificial
  probe
  misc_feature (1)..(25): SEQ ID NO: 2309; WAN024DUR; Start 756; Stop 780
agacttacaggaaatgaaagaggaa

SEQ ID NO: 321535 - DNA, 25 bp, Artificial
  probe
  misc_feature (1)..(25): SEQ ID NO: 2309; WAN024DUR; Start 759; Stop 783
cttacaggaaatgaaagaggaagac

SEQ ID NO: 321536 - DNA, 25 bp, Artificial
  probe
  misc_feature (1)..(25): SEQ ID NO: 2309; WAN024DUR; Start 757; Stop 781
gacttacaggaaatgaaagaggaag

SEQ ID NO: 321537 - DNA, 25 bp, Artificial
  probe
  misc_feature (1)..(25): SEQ ID NO: 2309; WAN024DUR; Start 806; Stop 830
aattctgccaaactacttacaactt

SEQ ID NO: 321538 - DNA, 25 bp, Artificial
  probe
  misc_feature (1)..(25): SEQ ID NO: 2309; WAN024DUR; Start 761; Stop 785
tacaggaaatgaaagaggaagacca

SEQ ID NO: 321539 - DNA, 25 bp, Artificial
  probe
  misc_feature (1)..(25): SEQ ID NO: 2309; WAN024DUR; Start 801; Stop 825
ttgtcaattctgccaaactacttac

SEQ ID NO: 321540 - DNA, 25 bp, Artificial
  probe
  misc_feature (1)..(25): SEQ ID NO: 2309; WAN024DUR; Start 800; Stop 824
cttgtcaattctgccaaactactta

SEQ ID NO: 321541 - DNA, 25 bp, Artificial
  probe
  misc_feature (1)..(25): SEQ ID NO: 2309; WAN024DUR; Start 754; Stop 778
tcagacttacaggaaatgaaagagg

SEQ ID NO: 321542 - DNA, 25 bp, Artificial
  probe
  misc_feature (1)..(25): SEQ ID NO: 2309; WAN024DUR; Start 689; Stop 713
aaatccgtttccaatgtgactgtag

SEQ ID NO: 321543 - DNA, 25 bp, Artificial
  probe
  misc_feature (1)..(25): SEQ ID NO: 2309; WAN024DUR; Start 793; Stop 817
gaaatcacttgtcaattctgccaaa

SEQ ID NO: 321544 - DNA, 25 bp, Artificial
  probe
  misc_feature (1)..(25): SEQ ID NO: 2309; WAN024DUR; Start 796; Stop 820
atcacttgtcaattctgccaaacta

SEQ ID NO: 321545 - DNA, 25 bp, Artificial
  probe
  misc_feature (1)..(25): SEQ ID NO: 2309; WAN024DUR; Start 752; Stop 776
gctcagacttacaggaaatgaaaga

SEQ ID NO: 321546 - DNA, 25 bp, Artificial
  probe
  misc_feature (1)..(25): SEQ ID NO: 2309; WAN024DUR; Start 794; Stop 818
aaatcacttgtcaattctgccaaac

SEQ ID NO: 321547 - DNA, 25 bp, Artificial
  probe
  misc_feature (1)..(25): SEQ ID NO: 2309; WAN024DUR; Start 851; Stop 875
aactcattcgtgacaaatcttaact

SEQ ID NO: 321548 - DNA, 25 bp, Artificial
  probe
  misc_feature (1)..(25): SEQ ID NO: 2309; WAN024DUR; Start 799; Stop 823
acttgtcaattctgccaaactactt

SEQ ID NO: 321549 - DNA, 25 bp, Artificial
  probe
  misc_feature (1)..(25): SEQ ID NO: 2309; WAN024DUR; Start 753; Stop 777
ctcagacttacaggaaatgaaagag

SEQ ID NO: 321550 - DNA, 25 bp, Artificial
  probe
  misc_feature (1)..(25): SEQ ID NO: 2309; WAN024DUR; Start 850; Stop 874
gaactcattcgtgacaaatcttaac

SEQ ID NO: 321551 - DNA, 25 bp, Artificial
  probe
  misc_feature (1)..(25): SEQ ID NO: 2309; WAN024DUR; Start 802; Stop 826
tgtcaattctgccaaactacttaca

SEQ ID NO: 321552 - DNA, 25 bp, Artificial
  probe
  misc_feature (1)..(25): SEQ ID NO: 2309; WAN024DUR; Start 432; Stop 456
ttaccttactgaaagccaacaaacg

SEQ ID NO: 321553 - DNA, 25 bp, Artificial
  probe
  misc_feature (1)..(25): SEQ ID NO: 2309; WAN024DUR; Start 795; Stop 819
aatcacttgtcaattctgccaaact

SEQ ID NO: 321554 - DNA, 25 bp, Artificial
  probe
  misc_feature (1)..(25): SEQ ID NO: 2309; WAN024DUR; Start 372; Stop 396
aaatccttacaactctataactccc

SEQ ID NO: 321555 - DNA, 25 bp, Artificial
  probe
  misc_feature (1)..(25): SEQ ID NO: 2309; WAN024DUR; Start 17; Stop 41
aaactatatcagaaagcggagcctt

SEQ ID NO: 321556 - DNA, 25 bp, Artificial
  probe
  misc_feature (1)..(25): SEQ ID NO: 2309; WAN024DUR; Start 798; Stop 822
cacttgtcaattctgccaaactact

SEQ ID NO: 321557 - DNA, 25 bp, Artificial
  probe
  misc_feature (1)..(25): SEQ ID NO: 2309; WAN024DUR; Start 797; Stop 821
tcacttgtcaattctgccaaactac

SEQ ID NO: 321558 - DNA, 25 bp, Artificial
  probe
  misc_feature (1)..(25): SEQ ID NO: 2310; WAN024D3K; Start 181; Stop 205
aaagactgttccaagattgaccaaa

SEQ ID NO: 321559 - DNA, 25 bp, Artificial
  probe
  misc_feature (1)..(25): SEQ ID NO: 2310; WAN024D3K; Start 134; Stop 158
aattagttgctcttgaaatggaacg

SEQ ID NO: 321560 - DNA, 25 bp, Artificial
  probe
  misc_feature (1)..(25): SEQ ID NO: 2310; WAN024D3K; Start 212; Stop 236
aagagcagaaggagatatttgaatc

SEQ ID NO: 321561 - DNA, 25 bp, Artificial
  probe
  misc_feature (1)..(25): SEQ ID NO: 2310; WAN024D3K; Start 211; Stop 235
aaagagcagaaggagatatttgaat

SEQ ID NO: 321562 - DNA, 25 bp, Artificial
  probe
  misc_feature (1)..(25): SEQ ID NO: 2310; WAN024D3K; Start 207; Stop 231
aatcaaagagcagaaggagatattt

SEQ ID NO: 321563 - DNA, 25 bp, Artificial
  probe
  misc_feature (1)..(25): SEQ ID NO: 2310; WAN024D3K; Start 206; Stop 230
aaatcaaagagcagaaggagatatt

SEQ ID NO: 321564 - DNA, 25 bp, Artificial
  probe
  misc_feature (1)..(25): SEQ ID NO: 2310; WAN024D3K; Start 133; Stop 157
aaattagttgctcttgaaatggaac

SEQ ID NO: 321565 - DNA, 25 bp, Artificial
  probe
  misc_feature (1)..(25): SEQ ID NO: 2310; WAN024D3K; Start 180; Stop 204
caaagactgttccaagattgaccaa

SEQ ID NO: 321566 - DNA, 25 bp, Artificial
  probe
  misc_feature (1)..(25): SEQ ID NO: 2310; WAN024D3K; Start 135; Stop 159
attagttgctcttgaaatggaacgg

SEQ ID NO: 321567 - DNA, 25 bp, Artificial
  probe
  misc_feature (1)..(25): SEQ ID NO: 2310; WAN024D3K; Start 213; Stop 237
agagcagaaggagatatttgaatcc

SEQ ID NO: 321568 - DNA, 25 bp, Artificial
  probe
  misc_feature (1)..(25): SEQ ID NO: 2310; WAN024D3K; Start 170; Stop 194
aaattgagcacaaagactgttccaa

SEQ ID NO: 321569 - DNA, 25 bp, Artificial
  probe
  misc_feature (1)..(25): SEQ ID NO: 2310; WAN024D3K; Start 171; Stop 195
aattgagcacaaagactgttccaag

SEQ ID NO: 321570 - DNA, 25 bp, Artificial
  probe
  misc_feature (1)..(25): SEQ ID NO: 2310; WAN024D3K; Start 178; Stop 202
cacaaagactgttccaagattgacc

SEQ ID NO: 321571 - DNA, 25 bp, Artificial
  probe
  misc_feature (1)..(25): SEQ ID NO: 2310; WAN024D3K; Start 179; Stop 203
acaaagactgttccaagattgacca

SEQ ID NO: 321572 - DNA, 25 bp, Artificial
  probe
  misc_feature (1)..(25): SEQ ID NO: 2310; WAN024D3K; Start 175; Stop 199
gagcacaaagactgttccaagattg

SEQ ID NO: 321573 - DNA, 25 bp, Artificial
  probe
  misc_feature (1)..(25): SEQ ID NO: 2310; WAN024D3K; Start 136; Stop 160
ttagttgctcttgaaatggaacggt

SEQ ID NO: 321574 - DNA, 25 bp, Artificial
  probe
  misc_feature (1)..(25): SEQ ID NO: 2310; WAN024D3K; Start 177; Stop 201
gcacaaagactgttccaagattgac

SEQ ID NO: 321575 - DNA, 25 bp, Artificial
  probe
  misc_feature (1)..(25): SEQ ID NO: 2310; WAN024D3K; Start 176; Stop 200
agcacaaagactgttccaagattga

SEQ ID NO: 321576 - DNA, 25 bp, Artificial
  probe
  misc_feature (1)..(25): SEQ ID NO: 2310; WAN024D3K; Start 174; Stop 198
tgagcacaaagactgttccaagatt

SEQ ID NO: 321577 - DNA, 25 bp, Artificial
  probe
  misc_feature (1)..(25): SEQ ID NO: 2310; WAN024D3K; Start 173; Stop 197
ttgagcacaaagactgttccaagat

SEQ ID NO: 321578 - DNA, 25 bp, Artificial
  probe
  misc_feature (1)..(25): SEQ ID NO: 2310; WAN024D3K; Start 172; Stop 196
attgagcacaaagactgttccaaga

SEQ ID NO: 321579 - DNA, 25 bp, Artificial
  probe
  misc_feature (1)..(25): SEQ ID NO: 2310; WAN024D3K; Start 210; Stop 234
caaagagcagaaggagatatttgaa

SEQ ID NO: 321580 - DNA, 25 bp, Artificial
  probe
  misc_feature (1)..(25): SEQ ID NO: 2310; WAN024D3K; Start 182; Stop 206
aagactgttccaagattgaccaaaa

SEQ ID NO: 321581 - DNA, 25 bp, Artificial
  probe
  misc_feature (1)..(25): SEQ ID NO: 2310; WAN024D3K; Start 208; Stop 232
atcaaagagcagaaggagatatttg

SEQ ID NO: 321582 - DNA, 25 bp, Artificial
  probe
  misc_feature (1)..(25): SEQ ID NO: 2310; WAN024D3K; Start 137; Stop 161
tagttgctcttgaaatggaacggtg

SEQ ID NO: 321583 - DNA, 25 bp, Artificial
  probe
  misc_feature (1)..(25): SEQ ID NO: 2310; WAN024D3K; Start 222; Stop 246
ggagatatttgaatcctgttgtaaa

SEQ ID NO: 321584 - DNA, 25 bp, Artificial
  probe
  misc_feature (1)..(25): SEQ ID NO: 2310; WAN024D3K; Start 205; Stop 229
aaaatcaaagagcagaaggagatat

SEQ ID NO: 321585 - DNA, 25 bp, Artificial
  probe
  misc_feature (1)..(25): SEQ ID NO: 2310; WAN024D3K; Start 132; Stop 156
aaaattagttgctcttgaaatggaa

SEQ ID NO: 321586 - DNA, 25 bp, Artificial
  probe
  misc_feature (1)..(25): SEQ ID NO: 2310; WAN024D3K; Start 169; Stop 193
aaaattgagcacaaagactgttcca

SEQ ID NO: 321587 - DNA, 25 bp, Artificial
  probe
  misc_feature (1)..(25): SEQ ID NO: 2310; WAN024D3K; Start 214; Stop 238
gagcagaaggagatatttgaatcct

SEQ ID NO: 321588 - DNA, 25 bp, Artificial
  probe
  misc_feature (1)..(25): SEQ ID NO: 2310; WAN024D3K; Start 215; Stop 239
agcagaaggagatatttgaatcctg

SEQ ID NO: 321589 - DNA, 25 bp, Artificial
  probe
  misc_feature (1)..(25): SEQ ID NO: 2310; WAN024D3K; Start 216; Stop 240
gcagaaggagatatttgaatcctgt

SEQ ID NO: 321590 - DNA, 25 bp, Artificial
  probe
  misc_feature (1)..(25): SEQ ID NO: 2310; WAN024D3K; Start 219; Stop 243
gaaggagatatttgaatcctgttgt

SEQ ID NO: 321591 - DNA, 25 bp, Artificial
  probe
  misc_feature (1)..(25): SEQ ID NO: 2311; WAN024FSO; Start 230; Stop 254
agtatgctgaggataatggatatga

SEQ ID NO: 321592 - DNA, 25 bp, Artificial
  probe
  misc_feature (1)..(25): SEQ ID NO: 2311; WAN024FSO; Start 387; Stop 411
ggtacaatctacaggtggtgatatt

SEQ ID NO: 321593 - DNA, 25 bp, Artificial
  probe
  misc_feature (1)..(25): SEQ ID NO: 2311; WAN024FSO; Start 386; Stop 410
tggtacaatctacaggtggtgatat

SEQ ID NO: 321594 - DNA, 25 bp, Artificial
  probe
  misc_feature (1)..(25): SEQ ID NO: 2311; WAN024FSO; Start 93; Stop 117
tgagtatgacatcgtgattgtagat

SEQ ID NO: 321595 - DNA, 25 bp, Artificial
  probe
  misc_feature (1)..(25): SEQ ID NO: 2311; WAN024FSO; Start 92; Stop 116
atgagtatgacatcgtgattgtaga

SEQ ID NO: 321596 - DNA, 25 bp, Artificial
  probe
  misc_feature (1)..(25): SEQ ID NO: 2311; WAN024FSO; Start 380; Stop 404
ataacttggtacaatctacaggtgg

SEQ ID NO: 321597 - DNA, 25 bp, Artificial
  probe
  misc_feature (1)..(25): SEQ ID NO: 2311; WAN024FSO; Start 229; Stop 253
aagtatgctgaggataatggatatg

SEQ ID NO: 321598 - DNA, 25 bp, Artificial
  probe
  misc_feature (1)..(25): SEQ ID NO: 2311; WAN024FSO; Start 105; Stop 129
cgtgattgtagataataattcggtg

SEQ ID NO: 321599 - DNA, 25 bp, Artificial
  probe
  misc_feature (1)..(25): SEQ ID NO: 2311; WAN024FSO; Start 347; Stop 371
ttgttagtccagtgttagttgaata

SEQ ID NO: 321600 - DNA, 25 bp, Artificial
  probe
  misc_feature (1)..(25): SEQ ID NO: 2311; WAN024FSO; Start 385; Stop 409
ttggtacaatctacaggtggtgata

SEQ ID NO: 321601 - DNA, 25 bp, Artificial
  probe
  misc_feature (1)..(25): SEQ ID NO: 2311; WAN024FSO; Start 104; Stop 128
tcgtgattgtagataataattcggt

SEQ ID NO: 321602 - DNA, 25 bp, Artificial
  probe
  misc_feature (1)..(25): SEQ ID NO: 2311; WAN024FSO; Start 231; Stop 255
gtatgctgaggataatggatatgat

SEQ ID NO: 321603 - DNA, 25 bp, Artificial
  probe
  misc_feature (1)..(25): SEQ ID NO: 2311; WAN024FSO; Start 91; Stop 115
aatgagtatgacatcgtgattgtag

SEQ ID NO: 321604 - DNA, 25 bp, Artificial
  probe
  misc_feature (1)..(25): SEQ ID NO: 2311; WAN024FSO; Start 381; Stop 405
taacttggtacaatctacaggtggt

SEQ ID NO: 321605 - DNA, 25 bp, Artificial
  probe
  misc_feature (1)..(25): SEQ ID NO: 2311; WAN024FSO; Start 235; Stop 259
gctgaggataatggatatgattaca

SEQ ID NO: 321606 - DNA, 25 bp, Artificial
  probe
  misc_feature (1)..(25): SEQ ID NO: 2311; WAN024FSO; Start 234; Stop 258
tgctgaggataatggatatgattac

SEQ ID NO: 321607 - DNA, 25 bp, Artificial
  probe
  misc_feature (1)..(25): SEQ ID NO: 2311; WAN024FSO; Start 348; Stop 372
tgttagtccagtgttagttgaatat

SEQ ID NO: 321608 - DNA, 25 bp, Artificial
  probe
  misc_feature (1)..(25): SEQ ID NO: 2311; WAN024FSO; Start 379; Stop 403
aataacttggtacaatctacaggtg

SEQ ID NO: 321609 - DNA, 25 bp, Artificial
  probe
  misc_feature (1)..(25): SEQ ID NO: 2311; WAN024FSO; Start 384; Stop 408
cttggtacaatctacaggtggtgat

SEQ ID NO: 321610 - DNA, 25 bp, Artificial
  probe
  misc_feature (1)..(25): SEQ ID NO: 2311; WAN024FSO; Start 232; Stop 256
tatgctgaggataatggatatgatt

SEQ ID NO: 321611 - DNA, 25 bp, Artificial
  probe
  misc_feature (1)..(25): SEQ ID NO: 2311; WAN024FSO; Start 196; Stop 220
agaggatatgcgaatggaaacaata

SEQ ID NO: 321612 - DNA, 25 bp, Artificial
  probe
  misc_feature (1)..(25): SEQ ID NO: 2311; WAN024FSO; Start 195; Stop 219
tagaggatatgcgaatggaaacaat

SEQ ID NO: 321613 - DNA, 25 bp, Artificial
  probe
  misc_feature (1)..(25): SEQ ID NO: 2311; WAN024FSO; Start 194; Stop 218
atagaggatatgcgaatggaaacaa

SEQ ID NO: 321614 - DNA, 25 bp, Artificial
  probe
  misc_feature (1)..(25): SEQ ID NO: 2311; WAN024FSO; Start 193; Stop 217
aatagaggatatgcgaatggaaaca

SEQ ID NO: 321615 - DNA, 25 bp, Artificial
  probe
  misc_feature (1)..(25): SEQ ID NO: 2311; WAN024FSO; Start 94; Stop 118
gagtatgacatcgtgattgtagata

SEQ ID NO: 321616 - DNA, 25 bp, Artificial
  probe
  misc_feature (1)..(25): SEQ ID NO: 2311; WAN024FSO; Start 344; Stop 368
cctttgttagtccagtgttagttga

SEQ ID NO: 321617 - DNA, 25 bp, Artificial
  probe
  misc_feature (1)..(25): SEQ ID NO: 2311; WAN024FSO; Start 134; Stop 158
atagtgtcaaagagttatccaaggc

SEQ ID NO: 321618 - DNA, 25 bp, Artificial
  probe
  misc_feature (1)..(25): SEQ ID NO: 2311; WAN024FSO; Start 345; Stop 369
ctttgttagtccagtgttagttgaa

SEQ ID NO: 321619 - DNA, 25 bp, Artificial
  probe
  misc_feature (1)..(25): SEQ ID NO: 2311; WAN024FSO; Start 192; Stop 216
aaatagaggatatgcgaatggaaac

SEQ ID NO: 321620 - DNA, 25 bp, Artificial
  probe
  misc_feature (1)..(25): SEQ ID NO: 2311; WAN024FSO; Start 329; Stop 353
ataattccttcgttgcctttgttag

SEQ ID NO: 321621 - DNA, 25 bp, Artificial
  probe
  misc_feature (1)..(25): SEQ ID NO: 2311; WAN024FSO; Start 327; Stop 351
aaataattccttcgttgcctttgtt

SEQ ID NO: 321622 - DNA, 25 bp, Artificial
  probe
  misc_feature (1)..(25): SEQ ID NO: 2311; WAN024FSO; Start 140; Stop 164
tcaaagagttatccaaggcgttatc

SEQ ID NO: 321623 - DNA, 25 bp, Artificial
  probe
  misc_feature (1)..(25): SEQ ID NO: 2311; WAN024FSO; Start 328; Stop 352
aataattccttcgttgcctttgtta

SEQ ID NO: 321624 - DNA, 25 bp, Artificial
  probe
  misc_feature (1)..(25): SEQ ID NO: 2312; WAN024CKU; Start 271; Stop 295
attgctaatggtattgctgatgatt

SEQ ID NO: 321625 - DNA, 25 bp, Artificial
  probe
  misc_feature (1)..(25): SEQ ID NO: 2312; WAN024CKU; Start 16; Stop 40
ttacttgtattggttactggttcgg

SEQ ID NO: 321626 - DNA, 25 bp, Artificial
  probe
  misc_feature (1)..(25): SEQ ID NO: 2312; WAN024CKU; Start 19; Stop 43
cttgtattggttactggttcggtag

SEQ ID NO: 321627 - DNA, 25 bp, Artificial
  probe
  misc_feature (1)..(25): SEQ ID NO: 2312; WAN024CKU; Start 270; Stop 294
aattgctaatggtattgctgatgat

SEQ ID NO: 321628 - DNA, 25 bp, Artificial
  probe
  misc_feature (1)..(25): SEQ ID NO: 2312; WAN024CKU; Start 18; Stop 42
acttgtattggttactggttcggta

SEQ ID NO: 321629 - DNA, 25 bp, Artificial
  probe
  misc_feature (1)..(25): SEQ ID NO: 2312; WAN024CKU; Start 17; Stop 41
tacttgtattggttactggttcggt

SEQ ID NO: 321630 - DNA, 25 bp, Artificial
  probe
  misc_feature (1)..(25): SEQ ID NO: 2312; WAN024CKU; Start 486; Stop 510
aatgttacaaccacagtcgttagta

SEQ ID NO: 321631 - DNA, 25 bp, Artificial
  probe
  misc_feature (1)..(25): SEQ ID NO: 2312; WAN024CKU; Start 483; Stop 507
ttcaatgttacaaccacagtcgtta

SEQ ID NO: 321632 - DNA, 25 bp, Artificial
  probe
  misc_feature (1)..(25): SEQ ID NO: 2312; WAN024CKU; Start 20; Stop 44
ttgtattggttactggttcggtagg

SEQ ID NO: 321633 - DNA, 25 bp, Artificial
  probe
  misc_feature (1)..(25): SEQ ID NO: 2312; WAN024CKU; Start 484; Stop 508
tcaatgttacaaccacagtcgttag

SEQ ID NO: 321634 - DNA, 25 bp, Artificial
  probe
  misc_feature (1)..(25): SEQ ID NO: 2312; WAN024CKU; Start 37; Stop 61
tcggtaggtgccagtaatgtagata

SEQ ID NO: 321635 - DNA, 25 bp, Artificial
  probe
  misc_feature (1)..(25): SEQ ID NO: 2312; WAN024CKU; Start 38; Stop 62
cggtaggtgccagtaatgtagatac

SEQ ID NO: 321636 - DNA, 25 bp, Artificial
  probe
  misc_feature (1)..(25): SEQ ID NO: 2312; WAN024CKU; Start 485; Stop 509
caatgttacaaccacagtcgttagt

SEQ ID NO: 321637 - DNA, 25 bp, Artificial
  probe
  misc_feature (1)..(25): SEQ ID NO: 2312; WAN024CKU; Start 487; Stop 511
atgttacaaccacagtcgttagtaa

SEQ ID NO: 321638 - DNA, 25 bp, Artificial
  probe
  misc_feature (1)..(25): SEQ ID NO: 2312; WAN024CKU; Start 39; Stop 63
ggtaggtgccagtaatgtagataca

SEQ ID NO: 321639 - DNA, 25 bp, Artificial
  probe
  misc_feature (1)..(25): SEQ ID NO: 2312; WAN024CKU; Start 479; Stop 503
catgttcaatgttacaaccacagtc

SEQ ID NO: 321640 - DNA, 25 bp, Artificial
  probe
  misc_feature (1)..(25): SEQ ID NO: 2312; WAN024CKU; Start 480; Stop 504
atgttcaatgttacaaccacagtcg

SEQ ID NO: 321641 - DNA, 25 bp, Artificial
  probe
  misc_feature (1)..(25): SEQ ID NO: 2312; WAN024CKU; Start 22; Stop 46
gtattggttactggttcggtaggtg

SEQ ID NO: 321642 - DNA, 25 bp, Artificial
  probe
  misc_feature (1)..(25): SEQ ID NO: 2312; WAN024CKU; Start 482; Stop 506
gttcaatgttacaaccacagtcgtt

SEQ ID NO: 321643 - DNA, 25 bp, Artificial
  probe
  misc_feature (1)..(25): SEQ ID NO: 2312; WAN024CKU; Start 272; Stop 296
ttgctaatggtattgctgatgattt

SEQ ID NO: 321644 - DNA, 25 bp, Artificial
  probe
  misc_feature (1)..(25): SEQ ID NO: 2312; WAN024CKU; Start 15; Stop 39
tttacttgtattggttactggttcg

SEQ ID NO: 321645 - DNA, 25 bp, Artificial
  probe
  misc_feature (1)..(25): SEQ ID NO: 2312; WAN024CKU; Start 364; Stop 388
tgggacaatcacatagttcaaagaa

SEQ ID NO: 321646 - DNA, 25 bp, Artificial
  probe
  misc_feature (1)..(25): SEQ ID NO: 2312; WAN024CKU; Start 365; Stop 389
gggacaatcacatagttcaaagaaa

SEQ ID NO: 321647 - DNA, 25 bp, Artificial
  probe
  misc_feature (1)..(25): SEQ ID NO: 2312; WAN024CKU; Start 269; Stop 293
aaattgctaatggtattgctgatga

SEQ ID NO: 321648 - DNA, 25 bp, Artificial
  probe
  misc_feature (1)..(25): SEQ ID NO: 2312; WAN024CKU; Start 36; Stop 60
ttcggtaggtgccagtaatgtagat

SEQ ID NO: 321649 - DNA, 25 bp, Artificial
  probe
  misc_feature (1)..(25): SEQ ID NO: 2312; WAN024CKU; Start 340; Stop 364
tgtcccaatatgaactctactatgt

SEQ ID NO: 321650 - DNA, 25 bp, Artificial
  probe
  misc_feature (1)..(25): SEQ ID NO: 2312; WAN024CKU; Start 273; Stop 297
tgctaatggtattgctgatgattta

SEQ ID NO: 321651 - DNA, 25 bp, Artificial
  probe
  misc_feature (1)..(25): SEQ ID NO: 2312; WAN024CKU; Start 21; Stop 45
tgtattggttactggttcggtaggt

SEQ ID NO: 321652 - DNA, 25 bp, Artificial
  probe
  misc_feature (1)..(25): SEQ ID NO: 2312; WAN024CKU; Start 393; Stop 417
atcaattctaaaggagttgggacat

SEQ ID NO: 321653 - DNA, 25 bp, Artificial
  probe
  misc_feature (1)..(25): SEQ ID NO: 2312; WAN024CKU; Start 178; Stop 202
atatttgttgaagaggtagttccgc

SEQ ID NO: 321654 - DNA, 25 bp, Artificial
  probe
  misc_feature (1)..(25): SEQ ID NO: 2312; WAN024CKU; Start 345; Stop 369
caatatgaactctactatgtgggac

SEQ ID NO: 321655 - DNA, 25 bp, Artificial
  probe
  misc_feature (1)..(25): SEQ ID NO: 2312; WAN024CKU; Start 341; Stop 365
gtcccaatatgaactctactatgtg

SEQ ID NO: 321656 - DNA, 25 bp, Artificial
  probe
  misc_feature (1)..(25): SEQ ID NO: 2312; WAN024CKU; Start 394; Stop 418
tcaattctaaaggagttgggacata

SEQ ID NO: 321657 - DNA, 25 bp, Artificial
  probe
  misc_feature (1)..(25): SEQ ID NO: 2313; WAN024AZD; Start 41; Stop 65
caactaccgaactcaaccaaattat

SEQ ID NO: 321658 - DNA, 25 bp, Artificial
  probe
  misc_feature (1)..(25): SEQ ID NO: 2313; WAN024AZD; Start 44; Stop 68
ctaccgaactcaaccaaattatagg

SEQ ID NO: 321659 - DNA, 25 bp, Artificial
  probe
  misc_feature (1)..(25): SEQ ID NO: 2313; WAN024AZD; Start 43; Stop 67
actaccgaactcaaccaaattatag

SEQ ID NO: 321660 - DNA, 25 bp, Artificial
  probe
  misc_feature (1)..(25): SEQ ID NO: 2313; WAN024AZD; Start 71; Stop 95
gaggatggtgggaagatttcttata

SEQ ID NO: 321661 - DNA, 25 bp, Artificial
  probe
  misc_feature (1)..(25): SEQ ID NO: 2313; WAN024AZD; Start 72; Stop 96
aggatggtgggaagatttcttatat

SEQ ID NO: 321662 - DNA, 25 bp, Artificial
  probe
  misc_feature (1)..(25): SEQ ID NO: 2313; WAN024AZD; Start 42; Stop 66
aactaccgaactcaaccaaattata

SEQ ID NO: 321663 - DNA, 25 bp, Artificial
  probe
  misc_feature (1)..(25): SEQ ID NO: 2313; WAN024AZD; Start 70; Stop 94
ggaggatggtgggaagatttcttat

SEQ ID NO: 321664 - DNA, 25 bp, Artificial
  probe
  misc_feature (1)..(25): SEQ ID NO: 2313; WAN024AZD; Start 52; Stop 76
ctcaaccaaattataggtggaggat

SEQ ID NO: 321665 - DNA, 25 bp, Artificial
  probe
  misc_feature (1)..(25): SEQ ID NO: 2313; WAN024AZD; Start 53; Stop 77
tcaaccaaattataggtggaggatg

SEQ ID NO: 321666 - DNA, 25 bp, Artificial
  probe
  misc_feature (1)..(25): SEQ ID NO: 2313; WAN024AZD; Start 45; Stop 69
taccgaactcaaccaaattataggt

SEQ ID NO: 321667 - DNA, 25 bp, Artificial
  probe
  misc_feature (1)..(25): SEQ ID NO: 2313; WAN024AZD; Start 50; Stop 74
aactcaaccaaattataggtggagg

SEQ ID NO: 321668 - DNA, 25 bp, Artificial
  probe
  misc_feature (1)..(25): SEQ ID NO: 2313; WAN024AZD; Start 49; Stop 73
gaactcaaccaaattataggtggag

SEQ ID NO: 321669 - DNA, 25 bp, Artificial
  probe
  misc_feature (1)..(25): SEQ ID NO: 2313; WAN024AZD; Start 58; Stop 82
caaattataggtggaggatggtggg

SEQ ID NO: 321670 - DNA, 25 bp, Artificial
  probe
  misc_feature (1)..(25): SEQ ID NO: 2313; WAN024AZD; Start 48; Stop 72
cgaactcaaccaaattataggtgga

SEQ ID NO: 321671 - DNA, 25 bp, Artificial
  probe
  misc_feature (1)..(25): SEQ ID NO: 2313; WAN024AZD; Start 46; Stop 70
accgaactcaaccaaattataggtg

SEQ ID NO: 321672 - DNA, 25 bp, Artificial
  probe
  misc_feature (1)..(25): SEQ ID NO: 2313; WAN024AZD; Start 60; Stop 84
aattataggtggaggatggtgggaa

SEQ ID NO: 321673 - DNA, 25 bp, Artificial
  probe
  misc_feature (1)..(25): SEQ ID NO: 2313; WAN024AZD; Start 59; Stop 83
aaattataggtggaggatggtggga

SEQ ID NO: 321674 - DNA, 25 bp, Artificial
  probe
  misc_feature (1)..(25): SEQ ID NO: 2313; WAN024AZD; Start 54; Stop 78
caaccaaattataggtggaggatgg

SEQ ID NO: 321675 - DNA, 25 bp, Artificial
  probe
  misc_feature (1)..(25): SEQ ID NO: 2313; WAN024AZD; Start 51; Stop 75
actcaaccaaattataggtggagga

SEQ ID NO: 321676 - DNA, 25 bp, Artificial
  probe
  misc_feature (1)..(25): SEQ ID NO: 2313; WAN024AZD; Start 73; Stop 97
ggatggtgggaagatttcttatata

SEQ ID NO: 321677 - DNA, 25 bp, Artificial
  probe
  misc_feature (1)..(25): SEQ ID NO: 2313; WAN024AZD; Start 61; Stop 85
attataggtggaggatggtgggaag

SEQ ID NO: 321678 - DNA, 25 bp, Artificial
  probe
  misc_feature (1)..(25): SEQ ID NO: 2313; WAN024AZD; Start 47; Stop 71
ccgaactcaaccaaattataggtgg

SEQ ID NO: 321679 - DNA, 25 bp, Artificial
  probe
  misc_feature (1)..(25): SEQ ID NO: 2313; WAN024AZD; Start 69; Stop 93
tggaggatggtgggaagatttctta

SEQ ID NO: 321680 - DNA, 25 bp, Artificial
  probe
  misc_feature (1)..(25): SEQ ID NO: 2313; WAN024AZD; Start 128; Stop 152
aaggattttatcagccaatacaact

SEQ ID NO: 321681 - DNA, 25 bp, Artificial
  probe
  misc_feature (1)..(25): SEQ ID NO: 2313; WAN024AZD; Start 57; Stop 81
ccaaattataggtggaggatggtgg

SEQ ID NO: 321682 - DNA, 25 bp, Artificial
  probe
  misc_feature (1)..(25): SEQ ID NO: 2313; WAN024AZD; Start 63; Stop 87
tataggtggaggatggtgggaagat

SEQ ID NO: 321683 - DNA, 25 bp, Artificial
  probe
  misc_feature (1)..(25): SEQ ID NO: 2313; WAN024AZD; Start 76; Stop 100
tggtgggaagatttcttatatagat

SEQ ID NO: 321684 - DNA, 25 bp, Artificial
  probe
  misc_feature (1)..(25): SEQ ID NO: 2313; WAN024AZD; Start 75; Stop 99
atggtgggaagatttcttatataga

SEQ ID NO: 321685 - DNA, 25 bp, Artificial
  probe
  misc_feature (1)..(25): SEQ ID NO: 2313; WAN024AZD; Start 74; Stop 98
gatggtgggaagatttcttatatag

SEQ ID NO: 321686 - DNA, 25 bp, Artificial
  probe
  misc_feature (1)..(25): SEQ ID NO: 2313; WAN024AZD; Start 127; Stop 151
aaaggattttatcagccaatacaac

SEQ ID NO: 321687 - DNA, 25 bp, Artificial
  probe
  misc_feature (1)..(25): SEQ ID NO: 2313; WAN024AZD; Start 129; Stop 153
aggattttatcagccaatacaacta

SEQ ID NO: 321688 - DNA, 25 bp, Artificial
  probe
  misc_feature (1)..(25): SEQ ID NO: 2313; WAN024AZD; Start 62; Stop 86
ttataggtggaggatggtgggaaga

SEQ ID NO: 321689 - DNA, 25 bp, Artificial
  probe
  misc_feature (1)..(25): SEQ ID NO: 2313; WAN024AZD; Start 130; Stop 154
ggattttatcagccaatacaactat

SEQ ID NO: 321690 - DNA, 25 bp, Artificial
  probe
  misc_feature (1)..(25): SEQ ID NO: 2314; WAN024DHR; Start 69; Stop 93
tggaggattgtgggaagatttatta

SEQ ID NO: 321691 - DNA, 25 bp, Artificial
  probe
  misc_feature (1)..(25): SEQ ID NO: 2314; WAN024DHR; Start 68; Stop 92
gtggaggattgtgggaagatttatt

SEQ ID NO: 321692 - DNA, 25 bp, Artificial
  probe
  misc_feature (1)..(25): SEQ ID NO: 2314; WAN024DHR; Start 70; Stop 94
ggaggattgtgggaagatttattat

SEQ ID NO: 321693 - DNA, 25 bp, Artificial
  probe
  misc_feature (1)..(25): SEQ ID NO: 2314; WAN024DHR; Start 67; Stop 91
ggtggaggattgtgggaagatttat

SEQ ID NO: 321694 - DNA, 25 bp, Artificial
  probe
  misc_feature (1)..(25): SEQ ID NO: 2314; WAN024DHR; Start 110; Stop 134
atgctcattacatcacataactaat

SEQ ID NO: 321695 - DNA, 25 bp, Artificial
  probe
  misc_feature (1)..(25): SEQ ID NO: 2314; WAN024DHR; Start 107; Stop 131
gatatgctcattacatcacataact

SEQ ID NO: 321696 - DNA, 25 bp, Artificial
  probe
  misc_feature (1)..(25): SEQ ID NO: 2314; WAN024DHR; Start 106; Stop 130
agatatgctcattacatcacataac

SEQ ID NO: 321697 - DNA, 25 bp, Artificial
  probe
  misc_feature (1)..(25): SEQ ID NO: 2314; WAN024DHR; Start 103; Stop 127
aatagatatgctcattacatcacat

SEQ ID NO: 321698 - DNA, 25 bp, Artificial
  probe
  misc_feature (1)..(25): SEQ ID NO: 2314; WAN024DHR; Start 66; Stop 90
aggtggaggattgtgggaagattta

SEQ ID NO: 321699 - DNA, 25 bp, Artificial
  probe
  misc_feature (1)..(25): SEQ ID NO: 2314; WAN024DHR; Start 109; Stop 133
tatgctcattacatcacataactaa

SEQ ID NO: 321700 - DNA, 25 bp, Artificial
  probe
  misc_feature (1)..(25): SEQ ID NO: 2314; WAN024DHR; Start 102; Stop 126
taatagatatgctcattacatcaca

SEQ ID NO: 321701 - DNA, 25 bp, Artificial
  probe
  misc_feature (1)..(25): SEQ ID NO: 2314; WAN024DHR; Start 71; Stop 95
gaggattgtgggaagatttattata

SEQ ID NO: 321702 - DNA, 25 bp, Artificial
  probe
  misc_feature (1)..(25): SEQ ID NO: 2314; WAN024DHR; Start 108; Stop 132
atatgctcattacatcacataacta

SEQ ID NO: 321703 - DNA, 25 bp, Artificial
  probe
  misc_feature (1)..(25): SEQ ID NO: 2314; WAN024DHR; Start 58; Stop 82
caaattacaggtggaggattgtggg

SEQ ID NO: 321704 - DNA, 25 bp, Artificial
  probe
  misc_feature (1)..(25): SEQ ID NO: 2314; WAN024DHR; Start 60; Stop 84
aattacaggtggaggattgtgggaa

SEQ ID NO: 321705 - DNA, 25 bp, Artificial
  probe
  misc_feature (1)..(25): SEQ ID NO: 2314; WAN024DHR; Start 59; Stop 83
aaattacaggtggaggattgtggga

SEQ ID NO: 321706 - DNA, 25 bp, Artificial
  probe
  misc_feature (1)..(25): SEQ ID NO: 2314; WAN024DHR; Start 105; Stop 129
tagatatgctcattacatcacataa

SEQ ID NO: 321707 - DNA, 25 bp, Artificial
  probe
  misc_feature (1)..(25): SEQ ID NO: 2314; WAN024DHR; Start 61; Stop 85
attacaggtggaggattgtgggaag

SEQ ID NO: 321708 - DNA, 25 bp, Artificial
  probe
  misc_feature (1)..(25): SEQ ID NO: 2314; WAN024DHR; Start 65; Stop 89
caggtggaggattgtgggaagattt

SEQ ID NO: 321709 - DNA, 25 bp, Artificial
  probe
  misc_feature (1)..(25): SEQ ID NO: 2314; WAN024DHR; Start 104; Stop 128
atagatatgctcattacatcacata

SEQ ID NO: 321710 - DNA, 25 bp, Artificial
  probe
  misc_feature (1)..(25): SEQ ID NO: 2314; WAN024DHR; Start 72; Stop 96
aggattgtgggaagatttattatat

SEQ ID NO: 321711 - DNA, 25 bp, Artificial
  probe
  misc_feature (1)..(25): SEQ ID NO: 2314; WAN024DHR; Start 63; Stop 87
tacaggtggaggattgtgggaagat

SEQ ID NO: 321712 - DNA, 25 bp, Artificial
  probe
  misc_feature (1)..(25): SEQ ID NO: 2314; WAN024DHR; Start 62; Stop 86
ttacaggtggaggattgtgggaaga

SEQ ID NO: 321713 - DNA, 25 bp, Artificial
  probe
  misc_feature (1)..(25): SEQ ID NO: 2315; WAN024D94; Start 87; Stop 111
gacagtaggagaattgctagaacat

SEQ ID NO: 321714 - DNA, 25 bp, Artificial
  probe
  misc_feature (1)..(25): SEQ ID NO: 2315; WAN024D94; Start 85; Stop 109
atgacagtaggagaattgctagaac

SEQ ID NO: 321715 - DNA, 25 bp, Artificial
  probe
  misc_feature (1)..(25): SEQ ID NO: 2315; WAN024D94; Start 83; Stop 107
ctatgacagtaggagaattgctaga

SEQ ID NO: 321716 - DNA, 25 bp, Artificial
  probe
  misc_feature (1)..(25): SEQ ID NO: 2315; WAN024D94; Start 293; Stop 317
ttgagatgacagacaaggaattgaa

SEQ ID NO: 321717 - DNA, 25 bp, Artificial
  probe
  misc_feature (1)..(25): SEQ ID NO: 2315; WAN024D94; Start 38; Stop 62
aatacaatactcttggagccttgat

SEQ ID NO: 321718 - DNA, 25 bp, Artificial
  probe
  misc_feature (1)..(25): SEQ ID NO: 2315; WAN024D94; Start 39; Stop 63
atacaatactcttggagccttgatg

SEQ ID NO: 321719 - DNA, 25 bp, Artificial
  probe
  misc_feature (1)..(25): SEQ ID NO: 2315; WAN024D94; Start 86; Stop 110
tgacagtaggagaattgctagaaca

SEQ ID NO: 321720 - DNA, 25 bp, Artificial
  probe
  misc_feature (1)..(25): SEQ ID NO: 2315; WAN024D94; Start 84; Stop 108
tatgacagtaggagaattgctagaa

SEQ ID NO: 321721 - DNA, 25 bp, Artificial
  probe
  misc_feature (1)..(25): SEQ ID NO: 2315; WAN024D94; Start 37; Stop 61
caatacaatactcttggagccttga

SEQ ID NO: 321722 - DNA, 25 bp, Artificial
  probe
  misc_feature (1)..(25): SEQ ID NO: 2315; WAN024D94; Start 36; Stop 60
tcaatacaatactcttggagccttg

SEQ ID NO: 321723 - DNA, 25 bp, Artificial
  probe
  misc_feature (1)..(25): SEQ ID NO: 2315; WAN024D94; Start 88; Stop 112
acagtaggagaattgctagaacatg

SEQ ID NO: 321724 - DNA, 25 bp, Artificial
  probe
  misc_feature (1)..(25): SEQ ID NO: 2315; WAN024D94; Start 395; Stop 419
atgtgcgtatgattcctaagtcaac

SEQ ID NO: 321725 - DNA, 25 bp, Artificial
  probe
  misc_feature (1)..(25): SEQ ID NO: 2315; WAN024D94; Start 82; Stop 106
actatgacagtaggagaattgctag

SEQ ID NO: 321726 - DNA, 25 bp, Artificial
  probe
  misc_feature (1)..(25): SEQ ID NO: 2315; WAN024D94; Start 89; Stop 113
cagtaggagaattgctagaacatgg

SEQ ID NO: 321727 - DNA, 25 bp, Artificial
  probe
  misc_feature (1)..(25): SEQ ID NO: 2315; WAN024D94; Start 92; Stop 116
taggagaattgctagaacatggtga

SEQ ID NO: 321728 - DNA, 25 bp, Artificial
  probe
  misc_feature (1)..(25): SEQ ID NO: 2315; WAN024D94; Start 91; Stop 115
gtaggagaattgctagaacatggtg

SEQ ID NO: 321729 - DNA, 25 bp, Artificial
  probe
  misc_feature (1)..(25): SEQ ID NO: 2315; WAN024D94; Start 90; Stop 114
agtaggagaattgctagaacatggt

SEQ ID NO: 321730 - DNA, 25 bp, Artificial
  probe
  misc_feature (1)..(25): SEQ ID NO: 2315; WAN024D94; Start 680; Stop 704
ttgctaagttcaatgttgacgagat

SEQ ID NO: 321731 - DNA, 25 bp, Artificial
  probe
  misc_feature (1)..(25): SEQ ID NO: 2315; WAN024D94; Start 460; Stop 484
gaatatagtcgtgacaatgttgcgg

SEQ ID NO: 321732 - DNA, 25 bp, Artificial
  probe
  misc_feature (1)..(25): SEQ ID NO: 2315; WAN024D94; Start 459; Stop 483
ggaatatagtcgtgacaatgttgcg

SEQ ID NO: 321733 - DNA, 25 bp, Artificial
  probe
  misc_feature (1)..(25): SEQ ID NO: 2315; WAN024D94; Start 458; Stop 482
cggaatatagtcgtgacaatgttgc

SEQ ID NO: 321734 - DNA, 25 bp, Artificial
  probe
  misc_feature (1)..(25): SEQ ID NO: 2315; WAN024D94; Start 682; Stop 706
gctaagttcaatgttgacgagatga

SEQ ID NO: 321735 - DNA, 25 bp, Artificial
  probe
  misc_feature (1)..(25): SEQ ID NO: 2315; WAN024D94; Start 394; Stop 418
catgtgcgtatgattcctaagtcaa

SEQ ID NO: 321736 - DNA, 25 bp, Artificial
  probe
  misc_feature (1)..(25): SEQ ID NO: 2315; WAN024D94; Start 40; Stop 64
tacaatactcttggagccttgatgg

SEQ ID NO: 321737 - DNA, 25 bp, Artificial
  probe
  misc_feature (1)..(25): SEQ ID NO: 2315; WAN024D94; Start 681; Stop 705
tgctaagttcaatgttgacgagatg

SEQ ID NO: 321738 - DNA, 25 bp, Artificial
  probe
  misc_feature (1)..(25): SEQ ID NO: 2315; WAN024D94; Start 97; Stop 121
gaattgctagaacatggtgaccttg

SEQ ID NO: 321739 - DNA, 25 bp, Artificial
  probe
  misc_feature (1)..(25): SEQ ID NO: 2315; WAN024D94; Start 96; Stop 120
agaattgctagaacatggtgacctt

SEQ ID NO: 321740 - DNA, 25 bp, Artificial
  probe
  misc_feature (1)..(25): SEQ ID NO: 2315; WAN024D94; Start 320; Stop 344
aacgaattgagtcttattatgatgg

SEQ ID NO: 321741 - DNA, 25 bp, Artificial
  probe
  misc_feature (1)..(25): SEQ ID NO: 2315; WAN024D94; Start 72; Stop 96
ttatggtggtactatgacagtagga

SEQ ID NO: 321742 - DNA, 25 bp, Artificial
  probe
  misc_feature (1)..(25): SEQ ID NO: 2315; WAN024D94; Start 73; Stop 97
tatggtggtactatgacagtaggag

SEQ ID NO: 321743 - DNA, 25 bp, Artificial
  probe
  misc_feature (1)..(25): SEQ ID NO: 2315; WAN024D94; Start 80; Stop 104
gtactatgacagtaggagaattgct

SEQ ID NO: 321744 - DNA, 25 bp, Artificial
  probe
  misc_feature (1)..(25): SEQ ID NO: 2315; WAN024D94; Start 79; Stop 103
ggtactatgacagtaggagaattgc

SEQ ID NO: 321745 - DNA, 25 bp, Artificial
  probe
  misc_feature (1)..(25): SEQ ID NO: 2315; WAN024D94; Start 396; Stop 420
tgtgcgtatgattcctaagtcaaca

SEQ ID NO: 321746 - DNA, 25 bp, Artificial
  probe
  misc_feature (1)..(25): SEQ ID NO: 2316; WAN024G3P; Start 745; Stop 769
ccatctattgtcttacctgctgtta

SEQ ID NO: 321747 - DNA, 25 bp, Artificial
  probe
  misc_feature (1)..(25): SEQ ID NO: 2316; WAN024G3P; Start 1581; Stop 1605
tattcagatagttgctaccagagga

SEQ ID NO: 321748 - DNA, 25 bp, Artificial
  probe
  misc_feature (1)..(25): SEQ ID NO: 2316; WAN024G3P; Start 1544; Stop 1568
attatagagagatgaaggtggatgc

SEQ ID NO: 321749 - DNA, 25 bp, Artificial
  probe
  misc_feature (1)..(25): SEQ ID NO: 2316; WAN024G3P; Start 778; Stop 802
caactgagcaatatggaagagaatg

SEQ ID NO: 321750 - DNA, 25 bp, Artificial
  probe
  misc_feature (1)..(25): SEQ ID NO: 2316; WAN024G3P; Start 1580; Stop 1604
gtattcagatagttgctaccagagg

SEQ ID NO: 321751 - DNA, 25 bp, Artificial
  probe
  misc_feature (1)..(25): SEQ ID NO: 2316; WAN024G3P; Start 860; Stop 884
attatatcgctgctattggaggaac

SEQ ID NO: 321752 - DNA, 25 bp, Artificial
  probe
  misc_feature (1)..(25): SEQ ID NO: 2316; WAN024G3P; Start 746; Stop 770
catctattgtcttacctgctgttac

SEQ ID NO: 321753 - DNA, 25 bp, Artificial
  probe
  misc_feature (1)..(25): SEQ ID NO: 2316; WAN024G3P; Start 859; Stop 883
aattatatcgctgctattggaggaa

SEQ ID NO: 321754 - DNA, 25 bp, Artificial
  probe
  misc_feature (1)..(25): SEQ ID NO: 2316; WAN024G3P; Start 1244; Stop 1268
gtagagcgtatgatagacagttact

SEQ ID NO: 321755 - DNA, 25 bp, Artificial
  probe
  misc_feature (1)..(25): SEQ ID NO: 2316; WAN024G3P; Start 1237; Stop 1261
ccattctgtagagcgtatgatagac

SEQ ID NO: 321756 - DNA, 25 bp, Artificial
  probe
  misc_feature (1)..(25): SEQ ID NO: 2316; WAN024G3P; Start 1528; Stop 1552
ccacaagttcggagttattatagag

SEQ ID NO: 321757 - DNA, 25 bp, Artificial
  probe
  misc_feature (1)..(25): SEQ ID NO: 2316; WAN024G3P; Start 471; Stop 495
ttaccgattctgtattaagcgagac

SEQ ID NO: 321758 - DNA, 25 bp, Artificial
  probe
  misc_feature (1)..(25): SEQ ID NO: 2316; WAN024G3P; Start 1583; Stop 1607
ttcagatagttgctaccagaggaat

SEQ ID NO: 321759 - DNA, 25 bp, Artificial
  probe
  misc_feature (1)..(25): SEQ ID NO: 2316; WAN024G3P; Start 1582; Stop 1606
attcagatagttgctaccagaggaa

SEQ ID NO: 321760 - DNA, 25 bp, Artificial
  probe
  misc_feature (1)..(25): SEQ ID NO: 2316; WAN024G3P; Start 85; Stop 109
gatggattcattgctactatgcctt

SEQ ID NO: 321761 - DNA, 25 bp, Artificial
  probe
  misc_feature (1)..(25): SEQ ID NO: 2316; WAN024G3P; Start 83; Stop 107
aagatggattcattgctactatgcc

SEQ ID NO: 321762 - DNA, 25 bp, Artificial
  probe
  misc_feature (1)..(25): SEQ ID NO: 2316; WAN024G3P; Start 362; Stop 386
taacgcttgtagttgatgagaagac

SEQ ID NO: 321763 - DNA, 25 bp, Artificial
  probe
  misc_feature (1)..(25): SEQ ID NO: 2316; WAN024G3P; Start 361; Stop 385
gtaacgcttgtagttgatgagaaga

SEQ ID NO: 321764 - DNA, 25 bp, Artificial
  probe
  misc_feature (1)..(25): SEQ ID NO: 2316; WAN024G3P; Start 360; Stop 384
tgtaacgcttgtagttgatgagaag

SEQ ID NO: 321765 - DNA, 25 bp, Artificial
  probe
  misc_feature (1)..(25): SEQ ID NO: 2316; WAN024G3P; Start 359; Stop 383
ctgtaacgcttgtagttgatgagaa

SEQ ID NO: 321766 - DNA, 25 bp, Artificial
  probe
  misc_feature (1)..(25): SEQ ID NO: 2316; WAN024G3P; Start 1584; Stop 1608
tcagatagttgctaccagaggaatg

SEQ ID NO: 321767 - DNA, 25 bp, Artificial
  probe
  misc_feature (1)..(25): SEQ ID NO: 2316; WAN024G3P; Start 744; Stop 768
accatctattgtcttacctgctgtt

SEQ ID NO: 321768 - DNA, 25 bp, Artificial
  probe
  misc_feature (1)..(25): SEQ ID NO: 2316; WAN024G3P; Start 786; Stop 810
caatatggaagagaatgctcaactt

SEQ ID NO: 321769 - DNA, 25 bp, Artificial
  probe
  misc_feature (1)..(25): SEQ ID NO: 2316; WAN024G3P; Start 84; Stop 108
agatggattcattgctactatgcct

SEQ ID NO: 321770 - DNA, 25 bp, Artificial
  probe
  misc_feature (1)..(25): SEQ ID NO: 2316; WAN024G3P; Start 1238; Stop 1262
cattctgtagagcgtatgatagaca

SEQ ID NO: 321771 - DNA, 25 bp, Artificial
  probe
  misc_feature (1)..(25): SEQ ID NO: 2316; WAN024G3P; Start 1243; Stop 1267
tgtagagcgtatgatagacagttac

SEQ ID NO: 321772 - DNA, 25 bp, Artificial
  probe
  misc_feature (1)..(25): SEQ ID NO: 2316; WAN024G3P; Start 747; Stop 771
atctattgtcttacctgctgttaca

SEQ ID NO: 321773 - DNA, 25 bp, Artificial
  probe
  misc_feature (1)..(25): SEQ ID NO: 2316; WAN024G3P; Start 1234; Stop 1258
ttgccattctgtagagcgtatgata

SEQ ID NO: 321774 - DNA, 25 bp, Artificial
  probe
  misc_feature (1)..(25): SEQ ID NO: 2316; WAN024G3P; Start 1529; Stop 1553
cacaagttcggagttattatagaga

SEQ ID NO: 321775 - DNA, 25 bp, Artificial
  probe
  misc_feature (1)..(25): SEQ ID NO: 2316; WAN024G3P; Start 1537; Stop 1561
cggagttattatagagagatgaagg

SEQ ID NO: 321776 - DNA, 25 bp, Artificial
  probe
  misc_feature (1)..(25): SEQ ID NO: 2316; WAN024G3P; Start 1236; Stop 1260
gccattctgtagagcgtatgataga

SEQ ID NO: 321777 - DNA, 25 bp, Artificial
  probe
  misc_feature (1)..(25): SEQ ID NO: 2316; WAN024G3P; Start 474; Stop 498
ccgattctgtattaagcgagacatt

SEQ ID NO: 321778 - DNA, 25 bp, Artificial
  probe
  misc_feature (1)..(25): SEQ ID NO: 2316; WAN024G3P; Start 475; Stop 499
cgattctgtattaagcgagacatta

SEQ ID NO: 321779 - DNA, 25 bp, Artificial
  probe
  misc_feature (1)..(25): SEQ ID NO: 2317; WAN024FQV; Start 529; Stop 553
gcatatataggcaaggctctattga

SEQ ID NO: 321780 - DNA, 25 bp, Artificial
  probe
  misc_feature (1)..(25): SEQ ID NO: 2317; WAN024FQV; Start 465; Stop 489
gttaataacttatcctcacatggct

SEQ ID NO: 321781 - DNA, 25 bp, Artificial
  probe
  misc_feature (1)..(25): SEQ ID NO: 2317; WAN024FQV; Start 612; Stop 636
atggtgctatctgaatctaactaat

SEQ ID NO: 321782 - DNA, 25 bp, Artificial
  probe
  misc_feature (1)..(25): SEQ ID NO: 2317; WAN024FQV; Start 466; Stop 490
ttaataacttatcctcacatggctt

SEQ ID NO: 321783 - DNA, 25 bp, Artificial
  probe
  misc_feature (1)..(25): SEQ ID NO: 2317; WAN024FQV; Start 498; Stop 522
cttaggtgctttcttaggaggaatt

SEQ ID NO: 321784 - DNA, 25 bp, Artificial
  probe
  misc_feature (1)..(25): SEQ ID NO: 2317; WAN024FQV; Start 530; Stop 554
catatataggcaaggctctattgaa

SEQ ID NO: 321785 - DNA, 25 bp, Artificial
  probe
  misc_feature (1)..(25): SEQ ID NO: 2317; WAN024FQV; Start 611; Stop 635
tatggtgctatctgaatctaactaa

SEQ ID NO: 321786 - DNA, 25 bp, Artificial
  probe
  misc_feature (1)..(25): SEQ ID NO: 2317; WAN024FQV; Start 610; Stop 634
ttatggtgctatctgaatctaacta

SEQ ID NO: 321787 - DNA, 25 bp, Artificial
  probe
  misc_feature (1)..(25): SEQ ID NO: 2317; WAN024FQV; Start 127; Stop 151
acagtattagccatagttgcaggaa

SEQ ID NO: 321788 - DNA, 25 bp, Artificial
  probe
  misc_feature (1)..(25): SEQ ID NO: 2317; WAN024FQV; Start 528; Stop 552
agcatatataggcaaggctctattg

SEQ ID NO: 321789 - DNA, 25 bp, Artificial
  probe
  misc_feature (1)..(25): SEQ ID NO: 2317; WAN024FQV; Start 128; Stop 152
cagtattagccatagttgcaggaac

SEQ ID NO: 321790 - DNA, 25 bp, Artificial
  probe
  misc_feature (1)..(25): SEQ ID NO: 2317; WAN024FQV; Start 121; Stop 145
tacccgacagtattagccatagttg

SEQ ID NO: 321791 - DNA, 25 bp, Artificial
  probe
  misc_feature (1)..(25): SEQ ID NO: 2317; WAN024FQV; Start 142; Stop 166
gttgcaggaactgttgttatgttat

SEQ ID NO: 321792 - DNA, 25 bp, Artificial
  probe
  misc_feature (1)..(25): SEQ ID NO: 2317; WAN024FQV; Start 143; Stop 167
ttgcaggaactgttgttatgttatt

SEQ ID NO: 321793 - DNA, 25 bp, Artificial
  probe
  misc_feature (1)..(25): SEQ ID NO: 2317; WAN024FQV; Start 517; Stop 541
ggaattcttggagcatatataggca

SEQ ID NO: 321794 - DNA, 25 bp, Artificial
  probe
  misc_feature (1)..(25): SEQ ID NO: 2317; WAN024FQV; Start 516; Stop 540
aggaattcttggagcatatataggc

SEQ ID NO: 321795 - DNA, 25 bp, Artificial
  probe
  misc_feature (1)..(25): SEQ ID NO: 2317; WAN024FQV; Start 510; Stop 534
cttaggaggaattcttggagcatat

SEQ ID NO: 321796 - DNA, 25 bp, Artificial
  probe
  misc_feature (1)..(25): SEQ ID NO: 2317; WAN024FQV; Start 126; Stop 150
gacagtattagccatagttgcagga

SEQ ID NO: 321797 - DNA, 25 bp, Artificial
  probe
  misc_feature (1)..(25): SEQ ID NO: 2317; WAN024FQV; Start 509; Stop 533
tcttaggaggaattcttggagcata

SEQ ID NO: 321798 - DNA, 25 bp, Artificial
  probe
  misc_feature (1)..(25): SEQ ID NO: 2317; WAN024FQV; Start 190; Stop 214
tgggcactatttatatttggtatga

SEQ ID NO: 321799 - DNA, 25 bp, Artificial
  probe
  misc_feature (1)..(25): SEQ ID NO: 2317; WAN024FQV; Start 119; Stop 143
tatacccgacagtattagccatagt

SEQ ID NO: 321800 - DNA, 25 bp, Artificial
  probe
  misc_feature (1)..(25): SEQ ID NO: 2317; WAN024FQV; Start 472; Stop 496
acttatcctcacatggctttagtag

SEQ ID NO: 321801 - DNA, 25 bp, Artificial
  probe
  misc_feature (1)..(25): SEQ ID NO: 2317; WAN024FQV; Start 511; Stop 535
ttaggaggaattcttggagcatata

SEQ ID NO: 321802 - DNA, 25 bp, Artificial
  probe
  misc_feature (1)..(25): SEQ ID NO: 2317; WAN024FQV; Start 471; Stop 495
aacttatcctcacatggctttagta

SEQ ID NO: 321803 - DNA, 25 bp, Artificial
  probe
  misc_feature (1)..(25): SEQ ID NO: 2317; WAN024FQV; Start 470; Stop 494
taacttatcctcacatggctttagt

SEQ ID NO: 321804 - DNA, 25 bp, Artificial
  probe
  misc_feature (1)..(25): SEQ ID NO: 2317; WAN024FQV; Start 350; Stop 374
caatcttcagcacatggatatgtag

SEQ ID NO: 321805 - DNA, 25 bp, Artificial
  probe
  misc_feature (1)..(25): SEQ ID NO: 2317; WAN024FQV; Start 120; Stop 144
atacccgacagtattagccatagtt

SEQ ID NO: 321806 - DNA, 25 bp, Artificial
  probe
  misc_feature (1)..(25): SEQ ID NO: 2317; WAN024FQV; Start 118; Stop 142
atatacccgacagtattagccatag

SEQ ID NO: 321807 - DNA, 25 bp, Artificial
  probe
  misc_feature (1)..(25): SEQ ID NO: 2317; WAN024FQV; Start 469; Stop 493
ataacttatcctcacatggctttag

SEQ ID NO: 321808 - DNA, 25 bp, Artificial
  probe
  misc_feature (1)..(25): SEQ ID NO: 2317; WAN024FQV; Start 513; Stop 537
aggaggaattcttggagcatatata

SEQ ID NO: 321809 - DNA, 25 bp, Artificial
  probe
  misc_feature (1)..(25): SEQ ID NO: 2317; WAN024FQV; Start 512; Stop 536
taggaggaattcttggagcatatat

SEQ ID NO: 321810 - DNA, 25 bp, Artificial
  probe
  misc_feature (1)..(25): SEQ ID NO: 2317; WAN024FQV; Start 609; Stop 633
tttatggtgctatctgaatctaact

SEQ ID NO: 321811 - DNA, 25 bp, Artificial
  probe
  misc_feature (1)..(25): SEQ ID NO: 2317; WAN024FQV; Start 115; Stop 139
ttaatatacccgacagtattagcca

SEQ ID NO: 321812 - DNA, 25 bp, Artificial
  probe
  misc_feature (1)..(25): SEQ ID NO: 2318; WAN024G5O; Start 776; Stop 800
aagaccataataaggctcataacca

SEQ ID NO: 321813 - DNA, 25 bp, Artificial
  probe
  misc_feature (1)..(25): SEQ ID NO: 2318; WAN024G5O; Start 773; Stop 797
accaagaccataataaggctcataa

SEQ ID NO: 321814 - DNA, 25 bp, Artificial
  probe
  misc_feature (1)..(25): SEQ ID NO: 2318; WAN024G5O; Start 770; Stop 794
aataccaagaccataataaggctca

SEQ ID NO: 321815 - DNA, 25 bp, Artificial
  probe
  misc_feature (1)..(25): SEQ ID NO: 2318; WAN024G5O; Start 768; Stop 792
tgaataccaagaccataataaggct

SEQ ID NO: 321816 - DNA, 25 bp, Artificial
  probe
  misc_feature (1)..(25): SEQ ID NO: 2318; WAN024G5O; Start 777; Stop 801
agaccataataaggctcataaccat

SEQ ID NO: 321817 - DNA, 25 bp, Artificial
  probe
  misc_feature (1)..(25): SEQ ID NO: 2318; WAN024G5O; Start 775; Stop 799
caagaccataataaggctcataacc

SEQ ID NO: 321818 - DNA, 25 bp, Artificial
  probe
  misc_feature (1)..(25): SEQ ID NO: 2318; WAN024G5O; Start 774; Stop 798
ccaagaccataataaggctcataac

SEQ ID NO: 321819 - DNA, 25 bp, Artificial
  probe
  misc_feature (1)..(25): SEQ ID NO: 2318; WAN024G5O; Start 771; Stop 795
ataccaagaccataataaggctcat

SEQ ID NO: 321820 - DNA, 25 bp, Artificial
  probe
  misc_feature (1)..(25): SEQ ID NO: 2318; WAN024G5O; Start 1037; Stop 1061
aatatccagatgtgatgatgattgc

SEQ ID NO: 321821 - DNA, 25 bp, Artificial
  probe
  misc_feature (1)..(25): SEQ ID NO: 2318; WAN024G5O; Start 769; Stop 793
gaataccaagaccataataaggctc

SEQ ID NO: 321822 - DNA, 25 bp, Artificial
  probe
  misc_feature (1)..(25): SEQ ID NO: 2318; WAN024G5O; Start 1799; Stop 1823
aagattatgagcagaccttaacctt

SEQ ID NO: 321823 - DNA, 25 bp, Artificial
  probe
  misc_feature (1)..(25): SEQ ID NO: 2318; WAN024G5O; Start 772; Stop 796
taccaagaccataataaggctcata

SEQ ID NO: 321824 - DNA, 25 bp, Artificial
  probe
  misc_feature (1)..(25): SEQ ID NO: 2318; WAN024G5O; Start 54; Stop 78
ccaacattatctaggagcacatagg

SEQ ID NO: 321825 - DNA, 25 bp, Artificial
  probe
  misc_feature (1)..(25): SEQ ID NO: 2318; WAN024G5O; Start 1431; Stop 1455
tgaagaacagttggaatggtctaac

SEQ ID NO: 321826 - DNA, 25 bp, Artificial
  probe
  misc_feature (1)..(25): SEQ ID NO: 2318; WAN024G5O; Start 1718; Stop 1742
tatggaatactgagttggaagagtg

SEQ ID NO: 321827 - DNA, 25 bp, Artificial
  probe
  misc_feature (1)..(25): SEQ ID NO: 2318; WAN024G5O; Start 767; Stop 791
ttgaataccaagaccataataaggc

SEQ ID NO: 321828 - DNA, 25 bp, Artificial
  probe
  misc_feature (1)..(25): SEQ ID NO: 2318; WAN024G5O; Start 778; Stop 802
gaccataataaggctcataaccatg

SEQ ID NO: 321829 - DNA, 25 bp, Artificial
  probe
  misc_feature (1)..(25): SEQ ID NO: 2318; WAN024G5O; Start 1430; Stop 1454
ctgaagaacagttggaatggtctaa

SEQ ID NO: 321830 - DNA, 25 bp, Artificial
  probe
  misc_feature (1)..(25): SEQ ID NO: 2318; WAN024G5O; Start 1717; Stop 1741
gtatggaatactgagttggaagagt

SEQ ID NO: 321831 - DNA, 25 bp, Artificial
  probe
  misc_feature (1)..(25): SEQ ID NO: 2318; WAN024G5O; Start 1427; Stop 1451
aatctgaagaacagttggaatggtc

SEQ ID NO: 321832 - DNA, 25 bp, Artificial
  probe
  misc_feature (1)..(25): SEQ ID NO: 2318; WAN024G5O; Start 1036; Stop 1060
gaatatccagatgtgatgatgattg

SEQ ID NO: 321833 - DNA, 25 bp, Artificial
  probe
  misc_feature (1)..(25): SEQ ID NO: 2318; WAN024G5O; Start 1429; Stop 1453
tctgaagaacagttggaatggtcta

SEQ ID NO: 321834 - DNA, 25 bp, Artificial
  probe
  misc_feature (1)..(25): SEQ ID NO: 2318; WAN024G5O; Start 1035; Stop 1059
agaatatccagatgtgatgatgatt

SEQ ID NO: 321835 - DNA, 25 bp, Artificial
  probe
  misc_feature (1)..(25): SEQ ID NO: 2318; WAN024G5O; Start 1719; Stop 1743
atggaatactgagttggaagagtgg

SEQ ID NO: 321836 - DNA, 25 bp, Artificial
  probe
  misc_feature (1)..(25): SEQ ID NO: 2318; WAN024G5O; Start 53; Stop 77
tccaacattatctaggagcacatag

SEQ ID NO: 321837 - DNA, 25 bp, Artificial
  probe
  misc_feature (1)..(25): SEQ ID NO: 2318; WAN024G5O; Start 1465; Stop 1489
ccaatgaatgctaagatgaagtatt

SEQ ID NO: 321838 - DNA, 25 bp, Artificial
  probe
  misc_feature (1)..(25): SEQ ID NO: 2318; WAN024G5O; Start 1402; Stop 1426
gaatacggtcaattcctagaatgga

SEQ ID NO: 321839 - DNA, 25 bp, Artificial
  probe
  misc_feature (1)..(25): SEQ ID NO: 2318; WAN024G5O; Start 1439; Stop 1463
agttggaatggtctaacctagaaga

SEQ ID NO: 321840 - DNA, 25 bp, Artificial
  probe
  misc_feature (1)..(25): SEQ ID NO: 2318; WAN024G5O; Start 1438; Stop 1462
cagttggaatggtctaacctagaag

SEQ ID NO: 321841 - DNA, 25 bp, Artificial
  probe
  misc_feature (1)..(25): SEQ ID NO: 2318; WAN024G5O; Start 1428; Stop 1452
atctgaagaacagttggaatggtct

SEQ ID NO: 321842 - DNA, 25 bp, Artificial
  probe
  misc_feature (1)..(25): SEQ ID NO: 2318; WAN024G5O; Start 1435; Stop 1459
gaacagttggaatggtctaacctag

SEQ ID NO: 321843 - DNA, 25 bp, Artificial
  probe
  misc_feature (1)..(25): SEQ ID NO: 2318; WAN024G5O; Start 1030; Stop 1054
aagttagaatatccagatgtgatga

SEQ ID NO: 321844 - DNA, 25 bp, Artificial
  probe
  misc_feature (1)..(25): SEQ ID NO: 2318; WAN024G5O; Start 1792; Stop 1816
ctatggaaagattatgagcagacct

SEQ ID NO: 321845 - DNA, 25 bp, Artificial
  probe
  misc_feature (1)..(25): SEQ ID NO: 2319; WAN024FBC; Start 256; Stop 280
gctcaactagatattcctgtcttgg

SEQ ID NO: 321846 - DNA, 25 bp, Artificial
  probe
  misc_feature (1)..(25): SEQ ID NO: 2319; WAN024FBC; Start 255; Stop 279
ggctcaactagatattcctgtcttg

SEQ ID NO: 321847 - DNA, 25 bp, Artificial
  probe
  misc_feature (1)..(25): SEQ ID NO: 2319; WAN024FBC; Start 353; Stop 377
ccatgacggtacaatcagacatata

SEQ ID NO: 321848 - DNA, 25 bp, Artificial
  probe
  misc_feature (1)..(25): SEQ ID NO: 2319; WAN024FBC; Start 250; Stop 274
atcaaggctcaactagatattcctg

SEQ ID NO: 321849 - DNA, 25 bp, Artificial
  probe
  misc_feature (1)..(25): SEQ ID NO: 2319; WAN024FBC; Start 354; Stop 378
catgacggtacaatcagacatatac

SEQ ID NO: 321850 - DNA, 25 bp, Artificial
  probe
  misc_feature (1)..(25): SEQ ID NO: 2319; WAN024FBC; Start 254; Stop 278
aggctcaactagatattcctgtctt

SEQ ID NO: 321851 - DNA, 25 bp, Artificial
  probe
  misc_feature (1)..(25): SEQ ID NO: 2319; WAN024FBC; Start 253; Stop 277
aaggctcaactagatattcctgtct

SEQ ID NO: 321852 - DNA, 25 bp, Artificial
  probe
  misc_feature (1)..(25): SEQ ID NO: 2319; WAN024FBC; Start 252; Stop 276
caaggctcaactagatattcctgtc

SEQ ID NO: 321853 - DNA, 25 bp, Artificial
  probe
  misc_feature (1)..(25): SEQ ID NO: 2319; WAN024FBC; Start 249; Stop 273
aatcaaggctcaactagatattcct

SEQ ID NO: 321854 - DNA, 25 bp, Artificial
  probe
  misc_feature (1)..(25): SEQ ID NO: 2319; WAN024FBC; Start 251; Stop 275
tcaaggctcaactagatattcctgt

SEQ ID NO: 321855 - DNA, 25 bp, Artificial
  probe
  misc_feature (1)..(25): SEQ ID NO: 2319; WAN024FBC; Start 544; Stop 568
ggctgtactcattatccactccttc

SEQ ID NO: 321856 - DNA, 25 bp, Artificial
  probe
  misc_feature (1)..(25): SEQ ID NO: 2319; WAN024FBC; Start 554; Stop 578
attatccactccttcgccctattat

SEQ ID NO: 321857 - DNA, 25 bp, Artificial
  probe
  misc_feature (1)..(25): SEQ ID NO: 2319; WAN024FBC; Start 203; Stop 227
tgattgtcattgcttgtaacactgc

SEQ ID NO: 321858 - DNA, 25 bp, Artificial
  probe
  misc_feature (1)..(25): SEQ ID NO: 2319; WAN024FBC; Start 546; Stop 570
ctgtactcattatccactccttcgc

SEQ ID NO: 321859 - DNA, 25 bp, Artificial
  probe
  misc_feature (1)..(25): SEQ ID NO: 2319; WAN024FBC; Start 545; Stop 569
gctgtactcattatccactccttcg

SEQ ID NO: 321860 - DNA, 25 bp, Artificial
  probe
  misc_feature (1)..(25): SEQ ID NO: 2319; WAN024FBC; Start 139; Stop 163
gctgagcaaattcgtgaatatactt

SEQ ID NO: 321861 - DNA, 25 bp, Artificial
  probe
  misc_feature (1)..(25): SEQ ID NO: 2319; WAN024FBC; Start 264; Stop 288
agatattcctgtcttgggtgtaatt

SEQ ID NO: 321862 - DNA, 25 bp, Artificial
  probe
  misc_feature (1)..(25): SEQ ID NO: 2319; WAN024FBC; Start 243; Stop 267
ggaagaaatcaaggctcaactagat

SEQ ID NO: 321863 - DNA, 25 bp, Artificial
  probe
  misc_feature (1)..(25): SEQ ID NO: 2319; WAN024FBC; Start 265; Stop 289
gatattcctgtcttgggtgtaattt

SEQ ID NO: 321864 - DNA, 25 bp, Artificial
  probe
  misc_feature (1)..(25): SEQ ID NO: 2319; WAN024FBC; Start 555; Stop 579
ttatccactccttcgccctattatc

SEQ ID NO: 321865 - DNA, 25 bp, Artificial
  probe
  misc_feature (1)..(25): SEQ ID NO: 2319; WAN024FBC; Start 261; Stop 285
actagatattcctgtcttgggtgta

SEQ ID NO: 321866 - DNA, 25 bp, Artificial
  probe
  misc_feature (1)..(25): SEQ ID NO: 2319; WAN024FBC; Start 141; Stop 165
tgagcaaattcgtgaatatacttgg

SEQ ID NO: 321867 - DNA, 25 bp, Artificial
  probe
  misc_feature (1)..(25): SEQ ID NO: 2319; WAN024FBC; Start 553; Stop 577
cattatccactccttcgccctatta

SEQ ID NO: 321868 - DNA, 25 bp, Artificial
  probe
  misc_feature (1)..(25): SEQ ID NO: 2319; WAN024FBC; Start 263; Stop 287
tagatattcctgtcttgggtgtaat

SEQ ID NO: 321869 - DNA, 25 bp, Artificial
  probe
  misc_feature (1)..(25): SEQ ID NO: 2319; WAN024FBC; Start 257; Stop 281
ctcaactagatattcctgtcttggg

SEQ ID NO: 321870 - DNA, 25 bp, Artificial
  probe
  misc_feature (1)..(25): SEQ ID NO: 2319; WAN024FBC; Start 262; Stop 286
ctagatattcctgtcttgggtgtaa

SEQ ID NO: 321871 - DNA, 25 bp, Artificial
  probe
  misc_feature (1)..(25): SEQ ID NO: 2319; WAN024FBC; Start 259; Stop 283
caactagatattcctgtcttgggtg

SEQ ID NO: 321872 - DNA, 25 bp, Artificial
  probe
  misc_feature (1)..(25): SEQ ID NO: 2319; WAN024FBC; Start 258; Stop 282
tcaactagatattcctgtcttgggt

SEQ ID NO: 321873 - DNA, 25 bp, Artificial
  probe
  misc_feature (1)..(25): SEQ ID NO: 2319; WAN024FBC; Start 260; Stop 284
aactagatattcctgtcttgggtgt

SEQ ID NO: 321874 - DNA, 25 bp, Artificial
  probe
  misc_feature (1)..(25): SEQ ID NO: 2319; WAN024FBC; Start 202; Stop 226
atgattgtcattgcttgtaacactg

SEQ ID NO: 321875 - DNA, 25 bp, Artificial
  probe
  misc_feature (1)..(25): SEQ ID NO: 2319; WAN024FBC; Start 142; Stop 166
gagcaaattcgtgaatatacttggc

SEQ ID NO: 321876 - DNA, 25 bp, Artificial
  probe
  misc_feature (1)..(25): SEQ ID NO: 2319; WAN024FBC; Start 248; Stop 272
aaatcaaggctcaactagatattcc

SEQ ID NO: 321877 - DNA, 25 bp, Artificial
  probe
  misc_feature (1)..(25): SEQ ID NO: 2319; WAN024FBC; Start 145; Stop 169
caaattcgtgaatatacttggcagc

SEQ ID NO: 321878 - DNA, 25 bp, Artificial
  probe
  misc_feature (1)..(25): SEQ ID NO: 2320; WAN024GO4; Start 394; Stop 418
ttccttatcatacttggtgtagaga

SEQ ID NO: 321879 - DNA, 25 bp, Artificial
  probe
  misc_feature (1)..(25): SEQ ID NO: 2320; WAN024GO4; Start 395; Stop 419
tccttatcatacttggtgtagagat

SEQ ID NO: 321880 - DNA, 25 bp, Artificial
  probe
  misc_feature (1)..(25): SEQ ID NO: 2320; WAN024GO4; Start 393; Stop 417
attccttatcatacttggtgtagag

SEQ ID NO: 321881 - DNA, 25 bp, Artificial
  probe
  misc_feature (1)..(25): SEQ ID NO: 2320; WAN024GO4; Start 396; Stop 420
ccttatcatacttggtgtagagatt

SEQ ID NO: 321882 - DNA, 25 bp, Artificial
  probe
  misc_feature (1)..(25): SEQ ID NO: 2320; WAN024GO4; Start 400; Stop 424
atcatacttggtgtagagatttcgg

SEQ ID NO: 321883 - DNA, 25 bp, Artificial
  probe
  misc_feature (1)..(25): SEQ ID NO: 2320; WAN024GO4; Start 90; Stop 114
aaacgacttcttccttggtatcatc

SEQ ID NO: 321884 - DNA, 25 bp, Artificial
  probe
  misc_feature (1)..(25): SEQ ID NO: 2320; WAN024GO4; Start 392; Stop 416
aattccttatcatacttggtgtaga

SEQ ID NO: 321885 - DNA, 25 bp, Artificial
  probe
  misc_feature (1)..(25): SEQ ID NO: 2320; WAN024GO4; Start 130; Stop 154
aactgtcttggtaatttcgctatca

SEQ ID NO: 321886 - DNA, 25 bp, Artificial
  probe
  misc_feature (1)..(25): SEQ ID NO: 2320; WAN024GO4; Start 402; Stop 426
catacttggtgtagagatttcggac

SEQ ID NO: 321887 - DNA, 25 bp, Artificial
  probe
  misc_feature (1)..(25): SEQ ID NO: 2320; WAN024GO4; Start 401; Stop 425
tcatacttggtgtagagatttcgga

SEQ ID NO: 321888 - DNA, 25 bp, Artificial
  probe
  misc_feature (1)..(25): SEQ ID NO: 2320; WAN024GO4; Start 127; Stop 151
cataactgtcttggtaatttcgcta

SEQ ID NO: 321889 - DNA, 25 bp, Artificial
  probe
  misc_feature (1)..(25): SEQ ID NO: 2320; WAN024GO4; Start 129; Stop 153
taactgtcttggtaatttcgctatc

SEQ ID NO: 321890 - DNA, 25 bp, Artificial
  probe
  misc_feature (1)..(25): SEQ ID NO: 2320; WAN024GO4; Start 132; Stop 156
ctgtcttggtaatttcgctatcaat

SEQ ID NO: 321891 - DNA, 25 bp, Artificial
  probe
  misc_feature (1)..(25): SEQ ID NO: 2320; WAN024GO4; Start 131; Stop 155
actgtcttggtaatttcgctatcaa

SEQ ID NO: 321892 - DNA, 25 bp, Artificial
  probe
  misc_feature (1)..(25): SEQ ID NO: 2320; WAN024GO4; Start 128; Stop 152
ataactgtcttggtaatttcgctat

SEQ ID NO: 321893 - DNA, 25 bp, Artificial
  probe
  misc_feature (1)..(25): SEQ ID NO: 2320; WAN024GO4; Start 399; Stop 423
tatcatacttggtgtagagatttcg

SEQ ID NO: 321894 - DNA, 25 bp, Artificial
  probe
  misc_feature (1)..(25): SEQ ID NO: 2320; WAN024GO4; Start 403; Stop 427
atacttggtgtagagatttcggaca

SEQ ID NO: 321895 - DNA, 25 bp, Artificial
  probe
  misc_feature (1)..(25): SEQ ID NO: 2320; WAN024GO4; Start 120; Stop 144
cgagttccataactgtcttggtaat

SEQ ID NO: 321896 - DNA, 25 bp, Artificial
  probe
  misc_feature (1)..(25): SEQ ID NO: 2320; WAN024GO4; Start 404; Stop 428
tacttggtgtagagatttcggacaa

SEQ ID NO: 321897 - DNA, 25 bp, Artificial
  probe
  misc_feature (1)..(25): SEQ ID NO: 2320; WAN024GO4; Start 121; Stop 145
gagttccataactgtcttggtaatt

SEQ ID NO: 321898 - DNA, 25 bp, Artificial
  probe
  misc_feature (1)..(25): SEQ ID NO: 2320; WAN024GO4; Start 483; Stop 507
gaatttccttgacatcaactggtga

SEQ ID NO: 321899 - DNA, 25 bp, Artificial
  probe
  misc_feature (1)..(25): SEQ ID NO: 2320; WAN024GO4; Start 271; Stop 295
cttattgagctgaggataaacttcg

SEQ ID NO: 321900 - DNA, 25 bp, Artificial
  probe
  misc_feature (1)..(25): SEQ ID NO: 2320; WAN024GO4; Start 405; Stop 429
acttggtgtagagatttcggacaat

SEQ ID NO: 321901 - DNA, 25 bp, Artificial
  probe
  misc_feature (1)..(25): SEQ ID NO: 2320; WAN024GO4; Start 124; Stop 148
ttccataactgtcttggtaatttcg

SEQ ID NO: 321902 - DNA, 25 bp, Artificial
  probe
  misc_feature (1)..(25): SEQ ID NO: 2320; WAN024GO4; Start 479; Stop 503
tcacgaatttccttgacatcaactg

SEQ ID NO: 321903 - DNA, 25 bp, Artificial
  probe
  misc_feature (1)..(25): SEQ ID NO: 2320; WAN024GO4; Start 272; Stop 296
ttattgagctgaggataaacttcgc

SEQ ID NO: 321904 - DNA, 25 bp, Artificial
  probe
  misc_feature (1)..(25): SEQ ID NO: 2320; WAN024GO4; Start 126; Stop 150
ccataactgtcttggtaatttcgct

SEQ ID NO: 321905 - DNA, 25 bp, Artificial
  probe
  misc_feature (1)..(25): SEQ ID NO: 2320; WAN024GO4; Start 406; Stop 430
cttggtgtagagatttcggacaatc

SEQ ID NO: 321906 - DNA, 25 bp, Artificial
  probe
  misc_feature (1)..(25): SEQ ID NO: 2320; WAN024GO4; Start 125; Stop 149
tccataactgtcttggtaatttcgc

SEQ ID NO: 321907 - DNA, 25 bp, Artificial
  probe
  misc_feature (1)..(25): SEQ ID NO: 2320; WAN024GO4; Start 91; Stop 115
aacgacttcttccttggtatcatcg

SEQ ID NO: 321908 - DNA, 25 bp, Artificial
  probe
  misc_feature (1)..(25): SEQ ID NO: 2320; WAN024GO4; Start 270; Stop 294
tcttattgagctgaggataaacttc

SEQ ID NO: 321909 - DNA, 25 bp, Artificial
  probe
  misc_feature (1)..(25): SEQ ID NO: 2320; WAN024GO4; Start 119; Stop 143
ccgagttccataactgtcttggtaa

SEQ ID NO: 321910 - DNA, 25 bp, Artificial
  probe
  misc_feature (1)..(25): SEQ ID NO: 2320; WAN024GO4; Start 123; Stop 147
gttccataactgtcttggtaatttc

SEQ ID NO: 321911 - DNA, 25 bp, Artificial
  probe
  misc_feature (1)..(25): SEQ ID NO: 2321; WAN024DXM; Start 4; Stop 28
gataatgtcttgagcgattgtgtag

SEQ ID NO: 321912 - DNA, 25 bp, Artificial
  probe
  misc_feature (1)..(25): SEQ ID NO: 2321; WAN024DXM; Start 336; Stop 360
ctccaagaatctcatccaagtagtg

SEQ ID NO: 321913 - DNA, 25 bp, Artificial
  probe
  misc_feature (1)..(25): SEQ ID NO: 2321; WAN024DXM; Start 5; Stop 29
ataatgtcttgagcgattgtgtagg

SEQ ID NO: 321914 - DNA, 25 bp, Artificial
  probe
  misc_feature (1)..(25): SEQ ID NO: 2321; WAN024DXM; Start 3; Stop 27
ggataatgtcttgagcgattgtgta

SEQ ID NO: 321915 - DNA, 25 bp, Artificial
  probe
  misc_feature (1)..(25): SEQ ID NO: 2321; WAN024DXM; Start 333; Stop 357
catctccaagaatctcatccaagta

SEQ ID NO: 321916 - DNA, 25 bp, Artificial
  probe
  misc_feature (1)..(25): SEQ ID NO: 2321; WAN024DXM; Start 334; Stop 358
atctccaagaatctcatccaagtag

SEQ ID NO: 321917 - DNA, 25 bp, Artificial
  probe
  misc_feature (1)..(25): SEQ ID NO: 2321; WAN024DXM; Start 335; Stop 359
tctccaagaatctcatccaagtagt

SEQ ID NO: 321918 - DNA, 25 bp, Artificial
  probe
  misc_feature (1)..(25): SEQ ID NO: 2321; WAN024DXM; Start 1; Stop 25
atggataatgtcttgagcgattgtg

SEQ ID NO: 321919 - DNA, 25 bp, Artificial
  probe
  misc_feature (1)..(25): SEQ ID NO: 2321; WAN024DXM; Start 337; Stop 361
tccaagaatctcatccaagtagtga

SEQ ID NO: 321920 - DNA, 25 bp, Artificial
  probe
  misc_feature (1)..(25): SEQ ID NO: 2321; WAN024DXM; Start 330; Stop 354
aaccatctccaagaatctcatccaa

SEQ ID NO: 321921 - DNA, 25 bp, Artificial
  probe
  misc_feature (1)..(25): SEQ ID NO: 2321; WAN024DXM; Start 332; Stop 356
ccatctccaagaatctcatccaagt

SEQ ID NO: 321922 - DNA, 25 bp, Artificial
  probe
  misc_feature (1)..(25): SEQ ID NO: 2321; WAN024DXM; Start 331; Stop 355
accatctccaagaatctcatccaag

SEQ ID NO: 321923 - DNA, 25 bp, Artificial
  probe
  misc_feature (1)..(25): SEQ ID NO: 2321; WAN024DXM; Start 2; Stop 26
tggataatgtcttgagcgattgtgt

SEQ ID NO: 321924 - DNA, 25 bp, Artificial
  probe
  misc_feature (1)..(25): SEQ ID NO: 2321; WAN024DXM; Start 329; Stop 353
caaccatctccaagaatctcatcca

SEQ ID NO: 321925 - DNA, 25 bp, Artificial
  probe
  misc_feature (1)..(25): SEQ ID NO: 2321; WAN024DXM; Start 685; Stop 709
agcaaggattgtgtggttagtgtag

SEQ ID NO: 321926 - DNA, 25 bp, Artificial
  probe
  misc_feature (1)..(25): SEQ ID NO: 2321; WAN024DXM; Start 353; Stop 377
aagtagtgagacaatcttgggttag

SEQ ID NO: 321927 - DNA, 25 bp, Artificial
  probe
  misc_feature (1)..(25): SEQ ID NO: 2321; WAN024DXM; Start 445; Stop 469
gtagaaggctttcaactcagaattt

SEQ ID NO: 321928 - DNA, 25 bp, Artificial
  probe
  misc_feature (1)..(25): SEQ ID NO: 2321; WAN024DXM; Start 328; Stop 352
ccaaccatctccaagaatctcatcc

SEQ ID NO: 321929 - DNA, 25 bp, Artificial
  probe
  misc_feature (1)..(25): SEQ ID NO: 2321; WAN024DXM; Start 6; Stop 30
taatgtcttgagcgattgtgtaggc

SEQ ID NO: 321930 - DNA, 25 bp, Artificial
  probe
  misc_feature (1)..(25): SEQ ID NO: 2321; WAN024DXM; Start 208; Stop 232
ttctttcaagtgacgagccaattta

SEQ ID NO: 321931 - DNA, 25 bp, Artificial
  probe
  misc_feature (1)..(25): SEQ ID NO: 2321; WAN024DXM; Start 684; Stop 708
cagcaaggattgtgtggttagtgta

SEQ ID NO: 321932 - DNA, 25 bp, Artificial
  probe
  misc_feature (1)..(25): SEQ ID NO: 2321; WAN024DXM; Start 691; Stop 715
gattgtgtggttagtgtaggcagtc

SEQ ID NO: 321933 - DNA, 25 bp, Artificial
  probe
  misc_feature (1)..(25): SEQ ID NO: 2321; WAN024DXM; Start 444; Stop 468
cgtagaaggctttcaactcagaatt

SEQ ID NO: 321934 - DNA, 25 bp, Artificial
  probe
  misc_feature (1)..(25): SEQ ID NO: 2321; WAN024DXM; Start 50; Stop 74
aagaagattgtgattggacgagcag

SEQ ID NO: 321935 - DNA, 25 bp, Artificial
  probe
  misc_feature (1)..(25): SEQ ID NO: 2321; WAN024DXM; Start 356; Stop 380
tagtgagacaatcttgggttagcat

SEQ ID NO: 321936 - DNA, 25 bp, Artificial
  probe
  misc_feature (1)..(25): SEQ ID NO: 2321; WAN024DXM; Start 209; Stop 233
tctttcaagtgacgagccaatttac

SEQ ID NO: 321937 - DNA, 25 bp, Artificial
  probe
  misc_feature (1)..(25): SEQ ID NO: 2321; WAN024DXM; Start 88; Stop 112
tttgatgtcaaggtatttgtggatc

SEQ ID NO: 321938 - DNA, 25 bp, Artificial
  probe
  misc_feature (1)..(25): SEQ ID NO: 2321; WAN024DXM; Start 87; Stop 111
ctttgatgtcaaggtatttgtggat

SEQ ID NO: 321939 - DNA, 25 bp, Artificial
  probe
  misc_feature (1)..(25): SEQ ID NO: 2321; WAN024DXM; Start 443; Stop 467
tcgtagaaggctttcaactcagaat

SEQ ID NO: 321940 - DNA, 25 bp, Artificial
  probe
  misc_feature (1)..(25): SEQ ID NO: 2321; WAN024DXM; Start 327; Stop 351
gccaaccatctccaagaatctcatc

SEQ ID NO: 321941 - DNA, 25 bp, Artificial
  probe
  misc_feature (1)..(25): SEQ ID NO: 2321; WAN024DXM; Start 41; Stop 65
ttaccaccaaagaagattgtgattg

SEQ ID NO: 321942 - DNA, 25 bp, Artificial
  probe
  misc_feature (1)..(25): SEQ ID NO: 2321; WAN024DXM; Start 354; Stop 378
agtagtgagacaatcttgggttagc

SEQ ID NO: 321943 - DNA, 25 bp, Artificial
  probe
  misc_feature (1)..(25): SEQ ID NO: 2321; WAN024DXM; Start 40; Stop 64
tttaccaccaaagaagattgtgatt

SEQ ID NO: 321944 - DNA, 25 bp, Artificial
  probe
  misc_feature (1)..(25): SEQ ID NO: 2322; WAN024CK5; Start 46; Stop 70
atgttatctagtattgaaggaggca

SEQ ID NO: 321945 - DNA, 25 bp, Artificial
  probe
  misc_feature (1)..(25): SEQ ID NO: 2322; WAN024CK5; Start 57; Stop 81
tattgaaggaggcaagaataattgg

SEQ ID NO: 321946 - DNA, 25 bp, Artificial
  probe
  misc_feature (1)..(25): SEQ ID NO: 2322; WAN024CK5; Start 51; Stop 75
atctagtattgaaggaggcaagaat

SEQ ID NO: 321947 - DNA, 25 bp, Artificial
  probe
  misc_feature (1)..(25): SEQ ID NO: 2322; WAN024CK5; Start 47; Stop 71
tgttatctagtattgaaggaggcaa

SEQ ID NO: 321948 - DNA, 25 bp, Artificial
  probe
  misc_feature (1)..(25): SEQ ID NO: 2322; WAN024CK5; Start 48; Stop 72
gttatctagtattgaaggaggcaag

SEQ ID NO: 321949 - DNA, 25 bp, Artificial
  probe
  misc_feature (1)..(25): SEQ ID NO: 2322; WAN024CK5; Start 52; Stop 76
tctagtattgaaggaggcaagaata

SEQ ID NO: 321950 - DNA, 25 bp, Artificial
  probe
  misc_feature (1)..(25): SEQ ID NO: 2322; WAN024CK5; Start 50; Stop 74
tatctagtattgaaggaggcaagaa

SEQ ID NO: 321951 - DNA, 25 bp, Artificial
  probe
  misc_feature (1)..(25): SEQ ID NO: 2322; WAN024CK5; Start 49; Stop 73
ttatctagtattgaaggaggcaaga

SEQ ID NO: 321952 - DNA, 25 bp, Artificial
  probe
  misc_feature (1)..(25): SEQ ID NO: 2322; WAN024CK5; Start 56; Stop 80
gtattgaaggaggcaagaataattg

SEQ ID NO: 321953 - DNA, 25 bp, Artificial
  probe
  misc_feature (1)..(25): SEQ ID NO: 2322; WAN024CK5; Start 58; Stop 82
attgaaggaggcaagaataattggc

SEQ ID NO: 321954 - DNA, 25 bp, Artificial
  probe
  misc_feature (1)..(25): SEQ ID NO: 2322; WAN024CK5; Start 55; Stop 79
agtattgaaggaggcaagaataatt

SEQ ID NO: 321955 - DNA, 25 bp, Artificial
  probe
  misc_feature (1)..(25): SEQ ID NO: 2322; WAN024CK5; Start 53; Stop 77
ctagtattgaaggaggcaagaataa

SEQ ID NO: 321956 - DNA, 25 bp, Artificial
  probe
  misc_feature (1)..(25): SEQ ID NO: 2322; WAN024CK5; Start 54; Stop 78
tagtattgaaggaggcaagaataat

SEQ ID NO: 321957 - DNA, 25 bp, Artificial
  probe
  misc_feature (1)..(25): SEQ ID NO: 2322; WAN024CK5; Start 45; Stop 69
tatgttatctagtattgaaggaggc

SEQ ID NO: 321958 - DNA, 25 bp, Artificial
  probe
  misc_feature (1)..(25): SEQ ID NO: 2322; WAN024CK5; Start 65; Stop 89
gaggcaagaataattggcaaactaa

SEQ ID NO: 321959 - DNA, 25 bp, Artificial
  probe
  misc_feature (1)..(25): SEQ ID NO: 2322; WAN024CK5; Start 67; Stop 91
ggcaagaataattggcaaactaatg

SEQ ID NO: 321960 - DNA, 25 bp, Artificial
  probe
  misc_feature (1)..(25): SEQ ID NO: 2322; WAN024CK5; Start 66; Stop 90
aggcaagaataattggcaaactaat

SEQ ID NO: 321961 - DNA, 25 bp, Artificial
  probe
  misc_feature (1)..(25): SEQ ID NO: 2322; WAN024CK5; Start 60; Stop 84
tgaaggaggcaagaataattggcaa

SEQ ID NO: 321962 - DNA, 25 bp, Artificial
  probe
  misc_feature (1)..(25): SEQ ID NO: 2322; WAN024CK5; Start 59; Stop 83
ttgaaggaggcaagaataattggca

SEQ ID NO: 321963 - DNA, 25 bp, Artificial
  probe
  misc_feature (1)..(25): SEQ ID NO: 2322; WAN024CK5; Start 68; Stop 92
gcaagaataattggcaaactaatgt

SEQ ID NO: 321964 - DNA, 25 bp, Artificial
  probe
  misc_feature (1)..(25): SEQ ID NO: 2322; WAN024CK5; Start 78; Stop 102
ttggcaaactaatgtcttagaaggt

SEQ ID NO: 321965 - DNA, 25 bp, Artificial
  probe
  misc_feature (1)..(25): SEQ ID NO: 2322; WAN024CK5; Start 64; Stop 88
ggaggcaagaataattggcaaacta

SEQ ID NO: 321966 - DNA, 25 bp, Artificial
  probe
  misc_feature (1)..(25): SEQ ID NO: 2322; WAN024CK5; Start 77; Stop 101
attggcaaactaatgtcttagaagg

SEQ ID NO: 321967 - DNA, 25 bp, Artificial
  probe
  misc_feature (1)..(25): SEQ ID NO: 2322; WAN024CK5; Start 61; Stop 85
gaaggaggcaagaataattggcaaa

SEQ ID NO: 321968 - DNA, 25 bp, Artificial
  probe
  misc_feature (1)..(25): SEQ ID NO: 2322; WAN024CK5; Start 62; Stop 86
aaggaggcaagaataattggcaaac

SEQ ID NO: 321969 - DNA, 25 bp, Artificial
  probe
  misc_feature (1)..(25): SEQ ID NO: 2322; WAN024CK5; Start 186; Stop 210
tggatacataggagctaaatttggt

SEQ ID NO: 321970 - DNA, 25 bp, Artificial
  probe
  misc_feature (1)..(25): SEQ ID NO: 2322; WAN024CK5; Start 187; Stop 211
ggatacataggagctaaatttggtg

SEQ ID NO: 321971 - DNA, 25 bp, Artificial
  probe
  misc_feature (1)..(25): SEQ ID NO: 2322; WAN024CK5; Start 185; Stop 209
gtggatacataggagctaaatttgg

SEQ ID NO: 321972 - DNA, 25 bp, Artificial
  probe
  misc_feature (1)..(25): SEQ ID NO: 2322; WAN024CK5; Start 76; Stop 100
aattggcaaactaatgtcttagaag

SEQ ID NO: 321973 - DNA, 25 bp, Artificial
  probe
  misc_feature (1)..(25): SEQ ID NO: 2322; WAN024CK5; Start 69; Stop 93
caagaataattggcaaactaatgtc

SEQ ID NO: 321974 - DNA, 25 bp, Artificial
  probe
  misc_feature (1)..(25): SEQ ID NO: 2322; WAN024CK5; Start 71; Stop 95
agaataattggcaaactaatgtctt

SEQ ID NO: 321975 - DNA, 25 bp, Artificial
  probe
  misc_feature (1)..(25): SEQ ID NO: 2322; WAN024CK5; Start 70; Stop 94
aagaataattggcaaactaatgtct

SEQ ID NO: 321976 - DNA, 25 bp, Artificial
  probe
  misc_feature (1)..(25): SEQ ID NO: 2322; WAN024CK5; Start 190; Stop 214
tacataggagctaaatttggtgtgg

SEQ ID NO: 321977 - DNA, 25 bp, Artificial
  probe
  misc_feature (1)..(25): SEQ ID NO: 2323; WAN024EU6; Start 18; Stop 42
ttatggaatagtgattgtcttggca

SEQ ID NO: 321978 - DNA, 25 bp, Artificial
  probe
  misc_feature (1)..(25): SEQ ID NO: 2323; WAN024EU6; Start 147; Stop 171
tgatgaagtgttgttattgtctgga

SEQ ID NO: 321979 - DNA, 25 bp, Artificial
  probe
  misc_feature (1)..(25): SEQ ID NO: 2323; WAN024EU6; Start 146; Stop 170
gtgatgaagtgttgttattgtctgg

SEQ ID NO: 321980 - DNA, 25 bp, Artificial
  probe
  misc_feature (1)..(25): SEQ ID NO: 2323; WAN024EU6; Start 145; Stop 169
ggtgatgaagtgttgttattgtctg

SEQ ID NO: 321981 - DNA, 25 bp, Artificial
  probe
  misc_feature (1)..(25): SEQ ID NO: 2323; WAN024EU6; Start 148; Stop 172
gatgaagtgttgttattgtctggaa

SEQ ID NO: 321982 - DNA, 25 bp, Artificial
  probe
  misc_feature (1)..(25): SEQ ID NO: 2323; WAN024EU6; Start 144; Stop 168
tggtgatgaagtgttgttattgtct

SEQ ID NO: 321983 - DNA, 25 bp, Artificial
  probe
  misc_feature (1)..(25): SEQ ID NO: 2323; WAN024EU6; Start 19; Stop 43
tatggaatagtgattgtcttggcag

SEQ ID NO: 321984 - DNA, 25 bp, Artificial
  probe
  misc_feature (1)..(25): SEQ ID NO: 2323; WAN024EU6; Start 149; Stop 173
atgaagtgttgttattgtctggaat

SEQ ID NO: 321985 - DNA, 25 bp, Artificial
  probe
  misc_feature (1)..(25): SEQ ID NO: 2323; WAN024EU6; Start 150; Stop 174
tgaagtgttgttattgtctggaatt

SEQ ID NO: 321986 - DNA, 25 bp, Artificial
  probe
  misc_feature (1)..(25): SEQ ID NO: 2323; WAN024EU6; Start 23; Stop 47
gaatagtgattgtcttggcagtgag

SEQ ID NO: 321987 - DNA, 25 bp, Artificial
  probe
  misc_feature (1)..(25): SEQ ID NO: 2323; WAN024EU6; Start 24; Stop 48
aatagtgattgtcttggcagtgagt

SEQ ID NO: 321988 - DNA, 25 bp, Artificial
  probe
  misc_feature (1)..(25): SEQ ID NO: 2323; WAN024EU6; Start 20; Stop 44
atggaatagtgattgtcttggcagt

SEQ ID NO: 321989 - DNA, 25 bp, Artificial
  probe
  misc_feature (1)..(25): SEQ ID NO: 2323; WAN024EU6; Start 25; Stop 49
atagtgattgtcttggcagtgagtc

SEQ ID NO: 321990 - DNA, 25 bp, Artificial
  probe
  misc_feature (1)..(25): SEQ ID NO: 2323; WAN024EU6; Start 103; Stop 127
cagatggagcaacgacaagagtatt

SEQ ID NO: 321991 - DNA, 25 bp, Artificial
  probe
  misc_feature (1)..(25): SEQ ID NO: 2323; WAN024EU6; Start 22; Stop 46
ggaatagtgattgtcttggcagtga

SEQ ID NO: 321992 - DNA, 25 bp, Artificial
  probe
  misc_feature (1)..(25): SEQ ID NO: 2323; WAN024EU6; Start 17; Stop 41
tttatggaatagtgattgtcttggc

SEQ ID NO: 321993 - DNA, 25 bp, Artificial
  probe
  misc_feature (1)..(25): SEQ ID NO: 2323; WAN024EU6; Start 106; Stop 130
atggagcaacgacaagagtatttag

SEQ ID NO: 321994 - DNA, 25 bp, Artificial
  probe
  misc_feature (1)..(25): SEQ ID NO: 2323; WAN024EU6; Start 105; Stop 129
gatggagcaacgacaagagtattta

SEQ ID NO: 321995 - DNA, 25 bp, Artificial
  probe
  misc_feature (1)..(25): SEQ ID NO: 2323; WAN024EU6; Start 21; Stop 45
tggaatagtgattgtcttggcagtg

SEQ ID NO: 321996 - DNA, 25 bp, Artificial
  probe
  misc_feature (1)..(25): SEQ ID NO: 2323; WAN024EU6; Start 251; Stop 275
aggaaagtgtaatgggaaagacaaa

SEQ ID NO: 321997 - DNA, 25 bp, Artificial
  probe
  misc_feature (1)..(25): SEQ ID NO: 2323; WAN024EU6; Start 250; Stop 274
aaggaaagtgtaatgggaaagacaa

SEQ ID NO: 321998 - DNA, 25 bp, Artificial
  probe
  misc_feature (1)..(25): SEQ ID NO: 2323; WAN024EU6; Start 249; Stop 273
aaaggaaagtgtaatgggaaagaca

SEQ ID NO: 321999 - DNA, 25 bp, Artificial
  probe
  misc_feature (1)..(25): SEQ ID NO: 2323; WAN024EU6; Start 155; Stop 179
tgttgttattgtctggaattcatgg

SEQ ID NO: 322000 - DNA, 25 bp, Artificial
  probe
  misc_feature (1)..(25): SEQ ID NO: 2323; WAN024EU6; Start 156; Stop 180
gttgttattgtctggaattcatgga

SEQ ID NO: 322001 - DNA, 25 bp, Artificial
  probe
  misc_feature (1)..(25): SEQ ID NO: 2323; WAN024EU6; Start 152; Stop 176
aagtgttgttattgtctggaattca

SEQ ID NO: 322002 - DNA, 25 bp, Artificial
  probe
  misc_feature (1)..(25): SEQ ID NO: 2323; WAN024EU6; Start 104; Stop 128
agatggagcaacgacaagagtattt

SEQ ID NO: 322003 - DNA, 25 bp, Artificial
  probe
  misc_feature (1)..(25): SEQ ID NO: 2323; WAN024EU6; Start 154; Stop 178
gtgttgttattgtctggaattcatg

SEQ ID NO: 322004 - DNA, 25 bp, Artificial
  probe
  misc_feature (1)..(25): SEQ ID NO: 2323; WAN024EU6; Start 153; Stop 177
agtgttgttattgtctggaattcat

SEQ ID NO: 322005 - DNA, 25 bp, Artificial
  probe
  misc_feature (1)..(25): SEQ ID NO: 2323; WAN024EU6; Start 157; Stop 181
ttgttattgtctggaattcatggaa

SEQ ID NO: 322006 - DNA, 25 bp, Artificial
  probe
  misc_feature (1)..(25): SEQ ID NO: 2323; WAN024EU6; Start 102; Stop 126
acagatggagcaacgacaagagtat

SEQ ID NO: 322007 - DNA, 25 bp, Artificial
  probe
  misc_feature (1)..(25): SEQ ID NO: 2323; WAN024EU6; Start 151; Stop 175
gaagtgttgttattgtctggaattc

SEQ ID NO: 322008 - DNA, 25 bp, Artificial
  probe
  misc_feature (1)..(25): SEQ ID NO: 2323; WAN024EU6; Start 101; Stop 125
aacagatggagcaacgacaagagta

SEQ ID NO: 322009 - DNA, 25 bp, Artificial
  probe
  misc_feature (1)..(25): SEQ ID NO: 2323; WAN024EU6; Start 111; Stop 135
gcaacgacaagagtatttagcttct

SEQ ID NO: 322010 - DNA, 25 bp, Artificial
  probe
  misc_feature (1)..(25): SEQ ID NO: 2324; WAN024DK9; Start 493; Stop 517
cgtggtctatttgaaacagataagg

SEQ ID NO: 322011 - DNA, 25 bp, Artificial
  probe
  misc_feature (1)..(25): SEQ ID NO: 2324; WAN024DK9; Start 174; Stop 198
tattgacgataatatggtggtagaa

SEQ ID NO: 322012 - DNA, 25 bp, Artificial
  probe
  misc_feature (1)..(25): SEQ ID NO: 2324; WAN024DK9; Start 173; Stop 197
ttattgacgataatatggtggtaga

SEQ ID NO: 322013 - DNA, 25 bp, Artificial
  probe
  misc_feature (1)..(25): SEQ ID NO: 2324; WAN024DK9; Start 490; Stop 514
gctcgtggtctatttgaaacagata

SEQ ID NO: 322014 - DNA, 25 bp, Artificial
  probe
  misc_feature (1)..(25): SEQ ID NO: 2324; WAN024DK9; Start 492; Stop 516
tcgtggtctatttgaaacagataag

SEQ ID NO: 322015 - DNA, 25 bp, Artificial
  probe
  misc_feature (1)..(25): SEQ ID NO: 2324; WAN024DK9; Start 491; Stop 515
ctcgtggtctatttgaaacagataa

SEQ ID NO: 322016 - DNA, 25 bp, Artificial
  probe
  misc_feature (1)..(25): SEQ ID NO: 2324; WAN024DK9; Start 494; Stop 518
gtggtctatttgaaacagataagga

SEQ ID NO: 322017 - DNA, 25 bp, Artificial
  probe
  misc_feature (1)..(25): SEQ ID NO: 2324; WAN024DK9; Start 175; Stop 199
attgacgataatatggtggtagaaa

SEQ ID NO: 322018 - DNA, 25 bp, Artificial
  probe
  misc_feature (1)..(25): SEQ ID NO: 2324; WAN024DK9; Start 487; Stop 511
gtagctcgtggtctatttgaaacag

SEQ ID NO: 322019 - DNA, 25 bp, Artificial
  probe
  misc_feature (1)..(25): SEQ ID NO: 2324; WAN024DK9; Start 485; Stop 509
cagtagctcgtggtctatttgaaac

SEQ ID NO: 322020 - DNA, 25 bp, Artificial
  probe
  misc_feature (1)..(25): SEQ ID NO: 2324; WAN024DK9; Start 488; Stop 512
tagctcgtggtctatttgaaacaga

SEQ ID NO: 322021 - DNA, 25 bp, Artificial
  probe
  misc_feature (1)..(25): SEQ ID NO: 2324; WAN024DK9; Start 486; Stop 510
agtagctcgtggtctatttgaaaca

SEQ ID NO: 322022 - DNA, 25 bp, Artificial
  probe
  misc_feature (1)..(25): SEQ ID NO: 2324; WAN024DK9; Start 484; Stop 508
acagtagctcgtggtctatttgaaa

SEQ ID NO: 322023 - DNA, 25 bp, Artificial
  probe
  misc_feature (1)..(25): SEQ ID NO: 2324; WAN024DK9; Start 179; Stop 203
acgataatatggtggtagaaaagga

SEQ ID NO: 322024 - DNA, 25 bp, Artificial
  probe
  misc_feature (1)..(25): SEQ ID NO: 2324; WAN024DK9; Start 489; Stop 513
agctcgtggtctatttgaaacagat

SEQ ID NO: 322025 - DNA, 25 bp, Artificial
  probe
  misc_feature (1)..(25): SEQ ID NO: 2324; WAN024DK9; Start 178; Stop 202
gacgataatatggtggtagaaaagg

SEQ ID NO: 322026 - DNA, 25 bp, Artificial
  probe
  misc_feature (1)..(25): SEQ ID NO: 2324; WAN024DK9; Start 177; Stop 201
tgacgataatatggtggtagaaaag

SEQ ID NO: 322027 - DNA, 25 bp, Artificial
  probe
  misc_feature (1)..(25): SEQ ID NO: 2324; WAN024DK9; Start 172; Stop 196
attattgacgataatatggtggtag

SEQ ID NO: 322028 - DNA, 25 bp, Artificial
  probe
  misc_feature (1)..(25): SEQ ID NO: 2324; WAN024DK9; Start 180; Stop 204
cgataatatggtggtagaaaaggat

SEQ ID NO: 322029 - DNA, 25 bp, Artificial
  probe
  misc_feature (1)..(25): SEQ ID NO: 2324; WAN024DK9; Start 483; Stop 507
gacagtagctcgtggtctatttgaa

SEQ ID NO: 322030 - DNA, 25 bp, Artificial
  probe
  misc_feature (1)..(25): SEQ ID NO: 2324; WAN024DK9; Start 176; Stop 200
ttgacgataatatggtggtagaaaa

SEQ ID NO: 322031 - DNA, 25 bp, Artificial
  probe
  misc_feature (1)..(25): SEQ ID NO: 2324; WAN024DK9; Start 212; Stop 236
tccataccatgtgtgaacaccactt

SEQ ID NO: 322032 - DNA, 25 bp, Artificial
  probe
  misc_feature (1)..(25): SEQ ID NO: 2324; WAN024DK9; Start 211; Stop 235
ttccataccatgtgtgaacaccact

SEQ ID NO: 322033 - DNA, 25 bp, Artificial
  probe
  misc_feature (1)..(25): SEQ ID NO: 2324; WAN024DK9; Start 388; Stop 412
tatctaggtgctaaaggagcctttg

SEQ ID NO: 322034 - DNA, 25 bp, Artificial
  probe
  misc_feature (1)..(25): SEQ ID NO: 2324; WAN024DK9; Start 210; Stop 234
tttccataccatgtgtgaacaccac

SEQ ID NO: 322035 - DNA, 25 bp, Artificial
  probe
  misc_feature (1)..(25): SEQ ID NO: 2324; WAN024DK9; Start 346; Stop 370
caagaacgtttgaatatcgaagtgg

SEQ ID NO: 322036 - DNA, 25 bp, Artificial
  probe
  misc_feature (1)..(25): SEQ ID NO: 2324; WAN024DK9; Start 347; Stop 371
aagaacgtttgaatatcgaagtggc

SEQ ID NO: 322037 - DNA, 25 bp, Artificial
  probe
  misc_feature (1)..(25): SEQ ID NO: 2324; WAN024DK9; Start 209; Stop 233
ttttccataccatgtgtgaacacca

SEQ ID NO: 322038 - DNA, 25 bp, Artificial
  probe
  misc_feature (1)..(25): SEQ ID NO: 2324; WAN024DK9; Start 389; Stop 413
atctaggtgctaaaggagcctttgt

SEQ ID NO: 322039 - DNA, 25 bp, Artificial
  probe
  misc_feature (1)..(25): SEQ ID NO: 2324; WAN024DK9; Start 390; Stop 414
tctaggtgctaaaggagcctttgtt

SEQ ID NO: 322040 - DNA, 25 bp, Artificial
  probe
  misc_feature (1)..(25): SEQ ID NO: 2324; WAN024DK9; Start 185; Stop 209
atatggtggtagaaaaggatatctt

SEQ ID NO: 322041 - DNA, 25 bp, Artificial
  probe
  misc_feature (1)..(25): SEQ ID NO: 2324; WAN024DK9; Start 184; Stop 208
aatatggtggtagaaaaggatatct

SEQ ID NO: 322042 - DNA, 25 bp, Artificial
  probe
  misc_feature (1)..(25): SEQ ID NO: 2324; WAN024DK9; Start 181; Stop 205
gataatatggtggtagaaaaggata

SEQ ID NO: 322043 - DNA, 25 bp, Artificial
  probe
  misc_feature (1)..(25): SEQ ID NO: 2325; WAN024DFO; Start 16; Stop 40
gagaatggttatgtagcagatgact

SEQ ID NO: 322044 - DNA, 25 bp, Artificial
  probe
  misc_feature (1)..(25): SEQ ID NO: 2325; WAN024DFO; Start 12; Stop 36
ggatgagaatggttatgtagcagat

SEQ ID NO: 322045 - DNA, 25 bp, Artificial
  probe
  misc_feature (1)..(25): SEQ ID NO: 2325; WAN024DFO; Start 15; Stop 39
tgagaatggttatgtagcagatgac

SEQ ID NO: 322046 - DNA, 25 bp, Artificial
  probe
  misc_feature (1)..(25): SEQ ID NO: 2325; WAN024DFO; Start 14; Stop 38
atgagaatggttatgtagcagatga

SEQ ID NO: 322047 - DNA, 25 bp, Artificial
  probe
  misc_feature (1)..(25): SEQ ID NO: 2325; WAN024DFO; Start 20; Stop 44
atggttatgtagcagatgactatcg

SEQ ID NO: 322048 - DNA, 25 bp, Artificial
  probe
  misc_feature (1)..(25): SEQ ID NO: 2325; WAN024DFO; Start 31; Stop 55
gcagatgactatcggattacttact

SEQ ID NO: 322049 - DNA, 25 bp, Artificial
  probe
  misc_feature (1)..(25): SEQ ID NO: 2325; WAN024DFO; Start 30; Stop 54
agcagatgactatcggattacttac

SEQ ID NO: 322050 - DNA, 25 bp, Artificial
  probe
  misc_feature (1)..(25): SEQ ID NO: 2325; WAN024DFO; Start 28; Stop 52
gtagcagatgactatcggattactt

SEQ ID NO: 322051 - DNA, 25 bp, Artificial
  probe
  misc_feature (1)..(25): SEQ ID NO: 2325; WAN024DFO; Start 26; Stop 50
atgtagcagatgactatcggattac

SEQ ID NO: 322052 - DNA, 25 bp, Artificial
  probe
  misc_feature (1)..(25): SEQ ID NO: 2325; WAN024DFO; Start 23; Stop 47
gttatgtagcagatgactatcggat

SEQ ID NO: 322053 - DNA, 25 bp, Artificial
  probe
  misc_feature (1)..(25): SEQ ID NO: 2325; WAN024DFO; Start 13; Stop 37
gatgagaatggttatgtagcagatg

SEQ ID NO: 322054 - DNA, 25 bp, Artificial
  probe
  misc_feature (1)..(25): SEQ ID NO: 2325; WAN024DFO; Start 38; Stop 62
actatcggattacttacttagaggc

SEQ ID NO: 322055 - DNA, 25 bp, Artificial
  probe
  misc_feature (1)..(25): SEQ ID NO: 2325; WAN024DFO; Start 27; Stop 51
tgtagcagatgactatcggattact

SEQ ID NO: 322056 - DNA, 25 bp, Artificial
  probe
  misc_feature (1)..(25): SEQ ID NO: 2325; WAN024DFO; Start 24; Stop 48
ttatgtagcagatgactatcggatt

SEQ ID NO: 322057 - DNA, 25 bp, Artificial
  probe
  misc_feature (1)..(25): SEQ ID NO: 2325; WAN024DFO; Start 17; Stop 41
agaatggttatgtagcagatgacta

SEQ ID NO: 322058 - DNA, 25 bp, Artificial
  probe
  misc_feature (1)..(25): SEQ ID NO: 2325; WAN024DFO; Start 25; Stop 49
tatgtagcagatgactatcggatta

SEQ ID NO: 322059 - DNA, 25 bp, Artificial
  probe
  misc_feature (1)..(25): SEQ ID NO: 2325; WAN024DFO; Start 22; Stop 46
ggttatgtagcagatgactatcgga

SEQ ID NO: 322060 - DNA, 25 bp, Artificial
  probe
  misc_feature (1)..(25): SEQ ID NO: 2325; WAN024DFO; Start 29; Stop 53
tagcagatgactatcggattactta

SEQ ID NO: 322061 - DNA, 25 bp, Artificial
  probe
  misc_feature (1)..(25): SEQ ID NO: 2325; WAN024DFO; Start 21; Stop 45
tggttatgtagcagatgactatcgg

SEQ ID NO: 322062 - DNA, 25 bp, Artificial
  probe
  misc_feature (1)..(25): SEQ ID NO: 2325; WAN024DFO; Start 18; Stop 42
gaatggttatgtagcagatgactat

SEQ ID NO: 322063 - DNA, 25 bp, Artificial
  probe
  misc_feature (1)..(25): SEQ ID NO: 2325; WAN024DFO; Start 19; Stop 43
aatggttatgtagcagatgactatc

SEQ ID NO: 322064 - DNA, 25 bp, Artificial
  probe
  misc_feature (1)..(25): SEQ ID NO: 2325; WAN024DFO; Start 11; Stop 35
cggatgagaatggttatgtagcaga

SEQ ID NO: 322065 - DNA, 25 bp, Artificial
  probe
  misc_feature (1)..(25): SEQ ID NO: 2325; WAN024DFO; Start 32; Stop 56
cagatgactatcggattacttactt

SEQ ID NO: 322066 - DNA, 25 bp, Artificial
  probe
  misc_feature (1)..(25): SEQ ID NO: 2325; WAN024DFO; Start 37; Stop 61
gactatcggattacttacttagagg

SEQ ID NO: 322067 - DNA, 25 bp, Artificial
  probe
  misc_feature (1)..(25): SEQ ID NO: 2325; WAN024DFO; Start 246; Stop 270
cttctattggtacaaggatgtcatt

SEQ ID NO: 322068 - DNA, 25 bp, Artificial
  probe
  misc_feature (1)..(25): SEQ ID NO: 2325; WAN024DFO; Start 36; Stop 60
tgactatcggattacttacttagag

SEQ ID NO: 322069 - DNA, 25 bp, Artificial
  probe
  misc_feature (1)..(25): SEQ ID NO: 2325; WAN024DFO; Start 39; Stop 63
ctatcggattacttacttagaggcc

SEQ ID NO: 322070 - DNA, 25 bp, Artificial
  probe
  misc_feature (1)..(25): SEQ ID NO: 2325; WAN024DFO; Start 35; Stop 59
atgactatcggattacttacttaga

SEQ ID NO: 322071 - DNA, 25 bp, Artificial
  probe
  misc_feature (1)..(25): SEQ ID NO: 2325; WAN024DFO; Start 33; Stop 57
agatgactatcggattacttactta

SEQ ID NO: 322072 - DNA, 25 bp, Artificial
  probe
  misc_feature (1)..(25): SEQ ID NO: 2325; WAN024DFO; Start 34; Stop 58
gatgactatcggattacttacttag

SEQ ID NO: 322073 - DNA, 25 bp, Artificial
  probe
  misc_feature (1)..(25): SEQ ID NO: 2325; WAN024DFO; Start 189; Stop 213
ctatgtagatcgagataatgtagga

SEQ ID NO: 322074 - DNA, 25 bp, Artificial
  probe
  misc_feature (1)..(25): SEQ ID NO: 2325; WAN024DFO; Start 188; Stop 212
tctatgtagatcgagataatgtagg

SEQ ID NO: 322075 - DNA, 25 bp, Artificial
  probe
  misc_feature (1)..(25): SEQ ID NO: 2325; WAN024DFO; Start 4; Stop 28
gatacaccggatgagaatggttatg

SEQ ID NO: 322076 - DNA, 25 bp, Artificial
  probe
  misc_feature (1)..(25): SEQ ID NO: 2326; WAN024DFE; Start 206; Stop 230
aggatgtggaagataatagtcagac

SEQ ID NO: 322077 - DNA, 25 bp, Artificial
  probe
  misc_feature (1)..(25): SEQ ID NO: 2326; WAN024DFE; Start 398; Stop 422
ccaatcctctctatgatgcctatat

SEQ ID NO: 322078 - DNA, 25 bp, Artificial
  probe
  misc_feature (1)..(25): SEQ ID NO: 2326; WAN024DFE; Start 205; Stop 229
aaggatgtggaagataatagtcaga

SEQ ID NO: 322079 - DNA, 25 bp, Artificial
  probe
  misc_feature (1)..(25): SEQ ID NO: 2326; WAN024DFE; Start 397; Stop 421
gccaatcctctctatgatgcctata

SEQ ID NO: 322080 - DNA, 25 bp, Artificial
  probe
  misc_feature (1)..(25): SEQ ID NO: 2326; WAN024DFE; Start 401; Stop 425
atcctctctatgatgcctatattgt

SEQ ID NO: 322081 - DNA, 25 bp, Artificial
  probe
  misc_feature (1)..(25): SEQ ID NO: 2326; WAN024DFE; Start 684; Stop 708
ttatatccgtggaccgttcttgtta

SEQ ID NO: 322082 - DNA, 25 bp, Artificial
  probe
  misc_feature (1)..(25): SEQ ID NO: 2326; WAN024DFE; Start 207; Stop 231
ggatgtggaagataatagtcagaca

SEQ ID NO: 322083 - DNA, 25 bp, Artificial
  probe
  misc_feature (1)..(25): SEQ ID NO: 2326; WAN024DFE; Start 402; Stop 426
tcctctctatgatgcctatattgta

SEQ ID NO: 322084 - DNA, 25 bp, Artificial
  probe
  misc_feature (1)..(25): SEQ ID NO: 2326; WAN024DFE; Start 685; Stop 709
tatatccgtggaccgttcttgttag

SEQ ID NO: 322085 - DNA, 25 bp, Artificial
  probe
  misc_feature (1)..(25): SEQ ID NO: 2326; WAN024DFE; Start 403; Stop 427
cctctctatgatgcctatattgtag

SEQ ID NO: 322086 - DNA, 25 bp, Artificial
  probe
  misc_feature (1)..(25): SEQ ID NO: 2326; WAN024DFE; Start 400; Stop 424
aatcctctctatgatgcctatattg

SEQ ID NO: 322087 - DNA, 25 bp, Artificial
  probe
  misc_feature (1)..(25): SEQ ID NO: 2326; WAN024DFE; Start 399; Stop 423
caatcctctctatgatgcctatatt

SEQ ID NO: 322088 - DNA, 25 bp, Artificial
  probe
  misc_feature (1)..(25): SEQ ID NO: 2326; WAN024DFE; Start 208; Stop 232
gatgtggaagataatagtcagacaa

SEQ ID NO: 322089 - DNA, 25 bp, Artificial
  probe
  misc_feature (1)..(25): SEQ ID NO: 2326; WAN024DFE; Start 837; Stop 861
tttatttagtccgttgatgattgcc

SEQ ID NO: 322090 - DNA, 25 bp, Artificial
  probe
  misc_feature (1)..(25): SEQ ID NO: 2326; WAN024DFE; Start 614; Stop 638
ccattcgtattaccattatttcccg

SEQ ID NO: 322091 - DNA, 25 bp, Artificial
  probe
  misc_feature (1)..(25): SEQ ID NO: 2326; WAN024DFE; Start 357; Stop 381
cgagataatgggagataactggaaa

SEQ ID NO: 322092 - DNA, 25 bp, Artificial
  probe
  misc_feature (1)..(25): SEQ ID NO: 2326; WAN024DFE; Start 201; Stop 225
ccgaaaggatgtggaagataatagt

SEQ ID NO: 322093 - DNA, 25 bp, Artificial
  probe
  misc_feature (1)..(25): SEQ ID NO: 2326; WAN024DFE; Start 829; Stop 853
agtccagatttatttagtccgttga

SEQ ID NO: 322094 - DNA, 25 bp, Artificial
  probe
  misc_feature (1)..(25): SEQ ID NO: 2326; WAN024DFE; Start 615; Stop 639
cattcgtattaccattatttcccgc

SEQ ID NO: 322095 - DNA, 25 bp, Artificial
  probe
  misc_feature (1)..(25): SEQ ID NO: 2326; WAN024DFE; Start 181; Stop 205
gtccgtgtagtagtttatatccgaa

SEQ ID NO: 322096 - DNA, 25 bp, Artificial
  probe
  misc_feature (1)..(25): SEQ ID NO: 2326; WAN024DFE; Start 179; Stop 203
atgtccgtgtagtagtttatatccg

SEQ ID NO: 322097 - DNA, 25 bp, Artificial
  probe
  misc_feature (1)..(25): SEQ ID NO: 2326; WAN024DFE; Start 353; Stop 377
taaccgagataatgggagataactg

SEQ ID NO: 322098 - DNA, 25 bp, Artificial
  probe
  misc_feature (1)..(25): SEQ ID NO: 2326; WAN024DFE; Start 616; Stop 640
attcgtattaccattatttcccgca

SEQ ID NO: 322099 - DNA, 25 bp, Artificial
  probe
  misc_feature (1)..(25): SEQ ID NO: 2326; WAN024DFE; Start 180; Stop 204
tgtccgtgtagtagtttatatccga

SEQ ID NO: 322100 - DNA, 25 bp, Artificial
  probe
  misc_feature (1)..(25): SEQ ID NO: 2326; WAN024DFE; Start 202; Stop 226
cgaaaggatgtggaagataatagtc

SEQ ID NO: 322101 - DNA, 25 bp, Artificial
  probe
  misc_feature (1)..(25): SEQ ID NO: 2326; WAN024DFE; Start 396; Stop 420
tgccaatcctctctatgatgcctat

SEQ ID NO: 322102 - DNA, 25 bp, Artificial
  probe
  misc_feature (1)..(25): SEQ ID NO: 2326; WAN024DFE; Start 395; Stop 419
atgccaatcctctctatgatgccta

SEQ ID NO: 322103 - DNA, 25 bp, Artificial
  probe
  misc_feature (1)..(25): SEQ ID NO: 2326; WAN024DFE; Start 182; Stop 206
tccgtgtagtagtttatatccgaaa

SEQ ID NO: 322104 - DNA, 25 bp, Artificial
  probe
  misc_feature (1)..(25): SEQ ID NO: 2326; WAN024DFE; Start 25; Stop 49
tttcgccatttatttgaagccttaa

SEQ ID NO: 322105 - DNA, 25 bp, Artificial
  probe
  misc_feature (1)..(25): SEQ ID NO: 2326; WAN024DFE; Start 210; Stop 234
tgtggaagataatagtcagacaatt

SEQ ID NO: 322106 - DNA, 25 bp, Artificial
  probe
  misc_feature (1)..(25): SEQ ID NO: 2326; WAN024DFE; Start 832; Stop 856
ccagatttatttagtccgttgatga

SEQ ID NO: 322107 - DNA, 25 bp, Artificial
  probe
  misc_feature (1)..(25): SEQ ID NO: 2326; WAN024DFE; Start 831; Stop 855
tccagatttatttagtccgttgatg

SEQ ID NO: 322108 - DNA, 25 bp, Artificial
  probe
  misc_feature (1)..(25): SEQ ID NO: 2326; WAN024DFE; Start 830; Stop 854
gtccagatttatttagtccgttgat

SEQ ID NO: 322109 - DNA, 25 bp, Artificial
  probe
  misc_feature (1)..(25): SEQ ID NO: 2327; WAN024DF8; Start 54; Stop 78
accagatgccttaactatcaagatt

SEQ ID NO: 322110 - DNA, 25 bp, Artificial
  probe
  misc_feature (1)..(25): SEQ ID NO: 2327; WAN024DF8; Start 53; Stop 77
aaccagatgccttaactatcaagat

SEQ ID NO: 322111 - DNA, 25 bp, Artificial
  probe
  misc_feature (1)..(25): SEQ ID NO: 2327; WAN024DF8; Start 48; Stop 72
ttcacaaccagatgccttaactatc

SEQ ID NO: 322112 - DNA, 25 bp, Artificial
  probe
  misc_feature (1)..(25): SEQ ID NO: 2327; WAN024DF8; Start 172; Stop 196
ataagaacgattgtctactctgtcc

SEQ ID NO: 322113 - DNA, 25 bp, Artificial
  probe
  misc_feature (1)..(25): SEQ ID NO: 2327; WAN024DF8; Start 55; Stop 79
ccagatgccttaactatcaagattg

SEQ ID NO: 322114 - DNA, 25 bp, Artificial
  probe
  misc_feature (1)..(25): SEQ ID NO: 2327; WAN024DF8; Start 170; Stop 194
cgataagaacgattgtctactctgt

SEQ ID NO: 322115 - DNA, 25 bp, Artificial
  probe
  misc_feature (1)..(25): SEQ ID NO: 2327; WAN024DF8; Start 52; Stop 76
caaccagatgccttaactatcaaga

SEQ ID NO: 322116 - DNA, 25 bp, Artificial
  probe
  misc_feature (1)..(25): SEQ ID NO: 2327; WAN024DF8; Start 50; Stop 74
cacaaccagatgccttaactatcaa

SEQ ID NO: 322117 - DNA, 25 bp, Artificial
  probe
  misc_feature (1)..(25): SEQ ID NO: 2327; WAN024DF8; Start 51; Stop 75
acaaccagatgccttaactatcaag

SEQ ID NO: 322118 - DNA, 25 bp, Artificial
  probe
  misc_feature (1)..(25): SEQ ID NO: 2327; WAN024DF8; Start 171; Stop 195
gataagaacgattgtctactctgtc

SEQ ID NO: 322119 - DNA, 25 bp, Artificial
  probe
  misc_feature (1)..(25): SEQ ID NO: 2327; WAN024DF8; Start 169; Stop 193
gcgataagaacgattgtctactctg

SEQ ID NO: 322120 - DNA, 25 bp, Artificial
  probe
  misc_feature (1)..(25): SEQ ID NO: 2327; WAN024DF8; Start 167; Stop 191
ctgcgataagaacgattgtctactc

SEQ ID NO: 322121 - DNA, 25 bp, Artificial
  probe
  misc_feature (1)..(25): SEQ ID NO: 2327; WAN024DF8; Start 49; Stop 73
tcacaaccagatgccttaactatca

SEQ ID NO: 322122 - DNA, 25 bp, Artificial
  probe
  misc_feature (1)..(25): SEQ ID NO: 2327; WAN024DF8; Start 168; Stop 192
tgcgataagaacgattgtctactct

SEQ ID NO: 322123 - DNA, 25 bp, Artificial
  probe
  misc_feature (1)..(25): SEQ ID NO: 2327; WAN024DF8; Start 166; Stop 190
tctgcgataagaacgattgtctact

SEQ ID NO: 322124 - DNA, 25 bp, Artificial
  probe
  misc_feature (1)..(25): SEQ ID NO: 2327; WAN024DF8; Start 71; Stop 95
tcaagattgaggatacaccagaatt

SEQ ID NO: 322125 - DNA, 25 bp, Artificial
  probe
  misc_feature (1)..(25): SEQ ID NO: 2327; WAN024DF8; Start 70; Stop 94
atcaagattgaggatacaccagaat

SEQ ID NO: 322126 - DNA, 25 bp, Artificial
  probe
  misc_feature (1)..(25): SEQ ID NO: 2327; WAN024DF8; Start 67; Stop 91
actatcaagattgaggatacaccag

SEQ ID NO: 322127 - DNA, 25 bp, Artificial
  probe
  misc_feature (1)..(25): SEQ ID NO: 2327; WAN024DF8; Start 68; Stop 92
ctatcaagattgaggatacaccaga

SEQ ID NO: 322128 - DNA, 25 bp, Artificial
  probe
  misc_feature (1)..(25): SEQ ID NO: 2327; WAN024DF8; Start 66; Stop 90
aactatcaagattgaggatacacca

SEQ ID NO: 322129 - DNA, 25 bp, Artificial
  probe
  misc_feature (1)..(25): SEQ ID NO: 2327; WAN024DF8; Start 56; Stop 80
cagatgccttaactatcaagattga

SEQ ID NO: 322130 - DNA, 25 bp, Artificial
  probe
  misc_feature (1)..(25): SEQ ID NO: 2327; WAN024DF8; Start 69; Stop 93
tatcaagattgaggatacaccagaa

SEQ ID NO: 322131 - DNA, 25 bp, Artificial
  probe
  misc_feature (1)..(25): SEQ ID NO: 2327; WAN024DF8; Start 60; Stop 84
tgccttaactatcaagattgaggat

SEQ ID NO: 322132 - DNA, 25 bp, Artificial
  probe
  misc_feature (1)..(25): SEQ ID NO: 2327; WAN024DF8; Start 59; Stop 83
atgccttaactatcaagattgagga

SEQ ID NO: 322133 - DNA, 25 bp, Artificial
  probe
  misc_feature (1)..(25): SEQ ID NO: 2327; WAN024DF8; Start 57; Stop 81
agatgccttaactatcaagattgag

SEQ ID NO: 322134 - DNA, 25 bp, Artificial
  probe
  misc_feature (1)..(25): SEQ ID NO: 2327; WAN024DF8; Start 58; Stop 82
gatgccttaactatcaagattgagg

SEQ ID NO: 322135 - DNA, 25 bp, Artificial
  probe
  misc_feature (1)..(25): SEQ ID NO: 2327; WAN024DF8; Start 21; Stop 45
cattattgcgattgtgaaaccctta

SEQ ID NO: 322136 - DNA, 25 bp, Artificial
  probe
  misc_feature (1)..(25): SEQ ID NO: 2327; WAN024DF8; Start 47; Stop 71
tttcacaaccagatgccttaactat

SEQ ID NO: 322137 - DNA, 25 bp, Artificial
  probe
  misc_feature (1)..(25): SEQ ID NO: 2327; WAN024DF8; Start 46; Stop 70
atttcacaaccagatgccttaacta

SEQ ID NO: 322138 - DNA, 25 bp, Artificial
  probe
  misc_feature (1)..(25): SEQ ID NO: 2327; WAN024DF8; Start 23; Stop 47
ttattgcgattgtgaaacccttaat

SEQ ID NO: 322139 - DNA, 25 bp, Artificial
  probe
  misc_feature (1)..(25): SEQ ID NO: 2327; WAN024DF8; Start 22; Stop 46
attattgcgattgtgaaacccttaa

SEQ ID NO: 322140 - DNA, 25 bp, Artificial
  probe
  misc_feature (1)..(25): SEQ ID NO: 2327; WAN024DF8; Start 44; Stop 68
taatttcacaaccagatgccttaac

SEQ ID NO: 322141 - DNA, 25 bp, Artificial
  probe
  misc_feature (1)..(25): SEQ ID NO: 2327; WAN024DF8; Start 37; Stop 61
aaacccttaatttcacaaccagatg

SEQ ID NO: 322142 - DNA, 25 bp, Artificial
  probe
  misc_feature (1)..(25): SEQ ID NO: 2328; WAN024CJ2; Start 393; Stop 417
ttccttacattcagatacacttcct

SEQ ID NO: 322143 - DNA, 25 bp, Artificial
  probe
  misc_feature (1)..(25): SEQ ID NO: 2328; WAN024CJ2; Start 392; Stop 416
cttccttacattcagatacacttcc

SEQ ID NO: 322144 - DNA, 25 bp, Artificial
  probe
  misc_feature (1)..(25): SEQ ID NO: 2328; WAN024CJ2; Start 394; Stop 418
tccttacattcagatacacttcctg

SEQ ID NO: 322145 - DNA, 25 bp, Artificial
  probe
  misc_feature (1)..(25): SEQ ID NO: 2328; WAN024CJ2; Start 471; Stop 495
taatattcgtgtacttgatgtcgga

SEQ ID NO: 322146 - DNA, 25 bp, Artificial
  probe
  misc_feature (1)..(25): SEQ ID NO: 2328; WAN024CJ2; Start 391; Stop 415
tcttccttacattcagatacacttc

SEQ ID NO: 322147 - DNA, 25 bp, Artificial
  probe
  misc_feature (1)..(25): SEQ ID NO: 2328; WAN024CJ2; Start 472; Stop 496
aatattcgtgtacttgatgtcggag

SEQ ID NO: 322148 - DNA, 25 bp, Artificial
  probe
  misc_feature (1)..(25): SEQ ID NO: 2328; WAN024CJ2; Start 470; Stop 494
ataatattcgtgtacttgatgtcgg

SEQ ID NO: 322149 - DNA, 25 bp, Artificial
  probe
  misc_feature (1)..(25): SEQ ID NO: 2328; WAN024CJ2; Start 390; Stop 414
ttcttccttacattcagatacactt

SEQ ID NO: 322150 - DNA, 25 bp, Artificial
  probe
  misc_feature (1)..(25): SEQ ID NO: 2328; WAN024CJ2; Start 899; Stop 923
tgggatgtgagtttgaagtaaagaa

SEQ ID NO: 322151 - DNA, 25 bp, Artificial
  probe
  misc_feature (1)..(25): SEQ ID NO: 2328; WAN024CJ2; Start 898; Stop 922
ttgggatgtgagtttgaagtaaaga

SEQ ID NO: 322152 - DNA, 25 bp, Artificial
  probe
  misc_feature (1)..(25): SEQ ID NO: 2328; WAN024CJ2; Start 98; Stop 122
aagatacggagacattggcatttat

SEQ ID NO: 322153 - DNA, 25 bp, Artificial
  probe
  misc_feature (1)..(25): SEQ ID NO: 2328; WAN024CJ2; Start 897; Stop 921
attgggatgtgagtttgaagtaaag

SEQ ID NO: 322154 - DNA, 25 bp, Artificial
  probe
  misc_feature (1)..(25): SEQ ID NO: 2328; WAN024CJ2; Start 176; Stop 200
agacagagatttcgctaatgacaaa

SEQ ID NO: 322155 - DNA, 25 bp, Artificial
  probe
  misc_feature (1)..(25): SEQ ID NO: 2328; WAN024CJ2; Start 97; Stop 121
aaagatacggagacattggcattta

SEQ ID NO: 322156 - DNA, 25 bp, Artificial
  probe
  misc_feature (1)..(25): SEQ ID NO: 2328; WAN024CJ2; Start 900; Stop 924
gggatgtgagtttgaagtaaagaat

SEQ ID NO: 322157 - DNA, 25 bp, Artificial
  probe
  misc_feature (1)..(25): SEQ ID NO: 2328; WAN024CJ2; Start 308; Stop 332
ctaaggcggcaattaagaaagattt

SEQ ID NO: 322158 - DNA, 25 bp, Artificial
  probe
  misc_feature (1)..(25): SEQ ID NO: 2328; WAN024CJ2; Start 171; Stop 195
tagtcagacagagatttcgctaatg

SEQ ID NO: 322159 - DNA, 25 bp, Artificial
  probe
  misc_feature (1)..(25): SEQ ID NO: 2328; WAN024CJ2; Start 893; Stop 917
atttattgggatgtgagtttgaagt

SEQ ID NO: 322160 - DNA, 25 bp, Artificial
  probe
  misc_feature (1)..(25): SEQ ID NO: 2328; WAN024CJ2; Start 102; Stop 126
tacggagacattggcatttatctta

SEQ ID NO: 322161 - DNA, 25 bp, Artificial
  probe
  misc_feature (1)..(25): SEQ ID NO: 2328; WAN024CJ2; Start 175; Stop 199
cagacagagatttcgctaatgacaa

SEQ ID NO: 322162 - DNA, 25 bp, Artificial
  probe
  misc_feature (1)..(25): SEQ ID NO: 2328; WAN024CJ2; Start 101; Stop 125
atacggagacattggcatttatctt

SEQ ID NO: 322163 - DNA, 25 bp, Artificial
  probe
  misc_feature (1)..(25): SEQ ID NO: 2328; WAN024CJ2; Start 170; Stop 194
ctagtcagacagagatttcgctaat

SEQ ID NO: 322164 - DNA, 25 bp, Artificial
  probe
  misc_feature (1)..(25): SEQ ID NO: 2328; WAN024CJ2; Start 304; Stop 328
aaatctaaggcggcaattaagaaag

SEQ ID NO: 322165 - DNA, 25 bp, Artificial
  probe
  misc_feature (1)..(25): SEQ ID NO: 2328; WAN024CJ2; Start 104; Stop 128
cggagacattggcatttatcttaga

SEQ ID NO: 322166 - DNA, 25 bp, Artificial
  probe
  misc_feature (1)..(25): SEQ ID NO: 2328; WAN024CJ2; Start 473; Stop 497
atattcgtgtacttgatgtcggagc

SEQ ID NO: 322167 - DNA, 25 bp, Artificial
  probe
  misc_feature (1)..(25): SEQ ID NO: 2328; WAN024CJ2; Start 103; Stop 127
acggagacattggcatttatcttag

SEQ ID NO: 322168 - DNA, 25 bp, Artificial
  probe
  misc_feature (1)..(25): SEQ ID NO: 2328; WAN024CJ2; Start 307; Stop 331
tctaaggcggcaattaagaaagatt

SEQ ID NO: 322169 - DNA, 25 bp, Artificial
  probe
  misc_feature (1)..(25): SEQ ID NO: 2328; WAN024CJ2; Start 305; Stop 329
aatctaaggcggcaattaagaaaga

SEQ ID NO: 322170 - DNA, 25 bp, Artificial
  probe
  misc_feature (1)..(25): SEQ ID NO: 2328; WAN024CJ2; Start 786; Stop 810
cgcaacaatttcatcttctgagtta

SEQ ID NO: 322171 - DNA, 25 bp, Artificial
  probe
  misc_feature (1)..(25): SEQ ID NO: 2328; WAN024CJ2; Start 105; Stop 129
ggagacattggcatttatcttagaa

SEQ ID NO: 322172 - DNA, 25 bp, Artificial
  probe
  misc_feature (1)..(25): SEQ ID NO: 2328; WAN024CJ2; Start 895; Stop 919
ttattgggatgtgagtttgaagtaa

SEQ ID NO: 322173 - DNA, 25 bp, Artificial
  probe
  misc_feature (1)..(25): SEQ ID NO: 2328; WAN024CJ2; Start 894; Stop 918
tttattgggatgtgagtttgaagta

SEQ ID NO: 322174 - DNA, 25 bp, Artificial
  probe
  misc_feature (1)..(25): SEQ ID NO: 2328; WAN024CJ2; Start 896; Stop 920
tattgggatgtgagtttgaagtaaa

SEQ ID NO: 322175 - DNA, 25 bp, Artificial
  probe
  misc_feature (1)..(25): SEQ ID NO: 2329; WAN024DJ7; Start 741; Stop 765
ttcttatctgacggatgcctcttat

SEQ ID NO: 322176 - DNA, 25 bp, Artificial
  probe
  misc_feature (1)..(25): SEQ ID NO: 2329; WAN024DJ7; Start 510; Stop 534
tatgattatgttggtgctagaggac

SEQ ID NO: 322177 - DNA, 25 bp, Artificial
  probe
  misc_feature (1)..(25): SEQ ID NO: 2329; WAN024DJ7; Start 509; Stop 533
ctatgattatgttggtgctagagga

SEQ ID NO: 322178 - DNA, 25 bp, Artificial
  probe
  misc_feature (1)..(25): SEQ ID NO: 2329; WAN024DJ7; Start 217; Stop 241
gccaagatgagtaagattattgacc

SEQ ID NO: 322179 - DNA, 25 bp, Artificial
  probe
  misc_feature (1)..(25): SEQ ID NO: 2329; WAN024DJ7; Start 837; Stop 861
caatgttaaggtcttctgtcaggag

SEQ ID NO: 322180 - DNA, 25 bp, Artificial
  probe
  misc_feature (1)..(25): SEQ ID NO: 2329; WAN024DJ7; Start 218; Stop 242
ccaagatgagtaagattattgaccg

SEQ ID NO: 322181 - DNA, 25 bp, Artificial
  probe
  misc_feature (1)..(25): SEQ ID NO: 2329; WAN024DJ7; Start 225; Stop 249
gagtaagattattgaccgttatcgt

SEQ ID NO: 322182 - DNA, 25 bp, Artificial
  probe
  misc_feature (1)..(25): SEQ ID NO: 2329; WAN024DJ7; Start 224; Stop 248
tgagtaagattattgaccgttatcg

SEQ ID NO: 322183 - DNA, 25 bp, Artificial
  probe
  misc_feature (1)..(25): SEQ ID NO: 2329; WAN024DJ7; Start 508; Stop 532
gctatgattatgttggtgctagagg

SEQ ID NO: 322184 - DNA, 25 bp, Artificial
  probe
  misc_feature (1)..(25): SEQ ID NO: 2329; WAN024DJ7; Start 216; Stop 240
tgccaagatgagtaagattattgac

SEQ ID NO: 322185 - DNA, 25 bp, Artificial
  probe
  misc_feature (1)..(25): SEQ ID NO: 2329; WAN024DJ7; Start 838; Stop 862
aatgttaaggtcttctgtcaggaga

SEQ ID NO: 322186 - DNA, 25 bp, Artificial
  probe
  misc_feature (1)..(25): SEQ ID NO: 2329; WAN024DJ7; Start 743; Stop 767
cttatctgacggatgcctcttatga

SEQ ID NO: 322187 - DNA, 25 bp, Artificial
  probe
  misc_feature (1)..(25): SEQ ID NO: 2329; WAN024DJ7; Start 742; Stop 766
tcttatctgacggatgcctcttatg

SEQ ID NO: 322188 - DNA, 25 bp, Artificial
  probe
  misc_feature (1)..(25): SEQ ID NO: 2329; WAN024DJ7; Start 219; Stop 243
caagatgagtaagattattgaccgt

SEQ ID NO: 322189 - DNA, 25 bp, Artificial
  probe
  misc_feature (1)..(25): SEQ ID NO: 2329; WAN024DJ7; Start 220; Stop 244
aagatgagtaagattattgaccgtt

SEQ ID NO: 322190 - DNA, 25 bp, Artificial
  probe
  misc_feature (1)..(25): SEQ ID NO: 2329; WAN024DJ7; Start 228; Stop 252
taagattattgaccgttatcgtcca

SEQ ID NO: 322191 - DNA, 25 bp, Artificial
  probe
  misc_feature (1)..(25): SEQ ID NO: 2329; WAN024DJ7; Start 227; Stop 251
gtaagattattgaccgttatcgtcc

SEQ ID NO: 322192 - DNA, 25 bp, Artificial
  probe
  misc_feature (1)..(25): SEQ ID NO: 2329; WAN024DJ7; Start 229; Stop 253
aagattattgaccgttatcgtccag

SEQ ID NO: 322193 - DNA, 25 bp, Artificial
  probe
  misc_feature (1)..(25): SEQ ID NO: 2329; WAN024DJ7; Start 215; Stop 239
atgccaagatgagtaagattattga

SEQ ID NO: 322194 - DNA, 25 bp, Artificial
  probe
  misc_feature (1)..(25): SEQ ID NO: 2329; WAN024DJ7; Start 618; Stop 642
tgagaaggactatcaggatatgctg

SEQ ID NO: 322195 - DNA, 25 bp, Artificial
  probe
  misc_feature (1)..(25): SEQ ID NO: 2329; WAN024DJ7; Start 836; Stop 860
ccaatgttaaggtcttctgtcagga

SEQ ID NO: 322196 - DNA, 25 bp, Artificial
  probe
  misc_feature (1)..(25): SEQ ID NO: 2329; WAN024DJ7; Start 744; Stop 768
ttatctgacggatgcctcttatgag

SEQ ID NO: 322197 - DNA, 25 bp, Artificial
  probe
  misc_feature (1)..(25): SEQ ID NO: 2329; WAN024DJ7; Start 513; Stop 537
gattatgttggtgctagaggacaag

SEQ ID NO: 322198 - DNA, 25 bp, Artificial
  probe
  misc_feature (1)..(25): SEQ ID NO: 2329; WAN024DJ7; Start 226; Stop 250
agtaagattattgaccgttatcgtc

SEQ ID NO: 322199 - DNA, 25 bp, Artificial
  probe
  misc_feature (1)..(25): SEQ ID NO: 2329; WAN024DJ7; Start 514; Stop 538
attatgttggtgctagaggacaaga

SEQ ID NO: 322200 - DNA, 25 bp, Artificial
  probe
  misc_feature (1)..(25): SEQ ID NO: 2329; WAN024DJ7; Start 511; Stop 535
atgattatgttggtgctagaggaca

SEQ ID NO: 322201 - DNA, 25 bp, Artificial
  probe
  misc_feature (1)..(25): SEQ ID NO: 2329; WAN024DJ7; Start 515; Stop 539
ttatgttggtgctagaggacaagaa

SEQ ID NO: 322202 - DNA, 25 bp, Artificial
  probe
  misc_feature (1)..(25): SEQ ID NO: 2329; WAN024DJ7; Start 512; Stop 536
tgattatgttggtgctagaggacaa

SEQ ID NO: 322203 - DNA, 25 bp, Artificial
  probe
  misc_feature (1)..(25): SEQ ID NO: 2329; WAN024DJ7; Start 221; Stop 245
agatgagtaagattattgaccgtta

SEQ ID NO: 322204 - DNA, 25 bp, Artificial
  probe
  misc_feature (1)..(25): SEQ ID NO: 2329; WAN024DJ7; Start 214; Stop 238
catgccaagatgagtaagattattg

SEQ ID NO: 322205 - DNA, 25 bp, Artificial
  probe
  misc_feature (1)..(25): SEQ ID NO: 2329; WAN024DJ7; Start 456; Stop 480
ctgggataaggatagtggagaaatt

SEQ ID NO: 322206 - DNA, 25 bp, Artificial
  probe
  misc_feature (1)..(25): SEQ ID NO: 2329; WAN024DJ7; Start 669; Stop 693
caagattggagaattaacggagaaa

SEQ ID NO: 322207 - DNA, 25 bp, Artificial
  probe
  misc_feature (1)..(25): SEQ ID NO: 2329; WAN024DJ7; Start 368; Stop 392
agcttggattggatagaagtcagtt

SEQ ID NO: 322208 - DNA, 25 bp, Artificial
  probe
  misc_feature (1)..(25): SEQ ID NO: 2330; WAN024CGL; Start 274; Stop 298
cctgtaacactctatgaacttcctt

SEQ ID NO: 322209 - DNA, 25 bp, Artificial
  probe
  misc_feature (1)..(25): SEQ ID NO: 2330; WAN024CGL; Start 272; Stop 296
atcctgtaacactctatgaacttcc

SEQ ID NO: 322210 - DNA, 25 bp, Artificial
  probe
  misc_feature (1)..(25): SEQ ID NO: 2330; WAN024CGL; Start 273; Stop 297
tcctgtaacactctatgaacttcct

SEQ ID NO: 322211 - DNA, 25 bp, Artificial
  probe
  misc_feature (1)..(25): SEQ ID NO: 2330; WAN024CGL; Start 271; Stop 295
gatcctgtaacactctatgaacttc

SEQ ID NO: 322212 - DNA, 25 bp, Artificial
  probe
  misc_feature (1)..(25): SEQ ID NO: 2330; WAN024CGL; Start 268; Stop 292
caagatcctgtaacactctatgaac

SEQ ID NO: 322213 - DNA, 25 bp, Artificial
  probe
  misc_feature (1)..(25): SEQ ID NO: 2330; WAN024CGL; Start 270; Stop 294
agatcctgtaacactctatgaactt

SEQ ID NO: 322214 - DNA, 25 bp, Artificial
  probe
  misc_feature (1)..(25): SEQ ID NO: 2330; WAN024CGL; Start 269; Stop 293
aagatcctgtaacactctatgaact

SEQ ID NO: 322215 - DNA, 25 bp, Artificial
  probe
  misc_feature (1)..(25): SEQ ID NO: 2330; WAN024CGL; Start 267; Stop 291
acaagatcctgtaacactctatgaa

SEQ ID NO: 322216 - DNA, 25 bp, Artificial
  probe
  misc_feature (1)..(25): SEQ ID NO: 2330; WAN024CGL; Start 266; Stop 290
aacaagatcctgtaacactctatga

SEQ ID NO: 322217 - DNA, 25 bp, Artificial
  probe
  misc_feature (1)..(25): SEQ ID NO: 2330; WAN024CGL; Start 154; Stop 178
ttatcacgaaagcaaactaatcagc

SEQ ID NO: 322218 - DNA, 25 bp, Artificial
  probe
  misc_feature (1)..(25): SEQ ID NO: 2330; WAN024CGL; Start 53; Stop 77
gttggctttatatcatccgtattcg

SEQ ID NO: 322219 - DNA, 25 bp, Artificial
  probe
  misc_feature (1)..(25): SEQ ID NO: 2330; WAN024CGL; Start 51; Stop 75
aggttggctttatatcatccgtatt

SEQ ID NO: 322220 - DNA, 25 bp, Artificial
  probe
  misc_feature (1)..(25): SEQ ID NO: 2330; WAN024CGL; Start 52; Stop 76
ggttggctttatatcatccgtattc

SEQ ID NO: 322221 - DNA, 25 bp, Artificial
  probe
  misc_feature (1)..(25): SEQ ID NO: 2330; WAN024CGL; Start 336; Stop 360
cgaaactttagtgacgaatacagac

SEQ ID NO: 322222 - DNA, 25 bp, Artificial
  probe
  misc_feature (1)..(25): SEQ ID NO: 2330; WAN024CGL; Start 573; Stop 597
atataaagtgtgtttctcagatgcg

SEQ ID NO: 322223 - DNA, 25 bp, Artificial
  probe
  misc_feature (1)..(25): SEQ ID NO: 2330; WAN024CGL; Start 335; Stop 359
acgaaactttagtgacgaatacaga

SEQ ID NO: 322224 - DNA, 25 bp, Artificial
  probe
  misc_feature (1)..(25): SEQ ID NO: 2330; WAN024CGL; Start 50; Stop 74
aaggttggctttatatcatccgtat

SEQ ID NO: 322225 - DNA, 25 bp, Artificial
  probe
  misc_feature (1)..(25): SEQ ID NO: 2330; WAN024CGL; Start 334; Stop 358
tacgaaactttagtgacgaatacag

SEQ ID NO: 322226 - DNA, 25 bp, Artificial
  probe
  misc_feature (1)..(25): SEQ ID NO: 2330; WAN024CGL; Start 574; Stop 598
tataaagtgtgtttctcagatgcgg

SEQ ID NO: 322227 - DNA, 25 bp, Artificial
  probe
  misc_feature (1)..(25): SEQ ID NO: 2330; WAN024CGL; Start 275; Stop 299
ctgtaacactctatgaacttccttt

SEQ ID NO: 322228 - DNA, 25 bp, Artificial
  probe
  misc_feature (1)..(25): SEQ ID NO: 2330; WAN024CGL; Start 333; Stop 357
atacgaaactttagtgacgaataca

SEQ ID NO: 322229 - DNA, 25 bp, Artificial
  probe
  misc_feature (1)..(25): SEQ ID NO: 2330; WAN024CGL; Start 7; Stop 31
agaggctatgaaagttacaatctca

SEQ ID NO: 322230 - DNA, 25 bp, Artificial
  probe
  misc_feature (1)..(25): SEQ ID NO: 2330; WAN024CGL; Start 337; Stop 361
gaaactttagtgacgaatacagact

SEQ ID NO: 322231 - DNA, 25 bp, Artificial
  probe
  misc_feature (1)..(25): SEQ ID NO: 2330; WAN024CGL; Start 665; Stop 689
aacagttatctattattcgaccgaa

SEQ ID NO: 322232 - DNA, 25 bp, Artificial
  probe
  misc_feature (1)..(25): SEQ ID NO: 2330; WAN024CGL; Start 572; Stop 596
gatataaagtgtgtttctcagatgc

SEQ ID NO: 322233 - DNA, 25 bp, Artificial
  probe
  misc_feature (1)..(25): SEQ ID NO: 2330; WAN024CGL; Start 484; Stop 508
caagaaatctttgctcgctttacaa

SEQ ID NO: 322234 - DNA, 25 bp, Artificial
  probe
  misc_feature (1)..(25): SEQ ID NO: 2330; WAN024CGL; Start 2; Stop 26
tggatagaggctatgaaagttacaa

SEQ ID NO: 322235 - DNA, 25 bp, Artificial
  probe
  misc_feature (1)..(25): SEQ ID NO: 2330; WAN024CGL; Start 16; Stop 40
gaaagttacaatctcatggctcatt

SEQ ID NO: 322236 - DNA, 25 bp, Artificial
  probe
  misc_feature (1)..(25): SEQ ID NO: 2330; WAN024CGL; Start 98; Stop 122
cttcctccttcaacttgccaaatac

SEQ ID NO: 322237 - DNA, 25 bp, Artificial
  probe
  misc_feature (1)..(25): SEQ ID NO: 2330; WAN024CGL; Start 1; Stop 25
atggatagaggctatgaaagttaca

SEQ ID NO: 322238 - DNA, 25 bp, Artificial
  probe
  misc_feature (1)..(25): SEQ ID NO: 2330; WAN024CGL; Start 17; Stop 41
aaagttacaatctcatggctcattt

SEQ ID NO: 322239 - DNA, 25 bp, Artificial
  probe
  misc_feature (1)..(25): SEQ ID NO: 2330; WAN024CGL; Start 303; Stop 327
tatggtgcgtttagaagtggaagaa

SEQ ID NO: 322240 - DNA, 25 bp, Artificial
  probe
  misc_feature (1)..(25): SEQ ID NO: 2330; WAN024CGL; Start 153; Stop 177
attatcacgaaagcaaactaatcag

SEQ ID NO: 322241 - DNA, 25 bp, Artificial
  probe
  misc_feature (1)..(25): SEQ ID NO: 2331; WAN024DLU; Start 825; Stop 849
agtaatcaagaaggcaagagaagaa

SEQ ID NO: 322242 - DNA, 25 bp, Artificial
  probe
  misc_feature (1)..(25): SEQ ID NO: 2331; WAN024DLU; Start 824; Stop 848
aagtaatcaagaaggcaagagaaga

SEQ ID NO: 322243 - DNA, 25 bp, Artificial
  probe
  misc_feature (1)..(25): SEQ ID NO: 2331; WAN024DLU; Start 462; Stop 486
aatggttcacaatatagcaggtacg

SEQ ID NO: 322244 - DNA, 25 bp, Artificial
  probe
  misc_feature (1)..(25): SEQ ID NO: 2331; WAN024DLU; Start 467; Stop 491
ttcacaatatagcaggtacgtcatt

SEQ ID NO: 322245 - DNA, 25 bp, Artificial
  probe
  misc_feature (1)..(25): SEQ ID NO: 2331; WAN024DLU; Start 466; Stop 490
gttcacaatatagcaggtacgtcat

SEQ ID NO: 322246 - DNA, 25 bp, Artificial
  probe
  misc_feature (1)..(25): SEQ ID NO: 2331; WAN024DLU; Start 458; Stop 482
ttcaaatggttcacaatatagcagg

SEQ ID NO: 322247 - DNA, 25 bp, Artificial
  probe
  misc_feature (1)..(25): SEQ ID NO: 2331; WAN024DLU; Start 459; Stop 483
tcaaatggttcacaatatagcaggt

SEQ ID NO: 322248 - DNA, 25 bp, Artificial
  probe
  misc_feature (1)..(25): SEQ ID NO: 2331; WAN024DLU; Start 826; Stop 850
gtaatcaagaaggcaagagaagaaa

SEQ ID NO: 322249 - DNA, 25 bp, Artificial
  probe
  misc_feature (1)..(25): SEQ ID NO: 2331; WAN024DLU; Start 823; Stop 847
aaagtaatcaagaaggcaagagaag

SEQ ID NO: 322250 - DNA, 25 bp, Artificial
  probe
  misc_feature (1)..(25): SEQ ID NO: 2331; WAN024DLU; Start 736; Stop 760
ttcaacgagagaatattggttacaa

SEQ ID NO: 322251 - DNA, 25 bp, Artificial
  probe
  misc_feature (1)..(25): SEQ ID NO: 2331; WAN024DLU; Start 588; Stop 612
aggataccaaattgatatagtgcga

SEQ ID NO: 322252 - DNA, 25 bp, Artificial
  probe
  misc_feature (1)..(25): SEQ ID NO: 2331; WAN024DLU; Start 460; Stop 484
caaatggttcacaatatagcaggta

SEQ ID NO: 322253 - DNA, 25 bp, Artificial
  probe
  misc_feature (1)..(25): SEQ ID NO: 2331; WAN024DLU; Start 589; Stop 613
ggataccaaattgatatagtgcgag

SEQ ID NO: 322254 - DNA, 25 bp, Artificial
  probe
  misc_feature (1)..(25): SEQ ID NO: 2331; WAN024DLU; Start 235; Stop 259
actaatgccagaaacataggtatca

SEQ ID NO: 322255 - DNA, 25 bp, Artificial
  probe
  misc_feature (1)..(25): SEQ ID NO: 2331; WAN024DLU; Start 540; Stop 564
aatagattcacatcaggacggtgtt

SEQ ID NO: 322256 - DNA, 25 bp, Artificial
  probe
  misc_feature (1)..(25): SEQ ID NO: 2331; WAN024DLU; Start 457; Stop 481
gttcaaatggttcacaatatagcag

SEQ ID NO: 322257 - DNA, 25 bp, Artificial
  probe
  misc_feature (1)..(25): SEQ ID NO: 2331; WAN024DLU; Start 587; Stop 611
aaggataccaaattgatatagtgcg

SEQ ID NO: 322258 - DNA, 25 bp, Artificial
  probe
  misc_feature (1)..(25): SEQ ID NO: 2331; WAN024DLU; Start 406; Stop 430
aatggtacacgagaagaggagaaga

SEQ ID NO: 322259 - DNA, 25 bp, Artificial
  probe
  misc_feature (1)..(25): SEQ ID NO: 2331; WAN024DLU; Start 233; Stop 257
caactaatgccagaaacataggtat

SEQ ID NO: 322260 - DNA, 25 bp, Artificial
  probe
  misc_feature (1)..(25): SEQ ID NO: 2331; WAN024DLU; Start 436; Stop 460
tttgttggaaatcccttgtttgttc

SEQ ID NO: 322261 - DNA, 25 bp, Artificial
  probe
  misc_feature (1)..(25): SEQ ID NO: 2331; WAN024DLU; Start 398; Stop 422
tttatccaaatggtacacgagaaga

SEQ ID NO: 322262 - DNA, 25 bp, Artificial
  probe
  misc_feature (1)..(25): SEQ ID NO: 2331; WAN024DLU; Start 590; Stop 614
gataccaaattgatatagtgcgaga

SEQ ID NO: 322263 - DNA, 25 bp, Artificial
  probe
  misc_feature (1)..(25): SEQ ID NO: 2331; WAN024DLU; Start 399; Stop 423
ttatccaaatggtacacgagaagag

SEQ ID NO: 322264 - DNA, 25 bp, Artificial
  probe
  misc_feature (1)..(25): SEQ ID NO: 2331; WAN024DLU; Start 236; Stop 260
ctaatgccagaaacataggtatcaa

SEQ ID NO: 322265 - DNA, 25 bp, Artificial
  probe
  misc_feature (1)..(25): SEQ ID NO: 2331; WAN024DLU; Start 234; Stop 258
aactaatgccagaaacataggtatc

SEQ ID NO: 322266 - DNA, 25 bp, Artificial
  probe
  misc_feature (1)..(25): SEQ ID NO: 2331; WAN024DLU; Start 463; Stop 487
atggttcacaatatagcaggtacgt

SEQ ID NO: 322267 - DNA, 25 bp, Artificial
  probe
  misc_feature (1)..(25): SEQ ID NO: 2331; WAN024DLU; Start 461; Stop 485
aaatggttcacaatatagcaggtac

SEQ ID NO: 322268 - DNA, 25 bp, Artificial
  probe
  misc_feature (1)..(25): SEQ ID NO: 2331; WAN024DLU; Start 444; Stop 468
aaatcccttgtttgttcaaatggtt

SEQ ID NO: 322269 - DNA, 25 bp, Artificial
  probe
  misc_feature (1)..(25): SEQ ID NO: 2331; WAN024DLU; Start 440; Stop 464
ttggaaatcccttgtttgttcaaat

SEQ ID NO: 322270 - DNA, 25 bp, Artificial
  probe
  misc_feature (1)..(25): SEQ ID NO: 2331; WAN024DLU; Start 592; Stop 616
taccaaattgatatagtgcgagaat

SEQ ID NO: 322271 - DNA, 25 bp, Artificial
  probe
  misc_feature (1)..(25): SEQ ID NO: 2331; WAN024DLU; Start 591; Stop 615
ataccaaattgatatagtgcgagaa

SEQ ID NO: 322272 - DNA, 25 bp, Artificial
  probe
  misc_feature (1)..(25): SEQ ID NO: 2331; WAN024DLU; Start 541; Stop 565
atagattcacatcaggacggtgttg

SEQ ID NO: 322273 - DNA, 25 bp, Artificial
  probe
  misc_feature (1)..(25): SEQ ID NO: 2331; WAN024DLU; Start 445; Stop 469
aatcccttgtttgttcaaatggttc

SEQ ID NO: 322274 - DNA, 25 bp, Artificial
  probe
  misc_feature (1)..(25): SEQ ID NO: 2332; WAN024CZS; Start 262; Stop 286
atggcttcaacagagattattcagt

SEQ ID NO: 322275 - DNA, 25 bp, Artificial
  probe
  misc_feature (1)..(25): SEQ ID NO: 2332; WAN024CZS; Start 261; Stop 285
aatggcttcaacagagattattcag

SEQ ID NO: 322276 - DNA, 25 bp, Artificial
  probe
  misc_feature (1)..(25): SEQ ID NO: 2332; WAN024CZS; Start 263; Stop 287
tggcttcaacagagattattcagtt

SEQ ID NO: 322277 - DNA, 25 bp, Artificial
  probe
  misc_feature (1)..(25): SEQ ID NO: 2332; WAN024CZS; Start 135; Stop 159
aattaaagttgaagaagcggaagac

SEQ ID NO: 322278 - DNA, 25 bp, Artificial
  probe
  misc_feature (1)..(25): SEQ ID NO: 2332; WAN024CZS; Start 260; Stop 284
aaatggcttcaacagagattattca

SEQ ID NO: 322279 - DNA, 25 bp, Artificial
  probe
  misc_feature (1)..(25): SEQ ID NO: 2332; WAN024CZS; Start 134; Stop 158
aaattaaagttgaagaagcggaaga

SEQ ID NO: 322280 - DNA, 25 bp, Artificial
  probe
  misc_feature (1)..(25): SEQ ID NO: 2332; WAN024CZS; Start 259; Stop 283
caaatggcttcaacagagattattc

SEQ ID NO: 322281 - DNA, 25 bp, Artificial
  probe
  misc_feature (1)..(25): SEQ ID NO: 2332; WAN024CZS; Start 258; Stop 282
ccaaatggcttcaacagagattatt

SEQ ID NO: 322282 - DNA, 25 bp, Artificial
  probe
  misc_feature (1)..(25): SEQ ID NO: 2332; WAN024CZS; Start 81; Stop 105
atcctttattgaagccatccaacta

SEQ ID NO: 322283 - DNA, 25 bp, Artificial
  probe
  misc_feature (1)..(25): SEQ ID NO: 2332; WAN024CZS; Start 257; Stop 281
accaaatggcttcaacagagattat

SEQ ID NO: 322284 - DNA, 25 bp, Artificial
  probe
  misc_feature (1)..(25): SEQ ID NO: 2332; WAN024CZS; Start 2; Stop 26
tggataggagaaataagatgacaga

SEQ ID NO: 322285 - DNA, 25 bp, Artificial
  probe
  misc_feature (1)..(25): SEQ ID NO: 2332; WAN024CZS; Start 74; Stop 98
ccaaatcatcctttattgaagccat

SEQ ID NO: 322286 - DNA, 25 bp, Artificial
  probe
  misc_feature (1)..(25): SEQ ID NO: 2332; WAN024CZS; Start 76; Stop 100
aaatcatcctttattgaagccatcc

SEQ ID NO: 322287 - DNA, 25 bp, Artificial
  probe
  misc_feature (1)..(25): SEQ ID NO: 2332; WAN024CZS; Start 78; Stop 102
atcatcctttattgaagccatccaa

SEQ ID NO: 322288 - DNA, 25 bp, Artificial
  probe
  misc_feature (1)..(25): SEQ ID NO: 2332; WAN024CZS; Start 77; Stop 101
aatcatcctttattgaagccatcca

SEQ ID NO: 322289 - DNA, 25 bp, Artificial
  probe
  misc_feature (1)..(25): SEQ ID NO: 2332; WAN024CZS; Start 136; Stop 160
attaaagttgaagaagcggaagact

SEQ ID NO: 322290 - DNA, 25 bp, Artificial
  probe
  misc_feature (1)..(25): SEQ ID NO: 2332; WAN024CZS; Start 148; Stop 172
gaagcggaagactccttagtagaag

SEQ ID NO: 322291 - DNA, 25 bp, Artificial
  probe
  misc_feature (1)..(25): SEQ ID NO: 2332; WAN024CZS; Start 145; Stop 169
gaagaagcggaagactccttagtag

SEQ ID NO: 322292 - DNA, 25 bp, Artificial
  probe
  misc_feature (1)..(25): SEQ ID NO: 2332; WAN024CZS; Start 256; Stop 280
gaccaaatggcttcaacagagatta

SEQ ID NO: 322293 - DNA, 25 bp, Artificial
  probe
  misc_feature (1)..(25): SEQ ID NO: 2332; WAN024CZS; Start 82; Stop 106
tcctttattgaagccatccaactag

SEQ ID NO: 322294 - DNA, 25 bp, Artificial
  probe
  misc_feature (1)..(25): SEQ ID NO: 2332; WAN024CZS; Start 71; Stop 95
cagccaaatcatcctttattgaagc

SEQ ID NO: 322295 - DNA, 25 bp, Artificial
  probe
  misc_feature (1)..(25): SEQ ID NO: 2332; WAN024CZS; Start 70; Stop 94
gcagccaaatcatcctttattgaag

SEQ ID NO: 322296 - DNA, 25 bp, Artificial
  probe
  misc_feature (1)..(25): SEQ ID NO: 2332; WAN024CZS; Start 80; Stop 104
catcctttattgaagccatccaact

SEQ ID NO: 322297 - DNA, 25 bp, Artificial
  probe
  misc_feature (1)..(25): SEQ ID NO: 2332; WAN024CZS; Start 75; Stop 99
caaatcatcctttattgaagccatc

SEQ ID NO: 322298 - DNA, 25 bp, Artificial
  probe
  misc_feature (1)..(25): SEQ ID NO: 2332; WAN024CZS; Start 69; Stop 93
agcagccaaatcatcctttattgaa

SEQ ID NO: 322299 - DNA, 25 bp, Artificial
  probe
  misc_feature (1)..(25): SEQ ID NO: 2332; WAN024CZS; Start 147; Stop 171
agaagcggaagactccttagtagaa

SEQ ID NO: 322300 - DNA, 25 bp, Artificial
  probe
  misc_feature (1)..(25): SEQ ID NO: 2332; WAN024CZS; Start 146; Stop 170
aagaagcggaagactccttagtaga

SEQ ID NO: 322301 - DNA, 25 bp, Artificial
  probe
  misc_feature (1)..(25): SEQ ID NO: 2332; WAN024CZS; Start 137; Stop 161
ttaaagttgaagaagcggaagactc

SEQ ID NO: 322302 - DNA, 25 bp, Artificial
  probe
  misc_feature (1)..(25): SEQ ID NO: 2332; WAN024CZS; Start 79; Stop 103
tcatcctttattgaagccatccaac

SEQ ID NO: 322303 - DNA, 25 bp, Artificial
  probe
  misc_feature (1)..(25): SEQ ID NO: 2332; WAN024CZS; Start 68; Stop 92
gagcagccaaatcatcctttattga

SEQ ID NO: 322304 - DNA, 25 bp, Artificial
  probe
  misc_feature (1)..(25): SEQ ID NO: 2332; WAN024CZS; Start 1; Stop 25
atggataggagaaataagatgacag

SEQ ID NO: 322305 - DNA, 25 bp, Artificial
  probe
  misc_feature (1)..(25): SEQ ID NO: 2332; WAN024CZS; Start 144; Stop 168
tgaagaagcggaagactccttagta

SEQ ID NO: 322306 - DNA, 25 bp, Artificial
  probe
  misc_feature (1)..(25): SEQ ID NO: 2332; WAN024CZS; Start 72; Stop 96
agccaaatcatcctttattgaagcc

SEQ ID NO: 322307 - DNA, 25 bp, Artificial
  probe
  misc_feature (1)..(25): SEQ ID NO: 2333; WAN024DU7; Start 733; Stop 757
gatacgctgaccattcttgttattc

SEQ ID NO: 322308 - DNA, 25 bp, Artificial
  probe
  misc_feature (1)..(25): SEQ ID NO: 2333; WAN024DU7; Start 734; Stop 758
atacgctgaccattcttgttattct

SEQ ID NO: 322309 - DNA, 25 bp, Artificial
  probe
  misc_feature (1)..(25): SEQ ID NO: 2333; WAN024DU7; Start 466; Stop 490
attggattgatgctgtctatgagtt

SEQ ID NO: 322310 - DNA, 25 bp, Artificial
  probe
  misc_feature (1)..(25): SEQ ID NO: 2333; WAN024DU7; Start 738; Stop 762
gctgaccattcttgttattctcgta

SEQ ID NO: 322311 - DNA, 25 bp, Artificial
  probe
  misc_feature (1)..(25): SEQ ID NO: 2333; WAN024DU7; Start 735; Stop 759
tacgctgaccattcttgttattctc

SEQ ID NO: 322312 - DNA, 25 bp, Artificial
  probe
  misc_feature (1)..(25): SEQ ID NO: 2333; WAN024DU7; Start 465; Stop 489
aattggattgatgctgtctatgagt

SEQ ID NO: 322313 - DNA, 25 bp, Artificial
  probe
  misc_feature (1)..(25): SEQ ID NO: 2333; WAN024DU7; Start 72; Stop 96
attgcttgctatgatgctactgatt

SEQ ID NO: 322314 - DNA, 25 bp, Artificial
  probe
  misc_feature (1)..(25): SEQ ID NO: 2333; WAN024DU7; Start 732; Stop 756
ggatacgctgaccattcttgttatt

SEQ ID NO: 322315 - DNA, 25 bp, Artificial
  probe
  misc_feature (1)..(25): SEQ ID NO: 2333; WAN024DU7; Start 71; Stop 95
aattgcttgctatgatgctactgat

SEQ ID NO: 322316 - DNA, 25 bp, Artificial
  probe
  misc_feature (1)..(25): SEQ ID NO: 2333; WAN024DU7; Start 751; Stop 775
gttattctcgtacttggttgttgtt

SEQ ID NO: 322317 - DNA, 25 bp, Artificial
  probe
  misc_feature (1)..(25): SEQ ID NO: 2333; WAN024DU7; Start 749; Stop 773
ttgttattctcgtacttggttgttg

SEQ ID NO: 322318 - DNA, 25 bp, Artificial
  probe
  misc_feature (1)..(25): SEQ ID NO: 2333; WAN024DU7; Start 747; Stop 771
tcttgttattctcgtacttggttgt

SEQ ID NO: 322319 - DNA, 25 bp, Artificial
  probe
  misc_feature (1)..(25): SEQ ID NO: 2333; WAN024DU7; Start 740; Stop 764
tgaccattcttgttattctcgtact

SEQ ID NO: 322320 - DNA, 25 bp, Artificial
  probe
  misc_feature (1)..(25): SEQ ID NO: 2333; WAN024DU7; Start 748; Stop 772
cttgttattctcgtacttggttgtt

SEQ ID NO: 322321 - DNA, 25 bp, Artificial
  probe
  misc_feature (1)..(25): SEQ ID NO: 2333; WAN024DU7; Start 739; Stop 763
ctgaccattcttgttattctcgtac

SEQ ID NO: 322322 - DNA, 25 bp, Artificial
  probe
  misc_feature (1)..(25): SEQ ID NO: 2333; WAN024DU7; Start 750; Stop 774
tgttattctcgtacttggttgttgt

SEQ ID NO: 322323 - DNA, 25 bp, Artificial
  probe
  misc_feature (1)..(25): SEQ ID NO: 2333; WAN024DU7; Start 746; Stop 770
ttcttgttattctcgtacttggttg

SEQ ID NO: 322324 - DNA, 25 bp, Artificial
  probe
  misc_feature (1)..(25): SEQ ID NO: 2333; WAN024DU7; Start 731; Stop 755
aggatacgctgaccattcttgttat

SEQ ID NO: 322325 - DNA, 25 bp, Artificial
  probe
  misc_feature (1)..(25): SEQ ID NO: 2333; WAN024DU7; Start 744; Stop 768
cattcttgttattctcgtacttggt

SEQ ID NO: 322326 - DNA, 25 bp, Artificial
  probe
  misc_feature (1)..(25): SEQ ID NO: 2333; WAN024DU7; Start 742; Stop 766
accattcttgttattctcgtacttg

SEQ ID NO: 322327 - DNA, 25 bp, Artificial
  probe
  misc_feature (1)..(25): SEQ ID NO: 2333; WAN024DU7; Start 741; Stop 765
gaccattcttgttattctcgtactt

SEQ ID NO: 322328 - DNA, 25 bp, Artificial
  probe
  misc_feature (1)..(25): SEQ ID NO: 2333; WAN024DU7; Start 745; Stop 769
attcttgttattctcgtacttggtt

SEQ ID NO: 322329 - DNA, 25 bp, Artificial
  probe
  misc_feature (1)..(25): SEQ ID NO: 2333; WAN024DU7; Start 730; Stop 754
aaggatacgctgaccattcttgtta

SEQ ID NO: 322330 - DNA, 25 bp, Artificial
  probe
  misc_feature (1)..(25): SEQ ID NO: 2333; WAN024DU7; Start 162; Stop 186
tattgccttgtcaggagtatctctt

SEQ ID NO: 322331 - DNA, 25 bp, Artificial
  probe
  misc_feature (1)..(25): SEQ ID NO: 2333; WAN024DU7; Start 161; Stop 185
ttattgccttgtcaggagtatctct

SEQ ID NO: 322332 - DNA, 25 bp, Artificial
  probe
  misc_feature (1)..(25): SEQ ID NO: 2333; WAN024DU7; Start 144; Stop 168
tatagcgacagggatatttattgcc

SEQ ID NO: 322333 - DNA, 25 bp, Artificial
  probe
  misc_feature (1)..(25): SEQ ID NO: 2333; WAN024DU7; Start 743; Stop 767
ccattcttgttattctcgtacttgg

SEQ ID NO: 322334 - DNA, 25 bp, Artificial
  probe
  misc_feature (1)..(25): SEQ ID NO: 2333; WAN024DU7; Start 467; Stop 491
ttggattgatgctgtctatgagttt

SEQ ID NO: 322335 - DNA, 25 bp, Artificial
  probe
  misc_feature (1)..(25): SEQ ID NO: 2333; WAN024DU7; Start 715; Stop 739
ttgaaatggactctaaaggatacgc

SEQ ID NO: 322336 - DNA, 25 bp, Artificial
  probe
  misc_feature (1)..(25): SEQ ID NO: 2333; WAN024DU7; Start 462; Stop 486
tgaaattggattgatgctgtctatg

SEQ ID NO: 322337 - DNA, 25 bp, Artificial
  probe
  misc_feature (1)..(25): SEQ ID NO: 2333; WAN024DU7; Start 464; Stop 488
aaattggattgatgctgtctatgag

SEQ ID NO: 322338 - DNA, 25 bp, Artificial
  probe
  misc_feature (1)..(25): SEQ ID NO: 2333; WAN024DU7; Start 463; Stop 487
gaaattggattgatgctgtctatga

SEQ ID NO: 322339 - DNA, 25 bp, Artificial
  probe
  misc_feature (1)..(25): SEQ ID NO: 2333; WAN024DU7; Start 468; Stop 492
tggattgatgctgtctatgagtttg

SEQ ID NO: 322340 - DNA, 25 bp, Artificial
  probe
  misc_feature (1)..(25): SEQ ID NO: 2334; WAN024DJX; Start 85; Stop 109
ctacgttattcaatagcactcttct

SEQ ID NO: 322341 - DNA, 25 bp, Artificial
  probe
  misc_feature (1)..(25): SEQ ID NO: 2334; WAN024DJX; Start 84; Stop 108
tctacgttattcaatagcactcttc

SEQ ID NO: 322342 - DNA, 25 bp, Artificial
  probe
  misc_feature (1)..(25): SEQ ID NO: 2334; WAN024DJX; Start 82; Stop 106
cttctacgttattcaatagcactct

SEQ ID NO: 322343 - DNA, 25 bp, Artificial
  probe
  misc_feature (1)..(25): SEQ ID NO: 2334; WAN024DJX; Start 81; Stop 105
tcttctacgttattcaatagcactc

SEQ ID NO: 322344 - DNA, 25 bp, Artificial
  probe
  misc_feature (1)..(25): SEQ ID NO: 2334; WAN024DJX; Start 396; Stop 420
aggtttagttctgagtttgttagac

SEQ ID NO: 322345 - DNA, 25 bp, Artificial
  probe
  misc_feature (1)..(25): SEQ ID NO: 2334; WAN024DJX; Start 86; Stop 110
tacgttattcaatagcactcttctt

SEQ ID NO: 322346 - DNA, 25 bp, Artificial
  probe
  misc_feature (1)..(25): SEQ ID NO: 2334; WAN024DJX; Start 83; Stop 107
ttctacgttattcaatagcactctt

SEQ ID NO: 322347 - DNA, 25 bp, Artificial
  probe
  misc_feature (1)..(25): SEQ ID NO: 2334; WAN024DJX; Start 80; Stop 104
ttcttctacgttattcaatagcact

SEQ ID NO: 322348 - DNA, 25 bp, Artificial
  probe
  misc_feature (1)..(25): SEQ ID NO: 2334; WAN024DJX; Start 79; Stop 103
cttcttctacgttattcaatagcac

SEQ ID NO: 322349 - DNA, 25 bp, Artificial
  probe
  misc_feature (1)..(25): SEQ ID NO: 2334; WAN024DJX; Start 78; Stop 102
tcttcttctacgttattcaatagca

SEQ ID NO: 322350 - DNA, 25 bp, Artificial
  probe
  misc_feature (1)..(25): SEQ ID NO: 2334; WAN024DJX; Start 397; Stop 421
ggtttagttctgagtttgttagaca

SEQ ID NO: 322351 - DNA, 25 bp, Artificial
  probe
  misc_feature (1)..(25): SEQ ID NO: 2334; WAN024DJX; Start 40; Stop 64
cgagagatggctctaactaatactt

SEQ ID NO: 322352 - DNA, 25 bp, Artificial
  probe
  misc_feature (1)..(25): SEQ ID NO: 2334; WAN024DJX; Start 72; Stop 96
tcgatatcttcttctacgttattca

SEQ ID NO: 322353 - DNA, 25 bp, Artificial
  probe
  misc_feature (1)..(25): SEQ ID NO: 2334; WAN024DJX; Start 395; Stop 419
taggtttagttctgagtttgttaga

SEQ ID NO: 322354 - DNA, 25 bp, Artificial
  probe
  misc_feature (1)..(25): SEQ ID NO: 2334; WAN024DJX; Start 355; Stop 379
aaccaagtagcacgtttatttgttt

SEQ ID NO: 322355 - DNA, 25 bp, Artificial
  probe
  misc_feature (1)..(25): SEQ ID NO: 2334; WAN024DJX; Start 87; Stop 111
acgttattcaatagcactcttcttt

SEQ ID NO: 322356 - DNA, 25 bp, Artificial
  probe
  misc_feature (1)..(25): SEQ ID NO: 2334; WAN024DJX; Start 402; Stop 426
agttctgagtttgttagacattaga

SEQ ID NO: 322357 - DNA, 25 bp, Artificial
  probe
  misc_feature (1)..(25): SEQ ID NO: 2334; WAN024DJX; Start 354; Stop 378
taaccaagtagcacgtttatttgtt

SEQ ID NO: 322358 - DNA, 25 bp, Artificial
  probe
  misc_feature (1)..(25): SEQ ID NO: 2334; WAN024DJX; Start 353; Stop 377
ataaccaagtagcacgtttatttgt

SEQ ID NO: 322359 - DNA, 25 bp, Artificial
  probe
  misc_feature (1)..(25): SEQ ID NO: 2334; WAN024DJX; Start 77; Stop 101
atcttcttctacgttattcaatagc

SEQ ID NO: 322360 - DNA, 25 bp, Artificial
  probe
  misc_feature (1)..(25): SEQ ID NO: 2334; WAN024DJX; Start 405; Stop 429
tctgagtttgttagacattagaaga

SEQ ID NO: 322361 - DNA, 25 bp, Artificial
  probe
  misc_feature (1)..(25): SEQ ID NO: 2334; WAN024DJX; Start 39; Stop 63
tcgagagatggctctaactaatact

SEQ ID NO: 322362 - DNA, 25 bp, Artificial
  probe
  misc_feature (1)..(25): SEQ ID NO: 2334; WAN024DJX; Start 38; Stop 62
gtcgagagatggctctaactaatac

SEQ ID NO: 322363 - DNA, 25 bp, Artificial
  probe
  misc_feature (1)..(25): SEQ ID NO: 2334; WAN024DJX; Start 398; Stop 422
gtttagttctgagtttgttagacat

SEQ ID NO: 322364 - DNA, 25 bp, Artificial
  probe
  misc_feature (1)..(25): SEQ ID NO: 2334; WAN024DJX; Start 394; Stop 418
ttaggtttagttctgagtttgttag

SEQ ID NO: 322365 - DNA, 25 bp, Artificial
  probe
  misc_feature (1)..(25): SEQ ID NO: 2334; WAN024DJX; Start 228; Stop 252
tggaaataggaaagaaaagttggga

SEQ ID NO: 322366 - DNA, 25 bp, Artificial
  probe
  misc_feature (1)..(25): SEQ ID NO: 2334; WAN024DJX; Start 229; Stop 253
ggaaataggaaagaaaagttgggaa

SEQ ID NO: 322367 - DNA, 25 bp, Artificial
  probe
  misc_feature (1)..(25): SEQ ID NO: 2334; WAN024DJX; Start 227; Stop 251
atggaaataggaaagaaaagttggg

SEQ ID NO: 322368 - DNA, 25 bp, Artificial
  probe
  misc_feature (1)..(25): SEQ ID NO: 2334; WAN024DJX; Start 387; Stop 411
tcttctattaggtttagttctgagt

SEQ ID NO: 322369 - DNA, 25 bp, Artificial
  probe
  misc_feature (1)..(25): SEQ ID NO: 2334; WAN024DJX; Start 73; Stop 97
cgatatcttcttctacgttattcaa

SEQ ID NO: 322370 - DNA, 25 bp, Artificial
  probe
  misc_feature (1)..(25): SEQ ID NO: 2334; WAN024DJX; Start 391; Stop 415
ctattaggtttagttctgagtttgt

SEQ ID NO: 322371 - DNA, 25 bp, Artificial
  probe
  misc_feature (1)..(25): SEQ ID NO: 2334; WAN024DJX; Start 235; Stop 259
aggaaagaaaagttgggaataacac

SEQ ID NO: 322372 - DNA, 25 bp, Artificial
  probe
  misc_feature (1)..(25): SEQ ID NO: 2334; WAN024DJX; Start 37; Stop 61
cgtcgagagatggctctaactaata

SEQ ID NO: 322373 - DNA, 25 bp, Artificial
  probe
  misc_feature (1)..(25): SEQ ID NO: 2335; WAN024FWS; Start 880; Stop 904
ataggaatgccaatctcagtgtatt

SEQ ID NO: 322374 - DNA, 25 bp, Artificial
  probe
  misc_feature (1)..(25): SEQ ID NO: 2335; WAN024FWS; Start 879; Stop 903
aataggaatgccaatctcagtgtat

SEQ ID NO: 322375 - DNA, 25 bp, Artificial
  probe
  misc_feature (1)..(25): SEQ ID NO: 2335; WAN024FWS; Start 1065; Stop 1089
taaggtaggattattagcgtcagga

SEQ ID NO: 322376 - DNA, 25 bp, Artificial
  probe
  misc_feature (1)..(25): SEQ ID NO: 2335; WAN024FWS; Start 877; Stop 901
ttaataggaatgccaatctcagtgt

SEQ ID NO: 322377 - DNA, 25 bp, Artificial
  probe
  misc_feature (1)..(25): SEQ ID NO: 2335; WAN024FWS; Start 80; Stop 104
ttgtaacggcggtattaagtagaat

SEQ ID NO: 322378 - DNA, 25 bp, Artificial
  probe
  misc_feature (1)..(25): SEQ ID NO: 2335; WAN024FWS; Start 1064; Stop 1088
ttaaggtaggattattagcgtcagg

SEQ ID NO: 322379 - DNA, 25 bp, Artificial
  probe
  misc_feature (1)..(25): SEQ ID NO: 2335; WAN024FWS; Start 878; Stop 902
taataggaatgccaatctcagtgta

SEQ ID NO: 322380 - DNA, 25 bp, Artificial
  probe
  misc_feature (1)..(25): SEQ ID NO: 2335; WAN024FWS; Start 103; Stop 127
atattaacacctgaagagtatggcg

SEQ ID NO: 322381 - DNA, 25 bp, Artificial
  probe
  misc_feature (1)..(25): SEQ ID NO: 2335; WAN024FWS; Start 1067; Stop 1091
aggtaggattattagcgtcaggatt

SEQ ID NO: 322382 - DNA, 25 bp, Artificial
  probe
  misc_feature (1)..(25): SEQ ID NO: 2335; WAN024FWS; Start 1066; Stop 1090
aaggtaggattattagcgtcaggat

SEQ ID NO: 322383 - DNA, 25 bp, Artificial
  probe
  misc_feature (1)..(25): SEQ ID NO: 2335; WAN024FWS; Start 787; Stop 811
tcacctgtaattcatccgataatgt

SEQ ID NO: 322384 - DNA, 25 bp, Artificial
  probe
  misc_feature (1)..(25): SEQ ID NO: 2335; WAN024FWS; Start 788; Stop 812
cacctgtaattcatccgataatgtc

SEQ ID NO: 322385 - DNA, 25 bp, Artificial
  probe
  misc_feature (1)..(25): SEQ ID NO: 2335; WAN024FWS; Start 81; Stop 105
tgtaacggcggtattaagtagaata

SEQ ID NO: 322386 - DNA, 25 bp, Artificial
  probe
  misc_feature (1)..(25): SEQ ID NO: 2335; WAN024FWS; Start 1315; Stop 1339
ggtgtagttatcaatcttgtgttgc

SEQ ID NO: 322387 - DNA, 25 bp, Artificial
  probe
  misc_feature (1)..(25): SEQ ID NO: 2335; WAN024FWS; Start 429; Stop 453
gatgaacttattgagtctgattgcc

SEQ ID NO: 322388 - DNA, 25 bp, Artificial
  probe
  misc_feature (1)..(25): SEQ ID NO: 2335; WAN024FWS; Start 428; Stop 452
ggatgaacttattgagtctgattgc

SEQ ID NO: 322389 - DNA, 25 bp, Artificial
  probe
  misc_feature (1)..(25): SEQ ID NO: 2335; WAN024FWS; Start 427; Stop 451
cggatgaacttattgagtctgattg

SEQ ID NO: 322390 - DNA, 25 bp, Artificial
  probe
  misc_feature (1)..(25): SEQ ID NO: 2335; WAN024FWS; Start 426; Stop 450
acggatgaacttattgagtctgatt

SEQ ID NO: 322391 - DNA, 25 bp, Artificial
  probe
  misc_feature (1)..(25): SEQ ID NO: 2335; WAN024FWS; Start 425; Stop 449
aacggatgaacttattgagtctgat

SEQ ID NO: 322392 - DNA, 25 bp, Artificial
  probe
  misc_feature (1)..(25): SEQ ID NO: 2335; WAN024FWS; Start 786; Stop 810
ttcacctgtaattcatccgataatg

SEQ ID NO: 322393 - DNA, 25 bp, Artificial
  probe
  misc_feature (1)..(25): SEQ ID NO: 2335; WAN024FWS; Start 430; Stop 454
atgaacttattgagtctgattgcca

SEQ ID NO: 322394 - DNA, 25 bp, Artificial
  probe
  misc_feature (1)..(25): SEQ ID NO: 2335; WAN024FWS; Start 104; Stop 128
tattaacacctgaagagtatggcgt

SEQ ID NO: 322395 - DNA, 25 bp, Artificial
  probe
  misc_feature (1)..(25): SEQ ID NO: 2335; WAN024FWS; Start 431; Stop 455
tgaacttattgagtctgattgccaa

SEQ ID NO: 322396 - DNA, 25 bp, Artificial
  probe
  misc_feature (1)..(25): SEQ ID NO: 2335; WAN024FWS; Start 1384; Stop 1408
acaggtcaatacaagcagttaataa

SEQ ID NO: 322397 - DNA, 25 bp, Artificial
  probe
  misc_feature (1)..(25): SEQ ID NO: 2335; WAN024FWS; Start 1383; Stop 1407
aacaggtcaatacaagcagttaata

SEQ ID NO: 322398 - DNA, 25 bp, Artificial
  probe
  misc_feature (1)..(25): SEQ ID NO: 2335; WAN024FWS; Start 82; Stop 106
gtaacggcggtattaagtagaatat

SEQ ID NO: 322399 - DNA, 25 bp, Artificial
  probe
  misc_feature (1)..(25): SEQ ID NO: 2335; WAN024FWS; Start 1249; Stop 1273
ttagttcaccttgtaacagttatcc

SEQ ID NO: 322400 - DNA, 25 bp, Artificial
  probe
  misc_feature (1)..(25): SEQ ID NO: 2335; WAN024FWS; Start 461; Stop 485
ttagtggagttattggtgttgtgct

SEQ ID NO: 322401 - DNA, 25 bp, Artificial
  probe
  misc_feature (1)..(25): SEQ ID NO: 2335; WAN024FWS; Start 738; Stop 762
ggcttaccagttatcattatatcct

SEQ ID NO: 322402 - DNA, 25 bp, Artificial
  probe
  misc_feature (1)..(25): SEQ ID NO: 2335; WAN024FWS; Start 737; Stop 761
aggcttaccagttatcattatatcc

SEQ ID NO: 322403 - DNA, 25 bp, Artificial
  probe
  misc_feature (1)..(25): SEQ ID NO: 2335; WAN024FWS; Start 105; Stop 129
attaacacctgaagagtatggcgtt

SEQ ID NO: 322404 - DNA, 25 bp, Artificial
  probe
  misc_feature (1)..(25): SEQ ID NO: 2335; WAN024FWS; Start 1381; Stop 1405
gtaacaggtcaatacaagcagttaa

SEQ ID NO: 322405 - DNA, 25 bp, Artificial
  probe
  misc_feature (1)..(25): SEQ ID NO: 2335; WAN024FWS; Start 102; Stop 126
aatattaacacctgaagagtatggc

SEQ ID NO: 322406 - DNA, 25 bp, Artificial
  probe
  misc_feature (1)..(25): SEQ ID NO: 2336; WAN024CDB; Start 366; Stop 390
aataatccaaggtgtgtccgatgtt

SEQ ID NO: 322407 - DNA, 25 bp, Artificial
  probe
  misc_feature (1)..(25): SEQ ID NO: 2336; WAN024CDB; Start 627; Stop 651
tgaggatatgtcttatgaggatatg

SEQ ID NO: 322408 - DNA, 25 bp, Artificial
  probe
  misc_feature (1)..(25): SEQ ID NO: 2336; WAN024CDB; Start 598; Stop 622
tctccaagatacaattatatgacca

SEQ ID NO: 322409 - DNA, 25 bp, Artificial
  probe
  misc_feature (1)..(25): SEQ ID NO: 2336; WAN024CDB; Start 628; Stop 652
gaggatatgtcttatgaggatatga

SEQ ID NO: 322410 - DNA, 25 bp, Artificial
  probe
  misc_feature (1)..(25): SEQ ID NO: 2336; WAN024CDB; Start 367; Stop 391
ataatccaaggtgtgtccgatgttt

SEQ ID NO: 322411 - DNA, 25 bp, Artificial
  probe
  misc_feature (1)..(25): SEQ ID NO: 2336; WAN024CDB; Start 365; Stop 389
aaataatccaaggtgtgtccgatgt

SEQ ID NO: 322412 - DNA, 25 bp, Artificial
  probe
  misc_feature (1)..(25): SEQ ID NO: 2336; WAN024CDB; Start 626; Stop 650
ttgaggatatgtcttatgaggatat

SEQ ID NO: 322413 - DNA, 25 bp, Artificial
  probe
  misc_feature (1)..(25): SEQ ID NO: 2336; WAN024CDB; Start 599; Stop 623
ctccaagatacaattatatgaccat

SEQ ID NO: 322414 - DNA, 25 bp, Artificial
  probe
  misc_feature (1)..(25): SEQ ID NO: 2336; WAN024CDB; Start 629; Stop 653
aggatatgtcttatgaggatatgat

SEQ ID NO: 322415 - DNA, 25 bp, Artificial
  probe
  misc_feature (1)..(25): SEQ ID NO: 2336; WAN024CDB; Start 600; Stop 624
tccaagatacaattatatgaccatt

SEQ ID NO: 322416 - DNA, 25 bp, Artificial
  probe
  misc_feature (1)..(25): SEQ ID NO: 2336; WAN024CDB; Start 625; Stop 649
tttgaggatatgtcttatgaggata

SEQ ID NO: 322417 - DNA, 25 bp, Artificial
  probe
  misc_feature (1)..(25): SEQ ID NO: 2336; WAN024CDB; Start 364; Stop 388
aaaataatccaaggtgtgtccgatg

SEQ ID NO: 322418 - DNA, 25 bp, Artificial
  probe
  misc_feature (1)..(25): SEQ ID NO: 2336; WAN024CDB; Start 373; Stop 397
caaggtgtgtccgatgttttaaata

SEQ ID NO: 322419 - DNA, 25 bp, Artificial
  probe
  misc_feature (1)..(25): SEQ ID NO: 2336; WAN024CDB; Start 376; Stop 400
ggtgtgtccgatgttttaaataagg

SEQ ID NO: 322420 - DNA, 25 bp, Artificial
  probe
  misc_feature (1)..(25): SEQ ID NO: 2336; WAN024CDB; Start 375; Stop 399
aggtgtgtccgatgttttaaataag

SEQ ID NO: 322421 - DNA, 25 bp, Artificial
  probe
  misc_feature (1)..(25): SEQ ID NO: 2336; WAN024CDB; Start 597; Stop 621
atctccaagatacaattatatgacc

SEQ ID NO: 322422 - DNA, 25 bp, Artificial
  probe
  misc_feature (1)..(25): SEQ ID NO: 2336; WAN024CDB; Start 374; Stop 398
aaggtgtgtccgatgttttaaataa

SEQ ID NO: 322423 - DNA, 25 bp, Artificial
  probe
  misc_feature (1)..(25): SEQ ID NO: 2336; WAN024CDB; Start 369; Stop 393
aatccaaggtgtgtccgatgtttta

SEQ ID NO: 322424 - DNA, 25 bp, Artificial
  probe
  misc_feature (1)..(25): SEQ ID NO: 2336; WAN024CDB; Start 368; Stop 392
taatccaaggtgtgtccgatgtttt

SEQ ID NO: 322425 - DNA, 25 bp, Artificial
  probe
  misc_feature (1)..(25): SEQ ID NO: 2336; WAN024CDB; Start 370; Stop 394
atccaaggtgtgtccgatgttttaa

SEQ ID NO: 322426 - DNA, 25 bp, Artificial
  probe
  misc_feature (1)..(25): SEQ ID NO: 2336; WAN024CDB; Start 624; Stop 648
ttttgaggatatgtcttatgaggat

SEQ ID NO: 322427 - DNA, 25 bp, Artificial
  probe
  misc_feature (1)..(25): SEQ ID NO: 2336; WAN024CDB; Start 372; Stop 396
ccaaggtgtgtccgatgttttaaat

SEQ ID NO: 322428 - DNA, 25 bp, Artificial
  probe
  misc_feature (1)..(25): SEQ ID NO: 2336; WAN024CDB; Start 377; Stop 401
gtgtgtccgatgttttaaataagga

SEQ ID NO: 322429 - DNA, 25 bp, Artificial
  probe
  misc_feature (1)..(25): SEQ ID NO: 2336; WAN024CDB; Start 341; Stop 365
tatttgatgaagaatttgatggaaa

SEQ ID NO: 322430 - DNA, 25 bp, Artificial
  probe
  misc_feature (1)..(25): SEQ ID NO: 2336; WAN024CDB; Start 340; Stop 364
ttatttgatgaagaatttgatggaa

SEQ ID NO: 322431 - DNA, 25 bp, Artificial
  probe
  misc_feature (1)..(25): SEQ ID NO: 2336; WAN024CDB; Start 339; Stop 363
tttatttgatgaagaatttgatgga

SEQ ID NO: 322432 - DNA, 25 bp, Artificial
  probe
  misc_feature (1)..(25): SEQ ID NO: 2336; WAN024CDB; Start 601; Stop 625
ccaagatacaattatatgaccattt

SEQ ID NO: 322433 - DNA, 25 bp, Artificial
  probe
  misc_feature (1)..(25): SEQ ID NO: 2336; WAN024CDB; Start 754; Stop 778
agaccttggcaagaaagtagtgagg

SEQ ID NO: 322434 - DNA, 25 bp, Artificial
  probe
  misc_feature (1)..(25): SEQ ID NO: 2336; WAN024CDB; Start 371; Stop 395
tccaaggtgtgtccgatgttttaaa

SEQ ID NO: 322435 - DNA, 25 bp, Artificial
  probe
  misc_feature (1)..(25): SEQ ID NO: 2336; WAN024CDB; Start 342; Stop 366
atttgatgaagaatttgatggaaaa

SEQ ID NO: 322436 - DNA, 25 bp, Artificial
  probe
  misc_feature (1)..(25): SEQ ID NO: 2336; WAN024CDB; Start 662; Stop 686
agcaacctgtaaactattatagtaa

SEQ ID NO: 322437 - DNA, 25 bp, Artificial
  probe
  misc_feature (1)..(25): SEQ ID NO: 2336; WAN024CDB; Start 661; Stop 685
aagcaacctgtaaactattatagta

SEQ ID NO: 322438 - DNA, 25 bp, Artificial
  probe
  misc_feature (1)..(25): SEQ ID NO: 2336; WAN024CDB; Start 660; Stop 684
taagcaacctgtaaactattatagt

SEQ ID NO: 322439 - DNA, 25 bp, Artificial
  probe
  misc_feature (1)..(25): SEQ ID NO: 2337; WAN024CDR; Start 697; Stop 721
cttgtaactgtattgaccatccttg

SEQ ID NO: 322440 - DNA, 25 bp, Artificial
  probe
  misc_feature (1)..(25): SEQ ID NO: 2337; WAN024CDR; Start 696; Stop 720
gcttgtaactgtattgaccatcctt

SEQ ID NO: 322441 - DNA, 25 bp, Artificial
  probe
  misc_feature (1)..(25): SEQ ID NO: 2337; WAN024CDR; Start 698; Stop 722
ttgtaactgtattgaccatccttgc

SEQ ID NO: 322442 - DNA, 25 bp, Artificial
  probe
  misc_feature (1)..(25): SEQ ID NO: 2337; WAN024CDR; Start 688; Stop 712
ttgactccgcttgtaactgtattga

SEQ ID NO: 322443 - DNA, 25 bp, Artificial
  probe
  misc_feature (1)..(25): SEQ ID NO: 2337; WAN024CDR; Start 269; Stop 293
atactgtcctctacaatcttggctt

SEQ ID NO: 322444 - DNA, 25 bp, Artificial
  probe
  misc_feature (1)..(25): SEQ ID NO: 2337; WAN024CDR; Start 268; Stop 292
aatactgtcctctacaatcttggct

SEQ ID NO: 322445 - DNA, 25 bp, Artificial
  probe
  misc_feature (1)..(25): SEQ ID NO: 2337; WAN024CDR; Start 687; Stop 711
gttgactccgcttgtaactgtattg

SEQ ID NO: 322446 - DNA, 25 bp, Artificial
  probe
  misc_feature (1)..(25): SEQ ID NO: 2337; WAN024CDR; Start 605; Stop 629
gaattgatccaacctactacgaagc

SEQ ID NO: 322447 - DNA, 25 bp, Artificial
  probe
  misc_feature (1)..(25): SEQ ID NO: 2337; WAN024CDR; Start 566; Stop 590
ttggatatagcagtgtcatgtacta

SEQ ID NO: 322448 - DNA, 25 bp, Artificial
  probe
  misc_feature (1)..(25): SEQ ID NO: 2337; WAN024CDR; Start 695; Stop 719
cgcttgtaactgtattgaccatcct

SEQ ID NO: 322449 - DNA, 25 bp, Artificial
  probe
  misc_feature (1)..(25): SEQ ID NO: 2337; WAN024CDR; Start 693; Stop 717
tccgcttgtaactgtattgaccatc

SEQ ID NO: 322450 - DNA, 25 bp, Artificial
  probe
  misc_feature (1)..(25): SEQ ID NO: 2337; WAN024CDR; Start 692; Stop 716
ctccgcttgtaactgtattgaccat

SEQ ID NO: 322451 - DNA, 25 bp, Artificial
  probe
  misc_feature (1)..(25): SEQ ID NO: 2337; WAN024CDR; Start 689; Stop 713
tgactccgcttgtaactgtattgac

SEQ ID NO: 322452 - DNA, 25 bp, Artificial
  probe
  misc_feature (1)..(25): SEQ ID NO: 2337; WAN024CDR; Start 606; Stop 630
aattgatccaacctactacgaagca

SEQ ID NO: 322453 - DNA, 25 bp, Artificial
  probe
  misc_feature (1)..(25): SEQ ID NO: 2337; WAN024CDR; Start 394; Stop 418
ccttacttcttgtcttgggttatca

SEQ ID NO: 322454 - DNA, 25 bp, Artificial
  probe
  misc_feature (1)..(25): SEQ ID NO: 2337; WAN024CDR; Start 754; Stop 778
ctcttctatcaaatcccacacaatg

SEQ ID NO: 322455 - DNA, 25 bp, Artificial
  probe
  misc_feature (1)..(25): SEQ ID NO: 2337; WAN024CDR; Start 753; Stop 777
tctcttctatcaaatcccacacaat

SEQ ID NO: 322456 - DNA, 25 bp, Artificial
  probe
  misc_feature (1)..(25): SEQ ID NO: 2337; WAN024CDR; Start 385; Stop 409
atgttgttcccttacttcttgtctt

SEQ ID NO: 322457 - DNA, 25 bp, Artificial
  probe
  misc_feature (1)..(25): SEQ ID NO: 2337; WAN024CDR; Start 468; Stop 492
tcatctattggaaagtcttggtctc

SEQ ID NO: 322458 - DNA, 25 bp, Artificial
  probe
  misc_feature (1)..(25): SEQ ID NO: 2337; WAN024CDR; Start 384; Stop 408
tatgttgttcccttacttcttgtct

SEQ ID NO: 322459 - DNA, 25 bp, Artificial
  probe
  misc_feature (1)..(25): SEQ ID NO: 2337; WAN024CDR; Start 382; Stop 406
tctatgttgttcccttacttcttgt

SEQ ID NO: 322460 - DNA, 25 bp, Artificial
  probe
  misc_feature (1)..(25): SEQ ID NO: 2337; WAN024CDR; Start 752; Stop 776
gtctcttctatcaaatcccacacaa

SEQ ID NO: 322461 - DNA, 25 bp, Artificial
  probe
  misc_feature (1)..(25): SEQ ID NO: 2337; WAN024CDR; Start 567; Stop 591
tggatatagcagtgtcatgtactat

SEQ ID NO: 322462 - DNA, 25 bp, Artificial
  probe
  misc_feature (1)..(25): SEQ ID NO: 2337; WAN024CDR; Start 469; Stop 493
catctattggaaagtcttggtctca

SEQ ID NO: 322463 - DNA, 25 bp, Artificial
  probe
  misc_feature (1)..(25): SEQ ID NO: 2337; WAN024CDR; Start 888; Stop 912
tgttggtttgattctggttatccta

SEQ ID NO: 322464 - DNA, 25 bp, Artificial
  probe
  misc_feature (1)..(25): SEQ ID NO: 2337; WAN024CDR; Start 383; Stop 407
ctatgttgttcccttacttcttgtc

SEQ ID NO: 322465 - DNA, 25 bp, Artificial
  probe
  misc_feature (1)..(25): SEQ ID NO: 2337; WAN024CDR; Start 312; Stop 336
tgtatctgtagggattgccattatc

SEQ ID NO: 322466 - DNA, 25 bp, Artificial
  probe
  misc_feature (1)..(25): SEQ ID NO: 2337; WAN024CDR; Start 274; Stop 298
gtcctctacaatcttggctttatct

SEQ ID NO: 322467 - DNA, 25 bp, Artificial
  probe
  misc_feature (1)..(25): SEQ ID NO: 2337; WAN024CDR; Start 604; Stop 628
ggaattgatccaacctactacgaag

SEQ ID NO: 322468 - DNA, 25 bp, Artificial
  probe
  misc_feature (1)..(25): SEQ ID NO: 2337; WAN024CDR; Start 306; Stop 330
tttagttgtatctgtagggattgcc

SEQ ID NO: 322469 - DNA, 25 bp, Artificial
  probe
  misc_feature (1)..(25): SEQ ID NO: 2337; WAN024CDR; Start 379; Stop 403
acttctatgttgttcccttacttct

SEQ ID NO: 322470 - DNA, 25 bp, Artificial
  probe
  misc_feature (1)..(25): SEQ ID NO: 2337; WAN024CDR; Start 310; Stop 334
gttgtatctgtagggattgccatta

SEQ ID NO: 322471 - DNA, 25 bp, Artificial
  probe
  misc_feature (1)..(25): SEQ ID NO: 2337; WAN024CDR; Start 467; Stop 491
atcatctattggaaagtcttggtct

SEQ ID NO: 322472 - DNA, 25 bp, Artificial
  probe
  misc_feature (1)..(25): SEQ ID NO: 2338; WAN024DV6; Start 116; Stop 140
ttgagttgattgtggagattgagaa

SEQ ID NO: 322473 - DNA, 25 bp, Artificial
  probe
  misc_feature (1)..(25): SEQ ID NO: 2338; WAN024DV6; Start 115; Stop 139
gttgagttgattgtggagattgaga

SEQ ID NO: 322474 - DNA, 25 bp, Artificial
  probe
  misc_feature (1)..(25): SEQ ID NO: 2338; WAN024DV6; Start 117; Stop 141
tgagttgattgtggagattgagaac

SEQ ID NO: 322475 - DNA, 25 bp, Artificial
  probe
  misc_feature (1)..(25): SEQ ID NO: 2338; WAN024DV6; Start 114; Stop 138
ggttgagttgattgtggagattgag

SEQ ID NO: 322476 - DNA, 25 bp, Artificial
  probe
  misc_feature (1)..(25): SEQ ID NO: 2338; WAN024DV6; Start 118; Stop 142
gagttgattgtggagattgagaacc

SEQ ID NO: 322477 - DNA, 25 bp, Artificial
  probe
  misc_feature (1)..(25): SEQ ID NO: 2338; WAN024DV6; Start 121; Stop 145
ttgattgtggagattgagaaccgtt

SEQ ID NO: 322478 - DNA, 25 bp, Artificial
  probe
  misc_feature (1)..(25): SEQ ID NO: 2338; WAN024DV6; Start 179; Stop 203
gtgacgactggaatacagctaataa

SEQ ID NO: 322479 - DNA, 25 bp, Artificial
  probe
  misc_feature (1)..(25): SEQ ID NO: 2338; WAN024DV6; Start 33; Stop 57
tgatgagttgtttatggaagatgtt

SEQ ID NO: 322480 - DNA, 25 bp, Artificial
  probe
  misc_feature (1)..(25): SEQ ID NO: 2338; WAN024DV6; Start 32; Stop 56
ttgatgagttgtttatggaagatgt

SEQ ID NO: 322481 - DNA, 25 bp, Artificial
  probe
  misc_feature (1)..(25): SEQ ID NO: 2338; WAN024DV6; Start 111; Stop 135
aacggttgagttgattgtggagatt

SEQ ID NO: 322482 - DNA, 25 bp, Artificial
  probe
  misc_feature (1)..(25): SEQ ID NO: 2338; WAN024DV6; Start 83; Stop 107
ttgatgcaggtgtcttggatagtat

SEQ ID NO: 322483 - DNA, 25 bp, Artificial
  probe
  misc_feature (1)..(25): SEQ ID NO: 2338; WAN024DV6; Start 119; Stop 143
agttgattgtggagattgagaaccg

SEQ ID NO: 322484 - DNA, 25 bp, Artificial
  probe
  misc_feature (1)..(25): SEQ ID NO: 2338; WAN024DV6; Start 113; Stop 137
cggttgagttgattgtggagattga

SEQ ID NO: 322485 - DNA, 25 bp, Artificial
  probe
  misc_feature (1)..(25): SEQ ID NO: 2338; WAN024DV6; Start 39; Stop 63
gttgtttatggaagatgtttctgac

SEQ ID NO: 322486 - DNA, 25 bp, Artificial
  probe
  misc_feature (1)..(25): SEQ ID NO: 2338; WAN024DV6; Start 38; Stop 62
agttgtttatggaagatgtttctga

SEQ ID NO: 322487 - DNA, 25 bp, Artificial
  probe
  misc_feature (1)..(25): SEQ ID NO: 2338; WAN024DV6; Start 36; Stop 60
tgagttgtttatggaagatgtttct

SEQ ID NO: 322488 - DNA, 25 bp, Artificial
  probe
  misc_feature (1)..(25): SEQ ID NO: 2338; WAN024DV6; Start 101; Stop 125
atagtatgggaacggttgagttgat

SEQ ID NO: 322489 - DNA, 25 bp, Artificial
  probe
  misc_feature (1)..(25): SEQ ID NO: 2338; WAN024DV6; Start 120; Stop 144
gttgattgtggagattgagaaccgt

SEQ ID NO: 322490 - DNA, 25 bp, Artificial
  probe
  misc_feature (1)..(25): SEQ ID NO: 2338; WAN024DV6; Start 110; Stop 134
gaacggttgagttgattgtggagat

SEQ ID NO: 322491 - DNA, 25 bp, Artificial
  probe
  misc_feature (1)..(25): SEQ ID NO: 2338; WAN024DV6; Start 37; Stop 61
gagttgtttatggaagatgtttctg

SEQ ID NO: 322492 - DNA, 25 bp, Artificial
  probe
  misc_feature (1)..(25): SEQ ID NO: 2338; WAN024DV6; Start 102; Stop 126
tagtatgggaacggttgagttgatt

SEQ ID NO: 322493 - DNA, 25 bp, Artificial
  probe
  misc_feature (1)..(25): SEQ ID NO: 2338; WAN024DV6; Start 84; Stop 108
tgatgcaggtgtcttggatagtatg

SEQ ID NO: 322494 - DNA, 25 bp, Artificial
  probe
  misc_feature (1)..(25): SEQ ID NO: 2338; WAN024DV6; Start 55; Stop 79
gtttctgacatgatggatgaagatc

SEQ ID NO: 322495 - DNA, 25 bp, Artificial
  probe
  misc_feature (1)..(25): SEQ ID NO: 2338; WAN024DV6; Start 112; Stop 136
acggttgagttgattgtggagattg

SEQ ID NO: 322496 - DNA, 25 bp, Artificial
  probe
  misc_feature (1)..(25): SEQ ID NO: 2338; WAN024DV6; Start 40; Stop 64
ttgtttatggaagatgtttctgaca

SEQ ID NO: 322497 - DNA, 25 bp, Artificial
  probe
  misc_feature (1)..(25): SEQ ID NO: 2338; WAN024DV6; Start 34; Stop 58
gatgagttgtttatggaagatgttt

SEQ ID NO: 322498 - DNA, 25 bp, Artificial
  probe
  misc_feature (1)..(25): SEQ ID NO: 2338; WAN024DV6; Start 100; Stop 124
gatagtatgggaacggttgagttga

SEQ ID NO: 322499 - DNA, 25 bp, Artificial
  probe
  misc_feature (1)..(25): SEQ ID NO: 2338; WAN024DV6; Start 35; Stop 59
atgagttgtttatggaagatgtttc

SEQ ID NO: 322500 - DNA, 25 bp, Artificial
  probe
  misc_feature (1)..(25): SEQ ID NO: 2338; WAN024DV6; Start 89; Stop 113
caggtgtcttggatagtatgggaac

SEQ ID NO: 322501 - DNA, 25 bp, Artificial
  probe
  misc_feature (1)..(25): SEQ ID NO: 2338; WAN024DV6; Start 31; Stop 55
attgatgagttgtttatggaagatg

SEQ ID NO: 322502 - DNA, 25 bp, Artificial
  probe
  misc_feature (1)..(25): SEQ ID NO: 2338; WAN024DV6; Start 54; Stop 78
tgtttctgacatgatggatgaagat

SEQ ID NO: 322503 - DNA, 25 bp, Artificial
  probe
  misc_feature (1)..(25): SEQ ID NO: 2338; WAN024DV6; Start 178; Stop 202
cgtgacgactggaatacagctaata

SEQ ID NO: 322504 - DNA, 25 bp, Artificial
  probe
  misc_feature (1)..(25): SEQ ID NO: 2338; WAN024DV6; Start 122; Stop 146
tgattgtggagattgagaaccgttt

SEQ ID NO: 322505 - DNA, 25 bp, Artificial
  probe
  misc_feature (1)..(25): SEQ ID NO: 2339; WAN024F95; Start 399; Stop 423
tgaatactgtaccaataaccaacca

SEQ ID NO: 322506 - DNA, 25 bp, Artificial
  probe
  misc_feature (1)..(25): SEQ ID NO: 2339; WAN024F95; Start 393; Stop 417
gacgcatgaatactgtaccaataac

SEQ ID NO: 322507 - DNA, 25 bp, Artificial
  probe
  misc_feature (1)..(25): SEQ ID NO: 2339; WAN024F95; Start 392; Stop 416
agacgcatgaatactgtaccaataa

SEQ ID NO: 322508 - DNA, 25 bp, Artificial
  probe
  misc_feature (1)..(25): SEQ ID NO: 2339; WAN024F95; Start 391; Stop 415
aagacgcatgaatactgtaccaata

SEQ ID NO: 322509 - DNA, 25 bp, Artificial
  probe
  misc_feature (1)..(25): SEQ ID NO: 2339; WAN024F95; Start 400; Stop 424
gaatactgtaccaataaccaaccaa

SEQ ID NO: 322510 - DNA, 25 bp, Artificial
  probe
  misc_feature (1)..(25): SEQ ID NO: 2339; WAN024F95; Start 396; Stop 420
gcatgaatactgtaccaataaccaa

SEQ ID NO: 322511 - DNA, 25 bp, Artificial
  probe
  misc_feature (1)..(25): SEQ ID NO: 2339; WAN024F95; Start 398; Stop 422
atgaatactgtaccaataaccaacc

SEQ ID NO: 322512 - DNA, 25 bp, Artificial
  probe
  misc_feature (1)..(25): SEQ ID NO: 2339; WAN024F95; Start 357; Stop 381
gaagactcttgatacagacgacttg

SEQ ID NO: 322513 - DNA, 25 bp, Artificial
  probe
  misc_feature (1)..(25): SEQ ID NO: 2339; WAN024F95; Start 395; Stop 419
cgcatgaatactgtaccaataacca

SEQ ID NO: 322514 - DNA, 25 bp, Artificial
  probe
  misc_feature (1)..(25): SEQ ID NO: 2339; WAN024F95; Start 394; Stop 418
acgcatgaatactgtaccaataacc

SEQ ID NO: 322515 - DNA, 25 bp, Artificial
  probe
  misc_feature (1)..(25): SEQ ID NO: 2339; WAN024F95; Start 390; Stop 414
caagacgcatgaatactgtaccaat

SEQ ID NO: 322516 - DNA, 25 bp, Artificial
  probe
  misc_feature (1)..(25): SEQ ID NO: 2339; WAN024F95; Start 387; Stop 411
tatcaagacgcatgaatactgtacc

SEQ ID NO: 322517 - DNA, 25 bp, Artificial
  probe
  misc_feature (1)..(25): SEQ ID NO: 2339; WAN024F95; Start 358; Stop 382
aagactcttgatacagacgacttgg

SEQ ID NO: 322518 - DNA, 25 bp, Artificial
  probe
  misc_feature (1)..(25): SEQ ID NO: 2339; WAN024F95; Start 397; Stop 421
catgaatactgtaccaataaccaac

SEQ ID NO: 322519 - DNA, 25 bp, Artificial
  probe
  misc_feature (1)..(25): SEQ ID NO: 2339; WAN024F95; Start 356; Stop 380
cgaagactcttgatacagacgactt

SEQ ID NO: 322520 - DNA, 25 bp, Artificial
  probe
  misc_feature (1)..(25): SEQ ID NO: 2339; WAN024F95; Start 386; Stop 410
gtatcaagacgcatgaatactgtac

SEQ ID NO: 322521 - DNA, 25 bp, Artificial
  probe
  misc_feature (1)..(25): SEQ ID NO: 2339; WAN024F95; Start 385; Stop 409
ggtatcaagacgcatgaatactgta

SEQ ID NO: 322522 - DNA, 25 bp, Artificial
  probe
  misc_feature (1)..(25): SEQ ID NO: 2339; WAN024F95; Start 388; Stop 412
atcaagacgcatgaatactgtacca

SEQ ID NO: 322523 - DNA, 25 bp, Artificial
  probe
  misc_feature (1)..(25): SEQ ID NO: 2339; WAN024F95; Start 931; Stop 955
ccagatggcttgattacagttaaat

SEQ ID NO: 322524 - DNA, 25 bp, Artificial
  probe
  misc_feature (1)..(25): SEQ ID NO: 2339; WAN024F95; Start 389; Stop 413
tcaagacgcatgaatactgtaccaa

SEQ ID NO: 322525 - DNA, 25 bp, Artificial
  probe
  misc_feature (1)..(25): SEQ ID NO: 2339; WAN024F95; Start 384; Stop 408
aggtatcaagacgcatgaatactgt

SEQ ID NO: 322526 - DNA, 25 bp, Artificial
  probe
  misc_feature (1)..(25): SEQ ID NO: 2339; WAN024F95; Start 402; Stop 426
atactgtaccaataaccaaccaaac

SEQ ID NO: 322527 - DNA, 25 bp, Artificial
  probe
  misc_feature (1)..(25): SEQ ID NO: 2339; WAN024F95; Start 408; Stop 432
taccaataaccaaccaaacaaccac

SEQ ID NO: 322528 - DNA, 25 bp, Artificial
  probe
  misc_feature (1)..(25): SEQ ID NO: 2339; WAN024F95; Start 411; Stop 435
caataaccaaccaaacaaccactca

SEQ ID NO: 322529 - DNA, 25 bp, Artificial
  probe
  misc_feature (1)..(25): SEQ ID NO: 2339; WAN024F95; Start 401; Stop 425
aatactgtaccaataaccaaccaaa

SEQ ID NO: 322530 - DNA, 25 bp, Artificial
  probe
  misc_feature (1)..(25): SEQ ID NO: 2339; WAN024F95; Start 403; Stop 427
tactgtaccaataaccaaccaaaca

SEQ ID NO: 322531 - DNA, 25 bp, Artificial
  probe
  misc_feature (1)..(25): SEQ ID NO: 2339; WAN024F95; Start 407; Stop 431
gtaccaataaccaaccaaacaacca

SEQ ID NO: 322532 - DNA, 25 bp, Artificial
  probe
  misc_feature (1)..(25): SEQ ID NO: 2339; WAN024F95; Start 405; Stop 429
ctgtaccaataaccaaccaaacaac

SEQ ID NO: 322533 - DNA, 25 bp, Artificial
  probe
  misc_feature (1)..(25): SEQ ID NO: 2339; WAN024F95; Start 620; Stop 644
attatttcgatggctcaggctatat

SEQ ID NO: 322534 - DNA, 25 bp, Artificial
  probe
  misc_feature (1)..(25): SEQ ID NO: 2339; WAN024F95; Start 404; Stop 428
actgtaccaataaccaaccaaacaa

SEQ ID NO: 322535 - DNA, 25 bp, Artificial
  probe
  misc_feature (1)..(25): SEQ ID NO: 2339; WAN024F95; Start 621; Stop 645
ttatttcgatggctcaggctatatg

SEQ ID NO: 322536 - DNA, 25 bp, Artificial
  probe
  misc_feature (1)..(25): SEQ ID NO: 2339; WAN024F95; Start 618; Stop 642
gtattatttcgatggctcaggctat

SEQ ID NO: 322537 - DNA, 25 bp, Artificial
  probe
  misc_feature (1)..(25): SEQ ID NO: 2339; WAN024F95; Start 619; Stop 643
tattatttcgatggctcaggctata

SEQ ID NO: 322538 - DNA, 25 bp, Artificial
  probe
  misc_feature (1)..(25): SEQ ID NO: 2340; WAN024FHP; Start 751; Stop 775
atccaccatactcatcatcaggaat

SEQ ID NO: 322539 - DNA, 25 bp, Artificial
  probe
  misc_feature (1)..(25): SEQ ID NO: 2340; WAN024FHP; Start 752; Stop 776
tccaccatactcatcatcaggaatt

SEQ ID NO: 322540 - DNA, 25 bp, Artificial
  probe
  misc_feature (1)..(25): SEQ ID NO: 2340; WAN024FHP; Start 483; Stop 507
ttatggacatattcaccagcagttg

SEQ ID NO: 322541 - DNA, 25 bp, Artificial
  probe
  misc_feature (1)..(25): SEQ ID NO: 2340; WAN024FHP; Start 328; Stop 352
aatcaacctcttcaaattcatcgtc

SEQ ID NO: 322542 - DNA, 25 bp, Artificial
  probe
  misc_feature (1)..(25): SEQ ID NO: 2340; WAN024FHP; Start 327; Stop 351
caatcaacctcttcaaattcatcgt

SEQ ID NO: 322543 - DNA, 25 bp, Artificial
  probe
  misc_feature (1)..(25): SEQ ID NO: 2340; WAN024FHP; Start 326; Stop 350
acaatcaacctcttcaaattcatcg

SEQ ID NO: 322544 - DNA, 25 bp, Artificial
  probe
  misc_feature (1)..(25): SEQ ID NO: 2340; WAN024FHP; Start 324; Stop 348
ccacaatcaacctcttcaaattcat

SEQ ID NO: 322545 - DNA, 25 bp, Artificial
  probe
  misc_feature (1)..(25): SEQ ID NO: 2340; WAN024FHP; Start 322; Stop 346
ctccacaatcaacctcttcaaattc

SEQ ID NO: 322546 - DNA, 25 bp, Artificial
  probe
  misc_feature (1)..(25): SEQ ID NO: 2340; WAN024FHP; Start 753; Stop 777
ccaccatactcatcatcaggaattt

SEQ ID NO: 322547 - DNA, 25 bp, Artificial
  probe
  misc_feature (1)..(25): SEQ ID NO: 2340; WAN024FHP; Start 329; Stop 353
atcaacctcttcaaattcatcgtca

SEQ ID NO: 322548 - DNA, 25 bp, Artificial
  probe
  misc_feature (1)..(25): SEQ ID NO: 2340; WAN024FHP; Start 323; Stop 347
tccacaatcaacctcttcaaattca

SEQ ID NO: 322549 - DNA, 25 bp, Artificial
  probe
  misc_feature (1)..(25): SEQ ID NO: 2340; WAN024FHP; Start 333; Stop 357
acctcttcaaattcatcgtcagttt

SEQ ID NO: 322550 - DNA, 25 bp, Artificial
  probe
  misc_feature (1)..(25): SEQ ID NO: 2340; WAN024FHP; Start 325; Stop 349
cacaatcaacctcttcaaattcatc

SEQ ID NO: 322551 - DNA, 25 bp, Artificial
  probe
  misc_feature (1)..(25): SEQ ID NO: 2340; WAN024FHP; Start 750; Stop 774
gatccaccatactcatcatcaggaa

SEQ ID NO: 322552 - DNA, 25 bp, Artificial
  probe
  misc_feature (1)..(25): SEQ ID NO: 2340; WAN024FHP; Start 721; Stop 745
gaggtttactatgaaagtctggtca

SEQ ID NO: 322553 - DNA, 25 bp, Artificial
  probe
  misc_feature (1)..(25): SEQ ID NO: 2340; WAN024FHP; Start 720; Stop 744
tgaggtttactatgaaagtctggtc

SEQ ID NO: 322554 - DNA, 25 bp, Artificial
  probe
  misc_feature (1)..(25): SEQ ID NO: 2340; WAN024FHP; Start 726; Stop 750
ttactatgaaagtctggtcaatggg

SEQ ID NO: 322555 - DNA, 25 bp, Artificial
  probe
  misc_feature (1)..(25): SEQ ID NO: 2340; WAN024FHP; Start 722; Stop 746
aggtttactatgaaagtctggtcaa

SEQ ID NO: 322556 - DNA, 25 bp, Artificial
  probe
  misc_feature (1)..(25): SEQ ID NO: 2340; WAN024FHP; Start 719; Stop 743
ttgaggtttactatgaaagtctggt

SEQ ID NO: 322557 - DNA, 25 bp, Artificial
  probe
  misc_feature (1)..(25): SEQ ID NO: 2340; WAN024FHP; Start 464; Stop 488
ctccctgtgatattgctgtttatgg

SEQ ID NO: 322558 - DNA, 25 bp, Artificial
  probe
  misc_feature (1)..(25): SEQ ID NO: 2340; WAN024FHP; Start 463; Stop 487
cctccctgtgatattgctgtttatg

SEQ ID NO: 322559 - DNA, 25 bp, Artificial
  probe
  misc_feature (1)..(25): SEQ ID NO: 2340; WAN024FHP; Start 462; Stop 486
tcctccctgtgatattgctgtttat

SEQ ID NO: 322560 - DNA, 25 bp, Artificial
  probe
  misc_feature (1)..(25): SEQ ID NO: 2340; WAN024FHP; Start 330; Stop 354
tcaacctcttcaaattcatcgtcag

SEQ ID NO: 322561 - DNA, 25 bp, Artificial
  probe
  misc_feature (1)..(25): SEQ ID NO: 2340; WAN024FHP; Start 332; Stop 356
aacctcttcaaattcatcgtcagtt

SEQ ID NO: 322562 - DNA, 25 bp, Artificial
  probe
  misc_feature (1)..(25): SEQ ID NO: 2340; WAN024FHP; Start 461; Stop 485
atcctccctgtgatattgctgttta

SEQ ID NO: 322563 - DNA, 25 bp, Artificial
  probe
  misc_feature (1)..(25): SEQ ID NO: 2340; WAN024FHP; Start 300; Stop 324
ttccctagaagaaattgaagtgctc

SEQ ID NO: 322564 - DNA, 25 bp, Artificial
  probe
  misc_feature (1)..(25): SEQ ID NO: 2340; WAN024FHP; Start 331; Stop 355
caacctcttcaaattcatcgtcagt

SEQ ID NO: 322565 - DNA, 25 bp, Artificial
  probe
  misc_feature (1)..(25): SEQ ID NO: 2340; WAN024FHP; Start 727; Stop 751
tactatgaaagtctggtcaatggga

SEQ ID NO: 322566 - DNA, 25 bp, Artificial
  probe
  misc_feature (1)..(25): SEQ ID NO: 2340; WAN024FHP; Start 466; Stop 490
ccctgtgatattgctgtttatggac

SEQ ID NO: 322567 - DNA, 25 bp, Artificial
  probe
  misc_feature (1)..(25): SEQ ID NO: 2340; WAN024FHP; Start 725; Stop 749
tttactatgaaagtctggtcaatgg

SEQ ID NO: 322568 - DNA, 25 bp, Artificial
  probe
  misc_feature (1)..(25): SEQ ID NO: 2340; WAN024FHP; Start 723; Stop 747
ggtttactatgaaagtctggtcaat

SEQ ID NO: 322569 - DNA, 25 bp, Artificial
  probe
  misc_feature (1)..(25): SEQ ID NO: 2340; WAN024FHP; Start 468; Stop 492
ctgtgatattgctgtttatggacat

SEQ ID NO: 322570 - DNA, 25 bp, Artificial
  probe
  misc_feature (1)..(25): SEQ ID NO: 2340; WAN024FHP; Start 718; Stop 742
tttgaggtttactatgaaagtctgg

SEQ ID NO: 322571 - DNA, 25 bp, Artificial
  probe
  misc_feature (1)..(25): SEQ ID NO: 2341; WAN024FDE; Start 807; Stop 831
tgatcgtcttgtaggatattctagc

SEQ ID NO: 322572 - DNA, 25 bp, Artificial
  probe
  misc_feature (1)..(25): SEQ ID NO: 2341; WAN024FDE; Start 372; Stop 396
agttgtcatgtccttggtagttatt

SEQ ID NO: 322573 - DNA, 25 bp, Artificial
  probe
  misc_feature (1)..(25): SEQ ID NO: 2341; WAN024FDE; Start 371; Stop 395
cagttgtcatgtccttggtagttat

SEQ ID NO: 322574 - DNA, 25 bp, Artificial
  probe
  misc_feature (1)..(25): SEQ ID NO: 2341; WAN024FDE; Start 454; Stop 478
aataaggtaggtattgcttctcaac

SEQ ID NO: 322575 - DNA, 25 bp, Artificial
  probe
  misc_feature (1)..(25): SEQ ID NO: 2341; WAN024FDE; Start 581; Stop 605
atattccacaagatgtctatgaagc

SEQ ID NO: 322576 - DNA, 25 bp, Artificial
  probe
  misc_feature (1)..(25): SEQ ID NO: 2341; WAN024FDE; Start 805; Stop 829
actgatcgtcttgtaggatattcta

SEQ ID NO: 322577 - DNA, 25 bp, Artificial
  probe
  misc_feature (1)..(25): SEQ ID NO: 2341; WAN024FDE; Start 804; Stop 828
tactgatcgtcttgtaggatattct

SEQ ID NO: 322578 - DNA, 25 bp, Artificial
  probe
  misc_feature (1)..(25): SEQ ID NO: 2341; WAN024FDE; Start 598; Stop 622
tatgaagctgctgaattagatggat

SEQ ID NO: 322579 - DNA, 25 bp, Artificial
  probe
  misc_feature (1)..(25): SEQ ID NO: 2341; WAN024FDE; Start 591; Stop 615
agatgtctatgaagctgctgaatta

SEQ ID NO: 322580 - DNA, 25 bp, Artificial
  probe
  misc_feature (1)..(25): SEQ ID NO: 2341; WAN024FDE; Start 810; Stop 834
tcgtcttgtaggatattctagctca

SEQ ID NO: 322581 - DNA, 25 bp, Artificial
  probe
  misc_feature (1)..(25): SEQ ID NO: 2341; WAN024FDE; Start 592; Stop 616
gatgtctatgaagctgctgaattag

SEQ ID NO: 322582 - DNA, 25 bp, Artificial
  probe
  misc_feature (1)..(25): SEQ ID NO: 2341; WAN024FDE; Start 597; Stop 621
ctatgaagctgctgaattagatgga

SEQ ID NO: 322583 - DNA, 25 bp, Artificial
  probe
  misc_feature (1)..(25): SEQ ID NO: 2341; WAN024FDE; Start 590; Stop 614
aagatgtctatgaagctgctgaatt

SEQ ID NO: 322584 - DNA, 25 bp, Artificial
  probe
  misc_feature (1)..(25): SEQ ID NO: 2341; WAN024FDE; Start 599; Stop 623
atgaagctgctgaattagatggatt

SEQ ID NO: 322585 - DNA, 25 bp, Artificial
  probe
  misc_feature (1)..(25): SEQ ID NO: 2341; WAN024FDE; Start 809; Stop 833
atcgtcttgtaggatattctagctc

SEQ ID NO: 322586 - DNA, 25 bp, Artificial
  probe
  misc_feature (1)..(25): SEQ ID NO: 2341; WAN024FDE; Start 808; Stop 832
gatcgtcttgtaggatattctagct

SEQ ID NO: 322587 - DNA, 25 bp, Artificial
  probe
  misc_feature (1)..(25): SEQ ID NO: 2341; WAN024FDE; Start 455; Stop 479
ataaggtaggtattgcttctcaacc

SEQ ID NO: 322588 - DNA, 25 bp, Artificial
  probe
  misc_feature (1)..(25): SEQ ID NO: 2341; WAN024FDE; Start 806; Stop 830
ctgatcgtcttgtaggatattctag

SEQ ID NO: 322589 - DNA, 25 bp, Artificial
  probe
  misc_feature (1)..(25): SEQ ID NO: 2341; WAN024FDE; Start 589; Stop 613
caagatgtctatgaagctgctgaat

SEQ ID NO: 322590 - DNA, 25 bp, Artificial
  probe
  misc_feature (1)..(25): SEQ ID NO: 2341; WAN024FDE; Start 815; Stop 839
ttgtaggatattctagctcaatcgc

SEQ ID NO: 322591 - DNA, 25 bp, Artificial
  probe
  misc_feature (1)..(25): SEQ ID NO: 2341; WAN024FDE; Start 811; Stop 835
cgtcttgtaggatattctagctcaa

SEQ ID NO: 322592 - DNA, 25 bp, Artificial
  probe
  misc_feature (1)..(25): SEQ ID NO: 2341; WAN024FDE; Start 803; Stop 827
ttactgatcgtcttgtaggatattc

SEQ ID NO: 322593 - DNA, 25 bp, Artificial
  probe
  misc_feature (1)..(25): SEQ ID NO: 2341; WAN024FDE; Start 861; Stop 885
tggtatgattagcttagtacaacgt

SEQ ID NO: 322594 - DNA, 25 bp, Artificial
  probe
  misc_feature (1)..(25): SEQ ID NO: 2341; WAN024FDE; Start 863; Stop 887
gtatgattagcttagtacaacgtcg

SEQ ID NO: 322595 - DNA, 25 bp, Artificial
  probe
  misc_feature (1)..(25): SEQ ID NO: 2341; WAN024FDE; Start 628; Stop 652
aaatgggctcagtttcgttatatca

SEQ ID NO: 322596 - DNA, 25 bp, Artificial
  probe
  misc_feature (1)..(25): SEQ ID NO: 2341; WAN024FDE; Start 604; Stop 628
gctgctgaattagatggattctcaa

SEQ ID NO: 322597 - DNA, 25 bp, Artificial
  probe
  misc_feature (1)..(25): SEQ ID NO: 2341; WAN024FDE; Start 864; Stop 888
tatgattagcttagtacaacgtcgc

SEQ ID NO: 322598 - DNA, 25 bp, Artificial
  probe
  misc_feature (1)..(25): SEQ ID NO: 2341; WAN024FDE; Start 862; Stop 886
ggtatgattagcttagtacaacgtc

SEQ ID NO: 322599 - DNA, 25 bp, Artificial
  probe
  misc_feature (1)..(25): SEQ ID NO: 2341; WAN024FDE; Start 161; Stop 185
atttgttgacaccagatgaaagaaa

SEQ ID NO: 322600 - DNA, 25 bp, Artificial
  probe
  misc_feature (1)..(25): SEQ ID NO: 2341; WAN024FDE; Start 582; Stop 606
tattccacaagatgtctatgaagct

SEQ ID NO: 322601 - DNA, 25 bp, Artificial
  probe
  misc_feature (1)..(25): SEQ ID NO: 2341; WAN024FDE; Start 860; Stop 884
ttggtatgattagcttagtacaacg

SEQ ID NO: 322602 - DNA, 25 bp, Artificial
  probe
  misc_feature (1)..(25): SEQ ID NO: 2341; WAN024FDE; Start 814; Stop 838
cttgtaggatattctagctcaatcg

SEQ ID NO: 322603 - DNA, 25 bp, Artificial
  probe
  misc_feature (1)..(25): SEQ ID NO: 2341; WAN024FDE; Start 830; Stop 854
gctcaatcgctttagtatttacaac

SEQ ID NO: 322604 - DNA, 25 bp, Artificial
  probe
  misc_feature (1)..(25): SEQ ID NO: 2342; WAN024FBK; Start 492; Stop 516
ggatgagtataagattgaggacatg

SEQ ID NO: 322605 - DNA, 25 bp, Artificial
  probe
  misc_feature (1)..(25): SEQ ID NO: 2342; WAN024FBK; Start 99; Stop 123
agtcatcgaacagtatctagcctat

SEQ ID NO: 322606 - DNA, 25 bp, Artificial
  probe
  misc_feature (1)..(25): SEQ ID NO: 2342; WAN024FBK; Start 98; Stop 122
aagtcatcgaacagtatctagccta

SEQ ID NO: 322607 - DNA, 25 bp, Artificial
  probe
  misc_feature (1)..(25): SEQ ID NO: 2342; WAN024FBK; Start 91; Stop 115
attacggaagtcatcgaacagtatc

SEQ ID NO: 322608 - DNA, 25 bp, Artificial
  probe
  misc_feature (1)..(25): SEQ ID NO: 2342; WAN024FBK; Start 93; Stop 117
tacggaagtcatcgaacagtatcta

SEQ ID NO: 322609 - DNA, 25 bp, Artificial
  probe
  misc_feature (1)..(25): SEQ ID NO: 2342; WAN024FBK; Start 90; Stop 114
cattacggaagtcatcgaacagtat

SEQ ID NO: 322610 - DNA, 25 bp, Artificial
  probe
  misc_feature (1)..(25): SEQ ID NO: 2342; WAN024FBK; Start 100; Stop 124
gtcatcgaacagtatctagcctatg

SEQ ID NO: 322611 - DNA, 25 bp, Artificial
  probe
  misc_feature (1)..(25): SEQ ID NO: 2342; WAN024FBK; Start 495; Stop 519
tgagtataagattgaggacatgatg

SEQ ID NO: 322612 - DNA, 25 bp, Artificial
  probe
  misc_feature (1)..(25): SEQ ID NO: 2342; WAN024FBK; Start 92; Stop 116
ttacggaagtcatcgaacagtatct

SEQ ID NO: 322613 - DNA, 25 bp, Artificial
  probe
  misc_feature (1)..(25): SEQ ID NO: 2342; WAN024FBK; Start 496; Stop 520
gagtataagattgaggacatgatga

SEQ ID NO: 322614 - DNA, 25 bp, Artificial
  probe
  misc_feature (1)..(25): SEQ ID NO: 2342; WAN024FBK; Start 280; Stop 304
gaagaatatcgcaagttcaagctct

SEQ ID NO: 322615 - DNA, 25 bp, Artificial
  probe
  misc_feature (1)..(25): SEQ ID NO: 2342; WAN024FBK; Start 491; Stop 515
gggatgagtataagattgaggacat

SEQ ID NO: 322616 - DNA, 25 bp, Artificial
  probe
  misc_feature (1)..(25): SEQ ID NO: 2342; WAN024FBK; Start 97; Stop 121
gaagtcatcgaacagtatctagcct

SEQ ID NO: 322617 - DNA, 25 bp, Artificial
  probe
  misc_feature (1)..(25): SEQ ID NO: 2342; WAN024FBK; Start 94; Stop 118
acggaagtcatcgaacagtatctag

SEQ ID NO: 322618 - DNA, 25 bp, Artificial
  probe
  misc_feature (1)..(25): SEQ ID NO: 2342; WAN024FBK; Start 493; Stop 517
gatgagtataagattgaggacatga

SEQ ID NO: 322619 - DNA, 25 bp, Artificial
  probe
  misc_feature (1)..(25): SEQ ID NO: 2342; WAN024FBK; Start 101; Stop 125
tcatcgaacagtatctagcctatgt

SEQ ID NO: 322620 - DNA, 25 bp, Artificial
  probe
  misc_feature (1)..(25): SEQ ID NO: 2342; WAN024FBK; Start 490; Stop 514
cgggatgagtataagattgaggaca

SEQ ID NO: 322621 - DNA, 25 bp, Artificial
  probe
  misc_feature (1)..(25): SEQ ID NO: 2342; WAN024FBK; Start 486; Stop 510
cttgcgggatgagtataagattgag

SEQ ID NO: 322622 - DNA, 25 bp, Artificial
  probe
  misc_feature (1)..(25): SEQ ID NO: 2342; WAN024FBK; Start 361; Stop 385
ccgacagagttgatttacgaagatg

SEQ ID NO: 322623 - DNA, 25 bp, Artificial
  probe
  misc_feature (1)..(25): SEQ ID NO: 2342; WAN024FBK; Start 497; Stop 521
agtataagattgaggacatgatgat

SEQ ID NO: 322624 - DNA, 25 bp, Artificial
  probe
  misc_feature (1)..(25): SEQ ID NO: 2342; WAN024FBK; Start 89; Stop 113
ccattacggaagtcatcgaacagta

SEQ ID NO: 322625 - DNA, 25 bp, Artificial
  probe
  misc_feature (1)..(25): SEQ ID NO: 2342; WAN024FBK; Start 494; Stop 518
atgagtataagattgaggacatgat

SEQ ID NO: 322626 - DNA, 25 bp, Artificial
  probe
  misc_feature (1)..(25): SEQ ID NO: 2342; WAN024FBK; Start 96; Stop 120
ggaagtcatcgaacagtatctagcc

SEQ ID NO: 322627 - DNA, 25 bp, Artificial
  probe
  misc_feature (1)..(25): SEQ ID NO: 2342; WAN024FBK; Start 487; Stop 511
ttgcgggatgagtataagattgagg

SEQ ID NO: 322628 - DNA, 25 bp, Artificial
  probe
  misc_feature (1)..(25): SEQ ID NO: 2342; WAN024FBK; Start 188; Stop 212
tcatgctgattaagagtcgtaaact

SEQ ID NO: 322629 - DNA, 25 bp, Artificial
  probe
  misc_feature (1)..(25): SEQ ID NO: 2342; WAN024FBK; Start 363; Stop 387
gacagagttgatttacgaagatgcg

SEQ ID NO: 322630 - DNA, 25 bp, Artificial
  probe
  misc_feature (1)..(25): SEQ ID NO: 2342; WAN024FBK; Start 362; Stop 386
cgacagagttgatttacgaagatgc

SEQ ID NO: 322631 - DNA, 25 bp, Artificial
  probe
  misc_feature (1)..(25): SEQ ID NO: 2342; WAN024FBK; Start 187; Stop 211
ctcatgctgattaagagtcgtaaac

SEQ ID NO: 322632 - DNA, 25 bp, Artificial
  probe
  misc_feature (1)..(25): SEQ ID NO: 2342; WAN024FBK; Start 95; Stop 119
cggaagtcatcgaacagtatctagc

SEQ ID NO: 322633 - DNA, 25 bp, Artificial
  probe
  misc_feature (1)..(25): SEQ ID NO: 2342; WAN024FBK; Start 276; Stop 300
aatcgaagaatatcgcaagttcaag

SEQ ID NO: 322634 - DNA, 25 bp, Artificial
  probe
  misc_feature (1)..(25): SEQ ID NO: 2342; WAN024FBK; Start 489; Stop 513
gcgggatgagtataagattgaggac

SEQ ID NO: 322635 - DNA, 25 bp, Artificial
  probe
  misc_feature (1)..(25): SEQ ID NO: 2342; WAN024FBK; Start 281; Stop 305
aagaatatcgcaagttcaagctctt

SEQ ID NO: 322636 - DNA, 25 bp, Artificial
  probe
  misc_feature (1)..(25): SEQ ID NO: 2342; WAN024FBK; Start 186; Stop 210
gctcatgctgattaagagtcgtaaa

SEQ ID NO: 322637 - DNA, 25 bp, Artificial
  probe
  misc_feature (1)..(25): SEQ ID NO: 2343; WAN024CXS; Start 1067; Stop 1091
tctgttctgttggattggatatgat

SEQ ID NO: 322638 - DNA, 25 bp, Artificial
  probe
  misc_feature (1)..(25): SEQ ID NO: 2343; WAN024CXS; Start 1070; Stop 1094
gttctgttggattggatatgattgc

SEQ ID NO: 322639 - DNA, 25 bp, Artificial
  probe
  misc_feature (1)..(25): SEQ ID NO: 2343; WAN024CXS; Start 1066; Stop 1090
atctgttctgttggattggatatga

SEQ ID NO: 322640 - DNA, 25 bp, Artificial
  probe
  misc_feature (1)..(25): SEQ ID NO: 2343; WAN024CXS; Start 1069; Stop 1093
tgttctgttggattggatatgattg

SEQ ID NO: 322641 - DNA, 25 bp, Artificial
  probe
  misc_feature (1)..(25): SEQ ID NO: 2343; WAN024CXS; Start 204; Stop 228
tcctatcgttaataagcgtgtatcg

SEQ ID NO: 322642 - DNA, 25 bp, Artificial
  probe
  misc_feature (1)..(25): SEQ ID NO: 2343; WAN024CXS; Start 206; Stop 230
ctatcgttaataagcgtgtatcggt

SEQ ID NO: 322643 - DNA, 25 bp, Artificial
  probe
  misc_feature (1)..(25): SEQ ID NO: 2343; WAN024CXS; Start 1068; Stop 1092
ctgttctgttggattggatatgatt

SEQ ID NO: 322644 - DNA, 25 bp, Artificial
  probe
  misc_feature (1)..(25): SEQ ID NO: 2343; WAN024CXS; Start 207; Stop 231
tatcgttaataagcgtgtatcggtg

SEQ ID NO: 322645 - DNA, 25 bp, Artificial
  probe
  misc_feature (1)..(25): SEQ ID NO: 2343; WAN024CXS; Start 380; Stop 404
agattctcatcaattccattcctcg

SEQ ID NO: 322646 - DNA, 25 bp, Artificial
  probe
  misc_feature (1)..(25): SEQ ID NO: 2343; WAN024CXS; Start 205; Stop 229
cctatcgttaataagcgtgtatcgg

SEQ ID NO: 322647 - DNA, 25 bp, Artificial
  probe
  misc_feature (1)..(25): SEQ ID NO: 2343; WAN024CXS; Start 203; Stop 227
ttcctatcgttaataagcgtgtatc

SEQ ID NO: 322648 - DNA, 25 bp, Artificial
  probe
  misc_feature (1)..(25): SEQ ID NO: 2343; WAN024CXS; Start 1071; Stop 1095
ttctgttggattggatatgattgcc

SEQ ID NO: 322649 - DNA, 25 bp, Artificial
  probe
  misc_feature (1)..(25): SEQ ID NO: 2343; WAN024CXS; Start 1063; Stop 1087
gctatctgttctgttggattggata

SEQ ID NO: 322650 - DNA, 25 bp, Artificial
  probe
  misc_feature (1)..(25): SEQ ID NO: 2343; WAN024CXS; Start 201; Stop 225
aattcctatcgttaataagcgtgta

SEQ ID NO: 322651 - DNA, 25 bp, Artificial
  probe
  misc_feature (1)..(25): SEQ ID NO: 2343; WAN024CXS; Start 202; Stop 226
attcctatcgttaataagcgtgtat

SEQ ID NO: 322652 - DNA, 25 bp, Artificial
  probe
  misc_feature (1)..(25): SEQ ID NO: 2343; WAN024CXS; Start 541; Stop 565
aagttggttgtattcgctaatgctg

SEQ ID NO: 322653 - DNA, 25 bp, Artificial
  probe
  misc_feature (1)..(25): SEQ ID NO: 2343; WAN024CXS; Start 990; Stop 1014
ttctgaggatgaaggaatgattgct

SEQ ID NO: 322654 - DNA, 25 bp, Artificial
  probe
  misc_feature (1)..(25): SEQ ID NO: 2343; WAN024CXS; Start 208; Stop 232
atcgttaataagcgtgtatcggtga

SEQ ID NO: 322655 - DNA, 25 bp, Artificial
  probe
  misc_feature (1)..(25): SEQ ID NO: 2343; WAN024CXS; Start 544; Stop 568
ttggttgtattcgctaatgctgttg

SEQ ID NO: 322656 - DNA, 25 bp, Artificial
  probe
  misc_feature (1)..(25): SEQ ID NO: 2343; WAN024CXS; Start 543; Stop 567
gttggttgtattcgctaatgctgtt

SEQ ID NO: 322657 - DNA, 25 bp, Artificial
  probe
  misc_feature (1)..(25): SEQ ID NO: 2343; WAN024CXS; Start 381; Stop 405
gattctcatcaattccattcctcgc

SEQ ID NO: 322658 - DNA, 25 bp, Artificial
  probe
  misc_feature (1)..(25): SEQ ID NO: 2343; WAN024CXS; Start 1065; Stop 1089
tatctgttctgttggattggatatg

SEQ ID NO: 322659 - DNA, 25 bp, Artificial
  probe
  misc_feature (1)..(25): SEQ ID NO: 2343; WAN024CXS; Start 540; Stop 564
caagttggttgtattcgctaatgct

SEQ ID NO: 322660 - DNA, 25 bp, Artificial
  probe
  misc_feature (1)..(25): SEQ ID NO: 2343; WAN024CXS; Start 379; Stop 403
gagattctcatcaattccattcctc

SEQ ID NO: 322661 - DNA, 25 bp, Artificial
  probe
  misc_feature (1)..(25): SEQ ID NO: 2343; WAN024CXS; Start 422; Stop 446
ataaggtctgctcgtcagtcaatat

SEQ ID NO: 322662 - DNA, 25 bp, Artificial
  probe
  misc_feature (1)..(25): SEQ ID NO: 2343; WAN024CXS; Start 548; Stop 572
ttgtattcgctaatgctgttgagga

SEQ ID NO: 322663 - DNA, 25 bp, Artificial
  probe
  misc_feature (1)..(25): SEQ ID NO: 2343; WAN024CXS; Start 547; Stop 571
gttgtattcgctaatgctgttgagg

SEQ ID NO: 322664 - DNA, 25 bp, Artificial
  probe
  misc_feature (1)..(25): SEQ ID NO: 2343; WAN024CXS; Start 546; Stop 570
ggttgtattcgctaatgctgttgag

SEQ ID NO: 322665 - DNA, 25 bp, Artificial
  probe
  misc_feature (1)..(25): SEQ ID NO: 2343; WAN024CXS; Start 991; Stop 1015
tctgaggatgaaggaatgattgctg

SEQ ID NO: 322666 - DNA, 25 bp, Artificial
  probe
  misc_feature (1)..(25): SEQ ID NO: 2343; WAN024CXS; Start 1064; Stop 1088
ctatctgttctgttggattggatat

SEQ ID NO: 322667 - DNA, 25 bp, Artificial
  probe
  misc_feature (1)..(25): SEQ ID NO: 2343; WAN024CXS; Start 1062; Stop 1086
ggctatctgttctgttggattggat

SEQ ID NO: 322668 - DNA, 25 bp, Artificial
  probe
  misc_feature (1)..(25): SEQ ID NO: 2343; WAN024CXS; Start 1218; Stop 1242
gattgagtttggtggtctattagga

SEQ ID NO: 322669 - DNA, 25 bp, Artificial
  probe
  misc_feature (1)..(25): SEQ ID NO: 2343; WAN024CXS; Start 1217; Stop 1241
tgattgagtttggtggtctattagg

SEQ ID NO: 322670 - DNA, 25 bp, Artificial
  probe
  misc_feature (1)..(25): SEQ ID NO: 2344; WAN024FPY; Start 319; Stop 343
caattcgcctatctgtctgctattc

SEQ ID NO: 322671 - DNA, 25 bp, Artificial
  probe
  misc_feature (1)..(25): SEQ ID NO: 2344; WAN024FPY; Start 320; Stop 344
aattcgcctatctgtctgctattca

SEQ ID NO: 322672 - DNA, 25 bp, Artificial
  probe
  misc_feature (1)..(25): SEQ ID NO: 2344; WAN024FPY; Start 85; Stop 109
ttactaacagttgtggctggtattg

SEQ ID NO: 322673 - DNA, 25 bp, Artificial
  probe
  misc_feature (1)..(25): SEQ ID NO: 2344; WAN024FPY; Start 318; Stop 342
ccaattcgcctatctgtctgctatt

SEQ ID NO: 322674 - DNA, 25 bp, Artificial
  probe
  misc_feature (1)..(25): SEQ ID NO: 2344; WAN024FPY; Start 311; Stop 335
ttctcaaccaattcgcctatctgtc

SEQ ID NO: 322675 - DNA, 25 bp, Artificial
  probe
  misc_feature (1)..(25): SEQ ID NO: 2344; WAN024FPY; Start 846; Stop 870
tgccttcttaataatgaatgaacaa

SEQ ID NO: 322676 - DNA, 25 bp, Artificial
  probe
  misc_feature (1)..(25): SEQ ID NO: 2344; WAN024FPY; Start 845; Stop 869
ttgccttcttaataatgaatgaaca

SEQ ID NO: 322677 - DNA, 25 bp, Artificial
  probe
  misc_feature (1)..(25): SEQ ID NO: 2344; WAN024FPY; Start 258; Stop 282
aaaggatagaaagagtttgctgtct

SEQ ID NO: 322678 - DNA, 25 bp, Artificial
  probe
  misc_feature (1)..(25): SEQ ID NO: 2344; WAN024FPY; Start 257; Stop 281
taaaggatagaaagagtttgctgtc

SEQ ID NO: 322679 - DNA, 25 bp, Artificial
  probe
  misc_feature (1)..(25): SEQ ID NO: 2344; WAN024FPY; Start 321; Stop 345
attcgcctatctgtctgctattcag

SEQ ID NO: 322680 - DNA, 25 bp, Artificial
  probe
  misc_feature (1)..(25): SEQ ID NO: 2344; WAN024FPY; Start 28; Stop 52
gaacttgattcgcaaagaagagtaa

SEQ ID NO: 322681 - DNA, 25 bp, Artificial
  probe
  misc_feature (1)..(25): SEQ ID NO: 2344; WAN024FPY; Start 34; Stop 58
gattcgcaaagaagagtaaggagag

SEQ ID NO: 322682 - DNA, 25 bp, Artificial
  probe
  misc_feature (1)..(25): SEQ ID NO: 2344; WAN024FPY; Start 29; Stop 53
aacttgattcgcaaagaagagtaag

SEQ ID NO: 322683 - DNA, 25 bp, Artificial
  probe
  misc_feature (1)..(25): SEQ ID NO: 2344; WAN024FPY; Start 25; Stop 49
gatgaacttgattcgcaaagaagag

SEQ ID NO: 322684 - DNA, 25 bp, Artificial
  probe
  misc_feature (1)..(25): SEQ ID NO: 2344; WAN024FPY; Start 27; Stop 51
tgaacttgattcgcaaagaagagta

SEQ ID NO: 322685 - DNA, 25 bp, Artificial
  probe
  misc_feature (1)..(25): SEQ ID NO: 2344; WAN024FPY; Start 256; Stop 280
ttaaaggatagaaagagtttgctgt

SEQ ID NO: 322686 - DNA, 25 bp, Artificial
  probe
  misc_feature (1)..(25): SEQ ID NO: 2344; WAN024FPY; Start 32; Stop 56
ttgattcgcaaagaagagtaaggag

SEQ ID NO: 322687 - DNA, 25 bp, Artificial
  probe
  misc_feature (1)..(25): SEQ ID NO: 2344; WAN024FPY; Start 31; Stop 55
cttgattcgcaaagaagagtaagga

SEQ ID NO: 322688 - DNA, 25 bp, Artificial
  probe
  misc_feature (1)..(25): SEQ ID NO: 2344; WAN024FPY; Start 259; Stop 283
aaggatagaaagagtttgctgtctc

SEQ ID NO: 322689 - DNA, 25 bp, Artificial
  probe
  misc_feature (1)..(25): SEQ ID NO: 2344; WAN024FPY; Start 35; Stop 59
attcgcaaagaagagtaaggagaga

SEQ ID NO: 322690 - DNA, 25 bp, Artificial
  probe
  misc_feature (1)..(25): SEQ ID NO: 2344; WAN024FPY; Start 24; Stop 48
tgatgaacttgattcgcaaagaaga

SEQ ID NO: 322691 - DNA, 25 bp, Artificial
  probe
  misc_feature (1)..(25): SEQ ID NO: 2344; WAN024FPY; Start 23; Stop 47
gtgatgaacttgattcgcaaagaag

SEQ ID NO: 322692 - DNA, 25 bp, Artificial
  probe
  misc_feature (1)..(25): SEQ ID NO: 2344; WAN024FPY; Start 137; Stop 161
aatacctaatggcacacggaatttc

SEQ ID NO: 322693 - DNA, 25 bp, Artificial
  probe
  misc_feature (1)..(25): SEQ ID NO: 2344; WAN024FPY; Start 910; Stop 934
tttgctgtaactttgatttctttga

SEQ ID NO: 322694 - DNA, 25 bp, Artificial
  probe
  misc_feature (1)..(25): SEQ ID NO: 2344; WAN024FPY; Start 736; Stop 760
cttatcgggactgtctttgcctata

SEQ ID NO: 322695 - DNA, 25 bp, Artificial
  probe
  misc_feature (1)..(25): SEQ ID NO: 2344; WAN024FPY; Start 26; Stop 50
atgaacttgattcgcaaagaagagt

SEQ ID NO: 322696 - DNA, 25 bp, Artificial
  probe
  misc_feature (1)..(25): SEQ ID NO: 2344; WAN024FPY; Start 33; Stop 57
tgattcgcaaagaagagtaaggaga

SEQ ID NO: 322697 - DNA, 25 bp, Artificial
  probe
  misc_feature (1)..(25): SEQ ID NO: 2344; WAN024FPY; Start 30; Stop 54
acttgattcgcaaagaagagtaagg

SEQ ID NO: 322698 - DNA, 25 bp, Artificial
  probe
  misc_feature (1)..(25): SEQ ID NO: 2344; WAN024FPY; Start 908; Stop 932
tgtttgctgtaactttgatttcttt

SEQ ID NO: 322699 - DNA, 25 bp, Artificial
  probe
  misc_feature (1)..(25): SEQ ID NO: 2344; WAN024FPY; Start 907; Stop 931
ttgtttgctgtaactttgatttctt

SEQ ID NO: 322700 - DNA, 25 bp, Artificial
  probe
  misc_feature (1)..(25): SEQ ID NO: 2344; WAN024FPY; Start 136; Stop 160
caatacctaatggcacacggaattt

SEQ ID NO: 322701 - DNA, 25 bp, Artificial
  probe
  misc_feature (1)..(25): SEQ ID NO: 2344; WAN024FPY; Start 84; Stop 108
tttactaacagttgtggctggtatt

SEQ ID NO: 322702 - DNA, 25 bp, Artificial
  probe
  misc_feature (1)..(25): SEQ ID NO: 2344; WAN024FPY; Start 911; Stop 935
ttgctgtaactttgatttctttgaa

SEQ ID NO: 322703 - DNA, 25 bp, Artificial
  probe
  misc_feature (1)..(25): SEQ ID NO: 2345; WAN024GEX; Start 585; Stop 609
aatcaaggcagcagactatatctca

SEQ ID NO: 322704 - DNA, 25 bp, Artificial
  probe
  misc_feature (1)..(25): SEQ ID NO: 2345; WAN024GEX; Start 586; Stop 610
atcaaggcagcagactatatctcag

SEQ ID NO: 322705 - DNA, 25 bp, Artificial
  probe
  misc_feature (1)..(25): SEQ ID NO: 2345; WAN024GEX; Start 273; Stop 297
aatctacggacctcaaggaatcaag

SEQ ID NO: 322706 - DNA, 25 bp, Artificial
  probe
  misc_feature (1)..(25): SEQ ID NO: 2345; WAN024GEX; Start 614; Stop 638
cacgtccaggtaagattatcactat

SEQ ID NO: 322707 - DNA, 25 bp, Artificial
  probe
  misc_feature (1)..(25): SEQ ID NO: 2345; WAN024GEX; Start 748; Stop 772
catggtcactcaactaatatgcaag

SEQ ID NO: 322708 - DNA, 25 bp, Artificial
  probe
  misc_feature (1)..(25): SEQ ID NO: 2345; WAN024GEX; Start 615; Stop 639
acgtccaggtaagattatcactatt

SEQ ID NO: 322709 - DNA, 25 bp, Artificial
  probe
  misc_feature (1)..(25): SEQ ID NO: 2345; WAN024GEX; Start 250; Stop 274
aatgaagagcagacagatttggaaa

SEQ ID NO: 322710 - DNA, 25 bp, Artificial
  probe
  misc_feature (1)..(25): SEQ ID NO: 2345; WAN024GEX; Start 582; Stop 606
tgaaatcaaggcagcagactatatc

SEQ ID NO: 322711 - DNA, 25 bp, Artificial
  probe
  misc_feature (1)..(25): SEQ ID NO: 2345; WAN024GEX; Start 251; Stop 275
atgaagagcagacagatttggaaat

SEQ ID NO: 322712 - DNA, 25 bp, Artificial
  probe
  misc_feature (1)..(25): SEQ ID NO: 2345; WAN024GEX; Start 584; Stop 608
aaatcaaggcagcagactatatctc

SEQ ID NO: 322713 - DNA, 25 bp, Artificial
  probe
  misc_feature (1)..(25): SEQ ID NO: 2345; WAN024GEX; Start 583; Stop 607
gaaatcaaggcagcagactatatct

SEQ ID NO: 322714 - DNA, 25 bp, Artificial
  probe
  misc_feature (1)..(25): SEQ ID NO: 2345; WAN024GEX; Start 749; Stop 773
atggtcactcaactaatatgcaagc

SEQ ID NO: 322715 - DNA, 25 bp, Artificial
  probe
  misc_feature (1)..(25): SEQ ID NO: 2345; WAN024GEX; Start 613; Stop 637
ccacgtccaggtaagattatcacta

SEQ ID NO: 322716 - DNA, 25 bp, Artificial
  probe
  misc_feature (1)..(25): SEQ ID NO: 2345; WAN024GEX; Start 291; Stop 315
aatcaagtcatttgtcttaaccagc

SEQ ID NO: 322717 - DNA, 25 bp, Artificial
  probe
  misc_feature (1)..(25): SEQ ID NO: 2345; WAN024GEX; Start 289; Stop 313
ggaatcaagtcatttgtcttaacca

SEQ ID NO: 322718 - DNA, 25 bp, Artificial
  probe
  misc_feature (1)..(25): SEQ ID NO: 2345; WAN024GEX; Start 284; Stop 308
ctcaaggaatcaagtcatttgtctt

SEQ ID NO: 322719 - DNA, 25 bp, Artificial
  probe
  misc_feature (1)..(25): SEQ ID NO: 2345; WAN024GEX; Start 87; Stop 111
gattaacgaagtttggctctttgac

SEQ ID NO: 322720 - DNA, 25 bp, Artificial
  probe
  misc_feature (1)..(25): SEQ ID NO: 2345; WAN024GEX; Start 86; Stop 110
agattaacgaagtttggctctttga

SEQ ID NO: 322721 - DNA, 25 bp, Artificial
  probe
  misc_feature (1)..(25): SEQ ID NO: 2345; WAN024GEX; Start 274; Stop 298
atctacggacctcaaggaatcaagt

SEQ ID NO: 322722 - DNA, 25 bp, Artificial
  probe
  misc_feature (1)..(25): SEQ ID NO: 2345; WAN024GEX; Start 288; Stop 312
aggaatcaagtcatttgtcttaacc

SEQ ID NO: 322723 - DNA, 25 bp, Artificial
  probe
  misc_feature (1)..(25): SEQ ID NO: 2345; WAN024GEX; Start 295; Stop 319
aagtcatttgtcttaaccagccttc

SEQ ID NO: 322724 - DNA, 25 bp, Artificial
  probe
  misc_feature (1)..(25): SEQ ID NO: 2345; WAN024GEX; Start 616; Stop 640
cgtccaggtaagattatcactattt

SEQ ID NO: 322725 - DNA, 25 bp, Artificial
  probe
  misc_feature (1)..(25): SEQ ID NO: 2345; WAN024GEX; Start 85; Stop 109
gagattaacgaagtttggctctttg

SEQ ID NO: 322726 - DNA, 25 bp, Artificial
  probe
  misc_feature (1)..(25): SEQ ID NO: 2345; WAN024GEX; Start 83; Stop 107
atgagattaacgaagtttggctctt

SEQ ID NO: 322727 - DNA, 25 bp, Artificial
  probe
  misc_feature (1)..(25): SEQ ID NO: 2345; WAN024GEX; Start 682; Stop 706
gtcaatgcagatgtcctagttcatg

SEQ ID NO: 322728 - DNA, 25 bp, Artificial
  probe
  misc_feature (1)..(25): SEQ ID NO: 2345; WAN024GEX; Start 353; Stop 377
atttccatgagtttgaccaagattc

SEQ ID NO: 322729 - DNA, 25 bp, Artificial
  probe
  misc_feature (1)..(25): SEQ ID NO: 2345; WAN024GEX; Start 283; Stop 307
cctcaaggaatcaagtcatttgtct

SEQ ID NO: 322730 - DNA, 25 bp, Artificial
  probe
  misc_feature (1)..(25): SEQ ID NO: 2345; WAN024GEX; Start 84; Stop 108
tgagattaacgaagtttggctcttt

SEQ ID NO: 322731 - DNA, 25 bp, Artificial
  probe
  misc_feature (1)..(25): SEQ ID NO: 2345; WAN024GEX; Start 354; Stop 378
tttccatgagtttgaccaagattct

SEQ ID NO: 322732 - DNA, 25 bp, Artificial
  probe
  misc_feature (1)..(25): SEQ ID NO: 2345; WAN024GEX; Start 88; Stop 112
attaacgaagtttggctctttgact

SEQ ID NO: 322733 - DNA, 25 bp, Artificial
  probe
  misc_feature (1)..(25): SEQ ID NO: 2345; WAN024GEX; Start 751; Stop 775
ggtcactcaactaatatgcaagctg

SEQ ID NO: 322734 - DNA, 25 bp, Artificial
  probe
  misc_feature (1)..(25): SEQ ID NO: 2345; WAN024GEX; Start 282; Stop 306
acctcaaggaatcaagtcatttgtc

SEQ ID NO: 322735 - DNA, 25 bp, Artificial
  probe
  misc_feature (1)..(25): SEQ ID NO: 2345; WAN024GEX; Start 272; Stop 296
aaatctacggacctcaaggaatcaa

SEQ ID NO: 322736 - DNA, 25 bp, Artificial
  probe
  misc_feature (1)..(25): SEQ ID NO: 2346; WAN024DJW; Start 1164; Stop 1188
tattaagccaattatcgcacaggtt

SEQ ID NO: 322737 - DNA, 25 bp, Artificial
  probe
  misc_feature (1)..(25): SEQ ID NO: 2346; WAN024DJW; Start 1163; Stop 1187
ttattaagccaattatcgcacaggt

SEQ ID NO: 322738 - DNA, 25 bp, Artificial
  probe
  misc_feature (1)..(25): SEQ ID NO: 2346; WAN024DJW; Start 671; Stop 695
ttatcaacggtcttcttgtagcaat

SEQ ID NO: 322739 - DNA, 25 bp, Artificial
  probe
  misc_feature (1)..(25): SEQ ID NO: 2346; WAN024DJW; Start 672; Stop 696
tatcaacggtcttcttgtagcaatg

SEQ ID NO: 322740 - DNA, 25 bp, Artificial
  probe
  misc_feature (1)..(25): SEQ ID NO: 2346; WAN024DJW; Start 319; Stop 343
gcagaggaagaagaactcaatatga

SEQ ID NO: 322741 - DNA, 25 bp, Artificial
  probe
  misc_feature (1)..(25): SEQ ID NO: 2346; WAN024DJW; Start 1165; Stop 1189
attaagccaattatcgcacaggttc

SEQ ID NO: 322742 - DNA, 25 bp, Artificial
  probe
  misc_feature (1)..(25): SEQ ID NO: 2346; WAN024DJW; Start 320; Stop 344
cagaggaagaagaactcaatatgaa

SEQ ID NO: 322743 - DNA, 25 bp, Artificial
  probe
  misc_feature (1)..(25): SEQ ID NO: 2346; WAN024DJW; Start 333; Stop 357
actcaatatgaatcctcttaatggt

SEQ ID NO: 322744 - DNA, 25 bp, Artificial
  probe
  misc_feature (1)..(25): SEQ ID NO: 2346; WAN024DJW; Start 1162; Stop 1186
tttattaagccaattatcgcacagg

SEQ ID NO: 322745 - DNA, 25 bp, Artificial
  probe
  misc_feature (1)..(25): SEQ ID NO: 2346; WAN024DJW; Start 324; Stop 348
ggaagaagaactcaatatgaatcct

SEQ ID NO: 322746 - DNA, 25 bp, Artificial
  probe
  misc_feature (1)..(25): SEQ ID NO: 2346; WAN024DJW; Start 323; Stop 347
aggaagaagaactcaatatgaatcc

SEQ ID NO: 322747 - DNA, 25 bp, Artificial
  probe
  misc_feature (1)..(25): SEQ ID NO: 2346; WAN024DJW; Start 1071; Stop 1095
acctattatctataatccagccttg

SEQ ID NO: 322748 - DNA, 25 bp, Artificial
  probe
  misc_feature (1)..(25): SEQ ID NO: 2346; WAN024DJW; Start 326; Stop 350
aagaagaactcaatatgaatcctct

SEQ ID NO: 322749 - DNA, 25 bp, Artificial
  probe
  misc_feature (1)..(25): SEQ ID NO: 2346; WAN024DJW; Start 1325; Stop 1349
tgaaagaagagcaaggtatctaact

SEQ ID NO: 322750 - DNA, 25 bp, Artificial
  probe
  misc_feature (1)..(25): SEQ ID NO: 2346; WAN024DJW; Start 1324; Stop 1348
gtgaaagaagagcaaggtatctaac

SEQ ID NO: 322751 - DNA, 25 bp, Artificial
  probe
  misc_feature (1)..(25): SEQ ID NO: 2346; WAN024DJW; Start 1016; Stop 1040
gagcatctgtagttccagccttatt

SEQ ID NO: 322752 - DNA, 25 bp, Artificial
  probe
  misc_feature (1)..(25): SEQ ID NO: 2346; WAN024DJW; Start 1160; Stop 1184
actttattaagccaattatcgcaca

SEQ ID NO: 322753 - DNA, 25 bp, Artificial
  probe
  misc_feature (1)..(25): SEQ ID NO: 2346; WAN024DJW; Start 325; Stop 349
gaagaagaactcaatatgaatcctc

SEQ ID NO: 322754 - DNA, 25 bp, Artificial
  probe
  misc_feature (1)..(25): SEQ ID NO: 2346; WAN024DJW; Start 321; Stop 345
agaggaagaagaactcaatatgaat

SEQ ID NO: 322755 - DNA, 25 bp, Artificial
  probe
  misc_feature (1)..(25): SEQ ID NO: 2346; WAN024DJW; Start 317; Stop 341
atgcagaggaagaagaactcaatat

SEQ ID NO: 322756 - DNA, 25 bp, Artificial
  probe
  misc_feature (1)..(25): SEQ ID NO: 2346; WAN024DJW; Start 315; Stop 339
ttatgcagaggaagaagaactcaat

SEQ ID NO: 322757 - DNA, 25 bp, Artificial
  probe
  misc_feature (1)..(25): SEQ ID NO: 2346; WAN024DJW; Start 670; Stop 694
tttatcaacggtcttcttgtagcaa

SEQ ID NO: 322758 - DNA, 25 bp, Artificial
  probe
  misc_feature (1)..(25): SEQ ID NO: 2346; WAN024DJW; Start 322; Stop 346
gaggaagaagaactcaatatgaatc

SEQ ID NO: 322759 - DNA, 25 bp, Artificial
  probe
  misc_feature (1)..(25): SEQ ID NO: 2346; WAN024DJW; Start 318; Stop 342
tgcagaggaagaagaactcaatatg

SEQ ID NO: 322760 - DNA, 25 bp, Artificial
  probe
  misc_feature (1)..(25): SEQ ID NO: 2346; WAN024DJW; Start 1002; Stop 1026
taaagcaataggacgagcatctgta

SEQ ID NO: 322761 - DNA, 25 bp, Artificial
  probe
  misc_feature (1)..(25): SEQ ID NO: 2346; WAN024DJW; Start 668; Stop 692
tctttatcaacggtcttcttgtagc

SEQ ID NO: 322762 - DNA, 25 bp, Artificial
  probe
  misc_feature (1)..(25): SEQ ID NO: 2346; WAN024DJW; Start 1161; Stop 1185
ctttattaagccaattatcgcacag

SEQ ID NO: 322763 - DNA, 25 bp, Artificial
  probe
  misc_feature (1)..(25): SEQ ID NO: 2346; WAN024DJW; Start 316; Stop 340
tatgcagaggaagaagaactcaata

SEQ ID NO: 322764 - DNA, 25 bp, Artificial
  probe
  misc_feature (1)..(25): SEQ ID NO: 2346; WAN024DJW; Start 1072; Stop 1096
cctattatctataatccagccttgg

SEQ ID NO: 322765 - DNA, 25 bp, Artificial
  probe
  misc_feature (1)..(25): SEQ ID NO: 2346; WAN024DJW; Start 669; Stop 693
ctttatcaacggtcttcttgtagca

SEQ ID NO: 322766 - DNA, 25 bp, Artificial
  probe
  misc_feature (1)..(25): SEQ ID NO: 2346; WAN024DJW; Start 1006; Stop 1030
gcaataggacgagcatctgtagttc

SEQ ID NO: 322767 - DNA, 25 bp, Artificial
  probe
  misc_feature (1)..(25): SEQ ID NO: 2346; WAN024DJW; Start 1073; Stop 1097
ctattatctataatccagccttggc

SEQ ID NO: 322768 - DNA, 25 bp, Artificial
  probe
  misc_feature (1)..(25): SEQ ID NO: 2346; WAN024DJW; Start 667; Stop 691
atctttatcaacggtcttcttgtag

SEQ ID NO: 322769 - DNA, 25 bp, Artificial
  probe
  misc_feature (1)..(25): SEQ ID NO: 2347; WAN024DK8; Start 683; Stop 707
tcatattgcctcatccttacatagc

SEQ ID NO: 322770 - DNA, 25 bp, Artificial
  probe
  misc_feature (1)..(25): SEQ ID NO: 2347; WAN024DK8; Start 681; Stop 705
cctcatattgcctcatccttacata

SEQ ID NO: 322771 - DNA, 25 bp, Artificial
  probe
  misc_feature (1)..(25): SEQ ID NO: 2347; WAN024DK8; Start 669; Stop 693
ttatacagacgacctcatattgcct

SEQ ID NO: 322772 - DNA, 25 bp, Artificial
  probe
  misc_feature (1)..(25): SEQ ID NO: 2347; WAN024DK8; Start 680; Stop 704
acctcatattgcctcatccttacat

SEQ ID NO: 322773 - DNA, 25 bp, Artificial
  probe
  misc_feature (1)..(25): SEQ ID NO: 2347; WAN024DK8; Start 684; Stop 708
catattgcctcatccttacatagcg

SEQ ID NO: 322774 - DNA, 25 bp, Artificial
  probe
  misc_feature (1)..(25): SEQ ID NO: 2347; WAN024DK8; Start 682; Stop 706
ctcatattgcctcatccttacatag

SEQ ID NO: 322775 - DNA, 25 bp, Artificial
  probe
  misc_feature (1)..(25): SEQ ID NO: 2347; WAN024DK8; Start 322; Stop 346
ctagatacttgctcggtaaccattc

SEQ ID NO: 322776 - DNA, 25 bp, Artificial
  probe
  misc_feature (1)..(25): SEQ ID NO: 2347; WAN024DK8; Start 670; Stop 694
tatacagacgacctcatattgcctc

SEQ ID NO: 322777 - DNA, 25 bp, Artificial
  probe
  misc_feature (1)..(25): SEQ ID NO: 2347; WAN024DK8; Start 323; Stop 347
tagatacttgctcggtaaccattca

SEQ ID NO: 322778 - DNA, 25 bp, Artificial
  probe
  misc_feature (1)..(25): SEQ ID NO: 2347; WAN024DK8; Start 321; Stop 345
actagatacttgctcggtaaccatt

SEQ ID NO: 322779 - DNA, 25 bp, Artificial
  probe
  misc_feature (1)..(25): SEQ ID NO: 2347; WAN024DK8; Start 316; Stop 340
ttgtcactagatacttgctcggtaa

SEQ ID NO: 322780 - DNA, 25 bp, Artificial
  probe
  misc_feature (1)..(25): SEQ ID NO: 2347; WAN024DK8; Start 92; Stop 116
cagccatcctatcctatgatatgac

SEQ ID NO: 322781 - DNA, 25 bp, Artificial
  probe
  misc_feature (1)..(25): SEQ ID NO: 2347; WAN024DK8; Start 91; Stop 115
tcagccatcctatcctatgatatga

SEQ ID NO: 322782 - DNA, 25 bp, Artificial
  probe
  misc_feature (1)..(25): SEQ ID NO: 2347; WAN024DK8; Start 679; Stop 703
gacctcatattgcctcatccttaca

SEQ ID NO: 322783 - DNA, 25 bp, Artificial
  probe
  misc_feature (1)..(25): SEQ ID NO: 2347; WAN024DK8; Start 90; Stop 114
ttcagccatcctatcctatgatatg

SEQ ID NO: 322784 - DNA, 25 bp, Artificial
  probe
  misc_feature (1)..(25): SEQ ID NO: 2347; WAN024DK8; Start 325; Stop 349
gatacttgctcggtaaccattcatc

SEQ ID NO: 322785 - DNA, 25 bp, Artificial
  probe
  misc_feature (1)..(25): SEQ ID NO: 2347; WAN024DK8; Start 93; Stop 117
agccatcctatcctatgatatgacc

SEQ ID NO: 322786 - DNA, 25 bp, Artificial
  probe
  misc_feature (1)..(25): SEQ ID NO: 2347; WAN024DK8; Start 94; Stop 118
gccatcctatcctatgatatgacca

SEQ ID NO: 322787 - DNA, 25 bp, Artificial
  probe
  misc_feature (1)..(25): SEQ ID NO: 2347; WAN024DK8; Start 95; Stop 119
ccatcctatcctatgatatgaccaa

SEQ ID NO: 322788 - DNA, 25 bp, Artificial
  probe
  misc_feature (1)..(25): SEQ ID NO: 2347; WAN024DK8; Start 324; Stop 348
agatacttgctcggtaaccattcat

SEQ ID NO: 322789 - DNA, 25 bp, Artificial
  probe
  misc_feature (1)..(25): SEQ ID NO: 2347; WAN024DK8; Start 100; Stop 124
ctatcctatgatatgaccaaggcag

SEQ ID NO: 322790 - DNA, 25 bp, Artificial
  probe
  misc_feature (1)..(25): SEQ ID NO: 2347; WAN024DK8; Start 320; Stop 344
cactagatacttgctcggtaaccat

SEQ ID NO: 322791 - DNA, 25 bp, Artificial
  probe
  misc_feature (1)..(25): SEQ ID NO: 2347; WAN024DK8; Start 317; Stop 341
tgtcactagatacttgctcggtaac

SEQ ID NO: 322792 - DNA, 25 bp, Artificial
  probe
  misc_feature (1)..(25): SEQ ID NO: 2347; WAN024DK8; Start 685; Stop 709
atattgcctcatccttacatagcgg

SEQ ID NO: 322793 - DNA, 25 bp, Artificial
  probe
  misc_feature (1)..(25): SEQ ID NO: 2347; WAN024DK8; Start 98; Stop 122
tcctatcctatgatatgaccaaggc

SEQ ID NO: 322794 - DNA, 25 bp, Artificial
  probe
  misc_feature (1)..(25): SEQ ID NO: 2347; WAN024DK8; Start 99; Stop 123
cctatcctatgatatgaccaaggca

SEQ ID NO: 322795 - DNA, 25 bp, Artificial
  probe
  misc_feature (1)..(25): SEQ ID NO: 2347; WAN024DK8; Start 97; Stop 121
atcctatcctatgatatgaccaagg

SEQ ID NO: 322796 - DNA, 25 bp, Artificial
  probe
  misc_feature (1)..(25): SEQ ID NO: 2347; WAN024DK8; Start 627; Stop 651
tttgattgatttggacttgctcttt

SEQ ID NO: 322797 - DNA, 25 bp, Artificial
  probe
  misc_feature (1)..(25): SEQ ID NO: 2347; WAN024DK8; Start 213; Stop 237
gattgaaacggtagcctataaactg

SEQ ID NO: 322798 - DNA, 25 bp, Artificial
  probe
  misc_feature (1)..(25): SEQ ID NO: 2347; WAN024DK8; Start 212; Stop 236
tgattgaaacggtagcctataaact

SEQ ID NO: 322799 - DNA, 25 bp, Artificial
  probe
  misc_feature (1)..(25): SEQ ID NO: 2347; WAN024DK8; Start 678; Stop 702
cgacctcatattgcctcatccttac

SEQ ID NO: 322800 - DNA, 25 bp, Artificial
  probe
  misc_feature (1)..(25): SEQ ID NO: 2347; WAN024DK8; Start 318; Stop 342
gtcactagatacttgctcggtaacc

SEQ ID NO: 322801 - DNA, 25 bp, Artificial
  probe
  misc_feature (1)..(25): SEQ ID NO: 2347; WAN024DK8; Start 101; Stop 125
tatcctatgatatgaccaaggcagc

SEQ ID NO: 322802 - DNA, 25 bp, Artificial
  probe
  misc_feature (1)..(25): SEQ ID NO: 2348; WAN024FK9; Start 58; Stop 82
ggctatacgactgatatgagaagac

SEQ ID NO: 322803 - DNA, 25 bp, Artificial
  probe
  misc_feature (1)..(25): SEQ ID NO: 2348; WAN024FK9; Start 57; Stop 81
aggctatacgactgatatgagaaga

SEQ ID NO: 322804 - DNA, 25 bp, Artificial
  probe
  misc_feature (1)..(25): SEQ ID NO: 2348; WAN024FK9; Start 60; Stop 84
ctatacgactgatatgagaagacgc

SEQ ID NO: 322805 - DNA, 25 bp, Artificial
  probe
  misc_feature (1)..(25): SEQ ID NO: 2348; WAN024FK9; Start 59; Stop 83
gctatacgactgatatgagaagacg

SEQ ID NO: 322806 - DNA, 25 bp, Artificial
  probe
  misc_feature (1)..(25): SEQ ID NO: 2348; WAN024FK9; Start 56; Stop 80
taggctatacgactgatatgagaag

SEQ ID NO: 322807 - DNA, 25 bp, Artificial
  probe
  misc_feature (1)..(25): SEQ ID NO: 2348; WAN024FK9; Start 61; Stop 85
tatacgactgatatgagaagacgcc

SEQ ID NO: 322808 - DNA, 25 bp, Artificial
  probe
  misc_feature (1)..(25): SEQ ID NO: 2348; WAN024FK9; Start 55; Stop 79
ataggctatacgactgatatgagaa

SEQ ID NO: 322809 - DNA, 25 bp, Artificial
  probe
  misc_feature (1)..(25): SEQ ID NO: 2348; WAN024FK9; Start 9; Stop 33
taaggcttatatgtacgttctggag

SEQ ID NO: 322810 - DNA, 25 bp, Artificial
  probe
  misc_feature (1)..(25): SEQ ID NO: 2348; WAN024FK9; Start 54; Stop 78
tataggctatacgactgatatgaga

SEQ ID NO: 322811 - DNA, 25 bp, Artificial
  probe
  misc_feature (1)..(25): SEQ ID NO: 2348; WAN024FK9; Start 14; Stop 38
cttatatgtacgttctggagtgtcg

SEQ ID NO: 322812 - DNA, 25 bp, Artificial
  probe
  misc_feature (1)..(25): SEQ ID NO: 2348; WAN024FK9; Start 62; Stop 86
atacgactgatatgagaagacgcct

SEQ ID NO: 322813 - DNA, 25 bp, Artificial
  probe
  misc_feature (1)..(25): SEQ ID NO: 2348; WAN024FK9; Start 13; Stop 37
gcttatatgtacgttctggagtgtc

SEQ ID NO: 322814 - DNA, 25 bp, Artificial
  probe
  misc_feature (1)..(25): SEQ ID NO: 2348; WAN024FK9; Start 10; Stop 34
aaggcttatatgtacgttctggagt

SEQ ID NO: 322815 - DNA, 25 bp, Artificial
  probe
  misc_feature (1)..(25): SEQ ID NO: 2348; WAN024FK9; Start 8; Stop 32
ataaggcttatatgtacgttctgga

SEQ ID NO: 322816 - DNA, 25 bp, Artificial
  probe
  misc_feature (1)..(25): SEQ ID NO: 2348; WAN024FK9; Start 139; Stop 163
gtcaaacttatctatgctcaaggtt

SEQ ID NO: 322817 - DNA, 25 bp, Artificial
  probe
  misc_feature (1)..(25): SEQ ID NO: 2348; WAN024FK9; Start 138; Stop 162
agtcaaacttatctatgctcaaggt

SEQ ID NO: 322818 - DNA, 25 bp, Artificial
  probe
  misc_feature (1)..(25): SEQ ID NO: 2348; WAN024FK9; Start 137; Stop 161
cagtcaaacttatctatgctcaagg

SEQ ID NO: 322819 - DNA, 25 bp, Artificial
  probe
  misc_feature (1)..(25): SEQ ID NO: 2348; WAN024FK9; Start 136; Stop 160
ccagtcaaacttatctatgctcaag

SEQ ID NO: 322820 - DNA, 25 bp, Artificial
  probe
  misc_feature (1)..(25): SEQ ID NO: 2348; WAN024FK9; Start 1; Stop 25
atggatcataaggcttatatgtacg

SEQ ID NO: 322821 - DNA, 25 bp, Artificial
  probe
  misc_feature (1)..(25): SEQ ID NO: 2348; WAN024FK9; Start 11; Stop 35
aggcttatatgtacgttctggagtg

SEQ ID NO: 322822 - DNA, 25 bp, Artificial
  probe
  misc_feature (1)..(25): SEQ ID NO: 2348; WAN024FK9; Start 135; Stop 159
gccagtcaaacttatctatgctcaa

SEQ ID NO: 322823 - DNA, 25 bp, Artificial
  probe
  misc_feature (1)..(25): SEQ ID NO: 2348; WAN024FK9; Start 133; Stop 157
ttgccagtcaaacttatctatgctc

SEQ ID NO: 322824 - DNA, 25 bp, Artificial
  probe
  misc_feature (1)..(25): SEQ ID NO: 2348; WAN024FK9; Start 132; Stop 156
cttgccagtcaaacttatctatgct

SEQ ID NO: 322825 - DNA, 25 bp, Artificial
  probe
  misc_feature (1)..(25): SEQ ID NO: 2348; WAN024FK9; Start 12; Stop 36
ggcttatatgtacgttctggagtgt

SEQ ID NO: 322826 - DNA, 25 bp, Artificial
  probe
  misc_feature (1)..(25): SEQ ID NO: 2348; WAN024FK9; Start 7; Stop 31
cataaggcttatatgtacgttctgg

SEQ ID NO: 322827 - DNA, 25 bp, Artificial
  probe
  misc_feature (1)..(25): SEQ ID NO: 2348; WAN024FK9; Start 2; Stop 26
tggatcataaggcttatatgtacgt

SEQ ID NO: 322828 - DNA, 25 bp, Artificial
  probe
  misc_feature (1)..(25): SEQ ID NO: 2348; WAN024FK9; Start 53; Stop 77
atataggctatacgactgatatgag

SEQ ID NO: 322829 - DNA, 25 bp, Artificial
  probe
  misc_feature (1)..(25): SEQ ID NO: 2348; WAN024FK9; Start 134; Stop 158
tgccagtcaaacttatctatgctca

SEQ ID NO: 322830 - DNA, 25 bp, Artificial
  probe
  misc_feature (1)..(25): SEQ ID NO: 2348; WAN024FK9; Start 6; Stop 30
tcataaggcttatatgtacgttctg

SEQ ID NO: 322831 - DNA, 25 bp, Artificial
  probe
  misc_feature (1)..(25): SEQ ID NO: 2348; WAN024FK9; Start 3; Stop 27
ggatcataaggcttatatgtacgtt

SEQ ID NO: 322832 - DNA, 25 bp, Artificial
  probe
  misc_feature (1)..(25): SEQ ID NO: 2348; WAN024FK9; Start 63; Stop 87
tacgactgatatgagaagacgcctc

SEQ ID NO: 322833 - DNA, 25 bp, Artificial
  probe
  misc_feature (1)..(25): SEQ ID NO: 2348; WAN024FK9; Start 130; Stop 154
cgcttgccagtcaaacttatctatg

SEQ ID NO: 322834 - DNA, 25 bp, Artificial
  probe
  misc_feature (1)..(25): SEQ ID NO: 2348; WAN024FK9; Start 97; Stop 121
aatagtgggaagggagccaaatata

SEQ ID NO: 322835 - DNA, 25 bp, Artificial
  probe
  misc_feature (1)..(25): SEQ ID NO: 2349; WAN024C3N; Start 141; Stop 165
gtgtttcaacttcttcatcaatgtc

SEQ ID NO: 322836 - DNA, 25 bp, Artificial
  probe
  misc_feature (1)..(25): SEQ ID NO: 2349; WAN024C3N; Start 265; Stop 289
gtagtcttctgggaatgttacgata

SEQ ID NO: 322837 - DNA, 25 bp, Artificial
  probe
  misc_feature (1)..(25): SEQ ID NO: 2349; WAN024C3N; Start 142; Stop 166
tgtttcaacttcttcatcaatgtct

SEQ ID NO: 322838 - DNA, 25 bp, Artificial
  probe
  misc_feature (1)..(25): SEQ ID NO: 2349; WAN024C3N; Start 123; Stop 147
tttctttcaagtcagcaagtgtttc

SEQ ID NO: 322839 - DNA, 25 bp, Artificial
  probe
  misc_feature (1)..(25): SEQ ID NO: 2349; WAN024C3N; Start 261; Stop 285
cttggtagtcttctgggaatgttac

SEQ ID NO: 322840 - DNA, 25 bp, Artificial
  probe
  misc_feature (1)..(25): SEQ ID NO: 2349; WAN024C3N; Start 266; Stop 290
tagtcttctgggaatgttacgataa

SEQ ID NO: 322841 - DNA, 25 bp, Artificial
  probe
  misc_feature (1)..(25): SEQ ID NO: 2349; WAN024C3N; Start 250; Stop 274
aaggtcttctgcttggtagtcttct

SEQ ID NO: 322842 - DNA, 25 bp, Artificial
  probe
  misc_feature (1)..(25): SEQ ID NO: 2349; WAN024C3N; Start 140; Stop 164
agtgtttcaacttcttcatcaatgt

SEQ ID NO: 322843 - DNA, 25 bp, Artificial
  probe
  misc_feature (1)..(25): SEQ ID NO: 2349; WAN024C3N; Start 143; Stop 167
gtttcaacttcttcatcaatgtctt

SEQ ID NO: 322844 - DNA, 25 bp, Artificial
  probe
  misc_feature (1)..(25): SEQ ID NO: 2349; WAN024C3N; Start 125; Stop 149
tctttcaagtcagcaagtgtttcaa

SEQ ID NO: 322845 - DNA, 25 bp, Artificial
  probe
  misc_feature (1)..(25): SEQ ID NO: 2349; WAN024C3N; Start 124; Stop 148
ttctttcaagtcagcaagtgtttca

SEQ ID NO: 322846 - DNA, 25 bp, Artificial
  probe
  misc_feature (1)..(25): SEQ ID NO: 2349; WAN024C3N; Start 126; Stop 150
ctttcaagtcagcaagtgtttcaac

SEQ ID NO: 322847 - DNA, 25 bp, Artificial
  probe
  misc_feature (1)..(25): SEQ ID NO: 2349; WAN024C3N; Start 10; Stop 34
ttcttctggaagttctacgatttca

SEQ ID NO: 322848 - DNA, 25 bp, Artificial
  probe
  misc_feature (1)..(25): SEQ ID NO: 2349; WAN024C3N; Start 1; Stop 25
atggatcatttcttctggaagttct

SEQ ID NO: 322849 - DNA, 25 bp, Artificial
  probe
  misc_feature (1)..(25): SEQ ID NO: 2349; WAN024C3N; Start 6; Stop 30
tcatttcttctggaagttctacgat

SEQ ID NO: 322850 - DNA, 25 bp, Artificial
  probe
  misc_feature (1)..(25): SEQ ID NO: 2349; WAN024C3N; Start 5; Stop 29
atcatttcttctggaagttctacga

SEQ ID NO: 322851 - DNA, 25 bp, Artificial
  probe
  misc_feature (1)..(25): SEQ ID NO: 2349; WAN024C3N; Start 4; Stop 28
gatcatttcttctggaagttctacg

SEQ ID NO: 322852 - DNA, 25 bp, Artificial
  probe
  misc_feature (1)..(25): SEQ ID NO: 2349; WAN024C3N; Start 2; Stop 26
tggatcatttcttctggaagttcta

SEQ ID NO: 322853 - DNA, 25 bp, Artificial
  probe
  misc_feature (1)..(25): SEQ ID NO: 2349; WAN024C3N; Start 264; Stop 288
ggtagtcttctgggaatgttacgat

SEQ ID NO: 322854 - DNA, 25 bp, Artificial
  probe
  misc_feature (1)..(25): SEQ ID NO: 2349; WAN024C3N; Start 3; Stop 27
ggatcatttcttctggaagttctac

SEQ ID NO: 322855 - DNA, 25 bp, Artificial
  probe
  misc_feature (1)..(25): SEQ ID NO: 2349; WAN024C3N; Start 9; Stop 33
tttcttctggaagttctacgatttc

SEQ ID NO: 322856 - DNA, 25 bp, Artificial
  probe
  misc_feature (1)..(25): SEQ ID NO: 2349; WAN024C3N; Start 7; Stop 31
catttcttctggaagttctacgatt

SEQ ID NO: 322857 - DNA, 25 bp, Artificial
  probe
  misc_feature (1)..(25): SEQ ID NO: 2349; WAN024C3N; Start 127; Stop 151
tttcaagtcagcaagtgtttcaact

SEQ ID NO: 322858 - DNA, 25 bp, Artificial
  probe
  misc_feature (1)..(25): SEQ ID NO: 2349; WAN024C3N; Start 262; Stop 286
ttggtagtcttctgggaatgttacg

SEQ ID NO: 322859 - DNA, 25 bp, Artificial
  probe
  misc_feature (1)..(25): SEQ ID NO: 2349; WAN024C3N; Start 260; Stop 284
gcttggtagtcttctgggaatgtta

SEQ ID NO: 322860 - DNA, 25 bp, Artificial
  probe
  misc_feature (1)..(25): SEQ ID NO: 2349; WAN024C3N; Start 8; Stop 32
atttcttctggaagttctacgattt

SEQ ID NO: 322861 - DNA, 25 bp, Artificial
  probe
  misc_feature (1)..(25): SEQ ID NO: 2349; WAN024C3N; Start 251; Stop 275
aggtcttctgcttggtagtcttctg

SEQ ID NO: 322862 - DNA, 25 bp, Artificial
  probe
  misc_feature (1)..(25): SEQ ID NO: 2349; WAN024C3N; Start 144; Stop 168
tttcaacttcttcatcaatgtcttt

SEQ ID NO: 322863 - DNA, 25 bp, Artificial
  probe
  misc_feature (1)..(25): SEQ ID NO: 2349; WAN024C3N; Start 90; Stop 114
cttctttagcagcagccaattcttt

SEQ ID NO: 322864 - DNA, 25 bp, Artificial
  probe
  misc_feature (1)..(25): SEQ ID NO: 2349; WAN024C3N; Start 267; Stop 291
agtcttctgggaatgttacgataac

SEQ ID NO: 322865 - DNA, 25 bp, Artificial
  probe
  misc_feature (1)..(25): SEQ ID NO: 2349; WAN024C3N; Start 215; Stop 239
tggatagttgtcacgaatttagctt

SEQ ID NO: 322866 - DNA, 25 bp, Artificial
  probe
  misc_feature (1)..(25): SEQ ID NO: 2349; WAN024C3N; Start 11; Stop 35
tcttctggaagttctacgatttcag

SEQ ID NO: 322867 - DNA, 25 bp, Artificial
  probe
  misc_feature (1)..(25): SEQ ID NO: 2349; WAN024C3N; Start 216; Stop 240
ggatagttgtcacgaatttagcttc

SEQ ID NO: 322868 - DNA, 25 bp, Artificial
  probe
  misc_feature (1)..(25): SEQ ID NO: 2350; WAN024ESV; Start 51; Stop 75
aacagaaggcttaacaccagaagaa

SEQ ID NO: 322869 - DNA, 25 bp, Artificial
  probe
  misc_feature (1)..(25): SEQ ID NO: 2350; WAN024ESV; Start 169; Stop 193
gaaggaaacgatgttacaccagaaa

SEQ ID NO: 322870 - DNA, 25 bp, Artificial
  probe
  misc_feature (1)..(25): SEQ ID NO: 2350; WAN024ESV; Start 97; Stop 121
cgtgaggagtacatcgaaggttatc

SEQ ID NO: 322871 - DNA, 25 bp, Artificial
  probe
  misc_feature (1)..(25): SEQ ID NO: 2350; WAN024ESV; Start 166; Stop 190
gaagaaggaaacgatgttacaccag

SEQ ID NO: 322872 - DNA, 25 bp, Artificial
  probe
  misc_feature (1)..(25): SEQ ID NO: 2350; WAN024ESV; Start 231; Stop 255
ccgtagtcttgatgatccaaattca

SEQ ID NO: 322873 - DNA, 25 bp, Artificial
  probe
  misc_feature (1)..(25): SEQ ID NO: 2350; WAN024ESV; Start 168; Stop 192
agaaggaaacgatgttacaccagaa

SEQ ID NO: 322874 - DNA, 25 bp, Artificial
  probe
  misc_feature (1)..(25): SEQ ID NO: 2350; WAN024ESV; Start 167; Stop 191
aagaaggaaacgatgttacaccaga

SEQ ID NO: 322875 - DNA, 25 bp, Artificial
  probe
  misc_feature (1)..(25): SEQ ID NO: 2350; WAN024ESV; Start 95; Stop 119
tacgtgaggagtacatcgaaggtta

SEQ ID NO: 322876 - DNA, 25 bp, Artificial
  probe
  misc_feature (1)..(25): SEQ ID NO: 2350; WAN024ESV; Start 52; Stop 76
acagaaggcttaacaccagaagaaa

SEQ ID NO: 322877 - DNA, 25 bp, Artificial
  probe
  misc_feature (1)..(25): SEQ ID NO: 2350; WAN024ESV; Start 50; Stop 74
aaacagaaggcttaacaccagaaga

SEQ ID NO: 322878 - DNA, 25 bp, Artificial
  probe
  misc_feature (1)..(25): SEQ ID NO: 2350; WAN024ESV; Start 163; Stop 187
gacgaagaaggaaacgatgttacac

SEQ ID NO: 322879 - DNA, 25 bp, Artificial
  probe
  misc_feature (1)..(25): SEQ ID NO: 2350; WAN024ESV; Start 130; Stop 154
gttcgtcaccacattgaaggaatca

SEQ ID NO: 322880 - DNA, 25 bp, Artificial
  probe
  misc_feature (1)..(25): SEQ ID NO: 2350; WAN024ESV; Start 230; Stop 254
gccgtagtcttgatgatccaaattc

SEQ ID NO: 322881 - DNA, 25 bp, Artificial
  probe
  misc_feature (1)..(25): SEQ ID NO: 2350; WAN024ESV; Start 129; Stop 153
tgttcgtcaccacattgaaggaatc

SEQ ID NO: 322882 - DNA, 25 bp, Artificial
  probe
  misc_feature (1)..(25): SEQ ID NO: 2350; WAN024ESV; Start 128; Stop 152
ctgttcgtcaccacattgaaggaat

SEQ ID NO: 322883 - DNA, 25 bp, Artificial
  probe
  misc_feature (1)..(25): SEQ ID NO: 2350; WAN024ESV; Start 96; Stop 120
acgtgaggagtacatcgaaggttat

SEQ ID NO: 322884 - DNA, 25 bp, Artificial
  probe
  misc_feature (1)..(25): SEQ ID NO: 2350; WAN024ESV; Start 156; Stop 180
aattgtggacgaagaaggaaacgat

SEQ ID NO: 322885 - DNA, 25 bp, Artificial
  probe
  misc_feature (1)..(25): SEQ ID NO: 2350; WAN024ESV; Start 222; Stop 246
attacatggccgtagtcttgatgat

SEQ ID NO: 322886 - DNA, 25 bp, Artificial
  probe
  misc_feature (1)..(25): SEQ ID NO: 2350; WAN024ESV; Start 161; Stop 185
tggacgaagaaggaaacgatgttac

SEQ ID NO: 322887 - DNA, 25 bp, Artificial
  probe
  misc_feature (1)..(25): SEQ ID NO: 2350; WAN024ESV; Start 160; Stop 184
gtggacgaagaaggaaacgatgtta

SEQ ID NO: 322888 - DNA, 25 bp, Artificial
  probe
  misc_feature (1)..(25): SEQ ID NO: 2350; WAN024ESV; Start 155; Stop 179
aaattgtggacgaagaaggaaacga

SEQ ID NO: 322889 - DNA, 25 bp, Artificial
  probe
  misc_feature (1)..(25): SEQ ID NO: 2350; WAN024ESV; Start 162; Stop 186
ggacgaagaaggaaacgatgttaca

SEQ ID NO: 322890 - DNA, 25 bp, Artificial
  probe
  misc_feature (1)..(25): SEQ ID NO: 2350; WAN024ESV; Start 223; Stop 247
ttacatggccgtagtcttgatgatc

SEQ ID NO: 322891 - DNA, 25 bp, Artificial
  probe
  misc_feature (1)..(25): SEQ ID NO: 2350; WAN024ESV; Start 221; Stop 245
gattacatggccgtagtcttgatga

SEQ ID NO: 322892 - DNA, 25 bp, Artificial
  probe
  misc_feature (1)..(25): SEQ ID NO: 2350; WAN024ESV; Start 232; Stop 256
cgtagtcttgatgatccaaattcat

SEQ ID NO: 322893 - DNA, 25 bp, Artificial
  probe
  misc_feature (1)..(25): SEQ ID NO: 2350; WAN024ESV; Start 157; Stop 181
attgtggacgaagaaggaaacgatg

SEQ ID NO: 322894 - DNA, 25 bp, Artificial
  probe
  misc_feature (1)..(25): SEQ ID NO: 2350; WAN024ESV; Start 149; Stop 173
gaatcaaaattgtggacgaagaagg

SEQ ID NO: 322895 - DNA, 25 bp, Artificial
  probe
  misc_feature (1)..(25): SEQ ID NO: 2350; WAN024ESV; Start 148; Stop 172
ggaatcaaaattgtggacgaagaag

SEQ ID NO: 322896 - DNA, 25 bp, Artificial
  probe
  misc_feature (1)..(25): SEQ ID NO: 2350; WAN024ESV; Start 145; Stop 169
gaaggaatcaaaattgtggacgaag

SEQ ID NO: 322897 - DNA, 25 bp, Artificial
  probe
  misc_feature (1)..(25): SEQ ID NO: 2350; WAN024ESV; Start 165; Stop 189
cgaagaaggaaacgatgttacacca

SEQ ID NO: 322898 - DNA, 25 bp, Artificial
  probe
  misc_feature (1)..(25): SEQ ID NO: 2350; WAN024ESV; Start 164; Stop 188
acgaagaaggaaacgatgttacacc

SEQ ID NO: 322899 - DNA, 25 bp, Artificial
  probe
  misc_feature (1)..(25): SEQ ID NO: 2350; WAN024ESV; Start 98; Stop 122
gtgaggagtacatcgaaggttatcg

SEQ ID NO: 322900 - DNA, 25 bp, Artificial
  probe
  misc_feature (1)..(25): SEQ ID NO: 2350; WAN024ESV; Start 151; Stop 175
atcaaaattgtggacgaagaaggaa

SEQ ID NO: 322901 - DNA, 25 bp, Artificial
  probe
  misc_feature (1)..(25): SEQ ID NO: 2351; WAN024B3G; Start 768; Stop 792
tagtcatgtaattgctaagcggatt

SEQ ID NO: 322902 - DNA, 25 bp, Artificial
  probe
  misc_feature (1)..(25): SEQ ID NO: 2351; WAN024B3G; Start 767; Stop 791
ctagtcatgtaattgctaagcggat

SEQ ID NO: 322903 - DNA, 25 bp, Artificial
  probe
  misc_feature (1)..(25): SEQ ID NO: 2351; WAN024B3G; Start 1144; Stop 1168
acagtggacgagtatgttcagtata

SEQ ID NO: 322904 - DNA, 25 bp, Artificial
  probe
  misc_feature (1)..(25): SEQ ID NO: 2351; WAN024B3G; Start 1143; Stop 1167
tacagtggacgagtatgttcagtat

SEQ ID NO: 322905 - DNA, 25 bp, Artificial
  probe
  misc_feature (1)..(25): SEQ ID NO: 2351; WAN024B3G; Start 774; Stop 798
tgtaattgctaagcggattattgat

SEQ ID NO: 322906 - DNA, 25 bp, Artificial
  probe
  misc_feature (1)..(25): SEQ ID NO: 2351; WAN024B3G; Start 773; Stop 797
atgtaattgctaagcggattattga

SEQ ID NO: 322907 - DNA, 25 bp, Artificial
  probe
  misc_feature (1)..(25): SEQ ID NO: 2351; WAN024B3G; Start 770; Stop 794
gtcatgtaattgctaagcggattat

SEQ ID NO: 322908 - DNA, 25 bp, Artificial
  probe
  misc_feature (1)..(25): SEQ ID NO: 2351; WAN024B3G; Start 769; Stop 793
agtcatgtaattgctaagcggatta

SEQ ID NO: 322909 - DNA, 25 bp, Artificial
  probe
  misc_feature (1)..(25): SEQ ID NO: 2351; WAN024B3G; Start 772; Stop 796
catgtaattgctaagcggattattg

SEQ ID NO: 322910 - DNA, 25 bp, Artificial
  probe
  misc_feature (1)..(25): SEQ ID NO: 2351; WAN024B3G; Start 1142; Stop 1166
ctacagtggacgagtatgttcagta

SEQ ID NO: 322911 - DNA, 25 bp, Artificial
  probe
  misc_feature (1)..(25): SEQ ID NO: 2351; WAN024B3G; Start 771; Stop 795
tcatgtaattgctaagcggattatt

SEQ ID NO: 322912 - DNA, 25 bp, Artificial
  probe
  misc_feature (1)..(25): SEQ ID NO: 2351; WAN024B3G; Start 835; Stop 859
ttagtcagtattgtattggttcctt

SEQ ID NO: 322913 - DNA, 25 bp, Artificial
  probe
  misc_feature (1)..(25): SEQ ID NO: 2351; WAN024B3G; Start 1275; Stop 1299
tgtggcttatattgataattggaca

SEQ ID NO: 322914 - DNA, 25 bp, Artificial
  probe
  misc_feature (1)..(25): SEQ ID NO: 2351; WAN024B3G; Start 1340; Stop 1364
ttgtatttatgagagatggagcgaa

SEQ ID NO: 322915 - DNA, 25 bp, Artificial
  probe
  misc_feature (1)..(25): SEQ ID NO: 2351; WAN024B3G; Start 1341; Stop 1365
tgtatttatgagagatggagcgaag

SEQ ID NO: 322916 - DNA, 25 bp, Artificial
  probe
  misc_feature (1)..(25): SEQ ID NO: 2351; WAN024B3G; Start 1204; Stop 1228
ggtattacaggtttatggcaggtta

SEQ ID NO: 322917 - DNA, 25 bp, Artificial
  probe
  misc_feature (1)..(25): SEQ ID NO: 2351; WAN024B3G; Start 1106; Stop 1130
taaagggagatatgagtttggttgg

SEQ ID NO: 322918 - DNA, 25 bp, Artificial
  probe
  misc_feature (1)..(25): SEQ ID NO: 2351; WAN024B3G; Start 814; Stop 838
gtagggctgatactatgtggtttag

SEQ ID NO: 322919 - DNA, 25 bp, Artificial
  probe
  misc_feature (1)..(25): SEQ ID NO: 2351; WAN024B3G; Start 1339; Stop 1363
gttgtatttatgagagatggagcga

SEQ ID NO: 322920 - DNA, 25 bp, Artificial
  probe
  misc_feature (1)..(25): SEQ ID NO: 2351; WAN024B3G; Start 1338; Stop 1362
agttgtatttatgagagatggagcg

SEQ ID NO: 322921 - DNA, 25 bp, Artificial
  probe
  misc_feature (1)..(25): SEQ ID NO: 2351; WAN024B3G; Start 1206; Stop 1230
tattacaggtttatggcaggttagc

SEQ ID NO: 322922 - DNA, 25 bp, Artificial
  probe
  misc_feature (1)..(25): SEQ ID NO: 2351; WAN024B3G; Start 1205; Stop 1229
gtattacaggtttatggcaggttag

SEQ ID NO: 322923 - DNA, 25 bp, Artificial
  probe
  misc_feature (1)..(25): SEQ ID NO: 2351; WAN024B3G; Start 1105; Stop 1129
ctaaagggagatatgagtttggttg

SEQ ID NO: 322924 - DNA, 25 bp, Artificial
  probe
  misc_feature (1)..(25): SEQ ID NO: 2351; WAN024B3G; Start 1276; Stop 1300
gtggcttatattgataattggacaa

SEQ ID NO: 322925 - DNA, 25 bp, Artificial
  probe
  misc_feature (1)..(25): SEQ ID NO: 2351; WAN024B3G; Start 837; Stop 861
agtcagtattgtattggttcctttg

SEQ ID NO: 322926 - DNA, 25 bp, Artificial
  probe
  misc_feature (1)..(25): SEQ ID NO: 2351; WAN024B3G; Start 830; Stop 854
gtggtttagtcagtattgtattggt

SEQ ID NO: 322927 - DNA, 25 bp, Artificial
  probe
  misc_feature (1)..(25): SEQ ID NO: 2351; WAN024B3G; Start 829; Stop 853
tgtggtttagtcagtattgtattgg

SEQ ID NO: 322928 - DNA, 25 bp, Artificial
  probe
  misc_feature (1)..(25): SEQ ID NO: 2351; WAN024B3G; Start 1337; Stop 1361
aagttgtatttatgagagatggagc

SEQ ID NO: 322929 - DNA, 25 bp, Artificial
  probe
  misc_feature (1)..(25): SEQ ID NO: 2351; WAN024B3G; Start 1274; Stop 1298
atgtggcttatattgataattggac

SEQ ID NO: 322930 - DNA, 25 bp, Artificial
  probe
  misc_feature (1)..(25): SEQ ID NO: 2351; WAN024B3G; Start 813; Stop 837
ggtagggctgatactatgtggttta

SEQ ID NO: 322931 - DNA, 25 bp, Artificial
  probe
  misc_feature (1)..(25): SEQ ID NO: 2351; WAN024B3G; Start 842; Stop 866
gtattgtattggttcctttgattcg

SEQ ID NO: 322932 - DNA, 25 bp, Artificial
  probe
  misc_feature (1)..(25): SEQ ID NO: 2351; WAN024B3G; Start 1104; Stop 1128
tctaaagggagatatgagtttggtt

SEQ ID NO: 322933 - DNA, 25 bp, Artificial
  probe
  misc_feature (1)..(25): SEQ ID NO: 2351; WAN024B3G; Start 598; Stop 622
cttccaggagagagctacgatattg

SEQ ID NO: 322934 - DNA, 25 bp, Artificial
  probe
  misc_feature (1)..(25): SEQ ID NO: 2352; WAN024GDW; Start 68; Stop 92
atttcctgaaggtgatagccgatat

SEQ ID NO: 322935 - DNA, 25 bp, Artificial
  probe
  misc_feature (1)..(25): SEQ ID NO: 2352; WAN024GDW; Start 69; Stop 93
tttcctgaaggtgatagccgatatt

SEQ ID NO: 322936 - DNA, 25 bp, Artificial
  probe
  misc_feature (1)..(25): SEQ ID NO: 2352; WAN024GDW; Start 67; Stop 91
aatttcctgaaggtgatagccgata

SEQ ID NO: 322937 - DNA, 25 bp, Artificial
  probe
  misc_feature (1)..(25): SEQ ID NO: 2352; WAN024GDW; Start 58; Stop 82
tttagaatcaatttcctgaaggtga

SEQ ID NO: 322938 - DNA, 25 bp, Artificial
  probe
  misc_feature (1)..(25): SEQ ID NO: 2352; WAN024GDW; Start 66; Stop 90
caatttcctgaaggtgatagccgat

SEQ ID NO: 322939 - DNA, 25 bp, Artificial
  probe
  misc_feature (1)..(25): SEQ ID NO: 2352; WAN024GDW; Start 62; Stop 86
gaatcaatttcctgaaggtgatagc

SEQ ID NO: 322940 - DNA, 25 bp, Artificial
  probe
  misc_feature (1)..(25): SEQ ID NO: 2352; WAN024GDW; Start 41; Stop 65
tggacaacctctgctattttagaat

SEQ ID NO: 322941 - DNA, 25 bp, Artificial
  probe
  misc_feature (1)..(25): SEQ ID NO: 2352; WAN024GDW; Start 63; Stop 87
aatcaatttcctgaaggtgatagcc

SEQ ID NO: 322942 - DNA, 25 bp, Artificial
  probe
  misc_feature (1)..(25): SEQ ID NO: 2352; WAN024GDW; Start 42; Stop 66
ggacaacctctgctattttagaatc

SEQ ID NO: 322943 - DNA, 25 bp, Artificial
  probe
  misc_feature (1)..(25): SEQ ID NO: 2352; WAN024GDW; Start 40; Stop 64
ctggacaacctctgctattttagaa

SEQ ID NO: 322944 - DNA, 25 bp, Artificial
  probe
  misc_feature (1)..(25): SEQ ID NO: 2352; WAN024GDW; Start 61; Stop 85
agaatcaatttcctgaaggtgatag

SEQ ID NO: 322945 - DNA, 25 bp, Artificial
  probe
  misc_feature (1)..(25): SEQ ID NO: 2352; WAN024GDW; Start 34; Stop 58
acattgctggacaacctctgctatt

SEQ ID NO: 322946 - DNA, 25 bp, Artificial
  probe
  misc_feature (1)..(25): SEQ ID NO: 2352; WAN024GDW; Start 43; Stop 67
gacaacctctgctattttagaatca

SEQ ID NO: 322947 - DNA, 25 bp, Artificial
  probe
  misc_feature (1)..(25): SEQ ID NO: 2352; WAN024GDW; Start 35; Stop 59
cattgctggacaacctctgctattt

SEQ ID NO: 322948 - DNA, 25 bp, Artificial
  probe
  misc_feature (1)..(25): SEQ ID NO: 2352; WAN024GDW; Start 44; Stop 68
acaacctctgctattttagaatcaa

SEQ ID NO: 322949 - DNA, 25 bp, Artificial
  probe
  misc_feature (1)..(25): SEQ ID NO: 2352; WAN024GDW; Start 59; Stop 83
ttagaatcaatttcctgaaggtgat

SEQ ID NO: 322950 - DNA, 25 bp, Artificial
  probe
  misc_feature (1)..(25): SEQ ID NO: 2352; WAN024GDW; Start 65; Stop 89
tcaatttcctgaaggtgatagccga

SEQ ID NO: 322951 - DNA, 25 bp, Artificial
  probe
  misc_feature (1)..(25): SEQ ID NO: 2352; WAN024GDW; Start 33; Stop 57
gacattgctggacaacctctgctat

SEQ ID NO: 322952 - DNA, 25 bp, Artificial
  probe
  misc_feature (1)..(25): SEQ ID NO: 2352; WAN024GDW; Start 60; Stop 84
tagaatcaatttcctgaaggtgata

SEQ ID NO: 322953 - DNA, 25 bp, Artificial
  probe
  misc_feature (1)..(25): SEQ ID NO: 2352; WAN024GDW; Start 37; Stop 61
ttgctggacaacctctgctatttta

SEQ ID NO: 322954 - DNA, 25 bp, Artificial
  probe
  misc_feature (1)..(25): SEQ ID NO: 2352; WAN024GDW; Start 39; Stop 63
gctggacaacctctgctattttaga

SEQ ID NO: 322955 - DNA, 25 bp, Artificial
  probe
  misc_feature (1)..(25): SEQ ID NO: 2352; WAN024GDW; Start 38; Stop 62
tgctggacaacctctgctattttag

SEQ ID NO: 322956 - DNA, 25 bp, Artificial
  probe
  misc_feature (1)..(25): SEQ ID NO: 2352; WAN024GDW; Start 57; Stop 81
ttttagaatcaatttcctgaaggtg

SEQ ID NO: 322957 - DNA, 25 bp, Artificial
  probe
  misc_feature (1)..(25): SEQ ID NO: 2352; WAN024GDW; Start 45; Stop 69
caacctctgctattttagaatcaat

SEQ ID NO: 322958 - DNA, 25 bp, Artificial
  probe
  misc_feature (1)..(25): SEQ ID NO: 2352; WAN024GDW; Start 64; Stop 88
atcaatttcctgaaggtgatagccg

SEQ ID NO: 322959 - DNA, 25 bp, Artificial
  probe
  misc_feature (1)..(25): SEQ ID NO: 2352; WAN024GDW; Start 36; Stop 60
attgctggacaacctctgctatttt

SEQ ID NO: 322960 - DNA, 25 bp, Artificial
  probe
  misc_feature (1)..(25): SEQ ID NO: 2352; WAN024GDW; Start 47; Stop 71
acctctgctattttagaatcaattt

SEQ ID NO: 322961 - DNA, 25 bp, Artificial
  probe
  misc_feature (1)..(25): SEQ ID NO: 2352; WAN024GDW; Start 46; Stop 70
aacctctgctattttagaatcaatt

SEQ ID NO: 322962 - DNA, 25 bp, Artificial
  probe
  misc_feature (1)..(25): SEQ ID NO: 2352; WAN024GDW; Start 51; Stop 75
ctgctattttagaatcaatttcctg

SEQ ID NO: 322963 - DNA, 25 bp, Artificial
  probe
  misc_feature (1)..(25): SEQ ID NO: 2352; WAN024GDW; Start 56; Stop 80
attttagaatcaatttcctgaaggt

SEQ ID NO: 322964 - DNA, 25 bp, Artificial
  probe
  misc_feature (1)..(25): SEQ ID NO: 2352; WAN024GDW; Start 52; Stop 76
tgctattttagaatcaatttcctga

SEQ ID NO: 322965 - DNA, 25 bp, Artificial
  probe
  misc_feature (1)..(25): SEQ ID NO: 2352; WAN024GDW; Start 50; Stop 74
tctgctattttagaatcaatttcct

SEQ ID NO: 322966 - DNA, 25 bp, Artificial
  probe
  misc_feature (1)..(25): SEQ ID NO: 2352; WAN024GDW; Start 49; Stop 73
ctctgctattttagaatcaatttcc

SEQ ID NO: 322967 - DNA, 25 bp, Artificial
  probe
  misc_feature (1)..(25): SEQ ID NO: 2353; WAN024GC3; Start 259; Stop 283
attcaaggtcaagttcatcttagaa

SEQ ID NO: 322968 - DNA, 25 bp, Artificial
  probe
  misc_feature (1)..(25): SEQ ID NO: 2353; WAN024GC3; Start 258; Stop 282
aattcaaggtcaagttcatcttaga

SEQ ID NO: 322969 - DNA, 25 bp, Artificial
  probe
  misc_feature (1)..(25): SEQ ID NO: 2353; WAN024GC3; Start 133; Stop 157
ttccttatacttggcaatctggtcg

SEQ ID NO: 322970 - DNA, 25 bp, Artificial
  probe
  misc_feature (1)..(25): SEQ ID NO: 2353; WAN024GC3; Start 56; Stop 80
ttctgctcgataatgtgctcaatag

SEQ ID NO: 322971 - DNA, 25 bp, Artificial
  probe
  misc_feature (1)..(25): SEQ ID NO: 2353; WAN024GC3; Start 58; Stop 82
ctgctcgataatgtgctcaatagtt

SEQ ID NO: 322972 - DNA, 25 bp, Artificial
  probe
  misc_feature (1)..(25): SEQ ID NO: 2353; WAN024GC3; Start 20; Stop 44
tctttctctttcaaatcaccaacag

SEQ ID NO: 322973 - DNA, 25 bp, Artificial
  probe
  misc_feature (1)..(25): SEQ ID NO: 2353; WAN024GC3; Start 21; Stop 45
ctttctctttcaaatcaccaacagg

SEQ ID NO: 322974 - DNA, 25 bp, Artificial
  probe
  misc_feature (1)..(25): SEQ ID NO: 2353; WAN024GC3; Start 130; Stop 154
catttccttatacttggcaatctgg

SEQ ID NO: 322975 - DNA, 25 bp, Artificial
  probe
  misc_feature (1)..(25): SEQ ID NO: 2353; WAN024GC3; Start 131; Stop 155
atttccttatacttggcaatctggt

SEQ ID NO: 322976 - DNA, 25 bp, Artificial
  probe
  misc_feature (1)..(25): SEQ ID NO: 2353; WAN024GC3; Start 26; Stop 50
tctttcaaatcaccaacagggatat

SEQ ID NO: 322977 - DNA, 25 bp, Artificial
  probe
  misc_feature (1)..(25): SEQ ID NO: 2353; WAN024GC3; Start 129; Stop 153
gcatttccttatacttggcaatctg

SEQ ID NO: 322978 - DNA, 25 bp, Artificial
  probe
  misc_feature (1)..(25): SEQ ID NO: 2353; WAN024GC3; Start 19; Stop 43
ttctttctctttcaaatcaccaaca

SEQ ID NO: 322979 - DNA, 25 bp, Artificial
  probe
  misc_feature (1)..(25): SEQ ID NO: 2353; WAN024GC3; Start 17; Stop 41
tgttctttctctttcaaatcaccaa

SEQ ID NO: 322980 - DNA, 25 bp, Artificial
  probe
  misc_feature (1)..(25): SEQ ID NO: 2353; WAN024GC3; Start 27; Stop 51
ctttcaaatcaccaacagggatatt

SEQ ID NO: 322981 - DNA, 25 bp, Artificial
  probe
  misc_feature (1)..(25): SEQ ID NO: 2353; WAN024GC3; Start 25; Stop 49
ctctttcaaatcaccaacagggata

SEQ ID NO: 322982 - DNA, 25 bp, Artificial
  probe
  misc_feature (1)..(25): SEQ ID NO: 2353; WAN024GC3; Start 132; Stop 156
tttccttatacttggcaatctggtc

SEQ ID NO: 322983 - DNA, 25 bp, Artificial
  probe
  misc_feature (1)..(25): SEQ ID NO: 2353; WAN024GC3; Start 2; Stop 26
tggatgagttgagattgttctttct

SEQ ID NO: 322984 - DNA, 25 bp, Artificial
  probe
  misc_feature (1)..(25): SEQ ID NO: 2353; WAN024GC3; Start 1; Stop 25
atggatgagttgagattgttctttc

SEQ ID NO: 322985 - DNA, 25 bp, Artificial
  probe
  misc_feature (1)..(25): SEQ ID NO: 2353; WAN024GC3; Start 28; Stop 52
tttcaaatcaccaacagggatattg

SEQ ID NO: 322986 - DNA, 25 bp, Artificial
  probe
  misc_feature (1)..(25): SEQ ID NO: 2353; WAN024GC3; Start 57; Stop 81
tctgctcgataatgtgctcaatagt

SEQ ID NO: 322987 - DNA, 25 bp, Artificial
  probe
  misc_feature (1)..(25): SEQ ID NO: 2353; WAN024GC3; Start 18; Stop 42
gttctttctctttcaaatcaccaac

SEQ ID NO: 322988 - DNA, 25 bp, Artificial
  probe
  misc_feature (1)..(25): SEQ ID NO: 2353; WAN024GC3; Start 16; Stop 40
ttgttctttctctttcaaatcacca

SEQ ID NO: 322989 - DNA, 25 bp, Artificial
  probe
  misc_feature (1)..(25): SEQ ID NO: 2353; WAN024GC3; Start 22; Stop 46
tttctctttcaaatcaccaacaggg

SEQ ID NO: 322990 - DNA, 25 bp, Artificial
  probe
  misc_feature (1)..(25): SEQ ID NO: 2353; WAN024GC3; Start 273; Stop 297
tcatcttagaaccagcttcatctag

SEQ ID NO: 322991 - DNA, 25 bp, Artificial
  probe
  misc_feature (1)..(25): SEQ ID NO: 2353; WAN024GC3; Start 272; Stop 296
ttcatcttagaaccagcttcatcta

SEQ ID NO: 322992 - DNA, 25 bp, Artificial
  probe
  misc_feature (1)..(25): SEQ ID NO: 2353; WAN024GC3; Start 24; Stop 48
tctctttcaaatcaccaacagggat

SEQ ID NO: 322993 - DNA, 25 bp, Artificial
  probe
  misc_feature (1)..(25): SEQ ID NO: 2353; WAN024GC3; Start 15; Stop 39
attgttctttctctttcaaatcacc

SEQ ID NO: 322994 - DNA, 25 bp, Artificial
  probe
  misc_feature (1)..(25): SEQ ID NO: 2353; WAN024GC3; Start 23; Stop 47
ttctctttcaaatcaccaacaggga

SEQ ID NO: 322995 - DNA, 25 bp, Artificial
  probe
  misc_feature (1)..(25): SEQ ID NO: 2353; WAN024GC3; Start 189; Stop 213
ctcgtgtagcttgagacttgagatt

SEQ ID NO: 322996 - DNA, 25 bp, Artificial
  probe
  misc_feature (1)..(25): SEQ ID NO: 2353; WAN024GC3; Start 55; Stop 79
tttctgctcgataatgtgctcaata

SEQ ID NO: 322997 - DNA, 25 bp, Artificial
  probe
  misc_feature (1)..(25): SEQ ID NO: 2353; WAN024GC3; Start 59; Stop 83
tgctcgataatgtgctcaatagttt

SEQ ID NO: 322998 - DNA, 25 bp, Artificial
  probe
  misc_feature (1)..(25): SEQ ID NO: 2353; WAN024GC3; Start 257; Stop 281
aaattcaaggtcaagttcatcttag

SEQ ID NO: 322999 - DNA, 25 bp, Artificial
  probe
  misc_feature (1)..(25): SEQ ID NO: 2353; WAN024GC3; Start 179; Stop 203
aaatcttcttctcgtgtagcttgag

SEQ ID NO: 323000 - DNA, 25 bp, Artificial
  probe
  misc_feature (1)..(25): SEQ ID NO: 2354; WAN024CW7; Start 43; Stop 67
gttgaataccatcttccagactacc

SEQ ID NO: 323001 - DNA, 25 bp, Artificial
  probe
  misc_feature (1)..(25): SEQ ID NO: 2354; WAN024CW7; Start 44; Stop 68
ttgaataccatcttccagactacca

SEQ ID NO: 323002 - DNA, 25 bp, Artificial
  probe
  misc_feature (1)..(25): SEQ ID NO: 2354; WAN024CW7; Start 42; Stop 66
cgttgaataccatcttccagactac

SEQ ID NO: 323003 - DNA, 25 bp, Artificial
  probe
  misc_feature (1)..(25): SEQ ID NO: 2354; WAN024CW7; Start 45; Stop 69
tgaataccatcttccagactaccac

SEQ ID NO: 323004 - DNA, 25 bp, Artificial
  probe
  misc_feature (1)..(25): SEQ ID NO: 2354; WAN024CW7; Start 52; Stop 76
catcttccagactaccaccatacaa

SEQ ID NO: 323005 - DNA, 25 bp, Artificial
  probe
  misc_feature (1)..(25): SEQ ID NO: 2354; WAN024CW7; Start 49; Stop 73
taccatcttccagactaccaccata

SEQ ID NO: 323006 - DNA, 25 bp, Artificial
  probe
  misc_feature (1)..(25): SEQ ID NO: 2354; WAN024CW7; Start 46; Stop 70
gaataccatcttccagactaccacc

SEQ ID NO: 323007 - DNA, 25 bp, Artificial
  probe
  misc_feature (1)..(25): SEQ ID NO: 2354; WAN024CW7; Start 145; Stop 169
gcaggtgaatatagaccaagtgaat

SEQ ID NO: 323008 - DNA, 25 bp, Artificial
  probe
  misc_feature (1)..(25): SEQ ID NO: 2354; WAN024CW7; Start 48; Stop 72
ataccatcttccagactaccaccat

SEQ ID NO: 323009 - DNA, 25 bp, Artificial
  probe
  misc_feature (1)..(25): SEQ ID NO: 2354; WAN024CW7; Start 47; Stop 71
aataccatcttccagactaccacca

SEQ ID NO: 323010 - DNA, 25 bp, Artificial
  probe
  misc_feature (1)..(25): SEQ ID NO: 2354; WAN024CW7; Start 61; Stop 85
gactaccaccatacaaatcatctcc

SEQ ID NO: 323011 - DNA, 25 bp, Artificial
  probe
  misc_feature (1)..(25): SEQ ID NO: 2354; WAN024CW7; Start 58; Stop 82
ccagactaccaccatacaaatcatc

SEQ ID NO: 323012 - DNA, 25 bp, Artificial
  probe
  misc_feature (1)..(25): SEQ ID NO: 2354; WAN024CW7; Start 55; Stop 79
cttccagactaccaccatacaaatc

SEQ ID NO: 323013 - DNA, 25 bp, Artificial
  probe
  misc_feature (1)..(25): SEQ ID NO: 2354; WAN024CW7; Start 60; Stop 84
agactaccaccatacaaatcatctc

SEQ ID NO: 323014 - DNA, 25 bp, Artificial
  probe
  misc_feature (1)..(25): SEQ ID NO: 2354; WAN024CW7; Start 59; Stop 83
cagactaccaccatacaaatcatct

SEQ ID NO: 323015 - DNA, 25 bp, Artificial
  probe
  misc_feature (1)..(25): SEQ ID NO: 2354; WAN024CW7; Start 57; Stop 81
tccagactaccaccatacaaatcat

SEQ ID NO: 323016 - DNA, 25 bp, Artificial
  probe
  misc_feature (1)..(25): SEQ ID NO: 2354; WAN024CW7; Start 56; Stop 80
ttccagactaccaccatacaaatca

SEQ ID NO: 323017 - DNA, 25 bp, Artificial
  probe
  misc_feature (1)..(25): SEQ ID NO: 2354; WAN024CW7; Start 41; Stop 65
acgttgaataccatcttccagacta

SEQ ID NO: 323018 - DNA, 25 bp, Artificial
  probe
  misc_feature (1)..(25): SEQ ID NO: 2354; WAN024CW7; Start 54; Stop 78
tcttccagactaccaccatacaaat

SEQ ID NO: 323019 - DNA, 25 bp, Artificial
  probe
  misc_feature (1)..(25): SEQ ID NO: 2354; WAN024CW7; Start 53; Stop 77
atcttccagactaccaccatacaaa

SEQ ID NO: 323020 - DNA, 25 bp, Artificial
  probe
  misc_feature (1)..(25): SEQ ID NO: 2354; WAN024CW7; Start 64; Stop 88
taccaccatacaaatcatctcccag

SEQ ID NO: 323021 - DNA, 25 bp, Artificial
  probe
  misc_feature (1)..(25): SEQ ID NO: 2354; WAN024CW7; Start 63; Stop 87
ctaccaccatacaaatcatctccca

SEQ ID NO: 323022 - DNA, 25 bp, Artificial
  probe
  misc_feature (1)..(25): SEQ ID NO: 2354; WAN024CW7; Start 62; Stop 86
actaccaccatacaaatcatctccc

SEQ ID NO: 323023 - DNA, 25 bp, Artificial
  probe
  misc_feature (1)..(25): SEQ ID NO: 2354; WAN024CW7; Start 146; Stop 170
caggtgaatatagaccaagtgaata

SEQ ID NO: 323024 - DNA, 25 bp, Artificial
  probe
  misc_feature (1)..(25): SEQ ID NO: 2354; WAN024CW7; Start 70; Stop 94
catacaaatcatctcccagcaaagg

SEQ ID NO: 323025 - DNA, 25 bp, Artificial
  probe
  misc_feature (1)..(25): SEQ ID NO: 2354; WAN024CW7; Start 69; Stop 93
ccatacaaatcatctcccagcaaag

SEQ ID NO: 323026 - DNA, 25 bp, Artificial
  probe
  misc_feature (1)..(25): SEQ ID NO: 2354; WAN024CW7; Start 50; Stop 74
accatcttccagactaccaccatac

SEQ ID NO: 323027 - DNA, 25 bp, Artificial
  probe
  misc_feature (1)..(25): SEQ ID NO: 2354; WAN024CW7; Start 51; Stop 75
ccatcttccagactaccaccataca

SEQ ID NO: 323028 - DNA, 25 bp, Artificial
  probe
  misc_feature (1)..(25): SEQ ID NO: 2354; WAN024CW7; Start 68; Stop 92
accatacaaatcatctcccagcaaa

SEQ ID NO: 323029 - DNA, 25 bp, Artificial
  probe
  misc_feature (1)..(25): SEQ ID NO: 2354; WAN024CW7; Start 186; Stop 210
acaatcttgtatgaagtatgggcat

SEQ ID NO: 323030 - DNA, 25 bp, Artificial
  probe
  misc_feature (1)..(25): SEQ ID NO: 2354; WAN024CW7; Start 40; Stop 64
gacgttgaataccatcttccagact

SEQ ID NO: 323031 - DNA, 25 bp, Artificial
  probe
  misc_feature (1)..(25): SEQ ID NO: 2354; WAN024CW7; Start 12; Stop 36
aaggataggtaatggcaatgcagag

SEQ ID NO: 323032 - DNA, 25 bp, Artificial
  probe
  misc_feature (1)..(25): SEQ ID NO: 2354; WAN024CW7; Start 187; Stop 211
caatcttgtatgaagtatgggcata

SEQ ID NO: 323033 - DNA, 25 bp, Artificial
  probe
  misc_feature (1)..(25): SEQ ID NO: 2355; WAN024CBV; Start 124; Stop 148
cagattgttgtaatagcatcgccaa

SEQ ID NO: 323034 - DNA, 25 bp, Artificial
  probe
  misc_feature (1)..(25): SEQ ID NO: 2355; WAN024CBV; Start 62; Stop 86
ccatatctagttaccacaaggcgtt

SEQ ID NO: 323035 - DNA, 25 bp, Artificial
  probe
  misc_feature (1)..(25): SEQ ID NO: 2355; WAN024CBV; Start 93; Stop 117
tgggtctctcctatttacatcattg

SEQ ID NO: 323036 - DNA, 25 bp, Artificial
  probe
  misc_feature (1)..(25): SEQ ID NO: 2355; WAN024CBV; Start 92; Stop 116
ttgggtctctcctatttacatcatt

SEQ ID NO: 323037 - DNA, 25 bp, Artificial
  probe
  misc_feature (1)..(25): SEQ ID NO: 2355; WAN024CBV; Start 91; Stop 115
tttgggtctctcctatttacatcat

SEQ ID NO: 323038 - DNA, 25 bp, Artificial
  probe
  misc_feature (1)..(25): SEQ ID NO: 2355; WAN024CBV; Start 90; Stop 114
atttgggtctctcctatttacatca

SEQ ID NO: 323039 - DNA, 25 bp, Artificial
  probe
  misc_feature (1)..(25): SEQ ID NO: 2355; WAN024CBV; Start 126; Stop 150
gattgttgtaatagcatcgccaatt

SEQ ID NO: 323040 - DNA, 25 bp, Artificial
  probe
  misc_feature (1)..(25): SEQ ID NO: 2355; WAN024CBV; Start 65; Stop 89
tatctagttaccacaaggcgtttaa

SEQ ID NO: 323041 - DNA, 25 bp, Artificial
  probe
  misc_feature (1)..(25): SEQ ID NO: 2355; WAN024CBV; Start 64; Stop 88
atatctagttaccacaaggcgttta

SEQ ID NO: 323042 - DNA, 25 bp, Artificial
  probe
  misc_feature (1)..(25): SEQ ID NO: 2355; WAN024CBV; Start 125; Stop 149
agattgttgtaatagcatcgccaat

SEQ ID NO: 323043 - DNA, 25 bp, Artificial
  probe
  misc_feature (1)..(25): SEQ ID NO: 2355; WAN024CBV; Start 63; Stop 87
catatctagttaccacaaggcgttt

SEQ ID NO: 323044 - DNA, 25 bp, Artificial
  probe
  misc_feature (1)..(25): SEQ ID NO: 2355; WAN024CBV; Start 58; Stop 82
atacccatatctagttaccacaagg

SEQ ID NO: 323045 - DNA, 25 bp, Artificial
  probe
  misc_feature (1)..(25): SEQ ID NO: 2355; WAN024CBV; Start 59; Stop 83
tacccatatctagttaccacaaggc

SEQ ID NO: 323046 - DNA, 25 bp, Artificial
  probe
  misc_feature (1)..(25): SEQ ID NO: 2355; WAN024CBV; Start 98; Stop 122
ctctcctatttacatcattgttggc

SEQ ID NO: 323047 - DNA, 25 bp, Artificial
  probe
  misc_feature (1)..(25): SEQ ID NO: 2355; WAN024CBV; Start 94; Stop 118
gggtctctcctatttacatcattgt

SEQ ID NO: 323048 - DNA, 25 bp, Artificial
  probe
  misc_feature (1)..(25): SEQ ID NO: 2355; WAN024CBV; Start 89; Stop 113
aatttgggtctctcctatttacatc

SEQ ID NO: 323049 - DNA, 25 bp, Artificial
  probe
  misc_feature (1)..(25): SEQ ID NO: 2355; WAN024CBV; Start 123; Stop 147
ccagattgttgtaatagcatcgcca

SEQ ID NO: 323050 - DNA, 25 bp, Artificial
  probe
  misc_feature (1)..(25): SEQ ID NO: 2355; WAN024CBV; Start 163; Stop 187
gcaaatccattaatagcagacagtg

SEQ ID NO: 323051 - DNA, 25 bp, Artificial
  probe
  misc_feature (1)..(25): SEQ ID NO: 2355; WAN024CBV; Start 68; Stop 92
ctagttaccacaaggcgtttaaatt

SEQ ID NO: 323052 - DNA, 25 bp, Artificial
  probe
  misc_feature (1)..(25): SEQ ID NO: 2355; WAN024CBV; Start 67; Stop 91
tctagttaccacaaggcgtttaaat

SEQ ID NO: 323053 - DNA, 25 bp, Artificial
  probe
  misc_feature (1)..(25): SEQ ID NO: 2355; WAN024CBV; Start 66; Stop 90
atctagttaccacaaggcgtttaaa

SEQ ID NO: 323054 - DNA, 25 bp, Artificial
  probe
  misc_feature (1)..(25): SEQ ID NO: 2355; WAN024CBV; Start 97; Stop 121
tctctcctatttacatcattgttgg

SEQ ID NO: 323055 - DNA, 25 bp, Artificial
  probe
  misc_feature (1)..(25): SEQ ID NO: 2355; WAN024CBV; Start 95; Stop 119
ggtctctcctatttacatcattgtt

SEQ ID NO: 323056 - DNA, 25 bp, Artificial
  probe
  misc_feature (1)..(25): SEQ ID NO: 2355; WAN024CBV; Start 57; Stop 81
aatacccatatctagttaccacaag

SEQ ID NO: 323057 - DNA, 25 bp, Artificial
  probe
  misc_feature (1)..(25): SEQ ID NO: 2355; WAN024CBV; Start 69; Stop 93
tagttaccacaaggcgtttaaattt

SEQ ID NO: 323058 - DNA, 25 bp, Artificial
  probe
  misc_feature (1)..(25): SEQ ID NO: 2355; WAN024CBV; Start 153; Stop 177
catccaagctgcaaatccattaata

SEQ ID NO: 323059 - DNA, 25 bp, Artificial
  probe
  misc_feature (1)..(25): SEQ ID NO: 2355; WAN024CBV; Start 154; Stop 178
atccaagctgcaaatccattaatag

SEQ ID NO: 323060 - DNA, 25 bp, Artificial
  probe
  misc_feature (1)..(25): SEQ ID NO: 2355; WAN024CBV; Start 83; Stop 107
cgtttaaatttgggtctctcctatt

SEQ ID NO: 323061 - DNA, 25 bp, Artificial
  probe
  misc_feature (1)..(25): SEQ ID NO: 2355; WAN024CBV; Start 82; Stop 106
gcgtttaaatttgggtctctcctat

SEQ ID NO: 323062 - DNA, 25 bp, Artificial
  probe
  misc_feature (1)..(25): SEQ ID NO: 2355; WAN024CBV; Start 70; Stop 94
agttaccacaaggcgtttaaatttg

SEQ ID NO: 323063 - DNA, 25 bp, Artificial
  probe
  misc_feature (1)..(25): SEQ ID NO: 2355; WAN024CBV; Start 128; Stop 152
ttgttgtaatagcatcgccaattga

SEQ ID NO: 323064 - DNA, 25 bp, Artificial
  probe
  misc_feature (1)..(25): SEQ ID NO: 2355; WAN024CBV; Start 96; Stop 120
gtctctcctatttacatcattgttg

SEQ ID NO: 323065 - DNA, 25 bp, Artificial
  probe
  misc_feature (1)..(25): SEQ ID NO: 2355; WAN024CBV; Start 152; Stop 176
acatccaagctgcaaatccattaat

SEQ ID NO: 323066 - DNA, 25 bp, Artificial
  probe
  misc_feature (1)..(25): SEQ ID NO: 2356; WAN024GFX; Start 1159; Stop 1183
cgtatgattatcttcggaacactct

SEQ ID NO: 323067 - DNA, 25 bp, Artificial
  probe
  misc_feature (1)..(25): SEQ ID NO: 2356; WAN024GFX; Start 156; Stop 180
tcttacaggtatcggtgctatcatc

SEQ ID NO: 323068 - DNA, 25 bp, Artificial
  probe
  misc_feature (1)..(25): SEQ ID NO: 2356; WAN024GFX; Start 155; Stop 179
ctcttacaggtatcggtgctatcat

SEQ ID NO: 323069 - DNA, 25 bp, Artificial
  probe
  misc_feature (1)..(25): SEQ ID NO: 2356; WAN024GFX; Start 1161; Stop 1185
tatgattatcttcggaacactcttg

SEQ ID NO: 323070 - DNA, 25 bp, Artificial
  probe
  misc_feature (1)..(25): SEQ ID NO: 2356; WAN024GFX; Start 1160; Stop 1184
gtatgattatcttcggaacactctt

SEQ ID NO: 323071 - DNA, 25 bp, Artificial
  probe
  misc_feature (1)..(25): SEQ ID NO: 2356; WAN024GFX; Start 1288; Stop 1312
attactcactctactcttgaaggac

SEQ ID NO: 323072 - DNA, 25 bp, Artificial
  probe
  misc_feature (1)..(25): SEQ ID NO: 2356; WAN024GFX; Start 1286; Stop 1310
tgattactcactctactcttgaagg

SEQ ID NO: 323073 - DNA, 25 bp, Artificial
  probe
  misc_feature (1)..(25): SEQ ID NO: 2356; WAN024GFX; Start 1287; Stop 1311
gattactcactctactcttgaagga

SEQ ID NO: 323074 - DNA, 25 bp, Artificial
  probe
  misc_feature (1)..(25): SEQ ID NO: 2356; WAN024GFX; Start 1289; Stop 1313
ttactcactctactcttgaaggacc

SEQ ID NO: 323075 - DNA, 25 bp, Artificial
  probe
  misc_feature (1)..(25): SEQ ID NO: 2356; WAN024GFX; Start 1162; Stop 1186
atgattatcttcggaacactcttgt

SEQ ID NO: 323076 - DNA, 25 bp, Artificial
  probe
  misc_feature (1)..(25): SEQ ID NO: 2356; WAN024GFX; Start 862; Stop 886
ttggaactcttctcacttatcggtt

SEQ ID NO: 323077 - DNA, 25 bp, Artificial
  probe
  misc_feature (1)..(25): SEQ ID NO: 2356; WAN024GFX; Start 428; Stop 452
aatggtatgctgataacaatggtgt

SEQ ID NO: 323078 - DNA, 25 bp, Artificial
  probe
  misc_feature (1)..(25): SEQ ID NO: 2356; WAN024GFX; Start 433; Stop 457
tatgctgataacaatggtgtgagtc

SEQ ID NO: 323079 - DNA, 25 bp, Artificial
  probe
  misc_feature (1)..(25): SEQ ID NO: 2356; WAN024GFX; Start 1293; Stop 1317
tcactctactcttgaaggaccaatc

SEQ ID NO: 323080 - DNA, 25 bp, Artificial
  probe
  misc_feature (1)..(25): SEQ ID NO: 2356; WAN024GFX; Start 1292; Stop 1316
ctcactctactcttgaaggaccaat

SEQ ID NO: 323081 - DNA, 25 bp, Artificial
  probe
  misc_feature (1)..(25): SEQ ID NO: 2356; WAN024GFX; Start 432; Stop 456
gtatgctgataacaatggtgtgagt

SEQ ID NO: 323082 - DNA, 25 bp, Artificial
  probe
  misc_feature (1)..(25): SEQ ID NO: 2356; WAN024GFX; Start 866; Stop 890
aactcttctcacttatcggttcatg

SEQ ID NO: 323083 - DNA, 25 bp, Artificial
  probe
  misc_feature (1)..(25): SEQ ID NO: 2356; WAN024GFX; Start 572; Stop 596
catcaccaatgacatcaactcacat

SEQ ID NO: 323084 - DNA, 25 bp, Artificial
  probe
  misc_feature (1)..(25): SEQ ID NO: 2356; WAN024GFX; Start 1338; Stop 1362
aattggtaacactacaactggtgat

SEQ ID NO: 323085 - DNA, 25 bp, Artificial
  probe
  misc_feature (1)..(25): SEQ ID NO: 2356; WAN024GFX; Start 1127; Stop 1151
ctctcttggttgtaactcgtggtaa

SEQ ID NO: 323086 - DNA, 25 bp, Artificial
  probe
  misc_feature (1)..(25): SEQ ID NO: 2356; WAN024GFX; Start 1340; Stop 1364
ttggtaacactacaactggtgatat

SEQ ID NO: 323087 - DNA, 25 bp, Artificial
  probe
  misc_feature (1)..(25): SEQ ID NO: 2356; WAN024GFX; Start 1339; Stop 1363
attggtaacactacaactggtgata

SEQ ID NO: 323088 - DNA, 25 bp, Artificial
  probe
  misc_feature (1)..(25): SEQ ID NO: 2356; WAN024GFX; Start 581; Stop 605
tgacatcaactcacatgaactacat

SEQ ID NO: 323089 - DNA, 25 bp, Artificial
  probe
  misc_feature (1)..(25): SEQ ID NO: 2356; WAN024GFX; Start 580; Stop 604
atgacatcaactcacatgaactaca

SEQ ID NO: 323090 - DNA, 25 bp, Artificial
  probe
  misc_feature (1)..(25): SEQ ID NO: 2356; WAN024GFX; Start 870; Stop 894
cttctcacttatcggttcatggttc

SEQ ID NO: 323091 - DNA, 25 bp, Artificial
  probe
  misc_feature (1)..(25): SEQ ID NO: 2356; WAN024GFX; Start 429; Stop 453
atggtatgctgataacaatggtgtg

SEQ ID NO: 323092 - DNA, 25 bp, Artificial
  probe
  misc_feature (1)..(25): SEQ ID NO: 2356; WAN024GFX; Start 1290; Stop 1314
tactcactctactcttgaaggacca

SEQ ID NO: 323093 - DNA, 25 bp, Artificial
  probe
  misc_feature (1)..(25): SEQ ID NO: 2356; WAN024GFX; Start 579; Stop 603
aatgacatcaactcacatgaactac

SEQ ID NO: 323094 - DNA, 25 bp, Artificial
  probe
  misc_feature (1)..(25): SEQ ID NO: 2356; WAN024GFX; Start 578; Stop 602
caatgacatcaactcacatgaacta

SEQ ID NO: 323095 - DNA, 25 bp, Artificial
  probe
  misc_feature (1)..(25): SEQ ID NO: 2356; WAN024GFX; Start 437; Stop 461
ctgataacaatggtgtgagtcaagg

SEQ ID NO: 323096 - DNA, 25 bp, Artificial
  probe
  misc_feature (1)..(25): SEQ ID NO: 2356; WAN024GFX; Start 869; Stop 893
tcttctcacttatcggttcatggtt

SEQ ID NO: 323097 - DNA, 25 bp, Artificial
  probe
  misc_feature (1)..(25): SEQ ID NO: 2356; WAN024GFX; Start 873; Stop 897
ctcacttatcggttcatggttcatc

SEQ ID NO: 323098 - DNA, 25 bp, Artificial
  probe
  misc_feature (1)..(25): SEQ ID NO: 2356; WAN024GFX; Start 431; Stop 455
ggtatgctgataacaatggtgtgag

SEQ ID NO: 323099 - DNA, 25 bp, Artificial
  probe
  misc_feature (1)..(25): SEQ ID NO: 2357; WAN024D77; Start 9; Stop 33
tattaaggaggcaggttatcatgtg

SEQ ID NO: 323100 - DNA, 25 bp, Artificial
  probe
  misc_feature (1)..(25): SEQ ID NO: 2357; WAN024D77; Start 8; Stop 32
ctattaaggaggcaggttatcatgt

SEQ ID NO: 323101 - DNA, 25 bp, Artificial
  probe
  misc_feature (1)..(25): SEQ ID NO: 2357; WAN024D77; Start 7; Stop 31
gctattaaggaggcaggttatcatg

SEQ ID NO: 323102 - DNA, 25 bp, Artificial
  probe
  misc_feature (1)..(25): SEQ ID NO: 2357; WAN024D77; Start 316; Stop 340
gagaaggaagcagatatcaccatta

SEQ ID NO: 323103 - DNA, 25 bp, Artificial
  probe
  misc_feature (1)..(25): SEQ ID NO: 2357; WAN024D77; Start 317; Stop 341
agaaggaagcagatatcaccattat

SEQ ID NO: 323104 - DNA, 25 bp, Artificial
  probe
  misc_feature (1)..(25): SEQ ID NO: 2357; WAN024D77; Start 315; Stop 339
agagaaggaagcagatatcaccatt

SEQ ID NO: 323105 - DNA, 25 bp, Artificial
  probe
  misc_feature (1)..(25): SEQ ID NO: 2357; WAN024D77; Start 60; Stop 84
ggattcgcaaattgagggagttatt

SEQ ID NO: 323106 - DNA, 25 bp, Artificial
  probe
  misc_feature (1)..(25): SEQ ID NO: 2357; WAN024D77; Start 62; Stop 86
attcgcaaattgagggagttatttc

SEQ ID NO: 323107 - DNA, 25 bp, Artificial
  probe
  misc_feature (1)..(25): SEQ ID NO: 2357; WAN024D77; Start 61; Stop 85
gattcgcaaattgagggagttattt

SEQ ID NO: 323108 - DNA, 25 bp, Artificial
  probe
  misc_feature (1)..(25): SEQ ID NO: 2357; WAN024D77; Start 319; Stop 343
aaggaagcagatatcaccattatca

SEQ ID NO: 323109 - DNA, 25 bp, Artificial
  probe
  misc_feature (1)..(25): SEQ ID NO: 2357; WAN024D77; Start 321; Stop 345
ggaagcagatatcaccattatcatg

SEQ ID NO: 323110 - DNA, 25 bp, Artificial
  probe
  misc_feature (1)..(25): SEQ ID NO: 2357; WAN024D77; Start 320; Stop 344
aggaagcagatatcaccattatcat

SEQ ID NO: 323111 - DNA, 25 bp, Artificial
  probe
  misc_feature (1)..(25): SEQ ID NO: 2357; WAN024D77; Start 318; Stop 342
gaaggaagcagatatcaccattatc

SEQ ID NO: 323112 - DNA, 25 bp, Artificial
  probe
  misc_feature (1)..(25): SEQ ID NO: 2357; WAN024D77; Start 314; Stop 338
cagagaaggaagcagatatcaccat

SEQ ID NO: 323113 - DNA, 25 bp, Artificial
  probe
  misc_feature (1)..(25): SEQ ID NO: 2357; WAN024D77; Start 63; Stop 87
ttcgcaaattgagggagttatttca

SEQ ID NO: 323114 - DNA, 25 bp, Artificial
  probe
  misc_feature (1)..(25): SEQ ID NO: 2357; WAN024D77; Start 4; Stop 28
gatgctattaaggaggcaggttatc

SEQ ID NO: 323115 - DNA, 25 bp, Artificial
  probe
  misc_feature (1)..(25): SEQ ID NO: 2357; WAN024D77; Start 6; Stop 30
tgctattaaggaggcaggttatcat

SEQ ID NO: 323116 - DNA, 25 bp, Artificial
  probe
  misc_feature (1)..(25): SEQ ID NO: 2357; WAN024D77; Start 5; Stop 29
atgctattaaggaggcaggttatca

SEQ ID NO: 323117 - DNA, 25 bp, Artificial
  probe
  misc_feature (1)..(25): SEQ ID NO: 2357; WAN024D77; Start 59; Stop 83
tggattcgcaaattgagggagttat

SEQ ID NO: 323118 - DNA, 25 bp, Artificial
  probe
  misc_feature (1)..(25): SEQ ID NO: 2357; WAN024D77; Start 366; Stop 390
tcgattggaaccaactgaagaacaa

SEQ ID NO: 323119 - DNA, 25 bp, Artificial
  probe
  misc_feature (1)..(25): SEQ ID NO: 2357; WAN024D77; Start 204; Stop 228
agcctattcctatggtttcaatgga

SEQ ID NO: 323120 - DNA, 25 bp, Artificial
  probe
  misc_feature (1)..(25): SEQ ID NO: 2357; WAN024D77; Start 3; Stop 27
ggatgctattaaggaggcaggttat

SEQ ID NO: 323121 - DNA, 25 bp, Artificial
  probe
  misc_feature (1)..(25): SEQ ID NO: 2357; WAN024D77; Start 58; Stop 82
ttggattcgcaaattgagggagtta

SEQ ID NO: 323122 - DNA, 25 bp, Artificial
  probe
  misc_feature (1)..(25): SEQ ID NO: 2357; WAN024D77; Start 367; Stop 391
cgattggaaccaactgaagaacaaa

SEQ ID NO: 323123 - DNA, 25 bp, Artificial
  probe
  misc_feature (1)..(25): SEQ ID NO: 2357; WAN024D77; Start 322; Stop 346
gaagcagatatcaccattatcatgc

SEQ ID NO: 323124 - DNA, 25 bp, Artificial
  probe
  misc_feature (1)..(25): SEQ ID NO: 2357; WAN024D77; Start 364; Stop 388
tatcgattggaaccaactgaagaac

SEQ ID NO: 323125 - DNA, 25 bp, Artificial
  probe
  misc_feature (1)..(25): SEQ ID NO: 2357; WAN024D77; Start 363; Stop 387
gtatcgattggaaccaactgaagaa

SEQ ID NO: 323126 - DNA, 25 bp, Artificial
  probe
  misc_feature (1)..(25): SEQ ID NO: 2357; WAN024D77; Start 246; Stop 270
tcaggaagactataatcgttatctt

SEQ ID NO: 323127 - DNA, 25 bp, Artificial
  probe
  misc_feature (1)..(25): SEQ ID NO: 2357; WAN024D77; Start 361; Stop 385
gagtatcgattggaaccaactgaag

SEQ ID NO: 323128 - DNA, 25 bp, Artificial
  probe
  misc_feature (1)..(25): SEQ ID NO: 2357; WAN024D77; Start 362; Stop 386
agtatcgattggaaccaactgaaga

SEQ ID NO: 323129 - DNA, 25 bp, Artificial
  probe
  misc_feature (1)..(25): SEQ ID NO: 2357; WAN024D77; Start 2; Stop 26
tggatgctattaaggaggcaggtta

SEQ ID NO: 323130 - DNA, 25 bp, Artificial
  probe
  misc_feature (1)..(25): SEQ ID NO: 2357; WAN024D77; Start 28; Stop 52
catgtgctggatttagctcataatc

SEQ ID NO: 323131 - DNA, 25 bp, Artificial
  probe
  misc_feature (1)..(25): SEQ ID NO: 2357; WAN024D77; Start 64; Stop 88
tcgcaaattgagggagttatttcaa

SEQ ID NO: 323132 - DNA, 25 bp, Artificial
  probe
  misc_feature (1)..(25): SEQ ID NO: 2358; WAN024D29; Start 207; Stop 231
cacacataagcaattcaccagtaat

SEQ ID NO: 323133 - DNA, 25 bp, Artificial
  probe
  misc_feature (1)..(25): SEQ ID NO: 2358; WAN024D29; Start 205; Stop 229
atcacacataagcaattcaccagta

SEQ ID NO: 323134 - DNA, 25 bp, Artificial
  probe
  misc_feature (1)..(25): SEQ ID NO: 2358; WAN024D29; Start 204; Stop 228
tatcacacataagcaattcaccagt

SEQ ID NO: 323135 - DNA, 25 bp, Artificial
  probe
  misc_feature (1)..(25): SEQ ID NO: 2358; WAN024D29; Start 203; Stop 227
atatcacacataagcaattcaccag

SEQ ID NO: 323136 - DNA, 25 bp, Artificial
  probe
  misc_feature (1)..(25): SEQ ID NO: 2358; WAN024D29; Start 206; Stop 230
tcacacataagcaattcaccagtaa

SEQ ID NO: 323137 - DNA, 25 bp, Artificial
  probe
  misc_feature (1)..(25): SEQ ID NO: 2358; WAN024D29; Start 351; Stop 375
caacaccagtaccacagatacatac

SEQ ID NO: 323138 - DNA, 25 bp, Artificial
  probe
  misc_feature (1)..(25): SEQ ID NO: 2358; WAN024D29; Start 346; Stop 370
gataccaacaccagtaccacagata

SEQ ID NO: 323139 - DNA, 25 bp, Artificial
  probe
  misc_feature (1)..(25): SEQ ID NO: 2358; WAN024D29; Start 350; Stop 374
ccaacaccagtaccacagatacata

SEQ ID NO: 323140 - DNA, 25 bp, Artificial
  probe
  misc_feature (1)..(25): SEQ ID NO: 2358; WAN024D29; Start 347; Stop 371
ataccaacaccagtaccacagatac

SEQ ID NO: 323141 - DNA, 25 bp, Artificial
  probe
  misc_feature (1)..(25): SEQ ID NO: 2358; WAN024D29; Start 312; Stop 336
aacgaacacctggaactttatttac

SEQ ID NO: 323142 - DNA, 25 bp, Artificial
  probe
  misc_feature (1)..(25): SEQ ID NO: 2358; WAN024D29; Start 311; Stop 335
gaacgaacacctggaactttattta

SEQ ID NO: 323143 - DNA, 25 bp, Artificial
  probe
  misc_feature (1)..(25): SEQ ID NO: 2358; WAN024D29; Start 313; Stop 337
acgaacacctggaactttatttaca

SEQ ID NO: 323144 - DNA, 25 bp, Artificial
  probe
  misc_feature (1)..(25): SEQ ID NO: 2358; WAN024D29; Start 310; Stop 334
agaacgaacacctggaactttattt

SEQ ID NO: 323145 - DNA, 25 bp, Artificial
  probe
  misc_feature (1)..(25): SEQ ID NO: 2358; WAN024D29; Start 202; Stop 226
gatatcacacataagcaattcacca

SEQ ID NO: 323146 - DNA, 25 bp, Artificial
  probe
  misc_feature (1)..(25): SEQ ID NO: 2358; WAN024D29; Start 102; Stop 126
ctgtttgttgagcattgtgactttc

SEQ ID NO: 323147 - DNA, 25 bp, Artificial
  probe
  misc_feature (1)..(25): SEQ ID NO: 2358; WAN024D29; Start 87; Stop 111
taaagaagtttgcgtctgtttgttg

SEQ ID NO: 323148 - DNA, 25 bp, Artificial
  probe
  misc_feature (1)..(25): SEQ ID NO: 2358; WAN024D29; Start 86; Stop 110
gtaaagaagtttgcgtctgtttgtt

SEQ ID NO: 323149 - DNA, 25 bp, Artificial
  probe
  misc_feature (1)..(25): SEQ ID NO: 2358; WAN024D29; Start 348; Stop 372
taccaacaccagtaccacagataca

SEQ ID NO: 323150 - DNA, 25 bp, Artificial
  probe
  misc_feature (1)..(25): SEQ ID NO: 2358; WAN024D29; Start 84; Stop 108
ctgtaaagaagtttgcgtctgtttg

SEQ ID NO: 323151 - DNA, 25 bp, Artificial
  probe
  misc_feature (1)..(25): SEQ ID NO: 2358; WAN024D29; Start 83; Stop 107
tctgtaaagaagtttgcgtctgttt

SEQ ID NO: 323152 - DNA, 25 bp, Artificial
  probe
  misc_feature (1)..(25): SEQ ID NO: 2358; WAN024D29; Start 101; Stop 125
tctgtttgttgagcattgtgacttt

SEQ ID NO: 323153 - DNA, 25 bp, Artificial
  probe
  misc_feature (1)..(25): SEQ ID NO: 2358; WAN024D29; Start 323; Stop 347
ggaactttatttacagcgttgttga

SEQ ID NO: 323154 - DNA, 25 bp, Artificial
  probe
  misc_feature (1)..(25): SEQ ID NO: 2358; WAN024D29; Start 322; Stop 346
tggaactttatttacagcgttgttg

SEQ ID NO: 323155 - DNA, 25 bp, Artificial
  probe
  misc_feature (1)..(25): SEQ ID NO: 2358; WAN024D29; Start 27; Stop 51
aatcataggtcacctcttagtcgtg

SEQ ID NO: 323156 - DNA, 25 bp, Artificial
  probe
  misc_feature (1)..(25): SEQ ID NO: 2358; WAN024D29; Start 35; Stop 59
gtcacctcttagtcgtggtattctc

SEQ ID NO: 323157 - DNA, 25 bp, Artificial
  probe
  misc_feature (1)..(25): SEQ ID NO: 2358; WAN024D29; Start 329; Stop 353
ttatttacagcgttgttgataccaa

SEQ ID NO: 323158 - DNA, 25 bp, Artificial
  probe
  misc_feature (1)..(25): SEQ ID NO: 2358; WAN024D29; Start 328; Stop 352
tttatttacagcgttgttgatacca

SEQ ID NO: 323159 - DNA, 25 bp, Artificial
  probe
  misc_feature (1)..(25): SEQ ID NO: 2358; WAN024D29; Start 276; Stop 300
cataaagggctgttgtcatatcacg

SEQ ID NO: 323160 - DNA, 25 bp, Artificial
  probe
  misc_feature (1)..(25): SEQ ID NO: 2358; WAN024D29; Start 314; Stop 338
cgaacacctggaactttatttacag

SEQ ID NO: 323161 - DNA, 25 bp, Artificial
  probe
  misc_feature (1)..(25): SEQ ID NO: 2358; WAN024D29; Start 3; Stop 27
ggatgggttcattgtgactgttaaa

SEQ ID NO: 323162 - DNA, 25 bp, Artificial
  probe
  misc_feature (1)..(25): SEQ ID NO: 2358; WAN024D29; Start 321; Stop 345
ctggaactttatttacagcgttgtt

SEQ ID NO: 323163 - DNA, 25 bp, Artificial
  probe
  misc_feature (1)..(25): SEQ ID NO: 2358; WAN024D29; Start 345; Stop 369
tgataccaacaccagtaccacagat

SEQ ID NO: 323164 - DNA, 25 bp, Artificial
  probe
  misc_feature (1)..(25): SEQ ID NO: 2358; WAN024D29; Start 315; Stop 339
gaacacctggaactttatttacagc

SEQ ID NO: 323165 - DNA, 25 bp, Artificial
  probe
  misc_feature (1)..(25): SEQ ID NO: 2359; WAN024CRJ; Start 70; Stop 94
aaggacaagaatgactcaacaagac

SEQ ID NO: 323166 - DNA, 25 bp, Artificial
  probe
  misc_feature (1)..(25): SEQ ID NO: 2359; WAN024CRJ; Start 72; Stop 96
ggacaagaatgactcaacaagactt

SEQ ID NO: 323167 - DNA, 25 bp, Artificial
  probe
  misc_feature (1)..(25): SEQ ID NO: 2359; WAN024CRJ; Start 421; Stop 445
ctgtgagtggattgacttggataag

SEQ ID NO: 323168 - DNA, 25 bp, Artificial
  probe
  misc_feature (1)..(25): SEQ ID NO: 2359; WAN024CRJ; Start 71; Stop 95
aggacaagaatgactcaacaagact

SEQ ID NO: 323169 - DNA, 25 bp, Artificial
  probe
  misc_feature (1)..(25): SEQ ID NO: 2359; WAN024CRJ; Start 420; Stop 444
cctgtgagtggattgacttggataa

SEQ ID NO: 323170 - DNA, 25 bp, Artificial
  probe
  misc_feature (1)..(25): SEQ ID NO: 2359; WAN024CRJ; Start 61; Stop 85
tttaagggaaaggacaagaatgact

SEQ ID NO: 323171 - DNA, 25 bp, Artificial
  probe
  misc_feature (1)..(25): SEQ ID NO: 2359; WAN024CRJ; Start 60; Stop 84
gtttaagggaaaggacaagaatgac

SEQ ID NO: 323172 - DNA, 25 bp, Artificial
  probe
  misc_feature (1)..(25): SEQ ID NO: 2359; WAN024CRJ; Start 62; Stop 86
ttaagggaaaggacaagaatgactc

SEQ ID NO: 323173 - DNA, 25 bp, Artificial
  probe
  misc_feature (1)..(25): SEQ ID NO: 2359; WAN024CRJ; Start 68; Stop 92
gaaaggacaagaatgactcaacaag

SEQ ID NO: 323174 - DNA, 25 bp, Artificial
  probe
  misc_feature (1)..(25): SEQ ID NO: 2359; WAN024CRJ; Start 69; Stop 93
aaaggacaagaatgactcaacaaga

SEQ ID NO: 323175 - DNA, 25 bp, Artificial
  probe
  misc_feature (1)..(25): SEQ ID NO: 2359; WAN024CRJ; Start 74; Stop 98
acaagaatgactcaacaagactttc

SEQ ID NO: 323176 - DNA, 25 bp, Artificial
  probe
  misc_feature (1)..(25): SEQ ID NO: 2359; WAN024CRJ; Start 73; Stop 97
gacaagaatgactcaacaagacttt

SEQ ID NO: 323177 - DNA, 25 bp, Artificial
  probe
  misc_feature (1)..(25): SEQ ID NO: 2359; WAN024CRJ; Start 75; Stop 99
caagaatgactcaacaagactttcg

SEQ ID NO: 323178 - DNA, 25 bp, Artificial
  probe
  misc_feature (1)..(25): SEQ ID NO: 2359; WAN024CRJ; Start 59; Stop 83
cgtttaagggaaaggacaagaatga

SEQ ID NO: 323179 - DNA, 25 bp, Artificial
  probe
  misc_feature (1)..(25): SEQ ID NO: 2359; WAN024CRJ; Start 58; Stop 82
tcgtttaagggaaaggacaagaatg

SEQ ID NO: 323180 - DNA, 25 bp, Artificial
  probe
  misc_feature (1)..(25): SEQ ID NO: 2359; WAN024CRJ; Start 63; Stop 87
taagggaaaggacaagaatgactca

SEQ ID NO: 323181 - DNA, 25 bp, Artificial
  probe
  misc_feature (1)..(25): SEQ ID NO: 2359; WAN024CRJ; Start 422; Stop 446
tgtgagtggattgacttggataagc

SEQ ID NO: 323182 - DNA, 25 bp, Artificial
  probe
  misc_feature (1)..(25): SEQ ID NO: 2359; WAN024CRJ; Start 506; Stop 530
caactaagacacattcatcttgagg

SEQ ID NO: 323183 - DNA, 25 bp, Artificial
  probe
  misc_feature (1)..(25): SEQ ID NO: 2359; WAN024CRJ; Start 505; Stop 529
ccaactaagacacattcatcttgag

SEQ ID NO: 323184 - DNA, 25 bp, Artificial
  probe
  misc_feature (1)..(25): SEQ ID NO: 2359; WAN024CRJ; Start 508; Stop 532
actaagacacattcatcttgaggaa

SEQ ID NO: 323185 - DNA, 25 bp, Artificial
  probe
  misc_feature (1)..(25): SEQ ID NO: 2359; WAN024CRJ; Start 507; Stop 531
aactaagacacattcatcttgagga

SEQ ID NO: 323186 - DNA, 25 bp, Artificial
  probe
  misc_feature (1)..(25): SEQ ID NO: 2359; WAN024CRJ; Start 67; Stop 91
ggaaaggacaagaatgactcaacaa

SEQ ID NO: 323187 - DNA, 25 bp, Artificial
  probe
  misc_feature (1)..(25): SEQ ID NO: 2359; WAN024CRJ; Start 76; Stop 100
aagaatgactcaacaagactttcgg

SEQ ID NO: 323188 - DNA, 25 bp, Artificial
  probe
  misc_feature (1)..(25): SEQ ID NO: 2359; WAN024CRJ; Start 504; Stop 528
gccaactaagacacattcatcttga

SEQ ID NO: 323189 - DNA, 25 bp, Artificial
  probe
  misc_feature (1)..(25): SEQ ID NO: 2359; WAN024CRJ; Start 509; Stop 533
ctaagacacattcatcttgaggaat

SEQ ID NO: 323190 - DNA, 25 bp, Artificial
  probe
  misc_feature (1)..(25): SEQ ID NO: 2359; WAN024CRJ; Start 64; Stop 88
aagggaaaggacaagaatgactcaa

SEQ ID NO: 323191 - DNA, 25 bp, Artificial
  probe
  misc_feature (1)..(25): SEQ ID NO: 2359; WAN024CRJ; Start 173; Stop 197
accaaagacaagggcaagtattaca

SEQ ID NO: 323192 - DNA, 25 bp, Artificial
  probe
  misc_feature (1)..(25): SEQ ID NO: 2359; WAN024CRJ; Start 78; Stop 102
gaatgactcaacaagactttcggac

SEQ ID NO: 323193 - DNA, 25 bp, Artificial
  probe
  misc_feature (1)..(25): SEQ ID NO: 2359; WAN024CRJ; Start 77; Stop 101
agaatgactcaacaagactttcgga

SEQ ID NO: 323194 - DNA, 25 bp, Artificial
  probe
  misc_feature (1)..(25): SEQ ID NO: 2359; WAN024CRJ; Start 57; Stop 81
gtcgtttaagggaaaggacaagaat

SEQ ID NO: 323195 - DNA, 25 bp, Artificial
  probe
  misc_feature (1)..(25): SEQ ID NO: 2359; WAN024CRJ; Start 423; Stop 447
gtgagtggattgacttggataagct

SEQ ID NO: 323196 - DNA, 25 bp, Artificial
  probe
  misc_feature (1)..(25): SEQ ID NO: 2359; WAN024CRJ; Start 80; Stop 104
atgactcaacaagactttcggacaa

SEQ ID NO: 323197 - DNA, 25 bp, Artificial
  probe
  misc_feature (1)..(25): SEQ ID NO: 2359; WAN024CRJ; Start 79; Stop 103
aatgactcaacaagactttcggaca

SEQ ID NO: 323198 - DNA, 25 bp, Artificial
  probe
  misc_feature (1)..(25): SEQ ID NO: 2361; WAN024FVC; Start 732; Stop 756
tgaggagaactactataagcaacat

SEQ ID NO: 323199 - DNA, 25 bp, Artificial
  probe
  misc_feature (1)..(25): SEQ ID NO: 2361; WAN024FVC; Start 731; Stop 755
ttgaggagaactactataagcaaca

SEQ ID NO: 323200 - DNA, 25 bp, Artificial
  probe
  misc_feature (1)..(25): SEQ ID NO: 2361; WAN024FVC; Start 333; Stop 357
agttgatctcttatcttgttggcat

SEQ ID NO: 323201 - DNA, 25 bp, Artificial
  probe
  misc_feature (1)..(25): SEQ ID NO: 2361; WAN024FVC; Start 332; Stop 356
aagttgatctcttatcttgttggca

SEQ ID NO: 323202 - DNA, 25 bp, Artificial
  probe
  misc_feature (1)..(25): SEQ ID NO: 2361; WAN024FVC; Start 334; Stop 358
gttgatctcttatcttgttggcata

SEQ ID NO: 323203 - DNA, 25 bp, Artificial
  probe
  misc_feature (1)..(25): SEQ ID NO: 2361; WAN024FVC; Start 730; Stop 754
attgaggagaactactataagcaac

SEQ ID NO: 323204 - DNA, 25 bp, Artificial
  probe
  misc_feature (1)..(25): SEQ ID NO: 2361; WAN024FVC; Start 335; Stop 359
ttgatctcttatcttgttggcataa

SEQ ID NO: 323205 - DNA, 25 bp, Artificial
  probe
  misc_feature (1)..(25): SEQ ID NO: 2361; WAN024FVC; Start 733; Stop 757
gaggagaactactataagcaacata

SEQ ID NO: 323206 - DNA, 25 bp, Artificial
  probe
  misc_feature (1)..(25): SEQ ID NO: 2361; WAN024FVC; Start 685; Stop 709
attcagaaccagttatggaatcaac

SEQ ID NO: 323207 - DNA, 25 bp, Artificial
  probe
  misc_feature (1)..(25): SEQ ID NO: 2361; WAN024FVC; Start 359; Stop 383
aagaacctgctacaactcaatacgg

SEQ ID NO: 323208 - DNA, 25 bp, Artificial
  probe
  misc_feature (1)..(25): SEQ ID NO: 2361; WAN024FVC; Start 628; Stop 652
gtaaatccacagtcgttatctaagc

SEQ ID NO: 323209 - DNA, 25 bp, Artificial
  probe
  misc_feature (1)..(25): SEQ ID NO: 2361; WAN024FVC; Start 989; Stop 1013
ttaaagagtggtggaagagaagaaa

SEQ ID NO: 323210 - DNA, 25 bp, Artificial
  probe
  misc_feature (1)..(25): SEQ ID NO: 2361; WAN024FVC; Start 729; Stop 753
aattgaggagaactactataagcaa

SEQ ID NO: 323211 - DNA, 25 bp, Artificial
  probe
  misc_feature (1)..(25): SEQ ID NO: 2361; WAN024FVC; Start 355; Stop 379
cataaagaacctgctacaactcaat

SEQ ID NO: 323212 - DNA, 25 bp, Artificial
  probe
  misc_feature (1)..(25): SEQ ID NO: 2361; WAN024FVC; Start 629; Stop 653
taaatccacagtcgttatctaagcg

SEQ ID NO: 323213 - DNA, 25 bp, Artificial
  probe
  misc_feature (1)..(25): SEQ ID NO: 2361; WAN024FVC; Start 376; Stop 400
caatacggtggaaatgagaataagt

SEQ ID NO: 323214 - DNA, 25 bp, Artificial
  probe
  misc_feature (1)..(25): SEQ ID NO: 2361; WAN024FVC; Start 377; Stop 401
aatacggtggaaatgagaataagtc

SEQ ID NO: 323215 - DNA, 25 bp, Artificial
  probe
  misc_feature (1)..(25): SEQ ID NO: 2361; WAN024FVC; Start 357; Stop 381
taaagaacctgctacaactcaatac

SEQ ID NO: 323216 - DNA, 25 bp, Artificial
  probe
  misc_feature (1)..(25): SEQ ID NO: 2361; WAN024FVC; Start 358; Stop 382
aaagaacctgctacaactcaatacg

SEQ ID NO: 323217 - DNA, 25 bp, Artificial
  probe
  misc_feature (1)..(25): SEQ ID NO: 2361; WAN024FVC; Start 379; Stop 403
tacggtggaaatgagaataagtcaa

SEQ ID NO: 323218 - DNA, 25 bp, Artificial
  probe
  misc_feature (1)..(25): SEQ ID NO: 2361; WAN024FVC; Start 378; Stop 402
atacggtggaaatgagaataagtca

SEQ ID NO: 323219 - DNA, 25 bp, Artificial
  probe
  misc_feature (1)..(25): SEQ ID NO: 2361; WAN024FVC; Start 734; Stop 758
aggagaactactataagcaacatat

SEQ ID NO: 323220 - DNA, 25 bp, Artificial
  probe
  misc_feature (1)..(25): SEQ ID NO: 2361; WAN024FVC; Start 421; Stop 445
acaagagaagaaataggtgctcatt

SEQ ID NO: 323221 - DNA, 25 bp, Artificial
  probe
  misc_feature (1)..(25): SEQ ID NO: 2361; WAN024FVC; Start 368; Stop 392
ctacaactcaatacggtggaaatga

SEQ ID NO: 323222 - DNA, 25 bp, Artificial
  probe
  misc_feature (1)..(25): SEQ ID NO: 2361; WAN024FVC; Start 420; Stop 444
tacaagagaagaaataggtgctcat

SEQ ID NO: 323223 - DNA, 25 bp, Artificial
  probe
  misc_feature (1)..(25): SEQ ID NO: 2361; WAN024FVC; Start 331; Stop 355
aaagttgatctcttatcttgttggc

SEQ ID NO: 323224 - DNA, 25 bp, Artificial
  probe
  misc_feature (1)..(25): SEQ ID NO: 2361; WAN024FVC; Start 381; Stop 405
cggtggaaatgagaataagtcaact

SEQ ID NO: 323225 - DNA, 25 bp, Artificial
  probe
  misc_feature (1)..(25): SEQ ID NO: 2361; WAN024FVC; Start 375; Stop 399
tcaatacggtggaaatgagaataag

SEQ ID NO: 323226 - DNA, 25 bp, Artificial
  probe
  misc_feature (1)..(25): SEQ ID NO: 2361; WAN024FVC; Start 422; Stop 446
caagagaagaaataggtgctcattt

SEQ ID NO: 323227 - DNA, 25 bp, Artificial
  probe
  misc_feature (1)..(25): SEQ ID NO: 2361; WAN024FVC; Start 380; Stop 404
acggtggaaatgagaataagtcaac

SEQ ID NO: 323228 - DNA, 25 bp, Artificial
  probe
  misc_feature (1)..(25): SEQ ID NO: 2361; WAN024FVC; Start 356; Stop 380
ataaagaacctgctacaactcaata

SEQ ID NO: 323229 - DNA, 25 bp, Artificial
  probe
  misc_feature (1)..(25): SEQ ID NO: 2361; WAN024FVC; Start 686; Stop 710
ttcagaaccagttatggaatcaact

SEQ ID NO: 323230 - DNA, 25 bp, Artificial
  probe
  misc_feature (1)..(25): SEQ ID NO: 2361; WAN024FVC; Start 419; Stop 443
gtacaagagaagaaataggtgctca

SEQ ID NO: 323231 - DNA, 25 bp, Artificial
  probe
  misc_feature (1)..(25): SEQ ID NO: 2362; WAN024AXC; Start 67; Stop 91
agaatgggagttacaactaaaatga

SEQ ID NO: 323232 - DNA, 25 bp, Artificial
  probe
  misc_feature (1)..(25): SEQ ID NO: 2362; WAN024AXC; Start 66; Stop 90
aagaatgggagttacaactaaaatg

SEQ ID NO: 323233 - DNA, 25 bp, Artificial
  probe
  misc_feature (1)..(25): SEQ ID NO: 2362; WAN024AXC; Start 68; Stop 92
gaatgggagttacaactaaaatgat

SEQ ID NO: 323234 - DNA, 25 bp, Artificial
  probe
  misc_feature (1)..(25): SEQ ID NO: 2362; WAN024AXC; Start 64; Stop 88
aaaagaatgggagttacaactaaaa

SEQ ID NO: 323235 - DNA, 25 bp, Artificial
  probe
  misc_feature (1)..(25): SEQ ID NO: 2362; WAN024AXC; Start 65; Stop 89
aaagaatgggagttacaactaaaat

SEQ ID NO: 323236 - DNA, 25 bp, Artificial
  probe
  misc_feature (1)..(25): SEQ ID NO: 2362; WAN024AXC; Start 71; Stop 95
tgggagttacaactaaaatgataaa

SEQ ID NO: 323237 - DNA, 25 bp, Artificial
  probe
  misc_feature (1)..(25): SEQ ID NO: 2362; WAN024AXC; Start 70; Stop 94
atgggagttacaactaaaatgataa

SEQ ID NO: 323238 - DNA, 25 bp, Artificial
  probe
  misc_feature (1)..(25): SEQ ID NO: 2362; WAN024AXC; Start 69; Stop 93
aatgggagttacaactaaaatgata

SEQ ID NO: 323239 - DNA, 25 bp, Artificial
  probe
  misc_feature (1)..(25): SEQ ID NO: 2362; WAN024AXC; Start 72; Stop 96
gggagttacaactaaaatgataaaa

SEQ ID NO: 323240 - DNA, 25 bp, Artificial
  probe
  misc_feature (1)..(25): SEQ ID NO: 2362; WAN024AXC; Start 36; Stop 60
cctcttttatctaacttcattctac

SEQ ID NO: 323241 - DNA, 25 bp, Artificial
  probe
  misc_feature (1)..(25): SEQ ID NO: 2363; WAN024DIE; Start 11; Stop 35
acgattatatgatacaggcatccaa

SEQ ID NO: 323242 - DNA, 25 bp, Artificial
  probe
  misc_feature (1)..(25): SEQ ID NO: 2363; WAN024DIE; Start 10; Stop 34
tacgattatatgatacaggcatcca

SEQ ID NO: 323243 - DNA, 25 bp, Artificial
  probe
  misc_feature (1)..(25): SEQ ID NO: 2363; WAN024DIE; Start 185; Stop 209
ttcaagagcatactccaactcataa

SEQ ID NO: 323244 - DNA, 25 bp, Artificial
  probe
  misc_feature (1)..(25): SEQ ID NO: 2363; WAN024DIE; Start 6; Stop 30
ttggtacgattatatgatacaggca

SEQ ID NO: 323245 - DNA, 25 bp, Artificial
  probe
  misc_feature (1)..(25): SEQ ID NO: 2363; WAN024DIE; Start 7; Stop 31
tggtacgattatatgatacaggcat

SEQ ID NO: 323246 - DNA, 25 bp, Artificial
  probe
  misc_feature (1)..(25): SEQ ID NO: 2363; WAN024DIE; Start 9; Stop 33
gtacgattatatgatacaggcatcc

SEQ ID NO: 323247 - DNA, 25 bp, Artificial
  probe
  misc_feature (1)..(25): SEQ ID NO: 2363; WAN024DIE; Start 8; Stop 32
ggtacgattatatgatacaggcatc

SEQ ID NO: 323248 - DNA, 25 bp, Artificial
  probe
  misc_feature (1)..(25): SEQ ID NO: 2363; WAN024DIE; Start 5; Stop 29
attggtacgattatatgatacaggc

SEQ ID NO: 323249 - DNA, 25 bp, Artificial
  probe
  misc_feature (1)..(25): SEQ ID NO: 2363; WAN024DIE; Start 22; Stop 46
atacaggcatccaaacaatcacaat

SEQ ID NO: 323250 - DNA, 25 bp, Artificial
  probe
  misc_feature (1)..(25): SEQ ID NO: 2363; WAN024DIE; Start 17; Stop 41
atatgatacaggcatccaaacaatc

SEQ ID NO: 323251 - DNA, 25 bp, Artificial
  probe
  misc_feature (1)..(25): SEQ ID NO: 2363; WAN024DIE; Start 12; Stop 36
cgattatatgatacaggcatccaaa

SEQ ID NO: 323252 - DNA, 25 bp, Artificial
  probe
  misc_feature (1)..(25): SEQ ID NO: 2363; WAN024DIE; Start 23; Stop 47
tacaggcatccaaacaatcacaatt

SEQ ID NO: 323253 - DNA, 25 bp, Artificial
  probe
  misc_feature (1)..(25): SEQ ID NO: 2363; WAN024DIE; Start 2; Stop 26
tggattggtacgattatatgataca

SEQ ID NO: 323254 - DNA, 25 bp, Artificial
  probe
  misc_feature (1)..(25): SEQ ID NO: 2363; WAN024DIE; Start 186; Stop 210
tcaagagcatactccaactcataaa

SEQ ID NO: 323255 - DNA, 25 bp, Artificial
  probe
  misc_feature (1)..(25): SEQ ID NO: 2363; WAN024DIE; Start 184; Stop 208
tttcaagagcatactccaactcata

SEQ ID NO: 323256 - DNA, 25 bp, Artificial
  probe
  misc_feature (1)..(25): SEQ ID NO: 2363; WAN024DIE; Start 183; Stop 207
ctttcaagagcatactccaactcat

SEQ ID NO: 323257 - DNA, 25 bp, Artificial
  probe
  misc_feature (1)..(25): SEQ ID NO: 2363; WAN024DIE; Start 21; Stop 45
gatacaggcatccaaacaatcacaa

SEQ ID NO: 323258 - DNA, 25 bp, Artificial
  probe
  misc_feature (1)..(25): SEQ ID NO: 2363; WAN024DIE; Start 134; Stop 158
tagactccaaagaactaacccgttt

SEQ ID NO: 323259 - DNA, 25 bp, Artificial
  probe
  misc_feature (1)..(25): SEQ ID NO: 2363; WAN024DIE; Start 15; Stop 39
ttatatgatacaggcatccaaacaa

SEQ ID NO: 323260 - DNA, 25 bp, Artificial
  probe
  misc_feature (1)..(25): SEQ ID NO: 2363; WAN024DIE; Start 27; Stop 51
ggcatccaaacaatcacaattcaac

SEQ ID NO: 323261 - DNA, 25 bp, Artificial
  probe
  misc_feature (1)..(25): SEQ ID NO: 2363; WAN024DIE; Start 187; Stop 211
caagagcatactccaactcataaat

SEQ ID NO: 323262 - DNA, 25 bp, Artificial
  probe
  misc_feature (1)..(25): SEQ ID NO: 2363; WAN024DIE; Start 26; Stop 50
aggcatccaaacaatcacaattcaa

SEQ ID NO: 323263 - DNA, 25 bp, Artificial
  probe
  misc_feature (1)..(25): SEQ ID NO: 2363; WAN024DIE; Start 16; Stop 40
tatatgatacaggcatccaaacaat

SEQ ID NO: 323264 - DNA, 25 bp, Artificial
  probe
  misc_feature (1)..(25): SEQ ID NO: 2363; WAN024DIE; Start 14; Stop 38
attatatgatacaggcatccaaaca

SEQ ID NO: 323265 - DNA, 25 bp, Artificial
  probe
  misc_feature (1)..(25): SEQ ID NO: 2363; WAN024DIE; Start 129; Stop 153
gttgctagactccaaagaactaacc

SEQ ID NO: 323266 - DNA, 25 bp, Artificial
  probe
  misc_feature (1)..(25): SEQ ID NO: 2363; WAN024DIE; Start 4; Stop 28
gattggtacgattatatgatacagg

SEQ ID NO: 323267 - DNA, 25 bp, Artificial
  probe
  misc_feature (1)..(25): SEQ ID NO: 2363; WAN024DIE; Start 3; Stop 27
ggattggtacgattatatgatacag

SEQ ID NO: 323268 - DNA, 25 bp, Artificial
  probe
  misc_feature (1)..(25): SEQ ID NO: 2363; WAN024DIE; Start 37; Stop 61
caatcacaattcaacgcaagccatt

SEQ ID NO: 323269 - DNA, 25 bp, Artificial
  probe
  misc_feature (1)..(25): SEQ ID NO: 2363; WAN024DIE; Start 231; Stop 255
acctgctaagttaaccaatgttcaa

SEQ ID NO: 323270 - DNA, 25 bp, Artificial
  probe
  misc_feature (1)..(25): SEQ ID NO: 2363; WAN024DIE; Start 230; Stop 254
aacctgctaagttaaccaatgttca

SEQ ID NO: 323271 - DNA, 25 bp, Artificial
  probe
  misc_feature (1)..(25): SEQ ID NO: 2363; WAN024DIE; Start 29; Stop 53
catccaaacaatcacaattcaacgc

SEQ ID NO: 323272 - DNA, 25 bp, Artificial
  probe
  misc_feature (1)..(25): SEQ ID NO: 2363; WAN024DIE; Start 28; Stop 52
gcatccaaacaatcacaattcaacg

SEQ ID NO: 323273 - DNA, 25 bp, Artificial
  probe
  misc_feature (1)..(25): SEQ ID NO: 2363; WAN024DIE; Start 32; Stop 56
ccaaacaatcacaattcaacgcaag

SEQ ID NO: 323274 - DNA, 25 bp, Artificial
  probe
  misc_feature (1)..(25): SEQ ID NO: 2364; WAN024D9F; Start 51; Stop 75
tgtcaaactgttagaagaacgaatg

SEQ ID NO: 323275 - DNA, 25 bp, Artificial
  probe
  misc_feature (1)..(25): SEQ ID NO: 2364; WAN024D9F; Start 44; Stop 68
accaaattgtcaaactgttagaaga

SEQ ID NO: 323276 - DNA, 25 bp, Artificial
  probe
  misc_feature (1)..(25): SEQ ID NO: 2364; WAN024D9F; Start 50; Stop 74
ttgtcaaactgttagaagaacgaat

SEQ ID NO: 323277 - DNA, 25 bp, Artificial
  probe
  misc_feature (1)..(25): SEQ ID NO: 2364; WAN024D9F; Start 49; Stop 73
attgtcaaactgttagaagaacgaa

SEQ ID NO: 323278 - DNA, 25 bp, Artificial
  probe
  misc_feature (1)..(25): SEQ ID NO: 2364; WAN024D9F; Start 52; Stop 76
gtcaaactgttagaagaacgaatgc

SEQ ID NO: 323279 - DNA, 25 bp, Artificial
  probe
  misc_feature (1)..(25): SEQ ID NO: 2364; WAN024D9F; Start 48; Stop 72
aattgtcaaactgttagaagaacga

SEQ ID NO: 323280 - DNA, 25 bp, Artificial
  probe
  misc_feature (1)..(25): SEQ ID NO: 2364; WAN024D9F; Start 47; Stop 71
aaattgtcaaactgttagaagaacg

SEQ ID NO: 323281 - DNA, 25 bp, Artificial
  probe
  misc_feature (1)..(25): SEQ ID NO: 2364; WAN024D9F; Start 45; Stop 69
ccaaattgtcaaactgttagaagaa

SEQ ID NO: 323282 - DNA, 25 bp, Artificial
  probe
  misc_feature (1)..(25): SEQ ID NO: 2364; WAN024D9F; Start 42; Stop 66
cgaccaaattgtcaaactgttagaa

SEQ ID NO: 323283 - DNA, 25 bp, Artificial
  probe
  misc_feature (1)..(25): SEQ ID NO: 2364; WAN024D9F; Start 40; Stop 64
gacgaccaaattgtcaaactgttag

SEQ ID NO: 323284 - DNA, 25 bp, Artificial
  probe
  misc_feature (1)..(25): SEQ ID NO: 2364; WAN024D9F; Start 41; Stop 65
acgaccaaattgtcaaactgttaga

SEQ ID NO: 323285 - DNA, 25 bp, Artificial
  probe
  misc_feature (1)..(25): SEQ ID NO: 2364; WAN024D9F; Start 43; Stop 67
gaccaaattgtcaaactgttagaag

SEQ ID NO: 323286 - DNA, 25 bp, Artificial
  probe
  misc_feature (1)..(25): SEQ ID NO: 2364; WAN024D9F; Start 46; Stop 70
caaattgtcaaactgttagaagaac

SEQ ID NO: 323287 - DNA, 25 bp, Artificial
  probe
  misc_feature (1)..(25): SEQ ID NO: 2364; WAN024D9F; Start 39; Stop 63
cgacgaccaaattgtcaaactgtta

SEQ ID NO: 323288 - DNA, 25 bp, Artificial
  probe
  misc_feature (1)..(25): SEQ ID NO: 2364; WAN024D9F; Start 53; Stop 77
tcaaactgttagaagaacgaatgca

SEQ ID NO: 323289 - DNA, 25 bp, Artificial
  probe
  misc_feature (1)..(25): SEQ ID NO: 2364; WAN024D9F; Start 32; Stop 56
atcaaatcgacgaccaaattgtcaa

SEQ ID NO: 323290 - DNA, 25 bp, Artificial
  probe
  misc_feature (1)..(25): SEQ ID NO: 2364; WAN024D9F; Start 35; Stop 59
aaatcgacgaccaaattgtcaaact

SEQ ID NO: 323291 - DNA, 25 bp, Artificial
  probe
  misc_feature (1)..(25): SEQ ID NO: 2364; WAN024D9F; Start 34; Stop 58
caaatcgacgaccaaattgtcaaac

SEQ ID NO: 323292 - DNA, 25 bp, Artificial
  probe
  misc_feature (1)..(25): SEQ ID NO: 2364; WAN024D9F; Start 33; Stop 57
tcaaatcgacgaccaaattgtcaaa

SEQ ID NO: 323293 - DNA, 25 bp, Artificial
  probe
  misc_feature (1)..(25): SEQ ID NO: 2364; WAN024D9F; Start 31; Stop 55
gatcaaatcgacgaccaaattgtca

SEQ ID NO: 323294 - DNA, 25 bp, Artificial
  probe
  misc_feature (1)..(25): SEQ ID NO: 2364; WAN024D9F; Start 109; Stop 133
gcttcaggtaaaccgattttagata

SEQ ID NO: 323295 - DNA, 25 bp, Artificial
  probe
  misc_feature (1)..(25): SEQ ID NO: 2364; WAN024D9F; Start 36; Stop 60
aatcgacgaccaaattgtcaaactg

SEQ ID NO: 323296 - DNA, 25 bp, Artificial
  probe
  misc_feature (1)..(25): SEQ ID NO: 2364; WAN024D9F; Start 108; Stop 132
agcttcaggtaaaccgattttagat

SEQ ID NO: 323297 - DNA, 25 bp, Artificial
  probe
  misc_feature (1)..(25): SEQ ID NO: 2364; WAN024D9F; Start 101; Stop 125
ataagaaagcttcaggtaaaccgat

SEQ ID NO: 323298 - DNA, 25 bp, Artificial
  probe
  misc_feature (1)..(25): SEQ ID NO: 2364; WAN024D9F; Start 100; Stop 124
tataagaaagcttcaggtaaaccga

SEQ ID NO: 323299 - DNA, 25 bp, Artificial
  probe
  misc_feature (1)..(25): SEQ ID NO: 2364; WAN024D9F; Start 111; Stop 135
ttcaggtaaaccgattttagatact

SEQ ID NO: 323300 - DNA, 25 bp, Artificial
  probe
  misc_feature (1)..(25): SEQ ID NO: 2364; WAN024D9F; Start 102; Stop 126
taagaaagcttcaggtaaaccgatt

SEQ ID NO: 323301 - DNA, 25 bp, Artificial
  probe
  misc_feature (1)..(25): SEQ ID NO: 2364; WAN024D9F; Start 110; Stop 134
cttcaggtaaaccgattttagatac

SEQ ID NO: 323302 - DNA, 25 bp, Artificial
  probe
  misc_feature (1)..(25): SEQ ID NO: 2364; WAN024D9F; Start 99; Stop 123
ttataagaaagcttcaggtaaaccg

SEQ ID NO: 323303 - DNA, 25 bp, Artificial
  probe
  misc_feature (1)..(25): SEQ ID NO: 2364; WAN024D9F; Start 2; Stop 26
tggatttagatattattcgtcaaga

SEQ ID NO: 323304 - DNA, 25 bp, Artificial
  probe
  misc_feature (1)..(25): SEQ ID NO: 2364; WAN024D9F; Start 103; Stop 127
aagaaagcttcaggtaaaccgattt

SEQ ID NO: 323305 - DNA, 25 bp, Artificial
  probe
  misc_feature (1)..(25): SEQ ID NO: 2364; WAN024D9F; Start 54; Stop 78
caaactgttagaagaacgaatgcat

SEQ ID NO: 323306 - DNA, 25 bp, Artificial
  probe
  misc_feature (1)..(25): SEQ ID NO: 2364; WAN024D9F; Start 37; Stop 61
atcgacgaccaaattgtcaaactgt

SEQ ID NO: 323307 - DNA, 25 bp, Artificial
  probe
  misc_feature (1)..(25): SEQ ID NO: 2365; WAN024G9K; Start 17; Stop 41
ctgaagttcatactccagatgtcaa

SEQ ID NO: 323308 - DNA, 25 bp, Artificial
  probe
  misc_feature (1)..(25): SEQ ID NO: 2365; WAN024G9K; Start 215; Stop 239
tccacccaaatccaaagaaagtatt

SEQ ID NO: 323309 - DNA, 25 bp, Artificial
  probe
  misc_feature (1)..(25): SEQ ID NO: 2365; WAN024G9K; Start 385; Stop 409
cctcgtgttaccatttactaccaaa

SEQ ID NO: 323310 - DNA, 25 bp, Artificial
  probe
  misc_feature (1)..(25): SEQ ID NO: 2365; WAN024G9K; Start 383; Stop 407
atcctcgtgttaccatttactacca

SEQ ID NO: 323311 - DNA, 25 bp, Artificial
  probe
  misc_feature (1)..(25): SEQ ID NO: 2365; WAN024G9K; Start 214; Stop 238
gtccacccaaatccaaagaaagtat

SEQ ID NO: 323312 - DNA, 25 bp, Artificial
  probe
  misc_feature (1)..(25): SEQ ID NO: 2365; WAN024G9K; Start 24; Stop 48
tcatactccagatgtcaaattgtct

SEQ ID NO: 323313 - DNA, 25 bp, Artificial
  probe
  misc_feature (1)..(25): SEQ ID NO: 2365; WAN024G9K; Start 804; Stop 828
ctttatgttgcccaagtatgttgag

SEQ ID NO: 323314 - DNA, 25 bp, Artificial
  probe
  misc_feature (1)..(25): SEQ ID NO: 2365; WAN024G9K; Start 22; Stop 46
gttcatactccagatgtcaaattgt

SEQ ID NO: 323315 - DNA, 25 bp, Artificial
  probe
  misc_feature (1)..(25): SEQ ID NO: 2365; WAN024G9K; Start 384; Stop 408
tcctcgtgttaccatttactaccaa

SEQ ID NO: 323316 - DNA, 25 bp, Artificial
  probe
  misc_feature (1)..(25): SEQ ID NO: 2365; WAN024G9K; Start 216; Stop 240
ccacccaaatccaaagaaagtattg

SEQ ID NO: 323317 - DNA, 25 bp, Artificial
  probe
  misc_feature (1)..(25): SEQ ID NO: 2365; WAN024G9K; Start 26; Stop 50
atactccagatgtcaaattgtctct

SEQ ID NO: 323318 - DNA, 25 bp, Artificial
  probe
  misc_feature (1)..(25): SEQ ID NO: 2365; WAN024G9K; Start 25; Stop 49
catactccagatgtcaaattgtctc

SEQ ID NO: 323319 - DNA, 25 bp, Artificial
  probe
  misc_feature (1)..(25): SEQ ID NO: 2365; WAN024G9K; Start 23; Stop 47
ttcatactccagatgtcaaattgtc

SEQ ID NO: 323320 - DNA, 25 bp, Artificial
  probe
  misc_feature (1)..(25): SEQ ID NO: 2365; WAN024G9K; Start 381; Stop 405
tgatcctcgtgttaccatttactac

SEQ ID NO: 323321 - DNA, 25 bp, Artificial
  probe
  misc_feature (1)..(25): SEQ ID NO: 2365; WAN024G9K; Start 633; Stop 657
ctttccaatcagtcgggtttatcag

SEQ ID NO: 323322 - DNA, 25 bp, Artificial
  probe
  misc_feature (1)..(25): SEQ ID NO: 2365; WAN024G9K; Start 382; Stop 406
gatcctcgtgttaccatttactacc

SEQ ID NO: 323323 - DNA, 25 bp, Artificial
  probe
  misc_feature (1)..(25): SEQ ID NO: 2365; WAN024G9K; Start 376; Stop 400
ctagatgatcctcgtgttaccattt

SEQ ID NO: 323324 - DNA, 25 bp, Artificial
  probe
  misc_feature (1)..(25): SEQ ID NO: 2365; WAN024G9K; Start 21; Stop 45
agttcatactccagatgtcaaattg

SEQ ID NO: 323325 - DNA, 25 bp, Artificial
  probe
  misc_feature (1)..(25): SEQ ID NO: 2365; WAN024G9K; Start 379; Stop 403
gatgatcctcgtgttaccatttact

SEQ ID NO: 323326 - DNA, 25 bp, Artificial
  probe
  misc_feature (1)..(25): SEQ ID NO: 2365; WAN024G9K; Start 378; Stop 402
agatgatcctcgtgttaccatttac

SEQ ID NO: 323327 - DNA, 25 bp, Artificial
  probe
  misc_feature (1)..(25): SEQ ID NO: 2365; WAN024G9K; Start 380; Stop 404
atgatcctcgtgttaccatttacta

SEQ ID NO: 323328 - DNA, 25 bp, Artificial
  probe
  misc_feature (1)..(25): SEQ ID NO: 2365; WAN024G9K; Start 19; Stop 43
gaagttcatactccagatgtcaaat

SEQ ID NO: 323329 - DNA, 25 bp, Artificial
  probe
  misc_feature (1)..(25): SEQ ID NO: 2365; WAN024G9K; Start 805; Stop 829
tttatgttgcccaagtatgttgagg

SEQ ID NO: 323330 - DNA, 25 bp, Artificial
  probe
  misc_feature (1)..(25): SEQ ID NO: 2365; WAN024G9K; Start 803; Stop 827
cctttatgttgcccaagtatgttga

SEQ ID NO: 323331 - DNA, 25 bp, Artificial
  probe
  misc_feature (1)..(25): SEQ ID NO: 2365; WAN024G9K; Start 377; Stop 401
tagatgatcctcgtgttaccattta

SEQ ID NO: 323332 - DNA, 25 bp, Artificial
  probe
  misc_feature (1)..(25): SEQ ID NO: 2365; WAN024G9K; Start 151; Stop 175
gtcttgttctcagatgcggatgatt

SEQ ID NO: 323333 - DNA, 25 bp, Artificial
  probe
  misc_feature (1)..(25): SEQ ID NO: 2365; WAN024G9K; Start 18; Stop 42
tgaagttcatactccagatgtcaaa

SEQ ID NO: 323334 - DNA, 25 bp, Artificial
  probe
  misc_feature (1)..(25): SEQ ID NO: 2365; WAN024G9K; Start 213; Stop 237
tgtccacccaaatccaaagaaagta

SEQ ID NO: 323335 - DNA, 25 bp, Artificial
  probe
  misc_feature (1)..(25): SEQ ID NO: 2365; WAN024G9K; Start 20; Stop 44
aagttcatactccagatgtcaaatt

SEQ ID NO: 323336 - DNA, 25 bp, Artificial
  probe
  misc_feature (1)..(25): SEQ ID NO: 2365; WAN024G9K; Start 622; Stop 646
gtcaatcaagcctttccaatcagtc

SEQ ID NO: 323337 - DNA, 25 bp, Artificial
  probe
  misc_feature (1)..(25): SEQ ID NO: 2365; WAN024G9K; Start 163; Stop 187
gatgcggatgatttcgtctacaatg

SEQ ID NO: 323338 - DNA, 25 bp, Artificial
  probe
  misc_feature (1)..(25): SEQ ID NO: 2365; WAN024G9K; Start 448; Stop 472
gatattatcatcaacgatgcgacag

SEQ ID NO: 323339 - DNA, 25 bp, Artificial
  probe
  misc_feature (1)..(25): SEQ ID NO: 2365; WAN024G9K; Start 806; Stop 830
ttatgttgcccaagtatgttgagga

SEQ ID NO: 323340 - DNA, 25 bp, Artificial
  probe
  misc_feature (1)..(25): SEQ ID NO: 2366; WAN024FW6; Start 313; Stop 337
tgtaatcttacgaatagactgtcag

SEQ ID NO: 323341 - DNA, 25 bp, Artificial
  probe
  misc_feature (1)..(25): SEQ ID NO: 2366; WAN024FW6; Start 314; Stop 338
gtaatcttacgaatagactgtcaga

SEQ ID NO: 323342 - DNA, 25 bp, Artificial
  probe
  misc_feature (1)..(25): SEQ ID NO: 2366; WAN024FW6; Start 317; Stop 341
atcttacgaatagactgtcagaatt

SEQ ID NO: 323343 - DNA, 25 bp, Artificial
  probe
  misc_feature (1)..(25): SEQ ID NO: 2366; WAN024FW6; Start 316; Stop 340
aatcttacgaatagactgtcagaat

SEQ ID NO: 323344 - DNA, 25 bp, Artificial
  probe
  misc_feature (1)..(25): SEQ ID NO: 2366; WAN024FW6; Start 312; Stop 336
ttgtaatcttacgaatagactgtca

SEQ ID NO: 323345 - DNA, 25 bp, Artificial
  probe
  misc_feature (1)..(25): SEQ ID NO: 2366; WAN024FW6; Start 326; Stop 350
atagactgtcagaatttaaggctcc

SEQ ID NO: 323346 - DNA, 25 bp, Artificial
  probe
  misc_feature (1)..(25): SEQ ID NO: 2366; WAN024FW6; Start 323; Stop 347
cgaatagactgtcagaatttaaggc

SEQ ID NO: 323347 - DNA, 25 bp, Artificial
  probe
  misc_feature (1)..(25): SEQ ID NO: 2366; WAN024FW6; Start 327; Stop 351
tagactgtcagaatttaaggctcca

SEQ ID NO: 323348 - DNA, 25 bp, Artificial
  probe
  misc_feature (1)..(25): SEQ ID NO: 2366; WAN024FW6; Start 329; Stop 353
gactgtcagaatttaaggctccaaa

SEQ ID NO: 323349 - DNA, 25 bp, Artificial
  probe
  misc_feature (1)..(25): SEQ ID NO: 2366; WAN024FW6; Start 315; Stop 339
taatcttacgaatagactgtcagaa

SEQ ID NO: 323350 - DNA, 25 bp, Artificial
  probe
  misc_feature (1)..(25): SEQ ID NO: 2366; WAN024FW6; Start 322; Stop 346
acgaatagactgtcagaatttaagg

SEQ ID NO: 323351 - DNA, 25 bp, Artificial
  probe
  misc_feature (1)..(25): SEQ ID NO: 2366; WAN024FW6; Start 325; Stop 349
aatagactgtcagaatttaaggctc

SEQ ID NO: 323352 - DNA, 25 bp, Artificial
  probe
  misc_feature (1)..(25): SEQ ID NO: 2366; WAN024FW6; Start 324; Stop 348
gaatagactgtcagaatttaaggct

SEQ ID NO: 323353 - DNA, 25 bp, Artificial
  probe
  misc_feature (1)..(25): SEQ ID NO: 2366; WAN024FW6; Start 904; Stop 928
cgagaaacagaacactccttaaata

SEQ ID NO: 323354 - DNA, 25 bp, Artificial
  probe
  misc_feature (1)..(25): SEQ ID NO: 2366; WAN024FW6; Start 328; Stop 352
agactgtcagaatttaaggctccaa

SEQ ID NO: 323355 - DNA, 25 bp, Artificial
  probe
  misc_feature (1)..(25): SEQ ID NO: 2366; WAN024FW6; Start 478; Stop 502
aggaagaactatgtagaagataaga

SEQ ID NO: 323356 - DNA, 25 bp, Artificial
  probe
  misc_feature (1)..(25): SEQ ID NO: 2366; WAN024FW6; Start 318; Stop 342
tcttacgaatagactgtcagaattt

SEQ ID NO: 323357 - DNA, 25 bp, Artificial
  probe
  misc_feature (1)..(25): SEQ ID NO: 2366; WAN024FW6; Start 941; Stop 965
cactggataacattgtgaatatagt

SEQ ID NO: 323358 - DNA, 25 bp, Artificial
  probe
  misc_feature (1)..(25): SEQ ID NO: 2366; WAN024FW6; Start 940; Stop 964
acactggataacattgtgaatatag

SEQ ID NO: 323359 - DNA, 25 bp, Artificial
  probe
  misc_feature (1)..(25): SEQ ID NO: 2366; WAN024FW6; Start 479; Stop 503
ggaagaactatgtagaagataagag

SEQ ID NO: 323360 - DNA, 25 bp, Artificial
  probe
  misc_feature (1)..(25): SEQ ID NO: 2366; WAN024FW6; Start 903; Stop 927
tcgagaaacagaacactccttaaat

SEQ ID NO: 323361 - DNA, 25 bp, Artificial
  probe
  misc_feature (1)..(25): SEQ ID NO: 2366; WAN024FW6; Start 902; Stop 926
ttcgagaaacagaacactccttaaa

SEQ ID NO: 323362 - DNA, 25 bp, Artificial
  probe
  misc_feature (1)..(25): SEQ ID NO: 2366; WAN024FW6; Start 901; Stop 925
attcgagaaacagaacactccttaa

SEQ ID NO: 323363 - DNA, 25 bp, Artificial
  probe
  misc_feature (1)..(25): SEQ ID NO: 2366; WAN024FW6; Start 899; Stop 923
ttattcgagaaacagaacactcctt

SEQ ID NO: 323364 - DNA, 25 bp, Artificial
  probe
  misc_feature (1)..(25): SEQ ID NO: 2366; WAN024FW6; Start 898; Stop 922
tttattcgagaaacagaacactcct

SEQ ID NO: 323365 - DNA, 25 bp, Artificial
  probe
  misc_feature (1)..(25): SEQ ID NO: 2366; WAN024FW6; Start 900; Stop 924
tattcgagaaacagaacactcctta

SEQ ID NO: 323366 - DNA, 25 bp, Artificial
  probe
  misc_feature (1)..(25): SEQ ID NO: 2366; WAN024FW6; Start 897; Stop 921
atttattcgagaaacagaacactcc

SEQ ID NO: 323367 - DNA, 25 bp, Artificial
  probe
  misc_feature (1)..(25): SEQ ID NO: 2366; WAN024FW6; Start 971; Stop 995
acatccataaactgggaatactaac

SEQ ID NO: 323368 - DNA, 25 bp, Artificial
  probe
  misc_feature (1)..(25): SEQ ID NO: 2366; WAN024FW6; Start 968; Stop 992
gttacatccataaactgggaatact

SEQ ID NO: 323369 - DNA, 25 bp, Artificial
  probe
  misc_feature (1)..(25): SEQ ID NO: 2366; WAN024FW6; Start 482; Stop 506
agaactatgtagaagataagagaca

SEQ ID NO: 323370 - DNA, 25 bp, Artificial
  probe
  misc_feature (1)..(25): SEQ ID NO: 2366; WAN024FW6; Start 972; Stop 996
catccataaactgggaatactaact

SEQ ID NO: 323371 - DNA, 25 bp, Artificial
  probe
  misc_feature (1)..(25): SEQ ID NO: 2366; WAN024FW6; Start 939; Stop 963
aacactggataacattgtgaatata

SEQ ID NO: 323372 - DNA, 25 bp, Artificial
  probe
  misc_feature (1)..(25): SEQ ID NO: 2366; WAN024FW6; Start 242; Stop 266
aaatgagccctactgctaacaaatt

SEQ ID NO: 323373 - DNA, 25 bp, Artificial
  probe
  misc_feature (1)..(25): SEQ ID NO: 2367; WAN024FMH; Start 667; Stop 691
gtaacatcacttggaggacctacag

SEQ ID NO: 323374 - DNA, 25 bp, Artificial
  probe
  misc_feature (1)..(25): SEQ ID NO: 2367; WAN024FMH; Start 368; Stop 392
tgggaactttctcaactatttcaag

SEQ ID NO: 323375 - DNA, 25 bp, Artificial
  probe
  misc_feature (1)..(25): SEQ ID NO: 2367; WAN024FMH; Start 362; Stop 386
acatcttgggaactttctcaactat

SEQ ID NO: 323376 - DNA, 25 bp, Artificial
  probe
  misc_feature (1)..(25): SEQ ID NO: 2367; WAN024FMH; Start 361; Stop 385
aacatcttgggaactttctcaacta

SEQ ID NO: 323377 - DNA, 25 bp, Artificial
  probe
  misc_feature (1)..(25): SEQ ID NO: 2367; WAN024FMH; Start 360; Stop 384
taacatcttgggaactttctcaact

SEQ ID NO: 323378 - DNA, 25 bp, Artificial
  probe
  misc_feature (1)..(25): SEQ ID NO: 2367; WAN024FMH; Start 357; Stop 381
aaataacatcttgggaactttctca

SEQ ID NO: 323379 - DNA, 25 bp, Artificial
  probe
  misc_feature (1)..(25): SEQ ID NO: 2367; WAN024FMH; Start 751; Stop 775
aaatcagttcttggtgagcataaag

SEQ ID NO: 323380 - DNA, 25 bp, Artificial
  probe
  misc_feature (1)..(25): SEQ ID NO: 2367; WAN024FMH; Start 366; Stop 390
cttgggaactttctcaactatttca

SEQ ID NO: 323381 - DNA, 25 bp, Artificial
  probe
  misc_feature (1)..(25): SEQ ID NO: 2367; WAN024FMH; Start 359; Stop 383
ataacatcttgggaactttctcaac

SEQ ID NO: 323382 - DNA, 25 bp, Artificial
  probe
  misc_feature (1)..(25): SEQ ID NO: 2367; WAN024FMH; Start 363; Stop 387
catcttgggaactttctcaactatt

SEQ ID NO: 323383 - DNA, 25 bp, Artificial
  probe
  misc_feature (1)..(25): SEQ ID NO: 2367; WAN024FMH; Start 365; Stop 389
tcttgggaactttctcaactatttc

SEQ ID NO: 323384 - DNA, 25 bp, Artificial
  probe
  misc_feature (1)..(25): SEQ ID NO: 2367; WAN024FMH; Start 656; Stop 680
ttatggctttggtaacatcacttgg

SEQ ID NO: 323385 - DNA, 25 bp, Artificial
  probe
  misc_feature (1)..(25): SEQ ID NO: 2367; WAN024FMH; Start 367; Stop 391
ttgggaactttctcaactatttcaa

SEQ ID NO: 323386 - DNA, 25 bp, Artificial
  probe
  misc_feature (1)..(25): SEQ ID NO: 2367; WAN024FMH; Start 88; Stop 112
gttgaacttaaaggtacgaaaggtc

SEQ ID NO: 323387 - DNA, 25 bp, Artificial
  probe
  misc_feature (1)..(25): SEQ ID NO: 2367; WAN024FMH; Start 668; Stop 692
taacatcacttggaggacctacagg

SEQ ID NO: 323388 - DNA, 25 bp, Artificial
  probe
  misc_feature (1)..(25): SEQ ID NO: 2367; WAN024FMH; Start 358; Stop 382
aataacatcttgggaactttctcaa

SEQ ID NO: 323389 - DNA, 25 bp, Artificial
  probe
  misc_feature (1)..(25): SEQ ID NO: 2367; WAN024FMH; Start 752; Stop 776
aatcagttcttggtgagcataaagg

SEQ ID NO: 323390 - DNA, 25 bp, Artificial
  probe
  misc_feature (1)..(25): SEQ ID NO: 2367; WAN024FMH; Start 356; Stop 380
caaataacatcttgggaactttctc

SEQ ID NO: 323391 - DNA, 25 bp, Artificial
  probe
  misc_feature (1)..(25): SEQ ID NO: 2367; WAN024FMH; Start 89; Stop 113
ttgaacttaaaggtacgaaaggtca

SEQ ID NO: 323392 - DNA, 25 bp, Artificial
  probe
  misc_feature (1)..(25): SEQ ID NO: 2367; WAN024FMH; Start 364; Stop 388
atcttgggaactttctcaactattt

SEQ ID NO: 323393 - DNA, 25 bp, Artificial
  probe
  misc_feature (1)..(25): SEQ ID NO: 2367; WAN024FMH; Start 657; Stop 681
tatggctttggtaacatcacttgga

SEQ ID NO: 323394 - DNA, 25 bp, Artificial
  probe
  misc_feature (1)..(25): SEQ ID NO: 2367; WAN024FMH; Start 90; Stop 114
tgaacttaaaggtacgaaaggtcac

SEQ ID NO: 323395 - DNA, 25 bp, Artificial
  probe
  misc_feature (1)..(25): SEQ ID NO: 2367; WAN024FMH; Start 655; Stop 679
gttatggctttggtaacatcacttg

SEQ ID NO: 323396 - DNA, 25 bp, Artificial
  probe
  misc_feature (1)..(25): SEQ ID NO: 2367; WAN024FMH; Start 130; Stop 154
gtcatcgctgttggttatggtatgg

SEQ ID NO: 323397 - DNA, 25 bp, Artificial
  probe
  misc_feature (1)..(25): SEQ ID NO: 2367; WAN024FMH; Start 664; Stop 688
ttggtaacatcacttggaggaccta

SEQ ID NO: 323398 - DNA, 25 bp, Artificial
  probe
  misc_feature (1)..(25): SEQ ID NO: 2367; WAN024FMH; Start 844; Stop 868
gctgtattcaaattcctttatctct

SEQ ID NO: 323399 - DNA, 25 bp, Artificial
  probe
  misc_feature (1)..(25): SEQ ID NO: 2367; WAN024FMH; Start 636; Stop 660
cttggcacttggattcctcgttatg

SEQ ID NO: 323400 - DNA, 25 bp, Artificial
  probe
  misc_feature (1)..(25): SEQ ID NO: 2367; WAN024FMH; Start 646; Stop 670
ggattcctcgttatggctttggtaa

SEQ ID NO: 323401 - DNA, 25 bp, Artificial
  probe
  misc_feature (1)..(25): SEQ ID NO: 2367; WAN024FMH; Start 129; Stop 153
cgtcatcgctgttggttatggtatg

SEQ ID NO: 323402 - DNA, 25 bp, Artificial
  probe
  misc_feature (1)..(25): SEQ ID NO: 2367; WAN024FMH; Start 654; Stop 678
cgttatggctttggtaacatcactt

SEQ ID NO: 323403 - DNA, 25 bp, Artificial
  probe
  misc_feature (1)..(25): SEQ ID NO: 2367; WAN024FMH; Start 838; Stop 862
gcagtagctgtattcaaattccttt

SEQ ID NO: 323404 - DNA, 25 bp, Artificial
  probe
  misc_feature (1)..(25): SEQ ID NO: 2367; WAN024FMH; Start 95; Stop 119
ttaaaggtacgaaaggtcaccaaag

SEQ ID NO: 323405 - DNA, 25 bp, Artificial
  probe
  misc_feature (1)..(25): SEQ ID NO: 2367; WAN024FMH; Start 94; Stop 118
cttaaaggtacgaaaggtcaccaaa

SEQ ID NO: 323406 - DNA, 25 bp, Artificial
  probe
  misc_feature (1)..(25): SEQ ID NO: 2368; WAN024FUA; Start 302; Stop 326
ctaatctgagaagtgacacgatcat

SEQ ID NO: 323407 - DNA, 25 bp, Artificial
  probe
  misc_feature (1)..(25): SEQ ID NO: 2368; WAN024FUA; Start 303; Stop 327
taatctgagaagtgacacgatcatg

SEQ ID NO: 323408 - DNA, 25 bp, Artificial
  probe
  misc_feature (1)..(25): SEQ ID NO: 2368; WAN024FUA; Start 54; Stop 78
tttgctcttcatctcccttactaat

SEQ ID NO: 323409 - DNA, 25 bp, Artificial
  probe
  misc_feature (1)..(25): SEQ ID NO: 2368; WAN024FUA; Start 53; Stop 77
atttgctcttcatctcccttactaa

SEQ ID NO: 323410 - DNA, 25 bp, Artificial
  probe
  misc_feature (1)..(25): SEQ ID NO: 2368; WAN024FUA; Start 55; Stop 79
ttgctcttcatctcccttactaatg

SEQ ID NO: 323411 - DNA, 25 bp, Artificial
  probe
  misc_feature (1)..(25): SEQ ID NO: 2368; WAN024FUA; Start 297; Stop 321
aatggctaatctgagaagtgacacg

SEQ ID NO: 323412 - DNA, 25 bp, Artificial
  probe
  misc_feature (1)..(25): SEQ ID NO: 2368; WAN024FUA; Start 52; Stop 76
aatttgctcttcatctcccttacta

SEQ ID NO: 323413 - DNA, 25 bp, Artificial
  probe
  misc_feature (1)..(25): SEQ ID NO: 2368; WAN024FUA; Start 296; Stop 320
aaatggctaatctgagaagtgacac

SEQ ID NO: 323414 - DNA, 25 bp, Artificial
  probe
  misc_feature (1)..(25): SEQ ID NO: 2368; WAN024FUA; Start 301; Stop 325
gctaatctgagaagtgacacgatca

SEQ ID NO: 323415 - DNA, 25 bp, Artificial
  probe
  misc_feature (1)..(25): SEQ ID NO: 2368; WAN024FUA; Start 56; Stop 80
tgctcttcatctcccttactaatgg

SEQ ID NO: 323416 - DNA, 25 bp, Artificial
  probe
  misc_feature (1)..(25): SEQ ID NO: 2368; WAN024FUA; Start 300; Stop 324
ggctaatctgagaagtgacacgatc

SEQ ID NO: 323417 - DNA, 25 bp, Artificial
  probe
  misc_feature (1)..(25): SEQ ID NO: 2368; WAN024FUA; Start 136; Stop 160
ctcgctattggacaagagaatggag

SEQ ID NO: 323418 - DNA, 25 bp, Artificial
  probe
  misc_feature (1)..(25): SEQ ID NO: 2368; WAN024FUA; Start 139; Stop 163
gctattggacaagagaatggaggtc

SEQ ID NO: 323419 - DNA, 25 bp, Artificial
  probe
  misc_feature (1)..(25): SEQ ID NO: 2368; WAN024FUA; Start 298; Stop 322
atggctaatctgagaagtgacacga

SEQ ID NO: 323420 - DNA, 25 bp, Artificial
  probe
  misc_feature (1)..(25): SEQ ID NO: 2368; WAN024FUA; Start 299; Stop 323
tggctaatctgagaagtgacacgat

SEQ ID NO: 323421 - DNA, 25 bp, Artificial
  probe
  misc_feature (1)..(25): SEQ ID NO: 2368; WAN024FUA; Start 304; Stop 328
aatctgagaagtgacacgatcatgc

SEQ ID NO: 323422 - DNA, 25 bp, Artificial
  probe
  misc_feature (1)..(25): SEQ ID NO: 2368; WAN024FUA; Start 51; Stop 75
aaatttgctcttcatctcccttact

SEQ ID NO: 323423 - DNA, 25 bp, Artificial
  probe
  misc_feature (1)..(25): SEQ ID NO: 2368; WAN024FUA; Start 57; Stop 81
gctcttcatctcccttactaatggc

SEQ ID NO: 323424 - DNA, 25 bp, Artificial
  probe
  misc_feature (1)..(25): SEQ ID NO: 2368; WAN024FUA; Start 137; Stop 161
tcgctattggacaagagaatggagg

SEQ ID NO: 323425 - DNA, 25 bp, Artificial
  probe
  misc_feature (1)..(25): SEQ ID NO: 2368; WAN024FUA; Start 138; Stop 162
cgctattggacaagagaatggaggt

SEQ ID NO: 323426 - DNA, 25 bp, Artificial
  probe
  misc_feature (1)..(25): SEQ ID NO: 2368; WAN024FUA; Start 294; Stop 318
gaaaatggctaatctgagaagtgac

SEQ ID NO: 323427 - DNA, 25 bp, Artificial
  probe
  misc_feature (1)..(25): SEQ ID NO: 2368; WAN024FUA; Start 289; Stop 313
atgaggaaaatggctaatctgagaa

SEQ ID NO: 323428 - DNA, 25 bp, Artificial
  probe
  misc_feature (1)..(25): SEQ ID NO: 2368; WAN024FUA; Start 295; Stop 319
aaaatggctaatctgagaagtgaca

SEQ ID NO: 323429 - DNA, 25 bp, Artificial
  probe
  misc_feature (1)..(25): SEQ ID NO: 2368; WAN024FUA; Start 291; Stop 315
gaggaaaatggctaatctgagaagt

SEQ ID NO: 323430 - DNA, 25 bp, Artificial
  probe
  misc_feature (1)..(25): SEQ ID NO: 2368; WAN024FUA; Start 290; Stop 314
tgaggaaaatggctaatctgagaag

SEQ ID NO: 323431 - DNA, 25 bp, Artificial
  probe
  misc_feature (1)..(25): SEQ ID NO: 2368; WAN024FUA; Start 288; Stop 312
tatgaggaaaatggctaatctgaga

SEQ ID NO: 323432 - DNA, 25 bp, Artificial
  probe
  misc_feature (1)..(25): SEQ ID NO: 2368; WAN024FUA; Start 305; Stop 329
atctgagaagtgacacgatcatgct

SEQ ID NO: 323433 - DNA, 25 bp, Artificial
  probe
  misc_feature (1)..(25): SEQ ID NO: 2368; WAN024FUA; Start 293; Stop 317
ggaaaatggctaatctgagaagtga

SEQ ID NO: 323434 - DNA, 25 bp, Artificial
  probe
  misc_feature (1)..(25): SEQ ID NO: 2368; WAN024FUA; Start 292; Stop 316
aggaaaatggctaatctgagaagtg

SEQ ID NO: 323435 - DNA, 25 bp, Artificial
  probe
  misc_feature (1)..(25): SEQ ID NO: 2368; WAN024FUA; Start 271; Stop 295
gagactagaagccaaaatatgagga

SEQ ID NO: 323436 - DNA, 25 bp, Artificial
  probe
  misc_feature (1)..(25): SEQ ID NO: 2368; WAN024FUA; Start 270; Stop 294
tgagactagaagccaaaatatgagg

SEQ ID NO: 323437 - DNA, 25 bp, Artificial
  probe
  misc_feature (1)..(25): SEQ ID NO: 2368; WAN024FUA; Start 272; Stop 296
agactagaagccaaaatatgaggaa

SEQ ID NO: 323438 - DNA, 25 bp, Artificial
  probe
  misc_feature (1)..(25): SEQ ID NO: 2368; WAN024FUA; Start 104; Stop 128
tccttgaaatcctcaattctatcca

SEQ ID NO: 323439 - DNA, 25 bp, Artificial
  probe
  misc_feature (1)..(25): SEQ ID NO: 2369; WAN024CLV; Start 108; Stop 132
tgaaatgaaagaagtgccaaacaat

SEQ ID NO: 323440 - DNA, 25 bp, Artificial
  probe
  misc_feature (1)..(25): SEQ ID NO: 2369; WAN024CLV; Start 99; Stop 123
tgtttaccgtgaaatgaaagaagtg

SEQ ID NO: 323441 - DNA, 25 bp, Artificial
  probe
  misc_feature (1)..(25): SEQ ID NO: 2369; WAN024CLV; Start 96; Stop 120
cgatgtttaccgtgaaatgaaagaa

SEQ ID NO: 323442 - DNA, 25 bp, Artificial
  probe
  misc_feature (1)..(25): SEQ ID NO: 2369; WAN024CLV; Start 98; Stop 122
atgtttaccgtgaaatgaaagaagt

SEQ ID NO: 323443 - DNA, 25 bp, Artificial
  probe
  misc_feature (1)..(25): SEQ ID NO: 2369; WAN024CLV; Start 97; Stop 121
gatgtttaccgtgaaatgaaagaag

SEQ ID NO: 323444 - DNA, 25 bp, Artificial
  probe
  misc_feature (1)..(25): SEQ ID NO: 2369; WAN024CLV; Start 107; Stop 131
gtgaaatgaaagaagtgccaaacaa

SEQ ID NO: 323445 - DNA, 25 bp, Artificial
  probe
  misc_feature (1)..(25): SEQ ID NO: 2369; WAN024CLV; Start 109; Stop 133
gaaatgaaagaagtgccaaacaata

SEQ ID NO: 323446 - DNA, 25 bp, Artificial
  probe
  misc_feature (1)..(25): SEQ ID NO: 2369; WAN024CLV; Start 100; Stop 124
gtttaccgtgaaatgaaagaagtgc

SEQ ID NO: 323447 - DNA, 25 bp, Artificial
  probe
  misc_feature (1)..(25): SEQ ID NO: 2369; WAN024CLV; Start 111; Stop 135
aatgaaagaagtgccaaacaataaa

SEQ ID NO: 323448 - DNA, 25 bp, Artificial
  probe
  misc_feature (1)..(25): SEQ ID NO: 2369; WAN024CLV; Start 110; Stop 134
aaatgaaagaagtgccaaacaataa

SEQ ID NO: 323449 - DNA, 25 bp, Artificial
  probe
  misc_feature (1)..(25): SEQ ID NO: 2369; WAN024CLV; Start 101; Stop 125
tttaccgtgaaatgaaagaagtgcc

SEQ ID NO: 323450 - DNA, 25 bp, Artificial
  probe
  misc_feature (1)..(25): SEQ ID NO: 2369; WAN024CLV; Start 95; Stop 119
tcgatgtttaccgtgaaatgaaaga

SEQ ID NO: 323451 - DNA, 25 bp, Artificial
  probe
  misc_feature (1)..(25): SEQ ID NO: 2369; WAN024CLV; Start 106; Stop 130
cgtgaaatgaaagaagtgccaaaca

SEQ ID NO: 323452 - DNA, 25 bp, Artificial
  probe
  misc_feature (1)..(25): SEQ ID NO: 2369; WAN024CLV; Start 103; Stop 127
taccgtgaaatgaaagaagtgccaa

SEQ ID NO: 323453 - DNA, 25 bp, Artificial
  probe
  misc_feature (1)..(25): SEQ ID NO: 2369; WAN024CLV; Start 102; Stop 126
ttaccgtgaaatgaaagaagtgcca

SEQ ID NO: 323454 - DNA, 25 bp, Artificial
  probe
  misc_feature (1)..(25): SEQ ID NO: 2369; WAN024CLV; Start 3; Stop 27
ggatttcttaaaccattctttcgat

SEQ ID NO: 323455 - DNA, 25 bp, Artificial
  probe
  misc_feature (1)..(25): SEQ ID NO: 2369; WAN024CLV; Start 105; Stop 129
ccgtgaaatgaaagaagtgccaaac

SEQ ID NO: 323456 - DNA, 25 bp, Artificial
  probe
  misc_feature (1)..(25): SEQ ID NO: 2369; WAN024CLV; Start 2; Stop 26
tggatttcttaaaccattctttcga

SEQ ID NO: 323457 - DNA, 25 bp, Artificial
  probe
  misc_feature (1)..(25): SEQ ID NO: 2369; WAN024CLV; Start 113; Stop 137
tgaaagaagtgccaaacaataaaat

SEQ ID NO: 323458 - DNA, 25 bp, Artificial
  probe
  misc_feature (1)..(25): SEQ ID NO: 2369; WAN024CLV; Start 112; Stop 136
atgaaagaagtgccaaacaataaaa

SEQ ID NO: 323459 - DNA, 25 bp, Artificial
  probe
  misc_feature (1)..(25): SEQ ID NO: 2369; WAN024CLV; Start 120; Stop 144
agtgccaaacaataaaattcatcaa

SEQ ID NO: 323460 - DNA, 25 bp, Artificial
  probe
  misc_feature (1)..(25): SEQ ID NO: 2369; WAN024CLV; Start 119; Stop 143
aagtgccaaacaataaaattcatca

SEQ ID NO: 323461 - DNA, 25 bp, Artificial
  probe
  misc_feature (1)..(25): SEQ ID NO: 2369; WAN024CLV; Start 104; Stop 128
accgtgaaatgaaagaagtgccaaa

SEQ ID NO: 323462 - DNA, 25 bp, Artificial
  probe
  misc_feature (1)..(25): SEQ ID NO: 2369; WAN024CLV; Start 116; Stop 140
aagaagtgccaaacaataaaattca

SEQ ID NO: 323463 - DNA, 25 bp, Artificial
  probe
  misc_feature (1)..(25): SEQ ID NO: 2369; WAN024CLV; Start 117; Stop 141
agaagtgccaaacaataaaattcat

SEQ ID NO: 323464 - DNA, 25 bp, Artificial
  probe
  misc_feature (1)..(25): SEQ ID NO: 2369; WAN024CLV; Start 118; Stop 142
gaagtgccaaacaataaaattcatc

SEQ ID NO: 323465 - DNA, 25 bp, Artificial
  probe
  misc_feature (1)..(25): SEQ ID NO: 2369; WAN024CLV; Start 94; Stop 118
atcgatgtttaccgtgaaatgaaag

SEQ ID NO: 323466 - DNA, 25 bp, Artificial
  probe
  misc_feature (1)..(25): SEQ ID NO: 2369; WAN024CLV; Start 6; Stop 30
tttcttaaaccattctttcgatact

SEQ ID NO: 323467 - DNA, 25 bp, Artificial
  probe
  misc_feature (1)..(25): SEQ ID NO: 2369; WAN024CLV; Start 121; Stop 145
gtgccaaacaataaaattcatcaat

SEQ ID NO: 323468 - DNA, 25 bp, Artificial
  probe
  misc_feature (1)..(25): SEQ ID NO: 2369; WAN024CLV; Start 114; Stop 138
gaaagaagtgccaaacaataaaatt

SEQ ID NO: 323469 - DNA, 25 bp, Artificial
  probe
  misc_feature (1)..(25): SEQ ID NO: 2369; WAN024CLV; Start 123; Stop 147
gccaaacaataaaattcatcaatca

SEQ ID NO: 323470 - DNA, 25 bp, Artificial
  probe
  misc_feature (1)..(25): SEQ ID NO: 2369; WAN024CLV; Start 122; Stop 146
tgccaaacaataaaattcatcaatc

SEQ ID NO: 323471 - DNA, 25 bp, Artificial
  probe
  misc_feature (1)..(25): SEQ ID NO: 2369; WAN024CLV; Start 115; Stop 139
aaagaagtgccaaacaataaaattc

SEQ ID NO: 323472 - DNA, 25 bp, Artificial
  probe
  misc_feature (1)..(25): SEQ ID NO: 2370; WAN024EYC; Start 809; Stop 833
cctctctgatggctgttattctctt

SEQ ID NO: 323473 - DNA, 25 bp, Artificial
  probe
  misc_feature (1)..(25): SEQ ID NO: 2370; WAN024EYC; Start 302; Stop 326
tccaagatcctcctagtatgttgtt

SEQ ID NO: 323474 - DNA, 25 bp, Artificial
  probe
  misc_feature (1)..(25): SEQ ID NO: 2370; WAN024EYC; Start 301; Stop 325
ctccaagatcctcctagtatgttgt

SEQ ID NO: 323475 - DNA, 25 bp, Artificial
  probe
  misc_feature (1)..(25): SEQ ID NO: 2370; WAN024EYC; Start 807; Stop 831
gacctctctgatggctgttattctc

SEQ ID NO: 323476 - DNA, 25 bp, Artificial
  probe
  misc_feature (1)..(25): SEQ ID NO: 2370; WAN024EYC; Start 299; Stop 323
acctccaagatcctcctagtatgtt

SEQ ID NO: 323477 - DNA, 25 bp, Artificial
  probe
  misc_feature (1)..(25): SEQ ID NO: 2370; WAN024EYC; Start 300; Stop 324
cctccaagatcctcctagtatgttg

SEQ ID NO: 323478 - DNA, 25 bp, Artificial
  probe
  misc_feature (1)..(25): SEQ ID NO: 2370; WAN024EYC; Start 297; Stop 321
agacctccaagatcctcctagtatg

SEQ ID NO: 323479 - DNA, 25 bp, Artificial
  probe
  misc_feature (1)..(25): SEQ ID NO: 2370; WAN024EYC; Start 296; Stop 320
cagacctccaagatcctcctagtat

SEQ ID NO: 323480 - DNA, 25 bp, Artificial
  probe
  misc_feature (1)..(25): SEQ ID NO: 2370; WAN024EYC; Start 808; Stop 832
acctctctgatggctgttattctct

SEQ ID NO: 323481 - DNA, 25 bp, Artificial
  probe
  misc_feature (1)..(25): SEQ ID NO: 2370; WAN024EYC; Start 298; Stop 322
gacctccaagatcctcctagtatgt

SEQ ID NO: 323482 - DNA, 25 bp, Artificial
  probe
  misc_feature (1)..(25): SEQ ID NO: 2370; WAN024EYC; Start 814; Stop 838
ctgatggctgttattctctttcttg

SEQ ID NO: 323483 - DNA, 25 bp, Artificial
  probe
  misc_feature (1)..(25): SEQ ID NO: 2370; WAN024EYC; Start 813; Stop 837
tctgatggctgttattctctttctt

SEQ ID NO: 323484 - DNA, 25 bp, Artificial
  probe
  misc_feature (1)..(25): SEQ ID NO: 2370; WAN024EYC; Start 812; Stop 836
ctctgatggctgttattctctttct

SEQ ID NO: 323485 - DNA, 25 bp, Artificial
  probe
  misc_feature (1)..(25): SEQ ID NO: 2370; WAN024EYC; Start 811; Stop 835
tctctgatggctgttattctctttc

SEQ ID NO: 323486 - DNA, 25 bp, Artificial
  probe
  misc_feature (1)..(25): SEQ ID NO: 2370; WAN024EYC; Start 810; Stop 834
ctctctgatggctgttattctcttt

SEQ ID NO: 323487 - DNA, 25 bp, Artificial
  probe
  misc_feature (1)..(25): SEQ ID NO: 2370; WAN024EYC; Start 194; Stop 218
cggcagtccattatatttctttctc

SEQ ID NO: 323488 - DNA, 25 bp, Artificial
  probe
  misc_feature (1)..(25): SEQ ID NO: 2370; WAN024EYC; Start 816; Stop 840
gatggctgttattctctttcttgga

SEQ ID NO: 323489 - DNA, 25 bp, Artificial
  probe
  misc_feature (1)..(25): SEQ ID NO: 2370; WAN024EYC; Start 815; Stop 839
tgatggctgttattctctttcttgg

SEQ ID NO: 323490 - DNA, 25 bp, Artificial
  probe
  misc_feature (1)..(25): SEQ ID NO: 2370; WAN024EYC; Start 195; Stop 219
ggcagtccattatatttctttctct

SEQ ID NO: 323491 - DNA, 25 bp, Artificial
  probe
  misc_feature (1)..(25): SEQ ID NO: 2370; WAN024EYC; Start 25; Stop 49
atttcaatcatcgtcccttgtttaa

SEQ ID NO: 323492 - DNA, 25 bp, Artificial
  probe
  misc_feature (1)..(25): SEQ ID NO: 2370; WAN024EYC; Start 825; Stop 849
tattctctttcttggaggcattcaa

SEQ ID NO: 323493 - DNA, 25 bp, Artificial
  probe
  misc_feature (1)..(25): SEQ ID NO: 2370; WAN024EYC; Start 824; Stop 848
ttattctctttcttggaggcattca

SEQ ID NO: 323494 - DNA, 25 bp, Artificial
  probe
  misc_feature (1)..(25): SEQ ID NO: 2370; WAN024EYC; Start 823; Stop 847
gttattctctttcttggaggcattc

SEQ ID NO: 323495 - DNA, 25 bp, Artificial
  probe
  misc_feature (1)..(25): SEQ ID NO: 2370; WAN024EYC; Start 24; Stop 48
gatttcaatcatcgtcccttgttta

SEQ ID NO: 323496 - DNA, 25 bp, Artificial
  probe
  misc_feature (1)..(25): SEQ ID NO: 2370; WAN024EYC; Start 822; Stop 846
tgttattctctttcttggaggcatt

SEQ ID NO: 323497 - DNA, 25 bp, Artificial
  probe
  misc_feature (1)..(25): SEQ ID NO: 2370; WAN024EYC; Start 305; Stop 329
aagatcctcctagtatgttgtttga

SEQ ID NO: 323498 - DNA, 25 bp, Artificial
  probe
  misc_feature (1)..(25): SEQ ID NO: 2370; WAN024EYC; Start 821; Stop 845
ctgttattctctttcttggaggcat

SEQ ID NO: 323499 - DNA, 25 bp, Artificial
  probe
  misc_feature (1)..(25): SEQ ID NO: 2370; WAN024EYC; Start 817; Stop 841
atggctgttattctctttcttggag

SEQ ID NO: 323500 - DNA, 25 bp, Artificial
  probe
  misc_feature (1)..(25): SEQ ID NO: 2370; WAN024EYC; Start 804; Stop 828
ttggacctctctgatggctgttatt

SEQ ID NO: 323501 - DNA, 25 bp, Artificial
  probe
  misc_feature (1)..(25): SEQ ID NO: 2370; WAN024EYC; Start 310; Stop 334
cctcctagtatgttgtttgagatga

SEQ ID NO: 323502 - DNA, 25 bp, Artificial
  probe
  misc_feature (1)..(25): SEQ ID NO: 2370; WAN024EYC; Start 309; Stop 333
tcctcctagtatgttgtttgagatg

SEQ ID NO: 323503 - DNA, 25 bp, Artificial
  probe
  misc_feature (1)..(25): SEQ ID NO: 2370; WAN024EYC; Start 303; Stop 327
ccaagatcctcctagtatgttgttt

SEQ ID NO: 323504 - DNA, 25 bp, Artificial
  probe
  misc_feature (1)..(25): SEQ ID NO: 2370; WAN024EYC; Start 806; Stop 830
ggacctctctgatggctgttattct

SEQ ID NO: 323505 - DNA, 25 bp, Artificial
  probe
  misc_feature (1)..(25): SEQ ID NO: 2371; WAN024CAF; Start 756; Stop 780
agaggatgaagccaatgtattatgt

SEQ ID NO: 323506 - DNA, 25 bp, Artificial
  probe
  misc_feature (1)..(25): SEQ ID NO: 2371; WAN024CAF; Start 757; Stop 781
gaggatgaagccaatgtattatgtc

SEQ ID NO: 323507 - DNA, 25 bp, Artificial
  probe
  misc_feature (1)..(25): SEQ ID NO: 2371; WAN024CAF; Start 758; Stop 782
aggatgaagccaatgtattatgtcg

SEQ ID NO: 323508 - DNA, 25 bp, Artificial
  probe
  misc_feature (1)..(25): SEQ ID NO: 2371; WAN024CAF; Start 1153; Stop 1177
atagaagccaatccttacgatagtt

SEQ ID NO: 323509 - DNA, 25 bp, Artificial
  probe
  misc_feature (1)..(25): SEQ ID NO: 2371; WAN024CAF; Start 1152; Stop 1176
aatagaagccaatccttacgatagt

SEQ ID NO: 323510 - DNA, 25 bp, Artificial
  probe
  misc_feature (1)..(25): SEQ ID NO: 2371; WAN024CAF; Start 77; Stop 101
gacgacttgttcttgttatagacga

SEQ ID NO: 323511 - DNA, 25 bp, Artificial
  probe
  misc_feature (1)..(25): SEQ ID NO: 2371; WAN024CAF; Start 78; Stop 102
acgacttgttcttgttatagacgac

SEQ ID NO: 323512 - DNA, 25 bp, Artificial
  probe
  misc_feature (1)..(25): SEQ ID NO: 2371; WAN024CAF; Start 759; Stop 783
ggatgaagccaatgtattatgtcgg

SEQ ID NO: 323513 - DNA, 25 bp, Artificial
  probe
  misc_feature (1)..(25): SEQ ID NO: 2371; WAN024CAF; Start 755; Stop 779
tagaggatgaagccaatgtattatg

SEQ ID NO: 323514 - DNA, 25 bp, Artificial
  probe
  misc_feature (1)..(25): SEQ ID NO: 2371; WAN024CAF; Start 76; Stop 100
ggacgacttgttcttgttatagacg

SEQ ID NO: 323515 - DNA, 25 bp, Artificial
  probe
  misc_feature (1)..(25): SEQ ID NO: 2371; WAN024CAF; Start 79; Stop 103
cgacttgttcttgttatagacgaca

SEQ ID NO: 323516 - DNA, 25 bp, Artificial
  probe
  misc_feature (1)..(25): SEQ ID NO: 2371; WAN024CAF; Start 45; Stop 69
aatacaagaagcattagaagcattg

SEQ ID NO: 323517 - DNA, 25 bp, Artificial
  probe
  misc_feature (1)..(25): SEQ ID NO: 2371; WAN024CAF; Start 1086; Stop 1110
taatcctgacaaggttgaacagtta

SEQ ID NO: 323518 - DNA, 25 bp, Artificial
  probe
  misc_feature (1)..(25): SEQ ID NO: 2371; WAN024CAF; Start 1085; Stop 1109
ataatcctgacaaggttgaacagtt

SEQ ID NO: 323519 - DNA, 25 bp, Artificial
  probe
  misc_feature (1)..(25): SEQ ID NO: 2371; WAN024CAF; Start 1084; Stop 1108
aataatcctgacaaggttgaacagt

SEQ ID NO: 323520 - DNA, 25 bp, Artificial
  probe
  misc_feature (1)..(25): SEQ ID NO: 2371; WAN024CAF; Start 724; Stop 748
gaacatcatcttgctcttattatgg

SEQ ID NO: 323521 - DNA, 25 bp, Artificial
  probe
  misc_feature (1)..(25): SEQ ID NO: 2371; WAN024CAF; Start 723; Stop 747
ggaacatcatcttgctcttattatg

SEQ ID NO: 323522 - DNA, 25 bp, Artificial
  probe
  misc_feature (1)..(25): SEQ ID NO: 2371; WAN024CAF; Start 90; Stop 114
tgttatagacgacaaggatagagaa

SEQ ID NO: 323523 - DNA, 25 bp, Artificial
  probe
  misc_feature (1)..(25): SEQ ID NO: 2371; WAN024CAF; Start 1087; Stop 1111
aatcctgacaaggttgaacagttag

SEQ ID NO: 323524 - DNA, 25 bp, Artificial
  probe
  misc_feature (1)..(25): SEQ ID NO: 2371; WAN024CAF; Start 17; Stop 41
aggataatcagtcaatggaatatcg

SEQ ID NO: 323525 - DNA, 25 bp, Artificial
  probe
  misc_feature (1)..(25): SEQ ID NO: 2371; WAN024CAF; Start 754; Stop 778
atagaggatgaagccaatgtattat

SEQ ID NO: 323526 - DNA, 25 bp, Artificial
  probe
  misc_feature (1)..(25): SEQ ID NO: 2371; WAN024CAF; Start 1088; Stop 1112
atcctgacaaggttgaacagttaga

SEQ ID NO: 323527 - DNA, 25 bp, Artificial
  probe
  misc_feature (1)..(25): SEQ ID NO: 2371; WAN024CAF; Start 1089; Stop 1113
tcctgacaaggttgaacagttagaa

SEQ ID NO: 323528 - DNA, 25 bp, Artificial
  probe
  misc_feature (1)..(25): SEQ ID NO: 2371; WAN024CAF; Start 994; Stop 1018
gcattaggctttgaaggtgatttaa

SEQ ID NO: 323529 - DNA, 25 bp, Artificial
  probe
  misc_feature (1)..(25): SEQ ID NO: 2371; WAN024CAF; Start 198; Stop 222
ttgtatgcctatgagcgaaagttta

SEQ ID NO: 323530 - DNA, 25 bp, Artificial
  probe
  misc_feature (1)..(25): SEQ ID NO: 2371; WAN024CAF; Start 351; Stop 375
acgtatgtgtgtagctgaagatata

SEQ ID NO: 323531 - DNA, 25 bp, Artificial
  probe
  misc_feature (1)..(25): SEQ ID NO: 2371; WAN024CAF; Start 11; Stop 35
gcagaaaggataatcagtcaatgga

SEQ ID NO: 323532 - DNA, 25 bp, Artificial
  probe
  misc_feature (1)..(25): SEQ ID NO: 2371; WAN024CAF; Start 10; Stop 34
agcagaaaggataatcagtcaatgg

SEQ ID NO: 323533 - DNA, 25 bp, Artificial
  probe
  misc_feature (1)..(25): SEQ ID NO: 2371; WAN024CAF; Start 352; Stop 376
cgtatgtgtgtagctgaagatataa

SEQ ID NO: 323534 - DNA, 25 bp, Artificial
  probe
  misc_feature (1)..(25): SEQ ID NO: 2371; WAN024CAF; Start 194; Stop 218
taatttgtatgcctatgagcgaaag

SEQ ID NO: 323535 - DNA, 25 bp, Artificial
  probe
  misc_feature (1)..(25): SEQ ID NO: 2371; WAN024CAF; Start 199; Stop 223
tgtatgcctatgagcgaaagtttag

SEQ ID NO: 323536 - DNA, 25 bp, Artificial
  probe
  misc_feature (1)..(25): SEQ ID NO: 2371; WAN024CAF; Start 1154; Stop 1178
tagaagccaatccttacgatagttt

SEQ ID NO: 323537 - DNA, 25 bp, Artificial
  probe
  misc_feature (1)..(25): SEQ ID NO: 2371; WAN024CAF; Start 726; Stop 750
acatcatcttgctcttattatggga

SEQ ID NO: 323538 - DNA, 25 bp, Artificial
  probe
  misc_feature (1)..(25): SEQ ID NO: 2372; WAN024CHE; Start 38; Stop 62
tactagagaatgtccaagtcatcca

SEQ ID NO: 323539 - DNA, 25 bp, Artificial
  probe
  misc_feature (1)..(25): SEQ ID NO: 2372; WAN024CHE; Start 37; Stop 61
ttactagagaatgtccaagtcatcc

SEQ ID NO: 323540 - DNA, 25 bp, Artificial
  probe
  misc_feature (1)..(25): SEQ ID NO: 2372; WAN024CHE; Start 39; Stop 63
actagagaatgtccaagtcatccaa

SEQ ID NO: 323541 - DNA, 25 bp, Artificial
  probe
  misc_feature (1)..(25): SEQ ID NO: 2372; WAN024CHE; Start 41; Stop 65
tagagaatgtccaagtcatccaaag

SEQ ID NO: 323542 - DNA, 25 bp, Artificial
  probe
  misc_feature (1)..(25): SEQ ID NO: 2372; WAN024CHE; Start 173; Stop 197
gtttagcactacgcaaagaagaatg

SEQ ID NO: 323543 - DNA, 25 bp, Artificial
  probe
  misc_feature (1)..(25): SEQ ID NO: 2372; WAN024CHE; Start 417; Stop 441
aatggaagtggatgatttgctgatt

SEQ ID NO: 323544 - DNA, 25 bp, Artificial
  probe
  misc_feature (1)..(25): SEQ ID NO: 2372; WAN024CHE; Start 204; Stop 228
gacctaccagtttctcttgatgaag

SEQ ID NO: 323545 - DNA, 25 bp, Artificial
  probe
  misc_feature (1)..(25): SEQ ID NO: 2372; WAN024CHE; Start 40; Stop 64
ctagagaatgtccaagtcatccaaa

SEQ ID NO: 323546 - DNA, 25 bp, Artificial
  probe
  misc_feature (1)..(25): SEQ ID NO: 2372; WAN024CHE; Start 203; Stop 227
agacctaccagtttctcttgatgaa

SEQ ID NO: 323547 - DNA, 25 bp, Artificial
  probe
  misc_feature (1)..(25): SEQ ID NO: 2372; WAN024CHE; Start 420; Stop 444
ggaagtggatgatttgctgattgat

SEQ ID NO: 323548 - DNA, 25 bp, Artificial
  probe
  misc_feature (1)..(25): SEQ ID NO: 2372; WAN024CHE; Start 416; Stop 440
gaatggaagtggatgatttgctgat

SEQ ID NO: 323549 - DNA, 25 bp, Artificial
  probe
  misc_feature (1)..(25): SEQ ID NO: 2372; WAN024CHE; Start 186; Stop 210
caaagaagaatggctcaagacctac

SEQ ID NO: 323550 - DNA, 25 bp, Artificial
  probe
  misc_feature (1)..(25): SEQ ID NO: 2372; WAN024CHE; Start 47; Stop 71
atgtccaagtcatccaaagtgattt

SEQ ID NO: 323551 - DNA, 25 bp, Artificial
  probe
  misc_feature (1)..(25): SEQ ID NO: 2372; WAN024CHE; Start 46; Stop 70
aatgtccaagtcatccaaagtgatt

SEQ ID NO: 323552 - DNA, 25 bp, Artificial
  probe
  misc_feature (1)..(25): SEQ ID NO: 2372; WAN024CHE; Start 418; Stop 442
atggaagtggatgatttgctgattg

SEQ ID NO: 323553 - DNA, 25 bp, Artificial
  probe
  misc_feature (1)..(25): SEQ ID NO: 2372; WAN024CHE; Start 174; Stop 198
tttagcactacgcaaagaagaatgg

SEQ ID NO: 323554 - DNA, 25 bp, Artificial
  probe
  misc_feature (1)..(25): SEQ ID NO: 2372; WAN024CHE; Start 45; Stop 69
gaatgtccaagtcatccaaagtgat

SEQ ID NO: 323555 - DNA, 25 bp, Artificial
  probe
  misc_feature (1)..(25): SEQ ID NO: 2372; WAN024CHE; Start 43; Stop 67
gagaatgtccaagtcatccaaagtg

SEQ ID NO: 323556 - DNA, 25 bp, Artificial
  probe
  misc_feature (1)..(25): SEQ ID NO: 2372; WAN024CHE; Start 42; Stop 66
agagaatgtccaagtcatccaaagt

SEQ ID NO: 323557 - DNA, 25 bp, Artificial
  probe
  misc_feature (1)..(25): SEQ ID NO: 2372; WAN024CHE; Start 207; Stop 231
ctaccagtttctcttgatgaaggct

SEQ ID NO: 323558 - DNA, 25 bp, Artificial
  probe
  misc_feature (1)..(25): SEQ ID NO: 2372; WAN024CHE; Start 187; Stop 211
aaagaagaatggctcaagacctacc

SEQ ID NO: 323559 - DNA, 25 bp, Artificial
  probe
  misc_feature (1)..(25): SEQ ID NO: 2372; WAN024CHE; Start 452; Stop 476
ctagcatggcagatgtaattggttt

SEQ ID NO: 323560 - DNA, 25 bp, Artificial
  probe
  misc_feature (1)..(25): SEQ ID NO: 2372; WAN024CHE; Start 44; Stop 68
agaatgtccaagtcatccaaagtga

SEQ ID NO: 323561 - DNA, 25 bp, Artificial
  probe
  misc_feature (1)..(25): SEQ ID NO: 2372; WAN024CHE; Start 331; Stop 355
attactatcctcgaaatgggttctg

SEQ ID NO: 323562 - DNA, 25 bp, Artificial
  probe
  misc_feature (1)..(25): SEQ ID NO: 2372; WAN024CHE; Start 36; Stop 60
tttactagagaatgtccaagtcatc

SEQ ID NO: 323563 - DNA, 25 bp, Artificial
  probe
  misc_feature (1)..(25): SEQ ID NO: 2372; WAN024CHE; Start 330; Stop 354
aattactatcctcgaaatgggttct

SEQ ID NO: 323564 - DNA, 25 bp, Artificial
  probe
  misc_feature (1)..(25): SEQ ID NO: 2372; WAN024CHE; Start 453; Stop 477
tagcatggcagatgtaattggtttg

SEQ ID NO: 323565 - DNA, 25 bp, Artificial
  probe
  misc_feature (1)..(25): SEQ ID NO: 2372; WAN024CHE; Start 419; Stop 443
tggaagtggatgatttgctgattga

SEQ ID NO: 323566 - DNA, 25 bp, Artificial
  probe
  misc_feature (1)..(25): SEQ ID NO: 2372; WAN024CHE; Start 328; Stop 352
gaaattactatcctcgaaatgggtt

SEQ ID NO: 323567 - DNA, 25 bp, Artificial
  probe
  misc_feature (1)..(25): SEQ ID NO: 2372; WAN024CHE; Start 561; Stop 585
ctattatcctgatgatgccgttgcg

SEQ ID NO: 323568 - DNA, 25 bp, Artificial
  probe
  misc_feature (1)..(25): SEQ ID NO: 2372; WAN024CHE; Start 931; Stop 955
tggactcaaggtactgaaatataac

SEQ ID NO: 323569 - DNA, 25 bp, Artificial
  probe
  misc_feature (1)..(25): SEQ ID NO: 2372; WAN024CHE; Start 329; Stop 353
aaattactatcctcgaaatgggttc

SEQ ID NO: 323570 - DNA, 25 bp, Artificial
  probe
  misc_feature (1)..(25): SEQ ID NO: 2372; WAN024CHE; Start 205; Stop 229
acctaccagtttctcttgatgaagg

SEQ ID NO: 323571 - DNA, 25 bp, Artificial
  probe
  misc_feature (1)..(25): SEQ ID NO: 2373; WAN024D5Y; Start 43; Stop 67
tacaatccacatgaagtatcagact

SEQ ID NO: 323572 - DNA, 25 bp, Artificial
  probe
  misc_feature (1)..(25): SEQ ID NO: 2373; WAN024D5Y; Start 30; Stop 54
agcacagaaactatacaatccacat

SEQ ID NO: 323573 - DNA, 25 bp, Artificial
  probe
  misc_feature (1)..(25): SEQ ID NO: 2373; WAN024D5Y; Start 28; Stop 52
gaagcacagaaactatacaatccac

SEQ ID NO: 323574 - DNA, 25 bp, Artificial
  probe
  misc_feature (1)..(25): SEQ ID NO: 2373; WAN024D5Y; Start 27; Stop 51
agaagcacagaaactatacaatcca

SEQ ID NO: 323575 - DNA, 25 bp, Artificial
  probe
  misc_feature (1)..(25): SEQ ID NO: 2373; WAN024D5Y; Start 22; Stop 46
tacgaagaagcacagaaactataca

SEQ ID NO: 323576 - DNA, 25 bp, Artificial
  probe
  misc_feature (1)..(25): SEQ ID NO: 2373; WAN024D5Y; Start 29; Stop 53
aagcacagaaactatacaatccaca

SEQ ID NO: 323577 - DNA, 25 bp, Artificial
  probe
  misc_feature (1)..(25): SEQ ID NO: 2373; WAN024D5Y; Start 23; Stop 47
acgaagaagcacagaaactatacaa

SEQ ID NO: 323578 - DNA, 25 bp, Artificial
  probe
  misc_feature (1)..(25): SEQ ID NO: 2373; WAN024D5Y; Start 24; Stop 48
cgaagaagcacagaaactatacaat

SEQ ID NO: 323579 - DNA, 25 bp, Artificial
  probe
  misc_feature (1)..(25): SEQ ID NO: 2373; WAN024D5Y; Start 26; Stop 50
aagaagcacagaaactatacaatcc

SEQ ID NO: 323580 - DNA, 25 bp, Artificial
  probe
  misc_feature (1)..(25): SEQ ID NO: 2373; WAN024D5Y; Start 42; Stop 66
atacaatccacatgaagtatcagac

SEQ ID NO: 323581 - DNA, 25 bp, Artificial
  probe
  misc_feature (1)..(25): SEQ ID NO: 2373; WAN024D5Y; Start 60; Stop 84
atcagactttgtttatgccaatcat

SEQ ID NO: 323582 - DNA, 25 bp, Artificial
  probe
  misc_feature (1)..(25): SEQ ID NO: 2373; WAN024D5Y; Start 370; Stop 394
aaagtcgcagaactaatcccttatt

SEQ ID NO: 323583 - DNA, 25 bp, Artificial
  probe
  misc_feature (1)..(25): SEQ ID NO: 2373; WAN024D5Y; Start 368; Stop 392
ttaaagtcgcagaactaatccctta

SEQ ID NO: 323584 - DNA, 25 bp, Artificial
  probe
  misc_feature (1)..(25): SEQ ID NO: 2373; WAN024D5Y; Start 369; Stop 393
taaagtcgcagaactaatcccttat

SEQ ID NO: 323585 - DNA, 25 bp, Artificial
  probe
  misc_feature (1)..(25): SEQ ID NO: 2373; WAN024D5Y; Start 21; Stop 45
gtacgaagaagcacagaaactatac

SEQ ID NO: 323586 - DNA, 25 bp, Artificial
  probe
  misc_feature (1)..(25): SEQ ID NO: 2373; WAN024D5Y; Start 371; Stop 395
aagtcgcagaactaatcccttattg

SEQ ID NO: 323587 - DNA, 25 bp, Artificial
  probe
  misc_feature (1)..(25): SEQ ID NO: 2373; WAN024D5Y; Start 59; Stop 83
tatcagactttgtttatgccaatca

SEQ ID NO: 323588 - DNA, 25 bp, Artificial
  probe
  misc_feature (1)..(25): SEQ ID NO: 2373; WAN024D5Y; Start 367; Stop 391
gttaaagtcgcagaactaatccctt

SEQ ID NO: 323589 - DNA, 25 bp, Artificial
  probe
  misc_feature (1)..(25): SEQ ID NO: 2373; WAN024D5Y; Start 31; Stop 55
gcacagaaactatacaatccacatg

SEQ ID NO: 323590 - DNA, 25 bp, Artificial
  probe
  misc_feature (1)..(25): SEQ ID NO: 2373; WAN024D5Y; Start 25; Stop 49
gaagaagcacagaaactatacaatc

SEQ ID NO: 323591 - DNA, 25 bp, Artificial
  probe
  misc_feature (1)..(25): SEQ ID NO: 2373; WAN024D5Y; Start 58; Stop 82
gtatcagactttgtttatgccaatc

SEQ ID NO: 323592 - DNA, 25 bp, Artificial
  probe
  misc_feature (1)..(25): SEQ ID NO: 2373; WAN024D5Y; Start 57; Stop 81
agtatcagactttgtttatgccaat

SEQ ID NO: 323593 - DNA, 25 bp, Artificial
  probe
  misc_feature (1)..(25): SEQ ID NO: 2373; WAN024D5Y; Start 32; Stop 56
cacagaaactatacaatccacatga

SEQ ID NO: 323594 - DNA, 25 bp, Artificial
  probe
  misc_feature (1)..(25): SEQ ID NO: 2373; WAN024D5Y; Start 65; Stop 89
actttgtttatgccaatcatgttgt

SEQ ID NO: 323595 - DNA, 25 bp, Artificial
  probe
  misc_feature (1)..(25): SEQ ID NO: 2373; WAN024D5Y; Start 61; Stop 85
tcagactttgtttatgccaatcatg

SEQ ID NO: 323596 - DNA, 25 bp, Artificial
  probe
  misc_feature (1)..(25): SEQ ID NO: 2373; WAN024D5Y; Start 64; Stop 88
gactttgtttatgccaatcatgttg

SEQ ID NO: 323597 - DNA, 25 bp, Artificial
  probe
  misc_feature (1)..(25): SEQ ID NO: 2373; WAN024D5Y; Start 63; Stop 87
agactttgtttatgccaatcatgtt

SEQ ID NO: 323598 - DNA, 25 bp, Artificial
  probe
  misc_feature (1)..(25): SEQ ID NO: 2373; WAN024D5Y; Start 62; Stop 86
cagactttgtttatgccaatcatgt

SEQ ID NO: 323599 - DNA, 25 bp, Artificial
  probe
  misc_feature (1)..(25): SEQ ID NO: 2373; WAN024D5Y; Start 68; Stop 92
ttgtttatgccaatcatgttgtagc

SEQ ID NO: 323600 - DNA, 25 bp, Artificial
  probe
  misc_feature (1)..(25): SEQ ID NO: 2373; WAN024D5Y; Start 20; Stop 44
tgtacgaagaagcacagaaactata

SEQ ID NO: 323601 - DNA, 25 bp, Artificial
  probe
  misc_feature (1)..(25): SEQ ID NO: 2373; WAN024D5Y; Start 19; Stop 43
atgtacgaagaagcacagaaactat

SEQ ID NO: 323602 - DNA, 25 bp, Artificial
  probe
  misc_feature (1)..(25): SEQ ID NO: 2373; WAN024D5Y; Start 44; Stop 68
acaatccacatgaagtatcagactt

SEQ ID NO: 323603 - DNA, 25 bp, Artificial
  probe
  misc_feature (1)..(25): SEQ ID NO: 2373; WAN024D5Y; Start 18; Stop 42
gatgtacgaagaagcacagaaacta

SEQ ID NO: 323604 - DNA, 25 bp, Artificial
  probe
  misc_feature (1)..(25): SEQ ID NO: 2374; WAN024CWI; Start 283; Stop 307
ggttacattcatggagccaataatc

SEQ ID NO: 323605 - DNA, 25 bp, Artificial
  probe
  misc_feature (1)..(25): SEQ ID NO: 2374; WAN024CWI; Start 108; Stop 132
tcaaggttatgaacgagatcagatt

SEQ ID NO: 323606 - DNA, 25 bp, Artificial
  probe
  misc_feature (1)..(25): SEQ ID NO: 2374; WAN024CWI; Start 107; Stop 131
ctcaaggttatgaacgagatcagat

SEQ ID NO: 323607 - DNA, 25 bp, Artificial
  probe
  misc_feature (1)..(25): SEQ ID NO: 2374; WAN024CWI; Start 103; Stop 127
cttcctcaaggttatgaacgagatc

SEQ ID NO: 323608 - DNA, 25 bp, Artificial
  probe
  misc_feature (1)..(25): SEQ ID NO: 2374; WAN024CWI; Start 104; Stop 128
ttcctcaaggttatgaacgagatca

SEQ ID NO: 323609 - DNA, 25 bp, Artificial
  probe
  misc_feature (1)..(25): SEQ ID NO: 2374; WAN024CWI; Start 106; Stop 130
cctcaaggttatgaacgagatcaga

SEQ ID NO: 323610 - DNA, 25 bp, Artificial
  probe
  misc_feature (1)..(25): SEQ ID NO: 2374; WAN024CWI; Start 105; Stop 129
tcctcaaggttatgaacgagatcag

SEQ ID NO: 323611 - DNA, 25 bp, Artificial
  probe
  misc_feature (1)..(25): SEQ ID NO: 2374; WAN024CWI; Start 285; Stop 309
ttacattcatggagccaataatcct

SEQ ID NO: 323612 - DNA, 25 bp, Artificial
  probe
  misc_feature (1)..(25): SEQ ID NO: 2374; WAN024CWI; Start 284; Stop 308
gttacattcatggagccaataatcc

SEQ ID NO: 323613 - DNA, 25 bp, Artificial
  probe
  misc_feature (1)..(25): SEQ ID NO: 2374; WAN024CWI; Start 286; Stop 310
tacattcatggagccaataatcctg

SEQ ID NO: 323614 - DNA, 25 bp, Artificial
  probe
  misc_feature (1)..(25): SEQ ID NO: 2374; WAN024CWI; Start 282; Stop 306
tggttacattcatggagccaataat

SEQ ID NO: 323615 - DNA, 25 bp, Artificial
  probe
  misc_feature (1)..(25): SEQ ID NO: 2374; WAN024CWI; Start 281; Stop 305
ctggttacattcatggagccaataa

SEQ ID NO: 323616 - DNA, 25 bp, Artificial
  probe
  misc_feature (1)..(25): SEQ ID NO: 2374; WAN024CWI; Start 102; Stop 126
gcttcctcaaggttatgaacgagat

SEQ ID NO: 323617 - DNA, 25 bp, Artificial
  probe
  misc_feature (1)..(25): SEQ ID NO: 2374; WAN024CWI; Start 288; Stop 312
cattcatggagccaataatcctgtc

SEQ ID NO: 323618 - DNA, 25 bp, Artificial
  probe
  misc_feature (1)..(25): SEQ ID NO: 2374; WAN024CWI; Start 109; Stop 133
caaggttatgaacgagatcagattt

SEQ ID NO: 323619 - DNA, 25 bp, Artificial
  probe
  misc_feature (1)..(25): SEQ ID NO: 2374; WAN024CWI; Start 280; Stop 304
actggttacattcatggagccaata

SEQ ID NO: 323620 - DNA, 25 bp, Artificial
  probe
  misc_feature (1)..(25): SEQ ID NO: 2374; WAN024CWI; Start 287; Stop 311
acattcatggagccaataatcctgt

SEQ ID NO: 323621 - DNA, 25 bp, Artificial
  probe
  misc_feature (1)..(25): SEQ ID NO: 2374; WAN024CWI; Start 172; Stop 196
attatcggaattgtccctatcactc

SEQ ID NO: 323622 - DNA, 25 bp, Artificial
  probe
  misc_feature (1)..(25): SEQ ID NO: 2374; WAN024CWI; Start 171; Stop 195
gattatcggaattgtccctatcact

SEQ ID NO: 323623 - DNA, 25 bp, Artificial
  probe
  misc_feature (1)..(25): SEQ ID NO: 2374; WAN024CWI; Start 46; Stop 70
ctatctaaagcagctatccctcatc

SEQ ID NO: 323624 - DNA, 25 bp, Artificial
  probe
  misc_feature (1)..(25): SEQ ID NO: 2374; WAN024CWI; Start 41; Stop 65
aaatcctatctaaagcagctatccc

SEQ ID NO: 323625 - DNA, 25 bp, Artificial
  probe
  misc_feature (1)..(25): SEQ ID NO: 2374; WAN024CWI; Start 34; Stop 58
gtggaacaaatcctatctaaagcag

SEQ ID NO: 323626 - DNA, 25 bp, Artificial
  probe
  misc_feature (1)..(25): SEQ ID NO: 2374; WAN024CWI; Start 28; Stop 52
acattggtggaacaaatcctatcta

SEQ ID NO: 323627 - DNA, 25 bp, Artificial
  probe
  misc_feature (1)..(25): SEQ ID NO: 2374; WAN024CWI; Start 26; Stop 50
aaacattggtggaacaaatcctatc

SEQ ID NO: 323628 - DNA, 25 bp, Artificial
  probe
  misc_feature (1)..(25): SEQ ID NO: 2374; WAN024CWI; Start 27; Stop 51
aacattggtggaacaaatcctatct

SEQ ID NO: 323629 - DNA, 25 bp, Artificial
  probe
  misc_feature (1)..(25): SEQ ID NO: 2374; WAN024CWI; Start 76; Stop 100
attcaaatcaatgccctagaaggag

SEQ ID NO: 323630 - DNA, 25 bp, Artificial
  probe
  misc_feature (1)..(25): SEQ ID NO: 2374; WAN024CWI; Start 75; Stop 99
gattcaaatcaatgccctagaagga

SEQ ID NO: 323631 - DNA, 25 bp, Artificial
  probe
  misc_feature (1)..(25): SEQ ID NO: 2374; WAN024CWI; Start 47; Stop 71
tatctaaagcagctatccctcatca

SEQ ID NO: 323632 - DNA, 25 bp, Artificial
  probe
  misc_feature (1)..(25): SEQ ID NO: 2374; WAN024CWI; Start 42; Stop 66
aatcctatctaaagcagctatccct

SEQ ID NO: 323633 - DNA, 25 bp, Artificial
  probe
  misc_feature (1)..(25): SEQ ID NO: 2374; WAN024CWI; Start 33; Stop 57
ggtggaacaaatcctatctaaagca

SEQ ID NO: 323634 - DNA, 25 bp, Artificial
  probe
  misc_feature (1)..(25): SEQ ID NO: 2374; WAN024CWI; Start 32; Stop 56
tggtggaacaaatcctatctaaagc

SEQ ID NO: 323635 - DNA, 25 bp, Artificial
  probe
  misc_feature (1)..(25): SEQ ID NO: 2374; WAN024CWI; Start 40; Stop 64
caaatcctatctaaagcagctatcc

SEQ ID NO: 323636 - DNA, 25 bp, Artificial
  probe
  misc_feature (1)..(25): SEQ ID NO: 2374; WAN024CWI; Start 173; Stop 197
ttatcggaattgtccctatcactca

SEQ ID NO: 323637 - DNA, 25 bp, Artificial
  probe
  misc_feature (1)..(25): SEQ ID NO: 2375; WAN024DMC; Start 75; Stop 99
cttcttcagtatcatttcgggtttg

SEQ ID NO: 323638 - DNA, 25 bp, Artificial
  probe
  misc_feature (1)..(25): SEQ ID NO: 2375; WAN024DMC; Start 74; Stop 98
tcttcttcagtatcatttcgggttt

SEQ ID NO: 323639 - DNA, 25 bp, Artificial
  probe
  misc_feature (1)..(25): SEQ ID NO: 2375; WAN024DMC; Start 73; Stop 97
atcttcttcagtatcatttcgggtt

SEQ ID NO: 323640 - DNA, 25 bp, Artificial
  probe
  misc_feature (1)..(25): SEQ ID NO: 2375; WAN024DMC; Start 306; Stop 330
ctttatcacaacaacctatgcctac

SEQ ID NO: 323641 - DNA, 25 bp, Artificial
  probe
  misc_feature (1)..(25): SEQ ID NO: 2375; WAN024DMC; Start 305; Stop 329
tctttatcacaacaacctatgccta

SEQ ID NO: 323642 - DNA, 25 bp, Artificial
  probe
  misc_feature (1)..(25): SEQ ID NO: 2375; WAN024DMC; Start 72; Stop 96
tatcttcttcagtatcatttcgggt

SEQ ID NO: 323643 - DNA, 25 bp, Artificial
  probe
  misc_feature (1)..(25): SEQ ID NO: 2375; WAN024DMC; Start 257; Stop 281
ccctcttcatctctgtctttgtaac

SEQ ID NO: 323644 - DNA, 25 bp, Artificial
  probe
  misc_feature (1)..(25): SEQ ID NO: 2375; WAN024DMC; Start 334; Stop 358
atttcacggacaacctttaagtatc

SEQ ID NO: 323645 - DNA, 25 bp, Artificial
  probe
  misc_feature (1)..(25): SEQ ID NO: 2375; WAN024DMC; Start 304; Stop 328
gtctttatcacaacaacctatgcct

SEQ ID NO: 323646 - DNA, 25 bp, Artificial
  probe
  misc_feature (1)..(25): SEQ ID NO: 2375; WAN024DMC; Start 307; Stop 331
tttatcacaacaacctatgcctacg

SEQ ID NO: 323647 - DNA, 25 bp, Artificial
  probe
  misc_feature (1)..(25): SEQ ID NO: 2375; WAN024DMC; Start 96; Stop 120
tttgattgccctctcttgtatccta

SEQ ID NO: 323648 - DNA, 25 bp, Artificial
  probe
  misc_feature (1)..(25): SEQ ID NO: 2375; WAN024DMC; Start 341; Stop 365
ggacaacctttaagtatcgcagatt

SEQ ID NO: 323649 - DNA, 25 bp, Artificial
  probe
  misc_feature (1)..(25): SEQ ID NO: 2375; WAN024DMC; Start 332; Stop 356
ctatttcacggacaacctttaagta

SEQ ID NO: 323650 - DNA, 25 bp, Artificial
  probe
  misc_feature (1)..(25): SEQ ID NO: 2375; WAN024DMC; Start 312; Stop 336
cacaacaacctatgcctacgctatt

SEQ ID NO: 323651 - DNA, 25 bp, Artificial
  probe
  misc_feature (1)..(25): SEQ ID NO: 2375; WAN024DMC; Start 308; Stop 332
ttatcacaacaacctatgcctacgc

SEQ ID NO: 323652 - DNA, 25 bp, Artificial
  probe
  misc_feature (1)..(25): SEQ ID NO: 2375; WAN024DMC; Start 335; Stop 359
tttcacggacaacctttaagtatcg

SEQ ID NO: 323653 - DNA, 25 bp, Artificial
  probe
  misc_feature (1)..(25): SEQ ID NO: 2375; WAN024DMC; Start 899; Stop 923
tgactatcggtggtgtgaaagaata

SEQ ID NO: 323654 - DNA, 25 bp, Artificial
  probe
  misc_feature (1)..(25): SEQ ID NO: 2375; WAN024DMC; Start 137; Stop 161
tcattatttcagtgacagacgagaa

SEQ ID NO: 323655 - DNA, 25 bp, Artificial
  probe
  misc_feature (1)..(25): SEQ ID NO: 2375; WAN024DMC; Start 49; Stop 73
cactccttcagtaagaaagcagata

SEQ ID NO: 323656 - DNA, 25 bp, Artificial
  probe
  misc_feature (1)..(25): SEQ ID NO: 2375; WAN024DMC; Start 136; Stop 160
atcattatttcagtgacagacgaga

SEQ ID NO: 323657 - DNA, 25 bp, Artificial
  probe
  misc_feature (1)..(25): SEQ ID NO: 2375; WAN024DMC; Start 76; Stop 100
ttcttcagtatcatttcgggtttga

SEQ ID NO: 323658 - DNA, 25 bp, Artificial
  probe
  misc_feature (1)..(25): SEQ ID NO: 2375; WAN024DMC; Start 331; Stop 355
gctatttcacggacaacctttaagt

SEQ ID NO: 323659 - DNA, 25 bp, Artificial
  probe
  misc_feature (1)..(25): SEQ ID NO: 2375; WAN024DMC; Start 50; Stop 74
actccttcagtaagaaagcagatat

SEQ ID NO: 323660 - DNA, 25 bp, Artificial
  probe
  misc_feature (1)..(25): SEQ ID NO: 2375; WAN024DMC; Start 46; Stop 70
attcactccttcagtaagaaagcag

SEQ ID NO: 323661 - DNA, 25 bp, Artificial
  probe
  misc_feature (1)..(25): SEQ ID NO: 2375; WAN024DMC; Start 45; Stop 69
cattcactccttcagtaagaaagca

SEQ ID NO: 323662 - DNA, 25 bp, Artificial
  probe
  misc_feature (1)..(25): SEQ ID NO: 2375; WAN024DMC; Start 71; Stop 95
atatcttcttcagtatcatttcggg

SEQ ID NO: 323663 - DNA, 25 bp, Artificial
  probe
  misc_feature (1)..(25): SEQ ID NO: 2375; WAN024DMC; Start 97; Stop 121
ttgattgccctctcttgtatcctac

SEQ ID NO: 323664 - DNA, 25 bp, Artificial
  probe
  misc_feature (1)..(25): SEQ ID NO: 2375; WAN024DMC; Start 333; Stop 357
tatttcacggacaacctttaagtat

SEQ ID NO: 323665 - DNA, 25 bp, Artificial
  probe
  misc_feature (1)..(25): SEQ ID NO: 2375; WAN024DMC; Start 302; Stop 326
atgtctttatcacaacaacctatgc

SEQ ID NO: 323666 - DNA, 25 bp, Artificial
  probe
  misc_feature (1)..(25): SEQ ID NO: 2375; WAN024DMC; Start 298; Stop 322
acaaatgtctttatcacaacaacct

SEQ ID NO: 323667 - DNA, 25 bp, Artificial
  probe
  misc_feature (1)..(25): SEQ ID NO: 2375; WAN024DMC; Start 30; Stop 54
aattgataatgtcggcattcactcc

SEQ ID NO: 323668 - DNA, 25 bp, Artificial
  probe
  misc_feature (1)..(25): SEQ ID NO: 2375; WAN024DMC; Start 599; Stop 623
aaatctgtttgccattgtcactacc

SEQ ID NO: 323669 - DNA, 25 bp, Artificial
  probe
  misc_feature (1)..(25): SEQ ID NO: 2375; WAN024DMC; Start 314; Stop 338
caacaacctatgcctacgctatttc

SEQ ID NO: 323670 - DNA, 25 bp, Artificial
  probe
  misc_feature (1)..(25): SEQ ID NO: 2376; WAN024FUD; Start 539; Stop 563
atgatcgtgtcacttctcagattag

SEQ ID NO: 323671 - DNA, 25 bp, Artificial
  probe
  misc_feature (1)..(25): SEQ ID NO: 2376; WAN024FUD; Start 538; Stop 562
catgatcgtgtcacttctcagatta

SEQ ID NO: 323672 - DNA, 25 bp, Artificial
  probe
  misc_feature (1)..(25): SEQ ID NO: 2376; WAN024FUD; Start 882; Stop 906
tagctcttacgacctctatgttgac

SEQ ID NO: 323673 - DNA, 25 bp, Artificial
  probe
  misc_feature (1)..(25): SEQ ID NO: 2376; WAN024FUD; Start 788; Stop 812
ttagtaagggagatgaagagcaaat

SEQ ID NO: 323674 - DNA, 25 bp, Artificial
  probe
  misc_feature (1)..(25): SEQ ID NO: 2376; WAN024FUD; Start 787; Stop 811
attagtaagggagatgaagagcaaa

SEQ ID NO: 323675 - DNA, 25 bp, Artificial
  probe
  misc_feature (1)..(25): SEQ ID NO: 2376; WAN024FUD; Start 256; Stop 280
gatttgcgagaaggcgttattattt

SEQ ID NO: 323676 - DNA, 25 bp, Artificial
  probe
  misc_feature (1)..(25): SEQ ID NO: 2376; WAN024FUD; Start 786; Stop 810
cattagtaagggagatgaagagcaa

SEQ ID NO: 323677 - DNA, 25 bp, Artificial
  probe
  misc_feature (1)..(25): SEQ ID NO: 2376; WAN024FUD; Start 880; Stop 904
gatagctcttacgacctctatgttg

SEQ ID NO: 323678 - DNA, 25 bp, Artificial
  probe
  misc_feature (1)..(25): SEQ ID NO: 2376; WAN024FUD; Start 262; Stop 286
cgagaaggcgttattatttcagatg

SEQ ID NO: 323679 - DNA, 25 bp, Artificial
  probe
  misc_feature (1)..(25): SEQ ID NO: 2376; WAN024FUD; Start 789; Stop 813
tagtaagggagatgaagagcaaatt

SEQ ID NO: 323680 - DNA, 25 bp, Artificial
  probe
  misc_feature (1)..(25): SEQ ID NO: 2376; WAN024FUD; Start 544; Stop 568
cgtgtcacttctcagattagccatt

SEQ ID NO: 323681 - DNA, 25 bp, Artificial
  probe
  misc_feature (1)..(25): SEQ ID NO: 2376; WAN024FUD; Start 263; Stop 287
gagaaggcgttattatttcagatgc

SEQ ID NO: 323682 - DNA, 25 bp, Artificial
  probe
  misc_feature (1)..(25): SEQ ID NO: 2376; WAN024FUD; Start 898; Stop 922
tatgttgacgttcctgatgaagaag

SEQ ID NO: 323683 - DNA, 25 bp, Artificial
  probe
  misc_feature (1)..(25): SEQ ID NO: 2376; WAN024FUD; Start 897; Stop 921
ctatgttgacgttcctgatgaagaa

SEQ ID NO: 323684 - DNA, 25 bp, Artificial
  probe
  misc_feature (1)..(25): SEQ ID NO: 2376; WAN024FUD; Start 881; Stop 905
atagctcttacgacctctatgttga

SEQ ID NO: 323685 - DNA, 25 bp, Artificial
  probe
  misc_feature (1)..(25): SEQ ID NO: 2376; WAN024FUD; Start 264; Stop 288
agaaggcgttattatttcagatgct

SEQ ID NO: 323686 - DNA, 25 bp, Artificial
  probe
  misc_feature (1)..(25): SEQ ID NO: 2376; WAN024FUD; Start 257; Stop 281
atttgcgagaaggcgttattatttc

SEQ ID NO: 323687 - DNA, 25 bp, Artificial
  probe
  misc_feature (1)..(25): SEQ ID NO: 2376; WAN024FUD; Start 224; Stop 248
ctattgctttcattaaggagttggc

SEQ ID NO: 323688 - DNA, 25 bp, Artificial
  probe
  misc_feature (1)..(25): SEQ ID NO: 2376; WAN024FUD; Start 895; Stop 919
ctctatgttgacgttcctgatgaag

SEQ ID NO: 323689 - DNA, 25 bp, Artificial
  probe
  misc_feature (1)..(25): SEQ ID NO: 2376; WAN024FUD; Start 545; Stop 569
gtgtcacttctcagattagccattt

SEQ ID NO: 323690 - DNA, 25 bp, Artificial
  probe
  misc_feature (1)..(25): SEQ ID NO: 2376; WAN024FUD; Start 879; Stop 903
ggatagctcttacgacctctatgtt

SEQ ID NO: 323691 - DNA, 25 bp, Artificial
  probe
  misc_feature (1)..(25): SEQ ID NO: 2376; WAN024FUD; Start 540; Stop 564
tgatcgtgtcacttctcagattagc

SEQ ID NO: 323692 - DNA, 25 bp, Artificial
  probe
  misc_feature (1)..(25): SEQ ID NO: 2376; WAN024FUD; Start 8; Stop 32
aaacaatctatatcgcaggtcttgg

SEQ ID NO: 323693 - DNA, 25 bp, Artificial
  probe
  misc_feature (1)..(25): SEQ ID NO: 2376; WAN024FUD; Start 434; Stop 458
atatctttacaccttcaagcctgac

SEQ ID NO: 323694 - DNA, 25 bp, Artificial
  probe
  misc_feature (1)..(25): SEQ ID NO: 2376; WAN024FUD; Start 223; Stop 247
actattgctttcattaaggagttgg

SEQ ID NO: 323695 - DNA, 25 bp, Artificial
  probe
  misc_feature (1)..(25): SEQ ID NO: 2376; WAN024FUD; Start 182; Stop 206
ctttggcagatgtcattatcctcag

SEQ ID NO: 323696 - DNA, 25 bp, Artificial
  probe
  misc_feature (1)..(25): SEQ ID NO: 2376; WAN024FUD; Start 433; Stop 457
tatatctttacaccttcaagcctga

SEQ ID NO: 323697 - DNA, 25 bp, Artificial
  probe
  misc_feature (1)..(25): SEQ ID NO: 2376; WAN024FUD; Start 432; Stop 456
ttatatctttacaccttcaagcctg

SEQ ID NO: 323698 - DNA, 25 bp, Artificial
  probe
  misc_feature (1)..(25): SEQ ID NO: 2376; WAN024FUD; Start 896; Stop 920
tctatgttgacgttcctgatgaaga

SEQ ID NO: 323699 - DNA, 25 bp, Artificial
  probe
  misc_feature (1)..(25): SEQ ID NO: 2376; WAN024FUD; Start 785; Stop 809
ccattagtaagggagatgaagagca

SEQ ID NO: 323700 - DNA, 25 bp, Artificial
  probe
  misc_feature (1)..(25): SEQ ID NO: 2376; WAN024FUD; Start 261; Stop 285
gcgagaaggcgttattatttcagat

SEQ ID NO: 323701 - DNA, 25 bp, Artificial
  probe
  misc_feature (1)..(25): SEQ ID NO: 2376; WAN024FUD; Start 258; Stop 282
tttgcgagaaggcgttattatttca

SEQ ID NO: 323702 - DNA, 25 bp, Artificial
  probe
  misc_feature (1)..(25): SEQ ID NO: 2376; WAN024FUD; Start 541; Stop 565
gatcgtgtcacttctcagattagcc

SEQ ID NO: 323703 - DNA, 25 bp, Artificial
  probe
  misc_feature (1)..(25): SEQ ID NO: 2377; WAN024EYE; Start 132; Stop 156
agagaatatccaagaacagacagag

SEQ ID NO: 323704 - DNA, 25 bp, Artificial
  probe
  misc_feature (1)..(25): SEQ ID NO: 2377; WAN024EYE; Start 131; Stop 155
gagagaatatccaagaacagacaga

SEQ ID NO: 323705 - DNA, 25 bp, Artificial
  probe
  misc_feature (1)..(25): SEQ ID NO: 2377; WAN024EYE; Start 362; Stop 386
tcatcgcagagattggataactaat

SEQ ID NO: 323706 - DNA, 25 bp, Artificial
  probe
  misc_feature (1)..(25): SEQ ID NO: 2377; WAN024EYE; Start 361; Stop 385
gtcatcgcagagattggataactaa

SEQ ID NO: 323707 - DNA, 25 bp, Artificial
  probe
  misc_feature (1)..(25): SEQ ID NO: 2377; WAN024EYE; Start 136; Stop 160
aatatccaagaacagacagagcaag

SEQ ID NO: 323708 - DNA, 25 bp, Artificial
  probe
  misc_feature (1)..(25): SEQ ID NO: 2377; WAN024EYE; Start 135; Stop 159
gaatatccaagaacagacagagcaa

SEQ ID NO: 323709 - DNA, 25 bp, Artificial
  probe
  misc_feature (1)..(25): SEQ ID NO: 2377; WAN024EYE; Start 133; Stop 157
gagaatatccaagaacagacagagc

SEQ ID NO: 323710 - DNA, 25 bp, Artificial
  probe
  misc_feature (1)..(25): SEQ ID NO: 2377; WAN024EYE; Start 134; Stop 158
agaatatccaagaacagacagagca

SEQ ID NO: 323711 - DNA, 25 bp, Artificial
  probe
  misc_feature (1)..(25): SEQ ID NO: 2377; WAN024EYE; Start 358; Stop 382
gaagtcatcgcagagattggataac

SEQ ID NO: 323712 - DNA, 25 bp, Artificial
  probe
  misc_feature (1)..(25): SEQ ID NO: 2377; WAN024EYE; Start 137; Stop 161
atatccaagaacagacagagcaagt

SEQ ID NO: 323713 - DNA, 25 bp, Artificial
  probe
  misc_feature (1)..(25): SEQ ID NO: 2377; WAN024EYE; Start 360; Stop 384
agtcatcgcagagattggataacta

SEQ ID NO: 323714 - DNA, 25 bp, Artificial
  probe
  misc_feature (1)..(25): SEQ ID NO: 2377; WAN024EYE; Start 357; Stop 381
tgaagtcatcgcagagattggataa

SEQ ID NO: 323715 - DNA, 25 bp, Artificial
  probe
  misc_feature (1)..(25): SEQ ID NO: 2377; WAN024EYE; Start 356; Stop 380
ttgaagtcatcgcagagattggata

SEQ ID NO: 323716 - DNA, 25 bp, Artificial
  probe
  misc_feature (1)..(25): SEQ ID NO: 2377; WAN024EYE; Start 359; Stop 383
aagtcatcgcagagattggataact

SEQ ID NO: 323717 - DNA, 25 bp, Artificial
  probe
  misc_feature (1)..(25): SEQ ID NO: 2377; WAN024EYE; Start 355; Stop 379
attgaagtcatcgcagagattggat

SEQ ID NO: 323718 - DNA, 25 bp, Artificial
  probe
  misc_feature (1)..(25): SEQ ID NO: 2377; WAN024EYE; Start 130; Stop 154
ggagagaatatccaagaacagacag

SEQ ID NO: 323719 - DNA, 25 bp, Artificial
  probe
  misc_feature (1)..(25): SEQ ID NO: 2377; WAN024EYE; Start 129; Stop 153
aggagagaatatccaagaacagaca

SEQ ID NO: 323720 - DNA, 25 bp, Artificial
  probe
  misc_feature (1)..(25): SEQ ID NO: 2377; WAN024EYE; Start 126; Stop 150
tgtaggagagaatatccaagaacag

SEQ ID NO: 323721 - DNA, 25 bp, Artificial
  probe
  misc_feature (1)..(25): SEQ ID NO: 2377; WAN024EYE; Start 128; Stop 152
taggagagaatatccaagaacagac

SEQ ID NO: 323722 - DNA, 25 bp, Artificial
  probe
  misc_feature (1)..(25): SEQ ID NO: 2377; WAN024EYE; Start 127; Stop 151
gtaggagagaatatccaagaacaga

SEQ ID NO: 323723 - DNA, 25 bp, Artificial
  probe
  misc_feature (1)..(25): SEQ ID NO: 2377; WAN024EYE; Start 125; Stop 149
ttgtaggagagaatatccaagaaca

SEQ ID NO: 323724 - DNA, 25 bp, Artificial
  probe
  misc_feature (1)..(25): SEQ ID NO: 2377; WAN024EYE; Start 354; Stop 378
aattgaagtcatcgcagagattgga

SEQ ID NO: 323725 - DNA, 25 bp, Artificial
  probe
  misc_feature (1)..(25): SEQ ID NO: 2377; WAN024EYE; Start 352; Stop 376
gaaattgaagtcatcgcagagattg

SEQ ID NO: 323726 - DNA, 25 bp, Artificial
  probe
  misc_feature (1)..(25): SEQ ID NO: 2377; WAN024EYE; Start 138; Stop 162
tatccaagaacagacagagcaagtc

SEQ ID NO: 323727 - DNA, 25 bp, Artificial
  probe
  misc_feature (1)..(25): SEQ ID NO: 2377; WAN024EYE; Start 124; Stop 148
attgtaggagagaatatccaagaac

SEQ ID NO: 323728 - DNA, 25 bp, Artificial
  probe
  misc_feature (1)..(25): SEQ ID NO: 2377; WAN024EYE; Start 231; Stop 255
cttcttgagcgatatgaacgacttt

SEQ ID NO: 323729 - DNA, 25 bp, Artificial
  probe
  misc_feature (1)..(25): SEQ ID NO: 2377; WAN024EYE; Start 232; Stop 256
ttcttgagcgatatgaacgactttg

SEQ ID NO: 323730 - DNA, 25 bp, Artificial
  probe
  misc_feature (1)..(25): SEQ ID NO: 2377; WAN024EYE; Start 353; Stop 377
aaattgaagtcatcgcagagattgg

SEQ ID NO: 323731 - DNA, 25 bp, Artificial
  probe
  misc_feature (1)..(25): SEQ ID NO: 2377; WAN024EYE; Start 234; Stop 258
cttgagcgatatgaacgactttgtt

SEQ ID NO: 323732 - DNA, 25 bp, Artificial
  probe
  misc_feature (1)..(25): SEQ ID NO: 2377; WAN024EYE; Start 225; Stop 249
aacttgcttcttgagcgatatgaac

SEQ ID NO: 323733 - DNA, 25 bp, Artificial
  probe
  misc_feature (1)..(25): SEQ ID NO: 2377; WAN024EYE; Start 224; Stop 248
caacttgcttcttgagcgatatgaa

SEQ ID NO: 323734 - DNA, 25 bp, Artificial
  probe
  misc_feature (1)..(25): SEQ ID NO: 2377; WAN024EYE; Start 123; Stop 147
aattgtaggagagaatatccaagaa

SEQ ID NO: 323735 - DNA, 25 bp, Artificial
  probe
  misc_feature (1)..(25): SEQ ID NO: 2377; WAN024EYE; Start 119; Stop 143
gggaaattgtaggagagaatatcca

SEQ ID NO: 323736 - DNA, 25 bp, Artificial
  probe
  misc_feature (1)..(25): SEQ ID NO: 2378; WAN024FI3; Start 154; Stop 178
atcgttctcatctatctatcatcgg

SEQ ID NO: 323737 - DNA, 25 bp, Artificial
  probe
  misc_feature (1)..(25): SEQ ID NO: 2378; WAN024FI3; Start 150; Stop 174
ggtcatcgttctcatctatctatca

SEQ ID NO: 323738 - DNA, 25 bp, Artificial
  probe
  misc_feature (1)..(25): SEQ ID NO: 2378; WAN024FI3; Start 149; Stop 173
tggtcatcgttctcatctatctatc

SEQ ID NO: 323739 - DNA, 25 bp, Artificial
  probe
  misc_feature (1)..(25): SEQ ID NO: 2378; WAN024FI3; Start 153; Stop 177
catcgttctcatctatctatcatcg

SEQ ID NO: 323740 - DNA, 25 bp, Artificial
  probe
  misc_feature (1)..(25): SEQ ID NO: 2378; WAN024FI3; Start 148; Stop 172
atggtcatcgttctcatctatctat

SEQ ID NO: 323741 - DNA, 25 bp, Artificial
  probe
  misc_feature (1)..(25): SEQ ID NO: 2378; WAN024FI3; Start 272; Stop 296
agagttcagagccagaatctacttc

SEQ ID NO: 323742 - DNA, 25 bp, Artificial
  probe
  misc_feature (1)..(25): SEQ ID NO: 2378; WAN024FI3; Start 81; Stop 105
ggctgataggatggctaatcgtatt

SEQ ID NO: 323743 - DNA, 25 bp, Artificial
  probe
  misc_feature (1)..(25): SEQ ID NO: 2378; WAN024FI3; Start 151; Stop 175
gtcatcgttctcatctatctatcat

SEQ ID NO: 323744 - DNA, 25 bp, Artificial
  probe
  misc_feature (1)..(25): SEQ ID NO: 2378; WAN024FI3; Start 271; Stop 295
cagagttcagagccagaatctactt

SEQ ID NO: 323745 - DNA, 25 bp, Artificial
  probe
  misc_feature (1)..(25): SEQ ID NO: 2378; WAN024FI3; Start 152; Stop 176
tcatcgttctcatctatctatcatc

SEQ ID NO: 323746 - DNA, 25 bp, Artificial
  probe
  misc_feature (1)..(25): SEQ ID NO: 2378; WAN024FI3; Start 82; Stop 106
gctgataggatggctaatcgtattt

SEQ ID NO: 323747 - DNA, 25 bp, Artificial
  probe
  misc_feature (1)..(25): SEQ ID NO: 2378; WAN024FI3; Start 126; Stop 150
tttctttgtaattgtggtggtgatg

SEQ ID NO: 323748 - DNA, 25 bp, Artificial
  probe
  misc_feature (1)..(25): SEQ ID NO: 2378; WAN024FI3; Start 155; Stop 179
tcgttctcatctatctatcatcggg

SEQ ID NO: 323749 - DNA, 25 bp, Artificial
  probe
  misc_feature (1)..(25): SEQ ID NO: 2378; WAN024FI3; Start 381; Stop 405
aggaatctccattgctcagttagag

SEQ ID NO: 323750 - DNA, 25 bp, Artificial
  probe
  misc_feature (1)..(25): SEQ ID NO: 2378; WAN024FI3; Start 296; Stop 320
ctagtagttcagaagaagctgctaa

SEQ ID NO: 323751 - DNA, 25 bp, Artificial
  probe
  misc_feature (1)..(25): SEQ ID NO: 2378; WAN024FI3; Start 131; Stop 155
ttgtaattgtggtggtgatggtcat

SEQ ID NO: 323752 - DNA, 25 bp, Artificial
  probe
  misc_feature (1)..(25): SEQ ID NO: 2378; WAN024FI3; Start 441; Stop 465
gtttgctaatccaggtgatgttata

SEQ ID NO: 323753 - DNA, 25 bp, Artificial
  probe
  misc_feature (1)..(25): SEQ ID NO: 2378; WAN024FI3; Start 440; Stop 464
ggtttgctaatccaggtgatgttat

SEQ ID NO: 323754 - DNA, 25 bp, Artificial
  probe
  misc_feature (1)..(25): SEQ ID NO: 2378; WAN024FI3; Start 298; Stop 322
agtagttcagaagaagctgctaatc

SEQ ID NO: 323755 - DNA, 25 bp, Artificial
  probe
  misc_feature (1)..(25): SEQ ID NO: 2378; WAN024FI3; Start 295; Stop 319
tctagtagttcagaagaagctgcta

SEQ ID NO: 323756 - DNA, 25 bp, Artificial
  probe
  misc_feature (1)..(25): SEQ ID NO: 2378; WAN024FI3; Start 297; Stop 321
tagtagttcagaagaagctgctaat

SEQ ID NO: 323757 - DNA, 25 bp, Artificial
  probe
  misc_feature (1)..(25): SEQ ID NO: 2378; WAN024FI3; Start 277; Stop 301
tcagagccagaatctacttctagta

SEQ ID NO: 323758 - DNA, 25 bp, Artificial
  probe
  misc_feature (1)..(25): SEQ ID NO: 2378; WAN024FI3; Start 275; Stop 299
gttcagagccagaatctacttctag

SEQ ID NO: 323759 - DNA, 25 bp, Artificial
  probe
  misc_feature (1)..(25): SEQ ID NO: 2378; WAN024FI3; Start 276; Stop 300
ttcagagccagaatctacttctagt

SEQ ID NO: 323760 - DNA, 25 bp, Artificial
  probe
  misc_feature (1)..(25): SEQ ID NO: 2378; WAN024FI3; Start 274; Stop 298
agttcagagccagaatctacttcta

SEQ ID NO: 323761 - DNA, 25 bp, Artificial
  probe
  misc_feature (1)..(25): SEQ ID NO: 2378; WAN024FI3; Start 380; Stop 404
caggaatctccattgctcagttaga

SEQ ID NO: 323762 - DNA, 25 bp, Artificial
  probe
  misc_feature (1)..(25): SEQ ID NO: 2378; WAN024FI3; Start 300; Stop 324
tagttcagaagaagctgctaatcct

SEQ ID NO: 323763 - DNA, 25 bp, Artificial
  probe
  misc_feature (1)..(25): SEQ ID NO: 2378; WAN024FI3; Start 299; Stop 323
gtagttcagaagaagctgctaatcc

SEQ ID NO: 323764 - DNA, 25 bp, Artificial
  probe
  misc_feature (1)..(25): SEQ ID NO: 2378; WAN024FI3; Start 127; Stop 151
ttctttgtaattgtggtggtgatgg

SEQ ID NO: 323765 - DNA, 25 bp, Artificial
  probe
  misc_feature (1)..(25): SEQ ID NO: 2378; WAN024FI3; Start 273; Stop 297
gagttcagagccagaatctacttct

SEQ ID NO: 323766 - DNA, 25 bp, Artificial
  probe
  misc_feature (1)..(25): SEQ ID NO: 2378; WAN024FI3; Start 382; Stop 406
ggaatctccattgctcagttagagg

SEQ ID NO: 323767 - DNA, 25 bp, Artificial
  probe
  misc_feature (1)..(25): SEQ ID NO: 2378; WAN024FI3; Start 383; Stop 407
gaatctccattgctcagttagaggc

SEQ ID NO: 323768 - DNA, 25 bp, Artificial
  probe
  misc_feature (1)..(25): SEQ ID NO: 2378; WAN024FI3; Start 427; Stop 451
gctacaggatcttggtttgctaatc

SEQ ID NO: 323769 - DNA, 25 bp, Artificial
  probe
  misc_feature (1)..(25): SEQ ID NO: 2379; WAN024FE5; Start 209; Stop 233
tgtctattccaactcttctcttcaa

SEQ ID NO: 323770 - DNA, 25 bp, Artificial
  probe
  misc_feature (1)..(25): SEQ ID NO: 2379; WAN024FE5; Start 208; Stop 232
atgtctattccaactcttctcttca

SEQ ID NO: 323771 - DNA, 25 bp, Artificial
  probe
  misc_feature (1)..(25): SEQ ID NO: 2379; WAN024FE5; Start 206; Stop 230
tcatgtctattccaactcttctctt

SEQ ID NO: 323772 - DNA, 25 bp, Artificial
  probe
  misc_feature (1)..(25): SEQ ID NO: 2379; WAN024FE5; Start 207; Stop 231
catgtctattccaactcttctcttc

SEQ ID NO: 323773 - DNA, 25 bp, Artificial
  probe
  misc_feature (1)..(25): SEQ ID NO: 2379; WAN024FE5; Start 205; Stop 229
atcatgtctattccaactcttctct

SEQ ID NO: 323774 - DNA, 25 bp, Artificial
  probe
  misc_feature (1)..(25): SEQ ID NO: 2379; WAN024FE5; Start 204; Stop 228
aatcatgtctattccaactcttctc

SEQ ID NO: 323775 - DNA, 25 bp, Artificial
  probe
  misc_feature (1)..(25): SEQ ID NO: 2379; WAN024FE5; Start 210; Stop 234
gtctattccaactcttctcttcaaa

SEQ ID NO: 323776 - DNA, 25 bp, Artificial
  probe
  misc_feature (1)..(25): SEQ ID NO: 2379; WAN024FE5; Start 203; Stop 227
gaatcatgtctattccaactcttct

SEQ ID NO: 323777 - DNA, 25 bp, Artificial
  probe
  misc_feature (1)..(25): SEQ ID NO: 2379; WAN024FE5; Start 56; Stop 80
tcttagtagacttctgggcaacttg

SEQ ID NO: 323778 - DNA, 25 bp, Artificial
  probe
  misc_feature (1)..(25): SEQ ID NO: 2379; WAN024FE5; Start 294; Stop 318
catcattgctgaattgagctaacta

SEQ ID NO: 323779 - DNA, 25 bp, Artificial
  probe
  misc_feature (1)..(25): SEQ ID NO: 2379; WAN024FE5; Start 296; Stop 320
tcattgctgaattgagctaactaat

SEQ ID NO: 323780 - DNA, 25 bp, Artificial
  probe
  misc_feature (1)..(25): SEQ ID NO: 2379; WAN024FE5; Start 295; Stop 319
atcattgctgaattgagctaactaa

SEQ ID NO: 323781 - DNA, 25 bp, Artificial
  probe
  misc_feature (1)..(25): SEQ ID NO: 2379; WAN024FE5; Start 293; Stop 317
ccatcattgctgaattgagctaact

SEQ ID NO: 323782 - DNA, 25 bp, Artificial
  probe
  misc_feature (1)..(25): SEQ ID NO: 2379; WAN024FE5; Start 57; Stop 81
cttagtagacttctgggcaacttgg

SEQ ID NO: 323783 - DNA, 25 bp, Artificial
  probe
  misc_feature (1)..(25): SEQ ID NO: 2379; WAN024FE5; Start 127; Stop 151
gaagaactttcagaagatgtcttga

SEQ ID NO: 323784 - DNA, 25 bp, Artificial
  probe
  misc_feature (1)..(25): SEQ ID NO: 2379; WAN024FE5; Start 89; Stop 113
catgtcgtatgcaaggtccaatctt

SEQ ID NO: 323785 - DNA, 25 bp, Artificial
  probe
  misc_feature (1)..(25): SEQ ID NO: 2379; WAN024FE5; Start 12; Stop 36
aattacagatgcaacattcgaacaa

SEQ ID NO: 323786 - DNA, 25 bp, Artificial
  probe
  misc_feature (1)..(25): SEQ ID NO: 2379; WAN024FE5; Start 13; Stop 37
attacagatgcaacattcgaacaag

SEQ ID NO: 323787 - DNA, 25 bp, Artificial
  probe
  misc_feature (1)..(25): SEQ ID NO: 2379; WAN024FE5; Start 11; Stop 35
caattacagatgcaacattcgaaca

SEQ ID NO: 323788 - DNA, 25 bp, Artificial
  probe
  misc_feature (1)..(25): SEQ ID NO: 2379; WAN024FE5; Start 8; Stop 32
aagcaattacagatgcaacattcga

SEQ ID NO: 323789 - DNA, 25 bp, Artificial
  probe
  misc_feature (1)..(25): SEQ ID NO: 2379; WAN024FE5; Start 126; Stop 150
tgaagaactttcagaagatgtcttg

SEQ ID NO: 323790 - DNA, 25 bp, Artificial
  probe
  misc_feature (1)..(25): SEQ ID NO: 2379; WAN024FE5; Start 58; Stop 82
ttagtagacttctgggcaacttggt

SEQ ID NO: 323791 - DNA, 25 bp, Artificial
  probe
  misc_feature (1)..(25): SEQ ID NO: 2379; WAN024FE5; Start 15; Stop 39
tacagatgcaacattcgaacaagaa

SEQ ID NO: 323792 - DNA, 25 bp, Artificial
  probe
  misc_feature (1)..(25): SEQ ID NO: 2379; WAN024FE5; Start 14; Stop 38
ttacagatgcaacattcgaacaaga

SEQ ID NO: 323793 - DNA, 25 bp, Artificial
  probe
  misc_feature (1)..(25): SEQ ID NO: 2379; WAN024FE5; Start 285; Stop 309
aatcaaggccatcattgctgaattg

SEQ ID NO: 323794 - DNA, 25 bp, Artificial
  probe
  misc_feature (1)..(25): SEQ ID NO: 2379; WAN024FE5; Start 128; Stop 152
aagaactttcagaagatgtcttgaa

SEQ ID NO: 323795 - DNA, 25 bp, Artificial
  probe
  misc_feature (1)..(25): SEQ ID NO: 2379; WAN024FE5; Start 292; Stop 316
gccatcattgctgaattgagctaac

SEQ ID NO: 323796 - DNA, 25 bp, Artificial
  probe
  misc_feature (1)..(25): SEQ ID NO: 2379; WAN024FE5; Start 192; Stop 216
tcgtgcttttggaatcatgtctatt

SEQ ID NO: 323797 - DNA, 25 bp, Artificial
  probe
  misc_feature (1)..(25): SEQ ID NO: 2379; WAN024FE5; Start 211; Stop 235
tctattccaactcttctcttcaaaa

SEQ ID NO: 323798 - DNA, 25 bp, Artificial
  probe
  misc_feature (1)..(25): SEQ ID NO: 2379; WAN024FE5; Start 191; Stop 215
ctcgtgcttttggaatcatgtctat

SEQ ID NO: 323799 - DNA, 25 bp, Artificial
  probe
  misc_feature (1)..(25): SEQ ID NO: 2379; WAN024FE5; Start 143; Stop 167
atgtcttgaaaatcgttaaaatgga

SEQ ID NO: 323800 - DNA, 25 bp, Artificial
  probe
  misc_feature (1)..(25): SEQ ID NO: 2379; WAN024FE5; Start 136; Stop 160
tcagaagatgtcttgaaaatcgtta

SEQ ID NO: 323801 - DNA, 25 bp, Artificial
  probe
  misc_feature (1)..(25): SEQ ID NO: 2379; WAN024FE5; Start 144; Stop 168
tgtcttgaaaatcgttaaaatggac

SEQ ID NO: 323802 - DNA, 25 bp, Artificial
  probe
  misc_feature (1)..(25): SEQ ID NO: 2380; WAN024CV4; Start 27; Stop 51
agcaggaatgtcttcatcacttatg

SEQ ID NO: 323803 - DNA, 25 bp, Artificial
  probe
  misc_feature (1)..(25): SEQ ID NO: 2380; WAN024CV4; Start 26; Stop 50
cagcaggaatgtcttcatcacttat

SEQ ID NO: 323804 - DNA, 25 bp, Artificial
  probe
  misc_feature (1)..(25): SEQ ID NO: 2380; WAN024CV4; Start 99; Stop 123
agttgatgctattagtgctactgaa

SEQ ID NO: 323805 - DNA, 25 bp, Artificial
  probe
  misc_feature (1)..(25): SEQ ID NO: 2380; WAN024CV4; Start 101; Stop 125
ttgatgctattagtgctactgaagg

SEQ ID NO: 323806 - DNA, 25 bp, Artificial
  probe
  misc_feature (1)..(25): SEQ ID NO: 2380; WAN024CV4; Start 100; Stop 124
gttgatgctattagtgctactgaag

SEQ ID NO: 323807 - DNA, 25 bp, Artificial
  probe
  misc_feature (1)..(25): SEQ ID NO: 2380; WAN024CV4; Start 103; Stop 127
gatgctattagtgctactgaaggag

SEQ ID NO: 323808 - DNA, 25 bp, Artificial
  probe
  misc_feature (1)..(25): SEQ ID NO: 2380; WAN024CV4; Start 98; Stop 122
tagttgatgctattagtgctactga

SEQ ID NO: 323809 - DNA, 25 bp, Artificial
  probe
  misc_feature (1)..(25): SEQ ID NO: 2380; WAN024CV4; Start 102; Stop 126
tgatgctattagtgctactgaagga

SEQ ID NO: 323810 - DNA, 25 bp, Artificial
  probe
  misc_feature (1)..(25): SEQ ID NO: 2380; WAN024CV4; Start 29; Stop 53
caggaatgtcttcatcacttatggc

SEQ ID NO: 323811 - DNA, 25 bp, Artificial
  probe
  misc_feature (1)..(25): SEQ ID NO: 2380; WAN024CV4; Start 28; Stop 52
gcaggaatgtcttcatcacttatgg

SEQ ID NO: 323812 - DNA, 25 bp, Artificial
  probe
  misc_feature (1)..(25): SEQ ID NO: 2380; WAN024CV4; Start 94; Stop 118
attgtagttgatgctattagtgcta

SEQ ID NO: 323813 - DNA, 25 bp, Artificial
  probe
  misc_feature (1)..(25): SEQ ID NO: 2380; WAN024CV4; Start 93; Stop 117
tattgtagttgatgctattagtgct

SEQ ID NO: 323814 - DNA, 25 bp, Artificial
  probe
  misc_feature (1)..(25): SEQ ID NO: 2380; WAN024CV4; Start 31; Stop 55
ggaatgtcttcatcacttatggcac

SEQ ID NO: 323815 - DNA, 25 bp, Artificial
  probe
  misc_feature (1)..(25): SEQ ID NO: 2380; WAN024CV4; Start 104; Stop 128
atgctattagtgctactgaaggagg

SEQ ID NO: 323816 - DNA, 25 bp, Artificial
  probe
  misc_feature (1)..(25): SEQ ID NO: 2380; WAN024CV4; Start 30; Stop 54
aggaatgtcttcatcacttatggca

SEQ ID NO: 323817 - DNA, 25 bp, Artificial
  probe
  misc_feature (1)..(25): SEQ ID NO: 2380; WAN024CV4; Start 33; Stop 57
aatgtcttcatcacttatggcacag

SEQ ID NO: 323818 - DNA, 25 bp, Artificial
  probe
  misc_feature (1)..(25): SEQ ID NO: 2380; WAN024CV4; Start 32; Stop 56
gaatgtcttcatcacttatggcaca

SEQ ID NO: 323819 - DNA, 25 bp, Artificial
  probe
  misc_feature (1)..(25): SEQ ID NO: 2380; WAN024CV4; Start 34; Stop 58
atgtcttcatcacttatggcacaga

SEQ ID NO: 323820 - DNA, 25 bp, Artificial
  probe
  misc_feature (1)..(25): SEQ ID NO: 2380; WAN024CV4; Start 84; Stop 108
agggaaagatattgtagttgatgct

SEQ ID NO: 323821 - DNA, 25 bp, Artificial
  probe
  misc_feature (1)..(25): SEQ ID NO: 2380; WAN024CV4; Start 35; Stop 59
tgtcttcatcacttatggcacagaa

SEQ ID NO: 323822 - DNA, 25 bp, Artificial
  probe
  misc_feature (1)..(25): SEQ ID NO: 2380; WAN024CV4; Start 92; Stop 116
atattgtagttgatgctattagtgc

SEQ ID NO: 323823 - DNA, 25 bp, Artificial
  probe
  misc_feature (1)..(25): SEQ ID NO: 2380; WAN024CV4; Start 83; Stop 107
aagggaaagatattgtagttgatgc

SEQ ID NO: 323824 - DNA, 25 bp, Artificial
  probe
  misc_feature (1)..(25): SEQ ID NO: 2380; WAN024CV4; Start 108; Stop 132
tattagtgctactgaaggagggaaa

SEQ ID NO: 323825 - DNA, 25 bp, Artificial
  probe
  misc_feature (1)..(25): SEQ ID NO: 2380; WAN024CV4; Start 96; Stop 120
tgtagttgatgctattagtgctact

SEQ ID NO: 323826 - DNA, 25 bp, Artificial
  probe
  misc_feature (1)..(25): SEQ ID NO: 2380; WAN024CV4; Start 85; Stop 109
gggaaagatattgtagttgatgcta

SEQ ID NO: 323827 - DNA, 25 bp, Artificial
  probe
  misc_feature (1)..(25): SEQ ID NO: 2380; WAN024CV4; Start 25; Stop 49
gcagcaggaatgtcttcatcactta

SEQ ID NO: 323828 - DNA, 25 bp, Artificial
  probe
  misc_feature (1)..(25): SEQ ID NO: 2380; WAN024CV4; Start 36; Stop 60
gtcttcatcacttatggcacagaaa

SEQ ID NO: 323829 - DNA, 25 bp, Artificial
  probe
  misc_feature (1)..(25): SEQ ID NO: 2380; WAN024CV4; Start 97; Stop 121
gtagttgatgctattagtgctactg

SEQ ID NO: 323830 - DNA, 25 bp, Artificial
  probe
  misc_feature (1)..(25): SEQ ID NO: 2380; WAN024CV4; Start 107; Stop 131
ctattagtgctactgaaggagggaa

SEQ ID NO: 323831 - DNA, 25 bp, Artificial
  probe
  misc_feature (1)..(25): SEQ ID NO: 2380; WAN024CV4; Start 95; Stop 119
ttgtagttgatgctattagtgctac

SEQ ID NO: 323832 - DNA, 25 bp, Artificial
  probe
  misc_feature (1)..(25): SEQ ID NO: 2380; WAN024CV4; Start 109; Stop 133
attagtgctactgaaggagggaaag

SEQ ID NO: 323833 - DNA, 25 bp, Artificial
  probe
  misc_feature (1)..(25): SEQ ID NO: 2380; WAN024CV4; Start 14; Stop 38
taattatttgtgcagcaggaatgtc

SEQ ID NO: 323834 - DNA, 25 bp, Artificial
  probe
  misc_feature (1)..(25): SEQ ID NO: 2380; WAN024CV4; Start 13; Stop 37
ttaattatttgtgcagcaggaatgt

SEQ ID NO: 323835 - DNA, 25 bp, Artificial
  probe
  misc_feature (1)..(25): SEQ ID NO: 2381; WAN024F3Y; Start 103; Stop 127
gaagagcaggcagtattgatagatt

SEQ ID NO: 323836 - DNA, 25 bp, Artificial
  probe
  misc_feature (1)..(25): SEQ ID NO: 2381; WAN024F3Y; Start 100; Stop 124
gatgaagagcaggcagtattgatag

SEQ ID NO: 323837 - DNA, 25 bp, Artificial
  probe
  misc_feature (1)..(25): SEQ ID NO: 2381; WAN024F3Y; Start 102; Stop 126
tgaagagcaggcagtattgatagat

SEQ ID NO: 323838 - DNA, 25 bp, Artificial
  probe
  misc_feature (1)..(25): SEQ ID NO: 2381; WAN024F3Y; Start 101; Stop 125
atgaagagcaggcagtattgataga

SEQ ID NO: 323839 - DNA, 25 bp, Artificial
  probe
  misc_feature (1)..(25): SEQ ID NO: 2381; WAN024F3Y; Start 99; Stop 123
tgatgaagagcaggcagtattgata

SEQ ID NO: 323840 - DNA, 25 bp, Artificial
  probe
  misc_feature (1)..(25): SEQ ID NO: 2381; WAN024F3Y; Start 98; Stop 122
ttgatgaagagcaggcagtattgat

SEQ ID NO: 323841 - DNA, 25 bp, Artificial
  probe
  misc_feature (1)..(25): SEQ ID NO: 2381; WAN024F3Y; Start 104; Stop 128
aagagcaggcagtattgatagattt

SEQ ID NO: 323842 - DNA, 25 bp, Artificial
  probe
  misc_feature (1)..(25): SEQ ID NO: 2381; WAN024F3Y; Start 107; Stop 131
agcaggcagtattgatagatttaca

SEQ ID NO: 323843 - DNA, 25 bp, Artificial
  probe
  misc_feature (1)..(25): SEQ ID NO: 2381; WAN024F3Y; Start 106; Stop 130
gagcaggcagtattgatagatttac

SEQ ID NO: 323844 - DNA, 25 bp, Artificial
  probe
  misc_feature (1)..(25): SEQ ID NO: 2381; WAN024F3Y; Start 105; Stop 129
agagcaggcagtattgatagattta

SEQ ID NO: 323845 - DNA, 25 bp, Artificial
  probe
  misc_feature (1)..(25): SEQ ID NO: 2381; WAN024F3Y; Start 108; Stop 132
gcaggcagtattgatagatttacaa

SEQ ID NO: 323846 - DNA, 25 bp, Artificial
  probe
  misc_feature (1)..(25): SEQ ID NO: 2381; WAN024F3Y; Start 96; Stop 120
atttgatgaagagcaggcagtattg

SEQ ID NO: 323847 - DNA, 25 bp, Artificial
  probe
  misc_feature (1)..(25): SEQ ID NO: 2381; WAN024F3Y; Start 95; Stop 119
catttgatgaagagcaggcagtatt

SEQ ID NO: 323848 - DNA, 25 bp, Artificial
  probe
  misc_feature (1)..(25): SEQ ID NO: 2381; WAN024F3Y; Start 97; Stop 121
tttgatgaagagcaggcagtattga

SEQ ID NO: 323849 - DNA, 25 bp, Artificial
  probe
  misc_feature (1)..(25): SEQ ID NO: 2381; WAN024F3Y; Start 162; Stop 186
attcccagaagccatatttggtaaa

SEQ ID NO: 323850 - DNA, 25 bp, Artificial
  probe
  misc_feature (1)..(25): SEQ ID NO: 2381; WAN024F3Y; Start 163; Stop 187
ttcccagaagccatatttggtaaag

SEQ ID NO: 323851 - DNA, 25 bp, Artificial
  probe
  misc_feature (1)..(25): SEQ ID NO: 2381; WAN024F3Y; Start 161; Stop 185
cattcccagaagccatatttggtaa

SEQ ID NO: 323852 - DNA, 25 bp, Artificial
  probe
  misc_feature (1)..(25): SEQ ID NO: 2381; WAN024F3Y; Start 115; Stop 139
gtattgatagatttacaaacaccgt

SEQ ID NO: 323853 - DNA, 25 bp, Artificial
  probe
  misc_feature (1)..(25): SEQ ID NO: 2381; WAN024F3Y; Start 111; Stop 135
ggcagtattgatagatttacaaaca

SEQ ID NO: 323854 - DNA, 25 bp, Artificial
  probe
  misc_feature (1)..(25): SEQ ID NO: 2381; WAN024F3Y; Start 158; Stop 182
ctacattcccagaagccatatttgg

SEQ ID NO: 323855 - DNA, 25 bp, Artificial
  probe
  misc_feature (1)..(25): SEQ ID NO: 2381; WAN024F3Y; Start 114; Stop 138
agtattgatagatttacaaacaccg

SEQ ID NO: 323856 - DNA, 25 bp, Artificial
  probe
  misc_feature (1)..(25): SEQ ID NO: 2381; WAN024F3Y; Start 110; Stop 134
aggcagtattgatagatttacaaac

SEQ ID NO: 323857 - DNA, 25 bp, Artificial
  probe
  misc_feature (1)..(25): SEQ ID NO: 2381; WAN024F3Y; Start 109; Stop 133
caggcagtattgatagatttacaaa

SEQ ID NO: 323858 - DNA, 25 bp, Artificial
  probe
  misc_feature (1)..(25): SEQ ID NO: 2381; WAN024F3Y; Start 160; Stop 184
acattcccagaagccatatttggta

SEQ ID NO: 323859 - DNA, 25 bp, Artificial
  probe
  misc_feature (1)..(25): SEQ ID NO: 2381; WAN024F3Y; Start 159; Stop 183
tacattcccagaagccatatttggt

SEQ ID NO: 323860 - DNA, 25 bp, Artificial
  probe
  misc_feature (1)..(25): SEQ ID NO: 2381; WAN024F3Y; Start 116; Stop 140
tattgatagatttacaaacaccgtt

SEQ ID NO: 323861 - DNA, 25 bp, Artificial
  probe
  misc_feature (1)..(25): SEQ ID NO: 2381; WAN024F3Y; Start 112; Stop 136
gcagtattgatagatttacaaacac

SEQ ID NO: 323862 - DNA, 25 bp, Artificial
  probe
  misc_feature (1)..(25): SEQ ID NO: 2381; WAN024F3Y; Start 54; Stop 78
gaaaccaaacttaatggagcggaag

SEQ ID NO: 323863 - DNA, 25 bp, Artificial
  probe
  misc_feature (1)..(25): SEQ ID NO: 2381; WAN024F3Y; Start 157; Stop 181
gctacattcccagaagccatatttg

SEQ ID NO: 323864 - DNA, 25 bp, Artificial
  probe
  misc_feature (1)..(25): SEQ ID NO: 2381; WAN024F3Y; Start 164; Stop 188
tcccagaagccatatttggtaaagc

SEQ ID NO: 323865 - DNA, 25 bp, Artificial
  probe
  misc_feature (1)..(25): SEQ ID NO: 2381; WAN024F3Y; Start 117; Stop 141
attgatagatttacaaacaccgttt

SEQ ID NO: 323866 - DNA, 25 bp, Artificial
  probe
  misc_feature (1)..(25): SEQ ID NO: 2381; WAN024F3Y; Start 94; Stop 118
tcatttgatgaagagcaggcagtat

SEQ ID NO: 323867 - DNA, 25 bp, Artificial
  probe
  misc_feature (1)..(25): SEQ ID NO: 2381; WAN024F3Y; Start 93; Stop 117
atcatttgatgaagagcaggcagta

SEQ ID NO: 323868 - DNA, 25 bp, Artificial
  probe
  misc_feature (1)..(25): SEQ ID NO: 2382; WAN024DOM; Start 63; Stop 87
tgcggtaatcgggctaactttattt

SEQ ID NO: 323869 - DNA, 25 bp, Artificial
  probe
  misc_feature (1)..(25): SEQ ID NO: 2382; WAN024DOM; Start 62; Stop 86
ctgcggtaatcgggctaactttatt

SEQ ID NO: 323870 - DNA, 25 bp, Artificial
  probe
  misc_feature (1)..(25): SEQ ID NO: 2382; WAN024DOM; Start 61; Stop 85
tctgcggtaatcgggctaactttat

SEQ ID NO: 323871 - DNA, 25 bp, Artificial
  probe
  misc_feature (1)..(25): SEQ ID NO: 2382; WAN024DOM; Start 64; Stop 88
gcggtaatcgggctaactttatttt

SEQ ID NO: 323872 - DNA, 25 bp, Artificial
  probe
  misc_feature (1)..(25): SEQ ID NO: 2382; WAN024DOM; Start 60; Stop 84
ttctgcggtaatcgggctaacttta

SEQ ID NO: 323873 - DNA, 25 bp, Artificial
  probe
  misc_feature (1)..(25): SEQ ID NO: 2382; WAN024DOM; Start 2; Stop 26
tggcaaaatctaatactaataagcg

SEQ ID NO: 323874 - DNA, 25 bp, Artificial
  probe
  misc_feature (1)..(25): SEQ ID NO: 2382; WAN024DOM; Start 3; Stop 27
ggcaaaatctaatactaataagcgc

SEQ ID NO: 323875 - DNA, 25 bp, Artificial
  probe
  misc_feature (1)..(25): SEQ ID NO: 2382; WAN024DOM; Start 1; Stop 25
atggcaaaatctaatactaataagc

SEQ ID NO: 323876 - DNA, 25 bp, Artificial
  probe
  misc_feature (1)..(25): SEQ ID NO: 2383; WAN024BFK; Start 74; Stop 98
cgactaagttctatgaaggagatgt

SEQ ID NO: 323877 - DNA, 25 bp, Artificial
  probe
  misc_feature (1)..(25): SEQ ID NO: 2383; WAN024BFK; Start 73; Stop 97
acgactaagttctatgaaggagatg

SEQ ID NO: 323878 - DNA, 25 bp, Artificial
  probe
  misc_feature (1)..(25): SEQ ID NO: 2383; WAN024BFK; Start 256; Stop 280
gtattccaacacttcaacctcttcc

SEQ ID NO: 323879 - DNA, 25 bp, Artificial
  probe
  misc_feature (1)..(25): SEQ ID NO: 2383; WAN024BFK; Start 325; Stop 349
cacaagttgatgactaaggaagaag

SEQ ID NO: 323880 - DNA, 25 bp, Artificial
  probe
  misc_feature (1)..(25): SEQ ID NO: 2383; WAN024BFK; Start 316; Stop 340
cctattgagcacaagttgatgacta

SEQ ID NO: 323881 - DNA, 25 bp, Artificial
  probe
  misc_feature (1)..(25): SEQ ID NO: 2383; WAN024BFK; Start 318; Stop 342
tattgagcacaagttgatgactaag

SEQ ID NO: 323882 - DNA, 25 bp, Artificial
  probe
  misc_feature (1)..(25): SEQ ID NO: 2383; WAN024BFK; Start 317; Stop 341
ctattgagcacaagttgatgactaa

SEQ ID NO: 323883 - DNA, 25 bp, Artificial
  probe
  misc_feature (1)..(25): SEQ ID NO: 2383; WAN024BFK; Start 326; Stop 350
acaagttgatgactaaggaagaagc

SEQ ID NO: 323884 - DNA, 25 bp, Artificial
  probe
  misc_feature (1)..(25): SEQ ID NO: 2383; WAN024BFK; Start 324; Stop 348
gcacaagttgatgactaaggaagaa

SEQ ID NO: 323885 - DNA, 25 bp, Artificial
  probe
  misc_feature (1)..(25): SEQ ID NO: 2383; WAN024BFK; Start 71; Stop 95
ttacgactaagttctatgaaggaga

SEQ ID NO: 323886 - DNA, 25 bp, Artificial
  probe
  misc_feature (1)..(25): SEQ ID NO: 2383; WAN024BFK; Start 319; Stop 343
attgagcacaagttgatgactaagg

SEQ ID NO: 323887 - DNA, 25 bp, Artificial
  probe
  misc_feature (1)..(25): SEQ ID NO: 2383; WAN024BFK; Start 72; Stop 96
tacgactaagttctatgaaggagat

SEQ ID NO: 323888 - DNA, 25 bp, Artificial
  probe
  misc_feature (1)..(25): SEQ ID NO: 2383; WAN024BFK; Start 322; Stop 346
gagcacaagttgatgactaaggaag

SEQ ID NO: 323889 - DNA, 25 bp, Artificial
  probe
  misc_feature (1)..(25): SEQ ID NO: 2383; WAN024BFK; Start 77; Stop 101
ctaagttctatgaaggagatgttgt

SEQ ID NO: 323890 - DNA, 25 bp, Artificial
  probe
  misc_feature (1)..(25): SEQ ID NO: 2383; WAN024BFK; Start 76; Stop 100
actaagttctatgaaggagatgttg

SEQ ID NO: 323891 - DNA, 25 bp, Artificial
  probe
  misc_feature (1)..(25): SEQ ID NO: 2383; WAN024BFK; Start 314; Stop 338
ctcctattgagcacaagttgatgac

SEQ ID NO: 323892 - DNA, 25 bp, Artificial
  probe
  misc_feature (1)..(25): SEQ ID NO: 2383; WAN024BFK; Start 323; Stop 347
agcacaagttgatgactaaggaaga

SEQ ID NO: 323893 - DNA, 25 bp, Artificial
  probe
  misc_feature (1)..(25): SEQ ID NO: 2383; WAN024BFK; Start 315; Stop 339
tcctattgagcacaagttgatgact

SEQ ID NO: 323894 - DNA, 25 bp, Artificial
  probe
  misc_feature (1)..(25): SEQ ID NO: 2383; WAN024BFK; Start 75; Stop 99
gactaagttctatgaaggagatgtt

SEQ ID NO: 323895 - DNA, 25 bp, Artificial
  probe
  misc_feature (1)..(25): SEQ ID NO: 2383; WAN024BFK; Start 70; Stop 94
attacgactaagttctatgaaggag

SEQ ID NO: 323896 - DNA, 25 bp, Artificial
  probe
  misc_feature (1)..(25): SEQ ID NO: 2383; WAN024BFK; Start 321; Stop 345
tgagcacaagttgatgactaaggaa

SEQ ID NO: 323897 - DNA, 25 bp, Artificial
  probe
  misc_feature (1)..(25): SEQ ID NO: 2383; WAN024BFK; Start 320; Stop 344
ttgagcacaagttgatgactaagga

SEQ ID NO: 323898 - DNA, 25 bp, Artificial
  probe
  misc_feature (1)..(25): SEQ ID NO: 2383; WAN024BFK; Start 330; Stop 354
gttgatgactaaggaagaagctgag

SEQ ID NO: 323899 - DNA, 25 bp, Artificial
  probe
  misc_feature (1)..(25): SEQ ID NO: 2383; WAN024BFK; Start 78; Stop 102
taagttctatgaaggagatgttgtt

SEQ ID NO: 323900 - DNA, 25 bp, Artificial
  probe
  misc_feature (1)..(25): SEQ ID NO: 2383; WAN024BFK; Start 401; Stop 425
ctaatgccaatccagatagcctatc

SEQ ID NO: 323901 - DNA, 25 bp, Artificial
  probe
  misc_feature (1)..(25): SEQ ID NO: 2383; WAN024BFK; Start 190; Stop 214
gtgaacggctatgatttaactgaaa

SEQ ID NO: 323902 - DNA, 25 bp, Artificial
  probe
  misc_feature (1)..(25): SEQ ID NO: 2383; WAN024BFK; Start 402; Stop 426
taatgccaatccagatagcctatca

SEQ ID NO: 323903 - DNA, 25 bp, Artificial
  probe
  misc_feature (1)..(25): SEQ ID NO: 2383; WAN024BFK; Start 328; Stop 352
aagttgatgactaaggaagaagctg

SEQ ID NO: 323904 - DNA, 25 bp, Artificial
  probe
  misc_feature (1)..(25): SEQ ID NO: 2383; WAN024BFK; Start 327; Stop 351
caagttgatgactaaggaagaagct

SEQ ID NO: 323905 - DNA, 25 bp, Artificial
  probe
  misc_feature (1)..(25): SEQ ID NO: 2383; WAN024BFK; Start 69; Stop 93
aattacgactaagttctatgaagga

SEQ ID NO: 323906 - DNA, 25 bp, Artificial
  probe
  misc_feature (1)..(25): SEQ ID NO: 2383; WAN024BFK; Start 66; Stop 90
aggaattacgactaagttctatgaa

SEQ ID NO: 323907 - DNA, 25 bp, Artificial
  probe
  misc_feature (1)..(25): SEQ ID NO: 2383; WAN024BFK; Start 65; Stop 89
aaggaattacgactaagttctatga

SEQ ID NO: 323908 - DNA, 25 bp, Artificial
  probe
  misc_feature (1)..(25): SEQ ID NO: 2383; WAN024BFK; Start 189; Stop 213
tgtgaacggctatgatttaactgaa

SEQ ID NO: 323909 - DNA, 25 bp, Artificial
  probe
  misc_feature (1)..(25): SEQ ID NO: 2384; WAN024DKT; Start 245; Stop 269
aaacagttgatgccttgatgaaatt

SEQ ID NO: 323910 - DNA, 25 bp, Artificial
  probe
  misc_feature (1)..(25): SEQ ID NO: 2384; WAN024DKT; Start 246; Stop 270
aacagttgatgccttgatgaaattg

SEQ ID NO: 323911 - DNA, 25 bp, Artificial
  probe
  misc_feature (1)..(25): SEQ ID NO: 2384; WAN024DKT; Start 249; Stop 273
agttgatgccttgatgaaattggat

SEQ ID NO: 323912 - DNA, 25 bp, Artificial
  probe
  misc_feature (1)..(25): SEQ ID NO: 2384; WAN024DKT; Start 253; Stop 277
gatgccttgatgaaattggatcttc

SEQ ID NO: 323913 - DNA, 25 bp, Artificial
  probe
  misc_feature (1)..(25): SEQ ID NO: 2384; WAN024DKT; Start 252; Stop 276
tgatgccttgatgaaattggatctt

SEQ ID NO: 323914 - DNA, 25 bp, Artificial
  probe
  misc_feature (1)..(25): SEQ ID NO: 2384; WAN024DKT; Start 251; Stop 275
ttgatgccttgatgaaattggatct

SEQ ID NO: 323915 - DNA, 25 bp, Artificial
  probe
  misc_feature (1)..(25): SEQ ID NO: 2384; WAN024DKT; Start 250; Stop 274
gttgatgccttgatgaaattggatc

SEQ ID NO: 323916 - DNA, 25 bp, Artificial
  probe
  misc_feature (1)..(25): SEQ ID NO: 2384; WAN024DKT; Start 162; Stop 186
gactcacaaatacaaagactctcgc

SEQ ID NO: 323917 - DNA, 25 bp, Artificial
  probe
  misc_feature (1)..(25): SEQ ID NO: 2384; WAN024DKT; Start 160; Stop 184
gcgactcacaaatacaaagactctc

SEQ ID NO: 323918 - DNA, 25 bp, Artificial
  probe
  misc_feature (1)..(25): SEQ ID NO: 2384; WAN024DKT; Start 187; Stop 211
gaacaatttgaaatgcgtacacaca

SEQ ID NO: 323919 - DNA, 25 bp, Artificial
  probe
  misc_feature (1)..(25): SEQ ID NO: 2384; WAN024DKT; Start 188; Stop 212
aacaatttgaaatgcgtacacacaa

SEQ ID NO: 323920 - DNA, 25 bp, Artificial
  probe
  misc_feature (1)..(25): SEQ ID NO: 2384; WAN024DKT; Start 248; Stop 272
cagttgatgccttgatgaaattgga

SEQ ID NO: 323921 - DNA, 25 bp, Artificial
  probe
  misc_feature (1)..(25): SEQ ID NO: 2384; WAN024DKT; Start 247; Stop 271
acagttgatgccttgatgaaattgg

SEQ ID NO: 323922 - DNA, 25 bp, Artificial
  probe
  misc_feature (1)..(25): SEQ ID NO: 2384; WAN024DKT; Start 159; Stop 183
tgcgactcacaaatacaaagactct

SEQ ID NO: 323923 - DNA, 25 bp, Artificial
  probe
  misc_feature (1)..(25): SEQ ID NO: 2384; WAN024DKT; Start 186; Stop 210
cgaacaatttgaaatgcgtacacac

SEQ ID NO: 323924 - DNA, 25 bp, Artificial
  probe
  misc_feature (1)..(25): SEQ ID NO: 2384; WAN024DKT; Start 72; Stop 96
aatcgtagaatcagctactcgtaca

SEQ ID NO: 323925 - DNA, 25 bp, Artificial
  probe
  misc_feature (1)..(25): SEQ ID NO: 2384; WAN024DKT; Start 281; Stop 305
gtggtgtaaacgtagaaatcaaact

SEQ ID NO: 323926 - DNA, 25 bp, Artificial
  probe
  misc_feature (1)..(25): SEQ ID NO: 2384; WAN024DKT; Start 280; Stop 304
agtggtgtaaacgtagaaatcaaac

SEQ ID NO: 323927 - DNA, 25 bp, Artificial
  probe
  misc_feature (1)..(25): SEQ ID NO: 2384; WAN024DKT; Start 278; Stop 302
caagtggtgtaaacgtagaaatcaa

SEQ ID NO: 323928 - DNA, 25 bp, Artificial
  probe
  misc_feature (1)..(25): SEQ ID NO: 2384; WAN024DKT; Start 282; Stop 306
tggtgtaaacgtagaaatcaaactt

SEQ ID NO: 323929 - DNA, 25 bp, Artificial
  probe
  misc_feature (1)..(25): SEQ ID NO: 2384; WAN024DKT; Start 279; Stop 303
aagtggtgtaaacgtagaaatcaaa

SEQ ID NO: 323930 - DNA, 25 bp, Artificial
  probe
  misc_feature (1)..(25): SEQ ID NO: 2384; WAN024DKT; Start 276; Stop 300
tccaagtggtgtaaacgtagaaatc

SEQ ID NO: 323931 - DNA, 25 bp, Artificial
  probe
  misc_feature (1)..(25): SEQ ID NO: 2384; WAN024DKT; Start 275; Stop 299
ttccaagtggtgtaaacgtagaaat

SEQ ID NO: 323932 - DNA, 25 bp, Artificial
  probe
  misc_feature (1)..(25): SEQ ID NO: 2384; WAN024DKT; Start 73; Stop 97
atcgtagaatcagctactcgtacag

SEQ ID NO: 323933 - DNA, 25 bp, Artificial
  probe
  misc_feature (1)..(25): SEQ ID NO: 2384; WAN024DKT; Start 277; Stop 301
ccaagtggtgtaaacgtagaaatca

SEQ ID NO: 323934 - DNA, 25 bp, Artificial
  probe
  misc_feature (1)..(25): SEQ ID NO: 2384; WAN024DKT; Start 271; Stop 295
gatcttccaagtggtgtaaacgtag

SEQ ID NO: 323935 - DNA, 25 bp, Artificial
  probe
  misc_feature (1)..(25): SEQ ID NO: 2384; WAN024DKT; Start 274; Stop 298
cttccaagtggtgtaaacgtagaaa

SEQ ID NO: 323936 - DNA, 25 bp, Artificial
  probe
  misc_feature (1)..(25): SEQ ID NO: 2384; WAN024DKT; Start 254; Stop 278
atgccttgatgaaattggatcttcc

SEQ ID NO: 323937 - DNA, 25 bp, Artificial
  probe
  misc_feature (1)..(25): SEQ ID NO: 2384; WAN024DKT; Start 133; Stop 157
gaacgtagcctctacacaatcattc

SEQ ID NO: 323938 - DNA, 25 bp, Artificial
  probe
  misc_feature (1)..(25): SEQ ID NO: 2384; WAN024DKT; Start 283; Stop 307
ggtgtaaacgtagaaatcaaacttt

SEQ ID NO: 323939 - DNA, 25 bp, Artificial
  probe
  misc_feature (1)..(25): SEQ ID NO: 2384; WAN024DKT; Start 158; Stop 182
gtgcgactcacaaatacaaagactc

SEQ ID NO: 323940 - DNA, 25 bp, Artificial
  probe
  misc_feature (1)..(25): SEQ ID NO: 2384; WAN024DKT; Start 150; Stop 174
aatcattcgtgcgactcacaaatac

SEQ ID NO: 323941 - DNA, 25 bp, Artificial
  probe
  misc_feature (1)..(25): SEQ ID NO: 2384; WAN024DKT; Start 149; Stop 173
caatcattcgtgcgactcacaaata

SEQ ID NO: 323942 - DNA, 25 bp, Artificial
  probe
  misc_feature (1)..(25): SEQ ID NO: 2385; WAN024ET6; Start 191; Stop 215
cacaaactggtaaagaaatgacaat

SEQ ID NO: 323943 - DNA, 25 bp, Artificial
  probe
  misc_feature (1)..(25): SEQ ID NO: 2385; WAN024ET6; Start 221; Stop 245
cttctaaagtaccagcattcaaagc

SEQ ID NO: 323944 - DNA, 25 bp, Artificial
  probe
  misc_feature (1)..(25): SEQ ID NO: 2385; WAN024ET6; Start 253; Stop 277
gctcttaaagacgctgttaaataac

SEQ ID NO: 323945 - DNA, 25 bp, Artificial
  probe
  misc_feature (1)..(25): SEQ ID NO: 2385; WAN024ET6; Start 192; Stop 216
acaaactggtaaagaaatgacaatt

SEQ ID NO: 323946 - DNA, 25 bp, Artificial
  probe
  misc_feature (1)..(25): SEQ ID NO: 2385; WAN024ET6; Start 190; Stop 214
ccacaaactggtaaagaaatgacaa

SEQ ID NO: 323947 - DNA, 25 bp, Artificial
  probe
  misc_feature (1)..(25): SEQ ID NO: 2385; WAN024ET6; Start 187; Stop 211
aacccacaaactggtaaagaaatga

SEQ ID NO: 323948 - DNA, 25 bp, Artificial
  probe
  misc_feature (1)..(25): SEQ ID NO: 2385; WAN024ET6; Start 186; Stop 210
caacccacaaactggtaaagaaatg

SEQ ID NO: 323949 - DNA, 25 bp, Artificial
  probe
  misc_feature (1)..(25): SEQ ID NO: 2385; WAN024ET6; Start 10; Stop 34
aaacaagatttgatcgctaaagtag

SEQ ID NO: 323950 - DNA, 25 bp, Artificial
  probe
  misc_feature (1)..(25): SEQ ID NO: 2385; WAN024ET6; Start 189; Stop 213
cccacaaactggtaaagaaatgaca

SEQ ID NO: 323951 - DNA, 25 bp, Artificial
  probe
  misc_feature (1)..(25): SEQ ID NO: 2385; WAN024ET6; Start 188; Stop 212
acccacaaactggtaaagaaatgac

SEQ ID NO: 323952 - DNA, 25 bp, Artificial
  probe
  misc_feature (1)..(25): SEQ ID NO: 2385; WAN024ET6; Start 254; Stop 278
ctcttaaagacgctgttaaataact

SEQ ID NO: 323953 - DNA, 25 bp, Artificial
  probe
  misc_feature (1)..(25): SEQ ID NO: 2385; WAN024ET6; Start 220; Stop 244
gcttctaaagtaccagcattcaaag

SEQ ID NO: 323954 - DNA, 25 bp, Artificial
  probe
  misc_feature (1)..(25): SEQ ID NO: 2385; WAN024ET6; Start 8; Stop 32
acaaacaagatttgatcgctaaagt

SEQ ID NO: 323955 - DNA, 25 bp, Artificial
  probe
  misc_feature (1)..(25): SEQ ID NO: 2385; WAN024ET6; Start 5; Stop 29
caaacaaacaagatttgatcgctaa

SEQ ID NO: 323956 - DNA, 25 bp, Artificial
  probe
  misc_feature (1)..(25): SEQ ID NO: 2385; WAN024ET6; Start 185; Stop 209
gcaacccacaaactggtaaagaaat

SEQ ID NO: 323957 - DNA, 25 bp, Artificial
  probe
  misc_feature (1)..(25): SEQ ID NO: 2385; WAN024ET6; Start 7; Stop 31
aacaaacaagatttgatcgctaaag

SEQ ID NO: 323958 - DNA, 25 bp, Artificial
  probe
  misc_feature (1)..(25): SEQ ID NO: 2385; WAN024ET6; Start 4; Stop 28
gcaaacaaacaagatttgatcgcta

SEQ ID NO: 323959 - DNA, 25 bp, Artificial
  probe
  misc_feature (1)..(25): SEQ ID NO: 2385; WAN024ET6; Start 1; Stop 25
atggcaaacaaacaagatttgatcg

SEQ ID NO: 323960 - DNA, 25 bp, Artificial
  probe
  misc_feature (1)..(25): SEQ ID NO: 2385; WAN024ET6; Start 195; Stop 219
aactggtaaagaaatgacaattgca

SEQ ID NO: 323961 - DNA, 25 bp, Artificial
  probe
  misc_feature (1)..(25): SEQ ID NO: 2385; WAN024ET6; Start 6; Stop 30
aaacaaacaagatttgatcgctaaa

SEQ ID NO: 323962 - DNA, 25 bp, Artificial
  probe
  misc_feature (1)..(25): SEQ ID NO: 2385; WAN024ET6; Start 248; Stop 272
gtaaagctcttaaagacgctgttaa

SEQ ID NO: 323963 - DNA, 25 bp, Artificial
  probe
  misc_feature (1)..(25): SEQ ID NO: 2385; WAN024ET6; Start 250; Stop 274
aaagctcttaaagacgctgttaaat

SEQ ID NO: 323964 - DNA, 25 bp, Artificial
  probe
  misc_feature (1)..(25): SEQ ID NO: 2385; WAN024ET6; Start 208; Stop 232
atgacaattgcagcttctaaagtac

SEQ ID NO: 323965 - DNA, 25 bp, Artificial
  probe
  misc_feature (1)..(25): SEQ ID NO: 2385; WAN024ET6; Start 206; Stop 230
aaatgacaattgcagcttctaaagt

SEQ ID NO: 323966 - DNA, 25 bp, Artificial
  probe
  misc_feature (1)..(25): SEQ ID NO: 2385; WAN024ET6; Start 200; Stop 224
gtaaagaaatgacaattgcagcttc

SEQ ID NO: 323967 - DNA, 25 bp, Artificial
  probe
  misc_feature (1)..(25): SEQ ID NO: 2385; WAN024ET6; Start 222; Stop 246
ttctaaagtaccagcattcaaagct

SEQ ID NO: 323968 - DNA, 25 bp, Artificial
  probe
  misc_feature (1)..(25): SEQ ID NO: 2385; WAN024ET6; Start 219; Stop 243
agcttctaaagtaccagcattcaaa

SEQ ID NO: 323969 - DNA, 25 bp, Artificial
  probe
  misc_feature (1)..(25): SEQ ID NO: 2385; WAN024ET6; Start 205; Stop 229
gaaatgacaattgcagcttctaaag

SEQ ID NO: 323970 - DNA, 25 bp, Artificial
  probe
  misc_feature (1)..(25): SEQ ID NO: 2385; WAN024ET6; Start 194; Stop 218
aaactggtaaagaaatgacaattgc

SEQ ID NO: 323971 - DNA, 25 bp, Artificial
  probe
  misc_feature (1)..(25): SEQ ID NO: 2385; WAN024ET6; Start 9; Stop 33
caaacaagatttgatcgctaaagta

SEQ ID NO: 323972 - DNA, 25 bp, Artificial
  probe
  misc_feature (1)..(25): SEQ ID NO: 2385; WAN024ET6; Start 249; Stop 273
taaagctcttaaagacgctgttaaa

SEQ ID NO: 323973 - DNA, 25 bp, Artificial
  probe
  misc_feature (1)..(25): SEQ ID NO: 2385; WAN024ET6; Start 207; Stop 231
aatgacaattgcagcttctaaagta

SEQ ID NO: 323974 - DNA, 25 bp, Artificial
  probe
  misc_feature (1)..(25): SEQ ID NO: 2385; WAN024ET6; Start 199; Stop 223
ggtaaagaaatgacaattgcagctt

SEQ ID NO: 323975 - DNA, 25 bp, Artificial
  probe
  misc_feature (1)..(25): SEQ ID NO: 2386; WAN024BHC; Start 1004; Stop 1028
ttggtattaaggtaacagttgaacg

SEQ ID NO: 323976 - DNA, 25 bp, Artificial
  probe
  misc_feature (1)..(25): SEQ ID NO: 2386; WAN024BHC; Start 1005; Stop 1029
tggtattaaggtaacagttgaacgg

SEQ ID NO: 323977 - DNA, 25 bp, Artificial
  probe
  misc_feature (1)..(25): SEQ ID NO: 2386; WAN024BHC; Start 654; Stop 678
ggctagattagaacaagaagagact

SEQ ID NO: 323978 - DNA, 25 bp, Artificial
  probe
  misc_feature (1)..(25): SEQ ID NO: 2386; WAN024BHC; Start 653; Stop 677
aggctagattagaacaagaagagac

SEQ ID NO: 323979 - DNA, 25 bp, Artificial
  probe
  misc_feature (1)..(25): SEQ ID NO: 2386; WAN024BHC; Start 652; Stop 676
gaggctagattagaacaagaagaga

SEQ ID NO: 323980 - DNA, 25 bp, Artificial
  probe
  misc_feature (1)..(25): SEQ ID NO: 2386; WAN024BHC; Start 651; Stop 675
agaggctagattagaacaagaagag

SEQ ID NO: 323981 - DNA, 25 bp, Artificial
  probe
  misc_feature (1)..(25): SEQ ID NO: 2386; WAN024BHC; Start 10; Stop 34
aagaatacaagtacaacaagacgga

SEQ ID NO: 323982 - DNA, 25 bp, Artificial
  probe
  misc_feature (1)..(25): SEQ ID NO: 2386; WAN024BHC; Start 9; Stop 33
caagaatacaagtacaacaagacgg

SEQ ID NO: 323983 - DNA, 25 bp, Artificial
  probe
  misc_feature (1)..(25): SEQ ID NO: 2386; WAN024BHC; Start 8; Stop 32
acaagaatacaagtacaacaagacg

SEQ ID NO: 323984 - DNA, 25 bp, Artificial
  probe
  misc_feature (1)..(25): SEQ ID NO: 2386; WAN024BHC; Start 650; Stop 674
aagaggctagattagaacaagaaga

SEQ ID NO: 323985 - DNA, 25 bp, Artificial
  probe
  misc_feature (1)..(25): SEQ ID NO: 2386; WAN024BHC; Start 12; Stop 36
gaatacaagtacaacaagacggaga

SEQ ID NO: 323986 - DNA, 25 bp, Artificial
  probe
  misc_feature (1)..(25): SEQ ID NO: 2386; WAN024BHC; Start 11; Stop 35
agaatacaagtacaacaagacggag

SEQ ID NO: 323987 - DNA, 25 bp, Artificial
  probe
  misc_feature (1)..(25): SEQ ID NO: 2386; WAN024BHC; Start 655; Stop 679
gctagattagaacaagaagagactg

SEQ ID NO: 323988 - DNA, 25 bp, Artificial
  probe
  misc_feature (1)..(25): SEQ ID NO: 2386; WAN024BHC; Start 13; Stop 37
aatacaagtacaacaagacggagac

SEQ ID NO: 323989 - DNA, 25 bp, Artificial
  probe
  misc_feature (1)..(25): SEQ ID NO: 2386; WAN024BHC; Start 7; Stop 31
aacaagaatacaagtacaacaagac

SEQ ID NO: 323990 - DNA, 25 bp, Artificial
  probe
  misc_feature (1)..(25): SEQ ID NO: 2386; WAN024BHC; Start 14; Stop 38
atacaagtacaacaagacggagacc

SEQ ID NO: 323991 - DNA, 25 bp, Artificial
  probe
  misc_feature (1)..(25): SEQ ID NO: 2386; WAN024BHC; Start 276; Stop 300
catatttgctggcttactcttgatt

SEQ ID NO: 323992 - DNA, 25 bp, Artificial
  probe
  misc_feature (1)..(25): SEQ ID NO: 2386; WAN024BHC; Start 310; Stop 334
tacttggtttggaaatatggtttgg

SEQ ID NO: 323993 - DNA, 25 bp, Artificial
  probe
  misc_feature (1)..(25): SEQ ID NO: 2386; WAN024BHC; Start 1671; Stop 1695
cattgtcgtgattgtggatgagttg

SEQ ID NO: 323994 - DNA, 25 bp, Artificial
  probe
  misc_feature (1)..(25): SEQ ID NO: 2386; WAN024BHC; Start 526; Stop 550
tggtctgtttacgatattgctgaat

SEQ ID NO: 323995 - DNA, 25 bp, Artificial
  probe
  misc_feature (1)..(25): SEQ ID NO: 2386; WAN024BHC; Start 308; Stop 332
cctacttggtttggaaatatggttt

SEQ ID NO: 323996 - DNA, 25 bp, Artificial
  probe
  misc_feature (1)..(25): SEQ ID NO: 2386; WAN024BHC; Start 525; Stop 549
ttggtctgtttacgatattgctgaa

SEQ ID NO: 323997 - DNA, 25 bp, Artificial
  probe
  misc_feature (1)..(25): SEQ ID NO: 2386; WAN024BHC; Start 527; Stop 551
ggtctgtttacgatattgctgaatt

SEQ ID NO: 323998 - DNA, 25 bp, Artificial
  probe
  misc_feature (1)..(25): SEQ ID NO: 2386; WAN024BHC; Start 312; Stop 336
cttggtttggaaatatggtttggac

SEQ ID NO: 323999 - DNA, 25 bp, Artificial
  probe
  misc_feature (1)..(25): SEQ ID NO: 2386; WAN024BHC; Start 656; Stop 680
ctagattagaacaagaagagactga

SEQ ID NO: 324000 - DNA, 25 bp, Artificial
  probe
  misc_feature (1)..(25): SEQ ID NO: 2386; WAN024BHC; Start 311; Stop 335
acttggtttggaaatatggtttgga

SEQ ID NO: 324001 - DNA, 25 bp, Artificial
  probe
  misc_feature (1)..(25): SEQ ID NO: 2386; WAN024BHC; Start 277; Stop 301
atatttgctggcttactcttgattt

SEQ ID NO: 324002 - DNA, 25 bp, Artificial
  probe
  misc_feature (1)..(25): SEQ ID NO: 2386; WAN024BHC; Start 524; Stop 548
cttggtctgtttacgatattgctga

SEQ ID NO: 324003 - DNA, 25 bp, Artificial
  probe
  misc_feature (1)..(25): SEQ ID NO: 2386; WAN024BHC; Start 1001; Stop 1025
gctttggtattaaggtaacagttga

SEQ ID NO: 324004 - DNA, 25 bp, Artificial
  probe
  misc_feature (1)..(25): SEQ ID NO: 2386; WAN024BHC; Start 77; Stop 101
gaatgttgatttcgttaggaattgc

SEQ ID NO: 324005 - DNA, 25 bp, Artificial
  probe
  misc_feature (1)..(25): SEQ ID NO: 2386; WAN024BHC; Start 155; Stop 179
ataatttaattcgcttgctagtggg

SEQ ID NO: 324006 - DNA, 25 bp, Artificial
  probe
  misc_feature (1)..(25): SEQ ID NO: 2386; WAN024BHC; Start 1662; Stop 1686
gctaccattcattgtcgtgattgtg

SEQ ID NO: 324007 - DNA, 25 bp, Artificial
  probe
  misc_feature (1)..(25): SEQ ID NO: 2386; WAN024BHC; Start 876; Stop 900
caaagaagcccttgaatacaaactt

SEQ ID NO: 324008 - DNA, 25 bp, Artificial
  probe
  misc_feature (1)..(25): SEQ ID NO: 2387; WAN024DA7; Start 382; Stop 406
gaccatccagtaactcagaataatc

SEQ ID NO: 324009 - DNA, 25 bp, Artificial
  probe
  misc_feature (1)..(25): SEQ ID NO: 2387; WAN024DA7; Start 378; Stop 402
gtatgaccatccagtaactcagaat

SEQ ID NO: 324010 - DNA, 25 bp, Artificial
  probe
  misc_feature (1)..(25): SEQ ID NO: 2387; WAN024DA7; Start 375; Stop 399
aatgtatgaccatccagtaactcag

SEQ ID NO: 324011 - DNA, 25 bp, Artificial
  probe
  misc_feature (1)..(25): SEQ ID NO: 2387; WAN024DA7; Start 383; Stop 407
accatccagtaactcagaataatct

SEQ ID NO: 324012 - DNA, 25 bp, Artificial
  probe
  misc_feature (1)..(25): SEQ ID NO: 2387; WAN024DA7; Start 376; Stop 400
atgtatgaccatccagtaactcaga

SEQ ID NO: 324013 - DNA, 25 bp, Artificial
  probe
  misc_feature (1)..(25): SEQ ID NO: 2387; WAN024DA7; Start 381; Stop 405
tgaccatccagtaactcagaataat

SEQ ID NO: 324014 - DNA, 25 bp, Artificial
  probe
  misc_feature (1)..(25): SEQ ID NO: 2387; WAN024DA7; Start 380; Stop 404
atgaccatccagtaactcagaataa

SEQ ID NO: 324015 - DNA, 25 bp, Artificial
  probe
  misc_feature (1)..(25): SEQ ID NO: 2387; WAN024DA7; Start 377; Stop 401
tgtatgaccatccagtaactcagaa

SEQ ID NO: 324016 - DNA, 25 bp, Artificial
  probe
  misc_feature (1)..(25): SEQ ID NO: 2387; WAN024DA7; Start 379; Stop 403
tatgaccatccagtaactcagaata

SEQ ID NO: 324017 - DNA, 25 bp, Artificial
  probe
  misc_feature (1)..(25): SEQ ID NO: 2387; WAN024DA7; Start 139; Stop 163
acactacaggtactctcacagaatc

SEQ ID NO: 324018 - DNA, 25 bp, Artificial
  probe
  misc_feature (1)..(25): SEQ ID NO: 2387; WAN024DA7; Start 138; Stop 162
gacactacaggtactctcacagaat

SEQ ID NO: 324019 - DNA, 25 bp, Artificial
  probe
  misc_feature (1)..(25): SEQ ID NO: 2387; WAN024DA7; Start 140; Stop 164
cactacaggtactctcacagaatcc

SEQ ID NO: 324020 - DNA, 25 bp, Artificial
  probe
  misc_feature (1)..(25): SEQ ID NO: 2387; WAN024DA7; Start 199; Stop 223
gatcaggtcaatcatatcgaacttg

SEQ ID NO: 324021 - DNA, 25 bp, Artificial
  probe
  misc_feature (1)..(25): SEQ ID NO: 2387; WAN024DA7; Start 410; Stop 434
aaacattagaaacctacggctatca

SEQ ID NO: 324022 - DNA, 25 bp, Artificial
  probe
  misc_feature (1)..(25): SEQ ID NO: 2387; WAN024DA7; Start 411; Stop 435
aacattagaaacctacggctatcag

SEQ ID NO: 324023 - DNA, 25 bp, Artificial
  probe
  misc_feature (1)..(25): SEQ ID NO: 2387; WAN024DA7; Start 43; Stop 67
tataagtcggcagatttagtcagtt

SEQ ID NO: 324024 - DNA, 25 bp, Artificial
  probe
  misc_feature (1)..(25): SEQ ID NO: 2387; WAN024DA7; Start 200; Stop 224
atcaggtcaatcatatcgaacttgg

SEQ ID NO: 324025 - DNA, 25 bp, Artificial
  probe
  misc_feature (1)..(25): SEQ ID NO: 2387; WAN024DA7; Start 44; Stop 68
ataagtcggcagatttagtcagttc

SEQ ID NO: 324026 - DNA, 25 bp, Artificial
  probe
  misc_feature (1)..(25): SEQ ID NO: 2387; WAN024DA7; Start 202; Stop 226
caggtcaatcatatcgaacttggaa

SEQ ID NO: 324027 - DNA, 25 bp, Artificial
  probe
  misc_feature (1)..(25): SEQ ID NO: 2387; WAN024DA7; Start 137; Stop 161
tgacactacaggtactctcacagaa

SEQ ID NO: 324028 - DNA, 25 bp, Artificial
  probe
  misc_feature (1)..(25): SEQ ID NO: 2387; WAN024DA7; Start 136; Stop 160
ttgacactacaggtactctcacaga

SEQ ID NO: 324029 - DNA, 25 bp, Artificial
  probe
  misc_feature (1)..(25): SEQ ID NO: 2387; WAN024DA7; Start 123; Stop 147
gtttatccaacctttgacactacag

SEQ ID NO: 324030 - DNA, 25 bp, Artificial
  probe
  misc_feature (1)..(25): SEQ ID NO: 2387; WAN024DA7; Start 117; Stop 141
tacagagtttatccaacctttgaca

SEQ ID NO: 324031 - DNA, 25 bp, Artificial
  probe
  misc_feature (1)..(25): SEQ ID NO: 2387; WAN024DA7; Start 201; Stop 225
tcaggtcaatcatatcgaacttgga

SEQ ID NO: 324032 - DNA, 25 bp, Artificial
  probe
  misc_feature (1)..(25): SEQ ID NO: 2387; WAN024DA7; Start 116; Stop 140
ctacagagtttatccaacctttgac

SEQ ID NO: 324033 - DNA, 25 bp, Artificial
  probe
  misc_feature (1)..(25): SEQ ID NO: 2387; WAN024DA7; Start 122; Stop 146
agtttatccaacctttgacactaca

SEQ ID NO: 324034 - DNA, 25 bp, Artificial
  probe
  misc_feature (1)..(25): SEQ ID NO: 2387; WAN024DA7; Start 115; Stop 139
gctacagagtttatccaacctttga

SEQ ID NO: 324035 - DNA, 25 bp, Artificial
  probe
  misc_feature (1)..(25): SEQ ID NO: 2387; WAN024DA7; Start 374; Stop 398
aaatgtatgaccatccagtaactca

SEQ ID NO: 324036 - DNA, 25 bp, Artificial
  probe
  misc_feature (1)..(25): SEQ ID NO: 2387; WAN024DA7; Start 327; Stop 351
cctaccaagtcatattcccaaacta

SEQ ID NO: 324037 - DNA, 25 bp, Artificial
  probe
  misc_feature (1)..(25): SEQ ID NO: 2387; WAN024DA7; Start 141; Stop 165
actacaggtactctcacagaatcct

SEQ ID NO: 324038 - DNA, 25 bp, Artificial
  probe
  misc_feature (1)..(25): SEQ ID NO: 2387; WAN024DA7; Start 121; Stop 145
gagtttatccaacctttgacactac

SEQ ID NO: 324039 - DNA, 25 bp, Artificial
  probe
  misc_feature (1)..(25): SEQ ID NO: 2387; WAN024DA7; Start 120; Stop 144
agagtttatccaacctttgacacta

SEQ ID NO: 324040 - DNA, 25 bp, Artificial
  probe
  misc_feature (1)..(25): SEQ ID NO: 2387; WAN024DA7; Start 114; Stop 138
tgctacagagtttatccaacctttg

SEQ ID NO: 324041 - DNA, 25 bp, Artificial
  probe
  misc_feature (1)..(25): SEQ ID NO: 2388; WAN024C9R; Start 78; Stop 102
cgaaccaaatgaatcagttgtgttt

SEQ ID NO: 324042 - DNA, 25 bp, Artificial
  probe
  misc_feature (1)..(25): SEQ ID NO: 2388; WAN024C9R; Start 605; Stop 629
tcgaggaggttcttgcataactaat

SEQ ID NO: 324043 - DNA, 25 bp, Artificial
  probe
  misc_feature (1)..(25): SEQ ID NO: 2388; WAN024C9R; Start 604; Stop 628
atcgaggaggttcttgcataactaa

SEQ ID NO: 324044 - DNA, 25 bp, Artificial
  probe
  misc_feature (1)..(25): SEQ ID NO: 2388; WAN024C9R; Start 603; Stop 627
aatcgaggaggttcttgcataacta

SEQ ID NO: 324045 - DNA, 25 bp, Artificial
  probe
  misc_feature (1)..(25): SEQ ID NO: 2388; WAN024C9R; Start 286; Stop 310
tcatacggctacaaacttccacaaa

SEQ ID NO: 324046 - DNA, 25 bp, Artificial
  probe
  misc_feature (1)..(25): SEQ ID NO: 2388; WAN024C9R; Start 285; Stop 309
ttcatacggctacaaacttccacaa

SEQ ID NO: 324047 - DNA, 25 bp, Artificial
  probe
  misc_feature (1)..(25): SEQ ID NO: 2388; WAN024C9R; Start 75; Stop 99
tatcgaaccaaatgaatcagttgtg

SEQ ID NO: 324048 - DNA, 25 bp, Artificial
  probe
  misc_feature (1)..(25): SEQ ID NO: 2388; WAN024C9R; Start 74; Stop 98
gtatcgaaccaaatgaatcagttgt

SEQ ID NO: 324049 - DNA, 25 bp, Artificial
  probe
  misc_feature (1)..(25): SEQ ID NO: 2388; WAN024C9R; Start 444; Stop 468
cgattctaaagttcttgttatcctt

SEQ ID NO: 324050 - DNA, 25 bp, Artificial
  probe
  misc_feature (1)..(25): SEQ ID NO: 2388; WAN024C9R; Start 543; Stop 567
aagtgttcttgacatcgcaaatagc

SEQ ID NO: 324051 - DNA, 25 bp, Artificial
  probe
  misc_feature (1)..(25): SEQ ID NO: 2388; WAN024C9R; Start 7; Stop 31
aacgtaacattatttgaccaaactg

SEQ ID NO: 324052 - DNA, 25 bp, Artificial
  probe
  misc_feature (1)..(25): SEQ ID NO: 2388; WAN024C9R; Start 76; Stop 100
atcgaaccaaatgaatcagttgtgt

SEQ ID NO: 324053 - DNA, 25 bp, Artificial
  probe
  misc_feature (1)..(25): SEQ ID NO: 2388; WAN024C9R; Start 77; Stop 101
tcgaaccaaatgaatcagttgtgtt

SEQ ID NO: 324054 - DNA, 25 bp, Artificial
  probe
  misc_feature (1)..(25): SEQ ID NO: 2388; WAN024C9R; Start 448; Stop 472
tctaaagttcttgttatccttgaag

SEQ ID NO: 324055 - DNA, 25 bp, Artificial
  probe
  misc_feature (1)..(25): SEQ ID NO: 2388; WAN024C9R; Start 81; Stop 105
accaaatgaatcagttgtgtttgat

SEQ ID NO: 324056 - DNA, 25 bp, Artificial
  probe
  misc_feature (1)..(25): SEQ ID NO: 2388; WAN024C9R; Start 80; Stop 104
aaccaaatgaatcagttgtgtttga

SEQ ID NO: 324057 - DNA, 25 bp, Artificial
  probe
  misc_feature (1)..(25): SEQ ID NO: 2388; WAN024C9R; Start 79; Stop 103
gaaccaaatgaatcagttgtgtttg

SEQ ID NO: 324058 - DNA, 25 bp, Artificial
  probe
  misc_feature (1)..(25): SEQ ID NO: 2388; WAN024C9R; Start 443; Stop 467
tcgattctaaagttcttgttatcct

SEQ ID NO: 324059 - DNA, 25 bp, Artificial
  probe
  misc_feature (1)..(25): SEQ ID NO: 2388; WAN024C9R; Start 82; Stop 106
ccaaatgaatcagttgtgtttgatg

SEQ ID NO: 324060 - DNA, 25 bp, Artificial
  probe
  misc_feature (1)..(25): SEQ ID NO: 2388; WAN024C9R; Start 284; Stop 308
gttcatacggctacaaacttccaca

SEQ ID NO: 324061 - DNA, 25 bp, Artificial
  probe
  misc_feature (1)..(25): SEQ ID NO: 2388; WAN024C9R; Start 73; Stop 97
ggtatcgaaccaaatgaatcagttg

SEQ ID NO: 324062 - DNA, 25 bp, Artificial
  probe
  misc_feature (1)..(25): SEQ ID NO: 2388; WAN024C9R; Start 6; Stop 30
aaacgtaacattatttgaccaaact

SEQ ID NO: 324063 - DNA, 25 bp, Artificial
  probe
  misc_feature (1)..(25): SEQ ID NO: 2388; WAN024C9R; Start 579; Stop 603
tgtcacacaagcagctatctctaaa

SEQ ID NO: 324064 - DNA, 25 bp, Artificial
  probe
  misc_feature (1)..(25): SEQ ID NO: 2388; WAN024C9R; Start 83; Stop 107
caaatgaatcagttgtgtttgatgt

SEQ ID NO: 324065 - DNA, 25 bp, Artificial
  probe
  misc_feature (1)..(25): SEQ ID NO: 2388; WAN024C9R; Start 8; Stop 32
acgtaacattatttgaccaaactgg

SEQ ID NO: 324066 - DNA, 25 bp, Artificial
  probe
  misc_feature (1)..(25): SEQ ID NO: 2388; WAN024C9R; Start 466; Stop 490
cttgaagaaggaaatgaattcgcag

SEQ ID NO: 324067 - DNA, 25 bp, Artificial
  probe
  misc_feature (1)..(25): SEQ ID NO: 2388; WAN024C9R; Start 602; Stop 626
aaatcgaggaggttcttgcataact

SEQ ID NO: 324068 - DNA, 25 bp, Artificial
  probe
  misc_feature (1)..(25): SEQ ID NO: 2388; WAN024C9R; Start 349; Stop 373
aaagttgctgaaaacaaattcgtag

SEQ ID NO: 324069 - DNA, 25 bp, Artificial
  probe
  misc_feature (1)..(25): SEQ ID NO: 2388; WAN024C9R; Start 578; Stop 602
ttgtcacacaagcagctatctctaa

SEQ ID NO: 324070 - DNA, 25 bp, Artificial
  probe
  misc_feature (1)..(25): SEQ ID NO: 2388; WAN024C9R; Start 348; Stop 372
aaaagttgctgaaaacaaattcgta

SEQ ID NO: 324071 - DNA, 25 bp, Artificial
  probe
  misc_feature (1)..(25): SEQ ID NO: 2388; WAN024C9R; Start 491; Stop 515
ctctttcagctcgtaaccttccaaa

SEQ ID NO: 324072 - DNA, 25 bp, Artificial
  probe
  misc_feature (1)..(25): SEQ ID NO: 2388; WAN024C9R; Start 371; Stop 395
tagctgtagacgctctttcatttac

SEQ ID NO: 324073 - DNA, 25 bp, Artificial
  probe
  misc_feature (1)..(25): SEQ ID NO: 2388; WAN024C9R; Start 370; Stop 394
gtagctgtagacgctctttcattta

SEQ ID NO: 324074 - DNA, 25 bp, Artificial
  probe
  misc_feature (1)..(25): SEQ ID NO: 2389; WAN024CUD; Start 970; Stop 994
ttaacgagagatataggaggtcagg

SEQ ID NO: 324075 - DNA, 25 bp, Artificial
  probe
  misc_feature (1)..(25): SEQ ID NO: 2389; WAN024CUD; Start 730; Stop 754
gatgaatcaagcgtcttatctggta

SEQ ID NO: 324076 - DNA, 25 bp, Artificial
  probe
  misc_feature (1)..(25): SEQ ID NO: 2389; WAN024CUD; Start 979; Stop 1003
gatataggaggtcaggcttcaacaa

SEQ ID NO: 324077 - DNA, 25 bp, Artificial
  probe
  misc_feature (1)..(25): SEQ ID NO: 2389; WAN024CUD; Start 471; Stop 495
ctatgaggaagtggagcggattatt

SEQ ID NO: 324078 - DNA, 25 bp, Artificial
  probe
  misc_feature (1)..(25): SEQ ID NO: 2389; WAN024CUD; Start 731; Stop 755
atgaatcaagcgtcttatctggtac

SEQ ID NO: 324079 - DNA, 25 bp, Artificial
  probe
  misc_feature (1)..(25): SEQ ID NO: 2389; WAN024CUD; Start 218; Stop 242
ctatcggtagtcctcagtatgatgg

SEQ ID NO: 324080 - DNA, 25 bp, Artificial
  probe
  misc_feature (1)..(25): SEQ ID NO: 2389; WAN024CUD; Start 726; Stop 750
atctgatgaatcaagcgtcttatct

SEQ ID NO: 324081 - DNA, 25 bp, Artificial
  probe
  misc_feature (1)..(25): SEQ ID NO: 2389; WAN024CUD; Start 977; Stop 1001
gagatataggaggtcaggcttcaac

SEQ ID NO: 324082 - DNA, 25 bp, Artificial
  probe
  misc_feature (1)..(25): SEQ ID NO: 2389; WAN024CUD; Start 976; Stop 1000
agagatataggaggtcaggcttcaa

SEQ ID NO: 324083 - DNA, 25 bp, Artificial
  probe
  misc_feature (1)..(25): SEQ ID NO: 2389; WAN024CUD; Start 793; Stop 817
ggaccaagtctctatgaacctattc

SEQ ID NO: 324084 - DNA, 25 bp, Artificial
  probe
  misc_feature (1)..(25): SEQ ID NO: 2389; WAN024CUD; Start 101; Stop 125
ttgactatgagattgacagacgacc

SEQ ID NO: 324085 - DNA, 25 bp, Artificial
  probe
  misc_feature (1)..(25): SEQ ID NO: 2389; WAN024CUD; Start 472; Stop 496
tatgaggaagtggagcggattattc

SEQ ID NO: 324086 - DNA, 25 bp, Artificial
  probe
  misc_feature (1)..(25): SEQ ID NO: 2389; WAN024CUD; Start 727; Stop 751
tctgatgaatcaagcgtcttatctg

SEQ ID NO: 324087 - DNA, 25 bp, Artificial
  probe
  misc_feature (1)..(25): SEQ ID NO: 2389; WAN024CUD; Start 791; Stop 815
atggaccaagtctctatgaacctat

SEQ ID NO: 324088 - DNA, 25 bp, Artificial
  probe
  misc_feature (1)..(25): SEQ ID NO: 2389; WAN024CUD; Start 792; Stop 816
tggaccaagtctctatgaacctatt

SEQ ID NO: 324089 - DNA, 25 bp, Artificial
  probe
  misc_feature (1)..(25): SEQ ID NO: 2389; WAN024CUD; Start 790; Stop 814
aatggaccaagtctctatgaaccta

SEQ ID NO: 324090 - DNA, 25 bp, Artificial
  probe
  misc_feature (1)..(25): SEQ ID NO: 2389; WAN024CUD; Start 733; Stop 757
gaatcaagcgtcttatctggtacac

SEQ ID NO: 324091 - DNA, 25 bp, Artificial
  probe
  misc_feature (1)..(25): SEQ ID NO: 2389; WAN024CUD; Start 217; Stop 241
gctatcggtagtcctcagtatgatg

SEQ ID NO: 324092 - DNA, 25 bp, Artificial
  probe
  misc_feature (1)..(25): SEQ ID NO: 2389; WAN024CUD; Start 975; Stop 999
gagagatataggaggtcaggcttca

SEQ ID NO: 324093 - DNA, 25 bp, Artificial
  probe
  misc_feature (1)..(25): SEQ ID NO: 2389; WAN024CUD; Start 725; Stop 749
tatctgatgaatcaagcgtcttatc

SEQ ID NO: 324094 - DNA, 25 bp, Artificial
  probe
  misc_feature (1)..(25): SEQ ID NO: 2389; WAN024CUD; Start 978; Stop 1002
agatataggaggtcaggcttcaaca

SEQ ID NO: 324095 - DNA, 25 bp, Artificial
  probe
  misc_feature (1)..(25): SEQ ID NO: 2389; WAN024CUD; Start 971; Stop 995
taacgagagatataggaggtcaggc

SEQ ID NO: 324096 - DNA, 25 bp, Artificial
  probe
  misc_feature (1)..(25): SEQ ID NO: 2389; WAN024CUD; Start 735; Stop 759
atcaagcgtcttatctggtacactt

SEQ ID NO: 324097 - DNA, 25 bp, Artificial
  probe
  misc_feature (1)..(25): SEQ ID NO: 2389; WAN024CUD; Start 734; Stop 758
aatcaagcgtcttatctggtacact

SEQ ID NO: 324098 - DNA, 25 bp, Artificial
  probe
  misc_feature (1)..(25): SEQ ID NO: 2389; WAN024CUD; Start 732; Stop 756
tgaatcaagcgtcttatctggtaca

SEQ ID NO: 324099 - DNA, 25 bp, Artificial
  probe
  misc_feature (1)..(25): SEQ ID NO: 2389; WAN024CUD; Start 728; Stop 752
ctgatgaatcaagcgtcttatctgg

SEQ ID NO: 324100 - DNA, 25 bp, Artificial
  probe
  misc_feature (1)..(25): SEQ ID NO: 2389; WAN024CUD; Start 659; Stop 683
tgcttatgattaccaatcctgctaa

SEQ ID NO: 324101 - DNA, 25 bp, Artificial
  probe
  misc_feature (1)..(25): SEQ ID NO: 2389; WAN024CUD; Start 658; Stop 682
atgcttatgattaccaatcctgcta

SEQ ID NO: 324102 - DNA, 25 bp, Artificial
  probe
  misc_feature (1)..(25): SEQ ID NO: 2389; WAN024CUD; Start 657; Stop 681
tatgcttatgattaccaatcctgct

SEQ ID NO: 324103 - DNA, 25 bp, Artificial
  probe
  misc_feature (1)..(25): SEQ ID NO: 2389; WAN024CUD; Start 654; Stop 678
tgctatgcttatgattaccaatcct

SEQ ID NO: 324104 - DNA, 25 bp, Artificial
  probe
  misc_feature (1)..(25): SEQ ID NO: 2389; WAN024CUD; Start 652; Stop 676
gctgctatgcttatgattaccaatc

SEQ ID NO: 324105 - DNA, 25 bp, Artificial
  probe
  misc_feature (1)..(25): SEQ ID NO: 2389; WAN024CUD; Start 660; Stop 684
gcttatgattaccaatcctgctaag

SEQ ID NO: 324106 - DNA, 25 bp, Artificial
  probe
  misc_feature (1)..(25): SEQ ID NO: 2389; WAN024CUD; Start 656; Stop 680
ctatgcttatgattaccaatcctgc

SEQ ID NO: 324107 - DNA, 25 bp, Artificial
  probe
  misc_feature (1)..(25): SEQ ID NO: 2390; WAN024FXY; Start 9; Stop 33
gaggaatggaatgattcgtaggaag

SEQ ID NO: 324108 - DNA, 25 bp, Artificial
  probe
  misc_feature (1)..(25): SEQ ID NO: 2390; WAN024FXY; Start 8; Stop 32
agaggaatggaatgattcgtaggaa

SEQ ID NO: 324109 - DNA, 25 bp, Artificial
  probe
  misc_feature (1)..(25): SEQ ID NO: 2390; WAN024FXY; Start 7; Stop 31
aagaggaatggaatgattcgtagga

SEQ ID NO: 324110 - DNA, 25 bp, Artificial
  probe
  misc_feature (1)..(25): SEQ ID NO: 2390; WAN024FXY; Start 62; Stop 86
caattaggaaagtaacaacggctac

SEQ ID NO: 324111 - DNA, 25 bp, Artificial
  probe
  misc_feature (1)..(25): SEQ ID NO: 2390; WAN024FXY; Start 53; Stop 77
taaaggcagcaattaggaaagtaac

SEQ ID NO: 324112 - DNA, 25 bp, Artificial
  probe
  misc_feature (1)..(25): SEQ ID NO: 2390; WAN024FXY; Start 50; Stop 74
tgataaaggcagcaattaggaaagt

SEQ ID NO: 324113 - DNA, 25 bp, Artificial
  probe
  misc_feature (1)..(25): SEQ ID NO: 2390; WAN024FXY; Start 51; Stop 75
gataaaggcagcaattaggaaagta

SEQ ID NO: 324114 - DNA, 25 bp, Artificial
  probe
  misc_feature (1)..(25): SEQ ID NO: 2390; WAN024FXY; Start 63; Stop 87
aattaggaaagtaacaacggctacc

SEQ ID NO: 324115 - DNA, 25 bp, Artificial
  probe
  misc_feature (1)..(25): SEQ ID NO: 2390; WAN024FXY; Start 55; Stop 79
aaggcagcaattaggaaagtaacaa

SEQ ID NO: 324116 - DNA, 25 bp, Artificial
  probe
  misc_feature (1)..(25): SEQ ID NO: 2390; WAN024FXY; Start 54; Stop 78
aaaggcagcaattaggaaagtaaca

SEQ ID NO: 324117 - DNA, 25 bp, Artificial
  probe
  misc_feature (1)..(25): SEQ ID NO: 2390; WAN024FXY; Start 182; Stop 206
taatgattggtggcaagagtttatc

SEQ ID NO: 324118 - DNA, 25 bp, Artificial
  probe
  misc_feature (1)..(25): SEQ ID NO: 2390; WAN024FXY; Start 180; Stop 204
gataatgattggtggcaagagttta

SEQ ID NO: 324119 - DNA, 25 bp, Artificial
  probe
  misc_feature (1)..(25): SEQ ID NO: 2390; WAN024FXY; Start 49; Stop 73
ttgataaaggcagcaattaggaaag

SEQ ID NO: 324120 - DNA, 25 bp, Artificial
  probe
  misc_feature (1)..(25): SEQ ID NO: 2390; WAN024FXY; Start 52; Stop 76
ataaaggcagcaattaggaaagtaa

SEQ ID NO: 324121 - DNA, 25 bp, Artificial
  probe
  misc_feature (1)..(25): SEQ ID NO: 2390; WAN024FXY; Start 13; Stop 37
aatggaatgattcgtaggaagcctt

SEQ ID NO: 324122 - DNA, 25 bp, Artificial
  probe
  misc_feature (1)..(25): SEQ ID NO: 2390; WAN024FXY; Start 61; Stop 85
gcaattaggaaagtaacaacggcta

SEQ ID NO: 324123 - DNA, 25 bp, Artificial
  probe
  misc_feature (1)..(25): SEQ ID NO: 2390; WAN024FXY; Start 181; Stop 205
ataatgattggtggcaagagtttat

SEQ ID NO: 324124 - DNA, 25 bp, Artificial
  probe
  misc_feature (1)..(25): SEQ ID NO: 2390; WAN024FXY; Start 56; Stop 80
aggcagcaattaggaaagtaacaac

SEQ ID NO: 324125 - DNA, 25 bp, Artificial
  probe
  misc_feature (1)..(25): SEQ ID NO: 2390; WAN024FXY; Start 146; Stop 170
caagtccaagaccgataacgatgat

SEQ ID NO: 324126 - DNA, 25 bp, Artificial
  probe
  misc_feature (1)..(25): SEQ ID NO: 2390; WAN024FXY; Start 147; Stop 171
aagtccaagaccgataacgatgatc

SEQ ID NO: 324127 - DNA, 25 bp, Artificial
  probe
  misc_feature (1)..(25): SEQ ID NO: 2390; WAN024FXY; Start 64; Stop 88
attaggaaagtaacaacggctacca

SEQ ID NO: 324128 - DNA, 25 bp, Artificial
  probe
  misc_feature (1)..(25): SEQ ID NO: 2390; WAN024FXY; Start 178; Stop 202
ccgataatgattggtggcaagagtt

SEQ ID NO: 324129 - DNA, 25 bp, Artificial
  probe
  misc_feature (1)..(25): SEQ ID NO: 2390; WAN024FXY; Start 179; Stop 203
cgataatgattggtggcaagagttt

SEQ ID NO: 324130 - DNA, 25 bp, Artificial
  probe
  misc_feature (1)..(25): SEQ ID NO: 2390; WAN024FXY; Start 12; Stop 36
gaatggaatgattcgtaggaagcct

SEQ ID NO: 324131 - DNA, 25 bp, Artificial
  probe
  misc_feature (1)..(25): SEQ ID NO: 2390; WAN024FXY; Start 10; Stop 34
aggaatggaatgattcgtaggaagc

SEQ ID NO: 324132 - DNA, 25 bp, Artificial
  probe
  misc_feature (1)..(25): SEQ ID NO: 2390; WAN024FXY; Start 65; Stop 89
ttaggaaagtaacaacggctaccag

SEQ ID NO: 324133 - DNA, 25 bp, Artificial
  probe
  misc_feature (1)..(25): SEQ ID NO: 2390; WAN024FXY; Start 191; Stop 215
gtggcaagagtttatcaatccattt

SEQ ID NO: 324134 - DNA, 25 bp, Artificial
  probe
  misc_feature (1)..(25): SEQ ID NO: 2390; WAN024FXY; Start 5; Stop 29
caaagaggaatggaatgattcgtag

SEQ ID NO: 324135 - DNA, 25 bp, Artificial
  probe
  misc_feature (1)..(25): SEQ ID NO: 2390; WAN024FXY; Start 170; Stop 194
tcataggaccgataatgattggtgg

SEQ ID NO: 324136 - DNA, 25 bp, Artificial
  probe
  misc_feature (1)..(25): SEQ ID NO: 2390; WAN024FXY; Start 6; Stop 30
aaagaggaatggaatgattcgtagg

SEQ ID NO: 324137 - DNA, 25 bp, Artificial
  probe
  misc_feature (1)..(25): SEQ ID NO: 2390; WAN024FXY; Start 96; Stop 120
tttccaatttccgtctgctacaaga

SEQ ID NO: 324138 - DNA, 25 bp, Artificial
  probe
  misc_feature (1)..(25): SEQ ID NO: 2390; WAN024FXY; Start 4; Stop 28
gcaaagaggaatggaatgattcgta

SEQ ID NO: 324139 - DNA, 25 bp, Artificial
  probe
  misc_feature (1)..(25): SEQ ID NO: 2390; WAN024FXY; Start 190; Stop 214
ggtggcaagagtttatcaatccatt

SEQ ID NO: 324140 - DNA, 25 bp, Artificial
  probe
  misc_feature (1)..(25): SEQ ID NO: 2391; WAN024FBD; Start 429; Stop 453
tcgtgtggagattgatgatagttac

SEQ ID NO: 324141 - DNA, 25 bp, Artificial
  probe
  misc_feature (1)..(25): SEQ ID NO: 2391; WAN024FBD; Start 430; Stop 454
cgtgtggagattgatgatagttact

SEQ ID NO: 324142 - DNA, 25 bp, Artificial
  probe
  misc_feature (1)..(25): SEQ ID NO: 2391; WAN024FBD; Start 428; Stop 452
ctcgtgtggagattgatgatagtta

SEQ ID NO: 324143 - DNA, 25 bp, Artificial
  probe
  misc_feature (1)..(25): SEQ ID NO: 2391; WAN024FBD; Start 431; Stop 455
gtgtggagattgatgatagttactt

SEQ ID NO: 324144 - DNA, 25 bp, Artificial
  probe
  misc_feature (1)..(25): SEQ ID NO: 2391; WAN024FBD; Start 432; Stop 456
tgtggagattgatgatagttacttc

SEQ ID NO: 324145 - DNA, 25 bp, Artificial
  probe
  misc_feature (1)..(25): SEQ ID NO: 2391; WAN024FBD; Start 424; Stop 448
tatgctcgtgtggagattgatgata

SEQ ID NO: 324146 - DNA, 25 bp, Artificial
  probe
  misc_feature (1)..(25): SEQ ID NO: 2391; WAN024FBD; Start 433; Stop 457
gtggagattgatgatagttacttca

SEQ ID NO: 324147 - DNA, 25 bp, Artificial
  probe
  misc_feature (1)..(25): SEQ ID NO: 2391; WAN024FBD; Start 425; Stop 449
atgctcgtgtggagattgatgatag

SEQ ID NO: 324148 - DNA, 25 bp, Artificial
  probe
  misc_feature (1)..(25): SEQ ID NO: 2391; WAN024FBD; Start 423; Stop 447
ctatgctcgtgtggagattgatgat

SEQ ID NO: 324149 - DNA, 25 bp, Artificial
  probe
  misc_feature (1)..(25): SEQ ID NO: 2391; WAN024FBD; Start 42; Stop 66
cgatagcttgattgtggaagaagtc

SEQ ID NO: 324150 - DNA, 25 bp, Artificial
  probe
  misc_feature (1)..(25): SEQ ID NO: 2391; WAN024FBD; Start 427; Stop 451
gctcgtgtggagattgatgatagtt

SEQ ID NO: 324151 - DNA, 25 bp, Artificial
  probe
  misc_feature (1)..(25): SEQ ID NO: 2391; WAN024FBD; Start 421; Stop 445
ctctatgctcgtgtggagattgatg

SEQ ID NO: 324152 - DNA, 25 bp, Artificial
  probe
  misc_feature (1)..(25): SEQ ID NO: 2391; WAN024FBD; Start 43; Stop 67
gatagcttgattgtggaagaagtcc

SEQ ID NO: 324153 - DNA, 25 bp, Artificial
  probe
  misc_feature (1)..(25): SEQ ID NO: 2391; WAN024FBD; Start 368; Stop 392
tctttctaaatccaggttctatcag

SEQ ID NO: 324154 - DNA, 25 bp, Artificial
  probe
  misc_feature (1)..(25): SEQ ID NO: 2391; WAN024FBD; Start 367; Stop 391
ctctttctaaatccaggttctatca

SEQ ID NO: 324155 - DNA, 25 bp, Artificial
  probe
  misc_feature (1)..(25): SEQ ID NO: 2391; WAN024FBD; Start 422; Stop 446
tctatgctcgtgtggagattgatga

SEQ ID NO: 324156 - DNA, 25 bp, Artificial
  probe
  misc_feature (1)..(25): SEQ ID NO: 2391; WAN024FBD; Start 441; Stop 465
tgatgatagttacttcaaagtggac

SEQ ID NO: 324157 - DNA, 25 bp, Artificial
  probe
  misc_feature (1)..(25): SEQ ID NO: 2391; WAN024FBD; Start 219; Stop 243
ttcgaccaagattatccaaactcat

SEQ ID NO: 324158 - DNA, 25 bp, Artificial
  probe
  misc_feature (1)..(25): SEQ ID NO: 2391; WAN024FBD; Start 160; Stop 184
gttaaagggaacatggacttctacg

SEQ ID NO: 324159 - DNA, 25 bp, Artificial
  probe
  misc_feature (1)..(25): SEQ ID NO: 2391; WAN024FBD; Start 363; Stop 387
gatcctctttctaaatccaggttct

SEQ ID NO: 324160 - DNA, 25 bp, Artificial
  probe
  misc_feature (1)..(25): SEQ ID NO: 2391; WAN024FBD; Start 362; Stop 386
agatcctctttctaaatccaggttc

SEQ ID NO: 324161 - DNA, 25 bp, Artificial
  probe
  misc_feature (1)..(25): SEQ ID NO: 2391; WAN024FBD; Start 3; Stop 27
ggcaaagcaaaccatcattgtaatg

SEQ ID NO: 324162 - DNA, 25 bp, Artificial
  probe
  misc_feature (1)..(25): SEQ ID NO: 2391; WAN024FBD; Start 365; Stop 389
tcctctttctaaatccaggttctat

SEQ ID NO: 324163 - DNA, 25 bp, Artificial
  probe
  misc_feature (1)..(25): SEQ ID NO: 2391; WAN024FBD; Start 364; Stop 388
atcctctttctaaatccaggttcta

SEQ ID NO: 324164 - DNA, 25 bp, Artificial
  probe
  misc_feature (1)..(25): SEQ ID NO: 2391; WAN024FBD; Start 220; Stop 244
tcgaccaagattatccaaactcatg

SEQ ID NO: 324165 - DNA, 25 bp, Artificial
  probe
  misc_feature (1)..(25): SEQ ID NO: 2391; WAN024FBD; Start 48; Stop 72
cttgattgtggaagaagtccgtgat

SEQ ID NO: 324166 - DNA, 25 bp, Artificial
  probe
  misc_feature (1)..(25): SEQ ID NO: 2391; WAN024FBD; Start 442; Stop 466
gatgatagttacttcaaagtggact

SEQ ID NO: 324167 - DNA, 25 bp, Artificial
  probe
  misc_feature (1)..(25): SEQ ID NO: 2391; WAN024FBD; Start 490; Stop 514
tatccaggtttgtccaaggagttta

SEQ ID NO: 324168 - DNA, 25 bp, Artificial
  probe
  misc_feature (1)..(25): SEQ ID NO: 2391; WAN024FBD; Start 366; Stop 390
cctctttctaaatccaggttctatc

SEQ ID NO: 324169 - DNA, 25 bp, Artificial
  probe
  misc_feature (1)..(25): SEQ ID NO: 2391; WAN024FBD; Start 426; Stop 450
tgctcgtgtggagattgatgatagt

SEQ ID NO: 324170 - DNA, 25 bp, Artificial
  probe
  misc_feature (1)..(25): SEQ ID NO: 2391; WAN024FBD; Start 49; Stop 73
ttgattgtggaagaagtccgtgatc

SEQ ID NO: 324171 - DNA, 25 bp, Artificial
  probe
  misc_feature (1)..(25): SEQ ID NO: 2391; WAN024FBD; Start 218; Stop 242
gttcgaccaagattatccaaactca

SEQ ID NO: 324172 - DNA, 25 bp, Artificial
  probe
  misc_feature (1)..(25): SEQ ID NO: 2391; WAN024FBD; Start 443; Stop 467
atgatagttacttcaaagtggactt

SEQ ID NO: 324173 - DNA, 25 bp, Artificial
  probe
  misc_feature (1)..(25): SEQ ID NO: 2392; WAN024G8D; Start 125; Stop 149
ctcgaattaatctcaaggatggctt

SEQ ID NO: 324174 - DNA, 25 bp, Artificial
  probe
  misc_feature (1)..(25): SEQ ID NO: 2392; WAN024G8D; Start 122; Stop 146
ctgctcgaattaatctcaaggatgg

SEQ ID NO: 324175 - DNA, 25 bp, Artificial
  probe
  misc_feature (1)..(25): SEQ ID NO: 2392; WAN024G8D; Start 93; Stop 117
gactggaactgaaatcaagagtgta

SEQ ID NO: 324176 - DNA, 25 bp, Artificial
  probe
  misc_feature (1)..(25): SEQ ID NO: 2392; WAN024G8D; Start 121; Stop 145
gctgctcgaattaatctcaaggatg

SEQ ID NO: 324177 - DNA, 25 bp, Artificial
  probe
  misc_feature (1)..(25): SEQ ID NO: 2392; WAN024G8D; Start 120; Stop 144
agctgctcgaattaatctcaaggat

SEQ ID NO: 324178 - DNA, 25 bp, Artificial
  probe
  misc_feature (1)..(25): SEQ ID NO: 2392; WAN024G8D; Start 387; Stop 411
ctatgacaaacgggagtctatcaaa

SEQ ID NO: 324179 - DNA, 25 bp, Artificial
  probe
  misc_feature (1)..(25): SEQ ID NO: 2392; WAN024G8D; Start 91; Stop 115
ctgactggaactgaaatcaagagtg

SEQ ID NO: 324180 - DNA, 25 bp, Artificial
  probe
  misc_feature (1)..(25): SEQ ID NO: 2392; WAN024G8D; Start 388; Stop 412
tatgacaaacgggagtctatcaaac

SEQ ID NO: 324181 - DNA, 25 bp, Artificial
  probe
  misc_feature (1)..(25): SEQ ID NO: 2392; WAN024G8D; Start 94; Stop 118
actggaactgaaatcaagagtgtac

SEQ ID NO: 324182 - DNA, 25 bp, Artificial
  probe
  misc_feature (1)..(25): SEQ ID NO: 2392; WAN024G8D; Start 386; Stop 410
actatgacaaacgggagtctatcaa

SEQ ID NO: 324183 - DNA, 25 bp, Artificial
  probe
  misc_feature (1)..(25): SEQ ID NO: 2392; WAN024G8D; Start 200; Stop 224
cttacgaagagggcaatatctggaa

SEQ ID NO: 324184 - DNA, 25 bp, Artificial
  probe
  misc_feature (1)..(25): SEQ ID NO: 2392; WAN024G8D; Start 97; Stop 121
ggaactgaaatcaagagtgtacgag

SEQ ID NO: 324185 - DNA, 25 bp, Artificial
  probe
  misc_feature (1)..(25): SEQ ID NO: 2392; WAN024G8D; Start 92; Stop 116
tgactggaactgaaatcaagagtgt

SEQ ID NO: 324186 - DNA, 25 bp, Artificial
  probe
  misc_feature (1)..(25): SEQ ID NO: 2392; WAN024G8D; Start 373; Stop 397
aaagggaagcatgactatgacaaac

SEQ ID NO: 324187 - DNA, 25 bp, Artificial
  probe
  misc_feature (1)..(25): SEQ ID NO: 2392; WAN024G8D; Start 372; Stop 396
caaagggaagcatgactatgacaaa

SEQ ID NO: 324188 - DNA, 25 bp, Artificial
  probe
  misc_feature (1)..(25): SEQ ID NO: 2392; WAN024G8D; Start 127; Stop 151
cgaattaatctcaaggatggctttg

SEQ ID NO: 324189 - DNA, 25 bp, Artificial
  probe
  misc_feature (1)..(25): SEQ ID NO: 2392; WAN024G8D; Start 128; Stop 152
gaattaatctcaaggatggctttgc

SEQ ID NO: 324190 - DNA, 25 bp, Artificial
  probe
  misc_feature (1)..(25): SEQ ID NO: 2392; WAN024G8D; Start 51; Stop 75
cgactatacaatcgtagatacgcta

SEQ ID NO: 324191 - DNA, 25 bp, Artificial
  probe
  misc_feature (1)..(25): SEQ ID NO: 2392; WAN024G8D; Start 95; Stop 119
ctggaactgaaatcaagagtgtacg

SEQ ID NO: 324192 - DNA, 25 bp, Artificial
  probe
  misc_feature (1)..(25): SEQ ID NO: 2392; WAN024G8D; Start 201; Stop 225
ttacgaagagggcaatatctggaac

SEQ ID NO: 324193 - DNA, 25 bp, Artificial
  probe
  misc_feature (1)..(25): SEQ ID NO: 2392; WAN024G8D; Start 129; Stop 153
aattaatctcaaggatggctttgct

SEQ ID NO: 324194 - DNA, 25 bp, Artificial
  probe
  misc_feature (1)..(25): SEQ ID NO: 2392; WAN024G8D; Start 124; Stop 148
gctcgaattaatctcaaggatggct

SEQ ID NO: 324195 - DNA, 25 bp, Artificial
  probe
  misc_feature (1)..(25): SEQ ID NO: 2392; WAN024G8D; Start 126; Stop 150
tcgaattaatctcaaggatggcttt

SEQ ID NO: 324196 - DNA, 25 bp, Artificial
  probe
  misc_feature (1)..(25): SEQ ID NO: 2392; WAN024G8D; Start 132; Stop 156
taatctcaaggatggctttgctcaa

SEQ ID NO: 324197 - DNA, 25 bp, Artificial
  probe
  misc_feature (1)..(25): SEQ ID NO: 2392; WAN024G8D; Start 131; Stop 155
ttaatctcaaggatggctttgctca

SEQ ID NO: 324198 - DNA, 25 bp, Artificial
  probe
  misc_feature (1)..(25): SEQ ID NO: 2392; WAN024G8D; Start 55; Stop 79
tatacaatcgtagatacgctagagg

SEQ ID NO: 324199 - DNA, 25 bp, Artificial
  probe
  misc_feature (1)..(25): SEQ ID NO: 2392; WAN024G8D; Start 98; Stop 122
gaactgaaatcaagagtgtacgagc

SEQ ID NO: 324200 - DNA, 25 bp, Artificial
  probe
  misc_feature (1)..(25): SEQ ID NO: 2392; WAN024G8D; Start 96; Stop 120
tggaactgaaatcaagagtgtacga

SEQ ID NO: 324201 - DNA, 25 bp, Artificial
  probe
  misc_feature (1)..(25): SEQ ID NO: 2392; WAN024G8D; Start 130; Stop 154
attaatctcaaggatggctttgctc

SEQ ID NO: 324202 - DNA, 25 bp, Artificial
  probe
  misc_feature (1)..(25): SEQ ID NO: 2392; WAN024G8D; Start 90; Stop 114
cctgactggaactgaaatcaagagt

SEQ ID NO: 324203 - DNA, 25 bp, Artificial
  probe
  misc_feature (1)..(25): SEQ ID NO: 2392; WAN024G8D; Start 123; Stop 147
tgctcgaattaatctcaaggatggc

SEQ ID NO: 324204 - DNA, 25 bp, Artificial
  probe
  misc_feature (1)..(25): SEQ ID NO: 2392; WAN024G8D; Start 119; Stop 143
gagctgctcgaattaatctcaagga

SEQ ID NO: 324205 - DNA, 25 bp, Artificial
  probe
  misc_feature (1)..(25): SEQ ID NO: 2392; WAN024G8D; Start 56; Stop 80
atacaatcgtagatacgctagaggc

SEQ ID NO: 324206 - DNA, 25 bp, Artificial
  probe
  misc_feature (1)..(25): SEQ ID NO: 2393; WAN024D3B; Start 232; Stop 256
gtggatgagaccttgttagagaata

SEQ ID NO: 324207 - DNA, 25 bp, Artificial
  probe
  misc_feature (1)..(25): SEQ ID NO: 2393; WAN024D3B; Start 230; Stop 254
tagtggatgagaccttgttagagaa

SEQ ID NO: 324208 - DNA, 25 bp, Artificial
  probe
  misc_feature (1)..(25): SEQ ID NO: 2393; WAN024D3B; Start 643; Stop 667
caagatactgtaacggtagaggatt

SEQ ID NO: 324209 - DNA, 25 bp, Artificial
  probe
  misc_feature (1)..(25): SEQ ID NO: 2393; WAN024D3B; Start 642; Stop 666
tcaagatactgtaacggtagaggat

SEQ ID NO: 324210 - DNA, 25 bp, Artificial
  probe
  misc_feature (1)..(25): SEQ ID NO: 2393; WAN024D3B; Start 641; Stop 665
ttcaagatactgtaacggtagagga

SEQ ID NO: 324211 - DNA, 25 bp, Artificial
  probe
  misc_feature (1)..(25): SEQ ID NO: 2393; WAN024D3B; Start 1247; Stop 1271
ggaatgttcgtaatctctctgtcaa

SEQ ID NO: 324212 - DNA, 25 bp, Artificial
  probe
  misc_feature (1)..(25): SEQ ID NO: 2393; WAN024D3B; Start 231; Stop 255
agtggatgagaccttgttagagaat

SEQ ID NO: 324213 - DNA, 25 bp, Artificial
  probe
  misc_feature (1)..(25): SEQ ID NO: 2393; WAN024D3B; Start 229; Stop 253
gtagtggatgagaccttgttagaga

SEQ ID NO: 324214 - DNA, 25 bp, Artificial
  probe
  misc_feature (1)..(25): SEQ ID NO: 2393; WAN024D3B; Start 759; Stop 783
gagtaagagtgatgaagtagaggct

SEQ ID NO: 324215 - DNA, 25 bp, Artificial
  probe
  misc_feature (1)..(25): SEQ ID NO: 2393; WAN024D3B; Start 757; Stop 781
acgagtaagagtgatgaagtagagg

SEQ ID NO: 324216 - DNA, 25 bp, Artificial
  probe
  misc_feature (1)..(25): SEQ ID NO: 2393; WAN024D3B; Start 396; Stop 420
taagtggcatcaagattatggtcag

SEQ ID NO: 324217 - DNA, 25 bp, Artificial
  probe
  misc_feature (1)..(25): SEQ ID NO: 2393; WAN024D3B; Start 395; Stop 419
ctaagtggcatcaagattatggtca

SEQ ID NO: 324218 - DNA, 25 bp, Artificial
  probe
  misc_feature (1)..(25): SEQ ID NO: 2393; WAN024D3B; Start 233; Stop 257
tggatgagaccttgttagagaataa

SEQ ID NO: 324219 - DNA, 25 bp, Artificial
  probe
  misc_feature (1)..(25): SEQ ID NO: 2393; WAN024D3B; Start 760; Stop 784
agtaagagtgatgaagtagaggctg

SEQ ID NO: 324220 - DNA, 25 bp, Artificial
  probe
  misc_feature (1)..(25): SEQ ID NO: 2393; WAN024D3B; Start 402; Stop 426
gcatcaagattatggtcaggtcaat

SEQ ID NO: 324221 - DNA, 25 bp, Artificial
  probe
  misc_feature (1)..(25): SEQ ID NO: 2393; WAN024D3B; Start 1043; Stop 1067
cagactatgttgagactaaggttac

SEQ ID NO: 324222 - DNA, 25 bp, Artificial
  probe
  misc_feature (1)..(25): SEQ ID NO: 2393; WAN024D3B; Start 281; Stop 305
gtgctccgatgacttatagtattga

SEQ ID NO: 324223 - DNA, 25 bp, Artificial
  probe
  misc_feature (1)..(25): SEQ ID NO: 2393; WAN024D3B; Start 282; Stop 306
tgctccgatgacttatagtattgat

SEQ ID NO: 324224 - DNA, 25 bp, Artificial
  probe
  misc_feature (1)..(25): SEQ ID NO: 2393; WAN024D3B; Start 849; Stop 873
caatacagaagtgaaggcggttatt

SEQ ID NO: 324225 - DNA, 25 bp, Artificial
  probe
  misc_feature (1)..(25): SEQ ID NO: 2393; WAN024D3B; Start 403; Stop 427
catcaagattatggtcaggtcaata

SEQ ID NO: 324226 - DNA, 25 bp, Artificial
  probe
  misc_feature (1)..(25): SEQ ID NO: 2393; WAN024D3B; Start 1046; Stop 1070
actatgttgagactaaggttacagc

SEQ ID NO: 324227 - DNA, 25 bp, Artificial
  probe
  misc_feature (1)..(25): SEQ ID NO: 2393; WAN024D3B; Start 391; Stop 415
ttggctaagtggcatcaagattatg

SEQ ID NO: 324228 - DNA, 25 bp, Artificial
  probe
  misc_feature (1)..(25): SEQ ID NO: 2393; WAN024D3B; Start 390; Stop 414
gttggctaagtggcatcaagattat

SEQ ID NO: 324229 - DNA, 25 bp, Artificial
  probe
  misc_feature (1)..(25): SEQ ID NO: 2393; WAN024D3B; Start 280; Stop 304
cgtgctccgatgacttatagtattg

SEQ ID NO: 324230 - DNA, 25 bp, Artificial
  probe
  misc_feature (1)..(25): SEQ ID NO: 2393; WAN024D3B; Start 394; Stop 418
gctaagtggcatcaagattatggtc

SEQ ID NO: 324231 - DNA, 25 bp, Artificial
  probe
  misc_feature (1)..(25): SEQ ID NO: 2393; WAN024D3B; Start 236; Stop 260
atgagaccttgttagagaataatcc

SEQ ID NO: 324232 - DNA, 25 bp, Artificial
  probe
  misc_feature (1)..(25): SEQ ID NO: 2393; WAN024D3B; Start 234; Stop 258
ggatgagaccttgttagagaataat

SEQ ID NO: 324233 - DNA, 25 bp, Artificial
  probe
  misc_feature (1)..(25): SEQ ID NO: 2393; WAN024D3B; Start 283; Stop 307
gctccgatgacttatagtattgatt

SEQ ID NO: 324234 - DNA, 25 bp, Artificial
  probe
  misc_feature (1)..(25): SEQ ID NO: 2393; WAN024D3B; Start 848; Stop 872
acaatacagaagtgaaggcggttat

SEQ ID NO: 324235 - DNA, 25 bp, Artificial
  probe
  misc_feature (1)..(25): SEQ ID NO: 2393; WAN024D3B; Start 758; Stop 782
cgagtaagagtgatgaagtagaggc

SEQ ID NO: 324236 - DNA, 25 bp, Artificial
  probe
  misc_feature (1)..(25): SEQ ID NO: 2393; WAN024D3B; Start 228; Stop 252
cgtagtggatgagaccttgttagag

SEQ ID NO: 324237 - DNA, 25 bp, Artificial
  probe
  misc_feature (1)..(25): SEQ ID NO: 2393; WAN024D3B; Start 756; Stop 780
cacgagtaagagtgatgaagtagag

SEQ ID NO: 324238 - DNA, 25 bp, Artificial
  probe
  misc_feature (1)..(25): SEQ ID NO: 2393; WAN024D3B; Start 1044; Stop 1068
agactatgttgagactaaggttaca

SEQ ID NO: 324239 - DNA, 25 bp, Artificial
  probe
  misc_feature (1)..(25): SEQ ID NO: 2394; WAN024DW4; Start 912; Stop 936
tgaatctgaaagcggaacaattatt

SEQ ID NO: 324240 - DNA, 25 bp, Artificial
  probe
  misc_feature (1)..(25): SEQ ID NO: 2394; WAN024DW4; Start 631; Stop 655
gttattgataaagacttcgcttccc

SEQ ID NO: 324241 - DNA, 25 bp, Artificial
  probe
  misc_feature (1)..(25): SEQ ID NO: 2394; WAN024DW4; Start 630; Stop 654
ggttattgataaagacttcgcttcc

SEQ ID NO: 324242 - DNA, 25 bp, Artificial
  probe
  misc_feature (1)..(25): SEQ ID NO: 2394; WAN024DW4; Start 632; Stop 656
ttattgataaagacttcgcttccca

SEQ ID NO: 324243 - DNA, 25 bp, Artificial
  probe
  misc_feature (1)..(25): SEQ ID NO: 2394; WAN024DW4; Start 629; Stop 653
cggttattgataaagacttcgcttc

SEQ ID NO: 324244 - DNA, 25 bp, Artificial
  probe
  misc_feature (1)..(25): SEQ ID NO: 2394; WAN024DW4; Start 633; Stop 657
tattgataaagacttcgcttcccaa

SEQ ID NO: 324245 - DNA, 25 bp, Artificial
  probe
  misc_feature (1)..(25): SEQ ID NO: 2394; WAN024DW4; Start 911; Stop 935
ttgaatctgaaagcggaacaattat

SEQ ID NO: 324246 - DNA, 25 bp, Artificial
  probe
  misc_feature (1)..(25): SEQ ID NO: 2394; WAN024DW4; Start 517; Stop 541
gaaattgaaaccatccgtactcttt

SEQ ID NO: 324247 - DNA, 25 bp, Artificial
  probe
  misc_feature (1)..(25): SEQ ID NO: 2394; WAN024DW4; Start 514; Stop 538
aaagaaattgaaaccatccgtactc

SEQ ID NO: 324248 - DNA, 25 bp, Artificial
  probe
  misc_feature (1)..(25): SEQ ID NO: 2394; WAN024DW4; Start 139; Stop 163
attatcactcacggtaatggacctc

SEQ ID NO: 324249 - DNA, 25 bp, Artificial
  probe
  misc_feature (1)..(25): SEQ ID NO: 2394; WAN024DW4; Start 138; Stop 162
gattatcactcacggtaatggacct

SEQ ID NO: 324250 - DNA, 25 bp, Artificial
  probe
  misc_feature (1)..(25): SEQ ID NO: 2394; WAN024DW4; Start 916; Stop 940
tctgaaagcggaacaattattgaaa

SEQ ID NO: 324251 - DNA, 25 bp, Artificial
  probe
  misc_feature (1)..(25): SEQ ID NO: 2394; WAN024DW4; Start 915; Stop 939
atctgaaagcggaacaattattgaa

SEQ ID NO: 324252 - DNA, 25 bp, Artificial
  probe
  misc_feature (1)..(25): SEQ ID NO: 2394; WAN024DW4; Start 914; Stop 938
aatctgaaagcggaacaattattga

SEQ ID NO: 324253 - DNA, 25 bp, Artificial
  probe
  misc_feature (1)..(25): SEQ ID NO: 2394; WAN024DW4; Start 913; Stop 937
gaatctgaaagcggaacaattattg

SEQ ID NO: 324254 - DNA, 25 bp, Artificial
  probe
  misc_feature (1)..(25): SEQ ID NO: 2394; WAN024DW4; Start 871; Stop 895
aaagcagttattacttcccttgaaa

SEQ ID NO: 324255 - DNA, 25 bp, Artificial
  probe
  misc_feature (1)..(25): SEQ ID NO: 2394; WAN024DW4; Start 516; Stop 540
agaaattgaaaccatccgtactctt

SEQ ID NO: 324256 - DNA, 25 bp, Artificial
  probe
  misc_feature (1)..(25): SEQ ID NO: 2394; WAN024DW4; Start 515; Stop 539
aagaaattgaaaccatccgtactct

SEQ ID NO: 324257 - DNA, 25 bp, Artificial
  probe
  misc_feature (1)..(25): SEQ ID NO: 2394; WAN024DW4; Start 513; Stop 537
caaagaaattgaaaccatccgtact

SEQ ID NO: 324258 - DNA, 25 bp, Artificial
  probe
  misc_feature (1)..(25): SEQ ID NO: 2394; WAN024DW4; Start 634; Stop 658
attgataaagacttcgcttcccaac

SEQ ID NO: 324259 - DNA, 25 bp, Artificial
  probe
  misc_feature (1)..(25): SEQ ID NO: 2394; WAN024DW4; Start 137; Stop 161
tgattatcactcacggtaatggacc

SEQ ID NO: 324260 - DNA, 25 bp, Artificial
  probe
  misc_feature (1)..(25): SEQ ID NO: 2394; WAN024DW4; Start 153; Stop 177
taatggacctcaagttgggaatctc

SEQ ID NO: 324261 - DNA, 25 bp, Artificial
  probe
  misc_feature (1)..(25): SEQ ID NO: 2394; WAN024DW4; Start 499; Stop 523
aaacctgttgacatcaaagaaattg

SEQ ID NO: 324262 - DNA, 25 bp, Artificial
  probe
  misc_feature (1)..(25): SEQ ID NO: 2394; WAN024DW4; Start 152; Stop 176
gtaatggacctcaagttgggaatct

SEQ ID NO: 324263 - DNA, 25 bp, Artificial
  probe
  misc_feature (1)..(25): SEQ ID NO: 2394; WAN024DW4; Start 907; Stop 931
ttgattgaatctgaaagcggaacaa

SEQ ID NO: 324264 - DNA, 25 bp, Artificial
  probe
  misc_feature (1)..(25): SEQ ID NO: 2394; WAN024DW4; Start 15; Stop 39
aattgtagtagctttgggaggaaat

SEQ ID NO: 324265 - DNA, 25 bp, Artificial
  probe
  misc_feature (1)..(25): SEQ ID NO: 2394; WAN024DW4; Start 14; Stop 38
aaattgtagtagctttgggaggaaa

SEQ ID NO: 324266 - DNA, 25 bp, Artificial
  probe
  misc_feature (1)..(25): SEQ ID NO: 2394; WAN024DW4; Start 723; Stop 747
taactacaacaagccaaaccaggaa

SEQ ID NO: 324267 - DNA, 25 bp, Artificial
  probe
  misc_feature (1)..(25): SEQ ID NO: 2394; WAN024DW4; Start 906; Stop 930
cttgattgaatctgaaagcggaaca

SEQ ID NO: 324268 - DNA, 25 bp, Artificial
  probe
  misc_feature (1)..(25): SEQ ID NO: 2394; WAN024DW4; Start 16; Stop 40
attgtagtagctttgggaggaaatg

SEQ ID NO: 324269 - DNA, 25 bp, Artificial
  probe
  misc_feature (1)..(25): SEQ ID NO: 2394; WAN024DW4; Start 722; Stop 746
ttaactacaacaagccaaaccagga

SEQ ID NO: 324270 - DNA, 25 bp, Artificial
  probe
  misc_feature (1)..(25): SEQ ID NO: 2394; WAN024DW4; Start 243; Stop 267
tatgacagaaggtagcatcggtttc

SEQ ID NO: 324271 - DNA, 25 bp, Artificial
  probe
  misc_feature (1)..(25): SEQ ID NO: 2394; WAN024DW4; Start 242; Stop 266
ctatgacagaaggtagcatcggttt

SEQ ID NO: 324272 - DNA, 25 bp, Artificial
  probe
  misc_feature (1)..(25): SEQ ID NO: 2395; WAN024C8V; Start 467; Stop 491
ttatcgtaacaactgctaacactga

SEQ ID NO: 324273 - DNA, 25 bp, Artificial
  probe
  misc_feature (1)..(25): SEQ ID NO: 2395; WAN024C8V; Start 468; Stop 492
tatcgtaacaactgctaacactgac

SEQ ID NO: 324274 - DNA, 25 bp, Artificial
  probe
  misc_feature (1)..(25): SEQ ID NO: 2395; WAN024C8V; Start 52; Stop 76
acagaacaattcaactactcatcag

SEQ ID NO: 324275 - DNA, 25 bp, Artificial
  probe
  misc_feature (1)..(25): SEQ ID NO: 2395; WAN024C8V; Start 51; Stop 75
gacagaacaattcaactactcatca

SEQ ID NO: 324276 - DNA, 25 bp, Artificial
  probe
  misc_feature (1)..(25): SEQ ID NO: 2395; WAN024C8V; Start 55; Stop 79
gaacaattcaactactcatcagtga

SEQ ID NO: 324277 - DNA, 25 bp, Artificial
  probe
  misc_feature (1)..(25): SEQ ID NO: 2395; WAN024C8V; Start 54; Stop 78
agaacaattcaactactcatcagtg

SEQ ID NO: 324278 - DNA, 25 bp, Artificial
  probe
  misc_feature (1)..(25): SEQ ID NO: 2395; WAN024C8V; Start 53; Stop 77
cagaacaattcaactactcatcagt

SEQ ID NO: 324279 - DNA, 25 bp, Artificial
  probe
  misc_feature (1)..(25): SEQ ID NO: 2395; WAN024C8V; Start 50; Stop 74
tgacagaacaattcaactactcatc

SEQ ID NO: 324280 - DNA, 25 bp, Artificial
  probe
  misc_feature (1)..(25): SEQ ID NO: 2395; WAN024C8V; Start 166; Stop 190
gaagaattggcacttatctcaggtc

SEQ ID NO: 324281 - DNA, 25 bp, Artificial
  probe
  misc_feature (1)..(25): SEQ ID NO: 2395; WAN024C8V; Start 472; Stop 496
gtaacaactgctaacactgacgaag

SEQ ID NO: 324282 - DNA, 25 bp, Artificial
  probe
  misc_feature (1)..(25): SEQ ID NO: 2395; WAN024C8V; Start 473; Stop 497
taacaactgctaacactgacgaaga

SEQ ID NO: 324283 - DNA, 25 bp, Artificial
  probe
  misc_feature (1)..(25): SEQ ID NO: 2395; WAN024C8V; Start 167; Stop 191
aagaattggcacttatctcaggtca

SEQ ID NO: 324284 - DNA, 25 bp, Artificial
  probe
  misc_feature (1)..(25): SEQ ID NO: 2395; WAN024C8V; Start 168; Stop 192
agaattggcacttatctcaggtcaa

SEQ ID NO: 324285 - DNA, 25 bp, Artificial
  probe
  misc_feature (1)..(25): SEQ ID NO: 2395; WAN024C8V; Start 466; Stop 490
gttatcgtaacaactgctaacactg

SEQ ID NO: 324286 - DNA, 25 bp, Artificial
  probe
  misc_feature (1)..(25): SEQ ID NO: 2395; WAN024C8V; Start 457; Stop 481
cttgacatcgttatcgtaacaactg

SEQ ID NO: 324287 - DNA, 25 bp, Artificial
  probe
  misc_feature (1)..(25): SEQ ID NO: 2395; WAN024C8V; Start 456; Stop 480
tcttgacatcgttatcgtaacaact

SEQ ID NO: 324288 - DNA, 25 bp, Artificial
  probe
  misc_feature (1)..(25): SEQ ID NO: 2395; WAN024C8V; Start 462; Stop 486
catcgttatcgtaacaactgctaac

SEQ ID NO: 324289 - DNA, 25 bp, Artificial
  probe
  misc_feature (1)..(25): SEQ ID NO: 2395; WAN024C8V; Start 455; Stop 479
gtcttgacatcgttatcgtaacaac

SEQ ID NO: 324290 - DNA, 25 bp, Artificial
  probe
  misc_feature (1)..(25): SEQ ID NO: 2395; WAN024C8V; Start 165; Stop 189
tgaagaattggcacttatctcaggt

SEQ ID NO: 324291 - DNA, 25 bp, Artificial
  probe
  misc_feature (1)..(25): SEQ ID NO: 2395; WAN024C8V; Start 463; Stop 487
atcgttatcgtaacaactgctaaca

SEQ ID NO: 324292 - DNA, 25 bp, Artificial
  probe
  misc_feature (1)..(25): SEQ ID NO: 2395; WAN024C8V; Start 461; Stop 485
acatcgttatcgtaacaactgctaa

SEQ ID NO: 324293 - DNA, 25 bp, Artificial
  probe
  misc_feature (1)..(25): SEQ ID NO: 2395; WAN024C8V; Start 56; Stop 80
aacaattcaactactcatcagtgat

SEQ ID NO: 324294 - DNA, 25 bp, Artificial
  probe
  misc_feature (1)..(25): SEQ ID NO: 2395; WAN024C8V; Start 460; Stop 484
gacatcgttatcgtaacaactgcta

SEQ ID NO: 324295 - DNA, 25 bp, Artificial
  probe
  misc_feature (1)..(25): SEQ ID NO: 2395; WAN024C8V; Start 454; Stop 478
ggtcttgacatcgttatcgtaacaa

SEQ ID NO: 324296 - DNA, 25 bp, Artificial
  probe
  misc_feature (1)..(25): SEQ ID NO: 2395; WAN024C8V; Start 25; Stop 49
tatcttaatgaagtagttcctgctt

SEQ ID NO: 324297 - DNA, 25 bp, Artificial
  probe
  misc_feature (1)..(25): SEQ ID NO: 2395; WAN024C8V; Start 465; Stop 489
cgttatcgtaacaactgctaacact

SEQ ID NO: 324298 - DNA, 25 bp, Artificial
  probe
  misc_feature (1)..(25): SEQ ID NO: 2395; WAN024C8V; Start 464; Stop 488
tcgttatcgtaacaactgctaacac

SEQ ID NO: 324299 - DNA, 25 bp, Artificial
  probe
  misc_feature (1)..(25): SEQ ID NO: 2395; WAN024C8V; Start 82; Stop 106
gctgtgcctaaagtagataagattg

SEQ ID NO: 324300 - DNA, 25 bp, Artificial
  probe
  misc_feature (1)..(25): SEQ ID NO: 2395; WAN024C8V; Start 24; Stop 48
atatcttaatgaagtagttcctgct

SEQ ID NO: 324301 - DNA, 25 bp, Artificial
  probe
  misc_feature (1)..(25): SEQ ID NO: 2395; WAN024C8V; Start 30; Stop 54
taatgaagtagttcctgctttgaca

SEQ ID NO: 324302 - DNA, 25 bp, Artificial
  probe
  misc_feature (1)..(25): SEQ ID NO: 2395; WAN024C8V; Start 452; Stop 476
gtggtcttgacatcgttatcgtaac

SEQ ID NO: 324303 - DNA, 25 bp, Artificial
  probe
  misc_feature (1)..(25): SEQ ID NO: 2395; WAN024C8V; Start 451; Stop 475
cgtggtcttgacatcgttatcgtaa

SEQ ID NO: 324304 - DNA, 25 bp, Artificial
  probe
  misc_feature (1)..(25): SEQ ID NO: 2395; WAN024C8V; Start 29; Stop 53
ttaatgaagtagttcctgctttgac

SEQ ID NO: 324305 - DNA, 25 bp, Artificial
  probe
  misc_feature (1)..(25): SEQ ID NO: 2396; WAN024D8Q; Start 45; Stop 69
aggtatttcatttgaagaaggagaa

SEQ ID NO: 324306 - DNA, 25 bp, Artificial
  probe
  misc_feature (1)..(25): SEQ ID NO: 2396; WAN024D8Q; Start 17; Stop 41
agagccattatttgatatacagagt

SEQ ID NO: 324307 - DNA, 25 bp, Artificial
  probe
  misc_feature (1)..(25): SEQ ID NO: 2396; WAN024D8Q; Start 44; Stop 68
taggtatttcatttgaagaaggaga

SEQ ID NO: 324308 - DNA, 25 bp, Artificial
  probe
  misc_feature (1)..(25): SEQ ID NO: 2396; WAN024D8Q; Start 18; Stop 42
gagccattatttgatatacagagtt

SEQ ID NO: 324309 - DNA, 25 bp, Artificial
  probe
  misc_feature (1)..(25): SEQ ID NO: 2396; WAN024D8Q; Start 16; Stop 40
aagagccattatttgatatacagag

SEQ ID NO: 324310 - DNA, 25 bp, Artificial
  probe
  misc_feature (1)..(25): SEQ ID NO: 2396; WAN024D8Q; Start 43; Stop 67
ttaggtatttcatttgaagaaggag

SEQ ID NO: 324311 - DNA, 25 bp, Artificial
  probe
  misc_feature (1)..(25): SEQ ID NO: 2396; WAN024D8Q; Start 19; Stop 43
agccattatttgatatacagagttt

SEQ ID NO: 324312 - DNA, 25 bp, Artificial
  probe
  misc_feature (1)..(25): SEQ ID NO: 2396; WAN024D8Q; Start 46; Stop 70
ggtatttcatttgaagaaggagaaa

SEQ ID NO: 324313 - DNA, 25 bp, Artificial
  probe
  misc_feature (1)..(25): SEQ ID NO: 2396; WAN024D8Q; Start 42; Stop 66
tttaggtatttcatttgaagaagga

SEQ ID NO: 324314 - DNA, 25 bp, Artificial
  probe
  misc_feature (1)..(25): SEQ ID NO: 2396; WAN024D8Q; Start 52; Stop 76
tcatttgaagaaggagaaaatatcg

SEQ ID NO: 324315 - DNA, 25 bp, Artificial
  probe
  misc_feature (1)..(25): SEQ ID NO: 2396; WAN024D8Q; Start 15; Stop 39
taagagccattatttgatatacaga

SEQ ID NO: 324316 - DNA, 25 bp, Artificial
  probe
  misc_feature (1)..(25): SEQ ID NO: 2396; WAN024D8Q; Start 35; Stop 59
acagagttttaggtatttcatttga

SEQ ID NO: 324317 - DNA, 25 bp, Artificial
  probe
  misc_feature (1)..(25): SEQ ID NO: 2396; WAN024D8Q; Start 102; Stop 126
tttatacaaatatgctggttcattt

SEQ ID NO: 324318 - DNA, 25 bp, Artificial
  probe
  misc_feature (1)..(25): SEQ ID NO: 2396; WAN024D8Q; Start 75; Stop 99
cgatttgtatcaaaataaaggtcgt

SEQ ID NO: 324319 - DNA, 25 bp, Artificial
  probe
  misc_feature (1)..(25): SEQ ID NO: 2396; WAN024D8Q; Start 4; Stop 28
gcaaatgataataagagccattatt

SEQ ID NO: 324320 - DNA, 25 bp, Artificial
  probe
  misc_feature (1)..(25): SEQ ID NO: 2396; WAN024D8Q; Start 3; Stop 27
ggcaaatgataataagagccattat

SEQ ID NO: 324321 - DNA, 25 bp, Artificial
  probe
  misc_feature (1)..(25): SEQ ID NO: 2396; WAN024D8Q; Start 53; Stop 77
catttgaagaaggagaaaatatcga

SEQ ID NO: 324322 - DNA, 25 bp, Artificial
  probe
  misc_feature (1)..(25): SEQ ID NO: 2396; WAN024D8Q; Start 20; Stop 44
gccattatttgatatacagagtttt

SEQ ID NO: 324323 - DNA, 25 bp, Artificial
  probe
  misc_feature (1)..(25): SEQ ID NO: 2396; WAN024D8Q; Start 74; Stop 98
tcgatttgtatcaaaataaaggtcg

SEQ ID NO: 324324 - DNA, 25 bp, Artificial
  probe
  misc_feature (1)..(25): SEQ ID NO: 2396; WAN024D8Q; Start 36; Stop 60
cagagttttaggtatttcatttgaa

SEQ ID NO: 324325 - DNA, 25 bp, Artificial
  probe
  misc_feature (1)..(25): SEQ ID NO: 2396; WAN024D8Q; Start 101; Stop 125
ttttatacaaatatgctggttcatt

SEQ ID NO: 324326 - DNA, 25 bp, Artificial
  probe
  misc_feature (1)..(25): SEQ ID NO: 2396; WAN024D8Q; Start 41; Stop 65
ttttaggtatttcatttgaagaagg

SEQ ID NO: 324327 - DNA, 25 bp, Artificial
  probe
  misc_feature (1)..(25): SEQ ID NO: 2396; WAN024D8Q; Start 162; Stop 186
atttggtacagaaaatactctaact

SEQ ID NO: 324328 - DNA, 25 bp, Artificial
  probe
  misc_feature (1)..(25): SEQ ID NO: 2396; WAN024D8Q; Start 34; Stop 58
tacagagttttaggtatttcatttg

SEQ ID NO: 324329 - DNA, 25 bp, Artificial
  probe
  misc_feature (1)..(25): SEQ ID NO: 2396; WAN024D8Q; Start 38; Stop 62
gagttttaggtatttcatttgaaga

SEQ ID NO: 324330 - DNA, 25 bp, Artificial
  probe
  misc_feature (1)..(25): SEQ ID NO: 2396; WAN024D8Q; Start 37; Stop 61
agagttttaggtatttcatttgaag

SEQ ID NO: 324331 - DNA, 25 bp, Artificial
  probe
  misc_feature (1)..(25): SEQ ID NO: 2396; WAN024D8Q; Start 76; Stop 100
gatttgtatcaaaataaaggtcgtt

SEQ ID NO: 324332 - DNA, 25 bp, Artificial
  probe
  misc_feature (1)..(25): SEQ ID NO: 2396; WAN024D8Q; Start 103; Stop 127
ttatacaaatatgctggttcatttt

SEQ ID NO: 324333 - DNA, 25 bp, Artificial
  probe
  misc_feature (1)..(25): SEQ ID NO: 2396; WAN024D8Q; Start 164; Stop 188
ttggtacagaaaatactctaactaa

SEQ ID NO: 324334 - DNA, 25 bp, Artificial
  probe
  misc_feature (1)..(25): SEQ ID NO: 2396; WAN024D8Q; Start 163; Stop 187
tttggtacagaaaatactctaacta

SEQ ID NO: 324335 - DNA, 25 bp, Artificial
  probe
  misc_feature (1)..(25): SEQ ID NO: 2396; WAN024D8Q; Start 51; Stop 75
ttcatttgaagaaggagaaaatatc

SEQ ID NO: 324336 - DNA, 25 bp, Artificial
  probe
  misc_feature (1)..(25): SEQ ID NO: 2396; WAN024D8Q; Start 78; Stop 102
tttgtatcaaaataaaggtcgtttt

SEQ ID NO: 324337 - DNA, 25 bp, Artificial
  probe
  misc_feature (1)..(25): SEQ ID NO: 2396; WAN024D8Q; Start 47; Stop 71
gtatttcatttgaagaaggagaaaa

SEQ ID NO: 324338 - DNA, 25 bp, Artificial
  probe
  misc_feature (1)..(25): SEQ ID NO: 2397; WAN024FFR; Start 128; Stop 152
tctgtatgatgaagatgtcaatcct

SEQ ID NO: 324339 - DNA, 25 bp, Artificial
  probe
  misc_feature (1)..(25): SEQ ID NO: 2397; WAN024FFR; Start 129; Stop 153
ctgtatgatgaagatgtcaatcctt

SEQ ID NO: 324340 - DNA, 25 bp, Artificial
  probe
  misc_feature (1)..(25): SEQ ID NO: 2397; WAN024FFR; Start 127; Stop 151
ttctgtatgatgaagatgtcaatcc

SEQ ID NO: 324341 - DNA, 25 bp, Artificial
  probe
  misc_feature (1)..(25): SEQ ID NO: 2397; WAN024FFR; Start 24; Stop 48
aatccaaagagaaagacagcaaatc

SEQ ID NO: 324342 - DNA, 25 bp, Artificial
  probe
  misc_feature (1)..(25): SEQ ID NO: 2397; WAN024FFR; Start 179; Stop 203
ggataaagaagaaagacagccagat

SEQ ID NO: 324343 - DNA, 25 bp, Artificial
  probe
  misc_feature (1)..(25): SEQ ID NO: 2397; WAN024FFR; Start 21; Stop 45
gttaatccaaagagaaagacagcaa

SEQ ID NO: 324344 - DNA, 25 bp, Artificial
  probe
  misc_feature (1)..(25): SEQ ID NO: 2397; WAN024FFR; Start 130; Stop 154
tgtatgatgaagatgtcaatcctta

SEQ ID NO: 324345 - DNA, 25 bp, Artificial
  probe
  misc_feature (1)..(25): SEQ ID NO: 2397; WAN024FFR; Start 25; Stop 49
atccaaagagaaagacagcaaatca

SEQ ID NO: 324346 - DNA, 25 bp, Artificial
  probe
  misc_feature (1)..(25): SEQ ID NO: 2397; WAN024FFR; Start 23; Stop 47
taatccaaagagaaagacagcaaat

SEQ ID NO: 324347 - DNA, 25 bp, Artificial
  probe
  misc_feature (1)..(25): SEQ ID NO: 2397; WAN024FFR; Start 22; Stop 46
ttaatccaaagagaaagacagcaaa

SEQ ID NO: 324348 - DNA, 25 bp, Artificial
  probe
  misc_feature (1)..(25): SEQ ID NO: 2397; WAN024FFR; Start 26; Stop 50
tccaaagagaaagacagcaaatcag

SEQ ID NO: 324349 - DNA, 25 bp, Artificial
  probe
  misc_feature (1)..(25): SEQ ID NO: 2397; WAN024FFR; Start 181; Stop 205
ataaagaagaaagacagccagatca

SEQ ID NO: 324350 - DNA, 25 bp, Artificial
  probe
  misc_feature (1)..(25): SEQ ID NO: 2397; WAN024FFR; Start 175; Stop 199
caagggataaagaagaaagacagcc

SEQ ID NO: 324351 - DNA, 25 bp, Artificial
  probe
  misc_feature (1)..(25): SEQ ID NO: 2397; WAN024FFR; Start 174; Stop 198
ccaagggataaagaagaaagacagc

SEQ ID NO: 324352 - DNA, 25 bp, Artificial
  probe
  misc_feature (1)..(25): SEQ ID NO: 2397; WAN024FFR; Start 182; Stop 206
taaagaagaaagacagccagatcag

SEQ ID NO: 324353 - DNA, 25 bp, Artificial
  probe
  misc_feature (1)..(25): SEQ ID NO: 2397; WAN024FFR; Start 198; Stop 222
ccagatcagcagaactaaaccaata

SEQ ID NO: 324354 - DNA, 25 bp, Artificial
  probe
  misc_feature (1)..(25): SEQ ID NO: 2397; WAN024FFR; Start 27; Stop 51
ccaaagagaaagacagcaaatcagt

SEQ ID NO: 324355 - DNA, 25 bp, Artificial
  probe
  misc_feature (1)..(25): SEQ ID NO: 2397; WAN024FFR; Start 180; Stop 204
gataaagaagaaagacagccagatc

SEQ ID NO: 324356 - DNA, 25 bp, Artificial
  probe
  misc_feature (1)..(25): SEQ ID NO: 2397; WAN024FFR; Start 176; Stop 200
aagggataaagaagaaagacagcca

SEQ ID NO: 324357 - DNA, 25 bp, Artificial
  probe
  misc_feature (1)..(25): SEQ ID NO: 2397; WAN024FFR; Start 173; Stop 197
cccaagggataaagaagaaagacag

SEQ ID NO: 324358 - DNA, 25 bp, Artificial
  probe
  misc_feature (1)..(25): SEQ ID NO: 2397; WAN024FFR; Start 199; Stop 223
cagatcagcagaactaaaccaatat

SEQ ID NO: 324359 - DNA, 25 bp, Artificial
  probe
  misc_feature (1)..(25): SEQ ID NO: 2397; WAN024FFR; Start 28; Stop 52
caaagagaaagacagcaaatcagtc

SEQ ID NO: 324360 - DNA, 25 bp, Artificial
  probe
  misc_feature (1)..(25): SEQ ID NO: 2397; WAN024FFR; Start 178; Stop 202
gggataaagaagaaagacagccaga

SEQ ID NO: 324361 - DNA, 25 bp, Artificial
  probe
  misc_feature (1)..(25): SEQ ID NO: 2397; WAN024FFR; Start 177; Stop 201
agggataaagaagaaagacagccag

SEQ ID NO: 324362 - DNA, 25 bp, Artificial
  probe
  misc_feature (1)..(25): SEQ ID NO: 2397; WAN024FFR; Start 29; Stop 53
aaagagaaagacagcaaatcagtcc

SEQ ID NO: 324363 - DNA, 25 bp, Artificial
  probe
  misc_feature (1)..(25): SEQ ID NO: 2397; WAN024FFR; Start 32; Stop 56
gagaaagacagcaaatcagtccaaa

SEQ ID NO: 324364 - DNA, 25 bp, Artificial
  probe
  misc_feature (1)..(25): SEQ ID NO: 2397; WAN024FFR; Start 191; Stop 215
aagacagccagatcagcagaactaa

SEQ ID NO: 324365 - DNA, 25 bp, Artificial
  probe
  misc_feature (1)..(25): SEQ ID NO: 2397; WAN024FFR; Start 200; Stop 224
agatcagcagaactaaaccaatata

SEQ ID NO: 324366 - DNA, 25 bp, Artificial
  probe
  misc_feature (1)..(25): SEQ ID NO: 2397; WAN024FFR; Start 31; Stop 55
agagaaagacagcaaatcagtccaa

SEQ ID NO: 324367 - DNA, 25 bp, Artificial
  probe
  misc_feature (1)..(25): SEQ ID NO: 2397; WAN024FFR; Start 30; Stop 54
aagagaaagacagcaaatcagtcca

SEQ ID NO: 324368 - DNA, 25 bp, Artificial
  probe
  misc_feature (1)..(25): SEQ ID NO: 2397; WAN024FFR; Start 126; Stop 150
tttctgtatgatgaagatgtcaatc

SEQ ID NO: 324369 - DNA, 25 bp, Artificial
  probe
  misc_feature (1)..(25): SEQ ID NO: 2397; WAN024FFR; Start 201; Stop 225
gatcagcagaactaaaccaatataa

SEQ ID NO: 324370 - DNA, 25 bp, Artificial
  probe
  misc_feature (1)..(25): SEQ ID NO: 2397; WAN024FFR; Start 183; Stop 207
aaagaagaaagacagccagatcagc

SEQ ID NO: 324371 - DNA, 25 bp, Artificial
  probe
  misc_feature (1)..(25): SEQ ID NO: 2398; WAN024D52; Start 47; Stop 71
agaactttccctttgactttgagat

SEQ ID NO: 324372 - DNA, 25 bp, Artificial
  probe
  misc_feature (1)..(25): SEQ ID NO: 2398; WAN024D52; Start 48; Stop 72
gaactttccctttgactttgagatt

SEQ ID NO: 324373 - DNA, 25 bp, Artificial
  probe
  misc_feature (1)..(25): SEQ ID NO: 2398; WAN024D52; Start 46; Stop 70
aagaactttccctttgactttgaga

SEQ ID NO: 324374 - DNA, 25 bp, Artificial
  probe
  misc_feature (1)..(25): SEQ ID NO: 2398; WAN024D52; Start 50; Stop 74
actttccctttgactttgagattag

SEQ ID NO: 324375 - DNA, 25 bp, Artificial
  probe
  misc_feature (1)..(25): SEQ ID NO: 2398; WAN024D52; Start 27; Stop 51
tttagaggaagagttggacaagaac

SEQ ID NO: 324376 - DNA, 25 bp, Artificial
  probe
  misc_feature (1)..(25): SEQ ID NO: 2398; WAN024D52; Start 45; Stop 69
caagaactttccctttgactttgag

SEQ ID NO: 324377 - DNA, 25 bp, Artificial
  probe
  misc_feature (1)..(25): SEQ ID NO: 2398; WAN024D52; Start 49; Stop 73
aactttccctttgactttgagatta

SEQ ID NO: 324378 - DNA, 25 bp, Artificial
  probe
  misc_feature (1)..(25): SEQ ID NO: 2398; WAN024D52; Start 43; Stop 67
gacaagaactttccctttgactttg

SEQ ID NO: 324379 - DNA, 25 bp, Artificial
  probe
  misc_feature (1)..(25): SEQ ID NO: 2398; WAN024D52; Start 44; Stop 68
acaagaactttccctttgactttga

SEQ ID NO: 324380 - DNA, 25 bp, Artificial
  probe
  misc_feature (1)..(25): SEQ ID NO: 2398; WAN024D52; Start 394; Stop 418
gaatggaaccaagaagtctttgaag

SEQ ID NO: 324381 - DNA, 25 bp, Artificial
  probe
  misc_feature (1)..(25): SEQ ID NO: 2398; WAN024D52; Start 401; Stop 425
accaagaagtctttgaagaaggaaa

SEQ ID NO: 324382 - DNA, 25 bp, Artificial
  probe
  misc_feature (1)..(25): SEQ ID NO: 2398; WAN024D52; Start 400; Stop 424
aaccaagaagtctttgaagaaggaa

SEQ ID NO: 324383 - DNA, 25 bp, Artificial
  probe
  misc_feature (1)..(25): SEQ ID NO: 2398; WAN024D52; Start 396; Stop 420
atggaaccaagaagtctttgaagaa

SEQ ID NO: 324384 - DNA, 25 bp, Artificial
  probe
  misc_feature (1)..(25): SEQ ID NO: 2398; WAN024D52; Start 395; Stop 419
aatggaaccaagaagtctttgaaga

SEQ ID NO: 324385 - DNA, 25 bp, Artificial
  probe
  misc_feature (1)..(25): SEQ ID NO: 2398; WAN024D52; Start 399; Stop 423
gaaccaagaagtctttgaagaagga

SEQ ID NO: 324386 - DNA, 25 bp, Artificial
  probe
  misc_feature (1)..(25): SEQ ID NO: 2398; WAN024D52; Start 397; Stop 421
tggaaccaagaagtctttgaagaag

SEQ ID NO: 324387 - DNA, 25 bp, Artificial
  probe
  misc_feature (1)..(25): SEQ ID NO: 2398; WAN024D52; Start 393; Stop 417
ggaatggaaccaagaagtctttgaa

SEQ ID NO: 324388 - DNA, 25 bp, Artificial
  probe
  misc_feature (1)..(25): SEQ ID NO: 2398; WAN024D52; Start 389; Stop 413
tcatggaatggaaccaagaagtctt

SEQ ID NO: 324389 - DNA, 25 bp, Artificial
  probe
  misc_feature (1)..(25): SEQ ID NO: 2398; WAN024D52; Start 378; Stop 402
agaggaatttgtcatggaatggaac

SEQ ID NO: 324390 - DNA, 25 bp, Artificial
  probe
  misc_feature (1)..(25): SEQ ID NO: 2398; WAN024D52; Start 377; Stop 401
cagaggaatttgtcatggaatggaa

SEQ ID NO: 324391 - DNA, 25 bp, Artificial
  probe
  misc_feature (1)..(25): SEQ ID NO: 2398; WAN024D52; Start 373; Stop 397
gaagcagaggaatttgtcatggaat

SEQ ID NO: 324392 - DNA, 25 bp, Artificial
  probe
  misc_feature (1)..(25): SEQ ID NO: 2398; WAN024D52; Start 29; Stop 53
tagaggaagagttggacaagaactt

SEQ ID NO: 324393 - DNA, 25 bp, Artificial
  probe
  misc_feature (1)..(25): SEQ ID NO: 2398; WAN024D52; Start 28; Stop 52
ttagaggaagagttggacaagaact

SEQ ID NO: 324394 - DNA, 25 bp, Artificial
  probe
  misc_feature (1)..(25): SEQ ID NO: 2398; WAN024D52; Start 398; Stop 422
ggaaccaagaagtctttgaagaagg

SEQ ID NO: 324395 - DNA, 25 bp, Artificial
  probe
  misc_feature (1)..(25): SEQ ID NO: 2398; WAN024D52; Start 386; Stop 410
ttgtcatggaatggaaccaagaagt

SEQ ID NO: 324396 - DNA, 25 bp, Artificial
  probe
  misc_feature (1)..(25): SEQ ID NO: 2398; WAN024D52; Start 374; Stop 398
aagcagaggaatttgtcatggaatg

SEQ ID NO: 324397 - DNA, 25 bp, Artificial
  probe
  misc_feature (1)..(25): SEQ ID NO: 2398; WAN024D52; Start 42; Stop 66
ggacaagaactttccctttgacttt

SEQ ID NO: 324398 - DNA, 25 bp, Artificial
  probe
  misc_feature (1)..(25): SEQ ID NO: 2398; WAN024D52; Start 388; Stop 412
gtcatggaatggaaccaagaagtct

SEQ ID NO: 324399 - DNA, 25 bp, Artificial
  probe
  misc_feature (1)..(25): SEQ ID NO: 2398; WAN024D52; Start 379; Stop 403
gaggaatttgtcatggaatggaacc

SEQ ID NO: 324400 - DNA, 25 bp, Artificial
  probe
  misc_feature (1)..(25): SEQ ID NO: 2398; WAN024D52; Start 372; Stop 396
agaagcagaggaatttgtcatggaa

SEQ ID NO: 324401 - DNA, 25 bp, Artificial
  probe
  misc_feature (1)..(25): SEQ ID NO: 2398; WAN024D52; Start 391; Stop 415
atggaatggaaccaagaagtctttg

SEQ ID NO: 324402 - DNA, 25 bp, Artificial
  probe
  misc_feature (1)..(25): SEQ ID NO: 2398; WAN024D52; Start 387; Stop 411
tgtcatggaatggaaccaagaagtc

SEQ ID NO: 324403 - DNA, 25 bp, Artificial
  probe
  misc_feature (1)..(25): SEQ ID NO: 2398; WAN024D52; Start 382; Stop 406
gaatttgtcatggaatggaaccaag

SEQ ID NO: 324404 - DNA, 25 bp, Artificial
  probe
  misc_feature (1)..(25): SEQ ID NO: 2399; WAN024DAQ; Start 391; Stop 415
ggtatcatagataatcaggtcatcg

SEQ ID NO: 324405 - DNA, 25 bp, Artificial
  probe
  misc_feature (1)..(25): SEQ ID NO: 2399; WAN024DAQ; Start 377; Stop 401
tgtcgattggaattggtatcataga

SEQ ID NO: 324406 - DNA, 25 bp, Artificial
  probe
  misc_feature (1)..(25): SEQ ID NO: 2399; WAN024DAQ; Start 568; Stop 592
tctatcgcagcagcatctatagtag

SEQ ID NO: 324407 - DNA, 25 bp, Artificial
  probe
  misc_feature (1)..(25): SEQ ID NO: 2399; WAN024DAQ; Start 567; Stop 591
ctctatcgcagcagcatctatagta

SEQ ID NO: 324408 - DNA, 25 bp, Artificial
  probe
  misc_feature (1)..(25): SEQ ID NO: 2399; WAN024DAQ; Start 581; Stop 605
catctatagtagccaaggtaacacg

SEQ ID NO: 324409 - DNA, 25 bp, Artificial
  probe
  misc_feature (1)..(25): SEQ ID NO: 2399; WAN024DAQ; Start 578; Stop 602
cagcatctatagtagccaaggtaac

SEQ ID NO: 324410 - DNA, 25 bp, Artificial
  probe
  misc_feature (1)..(25): SEQ ID NO: 2399; WAN024DAQ; Start 376; Stop 400
ttgtcgattggaattggtatcatag

SEQ ID NO: 324411 - DNA, 25 bp, Artificial
  probe
  misc_feature (1)..(25): SEQ ID NO: 2399; WAN024DAQ; Start 375; Stop 399
cttgtcgattggaattggtatcata

SEQ ID NO: 324412 - DNA, 25 bp, Artificial
  probe
  misc_feature (1)..(25): SEQ ID NO: 2399; WAN024DAQ; Start 374; Stop 398
ccttgtcgattggaattggtatcat

SEQ ID NO: 324413 - DNA, 25 bp, Artificial
  probe
  misc_feature (1)..(25): SEQ ID NO: 2399; WAN024DAQ; Start 580; Stop 604
gcatctatagtagccaaggtaacac

SEQ ID NO: 324414 - DNA, 25 bp, Artificial
  probe
  misc_feature (1)..(25): SEQ ID NO: 2399; WAN024DAQ; Start 579; Stop 603
agcatctatagtagccaaggtaaca

SEQ ID NO: 324415 - DNA, 25 bp, Artificial
  probe
  misc_feature (1)..(25): SEQ ID NO: 2399; WAN024DAQ; Start 524; Stop 548
ccatttcacaaacctccattatcaa

SEQ ID NO: 324416 - DNA, 25 bp, Artificial
  probe
  misc_feature (1)..(25): SEQ ID NO: 2399; WAN024DAQ; Start 582; Stop 606
atctatagtagccaaggtaacacgt

SEQ ID NO: 324417 - DNA, 25 bp, Artificial
  probe
  misc_feature (1)..(25): SEQ ID NO: 2399; WAN024DAQ; Start 378; Stop 402
gtcgattggaattggtatcatagat

SEQ ID NO: 324418 - DNA, 25 bp, Artificial
  probe
  misc_feature (1)..(25): SEQ ID NO: 2399; WAN024DAQ; Start 523; Stop 547
cccatttcacaaacctccattatca

SEQ ID NO: 324419 - DNA, 25 bp, Artificial
  probe
  misc_feature (1)..(25): SEQ ID NO: 2399; WAN024DAQ; Start 640; Stop 664
cctggctatgatttcgctactaatg

SEQ ID NO: 324420 - DNA, 25 bp, Artificial
  probe
  misc_feature (1)..(25): SEQ ID NO: 2399; WAN024DAQ; Start 565; Stop 589
ctctctatcgcagcagcatctatag

SEQ ID NO: 324421 - DNA, 25 bp, Artificial
  probe
  misc_feature (1)..(25): SEQ ID NO: 2399; WAN024DAQ; Start 577; Stop 601
gcagcatctatagtagccaaggtaa

SEQ ID NO: 324422 - DNA, 25 bp, Artificial
  probe
  misc_feature (1)..(25): SEQ ID NO: 2399; WAN024DAQ; Start 525; Stop 549
catttcacaaacctccattatcaaa

SEQ ID NO: 324423 - DNA, 25 bp, Artificial
  probe
  misc_feature (1)..(25): SEQ ID NO: 2399; WAN024DAQ; Start 390; Stop 414
tggtatcatagataatcaggtcatc

SEQ ID NO: 324424 - DNA, 25 bp, Artificial
  probe
  misc_feature (1)..(25): SEQ ID NO: 2399; WAN024DAQ; Start 564; Stop 588
cctctctatcgcagcagcatctata

SEQ ID NO: 324425 - DNA, 25 bp, Artificial
  probe
  misc_feature (1)..(25): SEQ ID NO: 2399; WAN024DAQ; Start 641; Stop 665
ctggctatgatttcgctactaatgc

SEQ ID NO: 324426 - DNA, 25 bp, Artificial
  probe
  misc_feature (1)..(25): SEQ ID NO: 2399; WAN024DAQ; Start 526; Stop 550
atttcacaaacctccattatcaaag

SEQ ID NO: 324427 - DNA, 25 bp, Artificial
  probe
  misc_feature (1)..(25): SEQ ID NO: 2399; WAN024DAQ; Start 292; Stop 316
tgtaagattaaaggtctcaacgaca

SEQ ID NO: 324428 - DNA, 25 bp, Artificial
  probe
  misc_feature (1)..(25): SEQ ID NO: 2399; WAN024DAQ; Start 293; Stop 317
gtaagattaaaggtctcaacgacag

SEQ ID NO: 324429 - DNA, 25 bp, Artificial
  probe
  misc_feature (1)..(25): SEQ ID NO: 2399; WAN024DAQ; Start 79; Stop 103
aaggataatcgctcaggagttcaaa

SEQ ID NO: 324430 - DNA, 25 bp, Artificial
  probe
  misc_feature (1)..(25): SEQ ID NO: 2399; WAN024DAQ; Start 78; Stop 102
aaaggataatcgctcaggagttcaa

SEQ ID NO: 324431 - DNA, 25 bp, Artificial
  probe
  misc_feature (1)..(25): SEQ ID NO: 2399; WAN024DAQ; Start 639; Stop 663
ccctggctatgatttcgctactaat

SEQ ID NO: 324432 - DNA, 25 bp, Artificial
  probe
  misc_feature (1)..(25): SEQ ID NO: 2399; WAN024DAQ; Start 290; Stop 314
attgtaagattaaaggtctcaacga

SEQ ID NO: 324433 - DNA, 25 bp, Artificial
  probe
  misc_feature (1)..(25): SEQ ID NO: 2399; WAN024DAQ; Start 294; Stop 318
taagattaaaggtctcaacgacagc

SEQ ID NO: 324434 - DNA, 25 bp, Artificial
  probe
  misc_feature (1)..(25): SEQ ID NO: 2399; WAN024DAQ; Start 291; Stop 315
ttgtaagattaaaggtctcaacgac

SEQ ID NO: 324435 - DNA, 25 bp, Artificial
  probe
  misc_feature (1)..(25): SEQ ID NO: 2399; WAN024DAQ; Start 527; Stop 551
tttcacaaacctccattatcaaagg

SEQ ID NO: 324436 - DNA, 25 bp, Artificial
  probe
  misc_feature (1)..(25): SEQ ID NO: 2399; WAN024DAQ; Start 569; Stop 593
ctatcgcagcagcatctatagtagc

SEQ ID NO: 324437 - DNA, 25 bp, Artificial
  probe
  misc_feature (1)..(25): SEQ ID NO: 2400; WAN024AZ9; Start 10; Stop 34
attactaatgctcttaatattgcgg

SEQ ID NO: 324438 - DNA, 25 bp, Artificial
  probe
  misc_feature (1)..(25): SEQ ID NO: 2400; WAN024AZ9; Start 89; Stop 113
tcgtagacggtaaatttgatggata

SEQ ID NO: 324439 - DNA, 25 bp, Artificial
  probe
  misc_feature (1)..(25): SEQ ID NO: 2400; WAN024AZ9; Start 88; Stop 112
atcgtagacggtaaatttgatggat

SEQ ID NO: 324440 - DNA, 25 bp, Artificial
  probe
  misc_feature (1)..(25): SEQ ID NO: 2400; WAN024AZ9; Start 87; Stop 111
tatcgtagacggtaaatttgatgga

SEQ ID NO: 324441 - DNA, 25 bp, Artificial
  probe
  misc_feature (1)..(25): SEQ ID NO: 2400; WAN024AZ9; Start 90; Stop 114
cgtagacggtaaatttgatggatat

SEQ ID NO: 324442 - DNA, 25 bp, Artificial
  probe
  misc_feature (1)..(25): SEQ ID NO: 2400; WAN024AZ9; Start 86; Stop 110
atatcgtagacggtaaatttgatgg

SEQ ID NO: 324443 - DNA, 25 bp, Artificial
  probe
  misc_feature (1)..(25): SEQ ID NO: 2400; WAN024AZ9; Start 77; Stop 101
atggtttagatatcgtagacggtaa

SEQ ID NO: 324444 - DNA, 25 bp, Artificial
  probe
  misc_feature (1)..(25): SEQ ID NO: 2400; WAN024AZ9; Start 78; Stop 102
tggtttagatatcgtagacggtaaa

SEQ ID NO: 324445 - DNA, 25 bp, Artificial
  probe
  misc_feature (1)..(25): SEQ ID NO: 2400; WAN024AZ9; Start 75; Stop 99
atatggtttagatatcgtagacggt

SEQ ID NO: 324446 - DNA, 25 bp, Artificial
  probe
  misc_feature (1)..(25): SEQ ID NO: 2400; WAN024AZ9; Start 73; Stop 97
gcatatggtttagatatcgtagacg

SEQ ID NO: 324447 - DNA, 25 bp, Artificial
  probe
  misc_feature (1)..(25): SEQ ID NO: 2400; WAN024AZ9; Start 76; Stop 100
tatggtttagatatcgtagacggta

SEQ ID NO: 324448 - DNA, 25 bp, Artificial
  probe
  misc_feature (1)..(25): SEQ ID NO: 2400; WAN024AZ9; Start 74; Stop 98
catatggtttagatatcgtagacgg

SEQ ID NO: 324449 - DNA, 25 bp, Artificial
  probe
  misc_feature (1)..(25): SEQ ID NO: 2400; WAN024AZ9; Start 37; Stop 61
actgttgctgaagttttctcattag

SEQ ID NO: 324450 - DNA, 25 bp, Artificial
  probe
  misc_feature (1)..(25): SEQ ID NO: 2400; WAN024AZ9; Start 38; Stop 62
ctgttgctgaagttttctcattagg

SEQ ID NO: 324451 - DNA, 25 bp, Artificial
  probe
  misc_feature (1)..(25): SEQ ID NO: 2400; WAN024AZ9; Start 79; Stop 103
ggtttagatatcgtagacggtaaat

SEQ ID NO: 324452 - DNA, 25 bp, Artificial
  probe
  misc_feature (1)..(25): SEQ ID NO: 2400; WAN024AZ9; Start 85; Stop 109
gatatcgtagacggtaaatttgatg

SEQ ID NO: 324453 - DNA, 25 bp, Artificial
  probe
  misc_feature (1)..(25): SEQ ID NO: 2400; WAN024AZ9; Start 39; Stop 63
tgttgctgaagttttctcattagga

SEQ ID NO: 324454 - DNA, 25 bp, Artificial
  probe
  misc_feature (1)..(25): SEQ ID NO: 2400; WAN024AZ9; Start 40; Stop 64
gttgctgaagttttctcattaggag

SEQ ID NO: 324455 - DNA, 25 bp, Artificial
  probe
  misc_feature (1)..(25): SEQ ID NO: 2400; WAN024AZ9; Start 84; Stop 108
agatatcgtagacggtaaatttgat

SEQ ID NO: 324456 - DNA, 25 bp, Artificial
  probe
  misc_feature (1)..(25): SEQ ID NO: 2400; WAN024AZ9; Start 72; Stop 96
tgcatatggtttagatatcgtagac

SEQ ID NO: 324457 - DNA, 25 bp, Artificial
  probe
  misc_feature (1)..(25): SEQ ID NO: 2400; WAN024AZ9; Start 41; Stop 65
ttgctgaagttttctcattaggagg

SEQ ID NO: 324458 - DNA, 25 bp, Artificial
  probe
  misc_feature (1)..(25): SEQ ID NO: 2400; WAN024AZ9; Start 36; Stop 60
tactgttgctgaagttttctcatta

SEQ ID NO: 324459 - DNA, 25 bp, Artificial
  probe
  misc_feature (1)..(25): SEQ ID NO: 2400; WAN024AZ9; Start 44; Stop 68
ctgaagttttctcattaggaggagc

SEQ ID NO: 324460 - DNA, 25 bp, Artificial
  probe
  misc_feature (1)..(25): SEQ ID NO: 2400; WAN024AZ9; Start 43; Stop 67
gctgaagttttctcattaggaggag

SEQ ID NO: 324461 - DNA, 25 bp, Artificial
  probe
  misc_feature (1)..(25): SEQ ID NO: 2400; WAN024AZ9; Start 91; Stop 115
gtagacggtaaatttgatggatatt

SEQ ID NO: 324462 - DNA, 25 bp, Artificial
  probe
  misc_feature (1)..(25): SEQ ID NO: 2400; WAN024AZ9; Start 83; Stop 107
tagatatcgtagacggtaaatttga

SEQ ID NO: 324463 - DNA, 25 bp, Artificial
  probe
  misc_feature (1)..(25): SEQ ID NO: 2400; WAN024AZ9; Start 49; Stop 73
gttttctcattaggaggagccattg

SEQ ID NO: 324464 - DNA, 25 bp, Artificial
  probe
  misc_feature (1)..(25): SEQ ID NO: 2400; WAN024AZ9; Start 48; Stop 72
agttttctcattaggaggagccatt

SEQ ID NO: 324465 - DNA, 25 bp, Artificial
  probe
  misc_feature (1)..(25): SEQ ID NO: 2400; WAN024AZ9; Start 47; Stop 71
aagttttctcattaggaggagccat

SEQ ID NO: 324466 - DNA, 25 bp, Artificial
  probe
  misc_feature (1)..(25): SEQ ID NO: 2400; WAN024AZ9; Start 42; Stop 66
tgctgaagttttctcattaggagga

SEQ ID NO: 324467 - DNA, 25 bp, Artificial
  probe
  misc_feature (1)..(25): SEQ ID NO: 2400; WAN024AZ9; Start 71; Stop 95
ttgcatatggtttagatatcgtaga

SEQ ID NO: 324468 - DNA, 25 bp, Artificial
  probe
  misc_feature (1)..(25): SEQ ID NO: 2400; WAN024AZ9; Start 46; Stop 70
gaagttttctcattaggaggagcca

SEQ ID NO: 324469 - DNA, 25 bp, Artificial
  probe
  misc_feature (1)..(25): SEQ ID NO: 2400; WAN024AZ9; Start 45; Stop 69
tgaagttttctcattaggaggagcc

SEQ ID NO: 324470 - DNA, 25 bp, Artificial
  probe
  misc_feature (1)..(25): SEQ ID NO: 2401; WAN024GIE; Start 159; Stop 183
ttattatctggagcacattcttccg

SEQ ID NO: 324471 - DNA, 25 bp, Artificial
  probe
  misc_feature (1)..(25): SEQ ID NO: 2401; WAN024GIE; Start 397; Stop 421
aagattgaactaacttgctttggat

SEQ ID NO: 324472 - DNA, 25 bp, Artificial
  probe
  misc_feature (1)..(25): SEQ ID NO: 2401; WAN024GIE; Start 398; Stop 422
agattgaactaacttgctttggata

SEQ ID NO: 324473 - DNA, 25 bp, Artificial
  probe
  misc_feature (1)..(25): SEQ ID NO: 2401; WAN024GIE; Start 408; Stop 432
aacttgctttggatataaccttcaa

SEQ ID NO: 324474 - DNA, 25 bp, Artificial
  probe
  misc_feature (1)..(25): SEQ ID NO: 2401; WAN024GIE; Start 407; Stop 431
taacttgctttggatataaccttca

SEQ ID NO: 324475 - DNA, 25 bp, Artificial
  probe
  misc_feature (1)..(25): SEQ ID NO: 2401; WAN024GIE; Start 405; Stop 429
actaacttgctttggatataacctt

SEQ ID NO: 324476 - DNA, 25 bp, Artificial
  probe
  misc_feature (1)..(25): SEQ ID NO: 2401; WAN024GIE; Start 404; Stop 428
aactaacttgctttggatataacct

SEQ ID NO: 324477 - DNA, 25 bp, Artificial
  probe
  misc_feature (1)..(25): SEQ ID NO: 2401; WAN024GIE; Start 403; Stop 427
gaactaacttgctttggatataacc

SEQ ID NO: 324478 - DNA, 25 bp, Artificial
  probe
  misc_feature (1)..(25): SEQ ID NO: 2401; WAN024GIE; Start 388; Stop 412
ggtcttcacaagattgaactaactt

SEQ ID NO: 324479 - DNA, 25 bp, Artificial
  probe
  misc_feature (1)..(25): SEQ ID NO: 2401; WAN024GIE; Start 406; Stop 430
ctaacttgctttggatataaccttc

SEQ ID NO: 324480 - DNA, 25 bp, Artificial
  probe
  misc_feature (1)..(25): SEQ ID NO: 2401; WAN024GIE; Start 399; Stop 423
gattgaactaacttgctttggatat

SEQ ID NO: 324481 - DNA, 25 bp, Artificial
  probe
  misc_feature (1)..(25): SEQ ID NO: 2401; WAN024GIE; Start 402; Stop 426
tgaactaacttgctttggatataac

SEQ ID NO: 324482 - DNA, 25 bp, Artificial
  probe
  misc_feature (1)..(25): SEQ ID NO: 2401; WAN024GIE; Start 158; Stop 182
tttattatctggagcacattcttcc

SEQ ID NO: 324483 - DNA, 25 bp, Artificial
  probe
  misc_feature (1)..(25): SEQ ID NO: 2401; WAN024GIE; Start 157; Stop 181
atttattatctggagcacattcttc

SEQ ID NO: 324484 - DNA, 25 bp, Artificial
  probe
  misc_feature (1)..(25): SEQ ID NO: 2401; WAN024GIE; Start 156; Stop 180
gatttattatctggagcacattctt

SEQ ID NO: 324485 - DNA, 25 bp, Artificial
  probe
  misc_feature (1)..(25): SEQ ID NO: 2401; WAN024GIE; Start 391; Stop 415
cttcacaagattgaactaacttgct

SEQ ID NO: 324486 - DNA, 25 bp, Artificial
  probe
  misc_feature (1)..(25): SEQ ID NO: 2401; WAN024GIE; Start 390; Stop 414
tcttcacaagattgaactaacttgc

SEQ ID NO: 324487 - DNA, 25 bp, Artificial
  probe
  misc_feature (1)..(25): SEQ ID NO: 2401; WAN024GIE; Start 392; Stop 416
ttcacaagattgaactaacttgctt

SEQ ID NO: 324488 - DNA, 25 bp, Artificial
  probe
  misc_feature (1)..(25): SEQ ID NO: 2401; WAN024GIE; Start 401; Stop 425
ttgaactaacttgctttggatataa

SEQ ID NO: 324489 - DNA, 25 bp, Artificial
  probe
  misc_feature (1)..(25): SEQ ID NO: 2401; WAN024GIE; Start 151; Stop 175
gatgagatttattatctggagcaca

SEQ ID NO: 324490 - DNA, 25 bp, Artificial
  probe
  misc_feature (1)..(25): SEQ ID NO: 2401; WAN024GIE; Start 389; Stop 413
gtcttcacaagattgaactaacttg

SEQ ID NO: 324491 - DNA, 25 bp, Artificial
  probe
  misc_feature (1)..(25): SEQ ID NO: 2401; WAN024GIE; Start 150; Stop 174
agatgagatttattatctggagcac

SEQ ID NO: 324492 - DNA, 25 bp, Artificial
  probe
  misc_feature (1)..(25): SEQ ID NO: 2401; WAN024GIE; Start 409; Stop 433
acttgctttggatataaccttcaaa

SEQ ID NO: 324493 - DNA, 25 bp, Artificial
  probe
  misc_feature (1)..(25): SEQ ID NO: 2401; WAN024GIE; Start 400; Stop 424
attgaactaacttgctttggatata

SEQ ID NO: 324494 - DNA, 25 bp, Artificial
  probe
  misc_feature (1)..(25): SEQ ID NO: 2401; WAN024GIE; Start 153; Stop 177
tgagatttattatctggagcacatt

SEQ ID NO: 324495 - DNA, 25 bp, Artificial
  probe
  misc_feature (1)..(25): SEQ ID NO: 2401; WAN024GIE; Start 152; Stop 176
atgagatttattatctggagcacat

SEQ ID NO: 324496 - DNA, 25 bp, Artificial
  probe
  misc_feature (1)..(25): SEQ ID NO: 2401; WAN024GIE; Start 155; Stop 179
agatttattatctggagcacattct

SEQ ID NO: 324497 - DNA, 25 bp, Artificial
  probe
  misc_feature (1)..(25): SEQ ID NO: 2401; WAN024GIE; Start 160; Stop 184
tattatctggagcacattcttccgg

SEQ ID NO: 324498 - DNA, 25 bp, Artificial
  probe
  misc_feature (1)..(25): SEQ ID NO: 2401; WAN024GIE; Start 154; Stop 178
gagatttattatctggagcacattc

SEQ ID NO: 324499 - DNA, 25 bp, Artificial
  probe
  misc_feature (1)..(25): SEQ ID NO: 2401; WAN024GIE; Start 149; Stop 173
aagatgagatttattatctggagca

SEQ ID NO: 324500 - DNA, 25 bp, Artificial
  probe
  misc_feature (1)..(25): SEQ ID NO: 2401; WAN024GIE; Start 148; Stop 172
gaagatgagatttattatctggagc

SEQ ID NO: 324501 - DNA, 25 bp, Artificial
  probe
  misc_feature (1)..(25): SEQ ID NO: 2401; WAN024GIE; Start 396; Stop 420
caagattgaactaacttgctttgga

SEQ ID NO: 324502 - DNA, 25 bp, Artificial
  probe
  misc_feature (1)..(25): SEQ ID NO: 2401; WAN024GIE; Start 395; Stop 419
acaagattgaactaacttgctttgg

SEQ ID NO: 324503 - DNA, 25 bp, Artificial
  probe
  misc_feature (1)..(25): SEQ ID NO: 2402; WAN024C48; Start 296; Stop 320
ccatctggcttatagaggttgtaat

SEQ ID NO: 324504 - DNA, 25 bp, Artificial
  probe
  misc_feature (1)..(25): SEQ ID NO: 2402; WAN024C48; Start 288; Stop 312
gataggttccatctggcttatagag

SEQ ID NO: 324505 - DNA, 25 bp, Artificial
  probe
  misc_feature (1)..(25): SEQ ID NO: 2402; WAN024C48; Start 295; Stop 319
tccatctggcttatagaggttgtaa

SEQ ID NO: 324506 - DNA, 25 bp, Artificial
  probe
  misc_feature (1)..(25): SEQ ID NO: 2402; WAN024C48; Start 294; Stop 318
ttccatctggcttatagaggttgta

SEQ ID NO: 324507 - DNA, 25 bp, Artificial
  probe
  misc_feature (1)..(25): SEQ ID NO: 2402; WAN024C48; Start 289; Stop 313
ataggttccatctggcttatagagg

SEQ ID NO: 324508 - DNA, 25 bp, Artificial
  probe
  misc_feature (1)..(25): SEQ ID NO: 2402; WAN024C48; Start 53; Stop 77
actgtgtaaccacgagattcaatat

SEQ ID NO: 324509 - DNA, 25 bp, Artificial
  probe
  misc_feature (1)..(25): SEQ ID NO: 2402; WAN024C48; Start 52; Stop 76
aactgtgtaaccacgagattcaata

SEQ ID NO: 324510 - DNA, 25 bp, Artificial
  probe
  misc_feature (1)..(25): SEQ ID NO: 2402; WAN024C48; Start 41; Stop 65
ttgtagatagcaactgtgtaaccac

SEQ ID NO: 324511 - DNA, 25 bp, Artificial
  probe
  misc_feature (1)..(25): SEQ ID NO: 2402; WAN024C48; Start 299; Stop 323
tctggcttatagaggttgtaataac

SEQ ID NO: 324512 - DNA, 25 bp, Artificial
  probe
  misc_feature (1)..(25): SEQ ID NO: 2402; WAN024C48; Start 293; Stop 317
gttccatctggcttatagaggttgt

SEQ ID NO: 324513 - DNA, 25 bp, Artificial
  probe
  misc_feature (1)..(25): SEQ ID NO: 2402; WAN024C48; Start 290; Stop 314
taggttccatctggcttatagaggt

SEQ ID NO: 324514 - DNA, 25 bp, Artificial
  probe
  misc_feature (1)..(25): SEQ ID NO: 2402; WAN024C48; Start 297; Stop 321
catctggcttatagaggttgtaata

SEQ ID NO: 324515 - DNA, 25 bp, Artificial
  probe
  misc_feature (1)..(25): SEQ ID NO: 2402; WAN024C48; Start 358; Stop 382
atattggtctccagtgatatagcca

SEQ ID NO: 324516 - DNA, 25 bp, Artificial
  probe
  misc_feature (1)..(25): SEQ ID NO: 2402; WAN024C48; Start 51; Stop 75
caactgtgtaaccacgagattcaat

SEQ ID NO: 324517 - DNA, 25 bp, Artificial
  probe
  misc_feature (1)..(25): SEQ ID NO: 2402; WAN024C48; Start 357; Stop 381
tatattggtctccagtgatatagcc

SEQ ID NO: 324518 - DNA, 25 bp, Artificial
  probe
  misc_feature (1)..(25): SEQ ID NO: 2402; WAN024C48; Start 349; Stop 373
ttcaaggatatattggtctccagtg

SEQ ID NO: 324519 - DNA, 25 bp, Artificial
  probe
  misc_feature (1)..(25): SEQ ID NO: 2402; WAN024C48; Start 348; Stop 372
gttcaaggatatattggtctccagt

SEQ ID NO: 324520 - DNA, 25 bp, Artificial
  probe
  misc_feature (1)..(25): SEQ ID NO: 2402; WAN024C48; Start 351; Stop 375
caaggatatattggtctccagtgat

SEQ ID NO: 324521 - DNA, 25 bp, Artificial
  probe
  misc_feature (1)..(25): SEQ ID NO: 2402; WAN024C48; Start 274; Stop 298
gttaagggtaaagagataggttcca

SEQ ID NO: 324522 - DNA, 25 bp, Artificial
  probe
  misc_feature (1)..(25): SEQ ID NO: 2402; WAN024C48; Start 350; Stop 374
tcaaggatatattggtctccagtga

SEQ ID NO: 324523 - DNA, 25 bp, Artificial
  probe
  misc_feature (1)..(25): SEQ ID NO: 2402; WAN024C48; Start 359; Stop 383
tattggtctccagtgatatagccac

SEQ ID NO: 324524 - DNA, 25 bp, Artificial
  probe
  misc_feature (1)..(25): SEQ ID NO: 2402; WAN024C48; Start 273; Stop 297
agttaagggtaaagagataggttcc

SEQ ID NO: 324525 - DNA, 25 bp, Artificial
  probe
  misc_feature (1)..(25): SEQ ID NO: 2402; WAN024C48; Start 347; Stop 371
cgttcaaggatatattggtctccag

SEQ ID NO: 324526 - DNA, 25 bp, Artificial
  probe
  misc_feature (1)..(25): SEQ ID NO: 2402; WAN024C48; Start 287; Stop 311
agataggttccatctggcttataga

SEQ ID NO: 324527 - DNA, 25 bp, Artificial
  probe
  misc_feature (1)..(25): SEQ ID NO: 2402; WAN024C48; Start 286; Stop 310
gagataggttccatctggcttatag

SEQ ID NO: 324528 - DNA, 25 bp, Artificial
  probe
  misc_feature (1)..(25): SEQ ID NO: 2402; WAN024C48; Start 285; Stop 309
agagataggttccatctggcttata

SEQ ID NO: 324529 - DNA, 25 bp, Artificial
  probe
  misc_feature (1)..(25): SEQ ID NO: 2402; WAN024C48; Start 344; Stop 368
acacgttcaaggatatattggtctc

SEQ ID NO: 324530 - DNA, 25 bp, Artificial
  probe
  misc_feature (1)..(25): SEQ ID NO: 2402; WAN024C48; Start 292; Stop 316
ggttccatctggcttatagaggttg

SEQ ID NO: 324531 - DNA, 25 bp, Artificial
  probe
  misc_feature (1)..(25): SEQ ID NO: 2402; WAN024C48; Start 276; Stop 300
taagggtaaagagataggttccatc

SEQ ID NO: 324532 - DNA, 25 bp, Artificial
  probe
  misc_feature (1)..(25): SEQ ID NO: 2402; WAN024C48; Start 54; Stop 78
ctgtgtaaccacgagattcaatatt

SEQ ID NO: 324533 - DNA, 25 bp, Artificial
  probe
  misc_feature (1)..(25): SEQ ID NO: 2402; WAN024C48; Start 284; Stop 308
aagagataggttccatctggcttat

SEQ ID NO: 324534 - DNA, 25 bp, Artificial
  probe
  misc_feature (1)..(25): SEQ ID NO: 2402; WAN024C48; Start 44; Stop 68
tagatagcaactgtgtaaccacgag

SEQ ID NO: 324535 - DNA, 25 bp, Artificial
  probe
  misc_feature (1)..(25): SEQ ID NO: 2402; WAN024C48; Start 291; Stop 315
aggttccatctggcttatagaggtt

SEQ ID NO: 324536 - DNA, 25 bp, Artificial
  probe
  misc_feature (1)..(25): SEQ ID NO: 2403; WAN024CER; Start 130; Stop 154
ccgataagtaaaccagtagtcacat

SEQ ID NO: 324537 - DNA, 25 bp, Artificial
  probe
  misc_feature (1)..(25): SEQ ID NO: 2403; WAN024CER; Start 167; Stop 191
aaccagtaatgaaaccagcaaatac

SEQ ID NO: 324538 - DNA, 25 bp, Artificial
  probe
  misc_feature (1)..(25): SEQ ID NO: 2403; WAN024CER; Start 134; Stop 158
taagtaaaccagtagtcacatctcc

SEQ ID NO: 324539 - DNA, 25 bp, Artificial
  probe
  misc_feature (1)..(25): SEQ ID NO: 2403; WAN024CER; Start 170; Stop 194
cagtaatgaaaccagcaaatacagg

SEQ ID NO: 324540 - DNA, 25 bp, Artificial
  probe
  misc_feature (1)..(25): SEQ ID NO: 2403; WAN024CER; Start 169; Stop 193
ccagtaatgaaaccagcaaatacag

SEQ ID NO: 324541 - DNA, 25 bp, Artificial
  probe
  misc_feature (1)..(25): SEQ ID NO: 2403; WAN024CER; Start 166; Stop 190
aaaccagtaatgaaaccagcaaata

SEQ ID NO: 324542 - DNA, 25 bp, Artificial
  probe
  misc_feature (1)..(25): SEQ ID NO: 2403; WAN024CER; Start 165; Stop 189
taaaccagtaatgaaaccagcaaat

SEQ ID NO: 324543 - DNA, 25 bp, Artificial
  probe
  misc_feature (1)..(25): SEQ ID NO: 2403; WAN024CER; Start 164; Stop 188
ttaaaccagtaatgaaaccagcaaa

SEQ ID NO: 324544 - DNA, 25 bp, Artificial
  probe
  misc_feature (1)..(25): SEQ ID NO: 2403; WAN024CER; Start 125; Stop 149
taccaccgataagtaaaccagtagt

SEQ ID NO: 324545 - DNA, 25 bp, Artificial
  probe
  misc_feature (1)..(25): SEQ ID NO: 2403; WAN024CER; Start 128; Stop 152
caccgataagtaaaccagtagtcac

SEQ ID NO: 324546 - DNA, 25 bp, Artificial
  probe
  misc_feature (1)..(25): SEQ ID NO: 2403; WAN024CER; Start 168; Stop 192
accagtaatgaaaccagcaaataca

SEQ ID NO: 324547 - DNA, 25 bp, Artificial
  probe
  misc_feature (1)..(25): SEQ ID NO: 2403; WAN024CER; Start 131; Stop 155
cgataagtaaaccagtagtcacatc

SEQ ID NO: 324548 - DNA, 25 bp, Artificial
  probe
  misc_feature (1)..(25): SEQ ID NO: 2403; WAN024CER; Start 162; Stop 186
gattaaaccagtaatgaaaccagca

SEQ ID NO: 324549 - DNA, 25 bp, Artificial
  probe
  misc_feature (1)..(25): SEQ ID NO: 2403; WAN024CER; Start 161; Stop 185
tgattaaaccagtaatgaaaccagc

SEQ ID NO: 324550 - DNA, 25 bp, Artificial
  probe
  misc_feature (1)..(25): SEQ ID NO: 2403; WAN024CER; Start 129; Stop 153
accgataagtaaaccagtagtcaca

SEQ ID NO: 324551 - DNA, 25 bp, Artificial
  probe
  misc_feature (1)..(25): SEQ ID NO: 2403; WAN024CER; Start 171; Stop 195
agtaatgaaaccagcaaatacaggg

SEQ ID NO: 324552 - DNA, 25 bp, Artificial
  probe
  misc_feature (1)..(25): SEQ ID NO: 2403; WAN024CER; Start 163; Stop 187
attaaaccagtaatgaaaccagcaa

SEQ ID NO: 324553 - DNA, 25 bp, Artificial
  probe
  misc_feature (1)..(25): SEQ ID NO: 2403; WAN024CER; Start 135; Stop 159
aagtaaaccagtagtcacatctccc

SEQ ID NO: 324554 - DNA, 25 bp, Artificial
  probe
  misc_feature (1)..(25): SEQ ID NO: 2403; WAN024CER; Start 137; Stop 161
gtaaaccagtagtcacatctcccat

SEQ ID NO: 324555 - DNA, 25 bp, Artificial
  probe
  misc_feature (1)..(25): SEQ ID NO: 2403; WAN024CER; Start 127; Stop 151
ccaccgataagtaaaccagtagtca

SEQ ID NO: 324556 - DNA, 25 bp, Artificial
  probe
  misc_feature (1)..(25): SEQ ID NO: 2403; WAN024CER; Start 126; Stop 150
accaccgataagtaaaccagtagtc

SEQ ID NO: 324557 - DNA, 25 bp, Artificial
  probe
  misc_feature (1)..(25): SEQ ID NO: 2403; WAN024CER; Start 14; Stop 38
catcaattccttgtgaaacagagaa

SEQ ID NO: 324558 - DNA, 25 bp, Artificial
  probe
  misc_feature (1)..(25): SEQ ID NO: 2403; WAN024CER; Start 15; Stop 39
atcaattccttgtgaaacagagaag

SEQ ID NO: 324559 - DNA, 25 bp, Artificial
  probe
  misc_feature (1)..(25): SEQ ID NO: 2403; WAN024CER; Start 151; Stop 175
acatctcccatgattaaaccagtaa

SEQ ID NO: 324560 - DNA, 25 bp, Artificial
  probe
  misc_feature (1)..(25): SEQ ID NO: 2403; WAN024CER; Start 150; Stop 174
cacatctcccatgattaaaccagta

SEQ ID NO: 324561 - DNA, 25 bp, Artificial
  probe
  misc_feature (1)..(25): SEQ ID NO: 2403; WAN024CER; Start 154; Stop 178
tctcccatgattaaaccagtaatga

SEQ ID NO: 324562 - DNA, 25 bp, Artificial
  probe
  misc_feature (1)..(25): SEQ ID NO: 2403; WAN024CER; Start 133; Stop 157
ataagtaaaccagtagtcacatctc

SEQ ID NO: 324563 - DNA, 25 bp, Artificial
  probe
  misc_feature (1)..(25): SEQ ID NO: 2403; WAN024CER; Start 146; Stop 170
tagtcacatctcccatgattaaacc

SEQ ID NO: 324564 - DNA, 25 bp, Artificial
  probe
  misc_feature (1)..(25): SEQ ID NO: 2403; WAN024CER; Start 143; Stop 167
cagtagtcacatctcccatgattaa

SEQ ID NO: 324565 - DNA, 25 bp, Artificial
  probe
  misc_feature (1)..(25): SEQ ID NO: 2403; WAN024CER; Start 132; Stop 156
gataagtaaaccagtagtcacatct

SEQ ID NO: 324566 - DNA, 25 bp, Artificial
  probe
  misc_feature (1)..(25): SEQ ID NO: 2403; WAN024CER; Start 155; Stop 179
ctcccatgattaaaccagtaatgaa

SEQ ID NO: 324567 - DNA, 25 bp, Artificial
  probe
  misc_feature (1)..(25): SEQ ID NO: 2403; WAN024CER; Start 145; Stop 169
gtagtcacatctcccatgattaaac

SEQ ID NO: 324568 - DNA, 25 bp, Artificial
  probe
  misc_feature (1)..(25): SEQ ID NO: 2403; WAN024CER; Start 144; Stop 168
agtagtcacatctcccatgattaaa

SEQ ID NO: 324569 - DNA, 25 bp, Artificial
  probe
  misc_feature (1)..(25): SEQ ID NO: 2404; WAN024F4A; Start 496; Stop 520
ctccataatcaggctatctatctcc

SEQ ID NO: 324570 - DNA, 25 bp, Artificial
  probe
  misc_feature (1)..(25): SEQ ID NO: 2404; WAN024F4A; Start 497; Stop 521
tccataatcaggctatctatctcct

SEQ ID NO: 324571 - DNA, 25 bp, Artificial
  probe
  misc_feature (1)..(25): SEQ ID NO: 2404; WAN024F4A; Start 501; Stop 525
taatcaggctatctatctcctcctt

SEQ ID NO: 324572 - DNA, 25 bp, Artificial
  probe
  misc_feature (1)..(25): SEQ ID NO: 2404; WAN024F4A; Start 499; Stop 523
cataatcaggctatctatctcctcc

SEQ ID NO: 324573 - DNA, 25 bp, Artificial
  probe
  misc_feature (1)..(25): SEQ ID NO: 2404; WAN024F4A; Start 498; Stop 522
ccataatcaggctatctatctcctc

SEQ ID NO: 324574 - DNA, 25 bp, Artificial
  probe
  misc_feature (1)..(25): SEQ ID NO: 2404; WAN024F4A; Start 495; Stop 519
cctccataatcaggctatctatctc

SEQ ID NO: 324575 - DNA, 25 bp, Artificial
  probe
  misc_feature (1)..(25): SEQ ID NO: 2404; WAN024F4A; Start 502; Stop 526
aatcaggctatctatctcctccttc

SEQ ID NO: 324576 - DNA, 25 bp, Artificial
  probe
  misc_feature (1)..(25): SEQ ID NO: 2404; WAN024F4A; Start 500; Stop 524
ataatcaggctatctatctcctcct

SEQ ID NO: 324577 - DNA, 25 bp, Artificial
  probe
  misc_feature (1)..(25): SEQ ID NO: 2404; WAN024F4A; Start 503; Stop 527
atcaggctatctatctcctccttca

SEQ ID NO: 324578 - DNA, 25 bp, Artificial
  probe
  misc_feature (1)..(25): SEQ ID NO: 2404; WAN024F4A; Start 115; Stop 139
cctcaagcaacggtttctatctata

SEQ ID NO: 324579 - DNA, 25 bp, Artificial
  probe
  misc_feature (1)..(25): SEQ ID NO: 2404; WAN024F4A; Start 504; Stop 528
tcaggctatctatctcctccttcaa

SEQ ID NO: 324580 - DNA, 25 bp, Artificial
  probe
  misc_feature (1)..(25): SEQ ID NO: 2404; WAN024F4A; Start 117; Stop 141
tcaagcaacggtttctatctatact

SEQ ID NO: 324581 - DNA, 25 bp, Artificial
  probe
  misc_feature (1)..(25): SEQ ID NO: 2404; WAN024F4A; Start 121; Stop 145
gcaacggtttctatctatacttctg

SEQ ID NO: 324582 - DNA, 25 bp, Artificial
  probe
  misc_feature (1)..(25): SEQ ID NO: 2404; WAN024F4A; Start 116; Stop 140
ctcaagcaacggtttctatctatac

SEQ ID NO: 324583 - DNA, 25 bp, Artificial
  probe
  misc_feature (1)..(25): SEQ ID NO: 2404; WAN024F4A; Start 120; Stop 144
agcaacggtttctatctatacttct

SEQ ID NO: 324584 - DNA, 25 bp, Artificial
  probe
  misc_feature (1)..(25): SEQ ID NO: 2404; WAN024F4A; Start 548; Stop 572
aaattgtgattgatgcctttaccag

SEQ ID NO: 324585 - DNA, 25 bp, Artificial
  probe
  misc_feature (1)..(25): SEQ ID NO: 2404; WAN024F4A; Start 81; Stop 105
caagaatccctatatccgctacttt

SEQ ID NO: 324586 - DNA, 25 bp, Artificial
  probe
  misc_feature (1)..(25): SEQ ID NO: 2404; WAN024F4A; Start 123; Stop 147
aacggtttctatctatacttctgga

SEQ ID NO: 324587 - DNA, 25 bp, Artificial
  probe
  misc_feature (1)..(25): SEQ ID NO: 2404; WAN024F4A; Start 122; Stop 146
caacggtttctatctatacttctgg

SEQ ID NO: 324588 - DNA, 25 bp, Artificial
  probe
  misc_feature (1)..(25): SEQ ID NO: 2404; WAN024F4A; Start 118; Stop 142
caagcaacggtttctatctatactt

SEQ ID NO: 324589 - DNA, 25 bp, Artificial
  probe
  misc_feature (1)..(25): SEQ ID NO: 2404; WAN024F4A; Start 549; Stop 573
aattgtgattgatgcctttaccagt

SEQ ID NO: 324590 - DNA, 25 bp, Artificial
  probe
  misc_feature (1)..(25): SEQ ID NO: 2404; WAN024F4A; Start 124; Stop 148
acggtttctatctatacttctggaa

SEQ ID NO: 324591 - DNA, 25 bp, Artificial
  probe
  misc_feature (1)..(25): SEQ ID NO: 2404; WAN024F4A; Start 119; Stop 143
aagcaacggtttctatctatacttc

SEQ ID NO: 324592 - DNA, 25 bp, Artificial
  probe
  misc_feature (1)..(25): SEQ ID NO: 2404; WAN024F4A; Start 550; Stop 574
attgtgattgatgcctttaccagtg

SEQ ID NO: 324593 - DNA, 25 bp, Artificial
  probe
  misc_feature (1)..(25): SEQ ID NO: 2404; WAN024F4A; Start 608; Stop 632
ccaatcgtttcagcaatcctatcag

SEQ ID NO: 324594 - DNA, 25 bp, Artificial
  probe
  misc_feature (1)..(25): SEQ ID NO: 2404; WAN024F4A; Start 74; Stop 98
ctcctagcaagaatccctatatccg

SEQ ID NO: 324595 - DNA, 25 bp, Artificial
  probe
  misc_feature (1)..(25): SEQ ID NO: 2404; WAN024F4A; Start 555; Stop 579
gattgatgcctttaccagtgctaaa

SEQ ID NO: 324596 - DNA, 25 bp, Artificial
  probe
  misc_feature (1)..(25): SEQ ID NO: 2404; WAN024F4A; Start 349; Stop 373
gattctaagactctgaccgaccaaa

SEQ ID NO: 324597 - DNA, 25 bp, Artificial
  probe
  misc_feature (1)..(25): SEQ ID NO: 2404; WAN024F4A; Start 348; Stop 372
ggattctaagactctgaccgaccaa

SEQ ID NO: 324598 - DNA, 25 bp, Artificial
  probe
  misc_feature (1)..(25): SEQ ID NO: 2404; WAN024F4A; Start 80; Stop 104
gcaagaatccctatatccgctactt

SEQ ID NO: 324599 - DNA, 25 bp, Artificial
  probe
  misc_feature (1)..(25): SEQ ID NO: 2404; WAN024F4A; Start 494; Stop 518
ccctccataatcaggctatctatct

SEQ ID NO: 324600 - DNA, 25 bp, Artificial
  probe
  misc_feature (1)..(25): SEQ ID NO: 2404; WAN024F4A; Start 554; Stop 578
tgattgatgcctttaccagtgctaa

SEQ ID NO: 324601 - DNA, 25 bp, Artificial
  probe
  misc_feature (1)..(25): SEQ ID NO: 2404; WAN024F4A; Start 231; Stop 255
tcttcctttaattgggacagatgag

SEQ ID NO: 324602 - DNA, 25 bp, Artificial
  probe
  misc_feature (1)..(25): SEQ ID NO: 2405; WAN024EU4; Start 228; Stop 252
ggcaattacaagttctatgacgaat

SEQ ID NO: 324603 - DNA, 25 bp, Artificial
  probe
  misc_feature (1)..(25): SEQ ID NO: 2405; WAN024EU4; Start 221; Stop 245
ttgaagcggcaattacaagttctat

SEQ ID NO: 324604 - DNA, 25 bp, Artificial
  probe
  misc_feature (1)..(25): SEQ ID NO: 2405; WAN024EU4; Start 227; Stop 251
cggcaattacaagttctatgacgaa

SEQ ID NO: 324605 - DNA, 25 bp, Artificial
  probe
  misc_feature (1)..(25): SEQ ID NO: 2405; WAN024EU4; Start 223; Stop 247
gaagcggcaattacaagttctatga

SEQ ID NO: 324606 - DNA, 25 bp, Artificial
  probe
  misc_feature (1)..(25): SEQ ID NO: 2405; WAN024EU4; Start 224; Stop 248
aagcggcaattacaagttctatgac

SEQ ID NO: 324607 - DNA, 25 bp, Artificial
  probe
  misc_feature (1)..(25): SEQ ID NO: 2405; WAN024EU4; Start 222; Stop 246
tgaagcggcaattacaagttctatg

SEQ ID NO: 324608 - DNA, 25 bp, Artificial
  probe
  misc_feature (1)..(25): SEQ ID NO: 2405; WAN024EU4; Start 229; Stop 253
gcaattacaagttctatgacgaatt

SEQ ID NO: 324609 - DNA, 25 bp, Artificial
  probe
  misc_feature (1)..(25): SEQ ID NO: 2405; WAN024EU4; Start 59; Stop 83
tccgtggctataataaagtagaagt

SEQ ID NO: 324610 - DNA, 25 bp, Artificial
  probe
  misc_feature (1)..(25): SEQ ID NO: 2405; WAN024EU4; Start 58; Stop 82
gtccgtggctataataaagtagaag

SEQ ID NO: 324611 - DNA, 25 bp, Artificial
  probe
  misc_feature (1)..(25): SEQ ID NO: 2405; WAN024EU4; Start 262; Stop 286
ttgaaacgcctgaatagattggaaa

SEQ ID NO: 324612 - DNA, 25 bp, Artificial
  probe
  misc_feature (1)..(25): SEQ ID NO: 2405; WAN024EU4; Start 261; Stop 285
tttgaaacgcctgaatagattggaa

SEQ ID NO: 324613 - DNA, 25 bp, Artificial
  probe
  misc_feature (1)..(25): SEQ ID NO: 2405; WAN024EU4; Start 60; Stop 84
ccgtggctataataaagtagaagtt

SEQ ID NO: 324614 - DNA, 25 bp, Artificial
  probe
  misc_feature (1)..(25): SEQ ID NO: 2405; WAN024EU4; Start 155; Stop 179
aaattgcggatttgaaggaagaatt

SEQ ID NO: 324615 - DNA, 25 bp, Artificial
  probe
  misc_feature (1)..(25): SEQ ID NO: 2405; WAN024EU4; Start 156; Stop 180
aattgcggatttgaaggaagaatta

SEQ ID NO: 324616 - DNA, 25 bp, Artificial
  probe
  misc_feature (1)..(25): SEQ ID NO: 2405; WAN024EU4; Start 154; Stop 178
gaaattgcggatttgaaggaagaat

SEQ ID NO: 324617 - DNA, 25 bp, Artificial
  probe
  misc_feature (1)..(25): SEQ ID NO: 2405; WAN024EU4; Start 106; Stop 130
atcaaggactatgaaacctatgctg

SEQ ID NO: 324618 - DNA, 25 bp, Artificial
  probe
  misc_feature (1)..(25): SEQ ID NO: 2405; WAN024EU4; Start 61; Stop 85
cgtggctataataaagtagaagttg

SEQ ID NO: 324619 - DNA, 25 bp, Artificial
  probe
  misc_feature (1)..(25): SEQ ID NO: 2405; WAN024EU4; Start 226; Stop 250
gcggcaattacaagttctatgacga

SEQ ID NO: 324620 - DNA, 25 bp, Artificial
  probe
  misc_feature (1)..(25): SEQ ID NO: 2405; WAN024EU4; Start 225; Stop 249
agcggcaattacaagttctatgacg

SEQ ID NO: 324621 - DNA, 25 bp, Artificial
  probe
  misc_feature (1)..(25): SEQ ID NO: 2405; WAN024EU4; Start 64; Stop 88
ggctataataaagtagaagttgacg

SEQ ID NO: 324622 - DNA, 25 bp, Artificial
  probe
  misc_feature (1)..(25): SEQ ID NO: 2405; WAN024EU4; Start 186; Stop 210
taaaccgaaaccttcaccagttcaa

SEQ ID NO: 324623 - DNA, 25 bp, Artificial
  probe
  misc_feature (1)..(25): SEQ ID NO: 2405; WAN024EU4; Start 153; Stop 177
ggaaattgcggatttgaaggaagaa

SEQ ID NO: 324624 - DNA, 25 bp, Artificial
  probe
  misc_feature (1)..(25): SEQ ID NO: 2405; WAN024EU4; Start 136; Stop 160
gtcaagtcacttcgtcaggaaattg

SEQ ID NO: 324625 - DNA, 25 bp, Artificial
  probe
  misc_feature (1)..(25): SEQ ID NO: 2405; WAN024EU4; Start 176; Stop 200
aattaactcgtaaaccgaaaccttc

SEQ ID NO: 324626 - DNA, 25 bp, Artificial
  probe
  misc_feature (1)..(25): SEQ ID NO: 2405; WAN024EU4; Start 175; Stop 199
gaattaactcgtaaaccgaaacctt

SEQ ID NO: 324627 - DNA, 25 bp, Artificial
  probe
  misc_feature (1)..(25): SEQ ID NO: 2405; WAN024EU4; Start 173; Stop 197
aagaattaactcgtaaaccgaaacc

SEQ ID NO: 324628 - DNA, 25 bp, Artificial
  probe
  misc_feature (1)..(25): SEQ ID NO: 2405; WAN024EU4; Start 170; Stop 194
aggaagaattaactcgtaaaccgaa

SEQ ID NO: 324629 - DNA, 25 bp, Artificial
  probe
  misc_feature (1)..(25): SEQ ID NO: 2405; WAN024EU4; Start 169; Stop 193
aaggaagaattaactcgtaaaccga

SEQ ID NO: 324630 - DNA, 25 bp, Artificial
  probe
  misc_feature (1)..(25): SEQ ID NO: 2405; WAN024EU4; Start 171; Stop 195
ggaagaattaactcgtaaaccgaaa

SEQ ID NO: 324631 - DNA, 25 bp, Artificial
  probe
  misc_feature (1)..(25): SEQ ID NO: 2405; WAN024EU4; Start 174; Stop 198
agaattaactcgtaaaccgaaacct

SEQ ID NO: 324632 - DNA, 25 bp, Artificial
  probe
  misc_feature (1)..(25): SEQ ID NO: 2405; WAN024EU4; Start 177; Stop 201
attaactcgtaaaccgaaaccttca

SEQ ID NO: 324633 - DNA, 25 bp, Artificial
  probe
  misc_feature (1)..(25): SEQ ID NO: 2405; WAN024EU4; Start 259; Stop 283
attttgaaacgcctgaatagattgg

SEQ ID NO: 324634 - DNA, 25 bp, Artificial
  probe
  misc_feature (1)..(25): SEQ ID NO: 2405; WAN024EU4; Start 172; Stop 196
gaagaattaactcgtaaaccgaaac

SEQ ID NO: 324635 - DNA, 25 bp, Artificial
  probe
  misc_feature (1)..(25): SEQ ID NO: 2406; WAN024FCY; Start 383; Stop 407
atggaattaacaatcagtcacctct

SEQ ID NO: 324636 - DNA, 25 bp, Artificial
  probe
  misc_feature (1)..(25): SEQ ID NO: 2406; WAN024FCY; Start 384; Stop 408
tggaattaacaatcagtcacctcta

SEQ ID NO: 324637 - DNA, 25 bp, Artificial
  probe
  misc_feature (1)..(25): SEQ ID NO: 2406; WAN024FCY; Start 367; Stop 391
tcaagtgcgactgtatatggaatta

SEQ ID NO: 324638 - DNA, 25 bp, Artificial
  probe
  misc_feature (1)..(25): SEQ ID NO: 2406; WAN024FCY; Start 382; Stop 406
tatggaattaacaatcagtcacctc

SEQ ID NO: 324639 - DNA, 25 bp, Artificial
  probe
  misc_feature (1)..(25): SEQ ID NO: 2406; WAN024FCY; Start 366; Stop 390
ttcaagtgcgactgtatatggaatt

SEQ ID NO: 324640 - DNA, 25 bp, Artificial
  probe
  misc_feature (1)..(25): SEQ ID NO: 2406; WAN024FCY; Start 385; Stop 409
ggaattaacaatcagtcacctctaa

SEQ ID NO: 324641 - DNA, 25 bp, Artificial
  probe
  misc_feature (1)..(25): SEQ ID NO: 2406; WAN024FCY; Start 369; Stop 393
aagtgcgactgtatatggaattaac

SEQ ID NO: 324642 - DNA, 25 bp, Artificial
  probe
  misc_feature (1)..(25): SEQ ID NO: 2406; WAN024FCY; Start 368; Stop 392
caagtgcgactgtatatggaattaa

SEQ ID NO: 324643 - DNA, 25 bp, Artificial
  probe
  misc_feature (1)..(25): SEQ ID NO: 2406; WAN024FCY; Start 365; Stop 389
cttcaagtgcgactgtatatggaat

SEQ ID NO: 324644 - DNA, 25 bp, Artificial
  probe
  misc_feature (1)..(25): SEQ ID NO: 2406; WAN024FCY; Start 495; Stop 519
agattcagaatggagtattgcgttg

SEQ ID NO: 324645 - DNA, 25 bp, Artificial
  probe
  misc_feature (1)..(25): SEQ ID NO: 2406; WAN024FCY; Start 494; Stop 518
cagattcagaatggagtattgcgtt

SEQ ID NO: 324646 - DNA, 25 bp, Artificial
  probe
  misc_feature (1)..(25): SEQ ID NO: 2406; WAN024FCY; Start 370; Stop 394
agtgcgactgtatatggaattaaca

SEQ ID NO: 324647 - DNA, 25 bp, Artificial
  probe
  misc_feature (1)..(25): SEQ ID NO: 2406; WAN024FCY; Start 371; Stop 395
gtgcgactgtatatggaattaacaa

SEQ ID NO: 324648 - DNA, 25 bp, Artificial
  probe
  misc_feature (1)..(25): SEQ ID NO: 2406; WAN024FCY; Start 490; Stop 514
gtggcagattcagaatggagtattg

SEQ ID NO: 324649 - DNA, 25 bp, Artificial
  probe
  misc_feature (1)..(25): SEQ ID NO: 2406; WAN024FCY; Start 488; Stop 512
atgtggcagattcagaatggagtat

SEQ ID NO: 324650 - DNA, 25 bp, Artificial
  probe
  misc_feature (1)..(25): SEQ ID NO: 2406; WAN024FCY; Start 381; Stop 405
atatggaattaacaatcagtcacct

SEQ ID NO: 324651 - DNA, 25 bp, Artificial
  probe
  misc_feature (1)..(25): SEQ ID NO: 2406; WAN024FCY; Start 372; Stop 396
tgcgactgtatatggaattaacaat

SEQ ID NO: 324652 - DNA, 25 bp, Artificial
  probe
  misc_feature (1)..(25): SEQ ID NO: 2406; WAN024FCY; Start 301; Stop 325
attatgagtacattggcacttgttg

SEQ ID NO: 324653 - DNA, 25 bp, Artificial
  probe
  misc_feature (1)..(25): SEQ ID NO: 2406; WAN024FCY; Start 489; Stop 513
tgtggcagattcagaatggagtatt

SEQ ID NO: 324654 - DNA, 25 bp, Artificial
  probe
  misc_feature (1)..(25): SEQ ID NO: 2406; WAN024FCY; Start 364; Stop 388
tcttcaagtgcgactgtatatggaa

SEQ ID NO: 324655 - DNA, 25 bp, Artificial
  probe
  misc_feature (1)..(25): SEQ ID NO: 2406; WAN024FCY; Start 363; Stop 387
ttcttcaagtgcgactgtatatgga

SEQ ID NO: 324656 - DNA, 25 bp, Artificial
  probe
  misc_feature (1)..(25): SEQ ID NO: 2406; WAN024FCY; Start 303; Stop 327
tatgagtacattggcacttgttgaa

SEQ ID NO: 324657 - DNA, 25 bp, Artificial
  probe
  misc_feature (1)..(25): SEQ ID NO: 2406; WAN024FCY; Start 302; Stop 326
ttatgagtacattggcacttgttga

SEQ ID NO: 324658 - DNA, 25 bp, Artificial
  probe
  misc_feature (1)..(25): SEQ ID NO: 2406; WAN024FCY; Start 481; Stop 505
gatgttcatgtggcagattcagaat

SEQ ID NO: 324659 - DNA, 25 bp, Artificial
  probe
  misc_feature (1)..(25): SEQ ID NO: 2406; WAN024FCY; Start 373; Stop 397
gcgactgtatatggaattaacaatc

SEQ ID NO: 324660 - DNA, 25 bp, Artificial
  probe
  misc_feature (1)..(25): SEQ ID NO: 2406; WAN024FCY; Start 38; Stop 62
gtagccataccgtagtagaattact

SEQ ID NO: 324661 - DNA, 25 bp, Artificial
  probe
  misc_feature (1)..(25): SEQ ID NO: 2406; WAN024FCY; Start 300; Stop 324
tattatgagtacattggcacttgtt

SEQ ID NO: 324662 - DNA, 25 bp, Artificial
  probe
  misc_feature (1)..(25): SEQ ID NO: 2406; WAN024FCY; Start 482; Stop 506
atgttcatgtggcagattcagaatg

SEQ ID NO: 324663 - DNA, 25 bp, Artificial
  probe
  misc_feature (1)..(25): SEQ ID NO: 2406; WAN024FCY; Start 649; Stop 673
ttcggaaatgattatgatacgcttg

SEQ ID NO: 324664 - DNA, 25 bp, Artificial
  probe
  misc_feature (1)..(25): SEQ ID NO: 2406; WAN024FCY; Start 648; Stop 672
gttcggaaatgattatgatacgctt

SEQ ID NO: 324665 - DNA, 25 bp, Artificial
  probe
  misc_feature (1)..(25): SEQ ID NO: 2406; WAN024FCY; Start 650; Stop 674
tcggaaatgattatgatacgcttga

SEQ ID NO: 324666 - DNA, 25 bp, Artificial
  probe
  misc_feature (1)..(25): SEQ ID NO: 2406; WAN024FCY; Start 645; Stop 669
tgtgttcggaaatgattatgatacg

SEQ ID NO: 324667 - DNA, 25 bp, Artificial
  probe
  misc_feature (1)..(25): SEQ ID NO: 2406; WAN024FCY; Start 304; Stop 328
atgagtacattggcacttgttgaag

SEQ ID NO: 324668 - DNA, 25 bp, Artificial
  probe
  misc_feature (1)..(25): SEQ ID NO: 2407; WAN024DW2; Start 754; Stop 778
tctatcctcttgaccaaccagtatt

SEQ ID NO: 324669 - DNA, 25 bp, Artificial
  probe
  misc_feature (1)..(25): SEQ ID NO: 2407; WAN024DW2; Start 212; Stop 236
gtgatattgtggttgagactaagac

SEQ ID NO: 324670 - DNA, 25 bp, Artificial
  probe
  misc_feature (1)..(25): SEQ ID NO: 2407; WAN024DW2; Start 245; Stop 269
atgtgttcgttatgatgaatgtagc

SEQ ID NO: 324671 - DNA, 25 bp, Artificial
  probe
  misc_feature (1)..(25): SEQ ID NO: 2407; WAN024DW2; Start 254; Stop 278
ttatgatgaatgtagcgactcagta

SEQ ID NO: 324672 - DNA, 25 bp, Artificial
  probe
  misc_feature (1)..(25): SEQ ID NO: 2407; WAN024DW2; Start 253; Stop 277
gttatgatgaatgtagcgactcagt

SEQ ID NO: 324673 - DNA, 25 bp, Artificial
  probe
  misc_feature (1)..(25): SEQ ID NO: 2407; WAN024DW2; Start 211; Stop 235
agtgatattgtggttgagactaaga

SEQ ID NO: 324674 - DNA, 25 bp, Artificial
  probe
  misc_feature (1)..(25): SEQ ID NO: 2407; WAN024DW2; Start 223; Stop 247
gttgagactaagaccaaggacaatg

SEQ ID NO: 324675 - DNA, 25 bp, Artificial
  probe
  misc_feature (1)..(25): SEQ ID NO: 2407; WAN024DW2; Start 240; Stop 264
ggacaatgtgttcgttatgatgaat

SEQ ID NO: 324676 - DNA, 25 bp, Artificial
  probe
  misc_feature (1)..(25): SEQ ID NO: 2407; WAN024DW2; Start 242; Stop 266
acaatgtgttcgttatgatgaatgt

SEQ ID NO: 324677 - DNA, 25 bp, Artificial
  probe
  misc_feature (1)..(25): SEQ ID NO: 2407; WAN024DW2; Start 239; Stop 263
aggacaatgtgttcgttatgatgaa

SEQ ID NO: 324678 - DNA, 25 bp, Artificial
  probe
  misc_feature (1)..(25): SEQ ID NO: 2407; WAN024DW2; Start 238; Stop 262
aaggacaatgtgttcgttatgatga

SEQ ID NO: 324679 - DNA, 25 bp, Artificial
  probe
  misc_feature (1)..(25): SEQ ID NO: 2407; WAN024DW2; Start 237; Stop 261
caaggacaatgtgttcgttatgatg

SEQ ID NO: 324680 - DNA, 25 bp, Artificial
  probe
  misc_feature (1)..(25): SEQ ID NO: 2407; WAN024DW2; Start 246; Stop 270
tgtgttcgttatgatgaatgtagcg

SEQ ID NO: 324681 - DNA, 25 bp, Artificial
  probe
  misc_feature (1)..(25): SEQ ID NO: 2407; WAN024DW2; Start 210; Stop 234
aagtgatattgtggttgagactaag

SEQ ID NO: 324682 - DNA, 25 bp, Artificial
  probe
  misc_feature (1)..(25): SEQ ID NO: 2407; WAN024DW2; Start 255; Stop 279
tatgatgaatgtagcgactcagtac

SEQ ID NO: 324683 - DNA, 25 bp, Artificial
  probe
  misc_feature (1)..(25): SEQ ID NO: 2407; WAN024DW2; Start 241; Stop 265
gacaatgtgttcgttatgatgaatg

SEQ ID NO: 324684 - DNA, 25 bp, Artificial
  probe
  misc_feature (1)..(25): SEQ ID NO: 2407; WAN024DW2; Start 224; Stop 248
ttgagactaagaccaaggacaatgt

SEQ ID NO: 324685 - DNA, 25 bp, Artificial
  probe
  misc_feature (1)..(25): SEQ ID NO: 2407; WAN024DW2; Start 243; Stop 267
caatgtgttcgttatgatgaatgta

SEQ ID NO: 324686 - DNA, 25 bp, Artificial
  probe
  misc_feature (1)..(25): SEQ ID NO: 2407; WAN024DW2; Start 252; Stop 276
cgttatgatgaatgtagcgactcag

SEQ ID NO: 324687 - DNA, 25 bp, Artificial
  probe
  misc_feature (1)..(25): SEQ ID NO: 2407; WAN024DW2; Start 225; Stop 249
tgagactaagaccaaggacaatgtg

SEQ ID NO: 324688 - DNA, 25 bp, Artificial
  probe
  misc_feature (1)..(25): SEQ ID NO: 2407; WAN024DW2; Start 244; Stop 268
aatgtgttcgttatgatgaatgtag

SEQ ID NO: 324689 - DNA, 25 bp, Artificial
  probe
  misc_feature (1)..(25): SEQ ID NO: 2407; WAN024DW2; Start 228; Stop 252
gactaagaccaaggacaatgtgttc

SEQ ID NO: 324690 - DNA, 25 bp, Artificial
  probe
  misc_feature (1)..(25): SEQ ID NO: 2407; WAN024DW2; Start 753; Stop 777
gtctatcctcttgaccaaccagtat

SEQ ID NO: 324691 - DNA, 25 bp, Artificial
  probe
  misc_feature (1)..(25): SEQ ID NO: 2407; WAN024DW2; Start 236; Stop 260
ccaaggacaatgtgttcgttatgat

SEQ ID NO: 324692 - DNA, 25 bp, Artificial
  probe
  misc_feature (1)..(25): SEQ ID NO: 2407; WAN024DW2; Start 227; Stop 251
agactaagaccaaggacaatgtgtt

SEQ ID NO: 324693 - DNA, 25 bp, Artificial
  probe
  misc_feature (1)..(25): SEQ ID NO: 2407; WAN024DW2; Start 747; Stop 771
aatcatgtctatcctcttgaccaac

SEQ ID NO: 324694 - DNA, 25 bp, Artificial
  probe
  misc_feature (1)..(25): SEQ ID NO: 2407; WAN024DW2; Start 213; Stop 237
tgatattgtggttgagactaagacc

SEQ ID NO: 324695 - DNA, 25 bp, Artificial
  probe
  misc_feature (1)..(25): SEQ ID NO: 2407; WAN024DW2; Start 457; Stop 481
atgaccacttacggctacattatcg

SEQ ID NO: 324696 - DNA, 25 bp, Artificial
  probe
  misc_feature (1)..(25): SEQ ID NO: 2407; WAN024DW2; Start 781; Stop 805
gataccttgaatacctttgcctcta

SEQ ID NO: 324697 - DNA, 25 bp, Artificial
  probe
  misc_feature (1)..(25): SEQ ID NO: 2407; WAN024DW2; Start 783; Stop 807
taccttgaatacctttgcctctaaa

SEQ ID NO: 324698 - DNA, 25 bp, Artificial
  probe
  misc_feature (1)..(25): SEQ ID NO: 2407; WAN024DW2; Start 776; Stop 800
atttggataccttgaatacctttgc

SEQ ID NO: 324699 - DNA, 25 bp, Artificial
  probe
  misc_feature (1)..(25): SEQ ID NO: 2407; WAN024DW2; Start 782; Stop 806
ataccttgaatacctttgcctctaa

SEQ ID NO: 324700 - DNA, 25 bp, Artificial
  probe
  misc_feature (1)..(25): SEQ ID NO: 2407; WAN024DW2; Start 755; Stop 779
ctatcctcttgaccaaccagtattt

SEQ ID NO: 324701 - DNA, 25 bp, Artificial
  probe
  misc_feature (1)..(25): SEQ ID NO: 2408; WAN024GGX; Start 198; Stop 222
gatcgctaaccttgttgaatcaatg

SEQ ID NO: 324702 - DNA, 25 bp, Artificial
  probe
  misc_feature (1)..(25): SEQ ID NO: 2408; WAN024GGX; Start 193; Stop 217
aacttgatcgctaaccttgttgaat

SEQ ID NO: 324703 - DNA, 25 bp, Artificial
  probe
  misc_feature (1)..(25): SEQ ID NO: 2408; WAN024GGX; Start 194; Stop 218
acttgatcgctaaccttgttgaatc

SEQ ID NO: 324704 - DNA, 25 bp, Artificial
  probe
  misc_feature (1)..(25): SEQ ID NO: 2408; WAN024GGX; Start 199; Stop 223
atcgctaaccttgttgaatcaatgg

SEQ ID NO: 324705 - DNA, 25 bp, Artificial
  probe
  misc_feature (1)..(25): SEQ ID NO: 2408; WAN024GGX; Start 397; Stop 421
gtagaagctgaagttggtactatcg

SEQ ID NO: 324706 - DNA, 25 bp, Artificial
  probe
  misc_feature (1)..(25): SEQ ID NO: 2408; WAN024GGX; Start 857; Stop 881
tattcggttcagaaggtaaagcata

SEQ ID NO: 324707 - DNA, 25 bp, Artificial
  probe
  misc_feature (1)..(25): SEQ ID NO: 2408; WAN024GGX; Start 858; Stop 882
attcggttcagaaggtaaagcataa

SEQ ID NO: 324708 - DNA, 25 bp, Artificial
  probe
  misc_feature (1)..(25): SEQ ID NO: 2408; WAN024GGX; Start 143; Stop 167
aaacttcaatgggtgctgctaaata

SEQ ID NO: 324709 - DNA, 25 bp, Artificial
  probe
  misc_feature (1)..(25): SEQ ID NO: 2408; WAN024GGX; Start 379; Stop 403
cacgctaaaggtatctcagtagaag

SEQ ID NO: 324710 - DNA, 25 bp, Artificial
  probe
  misc_feature (1)..(25): SEQ ID NO: 2408; WAN024GGX; Start 861; Stop 885
cggttcagaaggtaaagcataacta

SEQ ID NO: 324711 - DNA, 25 bp, Artificial
  probe
  misc_feature (1)..(25): SEQ ID NO: 2408; WAN024GGX; Start 477; Stop 501
taaagcaatggttgaaactggtatc

SEQ ID NO: 324712 - DNA, 25 bp, Artificial
  probe
  misc_feature (1)..(25): SEQ ID NO: 2408; WAN024GGX; Start 476; Stop 500
ctaaagcaatggttgaaactggtat

SEQ ID NO: 324713 - DNA, 25 bp, Artificial
  probe
  misc_feature (1)..(25): SEQ ID NO: 2408; WAN024GGX; Start 277; Stop 301
cttgagtgtatcgaagttggttata

SEQ ID NO: 324714 - DNA, 25 bp, Artificial
  probe
  misc_feature (1)..(25): SEQ ID NO: 2408; WAN024GGX; Start 64; Stop 88
ggatttaacacaaacaaccttgagt

SEQ ID NO: 324715 - DNA, 25 bp, Artificial
  probe
  misc_feature (1)..(25): SEQ ID NO: 2408; WAN024GGX; Start 63; Stop 87
tggatttaacacaaacaaccttgag

SEQ ID NO: 324716 - DNA, 25 bp, Artificial
  probe
  misc_feature (1)..(25): SEQ ID NO: 2408; WAN024GGX; Start 856; Stop 880
gtattcggttcagaaggtaaagcat

SEQ ID NO: 324717 - DNA, 25 bp, Artificial
  probe
  misc_feature (1)..(25): SEQ ID NO: 2408; WAN024GGX; Start 378; Stop 402
acacgctaaaggtatctcagtagaa

SEQ ID NO: 324718 - DNA, 25 bp, Artificial
  probe
  misc_feature (1)..(25): SEQ ID NO: 2408; WAN024GGX; Start 398; Stop 422
tagaagctgaagttggtactatcgg

SEQ ID NO: 324719 - DNA, 25 bp, Artificial
  probe
  misc_feature (1)..(25): SEQ ID NO: 2408; WAN024GGX; Start 409; Stop 433
gttggtactatcggtggtgaagaag

SEQ ID NO: 324720 - DNA, 25 bp, Artificial
  probe
  misc_feature (1)..(25): SEQ ID NO: 2408; WAN024GGX; Start 862; Stop 886
ggttcagaaggtaaagcataactaa

SEQ ID NO: 324721 - DNA, 25 bp, Artificial
  probe
  misc_feature (1)..(25): SEQ ID NO: 2408; WAN024GGX; Start 859; Stop 883
ttcggttcagaaggtaaagcataac

SEQ ID NO: 324722 - DNA, 25 bp, Artificial
  probe
  misc_feature (1)..(25): SEQ ID NO: 2408; WAN024GGX; Start 279; Stop 303
tgagtgtatcgaagttggttatact

SEQ ID NO: 324723 - DNA, 25 bp, Artificial
  probe
  misc_feature (1)..(25): SEQ ID NO: 2408; WAN024GGX; Start 410; Stop 434
ttggtactatcggtggtgaagaaga

SEQ ID NO: 324724 - DNA, 25 bp, Artificial
  probe
  misc_feature (1)..(25): SEQ ID NO: 2408; WAN024GGX; Start 634; Stop 658
ggtattcctgatgagcaaatccaag

SEQ ID NO: 324725 - DNA, 25 bp, Artificial
  probe
  misc_feature (1)..(25): SEQ ID NO: 2408; WAN024GGX; Start 144; Stop 168
aacttcaatgggtgctgctaaatac

SEQ ID NO: 324726 - DNA, 25 bp, Artificial
  probe
  misc_feature (1)..(25): SEQ ID NO: 2408; WAN024GGX; Start 163; Stop 187
aaatacatgggtggttacaaagttg

SEQ ID NO: 324727 - DNA, 25 bp, Artificial
  probe
  misc_feature (1)..(25): SEQ ID NO: 2408; WAN024GGX; Start 160; Stop 184
gctaaatacatgggtggttacaaag

SEQ ID NO: 324728 - DNA, 25 bp, Artificial
  probe
  misc_feature (1)..(25): SEQ ID NO: 2408; WAN024GGX; Start 584; Stop 608
aattgacagaagctcttccaggatt

SEQ ID NO: 324729 - DNA, 25 bp, Artificial
  probe
  misc_feature (1)..(25): SEQ ID NO: 2408; WAN024GGX; Start 146; Stop 170
cttcaatgggtgctgctaaatacat

SEQ ID NO: 324730 - DNA, 25 bp, Artificial
  probe
  misc_feature (1)..(25): SEQ ID NO: 2408; WAN024GGX; Start 395; Stop 419
cagtagaagctgaagttggtactat

SEQ ID NO: 324731 - DNA, 25 bp, Artificial
  probe
  misc_feature (1)..(25): SEQ ID NO: 2408; WAN024GGX; Start 396; Stop 420
agtagaagctgaagttggtactatc

SEQ ID NO: 324732 - DNA, 25 bp, Artificial
  probe
  misc_feature (1)..(25): SEQ ID NO: 2408; WAN024GGX; Start 349; Stop 373
aaattggctaaagaagttgttgaaa

SEQ ID NO: 324733 - DNA, 25 bp, Artificial
  probe
  misc_feature (1)..(25): SEQ ID NO: 2408; WAN024GGX; Start 159; Stop 183
tgctaaatacatgggtggttacaaa

SEQ ID NO: 324734 - DNA, 25 bp, Artificial
  probe
  misc_feature (1)..(25): SEQ ID NO: 2409; WAN024D6U; Start 61; Stop 85
gatacaggttcagtagaggttcaag

SEQ ID NO: 324735 - DNA, 25 bp, Artificial
  probe
  misc_feature (1)..(25): SEQ ID NO: 2409; WAN024D6U; Start 62; Stop 86
atacaggttcagtagaggttcaagt

SEQ ID NO: 324736 - DNA, 25 bp, Artificial
  probe
  misc_feature (1)..(25): SEQ ID NO: 2409; WAN024D6U; Start 63; Stop 87
tacaggttcagtagaggttcaagtt

SEQ ID NO: 324737 - DNA, 25 bp, Artificial
  probe
  misc_feature (1)..(25): SEQ ID NO: 2409; WAN024D6U; Start 60; Stop 84
tgatacaggttcagtagaggttcaa

SEQ ID NO: 324738 - DNA, 25 bp, Artificial
  probe
  misc_feature (1)..(25): SEQ ID NO: 2409; WAN024D6U; Start 59; Stop 83
gtgatacaggttcagtagaggttca

SEQ ID NO: 324739 - DNA, 25 bp, Artificial
  probe
  misc_feature (1)..(25): SEQ ID NO: 2409; WAN024D6U; Start 55; Stop 79
gaaggtgatacaggttcagtagagg

SEQ ID NO: 324740 - DNA, 25 bp, Artificial
  probe
  misc_feature (1)..(25): SEQ ID NO: 2409; WAN024D6U; Start 64; Stop 88
acaggttcagtagaggttcaagttg

SEQ ID NO: 324741 - DNA, 25 bp, Artificial
  probe
  misc_feature (1)..(25): SEQ ID NO: 2409; WAN024D6U; Start 58; Stop 82
ggtgatacaggttcagtagaggttc

SEQ ID NO: 324742 - DNA, 25 bp, Artificial
  probe
  misc_feature (1)..(25): SEQ ID NO: 2409; WAN024D6U; Start 54; Stop 78
cgaaggtgatacaggttcagtagag

SEQ ID NO: 324743 - DNA, 25 bp, Artificial
  probe
  misc_feature (1)..(25): SEQ ID NO: 2409; WAN024D6U; Start 251; Stop 275
ctctaggacttcgtcgctaactaat

SEQ ID NO: 324744 - DNA, 25 bp, Artificial
  probe
  misc_feature (1)..(25): SEQ ID NO: 2409; WAN024D6U; Start 57; Stop 81
aggtgatacaggttcagtagaggtt

SEQ ID NO: 324745 - DNA, 25 bp, Artificial
  probe
  misc_feature (1)..(25): SEQ ID NO: 2409; WAN024D6U; Start 56; Stop 80
aaggtgatacaggttcagtagaggt

SEQ ID NO: 324746 - DNA, 25 bp, Artificial
  probe
  misc_feature (1)..(25): SEQ ID NO: 2409; WAN024D6U; Start 53; Stop 77
acgaaggtgatacaggttcagtaga

SEQ ID NO: 324747 - DNA, 25 bp, Artificial
  probe
  misc_feature (1)..(25): SEQ ID NO: 2409; WAN024D6U; Start 112; Stop 136
caccttaacgaacacatcaaacaac

SEQ ID NO: 324748 - DNA, 25 bp, Artificial
  probe
  misc_feature (1)..(25): SEQ ID NO: 2409; WAN024D6U; Start 74; Stop 98
tagaggttcaagttgctgtccttac

SEQ ID NO: 324749 - DNA, 25 bp, Artificial
  probe
  misc_feature (1)..(25): SEQ ID NO: 2409; WAN024D6U; Start 73; Stop 97
gtagaggttcaagttgctgtcctta

SEQ ID NO: 324750 - DNA, 25 bp, Artificial
  probe
  misc_feature (1)..(25): SEQ ID NO: 2409; WAN024D6U; Start 250; Stop 274
tctctaggacttcgtcgctaactaa

SEQ ID NO: 324751 - DNA, 25 bp, Artificial
  probe
  misc_feature (1)..(25): SEQ ID NO: 2409; WAN024D6U; Start 113; Stop 137
accttaacgaacacatcaaacaaca

SEQ ID NO: 324752 - DNA, 25 bp, Artificial
  probe
  misc_feature (1)..(25): SEQ ID NO: 2409; WAN024D6U; Start 69; Stop 93
ttcagtagaggttcaagttgctgtc

SEQ ID NO: 324753 - DNA, 25 bp, Artificial
  probe
  misc_feature (1)..(25): SEQ ID NO: 2409; WAN024D6U; Start 52; Stop 76
cacgaaggtgatacaggttcagtag

SEQ ID NO: 324754 - DNA, 25 bp, Artificial
  probe
  misc_feature (1)..(25): SEQ ID NO: 2409; WAN024D6U; Start 249; Stop 273
ctctctaggacttcgtcgctaacta

SEQ ID NO: 324755 - DNA, 25 bp, Artificial
  probe
  misc_feature (1)..(25): SEQ ID NO: 2409; WAN024D6U; Start 68; Stop 92
gttcagtagaggttcaagttgctgt

SEQ ID NO: 324756 - DNA, 25 bp, Artificial
  probe
  misc_feature (1)..(25): SEQ ID NO: 2409; WAN024D6U; Start 66; Stop 90
aggttcagtagaggttcaagttgct

SEQ ID NO: 324757 - DNA, 25 bp, Artificial
  probe
  misc_feature (1)..(25): SEQ ID NO: 2409; WAN024D6U; Start 65; Stop 89
caggttcagtagaggttcaagttgc

SEQ ID NO: 324758 - DNA, 25 bp, Artificial
  probe
  misc_feature (1)..(25): SEQ ID NO: 2409; WAN024D6U; Start 67; Stop 91
ggttcagtagaggttcaagttgctg

SEQ ID NO: 324759 - DNA, 25 bp, Artificial
  probe
  misc_feature (1)..(25): SEQ ID NO: 2409; WAN024D6U; Start 75; Stop 99
agaggttcaagttgctgtccttact

SEQ ID NO: 324760 - DNA, 25 bp, Artificial
  probe
  misc_feature (1)..(25): SEQ ID NO: 2409; WAN024D6U; Start 72; Stop 96
agtagaggttcaagttgctgtcctt

SEQ ID NO: 324761 - DNA, 25 bp, Artificial
  probe
  misc_feature (1)..(25): SEQ ID NO: 2409; WAN024D6U; Start 150; Stop 174
cgctacttaccgtggattgatgaaa

SEQ ID NO: 324762 - DNA, 25 bp, Artificial
  probe
  misc_feature (1)..(25): SEQ ID NO: 2409; WAN024D6U; Start 247; Stop 271
aactctctaggacttcgtcgctaac

SEQ ID NO: 324763 - DNA, 25 bp, Artificial
  probe
  misc_feature (1)..(25): SEQ ID NO: 2409; WAN024D6U; Start 246; Stop 270
caactctctaggacttcgtcgctaa

SEQ ID NO: 324764 - DNA, 25 bp, Artificial
  probe
  misc_feature (1)..(25): SEQ ID NO: 2409; WAN024D6U; Start 86; Stop 110
ttgctgtccttacttgggaaatcaa

SEQ ID NO: 324765 - DNA, 25 bp, Artificial
  probe
  misc_feature (1)..(25): SEQ ID NO: 2409; WAN024D6U; Start 151; Stop 175
gctacttaccgtggattgatgaaaa

SEQ ID NO: 324766 - DNA, 25 bp, Artificial
  probe
  misc_feature (1)..(25): SEQ ID NO: 2409; WAN024D6U; Start 76; Stop 100
gaggttcaagttgctgtccttactt

SEQ ID NO: 324767 - DNA, 25 bp, Artificial
  probe
  misc_feature (1)..(25): SEQ ID NO: 2410; WAN024GG2; Start 937; Stop 961
atggtggatacggatattgaggata

SEQ ID NO: 324768 - DNA, 25 bp, Artificial
  probe
  misc_feature (1)..(25): SEQ ID NO: 2410; WAN024GG2; Start 931; Stop 955
ttgaagatggtggatacggatattg

SEQ ID NO: 324769 - DNA, 25 bp, Artificial
  probe
  misc_feature (1)..(25): SEQ ID NO: 2410; WAN024GG2; Start 933; Stop 957
gaagatggtggatacggatattgag

SEQ ID NO: 324770 - DNA, 25 bp, Artificial
  probe
  misc_feature (1)..(25): SEQ ID NO: 2410; WAN024GG2; Start 938; Stop 962
tggtggatacggatattgaggatat

SEQ ID NO: 324771 - DNA, 25 bp, Artificial
  probe
  misc_feature (1)..(25): SEQ ID NO: 2410; WAN024GG2; Start 939; Stop 963
ggtggatacggatattgaggatatt

SEQ ID NO: 324772 - DNA, 25 bp, Artificial
  probe
  misc_feature (1)..(25): SEQ ID NO: 2410; WAN024GG2; Start 932; Stop 956
tgaagatggtggatacggatattga

SEQ ID NO: 324773 - DNA, 25 bp, Artificial
  probe
  misc_feature (1)..(25): SEQ ID NO: 2410; WAN024GG2; Start 1; Stop 25
atggcaatgatagaagtggaacatc

SEQ ID NO: 324774 - DNA, 25 bp, Artificial
  probe
  misc_feature (1)..(25): SEQ ID NO: 2410; WAN024GG2; Start 936; Stop 960
gatggtggatacggatattgaggat

SEQ ID NO: 324775 - DNA, 25 bp, Artificial
  probe
  misc_feature (1)..(25): SEQ ID NO: 2410; WAN024GG2; Start 3; Stop 27
ggcaatgatagaagtggaacatctt

SEQ ID NO: 324776 - DNA, 25 bp, Artificial
  probe
  misc_feature (1)..(25): SEQ ID NO: 2410; WAN024GG2; Start 819; Stop 843
tgatatgaccattgatagacaagga

SEQ ID NO: 324777 - DNA, 25 bp, Artificial
  probe
  misc_feature (1)..(25): SEQ ID NO: 2410; WAN024GG2; Start 934; Stop 958
aagatggtggatacggatattgagg

SEQ ID NO: 324778 - DNA, 25 bp, Artificial
  probe
  misc_feature (1)..(25): SEQ ID NO: 2410; WAN024GG2; Start 818; Stop 842
ctgatatgaccattgatagacaagg

SEQ ID NO: 324779 - DNA, 25 bp, Artificial
  probe
  misc_feature (1)..(25): SEQ ID NO: 2410; WAN024GG2; Start 592; Stop 616
gcaattactcagatcaatcaagagg

SEQ ID NO: 324780 - DNA, 25 bp, Artificial
  probe
  misc_feature (1)..(25): SEQ ID NO: 2410; WAN024GG2; Start 591; Stop 615
ggcaattactcagatcaatcaagag

SEQ ID NO: 324781 - DNA, 25 bp, Artificial
  probe
  misc_feature (1)..(25): SEQ ID NO: 2410; WAN024GG2; Start 820; Stop 844
gatatgaccattgatagacaaggaa

SEQ ID NO: 324782 - DNA, 25 bp, Artificial
  probe
  misc_feature (1)..(25): SEQ ID NO: 2410; WAN024GG2; Start 567; Stop 591
ttcggttaaggataatattcgtcgg

SEQ ID NO: 324783 - DNA, 25 bp, Artificial
  probe
  misc_feature (1)..(25): SEQ ID NO: 2410; WAN024GG2; Start 2; Stop 26
tggcaatgatagaagtggaacatct

SEQ ID NO: 324784 - DNA, 25 bp, Artificial
  probe
  misc_feature (1)..(25): SEQ ID NO: 2410; WAN024GG2; Start 935; Stop 959
agatggtggatacggatattgagga

SEQ ID NO: 324785 - DNA, 25 bp, Artificial
  probe
  misc_feature (1)..(25): SEQ ID NO: 2410; WAN024GG2; Start 597; Stop 621
tactcagatcaatcaagaggaagaa

SEQ ID NO: 324786 - DNA, 25 bp, Artificial
  probe
  misc_feature (1)..(25): SEQ ID NO: 2410; WAN024GG2; Start 596; Stop 620
ttactcagatcaatcaagaggaaga

SEQ ID NO: 324787 - DNA, 25 bp, Artificial
  probe
  misc_feature (1)..(25): SEQ ID NO: 2410; WAN024GG2; Start 817; Stop 841
tctgatatgaccattgatagacaag

SEQ ID NO: 324788 - DNA, 25 bp, Artificial
  probe
  misc_feature (1)..(25): SEQ ID NO: 2410; WAN024GG2; Start 813; Stop 837
tctgtctgatatgaccattgataga

SEQ ID NO: 324789 - DNA, 25 bp, Artificial
  probe
  misc_feature (1)..(25): SEQ ID NO: 2410; WAN024GG2; Start 812; Stop 836
gtctgtctgatatgaccattgatag

SEQ ID NO: 324790 - DNA, 25 bp, Artificial
  probe
  misc_feature (1)..(25): SEQ ID NO: 2410; WAN024GG2; Start 593; Stop 617
caattactcagatcaatcaagagga

SEQ ID NO: 324791 - DNA, 25 bp, Artificial
  probe
  misc_feature (1)..(25): SEQ ID NO: 2410; WAN024GG2; Start 940; Stop 964
gtggatacggatattgaggatatta

SEQ ID NO: 324792 - DNA, 25 bp, Artificial
  probe
  misc_feature (1)..(25): SEQ ID NO: 2410; WAN024GG2; Start 928; Stop 952
gatttgaagatggtggatacggata

SEQ ID NO: 324793 - DNA, 25 bp, Artificial
  probe
  misc_feature (1)..(25): SEQ ID NO: 2410; WAN024GG2; Start 930; Stop 954
tttgaagatggtggatacggatatt

SEQ ID NO: 324794 - DNA, 25 bp, Artificial
  probe
  misc_feature (1)..(25): SEQ ID NO: 2410; WAN024GG2; Start 605; Stop 629
tcaatcaagaggaagaaactaccat

SEQ ID NO: 324795 - DNA, 25 bp, Artificial
  probe
  misc_feature (1)..(25): SEQ ID NO: 2410; WAN024GG2; Start 604; Stop 628
atcaatcaagaggaagaaactacca

SEQ ID NO: 324796 - DNA, 25 bp, Artificial
  probe
  misc_feature (1)..(25): SEQ ID NO: 2410; WAN024GG2; Start 929; Stop 953
atttgaagatggtggatacggatat

SEQ ID NO: 324797 - DNA, 25 bp, Artificial
  probe
  misc_feature (1)..(25): SEQ ID NO: 2410; WAN024GG2; Start 595; Stop 619
attactcagatcaatcaagaggaag

SEQ ID NO: 324798 - DNA, 25 bp, Artificial
  probe
  misc_feature (1)..(25): SEQ ID NO: 2410; WAN024GG2; Start 419; Stop 443
tgaatgaagtcttggatttgaagga

SEQ ID NO: 324799 - DNA, 25 bp, Artificial
  probe
  misc_feature (1)..(25): SEQ ID NO: 2410; WAN024GG2; Start 418; Stop 442
ttgaatgaagtcttggatttgaagg

SEQ ID NO: 324800 - DNA, 25 bp, Artificial
  probe
  misc_feature (1)..(25): SEQ ID NO: 2411; WAN024ESJ; Start 27; Stop 51
ttctgcttccttcacatcttccata

SEQ ID NO: 324801 - DNA, 25 bp, Artificial
  probe
  misc_feature (1)..(25): SEQ ID NO: 2411; WAN024ESJ; Start 30; Stop 54
tgcttccttcacatcttccatagtt

SEQ ID NO: 324802 - DNA, 25 bp, Artificial
  probe
  misc_feature (1)..(25): SEQ ID NO: 2411; WAN024ESJ; Start 28; Stop 52
tctgcttccttcacatcttccatag

SEQ ID NO: 324803 - DNA, 25 bp, Artificial
  probe
  misc_feature (1)..(25): SEQ ID NO: 2411; WAN024ESJ; Start 29; Stop 53
ctgcttccttcacatcttccatagt

SEQ ID NO: 324804 - DNA, 25 bp, Artificial
  probe
  misc_feature (1)..(25): SEQ ID NO: 2411; WAN024ESJ; Start 31; Stop 55
gcttccttcacatcttccatagttt

SEQ ID NO: 324805 - DNA, 25 bp, Artificial
  probe
  misc_feature (1)..(25): SEQ ID NO: 2411; WAN024ESJ; Start 26; Stop 50
tttctgcttccttcacatcttccat

SEQ ID NO: 324806 - DNA, 25 bp, Artificial
  probe
  misc_feature (1)..(25): SEQ ID NO: 2411; WAN024ESJ; Start 22; Stop 46
atcgtttctgcttccttcacatctt

SEQ ID NO: 324807 - DNA, 25 bp, Artificial
  probe
  misc_feature (1)..(25): SEQ ID NO: 2411; WAN024ESJ; Start 21; Stop 45
aatcgtttctgcttccttcacatct

SEQ ID NO: 324808 - DNA, 25 bp, Artificial
  probe
  misc_feature (1)..(25): SEQ ID NO: 2411; WAN024ESJ; Start 20; Stop 44
caatcgtttctgcttccttcacatc

SEQ ID NO: 324809 - DNA, 25 bp, Artificial
  probe
  misc_feature (1)..(25): SEQ ID NO: 2411; WAN024ESJ; Start 25; Stop 49
gtttctgcttccttcacatcttcca

SEQ ID NO: 324810 - DNA, 25 bp, Artificial
  probe
  misc_feature (1)..(25): SEQ ID NO: 2411; WAN024ESJ; Start 23; Stop 47
tcgtttctgcttccttcacatcttc

SEQ ID NO: 324811 - DNA, 25 bp, Artificial
  probe
  misc_feature (1)..(25): SEQ ID NO: 2411; WAN024ESJ; Start 43; Stop 67
tcttccatagttttcgcattttcaa

SEQ ID NO: 324812 - DNA, 25 bp, Artificial
  probe
  misc_feature (1)..(25): SEQ ID NO: 2411; WAN024ESJ; Start 40; Stop 64
acatcttccatagttttcgcatttt

SEQ ID NO: 324813 - DNA, 25 bp, Artificial
  probe
  misc_feature (1)..(25): SEQ ID NO: 2411; WAN024ESJ; Start 39; Stop 63
cacatcttccatagttttcgcattt

SEQ ID NO: 324814 - DNA, 25 bp, Artificial
  probe
  misc_feature (1)..(25): SEQ ID NO: 2411; WAN024ESJ; Start 46; Stop 70
tccatagttttcgcattttcaatct

SEQ ID NO: 324815 - DNA, 25 bp, Artificial
  probe
  misc_feature (1)..(25): SEQ ID NO: 2411; WAN024ESJ; Start 42; Stop 66
atcttccatagttttcgcattttca

SEQ ID NO: 324816 - DNA, 25 bp, Artificial
  probe
  misc_feature (1)..(25): SEQ ID NO: 2411; WAN024ESJ; Start 47; Stop 71
ccatagttttcgcattttcaatctc

SEQ ID NO: 324817 - DNA, 25 bp, Artificial
  probe
  misc_feature (1)..(25): SEQ ID NO: 2411; WAN024ESJ; Start 41; Stop 65
catcttccatagttttcgcattttc

SEQ ID NO: 324818 - DNA, 25 bp, Artificial
  probe
  misc_feature (1)..(25): SEQ ID NO: 2411; WAN024ESJ; Start 34; Stop 58
tccttcacatcttccatagttttcg

SEQ ID NO: 324819 - DNA, 25 bp, Artificial
  probe
  misc_feature (1)..(25): SEQ ID NO: 2411; WAN024ESJ; Start 38; Stop 62
tcacatcttccatagttttcgcatt

SEQ ID NO: 324820 - DNA, 25 bp, Artificial
  probe
  misc_feature (1)..(25): SEQ ID NO: 2411; WAN024ESJ; Start 37; Stop 61
ttcacatcttccatagttttcgcat

SEQ ID NO: 324821 - DNA, 25 bp, Artificial
  probe
  misc_feature (1)..(25): SEQ ID NO: 2411; WAN024ESJ; Start 33; Stop 57
ttccttcacatcttccatagttttc

SEQ ID NO: 324822 - DNA, 25 bp, Artificial
  probe
  misc_feature (1)..(25): SEQ ID NO: 2411; WAN024ESJ; Start 32; Stop 56
cttccttcacatcttccatagtttt

SEQ ID NO: 324823 - DNA, 25 bp, Artificial
  probe
  misc_feature (1)..(25): SEQ ID NO: 2411; WAN024ESJ; Start 45; Stop 69
ttccatagttttcgcattttcaatc

SEQ ID NO: 324824 - DNA, 25 bp, Artificial
  probe
  misc_feature (1)..(25): SEQ ID NO: 2411; WAN024ESJ; Start 44; Stop 68
cttccatagttttcgcattttcaat

SEQ ID NO: 324825 - DNA, 25 bp, Artificial
  probe
  misc_feature (1)..(25): SEQ ID NO: 2411; WAN024ESJ; Start 51; Stop 75
agttttcgcattttcaatctctttg

SEQ ID NO: 324826 - DNA, 25 bp, Artificial
  probe
  misc_feature (1)..(25): SEQ ID NO: 2411; WAN024ESJ; Start 48; Stop 72
catagttttcgcattttcaatctct

SEQ ID NO: 324827 - DNA, 25 bp, Artificial
  probe
  misc_feature (1)..(25): SEQ ID NO: 2411; WAN024ESJ; Start 36; Stop 60
cttcacatcttccatagttttcgca

SEQ ID NO: 324828 - DNA, 25 bp, Artificial
  probe
  misc_feature (1)..(25): SEQ ID NO: 2411; WAN024ESJ; Start 19; Stop 43
ccaatcgtttctgcttccttcacat

SEQ ID NO: 324829 - DNA, 25 bp, Artificial
  probe
  misc_feature (1)..(25): SEQ ID NO: 2411; WAN024ESJ; Start 89; Stop 113
tttctgcttccactcttgctaaaag

SEQ ID NO: 324830 - DNA, 25 bp, Artificial
  probe
  misc_feature (1)..(25): SEQ ID NO: 2411; WAN024ESJ; Start 50; Stop 74
tagttttcgcattttcaatctcttt

SEQ ID NO: 324831 - DNA, 25 bp, Artificial
  probe
  misc_feature (1)..(25): SEQ ID NO: 2411; WAN024ESJ; Start 49; Stop 73
atagttttcgcattttcaatctctt

SEQ ID NO: 324832 - DNA, 25 bp, Artificial
  probe
  misc_feature (1)..(25): SEQ ID NO: 2411; WAN024ESJ; Start 35; Stop 59
ccttcacatcttccatagttttcgc

SEQ ID NO: 324833 - DNA, 25 bp, Artificial
  probe
  misc_feature (1)..(25): SEQ ID NO: 2412; WAN024DMH; Start 478; Stop 502
ttcaagttagactaccacattcaca

SEQ ID NO: 324834 - DNA, 25 bp, Artificial
  probe
  misc_feature (1)..(25): SEQ ID NO: 2412; WAN024DMH; Start 479; Stop 503
tcaagttagactaccacattcacat

SEQ ID NO: 324835 - DNA, 25 bp, Artificial
  probe
  misc_feature (1)..(25): SEQ ID NO: 2412; WAN024DMH; Start 482; Stop 506
agttagactaccacattcacatgaa

SEQ ID NO: 324836 - DNA, 25 bp, Artificial
  probe
  misc_feature (1)..(25): SEQ ID NO: 2412; WAN024DMH; Start 481; Stop 505
aagttagactaccacattcacatga

SEQ ID NO: 324837 - DNA, 25 bp, Artificial
  probe
  misc_feature (1)..(25): SEQ ID NO: 2412; WAN024DMH; Start 480; Stop 504
caagttagactaccacattcacatg

SEQ ID NO: 324838 - DNA, 25 bp, Artificial
  probe
  misc_feature (1)..(25): SEQ ID NO: 2412; WAN024DMH; Start 105; Stop 129
ttcaatgtacgatgtcagctctatc

SEQ ID NO: 324839 - DNA, 25 bp, Artificial
  probe
  misc_feature (1)..(25): SEQ ID NO: 2412; WAN024DMH; Start 400; Stop 424
catacatcctacatcccagaacaat

SEQ ID NO: 324840 - DNA, 25 bp, Artificial
  probe
  misc_feature (1)..(25): SEQ ID NO: 2412; WAN024DMH; Start 109; Stop 133
atgtacgatgtcagctctatcacag

SEQ ID NO: 324841 - DNA, 25 bp, Artificial
  probe
  misc_feature (1)..(25): SEQ ID NO: 2412; WAN024DMH; Start 393; Stop 417
tatctaccatacatcctacatccca

SEQ ID NO: 324842 - DNA, 25 bp, Artificial
  probe
  misc_feature (1)..(25): SEQ ID NO: 2412; WAN024DMH; Start 107; Stop 131
caatgtacgatgtcagctctatcac

SEQ ID NO: 324843 - DNA, 25 bp, Artificial
  probe
  misc_feature (1)..(25): SEQ ID NO: 2412; WAN024DMH; Start 106; Stop 130
tcaatgtacgatgtcagctctatca

SEQ ID NO: 324844 - DNA, 25 bp, Artificial
  probe
  misc_feature (1)..(25): SEQ ID NO: 2412; WAN024DMH; Start 394; Stop 418
atctaccatacatcctacatcccag

SEQ ID NO: 324845 - DNA, 25 bp, Artificial
  probe
  misc_feature (1)..(25): SEQ ID NO: 2412; WAN024DMH; Start 396; Stop 420
ctaccatacatcctacatcccagaa

SEQ ID NO: 324846 - DNA, 25 bp, Artificial
  probe
  misc_feature (1)..(25): SEQ ID NO: 2412; WAN024DMH; Start 347; Stop 371
tctactacaagattgaacgtatccg

SEQ ID NO: 324847 - DNA, 25 bp, Artificial
  probe
  misc_feature (1)..(25): SEQ ID NO: 2412; WAN024DMH; Start 397; Stop 421
taccatacatcctacatcccagaac

SEQ ID NO: 324848 - DNA, 25 bp, Artificial
  probe
  misc_feature (1)..(25): SEQ ID NO: 2412; WAN024DMH; Start 401; Stop 425
atacatcctacatcccagaacaata

SEQ ID NO: 324849 - DNA, 25 bp, Artificial
  probe
  misc_feature (1)..(25): SEQ ID NO: 2412; WAN024DMH; Start 403; Stop 427
acatcctacatcccagaacaatata

SEQ ID NO: 324850 - DNA, 25 bp, Artificial
  probe
  misc_feature (1)..(25): SEQ ID NO: 2412; WAN024DMH; Start 402; Stop 426
tacatcctacatcccagaacaatat

SEQ ID NO: 324851 - DNA, 25 bp, Artificial
  probe
  misc_feature (1)..(25): SEQ ID NO: 2412; WAN024DMH; Start 337; Stop 361
ggcgatcaattctactacaagattg

SEQ ID NO: 324852 - DNA, 25 bp, Artificial
  probe
  misc_feature (1)..(25): SEQ ID NO: 2412; WAN024DMH; Start 348; Stop 372
ctactacaagattgaacgtatccgc

SEQ ID NO: 324853 - DNA, 25 bp, Artificial
  probe
  misc_feature (1)..(25): SEQ ID NO: 2412; WAN024DMH; Start 534; Stop 558
aatagtctttccaactccagaacat

SEQ ID NO: 324854 - DNA, 25 bp, Artificial
  probe
  misc_feature (1)..(25): SEQ ID NO: 2412; WAN024DMH; Start 533; Stop 557
aaatagtctttccaactccagaaca

SEQ ID NO: 324855 - DNA, 25 bp, Artificial
  probe
  misc_feature (1)..(25): SEQ ID NO: 2412; WAN024DMH; Start 475; Stop 499
cgtttcaagttagactaccacattc

SEQ ID NO: 324856 - DNA, 25 bp, Artificial
  probe
  misc_feature (1)..(25): SEQ ID NO: 2412; WAN024DMH; Start 473; Stop 497
atcgtttcaagttagactaccacat

SEQ ID NO: 324857 - DNA, 25 bp, Artificial
  probe
  misc_feature (1)..(25): SEQ ID NO: 2412; WAN024DMH; Start 474; Stop 498
tcgtttcaagttagactaccacatt

SEQ ID NO: 324858 - DNA, 25 bp, Artificial
  probe
  misc_feature (1)..(25): SEQ ID NO: 2412; WAN024DMH; Start 472; Stop 496
aatcgtttcaagttagactaccaca

SEQ ID NO: 324859 - DNA, 25 bp, Artificial
  probe
  misc_feature (1)..(25): SEQ ID NO: 2412; WAN024DMH; Start 392; Stop 416
atatctaccatacatcctacatccc

SEQ ID NO: 324860 - DNA, 25 bp, Artificial
  probe
  misc_feature (1)..(25): SEQ ID NO: 2412; WAN024DMH; Start 414; Stop 438
cccagaacaatatatcaacgcaaat

SEQ ID NO: 324861 - DNA, 25 bp, Artificial
  probe
  misc_feature (1)..(25): SEQ ID NO: 2412; WAN024DMH; Start 115; Stop 139
gatgtcagctctatcacagttgttc

SEQ ID NO: 324862 - DNA, 25 bp, Artificial
  probe
  misc_feature (1)..(25): SEQ ID NO: 2412; WAN024DMH; Start 412; Stop 436
atcccagaacaatatatcaacgcaa

SEQ ID NO: 324863 - DNA, 25 bp, Artificial
  probe
  misc_feature (1)..(25): SEQ ID NO: 2412; WAN024DMH; Start 477; Stop 501
tttcaagttagactaccacattcac

SEQ ID NO: 324864 - DNA, 25 bp, Artificial
  probe
  misc_feature (1)..(25): SEQ ID NO: 2412; WAN024DMH; Start 476; Stop 500
gtttcaagttagactaccacattca

SEQ ID NO: 324865 - DNA, 25 bp, Artificial
  probe
  misc_feature (1)..(25): SEQ ID NO: 2412; WAN024DMH; Start 399; Stop 423
ccatacatcctacatcccagaacaa

SEQ ID NO: 324866 - DNA, 25 bp, Artificial
  probe
  misc_feature (1)..(25): SEQ ID NO: 2413; WAN024C4I; Start 643; Stop 667
gagtggtatattacgattccgatga

SEQ ID NO: 324867 - DNA, 25 bp, Artificial
  probe
  misc_feature (1)..(25): SEQ ID NO: 2413; WAN024C4I; Start 642; Stop 666
agagtggtatattacgattccgatg

SEQ ID NO: 324868 - DNA, 25 bp, Artificial
  probe
  misc_feature (1)..(25): SEQ ID NO: 2413; WAN024C4I; Start 644; Stop 668
agtggtatattacgattccgatgat

SEQ ID NO: 324869 - DNA, 25 bp, Artificial
  probe
  misc_feature (1)..(25): SEQ ID NO: 2413; WAN024C4I; Start 641; Stop 665
aagagtggtatattacgattccgat

SEQ ID NO: 324870 - DNA, 25 bp, Artificial
  probe
  misc_feature (1)..(25): SEQ ID NO: 2413; WAN024C4I; Start 582; Stop 606
tgctattccagaagaagttcaagaa

SEQ ID NO: 324871 - DNA, 25 bp, Artificial
  probe
  misc_feature (1)..(25): SEQ ID NO: 2413; WAN024C4I; Start 584; Stop 608
ctattccagaagaagttcaagaagc

SEQ ID NO: 324872 - DNA, 25 bp, Artificial
  probe
  misc_feature (1)..(25): SEQ ID NO: 2413; WAN024C4I; Start 583; Stop 607
gctattccagaagaagttcaagaag

SEQ ID NO: 324873 - DNA, 25 bp, Artificial
  probe
  misc_feature (1)..(25): SEQ ID NO: 2413; WAN024C4I; Start 581; Stop 605
ttgctattccagaagaagttcaaga

SEQ ID NO: 324874 - DNA, 25 bp, Artificial
  probe
  misc_feature (1)..(25): SEQ ID NO: 2413; WAN024C4I; Start 645; Stop 669
gtggtatattacgattccgatgatt

SEQ ID NO: 324875 - DNA, 25 bp, Artificial
  probe
  misc_feature (1)..(25): SEQ ID NO: 2413; WAN024C4I; Start 267; Stop 291
ggctgtaattggtgttattattcaa

SEQ ID NO: 324876 - DNA, 25 bp, Artificial
  probe
  misc_feature (1)..(25): SEQ ID NO: 2413; WAN024C4I; Start 585; Stop 609
tattccagaagaagttcaagaagct

SEQ ID NO: 324877 - DNA, 25 bp, Artificial
  probe
  misc_feature (1)..(25): SEQ ID NO: 2413; WAN024C4I; Start 591; Stop 615
agaagaagttcaagaagctgctatt

SEQ ID NO: 324878 - DNA, 25 bp, Artificial
  probe
  misc_feature (1)..(25): SEQ ID NO: 2413; WAN024C4I; Start 617; Stop 641
tagacaatattactggttggaggaa

SEQ ID NO: 324879 - DNA, 25 bp, Artificial
  probe
  misc_feature (1)..(25): SEQ ID NO: 2413; WAN024C4I; Start 616; Stop 640
ttagacaatattactggttggagga

SEQ ID NO: 324880 - DNA, 25 bp, Artificial
  probe
  misc_feature (1)..(25): SEQ ID NO: 2413; WAN024C4I; Start 646; Stop 670
tggtatattacgattccgatgatta

SEQ ID NO: 324881 - DNA, 25 bp, Artificial
  probe
  misc_feature (1)..(25): SEQ ID NO: 2413; WAN024C4I; Start 859; Stop 883
ggtggaatgttgattatcgtttgta

SEQ ID NO: 324882 - DNA, 25 bp, Artificial
  probe
  misc_feature (1)..(25): SEQ ID NO: 2413; WAN024C4I; Start 633; Stop 657
ttggaggaaagagtggtatattacg

SEQ ID NO: 324883 - DNA, 25 bp, Artificial
  probe
  misc_feature (1)..(25): SEQ ID NO: 2413; WAN024C4I; Start 631; Stop 655
ggttggaggaaagagtggtatatta

SEQ ID NO: 324884 - DNA, 25 bp, Artificial
  probe
  misc_feature (1)..(25): SEQ ID NO: 2413; WAN024C4I; Start 857; Stop 881
taggtggaatgttgattatcgtttg

SEQ ID NO: 324885 - DNA, 25 bp, Artificial
  probe
  misc_feature (1)..(25): SEQ ID NO: 2413; WAN024C4I; Start 634; Stop 658
tggaggaaagagtggtatattacga

SEQ ID NO: 324886 - DNA, 25 bp, Artificial
  probe
  misc_feature (1)..(25): SEQ ID NO: 2413; WAN024C4I; Start 640; Stop 664
aaagagtggtatattacgattccga

SEQ ID NO: 324887 - DNA, 25 bp, Artificial
  probe
  misc_feature (1)..(25): SEQ ID NO: 2413; WAN024C4I; Start 635; Stop 659
ggaggaaagagtggtatattacgat

SEQ ID NO: 324888 - DNA, 25 bp, Artificial
  probe
  misc_feature (1)..(25): SEQ ID NO: 2413; WAN024C4I; Start 168; Stop 192
ccctgagtttcttggatttgataaa

SEQ ID NO: 324889 - DNA, 25 bp, Artificial
  probe
  misc_feature (1)..(25): SEQ ID NO: 2413; WAN024C4I; Start 858; Stop 882
aggtggaatgttgattatcgtttgt

SEQ ID NO: 324890 - DNA, 25 bp, Artificial
  probe
  misc_feature (1)..(25): SEQ ID NO: 2413; WAN024C4I; Start 779; Stop 803
ttgttattcgagaattagcagtggc

SEQ ID NO: 324891 - DNA, 25 bp, Artificial
  probe
  misc_feature (1)..(25): SEQ ID NO: 2413; WAN024C4I; Start 630; Stop 654
tggttggaggaaagagtggtatatt

SEQ ID NO: 324892 - DNA, 25 bp, Artificial
  probe
  misc_feature (1)..(25): SEQ ID NO: 2413; WAN024C4I; Start 639; Stop 663
gaaagagtggtatattacgattccg

SEQ ID NO: 324893 - DNA, 25 bp, Artificial
  probe
  misc_feature (1)..(25): SEQ ID NO: 2413; WAN024C4I; Start 856; Stop 880
ttaggtggaatgttgattatcgttt

SEQ ID NO: 324894 - DNA, 25 bp, Artificial
  probe
  misc_feature (1)..(25): SEQ ID NO: 2413; WAN024C4I; Start 855; Stop 879
tttaggtggaatgttgattatcgtt

SEQ ID NO: 324895 - DNA, 25 bp, Artificial
  probe
  misc_feature (1)..(25): SEQ ID NO: 2413; WAN024C4I; Start 373; Stop 397
ccaagtatcatttctagtgctgcta

SEQ ID NO: 324896 - DNA, 25 bp, Artificial
  probe
  misc_feature (1)..(25): SEQ ID NO: 2413; WAN024C4I; Start 251; Stop 275
ttaattctgttcgttgggctgtaat

SEQ ID NO: 324897 - DNA, 25 bp, Artificial
  probe
  misc_feature (1)..(25): SEQ ID NO: 2413; WAN024C4I; Start 632; Stop 656
gttggaggaaagagtggtatattac

SEQ ID NO: 324898 - DNA, 25 bp, Artificial
  probe
  misc_feature (1)..(25): SEQ ID NO: 2413; WAN024C4I; Start 263; Stop 287
gttgggctgtaattggtgttattat

SEQ ID NO: 324899 - DNA, 25 bp, Artificial
  probe
  misc_feature (1)..(25): SEQ ID NO: 2414; WAN024FGI; Start 493; Stop 517
atgttagccattcttgtcctcattg

SEQ ID NO: 324900 - DNA, 25 bp, Artificial
  probe
  misc_feature (1)..(25): SEQ ID NO: 2414; WAN024FGI; Start 502; Stop 526
attcttgtcctcattgtgatggttc

SEQ ID NO: 324901 - DNA, 25 bp, Artificial
  probe
  misc_feature (1)..(25): SEQ ID NO: 2414; WAN024FGI; Start 495; Stop 519
gttagccattcttgtcctcattgtg

SEQ ID NO: 324902 - DNA, 25 bp, Artificial
  probe
  misc_feature (1)..(25): SEQ ID NO: 2414; WAN024FGI; Start 501; Stop 525
cattcttgtcctcattgtgatggtt

SEQ ID NO: 324903 - DNA, 25 bp, Artificial
  probe
  misc_feature (1)..(25): SEQ ID NO: 2414; WAN024FGI; Start 484; Stop 508
ttcttcctcatgttagccattcttg

SEQ ID NO: 324904 - DNA, 25 bp, Artificial
  probe
  misc_feature (1)..(25): SEQ ID NO: 2414; WAN024FGI; Start 483; Stop 507
gttcttcctcatgttagccattctt

SEQ ID NO: 324905 - DNA, 25 bp, Artificial
  probe
  misc_feature (1)..(25): SEQ ID NO: 2414; WAN024FGI; Start 494; Stop 518
tgttagccattcttgtcctcattgt

SEQ ID NO: 324906 - DNA, 25 bp, Artificial
  probe
  misc_feature (1)..(25): SEQ ID NO: 2414; WAN024FGI; Start 492; Stop 516
catgttagccattcttgtcctcatt

SEQ ID NO: 324907 - DNA, 25 bp, Artificial
  probe
  misc_feature (1)..(25): SEQ ID NO: 2414; WAN024FGI; Start 497; Stop 521
tagccattcttgtcctcattgtgat

SEQ ID NO: 324908 - DNA, 25 bp, Artificial
  probe
  misc_feature (1)..(25): SEQ ID NO: 2414; WAN024FGI; Start 486; Stop 510
cttcctcatgttagccattcttgtc

SEQ ID NO: 324909 - DNA, 25 bp, Artificial
  probe
  misc_feature (1)..(25): SEQ ID NO: 2414; WAN024FGI; Start 504; Stop 528
tcttgtcctcattgtgatggttctt

SEQ ID NO: 324910 - DNA, 25 bp, Artificial
  probe
  misc_feature (1)..(25): SEQ ID NO: 2414; WAN024FGI; Start 503; Stop 527
ttcttgtcctcattgtgatggttct

SEQ ID NO: 324911 - DNA, 25 bp, Artificial
  probe
  misc_feature (1)..(25): SEQ ID NO: 2414; WAN024FGI; Start 496; Stop 520
ttagccattcttgtcctcattgtga

SEQ ID NO: 324912 - DNA, 25 bp, Artificial
  probe
  misc_feature (1)..(25): SEQ ID NO: 2414; WAN024FGI; Start 485; Stop 509
tcttcctcatgttagccattcttgt

SEQ ID NO: 324913 - DNA, 25 bp, Artificial
  probe
  misc_feature (1)..(25): SEQ ID NO: 2414; WAN024FGI; Start 491; Stop 515
tcatgttagccattcttgtcctcat

SEQ ID NO: 324914 - DNA, 25 bp, Artificial
  probe
  misc_feature (1)..(25): SEQ ID NO: 2414; WAN024FGI; Start 513; Stop 537
cattgtgatggttctttatctgtcc

SEQ ID NO: 324915 - DNA, 25 bp, Artificial
  probe
  misc_feature (1)..(25): SEQ ID NO: 2414; WAN024FGI; Start 470; Stop 494
ttaactttccttggttcttcctcat

SEQ ID NO: 324916 - DNA, 25 bp, Artificial
  probe
  misc_feature (1)..(25): SEQ ID NO: 2414; WAN024FGI; Start 469; Stop 493
tttaactttccttggttcttcctca

SEQ ID NO: 324917 - DNA, 25 bp, Artificial
  probe
  misc_feature (1)..(25): SEQ ID NO: 2414; WAN024FGI; Start 514; Stop 538
attgtgatggttctttatctgtccg

SEQ ID NO: 324918 - DNA, 25 bp, Artificial
  probe
  misc_feature (1)..(25): SEQ ID NO: 2414; WAN024FGI; Start 541; Stop 565
ttcagtctactcttaggtggctcag

SEQ ID NO: 324919 - DNA, 25 bp, Artificial
  probe
  misc_feature (1)..(25): SEQ ID NO: 2414; WAN024FGI; Start 540; Stop 564
cttcagtctactcttaggtggctca

SEQ ID NO: 324920 - DNA, 25 bp, Artificial
  probe
  misc_feature (1)..(25): SEQ ID NO: 2414; WAN024FGI; Start 546; Stop 570
tctactcttaggtggctcagtcttc

SEQ ID NO: 324921 - DNA, 25 bp, Artificial
  probe
  misc_feature (1)..(25): SEQ ID NO: 2414; WAN024FGI; Start 510; Stop 534
cctcattgtgatggttctttatctg

SEQ ID NO: 324922 - DNA, 25 bp, Artificial
  probe
  misc_feature (1)..(25): SEQ ID NO: 2414; WAN024FGI; Start 509; Stop 533
tcctcattgtgatggttctttatct

SEQ ID NO: 324923 - DNA, 25 bp, Artificial
  probe
  misc_feature (1)..(25): SEQ ID NO: 2414; WAN024FGI; Start 508; Stop 532
gtcctcattgtgatggttctttatc

SEQ ID NO: 324924 - DNA, 25 bp, Artificial
  probe
  misc_feature (1)..(25): SEQ ID NO: 2414; WAN024FGI; Start 507; Stop 531
tgtcctcattgtgatggttctttat

SEQ ID NO: 324925 - DNA, 25 bp, Artificial
  probe
  misc_feature (1)..(25): SEQ ID NO: 2414; WAN024FGI; Start 506; Stop 530
ttgtcctcattgtgatggttcttta

SEQ ID NO: 324926 - DNA, 25 bp, Artificial
  probe
  misc_feature (1)..(25): SEQ ID NO: 2414; WAN024FGI; Start 490; Stop 514
ctcatgttagccattcttgtcctca

SEQ ID NO: 324927 - DNA, 25 bp, Artificial
  probe
  misc_feature (1)..(25): SEQ ID NO: 2414; WAN024FGI; Start 482; Stop 506
ggttcttcctcatgttagccattct

SEQ ID NO: 324928 - DNA, 25 bp, Artificial
  probe
  misc_feature (1)..(25): SEQ ID NO: 2414; WAN024FGI; Start 476; Stop 500
ttccttggttcttcctcatgttagc

SEQ ID NO: 324929 - DNA, 25 bp, Artificial
  probe
  misc_feature (1)..(25): SEQ ID NO: 2414; WAN024FGI; Start 512; Stop 536
tcattgtgatggttctttatctgtc

SEQ ID NO: 324930 - DNA, 25 bp, Artificial
  probe
  misc_feature (1)..(25): SEQ ID NO: 2414; WAN024FGI; Start 511; Stop 535
ctcattgtgatggttctttatctgt

SEQ ID NO: 324931 - DNA, 25 bp, Artificial
  probe
  misc_feature (1)..(25): SEQ ID NO: 2414; WAN024FGI; Start 545; Stop 569
gtctactcttaggtggctcagtctt

SEQ ID NO: 324932 - DNA, 25 bp, Artificial
  probe
  misc_feature (1)..(25): SEQ ID NO: 2415; WAN024GBA; Start 927; Stop 951
taaggttgaatctggtagcattgag

SEQ ID NO: 324933 - DNA, 25 bp, Artificial
  probe
  misc_feature (1)..(25): SEQ ID NO: 2415; WAN024GBA; Start 926; Stop 950
gtaaggttgaatctggtagcattga

SEQ ID NO: 324934 - DNA, 25 bp, Artificial
  probe
  misc_feature (1)..(25): SEQ ID NO: 2415; WAN024GBA; Start 1430; Stop 1454
acgatggtaagattcaaggtattgt

SEQ ID NO: 324935 - DNA, 25 bp, Artificial
  probe
  misc_feature (1)..(25): SEQ ID NO: 2415; WAN024GBA; Start 1429; Stop 1453
cacgatggtaagattcaaggtattg

SEQ ID NO: 324936 - DNA, 25 bp, Artificial
  probe
  misc_feature (1)..(25): SEQ ID NO: 2415; WAN024GBA; Start 18; Stop 42
cattgagatgcgtgatattaccaag

SEQ ID NO: 324937 - DNA, 25 bp, Artificial
  probe
  misc_feature (1)..(25): SEQ ID NO: 2415; WAN024GBA; Start 17; Stop 41
tcattgagatgcgtgatattaccaa

SEQ ID NO: 324938 - DNA, 25 bp, Artificial
  probe
  misc_feature (1)..(25): SEQ ID NO: 2415; WAN024GBA; Start 14; Stop 38
atgtcattgagatgcgtgatattac

SEQ ID NO: 324939 - DNA, 25 bp, Artificial
  probe
  misc_feature (1)..(25): SEQ ID NO: 2415; WAN024GBA; Start 19; Stop 43
attgagatgcgtgatattaccaagg

SEQ ID NO: 324940 - DNA, 25 bp, Artificial
  probe
  misc_feature (1)..(25): SEQ ID NO: 2415; WAN024GBA; Start 533; Stop 557
ttgatgagttgatggctattatgaa

SEQ ID NO: 324941 - DNA, 25 bp, Artificial
  probe
  misc_feature (1)..(25): SEQ ID NO: 2415; WAN024GBA; Start 16; Stop 40
gtcattgagatgcgtgatattacca

SEQ ID NO: 324942 - DNA, 25 bp, Artificial
  probe
  misc_feature (1)..(25): SEQ ID NO: 2415; WAN024GBA; Start 15; Stop 39
tgtcattgagatgcgtgatattacc

SEQ ID NO: 324943 - DNA, 25 bp, Artificial
  probe
  misc_feature (1)..(25): SEQ ID NO: 2415; WAN024GBA; Start 985; Stop 1009
cgtcagattacagaactaagtgttg

SEQ ID NO: 324944 - DNA, 25 bp, Artificial
  probe
  misc_feature (1)..(25): SEQ ID NO: 2415; WAN024GBA; Start 532; Stop 556
attgatgagttgatggctattatga

SEQ ID NO: 324945 - DNA, 25 bp, Artificial
  probe
  misc_feature (1)..(25): SEQ ID NO: 2415; WAN024GBA; Start 986; Stop 1010
gtcagattacagaactaagtgttgg

SEQ ID NO: 324946 - DNA, 25 bp, Artificial
  probe
  misc_feature (1)..(25): SEQ ID NO: 2415; WAN024GBA; Start 1431; Stop 1455
cgatggtaagattcaaggtattgta

SEQ ID NO: 324947 - DNA, 25 bp, Artificial
  probe
  misc_feature (1)..(25): SEQ ID NO: 2415; WAN024GBA; Start 1516; Stop 1540
aaggagaagagtgatgtctaactaa

SEQ ID NO: 324948 - DNA, 25 bp, Artificial
  probe
  misc_feature (1)..(25): SEQ ID NO: 2415; WAN024GBA; Start 1517; Stop 1541
aggagaagagtgatgtctaactaat

SEQ ID NO: 324949 - DNA, 25 bp, Artificial
  probe
  misc_feature (1)..(25): SEQ ID NO: 2415; WAN024GBA; Start 13; Stop 37
aatgtcattgagatgcgtgatatta

SEQ ID NO: 324950 - DNA, 25 bp, Artificial
  probe
  misc_feature (1)..(25): SEQ ID NO: 2415; WAN024GBA; Start 23; Stop 47
agatgcgtgatattaccaaggtgtt

SEQ ID NO: 324951 - DNA, 25 bp, Artificial
  probe
  misc_feature (1)..(25): SEQ ID NO: 2415; WAN024GBA; Start 1424; Stop 1448
ttatccacgatggtaagattcaagg

SEQ ID NO: 324952 - DNA, 25 bp, Artificial
  probe
  misc_feature (1)..(25): SEQ ID NO: 2415; WAN024GBA; Start 1423; Stop 1447
gttatccacgatggtaagattcaag

SEQ ID NO: 324953 - DNA, 25 bp, Artificial
  probe
  misc_feature (1)..(25): SEQ ID NO: 2415; WAN024GBA; Start 531; Stop 555
aattgatgagttgatggctattatg

SEQ ID NO: 324954 - DNA, 25 bp, Artificial
  probe
  misc_feature (1)..(25): SEQ ID NO: 2415; WAN024GBA; Start 1335; Stop 1359
cttgattgaagagcgtgataatggc

SEQ ID NO: 324955 - DNA, 25 bp, Artificial
  probe
  misc_feature (1)..(25): SEQ ID NO: 2415; WAN024GBA; Start 20; Stop 44
ttgagatgcgtgatattaccaaggt

SEQ ID NO: 324956 - DNA, 25 bp, Artificial
  probe
  misc_feature (1)..(25): SEQ ID NO: 2415; WAN024GBA; Start 1428; Stop 1452
ccacgatggtaagattcaaggtatt

SEQ ID NO: 324957 - DNA, 25 bp, Artificial
  probe
  misc_feature (1)..(25): SEQ ID NO: 2415; WAN024GBA; Start 1439; Stop 1463
agattcaaggtattgtatcaccaga

SEQ ID NO: 324958 - DNA, 25 bp, Artificial
  probe
  misc_feature (1)..(25): SEQ ID NO: 2415; WAN024GBA; Start 1456; Stop 1480
tcaccagaaacaaccaataaacaag

SEQ ID NO: 324959 - DNA, 25 bp, Artificial
  probe
  misc_feature (1)..(25): SEQ ID NO: 2415; WAN024GBA; Start 1338; Stop 1362
gattgaagagcgtgataatggcaag

SEQ ID NO: 324960 - DNA, 25 bp, Artificial
  probe
  misc_feature (1)..(25): SEQ ID NO: 2415; WAN024GBA; Start 1455; Stop 1479
atcaccagaaacaaccaataaacaa

SEQ ID NO: 324961 - DNA, 25 bp, Artificial
  probe
  misc_feature (1)..(25): SEQ ID NO: 2415; WAN024GBA; Start 1434; Stop 1458
tggtaagattcaaggtattgtatca

SEQ ID NO: 324962 - DNA, 25 bp, Artificial
  probe
  misc_feature (1)..(25): SEQ ID NO: 2415; WAN024GBA; Start 1427; Stop 1451
tccacgatggtaagattcaaggtat

SEQ ID NO: 324963 - DNA, 25 bp, Artificial
  probe
  misc_feature (1)..(25): SEQ ID NO: 2415; WAN024GBA; Start 1426; Stop 1450
atccacgatggtaagattcaaggta

SEQ ID NO: 324964 - DNA, 25 bp, Artificial
  probe
  misc_feature (1)..(25): SEQ ID NO: 2415; WAN024GBA; Start 1425; Stop 1449
tatccacgatggtaagattcaaggt

SEQ ID NO: 324965 - DNA, 25 bp, Artificial
  probe
  misc_feature (1)..(25): SEQ ID NO: 2416; WAN024DC6; Start 414; Stop 438
aatcaagaccatctgtcagtattgc

SEQ ID NO: 324966 - DNA, 25 bp, Artificial
  probe
  misc_feature (1)..(25): SEQ ID NO: 2416; WAN024DC6; Start 201; Stop 225
tatctttggctatatccgagaccta

SEQ ID NO: 324967 - DNA, 25 bp, Artificial
  probe
  misc_feature (1)..(25): SEQ ID NO: 2416; WAN024DC6; Start 200; Stop 224
atatctttggctatatccgagacct

SEQ ID NO: 324968 - DNA, 25 bp, Artificial
  probe
  misc_feature (1)..(25): SEQ ID NO: 2416; WAN024DC6; Start 370; Stop 394
gaaggttccaaatatctcttgcttt

SEQ ID NO: 324969 - DNA, 25 bp, Artificial
  probe
  misc_feature (1)..(25): SEQ ID NO: 2416; WAN024DC6; Start 202; Stop 226
atctttggctatatccgagacctac

SEQ ID NO: 324970 - DNA, 25 bp, Artificial
  probe
  misc_feature (1)..(25): SEQ ID NO: 2416; WAN024DC6; Start 345; Stop 369
aaatgactttcgcaatgaattgttc

SEQ ID NO: 324971 - DNA, 25 bp, Artificial
  probe
  misc_feature (1)..(25): SEQ ID NO: 2416; WAN024DC6; Start 369; Stop 393
cgaaggttccaaatatctcttgctt

SEQ ID NO: 324972 - DNA, 25 bp, Artificial
  probe
  misc_feature (1)..(25): SEQ ID NO: 2416; WAN024DC6; Start 494; Stop 518
gagaacagatccagattggtggtaa

SEQ ID NO: 324973 - DNA, 25 bp, Artificial
  probe
  misc_feature (1)..(25): SEQ ID NO: 2416; WAN024DC6; Start 411; Stop 435
cgaaatcaagaccatctgtcagtat

SEQ ID NO: 324974 - DNA, 25 bp, Artificial
  probe
  misc_feature (1)..(25): SEQ ID NO: 2416; WAN024DC6; Start 413; Stop 437
aaatcaagaccatctgtcagtattg

SEQ ID NO: 324975 - DNA, 25 bp, Artificial
  probe
  misc_feature (1)..(25): SEQ ID NO: 2416; WAN024DC6; Start 346; Stop 370
aatgactttcgcaatgaattgttcg

SEQ ID NO: 324976 - DNA, 25 bp, Artificial
  probe
  misc_feature (1)..(25): SEQ ID NO: 2416; WAN024DC6; Start 412; Stop 436
gaaatcaagaccatctgtcagtatt

SEQ ID NO: 324977 - DNA, 25 bp, Artificial
  probe
  misc_feature (1)..(25): SEQ ID NO: 2416; WAN024DC6; Start 410; Stop 434
acgaaatcaagaccatctgtcagta

SEQ ID NO: 324978 - DNA, 25 bp, Artificial
  probe
  misc_feature (1)..(25): SEQ ID NO: 2416; WAN024DC6; Start 415; Stop 439
atcaagaccatctgtcagtattgca

SEQ ID NO: 324979 - DNA, 25 bp, Artificial
  probe
  misc_feature (1)..(25): SEQ ID NO: 2416; WAN024DC6; Start 68; Stop 92
cctataactacgaggagcaaggaaa

SEQ ID NO: 324980 - DNA, 25 bp, Artificial
  probe
  misc_feature (1)..(25): SEQ ID NO: 2416; WAN024DC6; Start 208; Stop 232
ggctatatccgagacctaccagaaa

SEQ ID NO: 324981 - DNA, 25 bp, Artificial
  probe
  misc_feature (1)..(25): SEQ ID NO: 2416; WAN024DC6; Start 16; Stop 40
tatcgttatgggaccatgaactctg

SEQ ID NO: 324982 - DNA, 25 bp, Artificial
  probe
  misc_feature (1)..(25): SEQ ID NO: 2416; WAN024DC6; Start 203; Stop 227
tctttggctatatccgagacctacc

SEQ ID NO: 324983 - DNA, 25 bp, Artificial
  probe
  misc_feature (1)..(25): SEQ ID NO: 2416; WAN024DC6; Start 184; Stop 208
attgaggaaacaacggatatctttg

SEQ ID NO: 324984 - DNA, 25 bp, Artificial
  probe
  misc_feature (1)..(25): SEQ ID NO: 2416; WAN024DC6; Start 183; Stop 207
gattgaggaaacaacggatatcttt

SEQ ID NO: 324985 - DNA, 25 bp, Artificial
  probe
  misc_feature (1)..(25): SEQ ID NO: 2416; WAN024DC6; Start 67; Stop 91
gcctataactacgaggagcaaggaa

SEQ ID NO: 324986 - DNA, 25 bp, Artificial
  probe
  misc_feature (1)..(25): SEQ ID NO: 2416; WAN024DC6; Start 190; Stop 214
gaaacaacggatatctttggctata

SEQ ID NO: 324987 - DNA, 25 bp, Artificial
  probe
  misc_feature (1)..(25): SEQ ID NO: 2416; WAN024DC6; Start 70; Stop 94
tataactacgaggagcaaggaaaag

SEQ ID NO: 324988 - DNA, 25 bp, Artificial
  probe
  misc_feature (1)..(25): SEQ ID NO: 2416; WAN024DC6; Start 69; Stop 93
ctataactacgaggagcaaggaaaa

SEQ ID NO: 324989 - DNA, 25 bp, Artificial
  probe
  misc_feature (1)..(25): SEQ ID NO: 2416; WAN024DC6; Start 189; Stop 213
ggaaacaacggatatctttggctat

SEQ ID NO: 324990 - DNA, 25 bp, Artificial
  probe
  misc_feature (1)..(25): SEQ ID NO: 2416; WAN024DC6; Start 182; Stop 206
cgattgaggaaacaacggatatctt

SEQ ID NO: 324991 - DNA, 25 bp, Artificial
  probe
  misc_feature (1)..(25): SEQ ID NO: 2416; WAN024DC6; Start 179; Stop 203
ttgcgattgaggaaacaacggatat

SEQ ID NO: 324992 - DNA, 25 bp, Artificial
  probe
  misc_feature (1)..(25): SEQ ID NO: 2416; WAN024DC6; Start 368; Stop 392
tcgaaggttccaaatatctcttgct

SEQ ID NO: 324993 - DNA, 25 bp, Artificial
  probe
  misc_feature (1)..(25): SEQ ID NO: 2416; WAN024DC6; Start 185; Stop 209
ttgaggaaacaacggatatctttgg

SEQ ID NO: 324994 - DNA, 25 bp, Artificial
  probe
  misc_feature (1)..(25): SEQ ID NO: 2416; WAN024DC6; Start 409; Stop 433
gacgaaatcaagaccatctgtcagt

SEQ ID NO: 324995 - DNA, 25 bp, Artificial
  probe
  misc_feature (1)..(25): SEQ ID NO: 2416; WAN024DC6; Start 493; Stop 517
ggagaacagatccagattggtggta

SEQ ID NO: 324996 - DNA, 25 bp, Artificial
  probe
  misc_feature (1)..(25): SEQ ID NO: 2416; WAN024DC6; Start 191; Stop 215
aaacaacggatatctttggctatat

SEQ ID NO: 324997 - DNA, 25 bp, Artificial
  probe
  misc_feature (1)..(25): SEQ ID NO: 2416; WAN024DC6; Start 403; Stop 427
aagattgacgaaatcaagaccatct

SEQ ID NO: 324998 - DNA, 25 bp, Artificial
  probe
  misc_feature (1)..(25): SEQ ID NO: 2417; WAN024FFS; Start 115; Stop 139
aggattgacatcttcatcatacaga

SEQ ID NO: 324999 - DNA, 25 bp, Artificial
  probe
  misc_feature (1)..(25): SEQ ID NO: 2417; WAN024FFS; Start 116; Stop 140
ggattgacatcttcatcatacagaa

SEQ ID NO: 325000 - DNA, 25 bp, Artificial
  probe
  misc_feature (1)..(25): SEQ ID NO: 2417; WAN024FFS; Start 114; Stop 138
aaggattgacatcttcatcatacag

SEQ ID NO: 325001 - DNA, 25 bp, Artificial
  probe
  misc_feature (1)..(25): SEQ ID NO: 2417; WAN024FFS; Start 64; Stop 88
atctggctgtctttcttctttatcc

SEQ ID NO: 325002 - DNA, 25 bp, Artificial
  probe
  misc_feature (1)..(25): SEQ ID NO: 2417; WAN024FFS; Start 113; Stop 137
taaggattgacatcttcatcataca

SEQ ID NO: 325003 - DNA, 25 bp, Artificial
  probe
  misc_feature (1)..(25): SEQ ID NO: 2417; WAN024FFS; Start 69; Stop 93
gctgtctttcttctttatcccttgg

SEQ ID NO: 325004 - DNA, 25 bp, Artificial
  probe
  misc_feature (1)..(25): SEQ ID NO: 2417; WAN024FFS; Start 68; Stop 92
ggctgtctttcttctttatcccttg

SEQ ID NO: 325005 - DNA, 25 bp, Artificial
  probe
  misc_feature (1)..(25): SEQ ID NO: 2417; WAN024FFS; Start 62; Stop 86
tgatctggctgtctttcttctttat

SEQ ID NO: 325006 - DNA, 25 bp, Artificial
  probe
  misc_feature (1)..(25): SEQ ID NO: 2417; WAN024FFS; Start 61; Stop 85
ctgatctggctgtctttcttcttta

SEQ ID NO: 325007 - DNA, 25 bp, Artificial
  probe
  misc_feature (1)..(25): SEQ ID NO: 2417; WAN024FFS; Start 45; Stop 69
tattggtttagttctgctgatctgg

SEQ ID NO: 325008 - DNA, 25 bp, Artificial
  probe
  misc_feature (1)..(25): SEQ ID NO: 2417; WAN024FFS; Start 63; Stop 87
gatctggctgtctttcttctttatc

SEQ ID NO: 325009 - DNA, 25 bp, Artificial
  probe
  misc_feature (1)..(25): SEQ ID NO: 2417; WAN024FFS; Start 67; Stop 91
tggctgtctttcttctttatccctt

SEQ ID NO: 325010 - DNA, 25 bp, Artificial
  probe
  misc_feature (1)..(25): SEQ ID NO: 2417; WAN024FFS; Start 39; Stop 63
ggtttatattggtttagttctgctg

SEQ ID NO: 325011 - DNA, 25 bp, Artificial
  probe
  misc_feature (1)..(25): SEQ ID NO: 2417; WAN024FFS; Start 38; Stop 62
aggtttatattggtttagttctgct

SEQ ID NO: 325012 - DNA, 25 bp, Artificial
  probe
  misc_feature (1)..(25): SEQ ID NO: 2417; WAN024FFS; Start 70; Stop 94
ctgtctttcttctttatcccttggg

SEQ ID NO: 325013 - DNA, 25 bp, Artificial
  probe
  misc_feature (1)..(25): SEQ ID NO: 2417; WAN024FFS; Start 44; Stop 68
atattggtttagttctgctgatctg

SEQ ID NO: 325014 - DNA, 25 bp, Artificial
  probe
  misc_feature (1)..(25): SEQ ID NO: 2417; WAN024FFS; Start 66; Stop 90
ctggctgtctttcttctttatccct

SEQ ID NO: 325015 - DNA, 25 bp, Artificial
  probe
  misc_feature (1)..(25): SEQ ID NO: 2417; WAN024FFS; Start 65; Stop 89
tctggctgtctttcttctttatccc

SEQ ID NO: 325016 - DNA, 25 bp, Artificial
  probe
  misc_feature (1)..(25): SEQ ID NO: 2417; WAN024FFS; Start 37; Stop 61
aaggtttatattggtttagttctgc

SEQ ID NO: 325017 - DNA, 25 bp, Artificial
  probe
  misc_feature (1)..(25): SEQ ID NO: 2417; WAN024FFS; Start 40; Stop 64
gtttatattggtttagttctgctga

SEQ ID NO: 325018 - DNA, 25 bp, Artificial
  probe
  misc_feature (1)..(25): SEQ ID NO: 2417; WAN024FFS; Start 52; Stop 76
ttagttctgctgatctggctgtctt

SEQ ID NO: 325019 - DNA, 25 bp, Artificial
  probe
  misc_feature (1)..(25): SEQ ID NO: 2417; WAN024FFS; Start 43; Stop 67
tatattggtttagttctgctgatct

SEQ ID NO: 325020 - DNA, 25 bp, Artificial
  probe
  misc_feature (1)..(25): SEQ ID NO: 2417; WAN024FFS; Start 117; Stop 141
gattgacatcttcatcatacagaaa

SEQ ID NO: 325021 - DNA, 25 bp, Artificial
  probe
  misc_feature (1)..(25): SEQ ID NO: 2417; WAN024FFS; Start 248; Stop 272
tatttatcacatttgccattttgcc

SEQ ID NO: 325022 - DNA, 25 bp, Artificial
  probe
  misc_feature (1)..(25): SEQ ID NO: 2417; WAN024FFS; Start 42; Stop 66
ttatattggtttagttctgctgatc

SEQ ID NO: 325023 - DNA, 25 bp, Artificial
  probe
  misc_feature (1)..(25): SEQ ID NO: 2417; WAN024FFS; Start 41; Stop 65
tttatattggtttagttctgctgat

SEQ ID NO: 325024 - DNA, 25 bp, Artificial
  probe
  misc_feature (1)..(25): SEQ ID NO: 2417; WAN024FFS; Start 60; Stop 84
gctgatctggctgtctttcttcttt

SEQ ID NO: 325025 - DNA, 25 bp, Artificial
  probe
  misc_feature (1)..(25): SEQ ID NO: 2417; WAN024FFS; Start 46; Stop 70
attggtttagttctgctgatctggc

SEQ ID NO: 325026 - DNA, 25 bp, Artificial
  probe
  misc_feature (1)..(25): SEQ ID NO: 2417; WAN024FFS; Start 71; Stop 95
tgtctttcttctttatcccttggga

SEQ ID NO: 325027 - DNA, 25 bp, Artificial
  probe
  misc_feature (1)..(25): SEQ ID NO: 2417; WAN024FFS; Start 249; Stop 273
atttatcacatttgccattttgccg

SEQ ID NO: 325028 - DNA, 25 bp, Artificial
  probe
  misc_feature (1)..(25): SEQ ID NO: 2417; WAN024FFS; Start 244; Stop 268
aacttatttatcacatttgccattt

SEQ ID NO: 325029 - DNA, 25 bp, Artificial
  probe
  misc_feature (1)..(25): SEQ ID NO: 2417; WAN024FFS; Start 50; Stop 74
gtttagttctgctgatctggctgtc

SEQ ID NO: 325030 - DNA, 25 bp, Artificial
  probe
  misc_feature (1)..(25): SEQ ID NO: 2417; WAN024FFS; Start 36; Stop 60
caaggtttatattggtttagttctg

SEQ ID NO: 325031 - DNA, 25 bp, Artificial
  probe
  misc_feature (1)..(25): SEQ ID NO: 2418; WAN024FIP; Start 99; Stop 123
tcagttagcggatattattcattgc

SEQ ID NO: 325032 - DNA, 25 bp, Artificial
  probe
  misc_feature (1)..(25): SEQ ID NO: 2418; WAN024FIP; Start 97; Stop 121
cgtcagttagcggatattattcatt

SEQ ID NO: 325033 - DNA, 25 bp, Artificial
  probe
  misc_feature (1)..(25): SEQ ID NO: 2418; WAN024FIP; Start 96; Stop 120
gcgtcagttagcggatattattcat

SEQ ID NO: 325034 - DNA, 25 bp, Artificial
  probe
  misc_feature (1)..(25): SEQ ID NO: 2418; WAN024FIP; Start 98; Stop 122
gtcagttagcggatattattcattg

SEQ ID NO: 325035 - DNA, 25 bp, Artificial
  probe
  misc_feature (1)..(25): SEQ ID NO: 2418; WAN024FIP; Start 424; Stop 448
gaggacttggttcttgttgagattg

SEQ ID NO: 325036 - DNA, 25 bp, Artificial
  probe
  misc_feature (1)..(25): SEQ ID NO: 2418; WAN024FIP; Start 422; Stop 446
atgaggacttggttcttgttgagat

SEQ ID NO: 325037 - DNA, 25 bp, Artificial
  probe
  misc_feature (1)..(25): SEQ ID NO: 2418; WAN024FIP; Start 279; Stop 303
gcctgttgagcatgatatgagtatt

SEQ ID NO: 325038 - DNA, 25 bp, Artificial
  probe
  misc_feature (1)..(25): SEQ ID NO: 2418; WAN024FIP; Start 423; Stop 447
tgaggacttggttcttgttgagatt

SEQ ID NO: 325039 - DNA, 25 bp, Artificial
  probe
  misc_feature (1)..(25): SEQ ID NO: 2418; WAN024FIP; Start 656; Stop 680
ctgtgattgtcaatgctcttcgtaa

SEQ ID NO: 325040 - DNA, 25 bp, Artificial
  probe
  misc_feature (1)..(25): SEQ ID NO: 2418; WAN024FIP; Start 421; Stop 445
gatgaggacttggttcttgttgaga

SEQ ID NO: 325041 - DNA, 25 bp, Artificial
  probe
  misc_feature (1)..(25): SEQ ID NO: 2418; WAN024FIP; Start 420; Stop 444
agatgaggacttggttcttgttgag

SEQ ID NO: 325042 - DNA, 25 bp, Artificial
  probe
  misc_feature (1)..(25): SEQ ID NO: 2418; WAN024FIP; Start 100; Stop 124
cagttagcggatattattcattgca

SEQ ID NO: 325043 - DNA, 25 bp, Artificial
  probe
  misc_feature (1)..(25): SEQ ID NO: 2418; WAN024FIP; Start 379; Stop 403
cttggttctttgattatttggcgta

SEQ ID NO: 325044 - DNA, 25 bp, Artificial
  probe
  misc_feature (1)..(25): SEQ ID NO: 2418; WAN024FIP; Start 372; Stop 396
gattcgccttggttctttgattatt

SEQ ID NO: 325045 - DNA, 25 bp, Artificial
  probe
  misc_feature (1)..(25): SEQ ID NO: 2418; WAN024FIP; Start 380; Stop 404
ttggttctttgattatttggcgtaa

SEQ ID NO: 325046 - DNA, 25 bp, Artificial
  probe
  misc_feature (1)..(25): SEQ ID NO: 2418; WAN024FIP; Start 373; Stop 397
attcgccttggttctttgattattt

SEQ ID NO: 325047 - DNA, 25 bp, Artificial
  probe
  misc_feature (1)..(25): SEQ ID NO: 2418; WAN024FIP; Start 253; Stop 277
atgatttacgaaacagaagcaaact

SEQ ID NO: 325048 - DNA, 25 bp, Artificial
  probe
  misc_feature (1)..(25): SEQ ID NO: 2418; WAN024FIP; Start 374; Stop 398
ttcgccttggttctttgattatttg

SEQ ID NO: 325049 - DNA, 25 bp, Artificial
  probe
  misc_feature (1)..(25): SEQ ID NO: 2418; WAN024FIP; Start 254; Stop 278
tgatttacgaaacagaagcaaactt

SEQ ID NO: 325050 - DNA, 25 bp, Artificial
  probe
  misc_feature (1)..(25): SEQ ID NO: 2418; WAN024FIP; Start 655; Stop 679
tctgtgattgtcaatgctcttcgta

SEQ ID NO: 325051 - DNA, 25 bp, Artificial
  probe
  misc_feature (1)..(25): SEQ ID NO: 2418; WAN024FIP; Start 255; Stop 279
gatttacgaaacagaagcaaacttg

SEQ ID NO: 325052 - DNA, 25 bp, Artificial
  probe
  misc_feature (1)..(25): SEQ ID NO: 2418; WAN024FIP; Start 245; Stop 269
gggctaatatgatttacgaaacaga

SEQ ID NO: 325053 - DNA, 25 bp, Artificial
  probe
  misc_feature (1)..(25): SEQ ID NO: 2418; WAN024FIP; Start 381; Stop 405
tggttctttgattatttggcgtaat

SEQ ID NO: 325054 - DNA, 25 bp, Artificial
  probe
  misc_feature (1)..(25): SEQ ID NO: 2418; WAN024FIP; Start 540; Stop 564
caataccctttcttactccgaactc

SEQ ID NO: 325055 - DNA, 25 bp, Artificial
  probe
  misc_feature (1)..(25): SEQ ID NO: 2418; WAN024FIP; Start 382; Stop 406
ggttctttgattatttggcgtaatg

SEQ ID NO: 325056 - DNA, 25 bp, Artificial
  probe
  misc_feature (1)..(25): SEQ ID NO: 2418; WAN024FIP; Start 660; Stop 684
gattgtcaatgctcttcgtaaactt

SEQ ID NO: 325057 - DNA, 25 bp, Artificial
  probe
  misc_feature (1)..(25): SEQ ID NO: 2418; WAN024FIP; Start 465; Stop 489
gattcagcttcttaacttccaacgt

SEQ ID NO: 325058 - DNA, 25 bp, Artificial
  probe
  misc_feature (1)..(25): SEQ ID NO: 2418; WAN024FIP; Start 538; Stop 562
gtcaataccctttcttactccgaac

SEQ ID NO: 325059 - DNA, 25 bp, Artificial
  probe
  misc_feature (1)..(25): SEQ ID NO: 2418; WAN024FIP; Start 539; Stop 563
tcaataccctttcttactccgaact

SEQ ID NO: 325060 - DNA, 25 bp, Artificial
  probe
  misc_feature (1)..(25): SEQ ID NO: 2418; WAN024FIP; Start 252; Stop 276
tatgatttacgaaacagaagcaaac

SEQ ID NO: 325061 - DNA, 25 bp, Artificial
  probe
  misc_feature (1)..(25): SEQ ID NO: 2418; WAN024FIP; Start 371; Stop 395
ggattcgccttggttctttgattat

SEQ ID NO: 325062 - DNA, 25 bp, Artificial
  probe
  misc_feature (1)..(25): SEQ ID NO: 2418; WAN024FIP; Start 466; Stop 490
attcagcttcttaacttccaacgtg

SEQ ID NO: 325063 - DNA, 25 bp, Artificial
  probe
  misc_feature (1)..(25): SEQ ID NO: 2418; WAN024FIP; Start 661; Stop 685
attgtcaatgctcttcgtaaacttg

SEQ ID NO: 325064 - DNA, 25 bp, Artificial
  probe
  misc_feature (1)..(25): SEQ ID NO: 2419; WAN024F4R; Start 993; Stop 1017
aggtgttcttcaatcaggttcatac

SEQ ID NO: 325065 - DNA, 25 bp, Artificial
  probe
  misc_feature (1)..(25): SEQ ID NO: 2419; WAN024F4R; Start 992; Stop 1016
caggtgttcttcaatcaggttcata

SEQ ID NO: 325066 - DNA, 25 bp, Artificial
  probe
  misc_feature (1)..(25): SEQ ID NO: 2419; WAN024F4R; Start 69; Stop 93
aacaacaactactgagcgtattctt

SEQ ID NO: 325067 - DNA, 25 bp, Artificial
  probe
  misc_feature (1)..(25): SEQ ID NO: 2419; WAN024F4R; Start 1139; Stop 1163
aagatactacaactggtgactcatt

SEQ ID NO: 325068 - DNA, 25 bp, Artificial
  probe
  misc_feature (1)..(25): SEQ ID NO: 2419; WAN024F4R; Start 1141; Stop 1165
gatactacaactggtgactcattga

SEQ ID NO: 325069 - DNA, 25 bp, Artificial
  probe
  misc_feature (1)..(25): SEQ ID NO: 2419; WAN024F4R; Start 1140; Stop 1164
agatactacaactggtgactcattg

SEQ ID NO: 325070 - DNA, 25 bp, Artificial
  probe
  misc_feature (1)..(25): SEQ ID NO: 2419; WAN024F4R; Start 1142; Stop 1166
atactacaactggtgactcattgac

SEQ ID NO: 325071 - DNA, 25 bp, Artificial
  probe
  misc_feature (1)..(25): SEQ ID NO: 2419; WAN024F4R; Start 988; Stop 1012
tactcaggtgttcttcaatcaggtt

SEQ ID NO: 325072 - DNA, 25 bp, Artificial
  probe
  misc_feature (1)..(25): SEQ ID NO: 2419; WAN024F4R; Start 987; Stop 1011
ttactcaggtgttcttcaatcaggt

SEQ ID NO: 325073 - DNA, 25 bp, Artificial
  probe
  misc_feature (1)..(25): SEQ ID NO: 2419; WAN024F4R; Start 1633; Stop 1657
gtagaatctatggctaacggtgttc

SEQ ID NO: 325074 - DNA, 25 bp, Artificial
  probe
  misc_feature (1)..(25): SEQ ID NO: 2419; WAN024F4R; Start 2012; Stop 2036
ttgaccactacgaagatgtacctaa

SEQ ID NO: 325075 - DNA, 25 bp, Artificial
  probe
  misc_feature (1)..(25): SEQ ID NO: 2419; WAN024F4R; Start 994; Stop 1018
ggtgttcttcaatcaggttcatacg

SEQ ID NO: 325076 - DNA, 25 bp, Artificial
  probe
  misc_feature (1)..(25): SEQ ID NO: 2419; WAN024F4R; Start 1143; Stop 1167
tactacaactggtgactcattgaca

SEQ ID NO: 325077 - DNA, 25 bp, Artificial
  probe
  misc_feature (1)..(25): SEQ ID NO: 2419; WAN024F4R; Start 2019; Stop 2043
ctacgaagatgtacctaagtcagta

SEQ ID NO: 325078 - DNA, 25 bp, Artificial
  probe
  misc_feature (1)..(25): SEQ ID NO: 2419; WAN024F4R; Start 1636; Stop 1660
gaatctatggctaacggtgttcttg

SEQ ID NO: 325079 - DNA, 25 bp, Artificial
  probe
  misc_feature (1)..(25): SEQ ID NO: 2419; WAN024F4R; Start 2013; Stop 2037
tgaccactacgaagatgtacctaag

SEQ ID NO: 325080 - DNA, 25 bp, Artificial
  probe
  misc_feature (1)..(25): SEQ ID NO: 2419; WAN024F4R; Start 2017; Stop 2041
cactacgaagatgtacctaagtcag

SEQ ID NO: 325081 - DNA, 25 bp, Artificial
  probe
  misc_feature (1)..(25): SEQ ID NO: 2419; WAN024F4R; Start 991; Stop 1015
tcaggtgttcttcaatcaggttcat

SEQ ID NO: 325082 - DNA, 25 bp, Artificial
  probe
  misc_feature (1)..(25): SEQ ID NO: 2419; WAN024F4R; Start 2018; Stop 2042
actacgaagatgtacctaagtcagt

SEQ ID NO: 325083 - DNA, 25 bp, Artificial
  probe
  misc_feature (1)..(25): SEQ ID NO: 2419; WAN024F4R; Start 1630; Stop 1654
ttggtagaatctatggctaacggtg

SEQ ID NO: 325084 - DNA, 25 bp, Artificial
  probe
  misc_feature (1)..(25): SEQ ID NO: 2419; WAN024F4R; Start 27; Stop 51
aactcgtaatatcggtatcatggct

SEQ ID NO: 325085 - DNA, 25 bp, Artificial
  probe
  misc_feature (1)..(25): SEQ ID NO: 2419; WAN024F4R; Start 307; Stop 331
gttaccgttcttgactcacaatcag

SEQ ID NO: 325086 - DNA, 25 bp, Artificial
  probe
  misc_feature (1)..(25): SEQ ID NO: 2419; WAN024F4R; Start 2016; Stop 2040
ccactacgaagatgtacctaagtca

SEQ ID NO: 325087 - DNA, 25 bp, Artificial
  probe
  misc_feature (1)..(25): SEQ ID NO: 2419; WAN024F4R; Start 2015; Stop 2039
accactacgaagatgtacctaagtc

SEQ ID NO: 325088 - DNA, 25 bp, Artificial
  probe
  misc_feature (1)..(25): SEQ ID NO: 2419; WAN024F4R; Start 2014; Stop 2038
gaccactacgaagatgtacctaagt

SEQ ID NO: 325089 - DNA, 25 bp, Artificial
  probe
  misc_feature (1)..(25): SEQ ID NO: 2419; WAN024F4R; Start 1506; Stop 1530
aggtcaattcggtgatgtatggatt

SEQ ID NO: 325090 - DNA, 25 bp, Artificial
  probe
  misc_feature (1)..(25): SEQ ID NO: 2419; WAN024F4R; Start 1505; Stop 1529
aaggtcaattcggtgatgtatggat

SEQ ID NO: 325091 - DNA, 25 bp, Artificial
  probe
  misc_feature (1)..(25): SEQ ID NO: 2419; WAN024F4R; Start 1632; Stop 1656
ggtagaatctatggctaacggtgtt

SEQ ID NO: 325092 - DNA, 25 bp, Artificial
  probe
  misc_feature (1)..(25): SEQ ID NO: 2419; WAN024F4R; Start 1146; Stop 1170
tacaactggtgactcattgacagat

SEQ ID NO: 325093 - DNA, 25 bp, Artificial
  probe
  misc_feature (1)..(25): SEQ ID NO: 2419; WAN024F4R; Start 990; Stop 1014
ctcaggtgttcttcaatcaggttca

SEQ ID NO: 325094 - DNA, 25 bp, Artificial
  probe
  misc_feature (1)..(25): SEQ ID NO: 2419; WAN024F4R; Start 989; Stop 1013
actcaggtgttcttcaatcaggttc

SEQ ID NO: 325095 - DNA, 25 bp, Artificial
  probe
  misc_feature (1)..(25): SEQ ID NO: 2419; WAN024F4R; Start 29; Stop 53
ctcgtaatatcggtatcatggctca

SEQ ID NO: 325096 - DNA, 25 bp, Artificial
  probe
  misc_feature (1)..(25): SEQ ID NO: 2419; WAN024F4R; Start 28; Stop 52
actcgtaatatcggtatcatggctc

SEQ ID NO: 325097 - DNA, 25 bp, Artificial
  probe
  misc_feature (1)..(25): SEQ ID NO: 2420; WAN024G8P; Start 176; Stop 200
aattgtggattactcgtatcaatgc

SEQ ID NO: 325098 - DNA, 25 bp, Artificial
  probe
  misc_feature (1)..(25): SEQ ID NO: 2420; WAN024G8P; Start 173; Stop 197
gcaaattgtggattactcgtatcaa

SEQ ID NO: 325099 - DNA, 25 bp, Artificial
  probe
  misc_feature (1)..(25): SEQ ID NO: 2420; WAN024G8P; Start 177; Stop 201
attgtggattactcgtatcaatgcg

SEQ ID NO: 325100 - DNA, 25 bp, Artificial
  probe
  misc_feature (1)..(25): SEQ ID NO: 2420; WAN024G8P; Start 172; Stop 196
cgcaaattgtggattactcgtatca

SEQ ID NO: 325101 - DNA, 25 bp, Artificial
  probe
  misc_feature (1)..(25): SEQ ID NO: 2420; WAN024G8P; Start 178; Stop 202
ttgtggattactcgtatcaatgcgg

SEQ ID NO: 325102 - DNA, 25 bp, Artificial
  probe
  misc_feature (1)..(25): SEQ ID NO: 2420; WAN024G8P; Start 171; Stop 195
ccgcaaattgtggattactcgtatc

SEQ ID NO: 325103 - DNA, 25 bp, Artificial
  probe
  misc_feature (1)..(25): SEQ ID NO: 2420; WAN024G8P; Start 67; Stop 91
ggttactatggagctaaacacatct

SEQ ID NO: 325104 - DNA, 25 bp, Artificial
  probe
  misc_feature (1)..(25): SEQ ID NO: 2420; WAN024G8P; Start 66; Stop 90
aggttactatggagctaaacacatc

SEQ ID NO: 325105 - DNA, 25 bp, Artificial
  probe
  misc_feature (1)..(25): SEQ ID NO: 2420; WAN024G8P; Start 64; Stop 88
aaaggttactatggagctaaacaca

SEQ ID NO: 325106 - DNA, 25 bp, Artificial
  probe
  misc_feature (1)..(25): SEQ ID NO: 2420; WAN024G8P; Start 65; Stop 89
aaggttactatggagctaaacacat

SEQ ID NO: 325107 - DNA, 25 bp, Artificial
  probe
  misc_feature (1)..(25): SEQ ID NO: 2420; WAN024G8P; Start 69; Stop 93
ttactatggagctaaacacatcttg

SEQ ID NO: 325108 - DNA, 25 bp, Artificial
  probe
  misc_feature (1)..(25): SEQ ID NO: 2420; WAN024G8P; Start 70; Stop 94
tactatggagctaaacacatcttgt

SEQ ID NO: 325109 - DNA, 25 bp, Artificial
  probe
  misc_feature (1)..(25): SEQ ID NO: 2420; WAN024G8P; Start 68; Stop 92
gttactatggagctaaacacatctt

SEQ ID NO: 325110 - DNA, 25 bp, Artificial
  probe
  misc_feature (1)..(25): SEQ ID NO: 2420; WAN024G8P; Start 166; Stop 190
gacttccgcaaattgtggattactc

SEQ ID NO: 325111 - DNA, 25 bp, Artificial
  probe
  misc_feature (1)..(25): SEQ ID NO: 2420; WAN024G8P; Start 56; Stop 80
aattagcaaaaggttactatggagc

SEQ ID NO: 325112 - DNA, 25 bp, Artificial
  probe
  misc_feature (1)..(25): SEQ ID NO: 2420; WAN024G8P; Start 170; Stop 194
tccgcaaattgtggattactcgtat

SEQ ID NO: 325113 - DNA, 25 bp, Artificial
  probe
  misc_feature (1)..(25): SEQ ID NO: 2420; WAN024G8P; Start 212; Stop 236
tgaacggactttcatactcacaatt

SEQ ID NO: 325114 - DNA, 25 bp, Artificial
  probe
  misc_feature (1)..(25): SEQ ID NO: 2420; WAN024G8P; Start 169; Stop 193
ttccgcaaattgtggattactcgta

SEQ ID NO: 325115 - DNA, 25 bp, Artificial
  probe
  misc_feature (1)..(25): SEQ ID NO: 2420; WAN024G8P; Start 223; Stop 247
tcatactcacaattgatgcatggtt

SEQ ID NO: 325116 - DNA, 25 bp, Artificial
  probe
  misc_feature (1)..(25): SEQ ID NO: 2420; WAN024G8P; Start 222; Stop 246
ttcatactcacaattgatgcatggt

SEQ ID NO: 325117 - DNA, 25 bp, Artificial
  probe
  misc_feature (1)..(25): SEQ ID NO: 2420; WAN024G8P; Start 175; Stop 199
aaattgtggattactcgtatcaatg

SEQ ID NO: 325118 - DNA, 25 bp, Artificial
  probe
  misc_feature (1)..(25): SEQ ID NO: 2420; WAN024G8P; Start 174; Stop 198
caaattgtggattactcgtatcaat

SEQ ID NO: 325119 - DNA, 25 bp, Artificial
  probe
  misc_feature (1)..(25): SEQ ID NO: 2420; WAN024G8P; Start 269; Stop 293
ttaaccgtaaaatgcttgctgactt

SEQ ID NO: 325120 - DNA, 25 bp, Artificial
  probe
  misc_feature (1)..(25): SEQ ID NO: 2420; WAN024G8P; Start 165; Stop 189
tgacttccgcaaattgtggattact

SEQ ID NO: 325121 - DNA, 25 bp, Artificial
  probe
  misc_feature (1)..(25): SEQ ID NO: 2420; WAN024G8P; Start 164; Stop 188
gtgacttccgcaaattgtggattac

SEQ ID NO: 325122 - DNA, 25 bp, Artificial
  probe
  misc_feature (1)..(25): SEQ ID NO: 2420; WAN024G8P; Start 213; Stop 237
gaacggactttcatactcacaattg

SEQ ID NO: 325123 - DNA, 25 bp, Artificial
  probe
  misc_feature (1)..(25): SEQ ID NO: 2420; WAN024G8P; Start 278; Stop 302
aaatgcttgctgacttggctgttaa

SEQ ID NO: 325124 - DNA, 25 bp, Artificial
  probe
  misc_feature (1)..(25): SEQ ID NO: 2420; WAN024G8P; Start 218; Stop 242
gactttcatactcacaattgatgca

SEQ ID NO: 325125 - DNA, 25 bp, Artificial
  probe
  misc_feature (1)..(25): SEQ ID NO: 2420; WAN024G8P; Start 216; Stop 240
cggactttcatactcacaattgatg

SEQ ID NO: 325126 - DNA, 25 bp, Artificial
  probe
  misc_feature (1)..(25): SEQ ID NO: 2420; WAN024G8P; Start 217; Stop 241
ggactttcatactcacaattgatgc

SEQ ID NO: 325127 - DNA, 25 bp, Artificial
  probe
  misc_feature (1)..(25): SEQ ID NO: 2420; WAN024G8P; Start 215; Stop 239
acggactttcatactcacaattgat

SEQ ID NO: 325128 - DNA, 25 bp, Artificial
  probe
  misc_feature (1)..(25): SEQ ID NO: 2420; WAN024G8P; Start 214; Stop 238
aacggactttcatactcacaattga

SEQ ID NO: 325129 - DNA, 25 bp, Artificial
  probe
  misc_feature (1)..(25): SEQ ID NO: 2420; WAN024G8P; Start 270; Stop 294
taaccgtaaaatgcttgctgacttg

SEQ ID NO: 325130 - DNA, 25 bp, Artificial
  probe
  misc_feature (1)..(25): SEQ ID NO: 2421; WAN024D22; Start 49; Stop 73
aactattcaatcaagatcagcggaa

SEQ ID NO: 325131 - DNA, 25 bp, Artificial
  probe
  misc_feature (1)..(25): SEQ ID NO: 2421; WAN024D22; Start 129; Stop 153
cactacacacagagaaacgagatag

SEQ ID NO: 325132 - DNA, 25 bp, Artificial
  probe
  misc_feature (1)..(25): SEQ ID NO: 2421; WAN024D22; Start 128; Stop 152
acactacacacagagaaacgagata

SEQ ID NO: 325133 - DNA, 25 bp, Artificial
  probe
  misc_feature (1)..(25): SEQ ID NO: 2421; WAN024D22; Start 127; Stop 151
tacactacacacagagaaacgagat

SEQ ID NO: 325134 - DNA, 25 bp, Artificial
  probe
  misc_feature (1)..(25): SEQ ID NO: 2421; WAN024D22; Start 48; Stop 72
aaactattcaatcaagatcagcgga

SEQ ID NO: 325135 - DNA, 25 bp, Artificial
  probe
  misc_feature (1)..(25): SEQ ID NO: 2421; WAN024D22; Start 110; Stop 134
gtaagcattgtggcaagtacactac

SEQ ID NO: 325136 - DNA, 25 bp, Artificial
  probe
  misc_feature (1)..(25): SEQ ID NO: 2421; WAN024D22; Start 51; Stop 75
ctattcaatcaagatcagcggaaac

SEQ ID NO: 325137 - DNA, 25 bp, Artificial
  probe
  misc_feature (1)..(25): SEQ ID NO: 2421; WAN024D22; Start 47; Stop 71
gaaactattcaatcaagatcagcgg

SEQ ID NO: 325138 - DNA, 25 bp, Artificial
  probe
  misc_feature (1)..(25): SEQ ID NO: 2421; WAN024D22; Start 46; Stop 70
agaaactattcaatcaagatcagcg

SEQ ID NO: 325139 - DNA, 25 bp, Artificial
  probe
  misc_feature (1)..(25): SEQ ID NO: 2421; WAN024D22; Start 78; Stop 102
caagcctacacgactagaagtaaat

SEQ ID NO: 325140 - DNA, 25 bp, Artificial
  probe
  misc_feature (1)..(25): SEQ ID NO: 2421; WAN024D22; Start 50; Stop 74
actattcaatcaagatcagcggaaa

SEQ ID NO: 325141 - DNA, 25 bp, Artificial
  probe
  misc_feature (1)..(25): SEQ ID NO: 2421; WAN024D22; Start 80; Stop 104
agcctacacgactagaagtaaataa

SEQ ID NO: 325142 - DNA, 25 bp, Artificial
  probe
  misc_feature (1)..(25): SEQ ID NO: 2421; WAN024D22; Start 79; Stop 103
aagcctacacgactagaagtaaata

SEQ ID NO: 325143 - DNA, 25 bp, Artificial
  probe
  misc_feature (1)..(25): SEQ ID NO: 2421; WAN024D22; Start 111; Stop 135
taagcattgtggcaagtacactaca

SEQ ID NO: 325144 - DNA, 25 bp, Artificial
  probe
  misc_feature (1)..(25): SEQ ID NO: 2421; WAN024D22; Start 124; Stop 148
aagtacactacacacagagaaacga

SEQ ID NO: 325145 - DNA, 25 bp, Artificial
  probe
  misc_feature (1)..(25): SEQ ID NO: 2421; WAN024D22; Start 123; Stop 147
caagtacactacacacagagaaacg

SEQ ID NO: 325146 - DNA, 25 bp, Artificial
  probe
  misc_feature (1)..(25): SEQ ID NO: 2421; WAN024D22; Start 52; Stop 76
tattcaatcaagatcagcggaaacc

SEQ ID NO: 325147 - DNA, 25 bp, Artificial
  probe
  misc_feature (1)..(25): SEQ ID NO: 2421; WAN024D22; Start 122; Stop 146
gcaagtacactacacacagagaaac

SEQ ID NO: 325148 - DNA, 25 bp, Artificial
  probe
  misc_feature (1)..(25): SEQ ID NO: 2421; WAN024D22; Start 81; Stop 105
gcctacacgactagaagtaaataaa

SEQ ID NO: 325149 - DNA, 25 bp, Artificial
  probe
  misc_feature (1)..(25): SEQ ID NO: 2421; WAN024D22; Start 126; Stop 150
gtacactacacacagagaaacgaga

SEQ ID NO: 325150 - DNA, 25 bp, Artificial
  probe
  misc_feature (1)..(25): SEQ ID NO: 2421; WAN024D22; Start 125; Stop 149
agtacactacacacagagaaacgag

SEQ ID NO: 325151 - DNA, 25 bp, Artificial
  probe
  misc_feature (1)..(25): SEQ ID NO: 2421; WAN024D22; Start 45; Stop 69
gagaaactattcaatcaagatcagc

SEQ ID NO: 325152 - DNA, 25 bp, Artificial
  probe
  misc_feature (1)..(25): SEQ ID NO: 2421; WAN024D22; Start 38; Stop 62
gtggttcgagaaactattcaatcaa

SEQ ID NO: 325153 - DNA, 25 bp, Artificial
  probe
  misc_feature (1)..(25): SEQ ID NO: 2421; WAN024D22; Start 37; Stop 61
tgtggttcgagaaactattcaatca

SEQ ID NO: 325154 - DNA, 25 bp, Artificial
  probe
  misc_feature (1)..(25): SEQ ID NO: 2421; WAN024D22; Start 109; Stop 133
tgtaagcattgtggcaagtacacta

SEQ ID NO: 325155 - DNA, 25 bp, Artificial
  probe
  misc_feature (1)..(25): SEQ ID NO: 2421; WAN024D22; Start 44; Stop 68
cgagaaactattcaatcaagatcag

SEQ ID NO: 325156 - DNA, 25 bp, Artificial
  probe
  misc_feature (1)..(25): SEQ ID NO: 2421; WAN024D22; Start 39; Stop 63
tggttcgagaaactattcaatcaag

SEQ ID NO: 325157 - DNA, 25 bp, Artificial
  probe
  misc_feature (1)..(25): SEQ ID NO: 2421; WAN024D22; Start 120; Stop 144
tggcaagtacactacacacagagaa

SEQ ID NO: 325158 - DNA, 25 bp, Artificial
  probe
  misc_feature (1)..(25): SEQ ID NO: 2421; WAN024D22; Start 36; Stop 60
ttgtggttcgagaaactattcaatc

SEQ ID NO: 325159 - DNA, 25 bp, Artificial
  probe
  misc_feature (1)..(25): SEQ ID NO: 2421; WAN024D22; Start 40; Stop 64
ggttcgagaaactattcaatcaaga

SEQ ID NO: 325160 - DNA, 25 bp, Artificial
  probe
  misc_feature (1)..(25): SEQ ID NO: 2421; WAN024D22; Start 35; Stop 59
tttgtggttcgagaaactattcaat

SEQ ID NO: 325161 - DNA, 25 bp, Artificial
  probe
  misc_feature (1)..(25): SEQ ID NO: 2421; WAN024D22; Start 121; Stop 145
ggcaagtacactacacacagagaaa

SEQ ID NO: 325162 - DNA, 25 bp, Artificial
  probe
  misc_feature (1)..(25): SEQ ID NO: 2421; WAN024D22; Start 43; Stop 67
tcgagaaactattcaatcaagatca

SEQ ID NO: 325163 - DNA, 25 bp, Artificial
  probe
  misc_feature (1)..(25): SEQ ID NO: 2422; WAN024CCJ; Start 121; Stop 145
aatgtaagcgatgacttctatatgt

SEQ ID NO: 325164 - DNA, 25 bp, Artificial
  probe
  misc_feature (1)..(25): SEQ ID NO: 2422; WAN024CCJ; Start 120; Stop 144
gaatgtaagcgatgacttctatatg

SEQ ID NO: 325165 - DNA, 25 bp, Artificial
  probe
  misc_feature (1)..(25): SEQ ID NO: 2422; WAN024CCJ; Start 123; Stop 147
tgtaagcgatgacttctatatgtat

SEQ ID NO: 325166 - DNA, 25 bp, Artificial
  probe
  misc_feature (1)..(25): SEQ ID NO: 2422; WAN024CCJ; Start 122; Stop 146
atgtaagcgatgacttctatatgta

SEQ ID NO: 325167 - DNA, 25 bp, Artificial
  probe
  misc_feature (1)..(25): SEQ ID NO: 2422; WAN024CCJ; Start 124; Stop 148
gtaagcgatgacttctatatgtatc

SEQ ID NO: 325168 - DNA, 25 bp, Artificial
  probe
  misc_feature (1)..(25): SEQ ID NO: 2422; WAN024CCJ; Start 117; Stop 141
caagaatgtaagcgatgacttctat

SEQ ID NO: 325169 - DNA, 25 bp, Artificial
  probe
  misc_feature (1)..(25): SEQ ID NO: 2422; WAN024CCJ; Start 116; Stop 140
gcaagaatgtaagcgatgacttcta

SEQ ID NO: 325170 - DNA, 25 bp, Artificial
  probe
  misc_feature (1)..(25): SEQ ID NO: 2422; WAN024CCJ; Start 235; Stop 259
ggtacaatcgcaacaatcaacgtag

SEQ ID NO: 325171 - DNA, 25 bp, Artificial
  probe
  misc_feature (1)..(25): SEQ ID NO: 2422; WAN024CCJ; Start 118; Stop 142
aagaatgtaagcgatgacttctata

SEQ ID NO: 325172 - DNA, 25 bp, Artificial
  probe
  misc_feature (1)..(25): SEQ ID NO: 2422; WAN024CCJ; Start 18; Stop 42
aaacacagataacttactagacctt

SEQ ID NO: 325173 - DNA, 25 bp, Artificial
  probe
  misc_feature (1)..(25): SEQ ID NO: 2422; WAN024CCJ; Start 119; Stop 143
agaatgtaagcgatgacttctatat

SEQ ID NO: 325174 - DNA, 25 bp, Artificial
  probe
  misc_feature (1)..(25): SEQ ID NO: 2422; WAN024CCJ; Start 257; Stop 281
tagccgttctgttgaatcatgaatt

SEQ ID NO: 325175 - DNA, 25 bp, Artificial
  probe
  misc_feature (1)..(25): SEQ ID NO: 2422; WAN024CCJ; Start 236; Stop 260
gtacaatcgcaacaatcaacgtagc

SEQ ID NO: 325176 - DNA, 25 bp, Artificial
  probe
  misc_feature (1)..(25): SEQ ID NO: 2422; WAN024CCJ; Start 234; Stop 258
tggtacaatcgcaacaatcaacgta

SEQ ID NO: 325177 - DNA, 25 bp, Artificial
  probe
  misc_feature (1)..(25): SEQ ID NO: 2422; WAN024CCJ; Start 256; Stop 280
gtagccgttctgttgaatcatgaat

SEQ ID NO: 325178 - DNA, 25 bp, Artificial
  probe
  misc_feature (1)..(25): SEQ ID NO: 2422; WAN024CCJ; Start 47; Stop 71
aaatcacagaaccatttgatcttgc

SEQ ID NO: 325179 - DNA, 25 bp, Artificial
  probe
  misc_feature (1)..(25): SEQ ID NO: 2422; WAN024CCJ; Start 260; Stop 284
ccgttctgttgaatcatgaattcta

SEQ ID NO: 325180 - DNA, 25 bp, Artificial
  probe
  misc_feature (1)..(25): SEQ ID NO: 2422; WAN024CCJ; Start 3; Stop 27
ggcagaaacaattcaaaacacagat

SEQ ID NO: 325181 - DNA, 25 bp, Artificial
  probe
  misc_feature (1)..(25): SEQ ID NO: 2422; WAN024CCJ; Start 4; Stop 28
gcagaaacaattcaaaacacagata

SEQ ID NO: 325182 - DNA, 25 bp, Artificial
  probe
  misc_feature (1)..(25): SEQ ID NO: 2422; WAN024CCJ; Start 1; Stop 25
atggcagaaacaattcaaaacacag

SEQ ID NO: 325183 - DNA, 25 bp, Artificial
  probe
  misc_feature (1)..(25): SEQ ID NO: 2422; WAN024CCJ; Start 83; Stop 107
gctacatgaaagaaaatggagagtt

SEQ ID NO: 325184 - DNA, 25 bp, Artificial
  probe
  misc_feature (1)..(25): SEQ ID NO: 2422; WAN024CCJ; Start 115; Stop 139
tgcaagaatgtaagcgatgacttct

SEQ ID NO: 325185 - DNA, 25 bp, Artificial
  probe
  misc_feature (1)..(25): SEQ ID NO: 2422; WAN024CCJ; Start 2; Stop 26
tggcagaaacaattcaaaacacaga

SEQ ID NO: 325186 - DNA, 25 bp, Artificial
  probe
  misc_feature (1)..(25): SEQ ID NO: 2422; WAN024CCJ; Start 50; Stop 74
tcacagaaccatttgatcttgcgag

SEQ ID NO: 325187 - DNA, 25 bp, Artificial
  probe
  misc_feature (1)..(25): SEQ ID NO: 2422; WAN024CCJ; Start 237; Stop 261
tacaatcgcaacaatcaacgtagcc

SEQ ID NO: 325188 - DNA, 25 bp, Artificial
  probe
  misc_feature (1)..(25): SEQ ID NO: 2422; WAN024CCJ; Start 48; Stop 72
aatcacagaaccatttgatcttgcg

SEQ ID NO: 325189 - DNA, 25 bp, Artificial
  probe
  misc_feature (1)..(25): SEQ ID NO: 2422; WAN024CCJ; Start 82; Stop 106
cgctacatgaaagaaaatggagagt

SEQ ID NO: 325190 - DNA, 25 bp, Artificial
  probe
  misc_feature (1)..(25): SEQ ID NO: 2422; WAN024CCJ; Start 259; Stop 283
gccgttctgttgaatcatgaattct

SEQ ID NO: 325191 - DNA, 25 bp, Artificial
  probe
  misc_feature (1)..(25): SEQ ID NO: 2422; WAN024CCJ; Start 258; Stop 282
agccgttctgttgaatcatgaattc

SEQ ID NO: 325192 - DNA, 25 bp, Artificial
  probe
  misc_feature (1)..(25): SEQ ID NO: 2422; WAN024CCJ; Start 128; Stop 152
gcgatgacttctatatgtatcgtga

SEQ ID NO: 325193 - DNA, 25 bp, Artificial
  probe
  misc_feature (1)..(25): SEQ ID NO: 2422; WAN024CCJ; Start 127; Stop 151
agcgatgacttctatatgtatcgtg

SEQ ID NO: 325194 - DNA, 25 bp, Artificial
  probe
  misc_feature (1)..(25): SEQ ID NO: 2422; WAN024CCJ; Start 126; Stop 150
aagcgatgacttctatatgtatcgt

SEQ ID NO: 325195 - DNA, 25 bp, Artificial
  probe
  misc_feature (1)..(25): SEQ ID NO: 2422; WAN024CCJ; Start 261; Stop 285
cgttctgttgaatcatgaattctat

SEQ ID NO: 325196 - DNA, 25 bp, Artificial
  probe
  misc_feature (1)..(25): SEQ ID NO: 2423; WAN024DJO; Start 93; Stop 117
tgtaaccactcttattgtagccatt

SEQ ID NO: 325197 - DNA, 25 bp, Artificial
  probe
  misc_feature (1)..(25): SEQ ID NO: 2423; WAN024DJO; Start 92; Stop 116
ctgtaaccactcttattgtagccat

SEQ ID NO: 325198 - DNA, 25 bp, Artificial
  probe
  misc_feature (1)..(25): SEQ ID NO: 2423; WAN024DJO; Start 84; Stop 108
ttccattgctgtaaccactcttatt

SEQ ID NO: 325199 - DNA, 25 bp, Artificial
  probe
  misc_feature (1)..(25): SEQ ID NO: 2423; WAN024DJO; Start 87; Stop 111
cattgctgtaaccactcttattgta

SEQ ID NO: 325200 - DNA, 25 bp, Artificial
  probe
  misc_feature (1)..(25): SEQ ID NO: 2423; WAN024DJO; Start 85; Stop 109
tccattgctgtaaccactcttattg

SEQ ID NO: 325201 - DNA, 25 bp, Artificial
  probe
  misc_feature (1)..(25): SEQ ID NO: 2423; WAN024DJO; Start 88; Stop 112
attgctgtaaccactcttattgtag

SEQ ID NO: 325202 - DNA, 25 bp, Artificial
  probe
  misc_feature (1)..(25): SEQ ID NO: 2423; WAN024DJO; Start 218; Stop 242
agcaagaggtcaatgaactattacg

SEQ ID NO: 325203 - DNA, 25 bp, Artificial
  probe
  misc_feature (1)..(25): SEQ ID NO: 2423; WAN024DJO; Start 217; Stop 241
aagcaagaggtcaatgaactattac

SEQ ID NO: 325204 - DNA, 25 bp, Artificial
  probe
  misc_feature (1)..(25): SEQ ID NO: 2423; WAN024DJO; Start 216; Stop 240
caagcaagaggtcaatgaactatta

SEQ ID NO: 325205 - DNA, 25 bp, Artificial
  probe
  misc_feature (1)..(25): SEQ ID NO: 2423; WAN024DJO; Start 86; Stop 110
ccattgctgtaaccactcttattgt

SEQ ID NO: 325206 - DNA, 25 bp, Artificial
  probe
  misc_feature (1)..(25): SEQ ID NO: 2423; WAN024DJO; Start 215; Stop 239
ccaagcaagaggtcaatgaactatt

SEQ ID NO: 325207 - DNA, 25 bp, Artificial
  probe
  misc_feature (1)..(25): SEQ ID NO: 2423; WAN024DJO; Start 96; Stop 120
aaccactcttattgtagccattagt

SEQ ID NO: 325208 - DNA, 25 bp, Artificial
  probe
  misc_feature (1)..(25): SEQ ID NO: 2423; WAN024DJO; Start 94; Stop 118
gtaaccactcttattgtagccatta

SEQ ID NO: 325209 - DNA, 25 bp, Artificial
  probe
  misc_feature (1)..(25): SEQ ID NO: 2423; WAN024DJO; Start 97; Stop 121
accactcttattgtagccattagta

SEQ ID NO: 325210 - DNA, 25 bp, Artificial
  probe
  misc_feature (1)..(25): SEQ ID NO: 2423; WAN024DJO; Start 95; Stop 119
taaccactcttattgtagccattag

SEQ ID NO: 325211 - DNA, 25 bp, Artificial
  probe
  misc_feature (1)..(25): SEQ ID NO: 2423; WAN024DJO; Start 98; Stop 122
ccactcttattgtagccattagtat

SEQ ID NO: 325212 - DNA, 25 bp, Artificial
  probe
  misc_feature (1)..(25): SEQ ID NO: 2423; WAN024DJO; Start 220; Stop 244
caagaggtcaatgaactattacgtg

SEQ ID NO: 325213 - DNA, 25 bp, Artificial
  probe
  misc_feature (1)..(25): SEQ ID NO: 2423; WAN024DJO; Start 226; Stop 250
gtcaatgaactattacgtgcagaac

SEQ ID NO: 325214 - DNA, 25 bp, Artificial
  probe
  misc_feature (1)..(25): SEQ ID NO: 2423; WAN024DJO; Start 83; Stop 107
tttccattgctgtaaccactcttat

SEQ ID NO: 325215 - DNA, 25 bp, Artificial
  probe
  misc_feature (1)..(25): SEQ ID NO: 2423; WAN024DJO; Start 221; Stop 245
aagaggtcaatgaactattacgtgc

SEQ ID NO: 325216 - DNA, 25 bp, Artificial
  probe
  misc_feature (1)..(25): SEQ ID NO: 2423; WAN024DJO; Start 219; Stop 243
gcaagaggtcaatgaactattacgt

SEQ ID NO: 325217 - DNA, 25 bp, Artificial
  probe
  misc_feature (1)..(25): SEQ ID NO: 2423; WAN024DJO; Start 225; Stop 249
ggtcaatgaactattacgtgcagaa

SEQ ID NO: 325218 - DNA, 25 bp, Artificial
  probe
  misc_feature (1)..(25): SEQ ID NO: 2423; WAN024DJO; Start 223; Stop 247
gaggtcaatgaactattacgtgcag

SEQ ID NO: 325219 - DNA, 25 bp, Artificial
  probe
  misc_feature (1)..(25): SEQ ID NO: 2423; WAN024DJO; Start 89; Stop 113
ttgctgtaaccactcttattgtagc

SEQ ID NO: 325220 - DNA, 25 bp, Artificial
  probe
  misc_feature (1)..(25): SEQ ID NO: 2423; WAN024DJO; Start 214; Stop 238
gccaagcaagaggtcaatgaactat

SEQ ID NO: 325221 - DNA, 25 bp, Artificial
  probe
  misc_feature (1)..(25): SEQ ID NO: 2423; WAN024DJO; Start 224; Stop 248
aggtcaatgaactattacgtgcaga

SEQ ID NO: 325222 - DNA, 25 bp, Artificial
  probe
  misc_feature (1)..(25): SEQ ID NO: 2423; WAN024DJO; Start 222; Stop 246
agaggtcaatgaactattacgtgca

SEQ ID NO: 325223 - DNA, 25 bp, Artificial
  probe
  misc_feature (1)..(25): SEQ ID NO: 2423; WAN024DJO; Start 99; Stop 123
cactcttattgtagccattagtatt

SEQ ID NO: 325224 - DNA, 25 bp, Artificial
  probe
  misc_feature (1)..(25): SEQ ID NO: 2423; WAN024DJO; Start 24; Stop 48
aggtcaaatactacagatgcaactt

SEQ ID NO: 325225 - DNA, 25 bp, Artificial
  probe
  misc_feature (1)..(25): SEQ ID NO: 2423; WAN024DJO; Start 31; Stop 55
atactacagatgcaacttaaacggt

SEQ ID NO: 325226 - DNA, 25 bp, Artificial
  probe
  misc_feature (1)..(25): SEQ ID NO: 2423; WAN024DJO; Start 21; Stop 45
aacaggtcaaatactacagatgcaa

SEQ ID NO: 325227 - DNA, 25 bp, Artificial
  probe
  misc_feature (1)..(25): SEQ ID NO: 2423; WAN024DJO; Start 20; Stop 44
aaacaggtcaaatactacagatgca

SEQ ID NO: 325228 - DNA, 25 bp, Artificial
  probe
  misc_feature (1)..(25): SEQ ID NO: 2423; WAN024DJO; Start 30; Stop 54
aatactacagatgcaacttaaacgg

SEQ ID NO: 325229 - DNA, 25 bp, Artificial
  probe
  misc_feature (1)..(25): SEQ ID NO: 2424; WAN024D7S; Start 1022; Stop 1046
cagcagccttgaataactaactaat

SEQ ID NO: 325230 - DNA, 25 bp, Artificial
  probe
  misc_feature (1)..(25): SEQ ID NO: 2424; WAN024D7S; Start 898; Stop 922
aagacagttgaagcataccttgaat

SEQ ID NO: 325231 - DNA, 25 bp, Artificial
  probe
  misc_feature (1)..(25): SEQ ID NO: 2424; WAN024D7S; Start 1021; Stop 1045
gcagcagccttgaataactaactaa

SEQ ID NO: 325232 - DNA, 25 bp, Artificial
  probe
  misc_feature (1)..(25): SEQ ID NO: 2424; WAN024D7S; Start 899; Stop 923
agacagttgaagcataccttgaatc

SEQ ID NO: 325233 - DNA, 25 bp, Artificial
  probe
  misc_feature (1)..(25): SEQ ID NO: 2424; WAN024D7S; Start 903; Stop 927
agttgaagcataccttgaatcagtt

SEQ ID NO: 325234 - DNA, 25 bp, Artificial
  probe
  misc_feature (1)..(25): SEQ ID NO: 2424; WAN024D7S; Start 904; Stop 928
gttgaagcataccttgaatcagtta

SEQ ID NO: 325235 - DNA, 25 bp, Artificial
  probe
  misc_feature (1)..(25): SEQ ID NO: 2424; WAN024D7S; Start 905; Stop 929
ttgaagcataccttgaatcagttaa

SEQ ID NO: 325236 - DNA, 25 bp, Artificial
  probe
  misc_feature (1)..(25): SEQ ID NO: 2424; WAN024D7S; Start 902; Stop 926
cagttgaagcataccttgaatcagt

SEQ ID NO: 325237 - DNA, 25 bp, Artificial
  probe
  misc_feature (1)..(25): SEQ ID NO: 2424; WAN024D7S; Start 901; Stop 925
acagttgaagcataccttgaatcag

SEQ ID NO: 325238 - DNA, 25 bp, Artificial
  probe
  misc_feature (1)..(25): SEQ ID NO: 2424; WAN024D7S; Start 900; Stop 924
gacagttgaagcataccttgaatca

SEQ ID NO: 325239 - DNA, 25 bp, Artificial
  probe
  misc_feature (1)..(25): SEQ ID NO: 2424; WAN024D7S; Start 716; Stop 740
taactgatgatgttattgctcaagc

SEQ ID NO: 325240 - DNA, 25 bp, Artificial
  probe
  misc_feature (1)..(25): SEQ ID NO: 2424; WAN024D7S; Start 205; Stop 229
aatgttgcagcagttattgaagtaa

SEQ ID NO: 325241 - DNA, 25 bp, Artificial
  probe
  misc_feature (1)..(25): SEQ ID NO: 2424; WAN024D7S; Start 203; Stop 227
gtaatgttgcagcagttattgaagt

SEQ ID NO: 325242 - DNA, 25 bp, Artificial
  probe
  misc_feature (1)..(25): SEQ ID NO: 2424; WAN024D7S; Start 721; Stop 745
gatgatgttattgctcaagctgaag

SEQ ID NO: 325243 - DNA, 25 bp, Artificial
  probe
  misc_feature (1)..(25): SEQ ID NO: 2424; WAN024D7S; Start 175; Stop 199
gaaggtttgactggtgtttatgtta

SEQ ID NO: 325244 - DNA, 25 bp, Artificial
  probe
  misc_feature (1)..(25): SEQ ID NO: 2424; WAN024D7S; Start 202; Stop 226
ggtaatgttgcagcagttattgaag

SEQ ID NO: 325245 - DNA, 25 bp, Artificial
  probe
  misc_feature (1)..(25): SEQ ID NO: 2424; WAN024D7S; Start 484; Stop 508
cgtatcggtgttatttcagttgttg

SEQ ID NO: 325246 - DNA, 25 bp, Artificial
  probe
  misc_feature (1)..(25): SEQ ID NO: 2424; WAN024D7S; Start 174; Stop 198
agaaggtttgactggtgtttatgtt

SEQ ID NO: 325247 - DNA, 25 bp, Artificial
  probe
  misc_feature (1)..(25): SEQ ID NO: 2424; WAN024D7S; Start 204; Stop 228
taatgttgcagcagttattgaagta

SEQ ID NO: 325248 - DNA, 25 bp, Artificial
  probe
  misc_feature (1)..(25): SEQ ID NO: 2424; WAN024D7S; Start 720; Stop 744
tgatgatgttattgctcaagctgaa

SEQ ID NO: 325249 - DNA, 25 bp, Artificial
  probe
  misc_feature (1)..(25): SEQ ID NO: 2424; WAN024D7S; Start 717; Stop 741
aactgatgatgttattgctcaagct

SEQ ID NO: 325250 - DNA, 25 bp, Artificial
  probe
  misc_feature (1)..(25): SEQ ID NO: 2424; WAN024D7S; Start 592; Stop 616
gatgagcaattcgttaaagatgagt

SEQ ID NO: 325251 - DNA, 25 bp, Artificial
  probe
  misc_feature (1)..(25): SEQ ID NO: 2424; WAN024D7S; Start 591; Stop 615
ggatgagcaattcgttaaagatgag

SEQ ID NO: 325252 - DNA, 25 bp, Artificial
  probe
  misc_feature (1)..(25): SEQ ID NO: 2424; WAN024D7S; Start 890; Stop 914
atgacagcaagacagttgaagcata

SEQ ID NO: 325253 - DNA, 25 bp, Artificial
  probe
  misc_feature (1)..(25): SEQ ID NO: 2424; WAN024D7S; Start 593; Stop 617
atgagcaattcgttaaagatgagtt

SEQ ID NO: 325254 - DNA, 25 bp, Artificial
  probe
  misc_feature (1)..(25): SEQ ID NO: 2424; WAN024D7S; Start 266; Stop 290
tcgttgaattggtaaatactacagc

SEQ ID NO: 325255 - DNA, 25 bp, Artificial
  probe
  misc_feature (1)..(25): SEQ ID NO: 2424; WAN024D7S; Start 590; Stop 614
tggatgagcaattcgttaaagatga

SEQ ID NO: 325256 - DNA, 25 bp, Artificial
  probe
  misc_feature (1)..(25): SEQ ID NO: 2424; WAN024D7S; Start 176; Stop 200
aaggtttgactggtgtttatgttaa

SEQ ID NO: 325257 - DNA, 25 bp, Artificial
  probe
  misc_feature (1)..(25): SEQ ID NO: 2424; WAN024D7S; Start 719; Stop 743
ctgatgatgttattgctcaagctga

SEQ ID NO: 325258 - DNA, 25 bp, Artificial
  probe
  misc_feature (1)..(25): SEQ ID NO: 2424; WAN024D7S; Start 623; Stop 647
aattgaatcacgttatcgaccaaga

SEQ ID NO: 325259 - DNA, 25 bp, Artificial
  probe
  misc_feature (1)..(25): SEQ ID NO: 2424; WAN024D7S; Start 956; Stop 980
ttgaagttggtgaaggtatcgagaa

SEQ ID NO: 325260 - DNA, 25 bp, Artificial
  probe
  misc_feature (1)..(25): SEQ ID NO: 2424; WAN024D7S; Start 594; Stop 618
tgagcaattcgttaaagatgagttg

SEQ ID NO: 325261 - DNA, 25 bp, Artificial
  probe
  misc_feature (1)..(25): SEQ ID NO: 2424; WAN024D7S; Start 589; Stop 613
ttggatgagcaattcgttaaagatg

SEQ ID NO: 325262 - DNA, 25 bp, Artificial
  probe
  misc_feature (1)..(25): SEQ ID NO: 2425; WAN024C9A; Start 217; Stop 241
ttggtagtatctgaagcattcgcaa

SEQ ID NO: 325263 - DNA, 25 bp, Artificial
  probe
  misc_feature (1)..(25): SEQ ID NO: 2425; WAN024C9A; Start 107; Stop 131
caatcgcaatcttgacattcactcc

SEQ ID NO: 325264 - DNA, 25 bp, Artificial
  probe
  misc_feature (1)..(25): SEQ ID NO: 2425; WAN024C9A; Start 115; Stop 139
atcttgacattcactccaaacaaag

SEQ ID NO: 325265 - DNA, 25 bp, Artificial
  probe
  misc_feature (1)..(25): SEQ ID NO: 2425; WAN024C9A; Start 113; Stop 137
caatcttgacattcactccaaacaa

SEQ ID NO: 325266 - DNA, 25 bp, Artificial
  probe
  misc_feature (1)..(25): SEQ ID NO: 2425; WAN024C9A; Start 114; Stop 138
aatcttgacattcactccaaacaaa

SEQ ID NO: 325267 - DNA, 25 bp, Artificial
  probe
  misc_feature (1)..(25): SEQ ID NO: 2425; WAN024C9A; Start 139; Stop 163
gctgctgaaatcatcttgaaagttt

SEQ ID NO: 325268 - DNA, 25 bp, Artificial
  probe
  misc_feature (1)..(25): SEQ ID NO: 2425; WAN024C9A; Start 109; Stop 133
atcgcaatcttgacattcactccaa

SEQ ID NO: 325269 - DNA, 25 bp, Artificial
  probe
  misc_feature (1)..(25): SEQ ID NO: 2425; WAN024C9A; Start 108; Stop 132
aatcgcaatcttgacattcactcca

SEQ ID NO: 325270 - DNA, 25 bp, Artificial
  probe
  misc_feature (1)..(25): SEQ ID NO: 2425; WAN024C9A; Start 106; Stop 130
gcaatcgcaatcttgacattcactc

SEQ ID NO: 325271 - DNA, 25 bp, Artificial
  probe
  misc_feature (1)..(25): SEQ ID NO: 2425; WAN024C9A; Start 219; Stop 243
ggtagtatctgaagcattcgcaaac

SEQ ID NO: 325272 - DNA, 25 bp, Artificial
  probe
  misc_feature (1)..(25): SEQ ID NO: 2425; WAN024C9A; Start 4; Stop 28
gcagaaattacttcagctaaagcaa

SEQ ID NO: 325273 - DNA, 25 bp, Artificial
  probe
  misc_feature (1)..(25): SEQ ID NO: 2425; WAN024C9A; Start 1; Stop 25
atggcagaaattacttcagctaaag

SEQ ID NO: 325274 - DNA, 25 bp, Artificial
  probe
  misc_feature (1)..(25): SEQ ID NO: 2425; WAN024C9A; Start 239; Stop 263
caaacgaaggaccaactatgaaacg

SEQ ID NO: 325275 - DNA, 25 bp, Artificial
  probe
  misc_feature (1)..(25): SEQ ID NO: 2425; WAN024C9A; Start 8; Stop 32
aaattacttcagctaaagcaatggc

SEQ ID NO: 325276 - DNA, 25 bp, Artificial
  probe
  misc_feature (1)..(25): SEQ ID NO: 2425; WAN024C9A; Start 116; Stop 140
tcttgacattcactccaaacaaagc

SEQ ID NO: 325277 - DNA, 25 bp, Artificial
  probe
  misc_feature (1)..(25): SEQ ID NO: 2425; WAN024C9A; Start 112; Stop 136
gcaatcttgacattcactccaaaca

SEQ ID NO: 325278 - DNA, 25 bp, Artificial
  probe
  misc_feature (1)..(25): SEQ ID NO: 2425; WAN024C9A; Start 218; Stop 242
tggtagtatctgaagcattcgcaaa

SEQ ID NO: 325279 - DNA, 25 bp, Artificial
  probe
  misc_feature (1)..(25): SEQ ID NO: 2425; WAN024C9A; Start 131; Stop 155
caaacaaagctgctgaaatcatctt

SEQ ID NO: 325280 - DNA, 25 bp, Artificial
  probe
  misc_feature (1)..(25): SEQ ID NO: 2425; WAN024C9A; Start 7; Stop 31
gaaattacttcagctaaagcaatgg

SEQ ID NO: 325281 - DNA, 25 bp, Artificial
  probe
  misc_feature (1)..(25): SEQ ID NO: 2425; WAN024C9A; Start 220; Stop 244
gtagtatctgaagcattcgcaaacg

SEQ ID NO: 325282 - DNA, 25 bp, Artificial
  probe
  misc_feature (1)..(25): SEQ ID NO: 2425; WAN024C9A; Start 68; Stop 92
ttgttcttgataacatccgtggtaa

SEQ ID NO: 325283 - DNA, 25 bp, Artificial
  probe
  misc_feature (1)..(25): SEQ ID NO: 2425; WAN024C9A; Start 238; Stop 262
gcaaacgaaggaccaactatgaaac

SEQ ID NO: 325284 - DNA, 25 bp, Artificial
  probe
  misc_feature (1)..(25): SEQ ID NO: 2425; WAN024C9A; Start 136; Stop 160
aaagctgctgaaatcatcttgaaag

SEQ ID NO: 325285 - DNA, 25 bp, Artificial
  probe
  misc_feature (1)..(25): SEQ ID NO: 2425; WAN024C9A; Start 132; Stop 156
aaacaaagctgctgaaatcatcttg

SEQ ID NO: 325286 - DNA, 25 bp, Artificial
  probe
  misc_feature (1)..(25): SEQ ID NO: 2425; WAN024C9A; Start 67; Stop 91
cttgttcttgataacatccgtggta

SEQ ID NO: 325287 - DNA, 25 bp, Artificial
  probe
  misc_feature (1)..(25): SEQ ID NO: 2425; WAN024C9A; Start 135; Stop 159
caaagctgctgaaatcatcttgaaa

SEQ ID NO: 325288 - DNA, 25 bp, Artificial
  probe
  misc_feature (1)..(25): SEQ ID NO: 2425; WAN024C9A; Start 138; Stop 162
agctgctgaaatcatcttgaaagtt

SEQ ID NO: 325289 - DNA, 25 bp, Artificial
  probe
  misc_feature (1)..(25): SEQ ID NO: 2425; WAN024C9A; Start 137; Stop 161
aagctgctgaaatcatcttgaaagt

SEQ ID NO: 325290 - DNA, 25 bp, Artificial
  probe
  misc_feature (1)..(25): SEQ ID NO: 2425; WAN024C9A; Start 3; Stop 27
ggcagaaattacttcagctaaagca

SEQ ID NO: 325291 - DNA, 25 bp, Artificial
  probe
  misc_feature (1)..(25): SEQ ID NO: 2425; WAN024C9A; Start 2; Stop 26
tggcagaaattacttcagctaaagc

SEQ ID NO: 325292 - DNA, 25 bp, Artificial
  probe
  misc_feature (1)..(25): SEQ ID NO: 2425; WAN024C9A; Start 6; Stop 30
agaaattacttcagctaaagcaatg

SEQ ID NO: 325293 - DNA, 25 bp, Artificial
  probe
  misc_feature (1)..(25): SEQ ID NO: 2425; WAN024C9A; Start 5; Stop 29
cagaaattacttcagctaaagcaat

SEQ ID NO: 325294 - DNA, 25 bp, Artificial
  probe
  misc_feature (1)..(25): SEQ ID NO: 2425; WAN024C9A; Start 134; Stop 158
acaaagctgctgaaatcatcttgaa

SEQ ID NO: 325295 - DNA, 25 bp, Artificial
  probe
  misc_feature (1)..(25): SEQ ID NO: 2426; WAN024D9A; Start 533; Stop 557
gtctatctgaagagtcttatcgtgt

SEQ ID NO: 325296 - DNA, 25 bp, Artificial
  probe
  misc_feature (1)..(25): SEQ ID NO: 2426; WAN024D9A; Start 625; Stop 649
tatgtagatattacgacaggtgagc

SEQ ID NO: 325297 - DNA, 25 bp, Artificial
  probe
  misc_feature (1)..(25): SEQ ID NO: 2426; WAN024D9A; Start 534; Stop 558
tctatctgaagagtcttatcgtgtc

SEQ ID NO: 325298 - DNA, 25 bp, Artificial
  probe
  misc_feature (1)..(25): SEQ ID NO: 2426; WAN024D9A; Start 532; Stop 556
agtctatctgaagagtcttatcgtg

SEQ ID NO: 325299 - DNA, 25 bp, Artificial
  probe
  misc_feature (1)..(25): SEQ ID NO: 2426; WAN024D9A; Start 536; Stop 560
tatctgaagagtcttatcgtgtcac

SEQ ID NO: 325300 - DNA, 25 bp, Artificial
  probe
  misc_feature (1)..(25): SEQ ID NO: 2426; WAN024D9A; Start 535; Stop 559
ctatctgaagagtcttatcgtgtca

SEQ ID NO: 325301 - DNA, 25 bp, Artificial
  probe
  misc_feature (1)..(25): SEQ ID NO: 2426; WAN024D9A; Start 730; Stop 754
cattattacaaggatctgagccatg

SEQ ID NO: 325302 - DNA, 25 bp, Artificial
  probe
  misc_feature (1)..(25): SEQ ID NO: 2426; WAN024D9A; Start 728; Stop 752
ttcattattacaaggatctgagcca

SEQ ID NO: 325303 - DNA, 25 bp, Artificial
  probe
  misc_feature (1)..(25): SEQ ID NO: 2426; WAN024D9A; Start 433; Stop 457
aatccttcaggttactgtcatatcg

SEQ ID NO: 325304 - DNA, 25 bp, Artificial
  probe
  misc_feature (1)..(25): SEQ ID NO: 2426; WAN024D9A; Start 729; Stop 753
tcattattacaaggatctgagccat

SEQ ID NO: 325305 - DNA, 25 bp, Artificial
  probe
  misc_feature (1)..(25): SEQ ID NO: 2426; WAN024D9A; Start 430; Stop 454
aagaatccttcaggttactgtcata

SEQ ID NO: 325306 - DNA, 25 bp, Artificial
  probe
  misc_feature (1)..(25): SEQ ID NO: 2426; WAN024D9A; Start 530; Stop 554
ccagtctatctgaagagtcttatcg

SEQ ID NO: 325307 - DNA, 25 bp, Artificial
  probe
  misc_feature (1)..(25): SEQ ID NO: 2426; WAN024D9A; Start 529; Stop 553
gccagtctatctgaagagtcttatc

SEQ ID NO: 325308 - DNA, 25 bp, Artificial
  probe
  misc_feature (1)..(25): SEQ ID NO: 2426; WAN024D9A; Start 431; Stop 455
agaatccttcaggttactgtcatat

SEQ ID NO: 325309 - DNA, 25 bp, Artificial
  probe
  misc_feature (1)..(25): SEQ ID NO: 2426; WAN024D9A; Start 432; Stop 456
gaatccttcaggttactgtcatatc

SEQ ID NO: 325310 - DNA, 25 bp, Artificial
  probe
  misc_feature (1)..(25): SEQ ID NO: 2426; WAN024D9A; Start 727; Stop 751
attcattattacaaggatctgagcc

SEQ ID NO: 325311 - DNA, 25 bp, Artificial
  probe
  misc_feature (1)..(25): SEQ ID NO: 2426; WAN024D9A; Start 531; Stop 555
cagtctatctgaagagtcttatcgt

SEQ ID NO: 325312 - DNA, 25 bp, Artificial
  probe
  misc_feature (1)..(25): SEQ ID NO: 2426; WAN024D9A; Start 626; Stop 650
atgtagatattacgacaggtgagcc

SEQ ID NO: 325313 - DNA, 25 bp, Artificial
  probe
  misc_feature (1)..(25): SEQ ID NO: 2426; WAN024D9A; Start 388; Stop 412
cactacattctggctgaagactacc

SEQ ID NO: 325314 - DNA, 25 bp, Artificial
  probe
  misc_feature (1)..(25): SEQ ID NO: 2426; WAN024D9A; Start 851; Stop 875
gtatcaattctgcttctttacgctt

SEQ ID NO: 325315 - DNA, 25 bp, Artificial
  probe
  misc_feature (1)..(25): SEQ ID NO: 2426; WAN024D9A; Start 852; Stop 876
tatcaattctgcttctttacgcttt

SEQ ID NO: 325316 - DNA, 25 bp, Artificial
  probe
  misc_feature (1)..(25): SEQ ID NO: 2426; WAN024D9A; Start 849; Stop 873
ctgtatcaattctgcttctttacgc

SEQ ID NO: 325317 - DNA, 25 bp, Artificial
  probe
  misc_feature (1)..(25): SEQ ID NO: 2426; WAN024D9A; Start 848; Stop 872
actgtatcaattctgcttctttacg

SEQ ID NO: 325318 - DNA, 25 bp, Artificial
  probe
  misc_feature (1)..(25): SEQ ID NO: 2426; WAN024D9A; Start 850; Stop 874
tgtatcaattctgcttctttacgct

SEQ ID NO: 325319 - DNA, 25 bp, Artificial
  probe
  misc_feature (1)..(25): SEQ ID NO: 2426; WAN024D9A; Start 709; Stop 733
ccgatttccaaagagttgattcatt

SEQ ID NO: 325320 - DNA, 25 bp, Artificial
  probe
  misc_feature (1)..(25): SEQ ID NO: 2426; WAN024D9A; Start 624; Stop 648
ttatgtagatattacgacaggtgag

SEQ ID NO: 325321 - DNA, 25 bp, Artificial
  probe
  misc_feature (1)..(25): SEQ ID NO: 2426; WAN024D9A; Start 726; Stop 750
gattcattattacaaggatctgagc

SEQ ID NO: 325322 - DNA, 25 bp, Artificial
  probe
  misc_feature (1)..(25): SEQ ID NO: 2426; WAN024D9A; Start 708; Stop 732
tccgatttccaaagagttgattcat

SEQ ID NO: 325323 - DNA, 25 bp, Artificial
  probe
  misc_feature (1)..(25): SEQ ID NO: 2426; WAN024D9A; Start 279; Stop 303
tgggatttattatcaggatgaagca

SEQ ID NO: 325324 - DNA, 25 bp, Artificial
  probe
  misc_feature (1)..(25): SEQ ID NO: 2426; WAN024D9A; Start 434; Stop 458
atccttcaggttactgtcatatcga

SEQ ID NO: 325325 - DNA, 25 bp, Artificial
  probe
  misc_feature (1)..(25): SEQ ID NO: 2426; WAN024D9A; Start 235; Stop 259
tctatcaatcaacaagggaatgacc

SEQ ID NO: 325326 - DNA, 25 bp, Artificial
  probe
  misc_feature (1)..(25): SEQ ID NO: 2426; WAN024D9A; Start 853; Stop 877
atcaattctgcttctttacgctttg

SEQ ID NO: 325327 - DNA, 25 bp, Artificial
  probe
  misc_feature (1)..(25): SEQ ID NO: 2426; WAN024D9A; Start 466; Stop 490
gatgctgataagccattgattgatg

SEQ ID NO: 325328 - DNA, 25 bp, Artificial
  probe
  misc_feature (1)..(25): SEQ ID NO: 2427; WAN024FEL; Start 210; Stop 234
gatgttggaatacgcagaatatgtc

SEQ ID NO: 325329 - DNA, 25 bp, Artificial
  probe
  misc_feature (1)..(25): SEQ ID NO: 2427; WAN024FEL; Start 208; Stop 232
cagatgttggaatacgcagaatatg

SEQ ID NO: 325330 - DNA, 25 bp, Artificial
  probe
  misc_feature (1)..(25): SEQ ID NO: 2427; WAN024FEL; Start 209; Stop 233
agatgttggaatacgcagaatatgt

SEQ ID NO: 325331 - DNA, 25 bp, Artificial
  probe
  misc_feature (1)..(25): SEQ ID NO: 2427; WAN024FEL; Start 580; Stop 604
attggtcactatcaggagatgttac

SEQ ID NO: 325332 - DNA, 25 bp, Artificial
  probe
  misc_feature (1)..(25): SEQ ID NO: 2427; WAN024FEL; Start 207; Stop 231
acagatgttggaatacgcagaatat

SEQ ID NO: 325333 - DNA, 25 bp, Artificial
  probe
  misc_feature (1)..(25): SEQ ID NO: 2427; WAN024FEL; Start 579; Stop 603
cattggtcactatcaggagatgtta

SEQ ID NO: 325334 - DNA, 25 bp, Artificial
  probe
  misc_feature (1)..(25): SEQ ID NO: 2427; WAN024FEL; Start 240; Stop 264
ctactatggaactcctctgacctat

SEQ ID NO: 325335 - DNA, 25 bp, Artificial
  probe
  misc_feature (1)..(25): SEQ ID NO: 2427; WAN024FEL; Start 241; Stop 265
tactatggaactcctctgacctatg

SEQ ID NO: 325336 - DNA, 25 bp, Artificial
  probe
  misc_feature (1)..(25): SEQ ID NO: 2427; WAN024FEL; Start 206; Stop 230
gacagatgttggaatacgcagaata

SEQ ID NO: 325337 - DNA, 25 bp, Artificial
  probe
  misc_feature (1)..(25): SEQ ID NO: 2427; WAN024FEL; Start 578; Stop 602
tcattggtcactatcaggagatgtt

SEQ ID NO: 325338 - DNA, 25 bp, Artificial
  probe
  misc_feature (1)..(25): SEQ ID NO: 2427; WAN024FEL; Start 239; Stop 263
actactatggaactcctctgaccta

SEQ ID NO: 325339 - DNA, 25 bp, Artificial
  probe
  misc_feature (1)..(25): SEQ ID NO: 2427; WAN024FEL; Start 211; Stop 235
atgttggaatacgcagaatatgtcg

SEQ ID NO: 325340 - DNA, 25 bp, Artificial
  probe
  misc_feature (1)..(25): SEQ ID NO: 2427; WAN024FEL; Start 577; Stop 601
gtcattggtcactatcaggagatgt

SEQ ID NO: 325341 - DNA, 25 bp, Artificial
  probe
  misc_feature (1)..(25): SEQ ID NO: 2427; WAN024FEL; Start 576; Stop 600
tgtcattggtcactatcaggagatg

SEQ ID NO: 325342 - DNA, 25 bp, Artificial
  probe
  misc_feature (1)..(25): SEQ ID NO: 2427; WAN024FEL; Start 242; Stop 266
actatggaactcctctgacctatgt

SEQ ID NO: 325343 - DNA, 25 bp, Artificial
  probe
  misc_feature (1)..(25): SEQ ID NO: 2427; WAN024FEL; Start 238; Stop 262
aactactatggaactcctctgacct

SEQ ID NO: 325344 - DNA, 25 bp, Artificial
  probe
  misc_feature (1)..(25): SEQ ID NO: 2427; WAN024FEL; Start 243; Stop 267
ctatggaactcctctgacctatgtc

SEQ ID NO: 325345 - DNA, 25 bp, Artificial
  probe
  misc_feature (1)..(25): SEQ ID NO: 2427; WAN024FEL; Start 197; Stop 221
ttcgtcaaggacagatgttggaata

SEQ ID NO: 325346 - DNA, 25 bp, Artificial
  probe
  misc_feature (1)..(25): SEQ ID NO: 2427; WAN024FEL; Start 52; Stop 76
aaaggaacggttagaagagagattt

SEQ ID NO: 325347 - DNA, 25 bp, Artificial
  probe
  misc_feature (1)..(25): SEQ ID NO: 2427; WAN024FEL; Start 584; Stop 608
gtcactatcaggagatgttaccaaa

SEQ ID NO: 325348 - DNA, 25 bp, Artificial
  probe
  misc_feature (1)..(25): SEQ ID NO: 2427; WAN024FEL; Start 575; Stop 599
gtgtcattggtcactatcaggagat

SEQ ID NO: 325349 - DNA, 25 bp, Artificial
  probe
  misc_feature (1)..(25): SEQ ID NO: 2427; WAN024FEL; Start 607; Stop 631
aaatctccaactacccgataactaa

SEQ ID NO: 325350 - DNA, 25 bp, Artificial
  probe
  misc_feature (1)..(25): SEQ ID NO: 2427; WAN024FEL; Start 583; Stop 607
ggtcactatcaggagatgttaccaa

SEQ ID NO: 325351 - DNA, 25 bp, Artificial
  probe
  misc_feature (1)..(25): SEQ ID NO: 2427; WAN024FEL; Start 581; Stop 605
ttggtcactatcaggagatgttacc

SEQ ID NO: 325352 - DNA, 25 bp, Artificial
  probe
  misc_feature (1)..(25): SEQ ID NO: 2427; WAN024FEL; Start 608; Stop 632
aatctccaactacccgataactaat

SEQ ID NO: 325353 - DNA, 25 bp, Artificial
  probe
  misc_feature (1)..(25): SEQ ID NO: 2427; WAN024FEL; Start 205; Stop 229
ggacagatgttggaatacgcagaat

SEQ ID NO: 325354 - DNA, 25 bp, Artificial
  probe
  misc_feature (1)..(25): SEQ ID NO: 2427; WAN024FEL; Start 212; Stop 236
tgttggaatacgcagaatatgtcgg

SEQ ID NO: 325355 - DNA, 25 bp, Artificial
  probe
  misc_feature (1)..(25): SEQ ID NO: 2427; WAN024FEL; Start 415; Stop 439
ggaacagatagtgcagaagtgattg

SEQ ID NO: 325356 - DNA, 25 bp, Artificial
  probe
  misc_feature (1)..(25): SEQ ID NO: 2427; WAN024FEL; Start 198; Stop 222
tcgtcaaggacagatgttggaatac

SEQ ID NO: 325357 - DNA, 25 bp, Artificial
  probe
  misc_feature (1)..(25): SEQ ID NO: 2427; WAN024FEL; Start 414; Stop 438
tggaacagatagtgcagaagtgatt

SEQ ID NO: 325358 - DNA, 25 bp, Artificial
  probe
  misc_feature (1)..(25): SEQ ID NO: 2427; WAN024FEL; Start 151; Stop 175
ggtgttgactatttcttccgtactc

SEQ ID NO: 325359 - DNA, 25 bp, Artificial
  probe
  misc_feature (1)..(25): SEQ ID NO: 2427; WAN024FEL; Start 402; Stop 426
cttggtaggtcgtggaacagatagt

SEQ ID NO: 325360 - DNA, 25 bp, Artificial
  probe
  misc_feature (1)..(25): SEQ ID NO: 2427; WAN024FEL; Start 155; Stop 179
ttgactatttcttccgtactcgtga

SEQ ID NO: 325361 - DNA, 25 bp, Artificial
  probe
  misc_feature (1)..(25): SEQ ID NO: 2428; WAN024COE; Start 737; Stop 761
agttcagactatgacttgaccaatc

SEQ ID NO: 325362 - DNA, 25 bp, Artificial
  probe
  misc_feature (1)..(25): SEQ ID NO: 2428; WAN024COE; Start 738; Stop 762
gttcagactatgacttgaccaatca

SEQ ID NO: 325363 - DNA, 25 bp, Artificial
  probe
  misc_feature (1)..(25): SEQ ID NO: 2428; WAN024COE; Start 566; Stop 590
gatacttactggacatggaaggtac

SEQ ID NO: 325364 - DNA, 25 bp, Artificial
  probe
  misc_feature (1)..(25): SEQ ID NO: 2428; WAN024COE; Start 379; Stop 403
acgctatgtgtatatgacttatgtt

SEQ ID NO: 325365 - DNA, 25 bp, Artificial
  probe
  misc_feature (1)..(25): SEQ ID NO: 2428; WAN024COE; Start 567; Stop 591
atacttactggacatggaaggtact

SEQ ID NO: 325366 - DNA, 25 bp, Artificial
  probe
  misc_feature (1)..(25): SEQ ID NO: 2428; WAN024COE; Start 568; Stop 592
tacttactggacatggaaggtactt

SEQ ID NO: 325367 - DNA, 25 bp, Artificial
  probe
  misc_feature (1)..(25): SEQ ID NO: 2428; WAN024COE; Start 565; Stop 589
ggatacttactggacatggaaggta

SEQ ID NO: 325368 - DNA, 25 bp, Artificial
  probe
  misc_feature (1)..(25): SEQ ID NO: 2428; WAN024COE; Start 562; Stop 586
agaggatacttactggacatggaag

SEQ ID NO: 325369 - DNA, 25 bp, Artificial
  probe
  misc_feature (1)..(25): SEQ ID NO: 2428; WAN024COE; Start 587; Stop 611
gtacttctaagagcttcgaggatag

SEQ ID NO: 325370 - DNA, 25 bp, Artificial
  probe
  misc_feature (1)..(25): SEQ ID NO: 2428; WAN024COE; Start 385; Stop 409
tgtgtatatgacttatgttacggat

SEQ ID NO: 325371 - DNA, 25 bp, Artificial
  probe
  misc_feature (1)..(25): SEQ ID NO: 2428; WAN024COE; Start 384; Stop 408
atgtgtatatgacttatgttacgga

SEQ ID NO: 325372 - DNA, 25 bp, Artificial
  probe
  misc_feature (1)..(25): SEQ ID NO: 2428; WAN024COE; Start 378; Stop 402
cacgctatgtgtatatgacttatgt

SEQ ID NO: 325373 - DNA, 25 bp, Artificial
  probe
  misc_feature (1)..(25): SEQ ID NO: 2428; WAN024COE; Start 586; Stop 610
ggtacttctaagagcttcgaggata

SEQ ID NO: 325374 - DNA, 25 bp, Artificial
  probe
  misc_feature (1)..(25): SEQ ID NO: 2428; WAN024COE; Start 591; Stop 615
ttctaagagcttcgaggatagtcta

SEQ ID NO: 325375 - DNA, 25 bp, Artificial
  probe
  misc_feature (1)..(25): SEQ ID NO: 2428; WAN024COE; Start 592; Stop 616
tctaagagcttcgaggatagtctat

SEQ ID NO: 325376 - DNA, 25 bp, Artificial
  probe
  misc_feature (1)..(25): SEQ ID NO: 2428; WAN024COE; Start 72; Stop 96
tagcattcagaatcagacgtatcaa

SEQ ID NO: 325377 - DNA, 25 bp, Artificial
  probe
  misc_feature (1)..(25): SEQ ID NO: 2428; WAN024COE; Start 71; Stop 95
atagcattcagaatcagacgtatca

SEQ ID NO: 325378 - DNA, 25 bp, Artificial
  probe
  misc_feature (1)..(25): SEQ ID NO: 2428; WAN024COE; Start 563; Stop 587
gaggatacttactggacatggaagg

SEQ ID NO: 325379 - DNA, 25 bp, Artificial
  probe
  misc_feature (1)..(25): SEQ ID NO: 2428; WAN024COE; Start 69; Stop 93
ggatagcattcagaatcagacgtat

SEQ ID NO: 325380 - DNA, 25 bp, Artificial
  probe
  misc_feature (1)..(25): SEQ ID NO: 2428; WAN024COE; Start 590; Stop 614
cttctaagagcttcgaggatagtct

SEQ ID NO: 325381 - DNA, 25 bp, Artificial
  probe
  misc_feature (1)..(25): SEQ ID NO: 2428; WAN024COE; Start 588; Stop 612
tacttctaagagcttcgaggatagt

SEQ ID NO: 325382 - DNA, 25 bp, Artificial
  probe
  misc_feature (1)..(25): SEQ ID NO: 2428; WAN024COE; Start 593; Stop 617
ctaagagcttcgaggatagtctatt

SEQ ID NO: 325383 - DNA, 25 bp, Artificial
  probe
  misc_feature (1)..(25): SEQ ID NO: 2428; WAN024COE; Start 51; Stop 75
ttatttgcgaatgtgtttggatagc

SEQ ID NO: 325384 - DNA, 25 bp, Artificial
  probe
  misc_feature (1)..(25): SEQ ID NO: 2428; WAN024COE; Start 615; Stop 639
atttgaatcgttgtgtttactggta

SEQ ID NO: 325385 - DNA, 25 bp, Artificial
  probe
  misc_feature (1)..(25): SEQ ID NO: 2428; WAN024COE; Start 614; Stop 638
tatttgaatcgttgtgtttactggt

SEQ ID NO: 325386 - DNA, 25 bp, Artificial
  probe
  misc_feature (1)..(25): SEQ ID NO: 2428; WAN024COE; Start 561; Stop 585
cagaggatacttactggacatggaa

SEQ ID NO: 325387 - DNA, 25 bp, Artificial
  probe
  misc_feature (1)..(25): SEQ ID NO: 2428; WAN024COE; Start 682; Stop 706
aaagcgtatgtatgatgaaattggg

SEQ ID NO: 325388 - DNA, 25 bp, Artificial
  probe
  misc_feature (1)..(25): SEQ ID NO: 2428; WAN024COE; Start 47; Stop 71
agaattatttgcgaatgtgtttgga

SEQ ID NO: 325389 - DNA, 25 bp, Artificial
  probe
  misc_feature (1)..(25): SEQ ID NO: 2428; WAN024COE; Start 46; Stop 70
gagaattatttgcgaatgtgtttgg

SEQ ID NO: 325390 - DNA, 25 bp, Artificial
  probe
  misc_feature (1)..(25): SEQ ID NO: 2428; WAN024COE; Start 512; Stop 536
ttcaagagagagttactacaagatt

SEQ ID NO: 325391 - DNA, 25 bp, Artificial
  probe
  misc_feature (1)..(25): SEQ ID NO: 2428; WAN024COE; Start 48; Stop 72
gaattatttgcgaatgtgtttggat

SEQ ID NO: 325392 - DNA, 25 bp, Artificial
  probe
  misc_feature (1)..(25): SEQ ID NO: 2428; WAN024COE; Start 45; Stop 69
tgagaattatttgcgaatgtgtttg

SEQ ID NO: 325393 - DNA, 25 bp, Artificial
  probe
  misc_feature (1)..(25): SEQ ID NO: 2428; WAN024COE; Start 43; Stop 67
gttgagaattatttgcgaatgtgtt

SEQ ID NO: 325394 - DNA, 25 bp, Artificial
  probe
  misc_feature (1)..(25): SEQ ID NO: 2429; WAN024D9W; Start 792; Stop 816
cgaagaatatgtgctaaaggagaac

SEQ ID NO: 325395 - DNA, 25 bp, Artificial
  probe
  misc_feature (1)..(25): SEQ ID NO: 2429; WAN024D9W; Start 567; Stop 591
gtcaccaaagaatgttcataaagca

SEQ ID NO: 325396 - DNA, 25 bp, Artificial
  probe
  misc_feature (1)..(25): SEQ ID NO: 2429; WAN024D9W; Start 568; Stop 592
tcaccaaagaatgttcataaagcaa

SEQ ID NO: 325397 - DNA, 25 bp, Artificial
  probe
  misc_feature (1)..(25): SEQ ID NO: 2429; WAN024D9W; Start 373; Stop 397
agtctttatgccaaattcaatccag

SEQ ID NO: 325398 - DNA, 25 bp, Artificial
  probe
  misc_feature (1)..(25): SEQ ID NO: 2429; WAN024D9W; Start 372; Stop 396
aagtctttatgccaaattcaatcca

SEQ ID NO: 325399 - DNA, 25 bp, Artificial
  probe
  misc_feature (1)..(25): SEQ ID NO: 2429; WAN024D9W; Start 569; Stop 593
caccaaagaatgttcataaagcaac

SEQ ID NO: 325400 - DNA, 25 bp, Artificial
  probe
  misc_feature (1)..(25): SEQ ID NO: 2429; WAN024D9W; Start 793; Stop 817
gaagaatatgtgctaaaggagaact

SEQ ID NO: 325401 - DNA, 25 bp, Artificial
  probe
  misc_feature (1)..(25): SEQ ID NO: 2429; WAN024D9W; Start 374; Stop 398
gtctttatgccaaattcaatccagc

SEQ ID NO: 325402 - DNA, 25 bp, Artificial
  probe
  misc_feature (1)..(25): SEQ ID NO: 2429; WAN024D9W; Start 566; Stop 590
ggtcaccaaagaatgttcataaagc

SEQ ID NO: 325403 - DNA, 25 bp, Artificial
  probe
  misc_feature (1)..(25): SEQ ID NO: 2429; WAN024D9W; Start 502; Stop 526
aagatttctccagaattgtttgacc

SEQ ID NO: 325404 - DNA, 25 bp, Artificial
  probe
  misc_feature (1)..(25): SEQ ID NO: 2429; WAN024D9W; Start 503; Stop 527
agatttctccagaattgtttgacca

SEQ ID NO: 325405 - DNA, 25 bp, Artificial
  probe
  misc_feature (1)..(25): SEQ ID NO: 2429; WAN024D9W; Start 504; Stop 528
gatttctccagaattgtttgaccaa

SEQ ID NO: 325406 - DNA, 25 bp, Artificial
  probe
  misc_feature (1)..(25): SEQ ID NO: 2429; WAN024D9W; Start 371; Stop 395
aaagtctttatgccaaattcaatcc

SEQ ID NO: 325407 - DNA, 25 bp, Artificial
  probe
  misc_feature (1)..(25): SEQ ID NO: 2429; WAN024D9W; Start 298; Stop 322
gaaacagagaaattatcactgcctc

SEQ ID NO: 325408 - DNA, 25 bp, Artificial
  probe
  misc_feature (1)..(25): SEQ ID NO: 2429; WAN024D9W; Start 297; Stop 321
agaaacagagaaattatcactgcct

SEQ ID NO: 325409 - DNA, 25 bp, Artificial
  probe
  misc_feature (1)..(25): SEQ ID NO: 2429; WAN024D9W; Start 501; Stop 525
gaagatttctccagaattgtttgac

SEQ ID NO: 325410 - DNA, 25 bp, Artificial
  probe
  misc_feature (1)..(25): SEQ ID NO: 2429; WAN024D9W; Start 296; Stop 320
aagaaacagagaaattatcactgcc

SEQ ID NO: 325411 - DNA, 25 bp, Artificial
  probe
  misc_feature (1)..(25): SEQ ID NO: 2429; WAN024D9W; Start 800; Stop 824
atgtgctaaaggagaactaactaat

SEQ ID NO: 325412 - DNA, 25 bp, Artificial
  probe
  misc_feature (1)..(25): SEQ ID NO: 2429; WAN024D9W; Start 185; Stop 209
gtcaggaagatgagtataccattac

SEQ ID NO: 325413 - DNA, 25 bp, Artificial
  probe
  misc_feature (1)..(25): SEQ ID NO: 2429; WAN024D9W; Start 797; Stop 821
aatatgtgctaaaggagaactaact

SEQ ID NO: 325414 - DNA, 25 bp, Artificial
  probe
  misc_feature (1)..(25): SEQ ID NO: 2429; WAN024D9W; Start 796; Stop 820
gaatatgtgctaaaggagaactaac

SEQ ID NO: 325415 - DNA, 25 bp, Artificial
  probe
  misc_feature (1)..(25): SEQ ID NO: 2429; WAN024D9W; Start 377; Stop 401
tttatgccaaattcaatccagcttt

SEQ ID NO: 325416 - DNA, 25 bp, Artificial
  probe
  misc_feature (1)..(25): SEQ ID NO: 2429; WAN024D9W; Start 440; Stop 464
aaatgacctacaacaaatgcgtgac

SEQ ID NO: 325417 - DNA, 25 bp, Artificial
  probe
  misc_feature (1)..(25): SEQ ID NO: 2429; WAN024D9W; Start 439; Stop 463
caaatgacctacaacaaatgcgtga

SEQ ID NO: 325418 - DNA, 25 bp, Artificial
  probe
  misc_feature (1)..(25): SEQ ID NO: 2429; WAN024D9W; Start 376; Stop 400
ctttatgccaaattcaatccagctt

SEQ ID NO: 325419 - DNA, 25 bp, Artificial
  probe
  misc_feature (1)..(25): SEQ ID NO: 2429; WAN024D9W; Start 795; Stop 819
agaatatgtgctaaaggagaactaa

SEQ ID NO: 325420 - DNA, 25 bp, Artificial
  probe
  misc_feature (1)..(25): SEQ ID NO: 2429; WAN024D9W; Start 794; Stop 818
aagaatatgtgctaaaggagaacta

SEQ ID NO: 325421 - DNA, 25 bp, Artificial
  probe
  misc_feature (1)..(25): SEQ ID NO: 2429; WAN024D9W; Start 791; Stop 815
tcgaagaatatgtgctaaaggagaa

SEQ ID NO: 325422 - DNA, 25 bp, Artificial
  probe
  misc_feature (1)..(25): SEQ ID NO: 2429; WAN024D9W; Start 787; Stop 811
gctatcgaagaatatgtgctaaagg

SEQ ID NO: 325423 - DNA, 25 bp, Artificial
  probe
  misc_feature (1)..(25): SEQ ID NO: 2429; WAN024D9W; Start 786; Stop 810
ggctatcgaagaatatgtgctaaag

SEQ ID NO: 325424 - DNA, 25 bp, Artificial
  probe
  misc_feature (1)..(25): SEQ ID NO: 2429; WAN024D9W; Start 790; Stop 814
atcgaagaatatgtgctaaaggaga

SEQ ID NO: 325425 - DNA, 25 bp, Artificial
  probe
  misc_feature (1)..(25): SEQ ID NO: 2429; WAN024D9W; Start 295; Stop 319
gaagaaacagagaaattatcactgc

SEQ ID NO: 325426 - DNA, 25 bp, Artificial
  probe
  misc_feature (1)..(25): SEQ ID NO: 2429; WAN024D9W; Start 438; Stop 462
tcaaatgacctacaacaaatgcgtg

SEQ ID NO: 325427 - DNA, 25 bp, Artificial
  probe
  misc_feature (1)..(25): SEQ ID NO: 2430; WAN024CAW; Start 334; Stop 358
ggagtagtaaggcagattgaagaat

SEQ ID NO: 325428 - DNA, 25 bp, Artificial
  probe
  misc_feature (1)..(25): SEQ ID NO: 2430; WAN024CAW; Start 341; Stop 365
taaggcagattgaagaattgaggtt

SEQ ID NO: 325429 - DNA, 25 bp, Artificial
  probe
  misc_feature (1)..(25): SEQ ID NO: 2430; WAN024CAW; Start 333; Stop 357
tggagtagtaaggcagattgaagaa

SEQ ID NO: 325430 - DNA, 25 bp, Artificial
  probe
  misc_feature (1)..(25): SEQ ID NO: 2430; WAN024CAW; Start 332; Stop 356
ttggagtagtaaggcagattgaaga

SEQ ID NO: 325431 - DNA, 25 bp, Artificial
  probe
  misc_feature (1)..(25): SEQ ID NO: 2430; WAN024CAW; Start 339; Stop 363
agtaaggcagattgaagaattgagg

SEQ ID NO: 325432 - DNA, 25 bp, Artificial
  probe
  misc_feature (1)..(25): SEQ ID NO: 2430; WAN024CAW; Start 340; Stop 364
gtaaggcagattgaagaattgaggt

SEQ ID NO: 325433 - DNA, 25 bp, Artificial
  probe
  misc_feature (1)..(25): SEQ ID NO: 2430; WAN024CAW; Start 337; Stop 361
gtagtaaggcagattgaagaattga

SEQ ID NO: 325434 - DNA, 25 bp, Artificial
  probe
  misc_feature (1)..(25): SEQ ID NO: 2430; WAN024CAW; Start 336; Stop 360
agtagtaaggcagattgaagaattg

SEQ ID NO: 325435 - DNA, 25 bp, Artificial
  probe
  misc_feature (1)..(25): SEQ ID NO: 2430; WAN024CAW; Start 338; Stop 362
tagtaaggcagattgaagaattgag

SEQ ID NO: 325436 - DNA, 25 bp, Artificial
  probe
  misc_feature (1)..(25): SEQ ID NO: 2430; WAN024CAW; Start 335; Stop 359
gagtagtaaggcagattgaagaatt

SEQ ID NO: 325437 - DNA, 25 bp, Artificial
  probe
  misc_feature (1)..(25): SEQ ID NO: 2430; WAN024CAW; Start 345; Stop 369
gcagattgaagaattgaggttggaa

SEQ ID NO: 325438 - DNA, 25 bp, Artificial
  probe
  misc_feature (1)..(25): SEQ ID NO: 2430; WAN024CAW; Start 342; Stop 366
aaggcagattgaagaattgaggttg

SEQ ID NO: 325439 - DNA, 25 bp, Artificial
  probe
  misc_feature (1)..(25): SEQ ID NO: 2430; WAN024CAW; Start 244; Stop 268
attatgatggacagtaaggtcaacc

SEQ ID NO: 325440 - DNA, 25 bp, Artificial
  probe
  misc_feature (1)..(25): SEQ ID NO: 2430; WAN024CAW; Start 243; Stop 267
tattatgatggacagtaaggtcaac

SEQ ID NO: 325441 - DNA, 25 bp, Artificial
  probe
  misc_feature (1)..(25): SEQ ID NO: 2430; WAN024CAW; Start 234; Stop 258
actcaatgatattatgatggacagt

SEQ ID NO: 325442 - DNA, 25 bp, Artificial
  probe
  misc_feature (1)..(25): SEQ ID NO: 2430; WAN024CAW; Start 161; Stop 185
ggataaagcaagatgagatgatgga

SEQ ID NO: 325443 - DNA, 25 bp, Artificial
  probe
  misc_feature (1)..(25): SEQ ID NO: 2430; WAN024CAW; Start 160; Stop 184
aggataaagcaagatgagatgatgg

SEQ ID NO: 325444 - DNA, 25 bp, Artificial
  probe
  misc_feature (1)..(25): SEQ ID NO: 2430; WAN024CAW; Start 158; Stop 182
tgaggataaagcaagatgagatgat

SEQ ID NO: 325445 - DNA, 25 bp, Artificial
  probe
  misc_feature (1)..(25): SEQ ID NO: 2430; WAN024CAW; Start 331; Stop 355
tttggagtagtaaggcagattgaag

SEQ ID NO: 325446 - DNA, 25 bp, Artificial
  probe
  misc_feature (1)..(25): SEQ ID NO: 2430; WAN024CAW; Start 159; Stop 183
gaggataaagcaagatgagatgatg

SEQ ID NO: 325447 - DNA, 25 bp, Artificial
  probe
  misc_feature (1)..(25): SEQ ID NO: 2430; WAN024CAW; Start 360; Stop 384
gaggttggaaattgaggaagtatct

SEQ ID NO: 325448 - DNA, 25 bp, Artificial
  probe
  misc_feature (1)..(25): SEQ ID NO: 2430; WAN024CAW; Start 358; Stop 382
ttgaggttggaaattgaggaagtat

SEQ ID NO: 325449 - DNA, 25 bp, Artificial
  probe
  misc_feature (1)..(25): SEQ ID NO: 2430; WAN024CAW; Start 357; Stop 381
attgaggttggaaattgaggaagta

SEQ ID NO: 325450 - DNA, 25 bp, Artificial
  probe
  misc_feature (1)..(25): SEQ ID NO: 2430; WAN024CAW; Start 346; Stop 370
cagattgaagaattgaggttggaaa

SEQ ID NO: 325451 - DNA, 25 bp, Artificial
  probe
  misc_feature (1)..(25): SEQ ID NO: 2430; WAN024CAW; Start 359; Stop 383
tgaggttggaaattgaggaagtatc

SEQ ID NO: 325452 - DNA, 25 bp, Artificial
  probe
  misc_feature (1)..(25): SEQ ID NO: 2430; WAN024CAW; Start 239; Stop 263
atgatattatgatggacagtaaggt

SEQ ID NO: 325453 - DNA, 25 bp, Artificial
  probe
  misc_feature (1)..(25): SEQ ID NO: 2430; WAN024CAW; Start 162; Stop 186
gataaagcaagatgagatgatggat

SEQ ID NO: 325454 - DNA, 25 bp, Artificial
  probe
  misc_feature (1)..(25): SEQ ID NO: 2430; WAN024CAW; Start 361; Stop 385
aggttggaaattgaggaagtatcta

SEQ ID NO: 325455 - DNA, 25 bp, Artificial
  probe
  misc_feature (1)..(25): SEQ ID NO: 2430; WAN024CAW; Start 241; Stop 265
gatattatgatggacagtaaggtca

SEQ ID NO: 325456 - DNA, 25 bp, Artificial
  probe
  misc_feature (1)..(25): SEQ ID NO: 2430; WAN024CAW; Start 240; Stop 264
tgatattatgatggacagtaaggtc

SEQ ID NO: 325457 - DNA, 25 bp, Artificial
  probe
  misc_feature (1)..(25): SEQ ID NO: 2430; WAN024CAW; Start 289; Stop 313
gcaaaggctatacttgaacaatctt

SEQ ID NO: 325458 - DNA, 25 bp, Artificial
  probe
  misc_feature (1)..(25): SEQ ID NO: 2430; WAN024CAW; Start 157; Stop 181
ttgaggataaagcaagatgagatga

SEQ ID NO: 325459 - DNA, 25 bp, Artificial
  probe
  misc_feature (1)..(25): SEQ ID NO: 2430; WAN024CAW; Start 154; Stop 178
acattgaggataaagcaagatgaga

SEQ ID NO: 325460 - DNA, 25 bp, Artificial
  probe
  misc_feature (1)..(25): SEQ ID NO: 2431; WAN024DOS; Start 53; Stop 77
cagatgaagttgatggaatgcgatt

SEQ ID NO: 325461 - DNA, 25 bp, Artificial
  probe
  misc_feature (1)..(25): SEQ ID NO: 2431; WAN024DOS; Start 27; Stop 51
attagtatctgttcaagttgacgaa

SEQ ID NO: 325462 - DNA, 25 bp, Artificial
  probe
  misc_feature (1)..(25): SEQ ID NO: 2431; WAN024DOS; Start 26; Stop 50
aattagtatctgttcaagttgacga

SEQ ID NO: 325463 - DNA, 25 bp, Artificial
  probe
  misc_feature (1)..(25): SEQ ID NO: 2431; WAN024DOS; Start 25; Stop 49
caattagtatctgttcaagttgacg

SEQ ID NO: 325464 - DNA, 25 bp, Artificial
  probe
  misc_feature (1)..(25): SEQ ID NO: 2431; WAN024DOS; Start 56; Stop 80
atgaagttgatggaatgcgatttag

SEQ ID NO: 325465 - DNA, 25 bp, Artificial
  probe
  misc_feature (1)..(25): SEQ ID NO: 2431; WAN024DOS; Start 55; Stop 79
gatgaagttgatggaatgcgattta

SEQ ID NO: 325466 - DNA, 25 bp, Artificial
  probe
  misc_feature (1)..(25): SEQ ID NO: 2431; WAN024DOS; Start 52; Stop 76
acagatgaagttgatggaatgcgat

SEQ ID NO: 325467 - DNA, 25 bp, Artificial
  probe
  misc_feature (1)..(25): SEQ ID NO: 2431; WAN024DOS; Start 58; Stop 82
gaagttgatggaatgcgatttagta

SEQ ID NO: 325468 - DNA, 25 bp, Artificial
  probe
  misc_feature (1)..(25): SEQ ID NO: 2431; WAN024DOS; Start 57; Stop 81
tgaagttgatggaatgcgatttagt

SEQ ID NO: 325469 - DNA, 25 bp, Artificial
  probe
  misc_feature (1)..(25): SEQ ID NO: 2431; WAN024DOS; Start 54; Stop 78
agatgaagttgatggaatgcgattt

SEQ ID NO: 325470 - DNA, 25 bp, Artificial
  probe
  misc_feature (1)..(25): SEQ ID NO: 2431; WAN024DOS; Start 48; Stop 72
cgaaacagatgaagttgatggaatg

SEQ ID NO: 325471 - DNA, 25 bp, Artificial
  probe
  misc_feature (1)..(25): SEQ ID NO: 2431; WAN024DOS; Start 49; Stop 73
gaaacagatgaagttgatggaatgc

SEQ ID NO: 325472 - DNA, 25 bp, Artificial
  probe
  misc_feature (1)..(25): SEQ ID NO: 2431; WAN024DOS; Start 43; Stop 67
gttgacgaaacagatgaagttgatg

SEQ ID NO: 325473 - DNA, 25 bp, Artificial
  probe
  misc_feature (1)..(25): SEQ ID NO: 2431; WAN024DOS; Start 42; Stop 66
agttgacgaaacagatgaagttgat

SEQ ID NO: 325474 - DNA, 25 bp, Artificial
  probe
  misc_feature (1)..(25): SEQ ID NO: 2431; WAN024DOS; Start 47; Stop 71
acgaaacagatgaagttgatggaat

SEQ ID NO: 325475 - DNA, 25 bp, Artificial
  probe
  misc_feature (1)..(25): SEQ ID NO: 2431; WAN024DOS; Start 51; Stop 75
aacagatgaagttgatggaatgcga

SEQ ID NO: 325476 - DNA, 25 bp, Artificial
  probe
  misc_feature (1)..(25): SEQ ID NO: 2431; WAN024DOS; Start 41; Stop 65
aagttgacgaaacagatgaagttga

SEQ ID NO: 325477 - DNA, 25 bp, Artificial
  probe
  misc_feature (1)..(25): SEQ ID NO: 2431; WAN024DOS; Start 59; Stop 83
aagttgatggaatgcgatttagtac

SEQ ID NO: 325478 - DNA, 25 bp, Artificial
  probe
  misc_feature (1)..(25): SEQ ID NO: 2431; WAN024DOS; Start 60; Stop 84
agttgatggaatgcgatttagtaca

SEQ ID NO: 325479 - DNA, 25 bp, Artificial
  probe
  misc_feature (1)..(25): SEQ ID NO: 2431; WAN024DOS; Start 40; Stop 64
caagttgacgaaacagatgaagttg

SEQ ID NO: 325480 - DNA, 25 bp, Artificial
  probe
  misc_feature (1)..(25): SEQ ID NO: 2431; WAN024DOS; Start 61; Stop 85
gttgatggaatgcgatttagtacat

SEQ ID NO: 325481 - DNA, 25 bp, Artificial
  probe
  misc_feature (1)..(25): SEQ ID NO: 2431; WAN024DOS; Start 46; Stop 70
gacgaaacagatgaagttgatggaa

SEQ ID NO: 325482 - DNA, 25 bp, Artificial
  probe
  misc_feature (1)..(25): SEQ ID NO: 2431; WAN024DOS; Start 44; Stop 68
ttgacgaaacagatgaagttgatgg

SEQ ID NO: 325483 - DNA, 25 bp, Artificial
  probe
  misc_feature (1)..(25): SEQ ID NO: 2431; WAN024DOS; Start 29; Stop 53
tagtatctgttcaagttgacgaaac

SEQ ID NO: 325484 - DNA, 25 bp, Artificial
  probe
  misc_feature (1)..(25): SEQ ID NO: 2431; WAN024DOS; Start 39; Stop 63
tcaagttgacgaaacagatgaagtt

SEQ ID NO: 325485 - DNA, 25 bp, Artificial
  probe
  misc_feature (1)..(25): SEQ ID NO: 2431; WAN024DOS; Start 50; Stop 74
aaacagatgaagttgatggaatgcg

SEQ ID NO: 325486 - DNA, 25 bp, Artificial
  probe
  misc_feature (1)..(25): SEQ ID NO: 2431; WAN024DOS; Start 28; Stop 52
ttagtatctgttcaagttgacgaaa

SEQ ID NO: 325487 - DNA, 25 bp, Artificial
  probe
  misc_feature (1)..(25): SEQ ID NO: 2431; WAN024DOS; Start 45; Stop 69
tgacgaaacagatgaagttgatgga

SEQ ID NO: 325488 - DNA, 25 bp, Artificial
  probe
  misc_feature (1)..(25): SEQ ID NO: 2431; WAN024DOS; Start 22; Stop 46
cttcaattagtatctgttcaagttg

SEQ ID NO: 325489 - DNA, 25 bp, Artificial
  probe
  misc_feature (1)..(25): SEQ ID NO: 2431; WAN024DOS; Start 21; Stop 45
tcttcaattagtatctgttcaagtt

SEQ ID NO: 325490 - DNA, 25 bp, Artificial
  probe
  misc_feature (1)..(25): SEQ ID NO: 2431; WAN024DOS; Start 20; Stop 44
atcttcaattagtatctgttcaagt

SEQ ID NO: 325491 - DNA, 25 bp, Artificial
  probe
  misc_feature (1)..(25): SEQ ID NO: 2431; WAN024DOS; Start 62; Stop 86
ttgatggaatgcgatttagtacatt

SEQ ID NO: 325492 - DNA, 25 bp, Artificial
  probe
  misc_feature (1)..(25): SEQ ID NO: 2431; WAN024DOS; Start 24; Stop 48
tcaattagtatctgttcaagttgac

SEQ ID NO: 325493 - DNA, 25 bp, Artificial
  probe
  misc_feature (1)..(25): SEQ ID NO: 2432; WAN024GI4; Start 712; Stop 736
gagacttacttgcgagagaatatga

SEQ ID NO: 325494 - DNA, 25 bp, Artificial
  probe
  misc_feature (1)..(25): SEQ ID NO: 2432; WAN024GI4; Start 713; Stop 737
agacttacttgcgagagaatatgaa

SEQ ID NO: 325495 - DNA, 25 bp, Artificial
  probe
  misc_feature (1)..(25): SEQ ID NO: 2432; WAN024GI4; Start 826; Stop 850
tatatggtcgttcctcctgttgata

SEQ ID NO: 325496 - DNA, 25 bp, Artificial
  probe
  misc_feature (1)..(25): SEQ ID NO: 2432; WAN024GI4; Start 823; Stop 847
gattatatggtcgttcctcctgttg

SEQ ID NO: 325497 - DNA, 25 bp, Artificial
  probe
  misc_feature (1)..(25): SEQ ID NO: 2432; WAN024GI4; Start 822; Stop 846
agattatatggtcgttcctcctgtt

SEQ ID NO: 325498 - DNA, 25 bp, Artificial
  probe
  misc_feature (1)..(25): SEQ ID NO: 2432; WAN024GI4; Start 821; Stop 845
aagattatatggtcgttcctcctgt

SEQ ID NO: 325499 - DNA, 25 bp, Artificial
  probe
  misc_feature (1)..(25): SEQ ID NO: 2432; WAN024GI4; Start 714; Stop 738
gacttacttgcgagagaatatgaat

SEQ ID NO: 325500 - DNA, 25 bp, Artificial
  probe
  misc_feature (1)..(25): SEQ ID NO: 2432; WAN024GI4; Start 711; Stop 735
cgagacttacttgcgagagaatatg

SEQ ID NO: 325501 - DNA, 25 bp, Artificial
  probe
  misc_feature (1)..(25): SEQ ID NO: 2432; WAN024GI4; Start 827; Stop 851
atatggtcgttcctcctgttgataa

SEQ ID NO: 325502 - DNA, 25 bp, Artificial
  probe
  misc_feature (1)..(25): SEQ ID NO: 2432; WAN024GI4; Start 825; Stop 849
ttatatggtcgttcctcctgttgat

SEQ ID NO: 325503 - DNA, 25 bp, Artificial
  probe
  misc_feature (1)..(25): SEQ ID NO: 2432; WAN024GI4; Start 824; Stop 848
attatatggtcgttcctcctgttga

SEQ ID NO: 325504 - DNA, 25 bp, Artificial
  probe
  misc_feature (1)..(25): SEQ ID NO: 2432; WAN024GI4; Start 828; Stop 852
tatggtcgttcctcctgttgataag

SEQ ID NO: 325505 - DNA, 25 bp, Artificial
  probe
  misc_feature (1)..(25): SEQ ID NO: 2432; WAN024GI4; Start 715; Stop 739
acttacttgcgagagaatatgaata

SEQ ID NO: 325506 - DNA, 25 bp, Artificial
  probe
  misc_feature (1)..(25): SEQ ID NO: 2432; WAN024GI4; Start 640; Stop 664
tgtaattcaagctgtaaggattcac

SEQ ID NO: 325507 - DNA, 25 bp, Artificial
  probe
  misc_feature (1)..(25): SEQ ID NO: 2432; WAN024GI4; Start 710; Stop 734
gcgagacttacttgcgagagaatat

SEQ ID NO: 325508 - DNA, 25 bp, Artificial
  probe
  misc_feature (1)..(25): SEQ ID NO: 2432; WAN024GI4; Start 834; Stop 858
cgttcctcctgttgataagagagag

SEQ ID NO: 325509 - DNA, 25 bp, Artificial
  probe
  misc_feature (1)..(25): SEQ ID NO: 2432; WAN024GI4; Start 528; Stop 552
ggaaatgtttagactggaaggtaga

SEQ ID NO: 325510 - DNA, 25 bp, Artificial
  probe
  misc_feature (1)..(25): SEQ ID NO: 2432; WAN024GI4; Start 527; Stop 551
aggaaatgtttagactggaaggtag

SEQ ID NO: 325511 - DNA, 25 bp, Artificial
  probe
  misc_feature (1)..(25): SEQ ID NO: 2432; WAN024GI4; Start 521; Stop 545
tgatgaaggaaatgtttagactgga

SEQ ID NO: 325512 - DNA, 25 bp, Artificial
  probe
  misc_feature (1)..(25): SEQ ID NO: 2432; WAN024GI4; Start 820; Stop 844
aaagattatatggtcgttcctcctg

SEQ ID NO: 325513 - DNA, 25 bp, Artificial
  probe
  misc_feature (1)..(25): SEQ ID NO: 2432; WAN024GI4; Start 816; Stop 840
cggtaaagattatatggtcgttcct

SEQ ID NO: 325514 - DNA, 25 bp, Artificial
  probe
  misc_feature (1)..(25): SEQ ID NO: 2432; WAN024GI4; Start 520; Stop 544
ctgatgaaggaaatgtttagactgg

SEQ ID NO: 325515 - DNA, 25 bp, Artificial
  probe
  misc_feature (1)..(25): SEQ ID NO: 2432; WAN024GI4; Start 639; Stop 663
atgtaattcaagctgtaaggattca

SEQ ID NO: 325516 - DNA, 25 bp, Artificial
  probe
  misc_feature (1)..(25): SEQ ID NO: 2432; WAN024GI4; Start 526; Stop 550
aaggaaatgtttagactggaaggta

SEQ ID NO: 325517 - DNA, 25 bp, Artificial
  probe
  misc_feature (1)..(25): SEQ ID NO: 2432; WAN024GI4; Start 870; Stop 894
tttagagttgagttacggagaagaa

SEQ ID NO: 325518 - DNA, 25 bp, Artificial
  probe
  misc_feature (1)..(25): SEQ ID NO: 2432; WAN024GI4; Start 128; Stop 152
tagcgtattctttaagtggaggtag

SEQ ID NO: 325519 - DNA, 25 bp, Artificial
  probe
  misc_feature (1)..(25): SEQ ID NO: 2432; WAN024GI4; Start 126; Stop 150
gatagcgtattctttaagtggaggt

SEQ ID NO: 325520 - DNA, 25 bp, Artificial
  probe
  misc_feature (1)..(25): SEQ ID NO: 2432; WAN024GI4; Start 525; Stop 549
gaaggaaatgtttagactggaaggt

SEQ ID NO: 325521 - DNA, 25 bp, Artificial
  probe
  misc_feature (1)..(25): SEQ ID NO: 2432; WAN024GI4; Start 524; Stop 548
tgaaggaaatgtttagactggaagg

SEQ ID NO: 325522 - DNA, 25 bp, Artificial
  probe
  misc_feature (1)..(25): SEQ ID NO: 2432; WAN024GI4; Start 131; Stop 155
cgtattctttaagtggaggtagcat

SEQ ID NO: 325523 - DNA, 25 bp, Artificial
  probe
  misc_feature (1)..(25): SEQ ID NO: 2432; WAN024GI4; Start 122; Stop 146
atgggatagcgtattctttaagtgg

SEQ ID NO: 325524 - DNA, 25 bp, Artificial
  probe
  misc_feature (1)..(25): SEQ ID NO: 2432; WAN024GI4; Start 835; Stop 859
gttcctcctgttgataagagagagc

SEQ ID NO: 325525 - DNA, 25 bp, Artificial
  probe
  misc_feature (1)..(25): SEQ ID NO: 2432; WAN024GI4; Start 833; Stop 857
tcgttcctcctgttgataagagaga

SEQ ID NO: 325526 - DNA, 25 bp, Artificial
  probe
  misc_feature (1)..(25): SEQ ID NO: 2433; WAN024CYK; Start 80; Stop 104
taaactttgacgaaactactggaga

SEQ ID NO: 325527 - DNA, 25 bp, Artificial
  probe
  misc_feature (1)..(25): SEQ ID NO: 2433; WAN024CYK; Start 85; Stop 109
tttgacgaaactactggagattact

SEQ ID NO: 325528 - DNA, 25 bp, Artificial
  probe
  misc_feature (1)..(25): SEQ ID NO: 2433; WAN024CYK; Start 83; Stop 107
actttgacgaaactactggagatta

SEQ ID NO: 325529 - DNA, 25 bp, Artificial
  probe
  misc_feature (1)..(25): SEQ ID NO: 2433; WAN024CYK; Start 82; Stop 106
aactttgacgaaactactggagatt

SEQ ID NO: 325530 - DNA, 25 bp, Artificial
  probe
  misc_feature (1)..(25): SEQ ID NO: 2433; WAN024CYK; Start 81; Stop 105
aaactttgacgaaactactggagat

SEQ ID NO: 325531 - DNA, 25 bp, Artificial
  probe
  misc_feature (1)..(25): SEQ ID NO: 2433; WAN024CYK; Start 79; Stop 103
gtaaactttgacgaaactactggag

SEQ ID NO: 325532 - DNA, 25 bp, Artificial
  probe
  misc_feature (1)..(25): SEQ ID NO: 2433; WAN024CYK; Start 77; Stop 101
ctgtaaactttgacgaaactactgg

SEQ ID NO: 325533 - DNA, 25 bp, Artificial
  probe
  misc_feature (1)..(25): SEQ ID NO: 2433; WAN024CYK; Start 71; Stop 95
ctccatctgtaaactttgacgaaac

SEQ ID NO: 325534 - DNA, 25 bp, Artificial
  probe
  misc_feature (1)..(25): SEQ ID NO: 2433; WAN024CYK; Start 84; Stop 108
ctttgacgaaactactggagattac

SEQ ID NO: 325535 - DNA, 25 bp, Artificial
  probe
  misc_feature (1)..(25): SEQ ID NO: 2433; WAN024CYK; Start 78; Stop 102
tgtaaactttgacgaaactactgga

SEQ ID NO: 325536 - DNA, 25 bp, Artificial
  probe
  misc_feature (1)..(25): SEQ ID NO: 2433; WAN024CYK; Start 72; Stop 96
tccatctgtaaactttgacgaaact

SEQ ID NO: 325537 - DNA, 25 bp, Artificial
  probe
  misc_feature (1)..(25): SEQ ID NO: 2433; WAN024CYK; Start 73; Stop 97
ccatctgtaaactttgacgaaacta

SEQ ID NO: 325538 - DNA, 25 bp, Artificial
  probe
  misc_feature (1)..(25): SEQ ID NO: 2433; WAN024CYK; Start 76; Stop 100
tctgtaaactttgacgaaactactg

SEQ ID NO: 325539 - DNA, 25 bp, Artificial
  probe
  misc_feature (1)..(25): SEQ ID NO: 2433; WAN024CYK; Start 128; Stop 152
cacttaaaggatactacaaaggacg

SEQ ID NO: 325540 - DNA, 25 bp, Artificial
  probe
  misc_feature (1)..(25): SEQ ID NO: 2433; WAN024CYK; Start 75; Stop 99
atctgtaaactttgacgaaactact

SEQ ID NO: 325541 - DNA, 25 bp, Artificial
  probe
  misc_feature (1)..(25): SEQ ID NO: 2433; WAN024CYK; Start 74; Stop 98
catctgtaaactttgacgaaactac

SEQ ID NO: 325542 - DNA, 25 bp, Artificial
  probe
  misc_feature (1)..(25): SEQ ID NO: 2433; WAN024CYK; Start 86; Stop 110
ttgacgaaactactggagattactc

SEQ ID NO: 325543 - DNA, 25 bp, Artificial
  probe
  misc_feature (1)..(25): SEQ ID NO: 2433; WAN024CYK; Start 93; Stop 117
aactactggagattactcacgttct

SEQ ID NO: 325544 - DNA, 25 bp, Artificial
  probe
  misc_feature (1)..(25): SEQ ID NO: 2433; WAN024CYK; Start 88; Stop 112
gacgaaactactggagattactcac

SEQ ID NO: 325545 - DNA, 25 bp, Artificial
  probe
  misc_feature (1)..(25): SEQ ID NO: 2433; WAN024CYK; Start 70; Stop 94
gctccatctgtaaactttgacgaaa

SEQ ID NO: 325546 - DNA, 25 bp, Artificial
  probe
  misc_feature (1)..(25): SEQ ID NO: 2433; WAN024CYK; Start 87; Stop 111
tgacgaaactactggagattactca

SEQ ID NO: 325547 - DNA, 25 bp, Artificial
  probe
  misc_feature (1)..(25): SEQ ID NO: 2433; WAN024CYK; Start 116; Stop 140
ctcaccgtgtatcacttaaaggata

SEQ ID NO: 325548 - DNA, 25 bp, Artificial
  probe
  misc_feature (1)..(25): SEQ ID NO: 2433; WAN024CYK; Start 127; Stop 151
tcacttaaaggatactacaaaggac

SEQ ID NO: 325549 - DNA, 25 bp, Artificial
  probe
  misc_feature (1)..(25): SEQ ID NO: 2433; WAN024CYK; Start 115; Stop 139
tctcaccgtgtatcacttaaaggat

SEQ ID NO: 325550 - DNA, 25 bp, Artificial
  probe
  misc_feature (1)..(25): SEQ ID NO: 2433; WAN024CYK; Start 114; Stop 138
ttctcaccgtgtatcacttaaagga

SEQ ID NO: 325551 - DNA, 25 bp, Artificial
  probe
  misc_feature (1)..(25): SEQ ID NO: 2433; WAN024CYK; Start 113; Stop 137
gttctcaccgtgtatcacttaaagg

SEQ ID NO: 325552 - DNA, 25 bp, Artificial
  probe
  misc_feature (1)..(25): SEQ ID NO: 2433; WAN024CYK; Start 46; Stop 70
cgtcgtacacactacaaagtaacag

SEQ ID NO: 325553 - DNA, 25 bp, Artificial
  probe
  misc_feature (1)..(25): SEQ ID NO: 2433; WAN024CYK; Start 89; Stop 113
acgaaactactggagattactcacg

SEQ ID NO: 325554 - DNA, 25 bp, Artificial
  probe
  misc_feature (1)..(25): SEQ ID NO: 2433; WAN024CYK; Start 112; Stop 136
cgttctcaccgtgtatcacttaaag

SEQ ID NO: 325555 - DNA, 25 bp, Artificial
  probe
  misc_feature (1)..(25): SEQ ID NO: 2433; WAN024CYK; Start 47; Stop 71
gtcgtacacactacaaagtaacagc

SEQ ID NO: 325556 - DNA, 25 bp, Artificial
  probe
  misc_feature (1)..(25): SEQ ID NO: 2433; WAN024CYK; Start 129; Stop 153
acttaaaggatactacaaaggacgt

SEQ ID NO: 325557 - DNA, 25 bp, Artificial
  probe
  misc_feature (1)..(25): SEQ ID NO: 2433; WAN024CYK; Start 50; Stop 74
gtacacactacaaagtaacagctcc

SEQ ID NO: 325558 - DNA, 25 bp, Artificial
  probe
  misc_feature (1)..(25): SEQ ID NO: 2433; WAN024CYK; Start 126; Stop 150
atcacttaaaggatactacaaagga

SEQ ID NO: 325559 - DNA, 25 bp, Artificial
  probe
  misc_feature (1)..(25): SEQ ID NO: 2434; WAN024CDY; Start 136; Stop 160
gattattctgatcctgaactgatgc

SEQ ID NO: 325560 - DNA, 25 bp, Artificial
  probe
  misc_feature (1)..(25): SEQ ID NO: 2434; WAN024CDY; Start 168; Stop 192
tgtaacttcggttgctaacaatctg

SEQ ID NO: 325561 - DNA, 25 bp, Artificial
  probe
  misc_feature (1)..(25): SEQ ID NO: 2434; WAN024CDY; Start 167; Stop 191
gtgtaacttcggttgctaacaatct

SEQ ID NO: 325562 - DNA, 25 bp, Artificial
  probe
  misc_feature (1)..(25): SEQ ID NO: 2434; WAN024CDY; Start 135; Stop 159
agattattctgatcctgaactgatg

SEQ ID NO: 325563 - DNA, 25 bp, Artificial
  probe
  misc_feature (1)..(25): SEQ ID NO: 2434; WAN024CDY; Start 173; Stop 197
cttcggttgctaacaatctgcttac

SEQ ID NO: 325564 - DNA, 25 bp, Artificial
  probe
  misc_feature (1)..(25): SEQ ID NO: 2434; WAN024CDY; Start 137; Stop 161
attattctgatcctgaactgatgca

SEQ ID NO: 325565 - DNA, 25 bp, Artificial
  probe
  misc_feature (1)..(25): SEQ ID NO: 2434; WAN024CDY; Start 172; Stop 196
acttcggttgctaacaatctgctta

SEQ ID NO: 325566 - DNA, 25 bp, Artificial
  probe
  misc_feature (1)..(25): SEQ ID NO: 2434; WAN024CDY; Start 170; Stop 194
taacttcggttgctaacaatctgct

SEQ ID NO: 325567 - DNA, 25 bp, Artificial
  probe
  misc_feature (1)..(25): SEQ ID NO: 2434; WAN024CDY; Start 169; Stop 193
gtaacttcggttgctaacaatctgc

SEQ ID NO: 325568 - DNA, 25 bp, Artificial
  probe
  misc_feature (1)..(25): SEQ ID NO: 2434; WAN024CDY; Start 166; Stop 190
ggtgtaacttcggttgctaacaatc

SEQ ID NO: 325569 - DNA, 25 bp, Artificial
  probe
  misc_feature (1)..(25): SEQ ID NO: 2434; WAN024CDY; Start 161; Stop 185
atgttggtgtaacttcggttgctaa

SEQ ID NO: 325570 - DNA, 25 bp, Artificial
  probe
  misc_feature (1)..(25): SEQ ID NO: 2434; WAN024CDY; Start 175; Stop 199
tcggttgctaacaatctgcttacaa

SEQ ID NO: 325571 - DNA, 25 bp, Artificial
  probe
  misc_feature (1)..(25): SEQ ID NO: 2434; WAN024CDY; Start 174; Stop 198
ttcggttgctaacaatctgcttaca

SEQ ID NO: 325572 - DNA, 25 bp, Artificial
  probe
  misc_feature (1)..(25): SEQ ID NO: 2434; WAN024CDY; Start 133; Stop 157
ctagattattctgatcctgaactga

SEQ ID NO: 325573 - DNA, 25 bp, Artificial
  probe
  misc_feature (1)..(25): SEQ ID NO: 2434; WAN024CDY; Start 165; Stop 189
tggtgtaacttcggttgctaacaat

SEQ ID NO: 325574 - DNA, 25 bp, Artificial
  probe
  misc_feature (1)..(25): SEQ ID NO: 2434; WAN024CDY; Start 83; Stop 107
aattggataagcgtattgctcagac

SEQ ID NO: 325575 - DNA, 25 bp, Artificial
  probe
  misc_feature (1)..(25): SEQ ID NO: 2434; WAN024CDY; Start 164; Stop 188
ttggtgtaacttcggttgctaacaa

SEQ ID NO: 325576 - DNA, 25 bp, Artificial
  probe
  misc_feature (1)..(25): SEQ ID NO: 2434; WAN024CDY; Start 171; Stop 195
aacttcggttgctaacaatctgctt

SEQ ID NO: 325577 - DNA, 25 bp, Artificial
  probe
  misc_feature (1)..(25): SEQ ID NO: 2434; WAN024CDY; Start 134; Stop 158
tagattattctgatcctgaactgat

SEQ ID NO: 325578 - DNA, 25 bp, Artificial
  probe
  misc_feature (1)..(25): SEQ ID NO: 2434; WAN024CDY; Start 88; Stop 112
gataagcgtattgctcagactgttg

SEQ ID NO: 325579 - DNA, 25 bp, Artificial
  probe
  misc_feature (1)..(25): SEQ ID NO: 2434; WAN024CDY; Start 162; Stop 186
tgttggtgtaacttcggttgctaac

SEQ ID NO: 325580 - DNA, 25 bp, Artificial
  probe
  misc_feature (1)..(25): SEQ ID NO: 2434; WAN024CDY; Start 84; Stop 108
attggataagcgtattgctcagact

SEQ ID NO: 325581 - DNA, 25 bp, Artificial
  probe
  misc_feature (1)..(25): SEQ ID NO: 2434; WAN024CDY; Start 176; Stop 200
cggttgctaacaatctgcttacaaa

SEQ ID NO: 325582 - DNA, 25 bp, Artificial
  probe
  misc_feature (1)..(25): SEQ ID NO: 2434; WAN024CDY; Start 113; Stop 137
cagaaggctatgctcgtaatctaga

SEQ ID NO: 325583 - DNA, 25 bp, Artificial
  probe
  misc_feature (1)..(25): SEQ ID NO: 2434; WAN024CDY; Start 163; Stop 187
gttggtgtaacttcggttgctaaca

SEQ ID NO: 325584 - DNA, 25 bp, Artificial
  probe
  misc_feature (1)..(25): SEQ ID NO: 2434; WAN024CDY; Start 160; Stop 184
catgttggtgtaacttcggttgcta

SEQ ID NO: 325585 - DNA, 25 bp, Artificial
  probe
  misc_feature (1)..(25): SEQ ID NO: 2434; WAN024CDY; Start 81; Stop 105
taaattggataagcgtattgctcag

SEQ ID NO: 325586 - DNA, 25 bp, Artificial
  probe
  misc_feature (1)..(25): SEQ ID NO: 2434; WAN024CDY; Start 87; Stop 111
ggataagcgtattgctcagactgtt

SEQ ID NO: 325587 - DNA, 25 bp, Artificial
  probe
  misc_feature (1)..(25): SEQ ID NO: 2434; WAN024CDY; Start 85; Stop 109
ttggataagcgtattgctcagactg

SEQ ID NO: 325588 - DNA, 25 bp, Artificial
  probe
  misc_feature (1)..(25): SEQ ID NO: 2434; WAN024CDY; Start 82; Stop 106
aaattggataagcgtattgctcaga

SEQ ID NO: 325589 - DNA, 25 bp, Artificial
  probe
  misc_feature (1)..(25): SEQ ID NO: 2434; WAN024CDY; Start 80; Stop 104
ataaattggataagcgtattgctca

SEQ ID NO: 325590 - DNA, 25 bp, Artificial
  probe
  misc_feature (1)..(25): SEQ ID NO: 2434; WAN024CDY; Start 132; Stop 156
tctagattattctgatcctgaactg

SEQ ID NO: 325591 - DNA, 25 bp, Artificial
  probe
  misc_feature (1)..(25): SEQ ID NO: 2434; WAN024CDY; Start 138; Stop 162
ttattctgatcctgaactgatgcat

SEQ ID NO: 325592 - DNA, 25 bp, Artificial
  probe
  misc_feature (1)..(25): SEQ ID NO: 2435; WAN024DIS; Start 112; Stop 136
ttgttccaagtaatctcagaaatcg

SEQ ID NO: 325593 - DNA, 25 bp, Artificial
  probe
  misc_feature (1)..(25): SEQ ID NO: 2435; WAN024DIS; Start 24; Stop 48
agaaattatcgttgaagaacttgga

SEQ ID NO: 325594 - DNA, 25 bp, Artificial
  probe
  misc_feature (1)..(25): SEQ ID NO: 2435; WAN024DIS; Start 55; Stop 79
gcatcagaagtaacacttgaatcaa

SEQ ID NO: 325595 - DNA, 25 bp, Artificial
  probe
  misc_feature (1)..(25): SEQ ID NO: 2435; WAN024DIS; Start 25; Stop 49
gaaattatcgttgaagaacttggaa

SEQ ID NO: 325596 - DNA, 25 bp, Artificial
  probe
  misc_feature (1)..(25): SEQ ID NO: 2435; WAN024DIS; Start 23; Stop 47
aagaaattatcgttgaagaacttgg

SEQ ID NO: 325597 - DNA, 25 bp, Artificial
  probe
  misc_feature (1)..(25): SEQ ID NO: 2435; WAN024DIS; Start 58; Stop 82
tcagaagtaacacttgaatcaactt

SEQ ID NO: 325598 - DNA, 25 bp, Artificial
  probe
  misc_feature (1)..(25): SEQ ID NO: 2435; WAN024DIS; Start 113; Stop 137
tgttccaagtaatctcagaaatcga

SEQ ID NO: 325599 - DNA, 25 bp, Artificial
  probe
  misc_feature (1)..(25): SEQ ID NO: 2435; WAN024DIS; Start 56; Stop 80
catcagaagtaacacttgaatcaac

SEQ ID NO: 325600 - DNA, 25 bp, Artificial
  probe
  misc_feature (1)..(25): SEQ ID NO: 2435; WAN024DIS; Start 26; Stop 50
aaattatcgttgaagaacttggaaa

SEQ ID NO: 325601 - DNA, 25 bp, Artificial
  probe
  misc_feature (1)..(25): SEQ ID NO: 2435; WAN024DIS; Start 57; Stop 81
atcagaagtaacacttgaatcaact

SEQ ID NO: 325602 - DNA, 25 bp, Artificial
  probe
  misc_feature (1)..(25): SEQ ID NO: 2435; WAN024DIS; Start 54; Stop 78
cgcatcagaagtaacacttgaatca

SEQ ID NO: 325603 - DNA, 25 bp, Artificial
  probe
  misc_feature (1)..(25): SEQ ID NO: 2435; WAN024DIS; Start 53; Stop 77
acgcatcagaagtaacacttgaatc

SEQ ID NO: 325604 - DNA, 25 bp, Artificial
  probe
  misc_feature (1)..(25): SEQ ID NO: 2435; WAN024DIS; Start 52; Stop 76
gacgcatcagaagtaacacttgaat

SEQ ID NO: 325605 - DNA, 25 bp, Artificial
  probe
  misc_feature (1)..(25): SEQ ID NO: 2435; WAN024DIS; Start 116; Stop 140
tccaagtaatctcagaaatcgaaga

SEQ ID NO: 325606 - DNA, 25 bp, Artificial
  probe
  misc_feature (1)..(25): SEQ ID NO: 2435; WAN024DIS; Start 114; Stop 138
gttccaagtaatctcagaaatcgaa

SEQ ID NO: 325607 - DNA, 25 bp, Artificial
  probe
  misc_feature (1)..(25): SEQ ID NO: 2435; WAN024DIS; Start 115; Stop 139
ttccaagtaatctcagaaatcgaag

SEQ ID NO: 325608 - DNA, 25 bp, Artificial
  probe
  misc_feature (1)..(25): SEQ ID NO: 2435; WAN024DIS; Start 21; Stop 45
acaagaaattatcgttgaagaactt

SEQ ID NO: 325609 - DNA, 25 bp, Artificial
  probe
  misc_feature (1)..(25): SEQ ID NO: 2435; WAN024DIS; Start 180; Stop 204
aacagttggtgacttggttgcttac

SEQ ID NO: 325610 - DNA, 25 bp, Artificial
  probe
  misc_feature (1)..(25): SEQ ID NO: 2435; WAN024DIS; Start 89; Stop 113
atttggacgcagattcattggactt

SEQ ID NO: 325611 - DNA, 25 bp, Artificial
  probe
  misc_feature (1)..(25): SEQ ID NO: 2435; WAN024DIS; Start 51; Stop 75
agacgcatcagaagtaacacttgaa

SEQ ID NO: 325612 - DNA, 25 bp, Artificial
  probe
  misc_feature (1)..(25): SEQ ID NO: 2435; WAN024DIS; Start 50; Stop 74
aagacgcatcagaagtaacacttga

SEQ ID NO: 325613 - DNA, 25 bp, Artificial
  probe
  misc_feature (1)..(25): SEQ ID NO: 2435; WAN024DIS; Start 93; Stop 117
ggacgcagattcattggacttgttc

SEQ ID NO: 325614 - DNA, 25 bp, Artificial
  probe
  misc_feature (1)..(25): SEQ ID NO: 2435; WAN024DIS; Start 189; Stop 213
tgacttggttgcttacgttgaagag

SEQ ID NO: 325615 - DNA, 25 bp, Artificial
  probe
  misc_feature (1)..(25): SEQ ID NO: 2435; WAN024DIS; Start 160; Stop 184
gaagcagaaaatgacttgaaaacag

SEQ ID NO: 325616 - DNA, 25 bp, Artificial
  probe
  misc_feature (1)..(25): SEQ ID NO: 2435; WAN024DIS; Start 20; Stop 44
tacaagaaattatcgttgaagaact

SEQ ID NO: 325617 - DNA, 25 bp, Artificial
  probe
  misc_feature (1)..(25): SEQ ID NO: 2435; WAN024DIS; Start 80; Stop 104
cttttgatgatttggacgcagattc

SEQ ID NO: 325618 - DNA, 25 bp, Artificial
  probe
  misc_feature (1)..(25): SEQ ID NO: 2435; WAN024DIS; Start 30; Stop 54
tatcgttgaagaacttggaaaagac

SEQ ID NO: 325619 - DNA, 25 bp, Artificial
  probe
  misc_feature (1)..(25): SEQ ID NO: 2435; WAN024DIS; Start 179; Stop 203
aaacagttggtgacttggttgctta

SEQ ID NO: 325620 - DNA, 25 bp, Artificial
  probe
  misc_feature (1)..(25): SEQ ID NO: 2435; WAN024DIS; Start 204; Stop 228
cgttgaagagcaagcaaaataacta

SEQ ID NO: 325621 - DNA, 25 bp, Artificial
  probe
  misc_feature (1)..(25): SEQ ID NO: 2435; WAN024DIS; Start 159; Stop 183
cgaagcagaaaatgacttgaaaaca

SEQ ID NO: 325622 - DNA, 25 bp, Artificial
  probe
  misc_feature (1)..(25): SEQ ID NO: 2435; WAN024DIS; Start 88; Stop 112
gatttggacgcagattcattggact

SEQ ID NO: 325623 - DNA, 25 bp, Artificial
  probe
  misc_feature (1)..(25): SEQ ID NO: 2435; WAN024DIS; Start 167; Stop 191
aaaatgacttgaaaacagttggtga

SEQ ID NO: 325624 - DNA, 25 bp, Artificial
  probe
  misc_feature (1)..(25): SEQ ID NO: 2435; WAN024DIS; Start 163; Stop 187
gcagaaaatgacttgaaaacagttg

SEQ ID NO: 325625 - DNA, 25 bp, Artificial
  probe
  misc_feature (1)..(25): SEQ ID NO: 2436; WAN024GGK; Start 87; Stop 111
ggaagaaccagagtgtgaagatatt

SEQ ID NO: 325626 - DNA, 25 bp, Artificial
  probe
  misc_feature (1)..(25): SEQ ID NO: 2436; WAN024GGK; Start 508; Stop 532
ggagagattagagactggacaacta

SEQ ID NO: 325627 - DNA, 25 bp, Artificial
  probe
  misc_feature (1)..(25): SEQ ID NO: 2436; WAN024GGK; Start 89; Stop 113
aagaaccagagtgtgaagatattcc

SEQ ID NO: 325628 - DNA, 25 bp, Artificial
  probe
  misc_feature (1)..(25): SEQ ID NO: 2436; WAN024GGK; Start 194; Stop 218
gaactaatctcatcgttgttatgcc

SEQ ID NO: 325629 - DNA, 25 bp, Artificial
  probe
  misc_feature (1)..(25): SEQ ID NO: 2436; WAN024GGK; Start 193; Stop 217
ggaactaatctcatcgttgttatgc

SEQ ID NO: 325630 - DNA, 25 bp, Artificial
  probe
  misc_feature (1)..(25): SEQ ID NO: 2436; WAN024GGK; Start 88; Stop 112
gaagaaccagagtgtgaagatattc

SEQ ID NO: 325631 - DNA, 25 bp, Artificial
  probe
  misc_feature (1)..(25): SEQ ID NO: 2436; WAN024GGK; Start 509; Stop 533
gagagattagagactggacaactag

SEQ ID NO: 325632 - DNA, 25 bp, Artificial
  probe
  misc_feature (1)..(25): SEQ ID NO: 2436; WAN024GGK; Start 192; Stop 216
aggaactaatctcatcgttgttatg

SEQ ID NO: 325633 - DNA, 25 bp, Artificial
  probe
  misc_feature (1)..(25): SEQ ID NO: 2436; WAN024GGK; Start 506; Stop 530
ttggagagattagagactggacaac

SEQ ID NO: 325634 - DNA, 25 bp, Artificial
  probe
  misc_feature (1)..(25): SEQ ID NO: 2436; WAN024GGK; Start 507; Stop 531
tggagagattagagactggacaact

SEQ ID NO: 325635 - DNA, 25 bp, Artificial
  probe
  misc_feature (1)..(25): SEQ ID NO: 2436; WAN024GGK; Start 191; Stop 215
gaggaactaatctcatcgttgttat

SEQ ID NO: 325636 - DNA, 25 bp, Artificial
  probe
  misc_feature (1)..(25): SEQ ID NO: 2436; WAN024GGK; Start 27; Stop 51
ctcacaagtattggatatggagtgg

SEQ ID NO: 325637 - DNA, 25 bp, Artificial
  probe
  misc_feature (1)..(25): SEQ ID NO: 2436; WAN024GGK; Start 137; Stop 161
tgtctggaaatcataatagttggct

SEQ ID NO: 325638 - DNA, 25 bp, Artificial
  probe
  misc_feature (1)..(25): SEQ ID NO: 2436; WAN024GGK; Start 86; Stop 110
tggaagaaccagagtgtgaagatat

SEQ ID NO: 325639 - DNA, 25 bp, Artificial
  probe
  misc_feature (1)..(25): SEQ ID NO: 2436; WAN024GGK; Start 138; Stop 162
gtctggaaatcataatagttggctt

SEQ ID NO: 325640 - DNA, 25 bp, Artificial
  probe
  misc_feature (1)..(25): SEQ ID NO: 2436; WAN024GGK; Start 536; Stop 560
cctattctcttgaaagtctggctaa

SEQ ID NO: 325641 - DNA, 25 bp, Artificial
  probe
  misc_feature (1)..(25): SEQ ID NO: 2436; WAN024GGK; Start 299; Stop 323
ttctgaaacgcttcttccctaatat

SEQ ID NO: 325642 - DNA, 25 bp, Artificial
  probe
  misc_feature (1)..(25): SEQ ID NO: 2436; WAN024GGK; Start 132; Stop 156
cgggatgtctggaaatcataatagt

SEQ ID NO: 325643 - DNA, 25 bp, Artificial
  probe
  misc_feature (1)..(25): SEQ ID NO: 2436; WAN024GGK; Start 131; Stop 155
acgggatgtctggaaatcataatag

SEQ ID NO: 325644 - DNA, 25 bp, Artificial
  probe
  misc_feature (1)..(25): SEQ ID NO: 2436; WAN024GGK; Start 130; Stop 154
cacgggatgtctggaaatcataata

SEQ ID NO: 325645 - DNA, 25 bp, Artificial
  probe
  misc_feature (1)..(25): SEQ ID NO: 2436; WAN024GGK; Start 301; Stop 325
ctgaaacgcttcttccctaatatga

SEQ ID NO: 325646 - DNA, 25 bp, Artificial
  probe
  misc_feature (1)..(25): SEQ ID NO: 2436; WAN024GGK; Start 300; Stop 324
tctgaaacgcttcttccctaatatg

SEQ ID NO: 325647 - DNA, 25 bp, Artificial
  probe
  misc_feature (1)..(25): SEQ ID NO: 2436; WAN024GGK; Start 531; Stop 555
tagtccctattctcttgaaagtctg

SEQ ID NO: 325648 - DNA, 25 bp, Artificial
  probe
  misc_feature (1)..(25): SEQ ID NO: 2436; WAN024GGK; Start 136; Stop 160
atgtctggaaatcataatagttggc

SEQ ID NO: 325649 - DNA, 25 bp, Artificial
  probe
  misc_feature (1)..(25): SEQ ID NO: 2436; WAN024GGK; Start 302; Stop 326
tgaaacgcttcttccctaatatgac

SEQ ID NO: 325650 - DNA, 25 bp, Artificial
  probe
  misc_feature (1)..(25): SEQ ID NO: 2436; WAN024GGK; Start 298; Stop 322
gttctgaaacgcttcttccctaata

SEQ ID NO: 325651 - DNA, 25 bp, Artificial
  probe
  misc_feature (1)..(25): SEQ ID NO: 2436; WAN024GGK; Start 199; Stop 223
aatctcatcgttgttatgcccaata

SEQ ID NO: 325652 - DNA, 25 bp, Artificial
  probe
  misc_feature (1)..(25): SEQ ID NO: 2436; WAN024GGK; Start 198; Stop 222
taatctcatcgttgttatgcccaat

SEQ ID NO: 325653 - DNA, 25 bp, Artificial
  probe
  misc_feature (1)..(25): SEQ ID NO: 2436; WAN024GGK; Start 505; Stop 529
tttggagagattagagactggacaa

SEQ ID NO: 325654 - DNA, 25 bp, Artificial
  probe
  misc_feature (1)..(25): SEQ ID NO: 2436; WAN024GGK; Start 183; Stop 207
cttgcttcgaggaactaatctcatc

SEQ ID NO: 325655 - DNA, 25 bp, Artificial
  probe
  misc_feature (1)..(25): SEQ ID NO: 2436; WAN024GGK; Start 190; Stop 214
cgaggaactaatctcatcgttgtta

SEQ ID NO: 325656 - DNA, 25 bp, Artificial
  probe
  misc_feature (1)..(25): SEQ ID NO: 2436; WAN024GGK; Start 85; Stop 109
gtggaagaaccagagtgtgaagata

SEQ ID NO: 325657 - DNA, 25 bp, Artificial
  probe
  misc_feature (1)..(25): SEQ ID NO: 2436; WAN024GGK; Start 195; Stop 219
aactaatctcatcgttgttatgccc

SEQ ID NO: 325658 - DNA, 25 bp, Artificial
  probe
  misc_feature (1)..(25): SEQ ID NO: 2437; WAN024FLB; Start 235; Stop 259
acaggctatatcgttatcacttcag

SEQ ID NO: 325659 - DNA, 25 bp, Artificial
  probe
  misc_feature (1)..(25): SEQ ID NO: 2437; WAN024FLB; Start 234; Stop 258
gacaggctatatcgttatcacttca

SEQ ID NO: 325660 - DNA, 25 bp, Artificial
  probe
  misc_feature (1)..(25): SEQ ID NO: 2437; WAN024FLB; Start 226; Stop 250
gtgaagaagacaggctatatcgtta

SEQ ID NO: 325661 - DNA, 25 bp, Artificial
  probe
  misc_feature (1)..(25): SEQ ID NO: 2437; WAN024FLB; Start 237; Stop 261
aggctatatcgttatcacttcagac

SEQ ID NO: 325662 - DNA, 25 bp, Artificial
  probe
  misc_feature (1)..(25): SEQ ID NO: 2437; WAN024FLB; Start 236; Stop 260
caggctatatcgttatcacttcaga

SEQ ID NO: 325663 - DNA, 25 bp, Artificial
  probe
  misc_feature (1)..(25): SEQ ID NO: 2437; WAN024FLB; Start 233; Stop 257
agacaggctatatcgttatcacttc

SEQ ID NO: 325664 - DNA, 25 bp, Artificial
  probe
  misc_feature (1)..(25): SEQ ID NO: 2437; WAN024FLB; Start 231; Stop 255
gaagacaggctatatcgttatcact

SEQ ID NO: 325665 - DNA, 25 bp, Artificial
  probe
  misc_feature (1)..(25): SEQ ID NO: 2437; WAN024FLB; Start 230; Stop 254
agaagacaggctatatcgttatcac

SEQ ID NO: 325666 - DNA, 25 bp, Artificial
  probe
  misc_feature (1)..(25): SEQ ID NO: 2437; WAN024FLB; Start 238; Stop 262
ggctatatcgttatcacttcagacc

SEQ ID NO: 325667 - DNA, 25 bp, Artificial
  probe
  misc_feature (1)..(25): SEQ ID NO: 2437; WAN024FLB; Start 229; Stop 253
aagaagacaggctatatcgttatca

SEQ ID NO: 325668 - DNA, 25 bp, Artificial
  probe
  misc_feature (1)..(25): SEQ ID NO: 2437; WAN024FLB; Start 227; Stop 251
tgaagaagacaggctatatcgttat

SEQ ID NO: 325669 - DNA, 25 bp, Artificial
  probe
  misc_feature (1)..(25): SEQ ID NO: 2437; WAN024FLB; Start 240; Stop 264
ctatatcgttatcacttcagaccgc

SEQ ID NO: 325670 - DNA, 25 bp, Artificial
  probe
  misc_feature (1)..(25): SEQ ID NO: 2437; WAN024FLB; Start 239; Stop 263
gctatatcgttatcacttcagaccg

SEQ ID NO: 325671 - DNA, 25 bp, Artificial
  probe
  misc_feature (1)..(25): SEQ ID NO: 2437; WAN024FLB; Start 232; Stop 256
aagacaggctatatcgttatcactt

SEQ ID NO: 325672 - DNA, 25 bp, Artificial
  probe
  misc_feature (1)..(25): SEQ ID NO: 2437; WAN024FLB; Start 228; Stop 252
gaagaagacaggctatatcgttatc

SEQ ID NO: 325673 - DNA, 25 bp, Artificial
  probe
  misc_feature (1)..(25): SEQ ID NO: 2437; WAN024FLB; Start 207; Stop 231
gatgttgattagccgttctgtgaag

SEQ ID NO: 325674 - DNA, 25 bp, Artificial
  probe
  misc_feature (1)..(25): SEQ ID NO: 2437; WAN024FLB; Start 225; Stop 249
tgtgaagaagacaggctatatcgtt

SEQ ID NO: 325675 - DNA, 25 bp, Artificial
  probe
  misc_feature (1)..(25): SEQ ID NO: 2437; WAN024FLB; Start 208; Stop 232
atgttgattagccgttctgtgaaga

SEQ ID NO: 325676 - DNA, 25 bp, Artificial
  probe
  misc_feature (1)..(25): SEQ ID NO: 2437; WAN024FLB; Start 301; Stop 325
gctgttatggagttgaaagaagaat

SEQ ID NO: 325677 - DNA, 25 bp, Artificial
  probe
  misc_feature (1)..(25): SEQ ID NO: 2437; WAN024FLB; Start 533; Stop 557
atgtcaatacgctaaccagtcaaat

SEQ ID NO: 325678 - DNA, 25 bp, Artificial
  probe
  misc_feature (1)..(25): SEQ ID NO: 2437; WAN024FLB; Start 798; Stop 822
aattcagtataaccgtgccagacag

SEQ ID NO: 325679 - DNA, 25 bp, Artificial
  probe
  misc_feature (1)..(25): SEQ ID NO: 2437; WAN024FLB; Start 838; Stop 862
gaaattacagaaatcgtagcaggtg

SEQ ID NO: 325680 - DNA, 25 bp, Artificial
  probe
  misc_feature (1)..(25): SEQ ID NO: 2437; WAN024FLB; Start 837; Stop 861
agaaattacagaaatcgtagcaggt

SEQ ID NO: 325681 - DNA, 25 bp, Artificial
  probe
  misc_feature (1)..(25): SEQ ID NO: 2437; WAN024FLB; Start 685; Stop 709
gaaagtatgatttacggtgccatta

SEQ ID NO: 325682 - DNA, 25 bp, Artificial
  probe
  misc_feature (1)..(25): SEQ ID NO: 2437; WAN024FLB; Start 836; Stop 860
aagaaattacagaaatcgtagcagg

SEQ ID NO: 325683 - DNA, 25 bp, Artificial
  probe
  misc_feature (1)..(25): SEQ ID NO: 2437; WAN024FLB; Start 687; Stop 711
aagtatgatttacggtgccattatc

SEQ ID NO: 325684 - DNA, 25 bp, Artificial
  probe
  misc_feature (1)..(25): SEQ ID NO: 2437; WAN024FLB; Start 684; Stop 708
agaaagtatgatttacggtgccatt

SEQ ID NO: 325685 - DNA, 25 bp, Artificial
  probe
  misc_feature (1)..(25): SEQ ID NO: 2437; WAN024FLB; Start 310; Stop 334
gagttgaaagaagaataccacccag

SEQ ID NO: 325686 - DNA, 25 bp, Artificial
  probe
  misc_feature (1)..(25): SEQ ID NO: 2437; WAN024FLB; Start 834; Stop 858
acaagaaattacagaaatcgtagca

SEQ ID NO: 325687 - DNA, 25 bp, Artificial
  probe
  misc_feature (1)..(25): SEQ ID NO: 2437; WAN024FLB; Start 833; Stop 857
cacaagaaattacagaaatcgtagc

SEQ ID NO: 325688 - DNA, 25 bp, Artificial
  probe
  misc_feature (1)..(25): SEQ ID NO: 2437; WAN024FLB; Start 688; Stop 712
agtatgatttacggtgccattatcg

SEQ ID NO: 325689 - DNA, 25 bp, Artificial
  probe
  misc_feature (1)..(25): SEQ ID NO: 2437; WAN024FLB; Start 686; Stop 710
aaagtatgatttacggtgccattat

SEQ ID NO: 325690 - DNA, 25 bp, Artificial
  probe
  misc_feature (1)..(25): SEQ ID NO: 2437; WAN024FLB; Start 312; Stop 336
gttgaaagaagaataccacccagac

SEQ ID NO: 325691 - DNA, 25 bp, Artificial
  probe
  misc_feature (1)..(25): SEQ ID NO: 2438; WAN024DF9; Start 18; Stop 42
tttgactcgtatgggttctaagaaa

SEQ ID NO: 325692 - DNA, 25 bp, Artificial
  probe
  misc_feature (1)..(25): SEQ ID NO: 2438; WAN024DF9; Start 17; Stop 41
gtttgactcgtatgggttctaagaa

SEQ ID NO: 325693 - DNA, 25 bp, Artificial
  probe
  misc_feature (1)..(25): SEQ ID NO: 2438; WAN024DF9; Start 139; Stop 163
aaccaagtaactttgaaagaagacc

SEQ ID NO: 325694 - DNA, 25 bp, Artificial
  probe
  misc_feature (1)..(25): SEQ ID NO: 2438; WAN024DF9; Start 16; Stop 40
cgtttgactcgtatgggttctaaga

SEQ ID NO: 325695 - DNA, 25 bp, Artificial
  probe
  misc_feature (1)..(25): SEQ ID NO: 2438; WAN024DF9; Start 140; Stop 164
accaagtaactttgaaagaagaccg

SEQ ID NO: 325696 - DNA, 25 bp, Artificial
  probe
  misc_feature (1)..(25): SEQ ID NO: 2438; WAN024DF9; Start 138; Stop 162
aaaccaagtaactttgaaagaagac

SEQ ID NO: 325697 - DNA, 25 bp, Artificial
  probe
  misc_feature (1)..(25): SEQ ID NO: 2438; WAN024DF9; Start 98; Stop 122
tcatcgaaacagttggaacttacaa

SEQ ID NO: 325698 - DNA, 25 bp, Artificial
  probe
  misc_feature (1)..(25): SEQ ID NO: 2438; WAN024DF9; Start 97; Stop 121
ttcatcgaaacagttggaacttaca

SEQ ID NO: 325699 - DNA, 25 bp, Artificial
  probe
  misc_feature (1)..(25): SEQ ID NO: 2438; WAN024DF9; Start 15; Stop 39
ccgtttgactcgtatgggttctaag

SEQ ID NO: 325700 - DNA, 25 bp, Artificial
  probe
  misc_feature (1)..(25): SEQ ID NO: 2438; WAN024DF9; Start 198; Stop 222
ttcagacacagtacgtaacatcctt

SEQ ID NO: 325701 - DNA, 25 bp, Artificial
  probe
  misc_feature (1)..(25): SEQ ID NO: 2438; WAN024DF9; Start 141; Stop 165
ccaagtaactttgaaagaagaccgc

SEQ ID NO: 325702 - DNA, 25 bp, Artificial
  probe
  misc_feature (1)..(25): SEQ ID NO: 2438; WAN024DF9; Start 194; Stop 218
aaccttcagacacagtacgtaacat

SEQ ID NO: 325703 - DNA, 25 bp, Artificial
  probe
  misc_feature (1)..(25): SEQ ID NO: 2438; WAN024DF9; Start 197; Stop 221
cttcagacacagtacgtaacatcct

SEQ ID NO: 325704 - DNA, 25 bp, Artificial
  probe
  misc_feature (1)..(25): SEQ ID NO: 2438; WAN024DF9; Start 13; Stop 37
atccgtttgactcgtatgggttcta

SEQ ID NO: 325705 - DNA, 25 bp, Artificial
  probe
  misc_feature (1)..(25): SEQ ID NO: 2438; WAN024DF9; Start 11; Stop 35
aaatccgtttgactcgtatgggttc

SEQ ID NO: 325706 - DNA, 25 bp, Artificial
  probe
  misc_feature (1)..(25): SEQ ID NO: 2438; WAN024DF9; Start 14; Stop 38
tccgtttgactcgtatgggttctaa

SEQ ID NO: 325707 - DNA, 25 bp, Artificial
  probe
  misc_feature (1)..(25): SEQ ID NO: 2438; WAN024DF9; Start 7; Stop 31
gttaaaatccgtttgactcgtatgg

SEQ ID NO: 325708 - DNA, 25 bp, Artificial
  probe
  misc_feature (1)..(25): SEQ ID NO: 2438; WAN024DF9; Start 191; Stop 215
ctcaaccttcagacacagtacgtaa

SEQ ID NO: 325709 - DNA, 25 bp, Artificial
  probe
  misc_feature (1)..(25): SEQ ID NO: 2438; WAN024DF9; Start 195; Stop 219
accttcagacacagtacgtaacatc

SEQ ID NO: 325710 - DNA, 25 bp, Artificial
  probe
  misc_feature (1)..(25): SEQ ID NO: 2438; WAN024DF9; Start 49; Stop 73
ttctaccgtatcaacgtagcagatt

SEQ ID NO: 325711 - DNA, 25 bp, Artificial
  probe
  misc_feature (1)..(25): SEQ ID NO: 2438; WAN024DF9; Start 192; Stop 216
tcaaccttcagacacagtacgtaac

SEQ ID NO: 325712 - DNA, 25 bp, Artificial
  probe
  misc_feature (1)..(25): SEQ ID NO: 2438; WAN024DF9; Start 8; Stop 32
ttaaaatccgtttgactcgtatggg

SEQ ID NO: 325713 - DNA, 25 bp, Artificial
  probe
  misc_feature (1)..(25): SEQ ID NO: 2438; WAN024DF9; Start 6; Stop 30
agttaaaatccgtttgactcgtatg

SEQ ID NO: 325714 - DNA, 25 bp, Artificial
  probe
  misc_feature (1)..(25): SEQ ID NO: 2438; WAN024DF9; Start 5; Stop 29
cagttaaaatccgtttgactcgtat

SEQ ID NO: 325715 - DNA, 25 bp, Artificial
  probe
  misc_feature (1)..(25): SEQ ID NO: 2438; WAN024DF9; Start 96; Stop 120
tttcatcgaaacagttggaacttac

SEQ ID NO: 325716 - DNA, 25 bp, Artificial
  probe
  misc_feature (1)..(25): SEQ ID NO: 2438; WAN024DF9; Start 19; Stop 43
ttgactcgtatgggttctaagaaaa

SEQ ID NO: 325717 - DNA, 25 bp, Artificial
  probe
  misc_feature (1)..(25): SEQ ID NO: 2438; WAN024DF9; Start 50; Stop 74
tctaccgtatcaacgtagcagattc

SEQ ID NO: 325718 - DNA, 25 bp, Artificial
  probe
  misc_feature (1)..(25): SEQ ID NO: 2438; WAN024DF9; Start 193; Stop 217
caaccttcagacacagtacgtaaca

SEQ ID NO: 325719 - DNA, 25 bp, Artificial
  probe
  misc_feature (1)..(25): SEQ ID NO: 2438; WAN024DF9; Start 51; Stop 75
ctaccgtatcaacgtagcagattca

SEQ ID NO: 325720 - DNA, 25 bp, Artificial
  probe
  misc_feature (1)..(25): SEQ ID NO: 2438; WAN024DF9; Start 132; Stop 156
tgctgaaaaccaagtaactttgaaa

SEQ ID NO: 325721 - DNA, 25 bp, Artificial
  probe
  misc_feature (1)..(25): SEQ ID NO: 2438; WAN024DF9; Start 131; Stop 155
ttgctgaaaaccaagtaactttgaa

SEQ ID NO: 325722 - DNA, 25 bp, Artificial
  probe
  misc_feature (1)..(25): SEQ ID NO: 2438; WAN024DF9; Start 128; Stop 152
ttgttgctgaaaaccaagtaacttt

SEQ ID NO: 325723 - DNA, 25 bp, Artificial
  probe
  misc_feature (1)..(25): SEQ ID NO: 2438; WAN024DF9; Start 203; Stop 227
acacagtacgtaacatcctttcaaa

SEQ ID NO: 325724 - DNA, 25 bp, Artificial
  probe
  misc_feature (1)..(25): SEQ ID NO: 2439; WAN024GDB; Start 328; Stop 352
cctgtcgtagataaccatcaagtat

SEQ ID NO: 325725 - DNA, 25 bp, Artificial
  probe
  misc_feature (1)..(25): SEQ ID NO: 2439; WAN024GDB; Start 526; Stop 550
cgtaaggatggtaaggtgattatcg

SEQ ID NO: 325726 - DNA, 25 bp, Artificial
  probe
  misc_feature (1)..(25): SEQ ID NO: 2439; WAN024GDB; Start 525; Stop 549
gcgtaaggatggtaaggtgattatc

SEQ ID NO: 325727 - DNA, 25 bp, Artificial
  probe
  misc_feature (1)..(25): SEQ ID NO: 2439; WAN024GDB; Start 436; Stop 460
gttacagaagatgaagttggtgttc

SEQ ID NO: 325728 - DNA, 25 bp, Artificial
  probe
  misc_feature (1)..(25): SEQ ID NO: 2439; WAN024GDB; Start 435; Stop 459
tgttacagaagatgaagttggtgtt

SEQ ID NO: 325729 - DNA, 25 bp, Artificial
  probe
  misc_feature (1)..(25): SEQ ID NO: 2439; WAN024GDB; Start 434; Stop 458
ttgttacagaagatgaagttggtgt

SEQ ID NO: 325730 - DNA, 25 bp, Artificial
  probe
  misc_feature (1)..(25): SEQ ID NO: 2439; WAN024GDB; Start 529; Stop 553
aaggatggtaaggtgattatcgaag

SEQ ID NO: 325731 - DNA, 25 bp, Artificial
  probe
  misc_feature (1)..(25): SEQ ID NO: 2439; WAN024GDB; Start 527; Stop 551
gtaaggatggtaaggtgattatcga

SEQ ID NO: 325732 - DNA, 25 bp, Artificial
  probe
  misc_feature (1)..(25): SEQ ID NO: 2439; WAN024GDB; Start 329; Stop 353
ctgtcgtagataaccatcaagtata

SEQ ID NO: 325733 - DNA, 25 bp, Artificial
  probe
  misc_feature (1)..(25): SEQ ID NO: 2439; WAN024GDB; Start 531; Stop 555
ggatggtaaggtgattatcgaagtg

SEQ ID NO: 325734 - DNA, 25 bp, Artificial
  probe
  misc_feature (1)..(25): SEQ ID NO: 2439; WAN024GDB; Start 530; Stop 554
aggatggtaaggtgattatcgaagt

SEQ ID NO: 325735 - DNA, 25 bp, Artificial
  probe
  misc_feature (1)..(25): SEQ ID NO: 2439; WAN024GDB; Start 528; Stop 552
taaggatggtaaggtgattatcgaa

SEQ ID NO: 325736 - DNA, 25 bp, Artificial
  probe
  misc_feature (1)..(25): SEQ ID NO: 2439; WAN024GDB; Start 24; Stop 48
ccgcaaggtagtttatattagtcca

SEQ ID NO: 325737 - DNA, 25 bp, Artificial
  probe
  misc_feature (1)..(25): SEQ ID NO: 2439; WAN024GDB; Start 571; Stop 595
attgatttaccagccttgaaagaaa

SEQ ID NO: 325738 - DNA, 25 bp, Artificial
  probe
  misc_feature (1)..(25): SEQ ID NO: 2439; WAN024GDB; Start 23; Stop 47
cccgcaaggtagtttatattagtcc

SEQ ID NO: 325739 - DNA, 25 bp, Artificial
  probe
  misc_feature (1)..(25): SEQ ID NO: 2439; WAN024GDB; Start 433; Stop 457
tttgttacagaagatgaagttggtg

SEQ ID NO: 325740 - DNA, 25 bp, Artificial
  probe
  misc_feature (1)..(25): SEQ ID NO: 2439; WAN024GDB; Start 604; Stop 628
gcaaatggtattcaagtggaagaaa

SEQ ID NO: 325741 - DNA, 25 bp, Artificial
  probe
  misc_feature (1)..(25): SEQ ID NO: 2439; WAN024GDB; Start 25; Stop 49
cgcaaggtagtttatattagtccag

SEQ ID NO: 325742 - DNA, 25 bp, Artificial
  probe
  misc_feature (1)..(25): SEQ ID NO: 2439; WAN024GDB; Start 607; Stop 631
aatggtattcaagtggaagaaatcg

SEQ ID NO: 325743 - DNA, 25 bp, Artificial
  probe
  misc_feature (1)..(25): SEQ ID NO: 2439; WAN024GDB; Start 570; Stop 594
aattgatttaccagccttgaaagaa

SEQ ID NO: 325744 - DNA, 25 bp, Artificial
  probe
  misc_feature (1)..(25): SEQ ID NO: 2439; WAN024GDB; Start 601; Stop 625
gaagcaaatggtattcaagtggaag

SEQ ID NO: 325745 - DNA, 25 bp, Artificial
  probe
  misc_feature (1)..(25): SEQ ID NO: 2439; WAN024GDB; Start 532; Stop 556
gatggtaaggtgattatcgaagtgc

SEQ ID NO: 325746 - DNA, 25 bp, Artificial
  probe
  misc_feature (1)..(25): SEQ ID NO: 2439; WAN024GDB; Start 165; Stop 189
aagtccatctaaagcaacaagtctt

SEQ ID NO: 325747 - DNA, 25 bp, Artificial
  probe
  misc_feature (1)..(25): SEQ ID NO: 2439; WAN024GDB; Start 321; Stop 345
tattctccctgtcgtagataaccat

SEQ ID NO: 325748 - DNA, 25 bp, Artificial
  probe
  misc_feature (1)..(25): SEQ ID NO: 2439; WAN024GDB; Start 164; Stop 188
caagtccatctaaagcaacaagtct

SEQ ID NO: 325749 - DNA, 25 bp, Artificial
  probe
  misc_feature (1)..(25): SEQ ID NO: 2439; WAN024GDB; Start 603; Stop 627
agcaaatggtattcaagtggaagaa

SEQ ID NO: 325750 - DNA, 25 bp, Artificial
  probe
  misc_feature (1)..(25): SEQ ID NO: 2439; WAN024GDB; Start 602; Stop 626
aagcaaatggtattcaagtggaaga

SEQ ID NO: 325751 - DNA, 25 bp, Artificial
  probe
  misc_feature (1)..(25): SEQ ID NO: 2439; WAN024GDB; Start 428; Stop 452
tacgctttgttacagaagatgaagt

SEQ ID NO: 325752 - DNA, 25 bp, Artificial
  probe
  misc_feature (1)..(25): SEQ ID NO: 2439; WAN024GDB; Start 432; Stop 456
ctttgttacagaagatgaagttggt

SEQ ID NO: 325753 - DNA, 25 bp, Artificial
  probe
  misc_feature (1)..(25): SEQ ID NO: 2439; WAN024GDB; Start 431; Stop 455
gctttgttacagaagatgaagttgg

SEQ ID NO: 325754 - DNA, 25 bp, Artificial
  probe
  misc_feature (1)..(25): SEQ ID NO: 2439; WAN024GDB; Start 438; Stop 462
tacagaagatgaagttggtgttctt

SEQ ID NO: 325755 - DNA, 25 bp, Artificial
  probe
  misc_feature (1)..(25): SEQ ID NO: 2439; WAN024GDB; Start 437; Stop 461
ttacagaagatgaagttggtgttct

SEQ ID NO: 325756 - DNA, 25 bp, Artificial
  probe
  misc_feature (1)..(25): SEQ ID NO: 2439; WAN024GDB; Start 430; Stop 454
cgctttgttacagaagatgaagttg

SEQ ID NO: 325757 - DNA, 25 bp, Artificial
  probe
  misc_feature (1)..(25): SEQ ID NO: 2440; WAN024EWT; Start 272; Stop 296
agattaacaatgccttaggacaagt

SEQ ID NO: 325758 - DNA, 25 bp, Artificial
  probe
  misc_feature (1)..(25): SEQ ID NO: 2440; WAN024EWT; Start 268; Stop 292
cacaagattaacaatgccttaggac

SEQ ID NO: 325759 - DNA, 25 bp, Artificial
  probe
  misc_feature (1)..(25): SEQ ID NO: 2440; WAN024EWT; Start 269; Stop 293
acaagattaacaatgccttaggaca

SEQ ID NO: 325760 - DNA, 25 bp, Artificial
  probe
  misc_feature (1)..(25): SEQ ID NO: 2440; WAN024EWT; Start 270; Stop 294
caagattaacaatgccttaggacaa

SEQ ID NO: 325761 - DNA, 25 bp, Artificial
  probe
  misc_feature (1)..(25): SEQ ID NO: 2440; WAN024EWT; Start 271; Stop 295
aagattaacaatgccttaggacaag

SEQ ID NO: 325762 - DNA, 25 bp, Artificial
  probe
  misc_feature (1)..(25): SEQ ID NO: 2440; WAN024EWT; Start 273; Stop 297
gattaacaatgccttaggacaagtt

SEQ ID NO: 325763 - DNA, 25 bp, Artificial
  probe
  misc_feature (1)..(25): SEQ ID NO: 2440; WAN024EWT; Start 267; Stop 291
ccacaagattaacaatgccttagga

SEQ ID NO: 325764 - DNA, 25 bp, Artificial
  probe
  misc_feature (1)..(25): SEQ ID NO: 2440; WAN024EWT; Start 230; Stop 254
tttatctcaaacgggaagaccttaa

SEQ ID NO: 325765 - DNA, 25 bp, Artificial
  probe
  misc_feature (1)..(25): SEQ ID NO: 2440; WAN024EWT; Start 229; Stop 253
atttatctcaaacgggaagacctta

SEQ ID NO: 325766 - DNA, 25 bp, Artificial
  probe
  misc_feature (1)..(25): SEQ ID NO: 2440; WAN024EWT; Start 231; Stop 255
ttatctcaaacgggaagaccttaac

SEQ ID NO: 325767 - DNA, 25 bp, Artificial
  probe
  misc_feature (1)..(25): SEQ ID NO: 2440; WAN024EWT; Start 228; Stop 252
gatttatctcaaacgggaagacctt

SEQ ID NO: 325768 - DNA, 25 bp, Artificial
  probe
  misc_feature (1)..(25): SEQ ID NO: 2440; WAN024EWT; Start 275; Stop 299
ttaacaatgccttaggacaagtttg

SEQ ID NO: 325769 - DNA, 25 bp, Artificial
  probe
  misc_feature (1)..(25): SEQ ID NO: 2440; WAN024EWT; Start 274; Stop 298
attaacaatgccttaggacaagttt

SEQ ID NO: 325770 - DNA, 25 bp, Artificial
  probe
  misc_feature (1)..(25): SEQ ID NO: 2440; WAN024EWT; Start 225; Stop 249
caagatttatctcaaacgggaagac

SEQ ID NO: 325771 - DNA, 25 bp, Artificial
  probe
  misc_feature (1)..(25): SEQ ID NO: 2440; WAN024EWT; Start 226; Stop 250
aagatttatctcaaacgggaagacc

SEQ ID NO: 325772 - DNA, 25 bp, Artificial
  probe
  misc_feature (1)..(25): SEQ ID NO: 2440; WAN024EWT; Start 224; Stop 248
ccaagatttatctcaaacgggaaga

SEQ ID NO: 325773 - DNA, 25 bp, Artificial
  probe
  misc_feature (1)..(25): SEQ ID NO: 2440; WAN024EWT; Start 258; Stop 282
tacaggagcccacaagattaacaat

SEQ ID NO: 325774 - DNA, 25 bp, Artificial
  probe
  misc_feature (1)..(25): SEQ ID NO: 2440; WAN024EWT; Start 257; Stop 281
atacaggagcccacaagattaacaa

SEQ ID NO: 325775 - DNA, 25 bp, Artificial
  probe
  misc_feature (1)..(25): SEQ ID NO: 2440; WAN024EWT; Start 276; Stop 300
taacaatgccttaggacaagtttgg

SEQ ID NO: 325776 - DNA, 25 bp, Artificial
  probe
  misc_feature (1)..(25): SEQ ID NO: 2440; WAN024EWT; Start 227; Stop 251
agatttatctcaaacgggaagacct

SEQ ID NO: 325777 - DNA, 25 bp, Artificial
  probe
  misc_feature (1)..(25): SEQ ID NO: 2440; WAN024EWT; Start 266; Stop 290
cccacaagattaacaatgccttagg

SEQ ID NO: 325778 - DNA, 25 bp, Artificial
  probe
  misc_feature (1)..(25): SEQ ID NO: 2440; WAN024EWT; Start 235; Stop 259
ctcaaacgggaagaccttaaccata

SEQ ID NO: 325779 - DNA, 25 bp, Artificial
  probe
  misc_feature (1)..(25): SEQ ID NO: 2440; WAN024EWT; Start 232; Stop 256
tatctcaaacgggaagaccttaacc

SEQ ID NO: 325780 - DNA, 25 bp, Artificial
  probe
  misc_feature (1)..(25): SEQ ID NO: 2440; WAN024EWT; Start 893; Stop 917
aaattcttgaagccttctctatctc

SEQ ID NO: 325781 - DNA, 25 bp, Artificial
  probe
  misc_feature (1)..(25): SEQ ID NO: 2440; WAN024EWT; Start 892; Stop 916
caaattcttgaagccttctctatct

SEQ ID NO: 325782 - DNA, 25 bp, Artificial
  probe
  misc_feature (1)..(25): SEQ ID NO: 2440; WAN024EWT; Start 256; Stop 280
catacaggagcccacaagattaaca

SEQ ID NO: 325783 - DNA, 25 bp, Artificial
  probe
  misc_feature (1)..(25): SEQ ID NO: 2440; WAN024EWT; Start 238; Stop 262
aaacgggaagaccttaaccatacag

SEQ ID NO: 325784 - DNA, 25 bp, Artificial
  probe
  misc_feature (1)..(25): SEQ ID NO: 2440; WAN024EWT; Start 236; Stop 260
tcaaacgggaagaccttaaccatac

SEQ ID NO: 325785 - DNA, 25 bp, Artificial
  probe
  misc_feature (1)..(25): SEQ ID NO: 2440; WAN024EWT; Start 265; Stop 289
gcccacaagattaacaatgccttag

SEQ ID NO: 325786 - DNA, 25 bp, Artificial
  probe
  misc_feature (1)..(25): SEQ ID NO: 2440; WAN024EWT; Start 605; Stop 629
cagaaatcgttcgtgacttccaaag

SEQ ID NO: 325787 - DNA, 25 bp, Artificial
  probe
  misc_feature (1)..(25): SEQ ID NO: 2440; WAN024EWT; Start 237; Stop 261
caaacgggaagaccttaaccataca

SEQ ID NO: 325788 - DNA, 25 bp, Artificial
  probe
  misc_feature (1)..(25): SEQ ID NO: 2440; WAN024EWT; Start 223; Stop 247
gccaagatttatctcaaacgggaag

SEQ ID NO: 325789 - DNA, 25 bp, Artificial
  probe
  misc_feature (1)..(25): SEQ ID NO: 2440; WAN024EWT; Start 264; Stop 288
agcccacaagattaacaatgcctta

SEQ ID NO: 325790 - DNA, 25 bp, Artificial
  probe
  misc_feature (1)..(25): SEQ ID NO: 2441; WAN024G8V; Start 51; Stop 75
attagatgatgtgacttaccgttcc

SEQ ID NO: 325791 - DNA, 25 bp, Artificial
  probe
  misc_feature (1)..(25): SEQ ID NO: 2441; WAN024G8V; Start 49; Stop 73
ggattagatgatgtgacttaccgtt

SEQ ID NO: 325792 - DNA, 25 bp, Artificial
  probe
  misc_feature (1)..(25): SEQ ID NO: 2441; WAN024G8V; Start 50; Stop 74
gattagatgatgtgacttaccgttc

SEQ ID NO: 325793 - DNA, 25 bp, Artificial
  probe
  misc_feature (1)..(25): SEQ ID NO: 2441; WAN024G8V; Start 47; Stop 71
caggattagatgatgtgacttaccg

SEQ ID NO: 325794 - DNA, 25 bp, Artificial
  probe
  misc_feature (1)..(25): SEQ ID NO: 2441; WAN024G8V; Start 48; Stop 72
aggattagatgatgtgacttaccgt

SEQ ID NO: 325795 - DNA, 25 bp, Artificial
  probe
  misc_feature (1)..(25): SEQ ID NO: 2441; WAN024G8V; Start 52; Stop 76
ttagatgatgtgacttaccgttcca

SEQ ID NO: 325796 - DNA, 25 bp, Artificial
  probe
  misc_feature (1)..(25): SEQ ID NO: 2441; WAN024G8V; Start 46; Stop 70
tcaggattagatgatgtgacttacc

SEQ ID NO: 325797 - DNA, 25 bp, Artificial
  probe
  misc_feature (1)..(25): SEQ ID NO: 2441; WAN024G8V; Start 53; Stop 77
tagatgatgtgacttaccgttccat

SEQ ID NO: 325798 - DNA, 25 bp, Artificial
  probe
  misc_feature (1)..(25): SEQ ID NO: 2441; WAN024G8V; Start 201; Stop 225
atacaaaggtgccaaagaaatgatt

SEQ ID NO: 325799 - DNA, 25 bp, Artificial
  probe
  misc_feature (1)..(25): SEQ ID NO: 2441; WAN024G8V; Start 56; Stop 80
atgatgtgacttaccgttccatgat

SEQ ID NO: 325800 - DNA, 25 bp, Artificial
  probe
  misc_feature (1)..(25): SEQ ID NO: 2441; WAN024G8V; Start 200; Stop 224
catacaaaggtgccaaagaaatgat

SEQ ID NO: 325801 - DNA, 25 bp, Artificial
  probe
  misc_feature (1)..(25): SEQ ID NO: 2441; WAN024G8V; Start 35; Stop 59
tggaacaattatcaggattagatga

SEQ ID NO: 325802 - DNA, 25 bp, Artificial
  probe
  misc_feature (1)..(25): SEQ ID NO: 2441; WAN024G8V; Start 2; Stop 26
tggcatcaagtaagaactatttgga

SEQ ID NO: 325803 - DNA, 25 bp, Artificial
  probe
  misc_feature (1)..(25): SEQ ID NO: 2441; WAN024G8V; Start 197; Stop 221
ttccatacaaaggtgccaaagaaat

SEQ ID NO: 325804 - DNA, 25 bp, Artificial
  probe
  misc_feature (1)..(25): SEQ ID NO: 2441; WAN024G8V; Start 3; Stop 27
ggcatcaagtaagaactatttggaa

SEQ ID NO: 325805 - DNA, 25 bp, Artificial
  probe
  misc_feature (1)..(25): SEQ ID NO: 2441; WAN024G8V; Start 1; Stop 25
atggcatcaagtaagaactatttgg

SEQ ID NO: 325806 - DNA, 25 bp, Artificial
  probe
  misc_feature (1)..(25): SEQ ID NO: 2441; WAN024G8V; Start 55; Stop 79
gatgatgtgacttaccgttccatga

SEQ ID NO: 325807 - DNA, 25 bp, Artificial
  probe
  misc_feature (1)..(25): SEQ ID NO: 2441; WAN024G8V; Start 54; Stop 78
agatgatgtgacttaccgttccatg

SEQ ID NO: 325808 - DNA, 25 bp, Artificial
  probe
  misc_feature (1)..(25): SEQ ID NO: 2441; WAN024G8V; Start 34; Stop 58
ttggaacaattatcaggattagatg

SEQ ID NO: 325809 - DNA, 25 bp, Artificial
  probe
  misc_feature (1)..(25): SEQ ID NO: 2441; WAN024G8V; Start 57; Stop 81
tgatgtgacttaccgttccatgatg

SEQ ID NO: 325810 - DNA, 25 bp, Artificial
  probe
  misc_feature (1)..(25): SEQ ID NO: 2441; WAN024G8V; Start 156; Stop 180
gcaagcagtcttagataagattgac

SEQ ID NO: 325811 - DNA, 25 bp, Artificial
  probe
  misc_feature (1)..(25): SEQ ID NO: 2441; WAN024G8V; Start 159; Stop 183
agcagtcttagataagattgaccaa

SEQ ID NO: 325812 - DNA, 25 bp, Artificial
  probe
  misc_feature (1)..(25): SEQ ID NO: 2441; WAN024G8V; Start 158; Stop 182
aagcagtcttagataagattgacca

SEQ ID NO: 325813 - DNA, 25 bp, Artificial
  probe
  misc_feature (1)..(25): SEQ ID NO: 2441; WAN024G8V; Start 157; Stop 181
caagcagtcttagataagattgacc

SEQ ID NO: 325814 - DNA, 25 bp, Artificial
  probe
  misc_feature (1)..(25): SEQ ID NO: 2441; WAN024G8V; Start 199; Stop 223
ccatacaaaggtgccaaagaaatga

SEQ ID NO: 325815 - DNA, 25 bp, Artificial
  probe
  misc_feature (1)..(25): SEQ ID NO: 2441; WAN024G8V; Start 198; Stop 222
tccatacaaaggtgccaaagaaatg

SEQ ID NO: 325816 - DNA, 25 bp, Artificial
  probe
  misc_feature (1)..(25): SEQ ID NO: 2441; WAN024G8V; Start 195; Stop 219
gtttccatacaaaggtgccaaagaa

SEQ ID NO: 325817 - DNA, 25 bp, Artificial
  probe
  misc_feature (1)..(25): SEQ ID NO: 2441; WAN024G8V; Start 160; Stop 184
gcagtcttagataagattgaccaat

SEQ ID NO: 325818 - DNA, 25 bp, Artificial
  probe
  misc_feature (1)..(25): SEQ ID NO: 2441; WAN024G8V; Start 193; Stop 217
gagtttccatacaaaggtgccaaag

SEQ ID NO: 325819 - DNA, 25 bp, Artificial
  probe
  misc_feature (1)..(25): SEQ ID NO: 2441; WAN024G8V; Start 155; Stop 179
tgcaagcagtcttagataagattga

SEQ ID NO: 325820 - DNA, 25 bp, Artificial
  probe
  misc_feature (1)..(25): SEQ ID NO: 2441; WAN024G8V; Start 154; Stop 178
gtgcaagcagtcttagataagattg

SEQ ID NO: 325821 - DNA, 25 bp, Artificial
  probe
  misc_feature (1)..(25): SEQ ID NO: 2441; WAN024G8V; Start 194; Stop 218
agtttccatacaaaggtgccaaaga

SEQ ID NO: 325822 - DNA, 25 bp, Artificial
  probe
  misc_feature (1)..(25): SEQ ID NO: 2441; WAN024G8V; Start 45; Stop 69
atcaggattagatgatgtgacttac

SEQ ID NO: 325823 - DNA, 25 bp, Artificial
  probe
  misc_feature (1)..(25): SEQ ID NO: 2442; WAN024G9E; Start 26; Stop 50
tgattcgctattcttgtctattgat

SEQ ID NO: 325824 - DNA, 25 bp, Artificial
  probe
  misc_feature (1)..(25): SEQ ID NO: 2442; WAN024G9E; Start 25; Stop 49
atgattcgctattcttgtctattga

SEQ ID NO: 325825 - DNA, 25 bp, Artificial
  probe
  misc_feature (1)..(25): SEQ ID NO: 2442; WAN024G9E; Start 30; Stop 54
tcgctattcttgtctattgattagt

SEQ ID NO: 325826 - DNA, 25 bp, Artificial
  probe
  misc_feature (1)..(25): SEQ ID NO: 2442; WAN024G9E; Start 31; Stop 55
cgctattcttgtctattgattagtc

SEQ ID NO: 325827 - DNA, 25 bp, Artificial
  probe
  misc_feature (1)..(25): SEQ ID NO: 2442; WAN024G9E; Start 27; Stop 51
gattcgctattcttgtctattgatt

SEQ ID NO: 325828 - DNA, 25 bp, Artificial
  probe
  misc_feature (1)..(25): SEQ ID NO: 2442; WAN024G9E; Start 37; Stop 61
tcttgtctattgattagtccgtatt

SEQ ID NO: 325829 - DNA, 25 bp, Artificial
  probe
  misc_feature (1)..(25): SEQ ID NO: 2442; WAN024G9E; Start 36; Stop 60
ttcttgtctattgattagtccgtat

SEQ ID NO: 325830 - DNA, 25 bp, Artificial
  probe
  misc_feature (1)..(25): SEQ ID NO: 2442; WAN024G9E; Start 35; Stop 59
attcttgtctattgattagtccgta

SEQ ID NO: 325831 - DNA, 25 bp, Artificial
  probe
  misc_feature (1)..(25): SEQ ID NO: 2442; WAN024G9E; Start 34; Stop 58
tattcttgtctattgattagtccgt

SEQ ID NO: 325832 - DNA, 25 bp, Artificial
  probe
  misc_feature (1)..(25): SEQ ID NO: 2442; WAN024G9E; Start 32; Stop 56
gctattcttgtctattgattagtcc

SEQ ID NO: 325833 - DNA, 25 bp, Artificial
  probe
  misc_feature (1)..(25): SEQ ID NO: 2442; WAN024G9E; Start 33; Stop 57
ctattcttgtctattgattagtccg

SEQ ID NO: 325834 - DNA, 25 bp, Artificial
  probe
  misc_feature (1)..(25): SEQ ID NO: 2442; WAN024G9E; Start 24; Stop 48
tatgattcgctattcttgtctattg

SEQ ID NO: 325835 - DNA, 25 bp, Artificial
  probe
  misc_feature (1)..(25): SEQ ID NO: 2442; WAN024G9E; Start 29; Stop 53
ttcgctattcttgtctattgattag

SEQ ID NO: 325836 - DNA, 25 bp, Artificial
  probe
  misc_feature (1)..(25): SEQ ID NO: 2442; WAN024G9E; Start 78; Stop 102
aaagcaaatagcagtaacttctgtc

SEQ ID NO: 325837 - DNA, 25 bp, Artificial
  probe
  misc_feature (1)..(25): SEQ ID NO: 2442; WAN024G9E; Start 80; Stop 104
agcaaatagcagtaacttctgtcta

SEQ ID NO: 325838 - DNA, 25 bp, Artificial
  probe
  misc_feature (1)..(25): SEQ ID NO: 2442; WAN024G9E; Start 79; Stop 103
aagcaaatagcagtaacttctgtct

SEQ ID NO: 325839 - DNA, 25 bp, Artificial
  probe
  misc_feature (1)..(25): SEQ ID NO: 2442; WAN024G9E; Start 81; Stop 105
gcaaatagcagtaacttctgtctat

SEQ ID NO: 325840 - DNA, 25 bp, Artificial
  probe
  misc_feature (1)..(25): SEQ ID NO: 2442; WAN024G9E; Start 28; Stop 52
attcgctattcttgtctattgatta

SEQ ID NO: 325841 - DNA, 25 bp, Artificial
  probe
  misc_feature (1)..(25): SEQ ID NO: 2442; WAN024G9E; Start 23; Stop 47
ttatgattcgctattcttgtctatt

SEQ ID NO: 325842 - DNA, 25 bp, Artificial
  probe
  misc_feature (1)..(25): SEQ ID NO: 2442; WAN024G9E; Start 38; Stop 62
cttgtctattgattagtccgtattt

SEQ ID NO: 325843 - DNA, 25 bp, Artificial
  probe
  misc_feature (1)..(25): SEQ ID NO: 2442; WAN024G9E; Start 88; Stop 112
gcagtaacttctgtctatttgcttt

SEQ ID NO: 325844 - DNA, 25 bp, Artificial
  probe
  misc_feature (1)..(25): SEQ ID NO: 2442; WAN024G9E; Start 85; Stop 109
atagcagtaacttctgtctatttgc

SEQ ID NO: 325845 - DNA, 25 bp, Artificial
  probe
  misc_feature (1)..(25): SEQ ID NO: 2442; WAN024G9E; Start 22; Stop 46
tttatgattcgctattcttgtctat

SEQ ID NO: 325846 - DNA, 25 bp, Artificial
  probe
  misc_feature (1)..(25): SEQ ID NO: 2442; WAN024G9E; Start 77; Stop 101
aaaagcaaatagcagtaacttctgt

SEQ ID NO: 325847 - DNA, 25 bp, Artificial
  probe
  misc_feature (1)..(25): SEQ ID NO: 2442; WAN024G9E; Start 94; Stop 118
acttctgtctatttgcttttctttt

SEQ ID NO: 325848 - DNA, 25 bp, Artificial
  probe
  misc_feature (1)..(25): SEQ ID NO: 2442; WAN024G9E; Start 93; Stop 117
aacttctgtctatttgcttttcttt

SEQ ID NO: 325849 - DNA, 25 bp, Artificial
  probe
  misc_feature (1)..(25): SEQ ID NO: 2442; WAN024G9E; Start 91; Stop 115
gtaacttctgtctatttgcttttct

SEQ ID NO: 325850 - DNA, 25 bp, Artificial
  probe
  misc_feature (1)..(25): SEQ ID NO: 2442; WAN024G9E; Start 90; Stop 114
agtaacttctgtctatttgcttttc

SEQ ID NO: 325851 - DNA, 25 bp, Artificial
  probe
  misc_feature (1)..(25): SEQ ID NO: 2442; WAN024G9E; Start 89; Stop 113
cagtaacttctgtctatttgctttt

SEQ ID NO: 325852 - DNA, 25 bp, Artificial
  probe
  misc_feature (1)..(25): SEQ ID NO: 2442; WAN024G9E; Start 92; Stop 116
taacttctgtctatttgcttttctt

SEQ ID NO: 325853 - DNA, 25 bp, Artificial
  probe
  misc_feature (1)..(25): SEQ ID NO: 2442; WAN024G9E; Start 21; Stop 45
ttttatgattcgctattcttgtcta

SEQ ID NO: 325854 - DNA, 25 bp, Artificial
  probe
  misc_feature (1)..(25): SEQ ID NO: 2442; WAN024G9E; Start 39; Stop 63
ttgtctattgattagtccgtatttt

SEQ ID NO: 325855 - DNA, 25 bp, Artificial
  probe
  misc_feature (1)..(25): SEQ ID NO: 2442; WAN024G9E; Start 84; Stop 108
aatagcagtaacttctgtctatttg

SEQ ID NO: 325856 - DNA, 25 bp, Artificial
  probe
  misc_feature (1)..(25): SEQ ID NO: 2443; WAN024DFI; Start 514; Stop 538
attctcttcttagatgaaccagcag

SEQ ID NO: 325857 - DNA, 25 bp, Artificial
  probe
  misc_feature (1)..(25): SEQ ID NO: 2443; WAN024DFI; Start 61; Stop 85
gatgtgactcttgaattgaacgaag

SEQ ID NO: 325858 - DNA, 25 bp, Artificial
  probe
  misc_feature (1)..(25): SEQ ID NO: 2443; WAN024DFI; Start 513; Stop 537
aattctcttcttagatgaaccagca

SEQ ID NO: 325859 - DNA, 25 bp, Artificial
  probe
  misc_feature (1)..(25): SEQ ID NO: 2443; WAN024DFI; Start 60; Stop 84
agatgtgactcttgaattgaacgaa

SEQ ID NO: 325860 - DNA, 25 bp, Artificial
  probe
  misc_feature (1)..(25): SEQ ID NO: 2443; WAN024DFI; Start 622; Stop 646
attgaacacgatatgaatctggtca

SEQ ID NO: 325861 - DNA, 25 bp, Artificial
  probe
  misc_feature (1)..(25): SEQ ID NO: 2443; WAN024DFI; Start 56; Stop 80
ttggagatgtgactcttgaattgaa

SEQ ID NO: 325862 - DNA, 25 bp, Artificial
  probe
  misc_feature (1)..(25): SEQ ID NO: 2443; WAN024DFI; Start 62; Stop 86
atgtgactcttgaattgaacgaagg

SEQ ID NO: 325863 - DNA, 25 bp, Artificial
  probe
  misc_feature (1)..(25): SEQ ID NO: 2443; WAN024DFI; Start 57; Stop 81
tggagatgtgactcttgaattgaac

SEQ ID NO: 325864 - DNA, 25 bp, Artificial
  probe
  misc_feature (1)..(25): SEQ ID NO: 2443; WAN024DFI; Start 55; Stop 79
gttggagatgtgactcttgaattga

SEQ ID NO: 325865 - DNA, 25 bp, Artificial
  probe
  misc_feature (1)..(25): SEQ ID NO: 2443; WAN024DFI; Start 53; Stop 77
ctgttggagatgtgactcttgaatt

SEQ ID NO: 325866 - DNA, 25 bp, Artificial
  probe
  misc_feature (1)..(25): SEQ ID NO: 2443; WAN024DFI; Start 59; Stop 83
gagatgtgactcttgaattgaacga

SEQ ID NO: 325867 - DNA, 25 bp, Artificial
  probe
  misc_feature (1)..(25): SEQ ID NO: 2443; WAN024DFI; Start 569; Stop 593
tgactgagttaattcgtcgtatcaa

SEQ ID NO: 325868 - DNA, 25 bp, Artificial
  probe
  misc_feature (1)..(25): SEQ ID NO: 2443; WAN024DFI; Start 568; Stop 592
ttgactgagttaattcgtcgtatca

SEQ ID NO: 325869 - DNA, 25 bp, Artificial
  probe
  misc_feature (1)..(25): SEQ ID NO: 2443; WAN024DFI; Start 54; Stop 78
tgttggagatgtgactcttgaattg

SEQ ID NO: 325870 - DNA, 25 bp, Artificial
  probe
  misc_feature (1)..(25): SEQ ID NO: 2443; WAN024DFI; Start 567; Stop 591
attgactgagttaattcgtcgtatc

SEQ ID NO: 325871 - DNA, 25 bp, Artificial
  probe
  misc_feature (1)..(25): SEQ ID NO: 2443; WAN024DFI; Start 558; Stop 582
aacagccgaattgactgagttaatt

SEQ ID NO: 325872 - DNA, 25 bp, Artificial
  probe
  misc_feature (1)..(25): SEQ ID NO: 2443; WAN024DFI; Start 566; Stop 590
aattgactgagttaattcgtcgtat

SEQ ID NO: 325873 - DNA, 25 bp, Artificial
  probe
  misc_feature (1)..(25): SEQ ID NO: 2443; WAN024DFI; Start 58; Stop 82
ggagatgtgactcttgaattgaacg

SEQ ID NO: 325874 - DNA, 25 bp, Artificial
  probe
  misc_feature (1)..(25): SEQ ID NO: 2443; WAN024DFI; Start 621; Stop 645
gattgaacacgatatgaatctggtc

SEQ ID NO: 325875 - DNA, 25 bp, Artificial
  probe
  misc_feature (1)..(25): SEQ ID NO: 2443; WAN024DFI; Start 620; Stop 644
tgattgaacacgatatgaatctggt

SEQ ID NO: 325876 - DNA, 25 bp, Artificial
  probe
  misc_feature (1)..(25): SEQ ID NO: 2443; WAN024DFI; Start 619; Stop 643
ttgattgaacacgatatgaatctgg

SEQ ID NO: 325877 - DNA, 25 bp, Artificial
  probe
  misc_feature (1)..(25): SEQ ID NO: 2443; WAN024DFI; Start 515; Stop 539
ttctcttcttagatgaaccagcagc

SEQ ID NO: 325878 - DNA, 25 bp, Artificial
  probe
  misc_feature (1)..(25): SEQ ID NO: 2443; WAN024DFI; Start 708; Stop 732
agacgaaattaagaccaataaacgc

SEQ ID NO: 325879 - DNA, 25 bp, Artificial
  probe
  misc_feature (1)..(25): SEQ ID NO: 2443; WAN024DFI; Start 618; Stop 642
gttgattgaacacgatatgaatctg

SEQ ID NO: 325880 - DNA, 25 bp, Artificial
  probe
  misc_feature (1)..(25): SEQ ID NO: 2443; WAN024DFI; Start 703; Stop 727
actccagacgaaattaagaccaata

SEQ ID NO: 325881 - DNA, 25 bp, Artificial
  probe
  misc_feature (1)..(25): SEQ ID NO: 2443; WAN024DFI; Start 702; Stop 726
aactccagacgaaattaagaccaat

SEQ ID NO: 325882 - DNA, 25 bp, Artificial
  probe
  misc_feature (1)..(25): SEQ ID NO: 2443; WAN024DFI; Start 643; Stop 667
gtcatggaagtaacagaacgtatct

SEQ ID NO: 325883 - DNA, 25 bp, Artificial
  probe
  misc_feature (1)..(25): SEQ ID NO: 2443; WAN024DFI; Start 642; Stop 666
ggtcatggaagtaacagaacgtatc

SEQ ID NO: 325884 - DNA, 25 bp, Artificial
  probe
  misc_feature (1)..(25): SEQ ID NO: 2443; WAN024DFI; Start 645; Stop 669
catggaagtaacagaacgtatctac

SEQ ID NO: 325885 - DNA, 25 bp, Artificial
  probe
  misc_feature (1)..(25): SEQ ID NO: 2443; WAN024DFI; Start 701; Stop 725
gaactccagacgaaattaagaccaa

SEQ ID NO: 325886 - DNA, 25 bp, Artificial
  probe
  misc_feature (1)..(25): SEQ ID NO: 2443; WAN024DFI; Start 644; Stop 668
tcatggaagtaacagaacgtatcta

SEQ ID NO: 325887 - DNA, 25 bp, Artificial
  probe
  misc_feature (1)..(25): SEQ ID NO: 2443; WAN024DFI; Start 698; Stop 722
aaggaactccagacgaaattaagac

SEQ ID NO: 325888 - DNA, 25 bp, Artificial
  probe
  misc_feature (1)..(25): SEQ ID NO: 2443; WAN024DFI; Start 697; Stop 721
caaggaactccagacgaaattaaga

SEQ ID NO: 325889 - DNA, 25 bp, Artificial
  probe
  misc_feature (1)..(25): SEQ ID NO: 2444; WAN024FXS; Start 90; Stop 114
cttggatgttgatgttgatgaatgt

SEQ ID NO: 325890 - DNA, 25 bp, Artificial
  probe
  misc_feature (1)..(25): SEQ ID NO: 2444; WAN024FXS; Start 91; Stop 115
ttggatgttgatgttgatgaatgta

SEQ ID NO: 325891 - DNA, 25 bp, Artificial
  probe
  misc_feature (1)..(25): SEQ ID NO: 2444; WAN024FXS; Start 385; Stop 409
gaagaagatattgaacgcttggaac

SEQ ID NO: 325892 - DNA, 25 bp, Artificial
  probe
  misc_feature (1)..(25): SEQ ID NO: 2444; WAN024FXS; Start 89; Stop 113
gcttggatgttgatgttgatgaatg

SEQ ID NO: 325893 - DNA, 25 bp, Artificial
  probe
  misc_feature (1)..(25): SEQ ID NO: 2444; WAN024FXS; Start 290; Stop 314
aattctgtaaggctgttgatgactt

SEQ ID NO: 325894 - DNA, 25 bp, Artificial
  probe
  misc_feature (1)..(25): SEQ ID NO: 2444; WAN024FXS; Start 386; Stop 410
aagaagatattgaacgcttggaaca

SEQ ID NO: 325895 - DNA, 25 bp, Artificial
  probe
  misc_feature (1)..(25): SEQ ID NO: 2444; WAN024FXS; Start 195; Stop 219
agatgagatgatggacttctacgaa

SEQ ID NO: 325896 - DNA, 25 bp, Artificial
  probe
  misc_feature (1)..(25): SEQ ID NO: 2444; WAN024FXS; Start 170; Stop 194
atacttatggtgatggtgaattgcc

SEQ ID NO: 325897 - DNA, 25 bp, Artificial
  probe
  misc_feature (1)..(25): SEQ ID NO: 2444; WAN024FXS; Start 169; Stop 193
tatacttatggtgatggtgaattgc

SEQ ID NO: 325898 - DNA, 25 bp, Artificial
  probe
  misc_feature (1)..(25): SEQ ID NO: 2444; WAN024FXS; Start 384; Stop 408
ggaagaagatattgaacgcttggaa

SEQ ID NO: 325899 - DNA, 25 bp, Artificial
  probe
  misc_feature (1)..(25): SEQ ID NO: 2444; WAN024FXS; Start 92; Stop 116
tggatgttgatgttgatgaatgtac

SEQ ID NO: 325900 - DNA, 25 bp, Artificial
  probe
  misc_feature (1)..(25): SEQ ID NO: 2444; WAN024FXS; Start 387; Stop 411
agaagatattgaacgcttggaacaa

SEQ ID NO: 325901 - DNA, 25 bp, Artificial
  probe
  misc_feature (1)..(25): SEQ ID NO: 2444; WAN024FXS; Start 194; Stop 218
cagatgagatgatggacttctacga

SEQ ID NO: 325902 - DNA, 25 bp, Artificial
  probe
  misc_feature (1)..(25): SEQ ID NO: 2444; WAN024FXS; Start 382; Stop 406
gaggaagaagatattgaacgcttgg

SEQ ID NO: 325903 - DNA, 25 bp, Artificial
  probe
  misc_feature (1)..(25): SEQ ID NO: 2444; WAN024FXS; Start 167; Stop 191
cctatacttatggtgatggtgaatt

SEQ ID NO: 325904 - DNA, 25 bp, Artificial
  probe
  misc_feature (1)..(25): SEQ ID NO: 2444; WAN024FXS; Start 88; Stop 112
ggcttggatgttgatgttgatgaat

SEQ ID NO: 325905 - DNA, 25 bp, Artificial
  probe
  misc_feature (1)..(25): SEQ ID NO: 2444; WAN024FXS; Start 383; Stop 407
aggaagaagatattgaacgcttgga

SEQ ID NO: 325906 - DNA, 25 bp, Artificial
  probe
  misc_feature (1)..(25): SEQ ID NO: 2444; WAN024FXS; Start 381; Stop 405
cgaggaagaagatattgaacgcttg

SEQ ID NO: 325907 - DNA, 25 bp, Artificial
  probe
  misc_feature (1)..(25): SEQ ID NO: 2444; WAN024FXS; Start 269; Stop 293
caggagataccttctacgatgaatt

SEQ ID NO: 325908 - DNA, 25 bp, Artificial
  probe
  misc_feature (1)..(25): SEQ ID NO: 2444; WAN024FXS; Start 268; Stop 292
tcaggagataccttctacgatgaat

SEQ ID NO: 325909 - DNA, 25 bp, Artificial
  probe
  misc_feature (1)..(25): SEQ ID NO: 2444; WAN024FXS; Start 267; Stop 291
ctcaggagataccttctacgatgaa

SEQ ID NO: 325910 - DNA, 25 bp, Artificial
  probe
  misc_feature (1)..(25): SEQ ID NO: 2444; WAN024FXS; Start 165; Stop 189
gacctatacttatggtgatggtgaa

SEQ ID NO: 325911 - DNA, 25 bp, Artificial
  probe
  misc_feature (1)..(25): SEQ ID NO: 2444; WAN024FXS; Start 376; Stop 400
tctgccgaggaagaagatattgaac

SEQ ID NO: 325912 - DNA, 25 bp, Artificial
  probe
  misc_feature (1)..(25): SEQ ID NO: 2444; WAN024FXS; Start 166; Stop 190
acctatacttatggtgatggtgaat

SEQ ID NO: 325913 - DNA, 25 bp, Artificial
  probe
  misc_feature (1)..(25): SEQ ID NO: 2444; WAN024FXS; Start 168; Stop 192
ctatacttatggtgatggtgaattg

SEQ ID NO: 325914 - DNA, 25 bp, Artificial
  probe
  misc_feature (1)..(25): SEQ ID NO: 2444; WAN024FXS; Start 160; Stop 184
gttgcgacctatacttatggtgatg

SEQ ID NO: 325915 - DNA, 25 bp, Artificial
  probe
  misc_feature (1)..(25): SEQ ID NO: 2444; WAN024FXS; Start 164; Stop 188
cgacctatacttatggtgatggtga

SEQ ID NO: 325916 - DNA, 25 bp, Artificial
  probe
  misc_feature (1)..(25): SEQ ID NO: 2444; WAN024FXS; Start 390; Stop 414
agatattgaacgcttggaacaattc

SEQ ID NO: 325917 - DNA, 25 bp, Artificial
  probe
  misc_feature (1)..(25): SEQ ID NO: 2444; WAN024FXS; Start 389; Stop 413
aagatattgaacgcttggaacaatt

SEQ ID NO: 325918 - DNA, 25 bp, Artificial
  probe
  misc_feature (1)..(25): SEQ ID NO: 2444; WAN024FXS; Start 388; Stop 412
gaagatattgaacgcttggaacaat

SEQ ID NO: 325919 - DNA, 25 bp, Artificial
  probe
  misc_feature (1)..(25): SEQ ID NO: 2444; WAN024FXS; Start 291; Stop 315
attctgtaaggctgttgatgacttt

SEQ ID NO: 325920 - DNA, 25 bp, Artificial
  probe
  misc_feature (1)..(25): SEQ ID NO: 2444; WAN024FXS; Start 380; Stop 404
ccgaggaagaagatattgaacgctt

SEQ ID NO: 325921 - DNA, 25 bp, Artificial
  probe
  misc_feature (1)..(25): SEQ ID NO: 2444; WAN024FXS; Start 155; Stop 179
ctatcgttgcgacctatacttatgg

SEQ ID NO: 325922 - DNA, 25 bp, Artificial
  probe
  misc_feature (1)..(25): SEQ ID NO: 2445; WAN024G3F; Start 144; Stop 168
ggcgataatagagaagttacggatc

SEQ ID NO: 325923 - DNA, 25 bp, Artificial
  probe
  misc_feature (1)..(25): SEQ ID NO: 2445; WAN024G3F; Start 145; Stop 169
gcgataatagagaagttacggatct

SEQ ID NO: 325924 - DNA, 25 bp, Artificial
  probe
  misc_feature (1)..(25): SEQ ID NO: 2445; WAN024G3F; Start 140; Stop 164
tatgggcgataatagagaagttacg

SEQ ID NO: 325925 - DNA, 25 bp, Artificial
  probe
  misc_feature (1)..(25): SEQ ID NO: 2445; WAN024G3F; Start 146; Stop 170
cgataatagagaagttacggatctt

SEQ ID NO: 325926 - DNA, 25 bp, Artificial
  probe
  misc_feature (1)..(25): SEQ ID NO: 2445; WAN024G3F; Start 134; Stop 158
ggtcaatatgggcgataatagagaa

SEQ ID NO: 325927 - DNA, 25 bp, Artificial
  probe
  misc_feature (1)..(25): SEQ ID NO: 2445; WAN024G3F; Start 136; Stop 160
tcaatatgggcgataatagagaagt

SEQ ID NO: 325928 - DNA, 25 bp, Artificial
  probe
  misc_feature (1)..(25): SEQ ID NO: 2445; WAN024G3F; Start 133; Stop 157
tggtcaatatgggcgataatagaga

SEQ ID NO: 325929 - DNA, 25 bp, Artificial
  probe
  misc_feature (1)..(25): SEQ ID NO: 2445; WAN024G3F; Start 132; Stop 156
gtggtcaatatgggcgataatagag

SEQ ID NO: 325930 - DNA, 25 bp, Artificial
  probe
  misc_feature (1)..(25): SEQ ID NO: 2445; WAN024G3F; Start 135; Stop 159
gtcaatatgggcgataatagagaag

SEQ ID NO: 325931 - DNA, 25 bp, Artificial
  probe
  misc_feature (1)..(25): SEQ ID NO: 2445; WAN024G3F; Start 3; Stop 27
ggcattcaacttaatagtaattcca

SEQ ID NO: 325932 - DNA, 25 bp, Artificial
  probe
  misc_feature (1)..(25): SEQ ID NO: 2445; WAN024G3F; Start 2; Stop 26
tggcattcaacttaatagtaattcc

SEQ ID NO: 325933 - DNA, 25 bp, Artificial
  probe
  misc_feature (1)..(25): SEQ ID NO: 2445; WAN024G3F; Start 137; Stop 161
caatatgggcgataatagagaagtt

SEQ ID NO: 325934 - DNA, 25 bp, Artificial
  probe
  misc_feature (1)..(25): SEQ ID NO: 2445; WAN024G3F; Start 143; Stop 167
gggcgataatagagaagttacggat

SEQ ID NO: 325935 - DNA, 25 bp, Artificial
  probe
  misc_feature (1)..(25): SEQ ID NO: 2445; WAN024G3F; Start 141; Stop 165
atgggcgataatagagaagttacgg

SEQ ID NO: 325936 - DNA, 25 bp, Artificial
  probe
  misc_feature (1)..(25): SEQ ID NO: 2445; WAN024G3F; Start 139; Stop 163
atatgggcgataatagagaagttac

SEQ ID NO: 325937 - DNA, 25 bp, Artificial
  probe
  misc_feature (1)..(25): SEQ ID NO: 2445; WAN024G3F; Start 202; Stop 226
atgattctcttcctttcagggtatc

SEQ ID NO: 325938 - DNA, 25 bp, Artificial
  probe
  misc_feature (1)..(25): SEQ ID NO: 2445; WAN024G3F; Start 203; Stop 227
tgattctcttcctttcagggtatct

SEQ ID NO: 325939 - DNA, 25 bp, Artificial
  probe
  misc_feature (1)..(25): SEQ ID NO: 2445; WAN024G3F; Start 131; Stop 155
cgtggtcaatatgggcgataataga

SEQ ID NO: 325940 - DNA, 25 bp, Artificial
  probe
  misc_feature (1)..(25): SEQ ID NO: 2445; WAN024G3F; Start 9; Stop 33
caacttaatagtaattccacgttcc

SEQ ID NO: 325941 - DNA, 25 bp, Artificial
  probe
  misc_feature (1)..(25): SEQ ID NO: 2445; WAN024G3F; Start 204; Stop 228
gattctcttcctttcagggtatcta

SEQ ID NO: 325942 - DNA, 25 bp, Artificial
  probe
  misc_feature (1)..(25): SEQ ID NO: 2445; WAN024G3F; Start 4; Stop 28
gcattcaacttaatagtaattccac

SEQ ID NO: 325943 - DNA, 25 bp, Artificial
  probe
  misc_feature (1)..(25): SEQ ID NO: 2445; WAN024G3F; Start 207; Stop 231
tctcttcctttcagggtatctattt

SEQ ID NO: 325944 - DNA, 25 bp, Artificial
  probe
  misc_feature (1)..(25): SEQ ID NO: 2445; WAN024G3F; Start 206; Stop 230
ttctcttcctttcagggtatctatt

SEQ ID NO: 325945 - DNA, 25 bp, Artificial
  probe
  misc_feature (1)..(25): SEQ ID NO: 2445; WAN024G3F; Start 201; Stop 225
catgattctcttcctttcagggtat

SEQ ID NO: 325946 - DNA, 25 bp, Artificial
  probe
  misc_feature (1)..(25): SEQ ID NO: 2445; WAN024G3F; Start 205; Stop 229
attctcttcctttcagggtatctat

SEQ ID NO: 325947 - DNA, 25 bp, Artificial
  probe
  misc_feature (1)..(25): SEQ ID NO: 2445; WAN024G3F; Start 5; Stop 29
cattcaacttaatagtaattccacg

SEQ ID NO: 325948 - DNA, 25 bp, Artificial
  probe
  misc_feature (1)..(25): SEQ ID NO: 2445; WAN024G3F; Start 138; Stop 162
aatatgggcgataatagagaagtta

SEQ ID NO: 325949 - DNA, 25 bp, Artificial
  probe
  misc_feature (1)..(25): SEQ ID NO: 2445; WAN024G3F; Start 142; Stop 166
tgggcgataatagagaagttacgga

SEQ ID NO: 325950 - DNA, 25 bp, Artificial
  probe
  misc_feature (1)..(25): SEQ ID NO: 2445; WAN024G3F; Start 8; Stop 32
tcaacttaatagtaattccacgttc

SEQ ID NO: 325951 - DNA, 25 bp, Artificial
  probe
  misc_feature (1)..(25): SEQ ID NO: 2445; WAN024G3F; Start 130; Stop 154
ccgtggtcaatatgggcgataatag

SEQ ID NO: 325952 - DNA, 25 bp, Artificial
  probe
  misc_feature (1)..(25): SEQ ID NO: 2445; WAN024G3F; Start 11; Stop 35
acttaatagtaattccacgttcccg

SEQ ID NO: 325953 - DNA, 25 bp, Artificial
  probe
  misc_feature (1)..(25): SEQ ID NO: 2445; WAN024G3F; Start 12; Stop 36
cttaatagtaattccacgttcccgc

SEQ ID NO: 325954 - DNA, 25 bp, Artificial
  probe
  misc_feature (1)..(25): SEQ ID NO: 2445; WAN024G3F; Start 10; Stop 34
aacttaatagtaattccacgttccc

SEQ ID NO: 325955 - DNA, 25 bp, Artificial
  probe
  misc_feature (1)..(25): SEQ ID NO: 2446; WAN024C8P; Start 277; Stop 301
gtattgttgaaacctgctgtagaag

SEQ ID NO: 325956 - DNA, 25 bp, Artificial
  probe
  misc_feature (1)..(25): SEQ ID NO: 2446; WAN024C8P; Start 274; Stop 298
aaagtattgttgaaacctgctgtag

SEQ ID NO: 325957 - DNA, 25 bp, Artificial
  probe
  misc_feature (1)..(25): SEQ ID NO: 2446; WAN024C8P; Start 272; Stop 296
ctaaagtattgttgaaacctgctgt

SEQ ID NO: 325958 - DNA, 25 bp, Artificial
  probe
  misc_feature (1)..(25): SEQ ID NO: 2446; WAN024C8P; Start 276; Stop 300
agtattgttgaaacctgctgtagaa

SEQ ID NO: 325959 - DNA, 25 bp, Artificial
  probe
  misc_feature (1)..(25): SEQ ID NO: 2446; WAN024C8P; Start 275; Stop 299
aagtattgttgaaacctgctgtaga

SEQ ID NO: 325960 - DNA, 25 bp, Artificial
  probe
  misc_feature (1)..(25): SEQ ID NO: 2446; WAN024C8P; Start 371; Stop 395
ctaaatcacttggttctaacactcc

SEQ ID NO: 325961 - DNA, 25 bp, Artificial
  probe
  misc_feature (1)..(25): SEQ ID NO: 2446; WAN024C8P; Start 271; Stop 295
gctaaagtattgttgaaacctgctg

SEQ ID NO: 325962 - DNA, 25 bp, Artificial
  probe
  misc_feature (1)..(25): SEQ ID NO: 2446; WAN024C8P; Start 350; Stop 374
caggtgtggcagatattacatctaa

SEQ ID NO: 325963 - DNA, 25 bp, Artificial
  probe
  misc_feature (1)..(25): SEQ ID NO: 2446; WAN024C8P; Start 14; Stop 38
acaatgcagttgaattagaagaacg

SEQ ID NO: 325964 - DNA, 25 bp, Artificial
  probe
  misc_feature (1)..(25): SEQ ID NO: 2446; WAN024C8P; Start 13; Stop 37
gacaatgcagttgaattagaagaac

SEQ ID NO: 325965 - DNA, 25 bp, Artificial
  probe
  misc_feature (1)..(25): SEQ ID NO: 2446; WAN024C8P; Start 273; Stop 297
taaagtattgttgaaacctgctgta

SEQ ID NO: 325966 - DNA, 25 bp, Artificial
  probe
  misc_feature (1)..(25): SEQ ID NO: 2446; WAN024C8P; Start 12; Stop 36
agacaatgcagttgaattagaagaa

SEQ ID NO: 325967 - DNA, 25 bp, Artificial
  probe
  misc_feature (1)..(25): SEQ ID NO: 2446; WAN024C8P; Start 11; Stop 35
aagacaatgcagttgaattagaaga

SEQ ID NO: 325968 - DNA, 25 bp, Artificial
  probe
  misc_feature (1)..(25): SEQ ID NO: 2446; WAN024C8P; Start 343; Stop 367
gaattggcaggtgtggcagatatta

SEQ ID NO: 325969 - DNA, 25 bp, Artificial
  probe
  misc_feature (1)..(25): SEQ ID NO: 2446; WAN024C8P; Start 370; Stop 394
tctaaatcacttggttctaacactc

SEQ ID NO: 325970 - DNA, 25 bp, Artificial
  probe
  misc_feature (1)..(25): SEQ ID NO: 2446; WAN024C8P; Start 15; Stop 39
caatgcagttgaattagaagaacgc

SEQ ID NO: 325971 - DNA, 25 bp, Artificial
  probe
  misc_feature (1)..(25): SEQ ID NO: 2446; WAN024C8P; Start 344; Stop 368
aattggcaggtgtggcagatattac

SEQ ID NO: 325972 - DNA, 25 bp, Artificial
  probe
  misc_feature (1)..(25): SEQ ID NO: 2446; WAN024C8P; Start 367; Stop 391
acatctaaatcacttggttctaaca

SEQ ID NO: 325973 - DNA, 25 bp, Artificial
  probe
  misc_feature (1)..(25): SEQ ID NO: 2446; WAN024C8P; Start 368; Stop 392
catctaaatcacttggttctaacac

SEQ ID NO: 325974 - DNA, 25 bp, Artificial
  probe
  misc_feature (1)..(25): SEQ ID NO: 2446; WAN024C8P; Start 369; Stop 393
atctaaatcacttggttctaacact

SEQ ID NO: 325975 - DNA, 25 bp, Artificial
  probe
  misc_feature (1)..(25): SEQ ID NO: 2446; WAN024C8P; Start 268; Stop 292
ggagctaaagtattgttgaaacctg

SEQ ID NO: 325976 - DNA, 25 bp, Artificial
  probe
  misc_feature (1)..(25): SEQ ID NO: 2446; WAN024C8P; Start 349; Stop 373
gcaggtgtggcagatattacatcta

SEQ ID NO: 325977 - DNA, 25 bp, Artificial
  probe
  misc_feature (1)..(25): SEQ ID NO: 2446; WAN024C8P; Start 278; Stop 302
tattgttgaaacctgctgtagaagg

SEQ ID NO: 325978 - DNA, 25 bp, Artificial
  probe
  misc_feature (1)..(25): SEQ ID NO: 2446; WAN024C8P; Start 267; Stop 291
tggagctaaagtattgttgaaacct

SEQ ID NO: 325979 - DNA, 25 bp, Artificial
  probe
  misc_feature (1)..(25): SEQ ID NO: 2446; WAN024C8P; Start 266; Stop 290
gtggagctaaagtattgttgaaacc

SEQ ID NO: 325980 - DNA, 25 bp, Artificial
  probe
  misc_feature (1)..(25): SEQ ID NO: 2446; WAN024C8P; Start 265; Stop 289
ggtggagctaaagtattgttgaaac

SEQ ID NO: 325981 - DNA, 25 bp, Artificial
  probe
  misc_feature (1)..(25): SEQ ID NO: 2446; WAN024C8P; Start 269; Stop 293
gagctaaagtattgttgaaacctgc

SEQ ID NO: 325982 - DNA, 25 bp, Artificial
  probe
  misc_feature (1)..(25): SEQ ID NO: 2446; WAN024C8P; Start 260; Stop 284
aattcggtggagctaaagtattgtt

SEQ ID NO: 325983 - DNA, 25 bp, Artificial
  probe
  misc_feature (1)..(25): SEQ ID NO: 2446; WAN024C8P; Start 133; Stop 157
gtaggatttggtactggtaaagctc

SEQ ID NO: 325984 - DNA, 25 bp, Artificial
  probe
  misc_feature (1)..(25): SEQ ID NO: 2446; WAN024C8P; Start 134; Stop 158
taggatttggtactggtaaagctca

SEQ ID NO: 325985 - DNA, 25 bp, Artificial
  probe
  misc_feature (1)..(25): SEQ ID NO: 2446; WAN024C8P; Start 138; Stop 162
atttggtactggtaaagctcaagaa

SEQ ID NO: 325986 - DNA, 25 bp, Artificial
  probe
  misc_feature (1)..(25): SEQ ID NO: 2446; WAN024C8P; Start 261; Stop 285
attcggtggagctaaagtattgttg

SEQ ID NO: 325987 - DNA, 25 bp, Artificial
  probe
  misc_feature (1)..(25): SEQ ID NO: 2446; WAN024C8P; Start 137; Stop 161
gatttggtactggtaaagctcaaga

SEQ ID NO: 325988 - DNA, 25 bp, Artificial
  probe
  misc_feature (1)..(25): SEQ ID NO: 2447; WAN024F8I; Start 150; Stop 174
gattggtccttgctcttctgataat

SEQ ID NO: 325989 - DNA, 25 bp, Artificial
  probe
  misc_feature (1)..(25): SEQ ID NO: 2447; WAN024F8I; Start 151; Stop 175
attggtccttgctcttctgataatg

SEQ ID NO: 325990 - DNA, 25 bp, Artificial
  probe
  misc_feature (1)..(25): SEQ ID NO: 2447; WAN024F8I; Start 678; Stop 702
agtcaacgagtatggcaattatatg

SEQ ID NO: 325991 - DNA, 25 bp, Artificial
  probe
  misc_feature (1)..(25): SEQ ID NO: 2447; WAN024F8I; Start 677; Stop 701
cagtcaacgagtatggcaattatat

SEQ ID NO: 325992 - DNA, 25 bp, Artificial
  probe
  misc_feature (1)..(25): SEQ ID NO: 2447; WAN024F8I; Start 137; Stop 161
gtattctcttggtgattggtccttg

SEQ ID NO: 325993 - DNA, 25 bp, Artificial
  probe
  misc_feature (1)..(25): SEQ ID NO: 2447; WAN024F8I; Start 676; Stop 700
gcagtcaacgagtatggcaattata

SEQ ID NO: 325994 - DNA, 25 bp, Artificial
  probe
  misc_feature (1)..(25): SEQ ID NO: 2447; WAN024F8I; Start 797; Stop 821
ataactcaggcaagcaatatatgga

SEQ ID NO: 325995 - DNA, 25 bp, Artificial
  probe
  misc_feature (1)..(25): SEQ ID NO: 2447; WAN024F8I; Start 152; Stop 176
ttggtccttgctcttctgataatga

SEQ ID NO: 325996 - DNA, 25 bp, Artificial
  probe
  misc_feature (1)..(25): SEQ ID NO: 2447; WAN024F8I; Start 149; Stop 173
tgattggtccttgctcttctgataa

SEQ ID NO: 325997 - DNA, 25 bp, Artificial
  probe
  misc_feature (1)..(25): SEQ ID NO: 2447; WAN024F8I; Start 796; Stop 820
gataactcaggcaagcaatatatgg

SEQ ID NO: 325998 - DNA, 25 bp, Artificial
  probe
  misc_feature (1)..(25): SEQ ID NO: 2447; WAN024F8I; Start 625; Stop 649
caggaagttgagacatcaggtaatc

SEQ ID NO: 325999 - DNA, 25 bp, Artificial
  probe
  misc_feature (1)..(25): SEQ ID NO: 2447; WAN024F8I; Start 153; Stop 177
tggtccttgctcttctgataatgaa

SEQ ID NO: 326000 - DNA, 25 bp, Artificial
  probe
  misc_feature (1)..(25): SEQ ID NO: 2447; WAN024F8I; Start 628; Stop 652
gaagttgagacatcaggtaatcctt

SEQ ID NO: 326001 - DNA, 25 bp, Artificial
  probe
  misc_feature (1)..(25): SEQ ID NO: 2447; WAN024F8I; Start 798; Stop 822
taactcaggcaagcaatatatggag

SEQ ID NO: 326002 - DNA, 25 bp, Artificial
  probe
  misc_feature (1)..(25): SEQ ID NO: 2447; WAN024F8I; Start 148; Stop 172
gtgattggtccttgctcttctgata

SEQ ID NO: 326003 - DNA, 25 bp, Artificial
  probe
  misc_feature (1)..(25): SEQ ID NO: 2447; WAN024F8I; Start 795; Stop 819
tgataactcaggcaagcaatatatg

SEQ ID NO: 326004 - DNA, 25 bp, Artificial
  probe
  misc_feature (1)..(25): SEQ ID NO: 2447; WAN024F8I; Start 793; Stop 817
catgataactcaggcaagcaatata

SEQ ID NO: 326005 - DNA, 25 bp, Artificial
  probe
  misc_feature (1)..(25): SEQ ID NO: 2447; WAN024F8I; Start 781; Stop 805
attgacaccaaccatgataactcag

SEQ ID NO: 326006 - DNA, 25 bp, Artificial
  probe
  misc_feature (1)..(25): SEQ ID NO: 2447; WAN024F8I; Start 136; Stop 160
cgtattctcttggtgattggtcctt

SEQ ID NO: 326007 - DNA, 25 bp, Artificial
  probe
  misc_feature (1)..(25): SEQ ID NO: 2447; WAN024F8I; Start 792; Stop 816
ccatgataactcaggcaagcaatat

SEQ ID NO: 326008 - DNA, 25 bp, Artificial
  probe
  misc_feature (1)..(25): SEQ ID NO: 2447; WAN024F8I; Start 259; Stop 283
tatactgctaagcctcgtaccaatg

SEQ ID NO: 326009 - DNA, 25 bp, Artificial
  probe
  misc_feature (1)..(25): SEQ ID NO: 2447; WAN024F8I; Start 780; Stop 804
cattgacaccaaccatgataactca

SEQ ID NO: 326010 - DNA, 25 bp, Artificial
  probe
  misc_feature (1)..(25): SEQ ID NO: 2447; WAN024F8I; Start 805; Stop 829
ggcaagcaatatatggagcagattc

SEQ ID NO: 326011 - DNA, 25 bp, Artificial
  probe
  misc_feature (1)..(25): SEQ ID NO: 2447; WAN024F8I; Start 138; Stop 162
tattctcttggtgattggtccttgc

SEQ ID NO: 326012 - DNA, 25 bp, Artificial
  probe
  misc_feature (1)..(25): SEQ ID NO: 2447; WAN024F8I; Start 807; Stop 831
caagcaatatatggagcagattcga

SEQ ID NO: 326013 - DNA, 25 bp, Artificial
  probe
  misc_feature (1)..(25): SEQ ID NO: 2447; WAN024F8I; Start 675; Stop 699
agcagtcaacgagtatggcaattat

SEQ ID NO: 326014 - DNA, 25 bp, Artificial
  probe
  misc_feature (1)..(25): SEQ ID NO: 2447; WAN024F8I; Start 794; Stop 818
atgataactcaggcaagcaatatat

SEQ ID NO: 326015 - DNA, 25 bp, Artificial
  probe
  misc_feature (1)..(25): SEQ ID NO: 2447; WAN024F8I; Start 304; Stop 328
gttcaccagccagatacttctaagg

SEQ ID NO: 326016 - DNA, 25 bp, Artificial
  probe
  misc_feature (1)..(25): SEQ ID NO: 2447; WAN024F8I; Start 624; Stop 648
gcaggaagttgagacatcaggtaat

SEQ ID NO: 326017 - DNA, 25 bp, Artificial
  probe
  misc_feature (1)..(25): SEQ ID NO: 2447; WAN024F8I; Start 806; Stop 830
gcaagcaatatatggagcagattcg

SEQ ID NO: 326018 - DNA, 25 bp, Artificial
  probe
  misc_feature (1)..(25): SEQ ID NO: 2447; WAN024F8I; Start 804; Stop 828
aggcaagcaatatatggagcagatt

SEQ ID NO: 326019 - DNA, 25 bp, Artificial
  probe
  misc_feature (1)..(25): SEQ ID NO: 2447; WAN024F8I; Start 96; Stop 120
tgacagggaattggcagatattatt

SEQ ID NO: 326020 - DNA, 25 bp, Artificial
  probe
  misc_feature (1)..(25): SEQ ID NO: 2447; WAN024F8I; Start 627; Stop 651
ggaagttgagacatcaggtaatcct

SEQ ID NO: 326021 - DNA, 25 bp, Artificial
  probe
  misc_feature (1)..(25): SEQ ID NO: 2448; WAN024DPC; Start 258; Stop 282
atcagaagaccaccatattcatcag

SEQ ID NO: 326022 - DNA, 25 bp, Artificial
  probe
  misc_feature (1)..(25): SEQ ID NO: 2448; WAN024DPC; Start 257; Stop 281
aatcagaagaccaccatattcatca

SEQ ID NO: 326023 - DNA, 25 bp, Artificial
  probe
  misc_feature (1)..(25): SEQ ID NO: 2448; WAN024DPC; Start 106; Stop 130
aaggttggtaactatgaactgactc

SEQ ID NO: 326024 - DNA, 25 bp, Artificial
  probe
  misc_feature (1)..(25): SEQ ID NO: 2448; WAN024DPC; Start 105; Stop 129
taaggttggtaactatgaactgact

SEQ ID NO: 326025 - DNA, 25 bp, Artificial
  probe
  misc_feature (1)..(25): SEQ ID NO: 2448; WAN024DPC; Start 103; Stop 127
actaaggttggtaactatgaactga

SEQ ID NO: 326026 - DNA, 25 bp, Artificial
  probe
  misc_feature (1)..(25): SEQ ID NO: 2448; WAN024DPC; Start 261; Stop 285
agaagaccaccatattcatcaggaa

SEQ ID NO: 326027 - DNA, 25 bp, Artificial
  probe
  misc_feature (1)..(25): SEQ ID NO: 2448; WAN024DPC; Start 179; Stop 203
tcatcattaacaaggaacttacagg

SEQ ID NO: 326028 - DNA, 25 bp, Artificial
  probe
  misc_feature (1)..(25): SEQ ID NO: 2448; WAN024DPC; Start 104; Stop 128
ctaaggttggtaactatgaactgac

SEQ ID NO: 326029 - DNA, 25 bp, Artificial
  probe
  misc_feature (1)..(25): SEQ ID NO: 2448; WAN024DPC; Start 102; Stop 126
aactaaggttggtaactatgaactg

SEQ ID NO: 326030 - DNA, 25 bp, Artificial
  probe
  misc_feature (1)..(25): SEQ ID NO: 2448; WAN024DPC; Start 260; Stop 284
cagaagaccaccatattcatcagga

SEQ ID NO: 326031 - DNA, 25 bp, Artificial
  probe
  misc_feature (1)..(25): SEQ ID NO: 2448; WAN024DPC; Start 259; Stop 283
tcagaagaccaccatattcatcagg

SEQ ID NO: 326032 - DNA, 25 bp, Artificial
  probe
  misc_feature (1)..(25): SEQ ID NO: 2448; WAN024DPC; Start 107; Stop 131
aggttggtaactatgaactgactcg

SEQ ID NO: 326033 - DNA, 25 bp, Artificial
  probe
  misc_feature (1)..(25): SEQ ID NO: 2448; WAN024DPC; Start 70; Stop 94
aaattcaccctcaaagataacacct

SEQ ID NO: 326034 - DNA, 25 bp, Artificial
  probe
  misc_feature (1)..(25): SEQ ID NO: 2448; WAN024DPC; Start 254; Stop 278
tcaaatcagaagaccaccatattca

SEQ ID NO: 326035 - DNA, 25 bp, Artificial
  probe
  misc_feature (1)..(25): SEQ ID NO: 2448; WAN024DPC; Start 262; Stop 286
gaagaccaccatattcatcaggaaa

SEQ ID NO: 326036 - DNA, 25 bp, Artificial
  probe
  misc_feature (1)..(25): SEQ ID NO: 2448; WAN024DPC; Start 180; Stop 204
catcattaacaaggaacttacaggg

SEQ ID NO: 326037 - DNA, 25 bp, Artificial
  probe
  misc_feature (1)..(25): SEQ ID NO: 2448; WAN024DPC; Start 71; Stop 95
aattcaccctcaaagataacacctt

SEQ ID NO: 326038 - DNA, 25 bp, Artificial
  probe
  misc_feature (1)..(25): SEQ ID NO: 2448; WAN024DPC; Start 255; Stop 279
caaatcagaagaccaccatattcat

SEQ ID NO: 326039 - DNA, 25 bp, Artificial
  probe
  misc_feature (1)..(25): SEQ ID NO: 2448; WAN024DPC; Start 253; Stop 277
ttcaaatcagaagaccaccatattc

SEQ ID NO: 326040 - DNA, 25 bp, Artificial
  probe
  misc_feature (1)..(25): SEQ ID NO: 2448; WAN024DPC; Start 178; Stop 202
atcatcattaacaaggaacttacag

SEQ ID NO: 326041 - DNA, 25 bp, Artificial
  probe
  misc_feature (1)..(25): SEQ ID NO: 2448; WAN024DPC; Start 256; Stop 280
aaatcagaagaccaccatattcatc

SEQ ID NO: 326042 - DNA, 25 bp, Artificial
  probe
  misc_feature (1)..(25): SEQ ID NO: 2448; WAN024DPC; Start 210; Stop 234
aatcaatatcactgacaagtttggc

SEQ ID NO: 326043 - DNA, 25 bp, Artificial
  probe
  misc_feature (1)..(25): SEQ ID NO: 2448; WAN024DPC; Start 288; Stop 312
attctacttcctcatggatagcttg

SEQ ID NO: 326044 - DNA, 25 bp, Artificial
  probe
  misc_feature (1)..(25): SEQ ID NO: 2448; WAN024DPC; Start 252; Stop 276
tttcaaatcagaagaccaccatatt

SEQ ID NO: 326045 - DNA, 25 bp, Artificial
  probe
  misc_feature (1)..(25): SEQ ID NO: 2448; WAN024DPC; Start 287; Stop 311
aattctacttcctcatggatagctt

SEQ ID NO: 326046 - DNA, 25 bp, Artificial
  probe
  misc_feature (1)..(25): SEQ ID NO: 2448; WAN024DPC; Start 111; Stop 135
tggtaactatgaactgactcgcctt

SEQ ID NO: 326047 - DNA, 25 bp, Artificial
  probe
  misc_feature (1)..(25): SEQ ID NO: 2448; WAN024DPC; Start 110; Stop 134
ttggtaactatgaactgactcgcct

SEQ ID NO: 326048 - DNA, 25 bp, Artificial
  probe
  misc_feature (1)..(25): SEQ ID NO: 2448; WAN024DPC; Start 292; Stop 316
tacttcctcatggatagcttggtag

SEQ ID NO: 326049 - DNA, 25 bp, Artificial
  probe
  misc_feature (1)..(25): SEQ ID NO: 2448; WAN024DPC; Start 291; Stop 315
ctacttcctcatggatagcttggta

SEQ ID NO: 326050 - DNA, 25 bp, Artificial
  probe
  misc_feature (1)..(25): SEQ ID NO: 2448; WAN024DPC; Start 177; Stop 201
aatcatcattaacaaggaacttaca

SEQ ID NO: 326051 - DNA, 25 bp, Artificial
  probe
  misc_feature (1)..(25): SEQ ID NO: 2448; WAN024DPC; Start 109; Stop 133
gttggtaactatgaactgactcgcc

SEQ ID NO: 326052 - DNA, 25 bp, Artificial
  probe
  misc_feature (1)..(25): SEQ ID NO: 2448; WAN024DPC; Start 108; Stop 132
ggttggtaactatgaactgactcgc

SEQ ID NO: 326053 - DNA, 25 bp, Artificial
  probe
  misc_feature (1)..(25): SEQ ID NO: 2448; WAN024DPC; Start 294; Stop 318
cttcctcatggatagcttggtagaa

SEQ ID NO: 326054 - DNA, 25 bp, Artificial
  probe
  misc_feature (1)..(25): SEQ ID NO: 2449; WAN024F8U; Start 282; Stop 306
tatcaagtcacctaagattccaacc

SEQ ID NO: 326055 - DNA, 25 bp, Artificial
  probe
  misc_feature (1)..(25): SEQ ID NO: 2449; WAN024F8U; Start 290; Stop 314
cacctaagattccaaccatcatcat

SEQ ID NO: 326056 - DNA, 25 bp, Artificial
  probe
  misc_feature (1)..(25): SEQ ID NO: 2449; WAN024F8U; Start 288; Stop 312
gtcacctaagattccaaccatcatc

SEQ ID NO: 326057 - DNA, 25 bp, Artificial
  probe
  misc_feature (1)..(25): SEQ ID NO: 2449; WAN024F8U; Start 285; Stop 309
caagtcacctaagattccaaccatc

SEQ ID NO: 326058 - DNA, 25 bp, Artificial
  probe
  misc_feature (1)..(25): SEQ ID NO: 2449; WAN024F8U; Start 289; Stop 313
tcacctaagattccaaccatcatca

SEQ ID NO: 326059 - DNA, 25 bp, Artificial
  probe
  misc_feature (1)..(25): SEQ ID NO: 2449; WAN024F8U; Start 287; Stop 311
agtcacctaagattccaaccatcat

SEQ ID NO: 326060 - DNA, 25 bp, Artificial
  probe
  misc_feature (1)..(25): SEQ ID NO: 2449; WAN024F8U; Start 284; Stop 308
tcaagtcacctaagattccaaccat

SEQ ID NO: 326061 - DNA, 25 bp, Artificial
  probe
  misc_feature (1)..(25): SEQ ID NO: 2449; WAN024F8U; Start 281; Stop 305
ttatcaagtcacctaagattccaac

SEQ ID NO: 326062 - DNA, 25 bp, Artificial
  probe
  misc_feature (1)..(25): SEQ ID NO: 2449; WAN024F8U; Start 286; Stop 310
aagtcacctaagattccaaccatca

SEQ ID NO: 326063 - DNA, 25 bp, Artificial
  probe
  misc_feature (1)..(25): SEQ ID NO: 2449; WAN024F8U; Start 283; Stop 307
atcaagtcacctaagattccaacca

SEQ ID NO: 326064 - DNA, 25 bp, Artificial
  probe
  misc_feature (1)..(25): SEQ ID NO: 2449; WAN024F8U; Start 291; Stop 315
acctaagattccaaccatcatcatg

SEQ ID NO: 326065 - DNA, 25 bp, Artificial
  probe
  misc_feature (1)..(25): SEQ ID NO: 2449; WAN024F8U; Start 554; Stop 578
acgactatgtcttgattgatactgc

SEQ ID NO: 326066 - DNA, 25 bp, Artificial
  probe
  misc_feature (1)..(25): SEQ ID NO: 2449; WAN024F8U; Start 654; Stop 678
cttgcttgtcgttgatgctatgatt

SEQ ID NO: 326067 - DNA, 25 bp, Artificial
  probe
  misc_feature (1)..(25): SEQ ID NO: 2449; WAN024F8U; Start 664; Stop 688
gttgatgctatgattggtcaggaag

SEQ ID NO: 326068 - DNA, 25 bp, Artificial
  probe
  misc_feature (1)..(25): SEQ ID NO: 2449; WAN024F8U; Start 651; Stop 675
aatcttgcttgtcgttgatgctatg

SEQ ID NO: 326069 - DNA, 25 bp, Artificial
  probe
  misc_feature (1)..(25): SEQ ID NO: 2449; WAN024F8U; Start 658; Stop 682
cttgtcgttgatgctatgattggtc

SEQ ID NO: 326070 - DNA, 25 bp, Artificial
  probe
  misc_feature (1)..(25): SEQ ID NO: 2449; WAN024F8U; Start 280; Stop 304
attatcaagtcacctaagattccaa

SEQ ID NO: 326071 - DNA, 25 bp, Artificial
  probe
  misc_feature (1)..(25): SEQ ID NO: 2449; WAN024F8U; Start 655; Stop 679
ttgcttgtcgttgatgctatgattg

SEQ ID NO: 326072 - DNA, 25 bp, Artificial
  probe
  misc_feature (1)..(25): SEQ ID NO: 2449; WAN024F8U; Start 556; Stop 580
gactatgtcttgattgatactgcgg

SEQ ID NO: 326073 - DNA, 25 bp, Artificial
  probe
  misc_feature (1)..(25): SEQ ID NO: 2449; WAN024F8U; Start 553; Stop 577
aacgactatgtcttgattgatactg

SEQ ID NO: 326074 - DNA, 25 bp, Artificial
  probe
  misc_feature (1)..(25): SEQ ID NO: 2449; WAN024F8U; Start 279; Stop 303
aattatcaagtcacctaagattcca

SEQ ID NO: 326075 - DNA, 25 bp, Artificial
  probe
  misc_feature (1)..(25): SEQ ID NO: 2449; WAN024F8U; Start 555; Stop 579
cgactatgtcttgattgatactgcg

SEQ ID NO: 326076 - DNA, 25 bp, Artificial
  probe
  misc_feature (1)..(25): SEQ ID NO: 2449; WAN024F8U; Start 653; Stop 677
tcttgcttgtcgttgatgctatgat

SEQ ID NO: 326077 - DNA, 25 bp, Artificial
  probe
  misc_feature (1)..(25): SEQ ID NO: 2449; WAN024F8U; Start 537; Stop 561
agcccaaactaatcataacgactat

SEQ ID NO: 326078 - DNA, 25 bp, Artificial
  probe
  misc_feature (1)..(25): SEQ ID NO: 2449; WAN024F8U; Start 536; Stop 560
aagcccaaactaatcataacgacta

SEQ ID NO: 326079 - DNA, 25 bp, Artificial
  probe
  misc_feature (1)..(25): SEQ ID NO: 2449; WAN024F8U; Start 652; Stop 676
atcttgcttgtcgttgatgctatga

SEQ ID NO: 326080 - DNA, 25 bp, Artificial
  probe
  misc_feature (1)..(25): SEQ ID NO: 2449; WAN024F8U; Start 364; Stop 388
gccaacaaactcaagaaagaagaaa

SEQ ID NO: 326081 - DNA, 25 bp, Artificial
  probe
  misc_feature (1)..(25): SEQ ID NO: 2449; WAN024F8U; Start 645; Stop 669
aaatgaaatcttgcttgtcgttgat

SEQ ID NO: 326082 - DNA, 25 bp, Artificial
  probe
  misc_feature (1)..(25): SEQ ID NO: 2449; WAN024F8U; Start 1448; Stop 1472
gaatgccagatatgagccagatgtt

SEQ ID NO: 326083 - DNA, 25 bp, Artificial
  probe
  misc_feature (1)..(25): SEQ ID NO: 2449; WAN024F8U; Start 742; Stop 766
cttaccaagattgatggcgatactc

SEQ ID NO: 326084 - DNA, 25 bp, Artificial
  probe
  misc_feature (1)..(25): SEQ ID NO: 2449; WAN024F8U; Start 1541; Stop 1565
aaatgaagaaagcgaagaagaaacg

SEQ ID NO: 326085 - DNA, 25 bp, Artificial
  probe
  misc_feature (1)..(25): SEQ ID NO: 2449; WAN024F8U; Start 273; Stop 297
ggcagaaattatcaagtcacctaag

SEQ ID NO: 326086 - DNA, 25 bp, Artificial
  probe
  misc_feature (1)..(25): SEQ ID NO: 2449; WAN024F8U; Start 834; Stop 858
aaagattacggacattgaaaccttc

SEQ ID NO: 326087 - DNA, 25 bp, Artificial
  probe
  misc_feature (1)..(25): SEQ ID NO: 2450; WAN024DPD; Start 52; Stop 76
accttgtttatcgtgattatcatgc

SEQ ID NO: 326088 - DNA, 25 bp, Artificial
  probe
  misc_feature (1)..(25): SEQ ID NO: 2450; WAN024DPD; Start 53; Stop 77
ccttgtttatcgtgattatcatgct

SEQ ID NO: 326089 - DNA, 25 bp, Artificial
  probe
  misc_feature (1)..(25): SEQ ID NO: 2450; WAN024DPD; Start 59; Stop 83
ttatcgtgattatcatgctagtagc

SEQ ID NO: 326090 - DNA, 25 bp, Artificial
  probe
  misc_feature (1)..(25): SEQ ID NO: 2450; WAN024DPD; Start 116; Stop 140
gtgccctcagtaatctactaactaa

SEQ ID NO: 326091 - DNA, 25 bp, Artificial
  probe
  misc_feature (1)..(25): SEQ ID NO: 2450; WAN024DPD; Start 115; Stop 139
ggtgccctcagtaatctactaacta

SEQ ID NO: 326092 - DNA, 25 bp, Artificial
  probe
  misc_feature (1)..(25): SEQ ID NO: 2450; WAN024DPD; Start 112; Stop 136
attggtgccctcagtaatctactaa

SEQ ID NO: 326093 - DNA, 25 bp, Artificial
  probe
  misc_feature (1)..(25): SEQ ID NO: 2450; WAN024DPD; Start 111; Stop 135
aattggtgccctcagtaatctacta

SEQ ID NO: 326094 - DNA, 25 bp, Artificial
  probe
  misc_feature (1)..(25): SEQ ID NO: 2450; WAN024DPD; Start 56; Stop 80
tgtttatcgtgattatcatgctagt

SEQ ID NO: 326095 - DNA, 25 bp, Artificial
  probe
  misc_feature (1)..(25): SEQ ID NO: 2450; WAN024DPD; Start 117; Stop 141
tgccctcagtaatctactaactaat

SEQ ID NO: 326096 - DNA, 25 bp, Artificial
  probe
  misc_feature (1)..(25): SEQ ID NO: 2450; WAN024DPD; Start 1; Stop 25
atggcatttggagataatggaaatc

SEQ ID NO: 326097 - DNA, 25 bp, Artificial
  probe
  misc_feature (1)..(25): SEQ ID NO: 2450; WAN024DPD; Start 4; Stop 28
gcatttggagataatggaaatcgta

SEQ ID NO: 326098 - DNA, 25 bp, Artificial
  probe
  misc_feature (1)..(25): SEQ ID NO: 2450; WAN024DPD; Start 51; Stop 75
aaccttgtttatcgtgattatcatg

SEQ ID NO: 326099 - DNA, 25 bp, Artificial
  probe
  misc_feature (1)..(25): SEQ ID NO: 2450; WAN024DPD; Start 113; Stop 137
ttggtgccctcagtaatctactaac

SEQ ID NO: 326100 - DNA, 25 bp, Artificial
  probe
  misc_feature (1)..(25): SEQ ID NO: 2450; WAN024DPD; Start 76; Stop 100
ctagtagcaagtttattgggaattt

SEQ ID NO: 326101 - DNA, 25 bp, Artificial
  probe
  misc_feature (1)..(25): SEQ ID NO: 2450; WAN024DPD; Start 3; Stop 27
ggcatttggagataatggaaatcgt

SEQ ID NO: 326102 - DNA, 25 bp, Artificial
  probe
  misc_feature (1)..(25): SEQ ID NO: 2450; WAN024DPD; Start 2; Stop 26
tggcatttggagataatggaaatcg

SEQ ID NO: 326103 - DNA, 25 bp, Artificial
  probe
  misc_feature (1)..(25): SEQ ID NO: 2450; WAN024DPD; Start 55; Stop 79
ttgtttatcgtgattatcatgctag

SEQ ID NO: 326104 - DNA, 25 bp, Artificial
  probe
  misc_feature (1)..(25): SEQ ID NO: 2450; WAN024DPD; Start 54; Stop 78
cttgtttatcgtgattatcatgcta

SEQ ID NO: 326105 - DNA, 25 bp, Artificial
  probe
  misc_feature (1)..(25): SEQ ID NO: 2450; WAN024DPD; Start 75; Stop 99
gctagtagcaagtttattgggaatt

SEQ ID NO: 326106 - DNA, 25 bp, Artificial
  probe
  misc_feature (1)..(25): SEQ ID NO: 2450; WAN024DPD; Start 114; Stop 138
tggtgccctcagtaatctactaact

SEQ ID NO: 326107 - DNA, 25 bp, Artificial
  probe
  misc_feature (1)..(25): SEQ ID NO: 2450; WAN024DPD; Start 6; Stop 30
atttggagataatggaaatcgtaaa

SEQ ID NO: 326108 - DNA, 25 bp, Artificial
  probe
  misc_feature (1)..(25): SEQ ID NO: 2450; WAN024DPD; Start 5; Stop 29
catttggagataatggaaatcgtaa

SEQ ID NO: 326109 - DNA, 25 bp, Artificial
  probe
  misc_feature (1)..(25): SEQ ID NO: 2450; WAN024DPD; Start 57; Stop 81
gtttatcgtgattatcatgctagta

SEQ ID NO: 326110 - DNA, 25 bp, Artificial
  probe
  misc_feature (1)..(25): SEQ ID NO: 2450; WAN024DPD; Start 42; Stop 66
tgagaaaataaccttgtttatcgtg

SEQ ID NO: 326111 - DNA, 25 bp, Artificial
  probe
  misc_feature (1)..(25): SEQ ID NO: 2450; WAN024DPD; Start 50; Stop 74
taaccttgtttatcgtgattatcat

SEQ ID NO: 326112 - DNA, 25 bp, Artificial
  probe
  misc_feature (1)..(25): SEQ ID NO: 2450; WAN024DPD; Start 49; Stop 73
ataaccttgtttatcgtgattatca

SEQ ID NO: 326113 - DNA, 25 bp, Artificial
  probe
  misc_feature (1)..(25): SEQ ID NO: 2450; WAN024DPD; Start 43; Stop 67
gagaaaataaccttgtttatcgtga

SEQ ID NO: 326114 - DNA, 25 bp, Artificial
  probe
  misc_feature (1)..(25): SEQ ID NO: 2450; WAN024DPD; Start 58; Stop 82
tttatcgtgattatcatgctagtag

SEQ ID NO: 326115 - DNA, 25 bp, Artificial
  probe
  misc_feature (1)..(25): SEQ ID NO: 2450; WAN024DPD; Start 41; Stop 65
ttgagaaaataaccttgtttatcgt

SEQ ID NO: 326116 - DNA, 25 bp, Artificial
  probe
  misc_feature (1)..(25): SEQ ID NO: 2450; WAN024DPD; Start 7; Stop 31
tttggagataatggaaatcgtaaaa

SEQ ID NO: 326117 - DNA, 25 bp, Artificial
  probe
  misc_feature (1)..(25): SEQ ID NO: 2450; WAN024DPD; Start 48; Stop 72
aataaccttgtttatcgtgattatc

SEQ ID NO: 326118 - DNA, 25 bp, Artificial
  probe
  misc_feature (1)..(25): SEQ ID NO: 2450; WAN024DPD; Start 44; Stop 68
agaaaataaccttgtttatcgtgat

SEQ ID NO: 326119 - DNA, 25 bp, Artificial
  probe
  misc_feature (1)..(25): SEQ ID NO: 2450; WAN024DPD; Start 34; Stop 58
actatgtttgagaaaataaccttgt

SEQ ID NO: 326120 - DNA, 25 bp, Artificial
  probe
  misc_feature (1)..(25): SEQ ID NO: 2451; WAN024DC2; Start 96; Stop 120
tatggcacaaatgggaaaggataaa

SEQ ID NO: 326121 - DNA, 25 bp, Artificial
  probe
  misc_feature (1)..(25): SEQ ID NO: 2451; WAN024DC2; Start 94; Stop 118
gttatggcacaaatgggaaaggata

SEQ ID NO: 326122 - DNA, 25 bp, Artificial
  probe
  misc_feature (1)..(25): SEQ ID NO: 2451; WAN024DC2; Start 95; Stop 119
ttatggcacaaatgggaaaggataa

SEQ ID NO: 326123 - DNA, 25 bp, Artificial
  probe
  misc_feature (1)..(25): SEQ ID NO: 2451; WAN024DC2; Start 90; Stop 114
aaatgttatggcacaaatgggaaag

SEQ ID NO: 326124 - DNA, 25 bp, Artificial
  probe
  misc_feature (1)..(25): SEQ ID NO: 2451; WAN024DC2; Start 97; Stop 121
atggcacaaatgggaaaggataaac

SEQ ID NO: 326125 - DNA, 25 bp, Artificial
  probe
  misc_feature (1)..(25): SEQ ID NO: 2451; WAN024DC2; Start 89; Stop 113
caaatgttatggcacaaatgggaaa

SEQ ID NO: 326126 - DNA, 25 bp, Artificial
  probe
  misc_feature (1)..(25): SEQ ID NO: 2451; WAN024DC2; Start 71; Stop 95
ctatggcaggacttacaacaaatgt

SEQ ID NO: 326127 - DNA, 25 bp, Artificial
  probe
  misc_feature (1)..(25): SEQ ID NO: 2451; WAN024DC2; Start 70; Stop 94
gctatggcaggacttacaacaaatg

SEQ ID NO: 326128 - DNA, 25 bp, Artificial
  probe
  misc_feature (1)..(25): SEQ ID NO: 2451; WAN024DC2; Start 81; Stop 105
acttacaacaaatgttatggcacaa

SEQ ID NO: 326129 - DNA, 25 bp, Artificial
  probe
  misc_feature (1)..(25): SEQ ID NO: 2451; WAN024DC2; Start 80; Stop 104
gacttacaacaaatgttatggcaca

SEQ ID NO: 326130 - DNA, 25 bp, Artificial
  probe
  misc_feature (1)..(25): SEQ ID NO: 2451; WAN024DC2; Start 108; Stop 132
gggaaaggataaaccaattacattt

SEQ ID NO: 326131 - DNA, 25 bp, Artificial
  probe
  misc_feature (1)..(25): SEQ ID NO: 2451; WAN024DC2; Start 77; Stop 101
caggacttacaacaaatgttatggc

SEQ ID NO: 326132 - DNA, 25 bp, Artificial
  probe
  misc_feature (1)..(25): SEQ ID NO: 2451; WAN024DC2; Start 76; Stop 100
gcaggacttacaacaaatgttatgg

SEQ ID NO: 326133 - DNA, 25 bp, Artificial
  probe
  misc_feature (1)..(25): SEQ ID NO: 2451; WAN024DC2; Start 75; Stop 99
ggcaggacttacaacaaatgttatg

SEQ ID NO: 326134 - DNA, 25 bp, Artificial
  probe
  misc_feature (1)..(25): SEQ ID NO: 2451; WAN024DC2; Start 84; Stop 108
tacaacaaatgttatggcacaaatg

SEQ ID NO: 326135 - DNA, 25 bp, Artificial
  probe
  misc_feature (1)..(25): SEQ ID NO: 2451; WAN024DC2; Start 79; Stop 103
ggacttacaacaaatgttatggcac

SEQ ID NO: 326136 - DNA, 25 bp, Artificial
  probe
  misc_feature (1)..(25): SEQ ID NO: 2451; WAN024DC2; Start 78; Stop 102
aggacttacaacaaatgttatggca

SEQ ID NO: 326137 - DNA, 25 bp, Artificial
  probe
  misc_feature (1)..(25): SEQ ID NO: 2451; WAN024DC2; Start 74; Stop 98
tggcaggacttacaacaaatgttat

SEQ ID NO: 326138 - DNA, 25 bp, Artificial
  probe
  misc_feature (1)..(25): SEQ ID NO: 2451; WAN024DC2; Start 73; Stop 97
atggcaggacttacaacaaatgtta

SEQ ID NO: 326139 - DNA, 25 bp, Artificial
  probe
  misc_feature (1)..(25): SEQ ID NO: 2451; WAN024DC2; Start 72; Stop 96
tatggcaggacttacaacaaatgtt

SEQ ID NO: 326140 - DNA, 25 bp, Artificial
  probe
  misc_feature (1)..(25): SEQ ID NO: 2451; WAN024DC2; Start 101; Stop 125
cacaaatgggaaaggataaaccaat

SEQ ID NO: 326141 - DNA, 25 bp, Artificial
  probe
  misc_feature (1)..(25): SEQ ID NO: 2451; WAN024DC2; Start 82; Stop 106
cttacaacaaatgttatggcacaaa

SEQ ID NO: 326142 - DNA, 25 bp, Artificial
  probe
  misc_feature (1)..(25): SEQ ID NO: 2451; WAN024DC2; Start 88; Stop 112
acaaatgttatggcacaaatgggaa

SEQ ID NO: 326143 - DNA, 25 bp, Artificial
  probe
  misc_feature (1)..(25): SEQ ID NO: 2451; WAN024DC2; Start 102; Stop 126
acaaatgggaaaggataaaccaatt

SEQ ID NO: 326144 - DNA, 25 bp, Artificial
  probe
  misc_feature (1)..(25): SEQ ID NO: 2451; WAN024DC2; Start 85; Stop 109
acaacaaatgttatggcacaaatgg

SEQ ID NO: 326145 - DNA, 25 bp, Artificial
  probe
  misc_feature (1)..(25): SEQ ID NO: 2451; WAN024DC2; Start 91; Stop 115
aatgttatggcacaaatgggaaagg

SEQ ID NO: 326146 - DNA, 25 bp, Artificial
  probe
  misc_feature (1)..(25): SEQ ID NO: 2451; WAN024DC2; Start 83; Stop 107
ttacaacaaatgttatggcacaaat

SEQ ID NO: 326147 - DNA, 25 bp, Artificial
  probe
  misc_feature (1)..(25): SEQ ID NO: 2451; WAN024DC2; Start 156; Stop 180
ggctttatcttgcactcctaatgat

SEQ ID NO: 326148 - DNA, 25 bp, Artificial
  probe
  misc_feature (1)..(25): SEQ ID NO: 2451; WAN024DC2; Start 149; Stop 173
tatgtaaggctttatcttgcactcc

SEQ ID NO: 326149 - DNA, 25 bp, Artificial
  probe
  misc_feature (1)..(25): SEQ ID NO: 2451; WAN024DC2; Start 107; Stop 131
tgggaaaggataaaccaattacatt

SEQ ID NO: 326150 - DNA, 25 bp, Artificial
  probe
  misc_feature (1)..(25): SEQ ID NO: 2451; WAN024DC2; Start 105; Stop 129
aatgggaaaggataaaccaattaca

SEQ ID NO: 326151 - DNA, 25 bp, Artificial
  probe
  misc_feature (1)..(25): SEQ ID NO: 2451; WAN024DC2; Start 86; Stop 110
caacaaatgttatggcacaaatggg

SEQ ID NO: 326152 - DNA, 25 bp, Artificial
  probe
  misc_feature (1)..(25): SEQ ID NO: 2451; WAN024DC2; Start 148; Stop 172
atatgtaaggctttatcttgcactc

SEQ ID NO: 326153 - DNA, 25 bp, Artificial
  probe
  misc_feature (1)..(25): SEQ ID NO: 2452; WAN024FHR; Start 647; Stop 671
agatattcattccacaaggttccat

SEQ ID NO: 326154 - DNA, 25 bp, Artificial
  probe
  misc_feature (1)..(25): SEQ ID NO: 2452; WAN024FHR; Start 646; Stop 670
aagatattcattccacaaggttcca

SEQ ID NO: 326155 - DNA, 25 bp, Artificial
  probe
  misc_feature (1)..(25): SEQ ID NO: 2452; WAN024FHR; Start 645; Stop 669
caagatattcattccacaaggttcc

SEQ ID NO: 326156 - DNA, 25 bp, Artificial
  probe
  misc_feature (1)..(25): SEQ ID NO: 2452; WAN024FHR; Start 644; Stop 668
gcaagatattcattccacaaggttc

SEQ ID NO: 326157 - DNA, 25 bp, Artificial
  probe
  misc_feature (1)..(25): SEQ ID NO: 2452; WAN024FHR; Start 651; Stop 675
attcattccacaaggttccattatc

SEQ ID NO: 326158 - DNA, 25 bp, Artificial
  probe
  misc_feature (1)..(25): SEQ ID NO: 2452; WAN024FHR; Start 648; Stop 672
gatattcattccacaaggttccatt

SEQ ID NO: 326159 - DNA, 25 bp, Artificial
  probe
  misc_feature (1)..(25): SEQ ID NO: 2452; WAN024FHR; Start 643; Stop 667
agcaagatattcattccacaaggtt

SEQ ID NO: 326160 - DNA, 25 bp, Artificial
  probe
  misc_feature (1)..(25): SEQ ID NO: 2452; WAN024FHR; Start 642; Stop 666
aagcaagatattcattccacaaggt

SEQ ID NO: 326161 - DNA, 25 bp, Artificial
  probe
  misc_feature (1)..(25): SEQ ID NO: 2452; WAN024FHR; Start 641; Stop 665
gaagcaagatattcattccacaagg

SEQ ID NO: 326162 - DNA, 25 bp, Artificial
  probe
  misc_feature (1)..(25): SEQ ID NO: 2452; WAN024FHR; Start 640; Stop 664
agaagcaagatattcattccacaag

SEQ ID NO: 326163 - DNA, 25 bp, Artificial
  probe
  misc_feature (1)..(25): SEQ ID NO: 2452; WAN024FHR; Start 660; Stop 684
acaaggttccattatcggtatgatg

SEQ ID NO: 326164 - DNA, 25 bp, Artificial
  probe
  misc_feature (1)..(25): SEQ ID NO: 2452; WAN024FHR; Start 659; Stop 683
cacaaggttccattatcggtatgat

SEQ ID NO: 326165 - DNA, 25 bp, Artificial
  probe
  misc_feature (1)..(25): SEQ ID NO: 2452; WAN024FHR; Start 652; Stop 676
ttcattccacaaggttccattatcg

SEQ ID NO: 326166 - DNA, 25 bp, Artificial
  probe
  misc_feature (1)..(25): SEQ ID NO: 2452; WAN024FHR; Start 921; Stop 945
ctctatcaatgacttggcttcctta

SEQ ID NO: 326167 - DNA, 25 bp, Artificial
  probe
  misc_feature (1)..(25): SEQ ID NO: 2452; WAN024FHR; Start 922; Stop 946
tctatcaatgacttggcttccttaa

SEQ ID NO: 326168 - DNA, 25 bp, Artificial
  probe
  misc_feature (1)..(25): SEQ ID NO: 2452; WAN024FHR; Start 210; Stop 234
attagatgaattggctcaacacaag

SEQ ID NO: 326169 - DNA, 25 bp, Artificial
  probe
  misc_feature (1)..(25): SEQ ID NO: 2452; WAN024FHR; Start 656; Stop 680
ttccacaaggttccattatcggtat

SEQ ID NO: 326170 - DNA, 25 bp, Artificial
  probe
  misc_feature (1)..(25): SEQ ID NO: 2452; WAN024FHR; Start 655; Stop 679
attccacaaggttccattatcggta

SEQ ID NO: 326171 - DNA, 25 bp, Artificial
  probe
  misc_feature (1)..(25): SEQ ID NO: 2452; WAN024FHR; Start 650; Stop 674
tattcattccacaaggttccattat

SEQ ID NO: 326172 - DNA, 25 bp, Artificial
  probe
  misc_feature (1)..(25): SEQ ID NO: 2452; WAN024FHR; Start 649; Stop 673
atattcattccacaaggttccatta

SEQ ID NO: 326173 - DNA, 25 bp, Artificial
  probe
  misc_feature (1)..(25): SEQ ID NO: 2452; WAN024FHR; Start 639; Stop 663
tagaagcaagatattcattccacaa

SEQ ID NO: 326174 - DNA, 25 bp, Artificial
  probe
  misc_feature (1)..(25): SEQ ID NO: 2452; WAN024FHR; Start 661; Stop 685
caaggttccattatcggtatgatgc

SEQ ID NO: 326175 - DNA, 25 bp, Artificial
  probe
  misc_feature (1)..(25): SEQ ID NO: 2452; WAN024FHR; Start 209; Stop 233
tattagatgaattggctcaacacaa

SEQ ID NO: 326176 - DNA, 25 bp, Artificial
  probe
  misc_feature (1)..(25): SEQ ID NO: 2452; WAN024FHR; Start 208; Stop 232
ttattagatgaattggctcaacaca

SEQ ID NO: 326177 - DNA, 25 bp, Artificial
  probe
  misc_feature (1)..(25): SEQ ID NO: 2452; WAN024FHR; Start 662; Stop 686
aaggttccattatcggtatgatgct

SEQ ID NO: 326178 - DNA, 25 bp, Artificial
  probe
  misc_feature (1)..(25): SEQ ID NO: 2452; WAN024FHR; Start 638; Stop 662
atagaagcaagatattcattccaca

SEQ ID NO: 326179 - DNA, 25 bp, Artificial
  probe
  misc_feature (1)..(25): SEQ ID NO: 2452; WAN024FHR; Start 658; Stop 682
ccacaaggttccattatcggtatga

SEQ ID NO: 326180 - DNA, 25 bp, Artificial
  probe
  misc_feature (1)..(25): SEQ ID NO: 2452; WAN024FHR; Start 657; Stop 681
tccacaaggttccattatcggtatg

SEQ ID NO: 326181 - DNA, 25 bp, Artificial
  probe
  misc_feature (1)..(25): SEQ ID NO: 2452; WAN024FHR; Start 637; Stop 661
gatagaagcaagatattcattccac

SEQ ID NO: 326182 - DNA, 25 bp, Artificial
  probe
  misc_feature (1)..(25): SEQ ID NO: 2452; WAN024FHR; Start 1031; Stop 1055
agttattgattgatactcgttacca

SEQ ID NO: 326183 - DNA, 25 bp, Artificial
  probe
  misc_feature (1)..(25): SEQ ID NO: 2452; WAN024FHR; Start 663; Stop 687
aggttccattatcggtatgatgctg

SEQ ID NO: 326184 - DNA, 25 bp, Artificial
  probe
  misc_feature (1)..(25): SEQ ID NO: 2452; WAN024FHR; Start 1030; Stop 1054
cagttattgattgatactcgttacc

SEQ ID NO: 326185 - DNA, 25 bp, Artificial
  probe
  misc_feature (1)..(25): SEQ ID NO: 2452; WAN024FHR; Start 1029; Stop 1053
ccagttattgattgatactcgttac

SEQ ID NO: 326186 - DNA, 25 bp, Artificial
  probe
  misc_feature (1)..(25): SEQ ID NO: 2453; WAN024FJ5; Start 7; Stop 31
acaaggacattacgaagatcacctg

SEQ ID NO: 326187 - DNA, 25 bp, Artificial
  probe
  misc_feature (1)..(25): SEQ ID NO: 2453; WAN024FJ5; Start 6; Stop 30
cacaaggacattacgaagatcacct

SEQ ID NO: 326188 - DNA, 25 bp, Artificial
  probe
  misc_feature (1)..(25): SEQ ID NO: 2453; WAN024FJ5; Start 5; Stop 29
ccacaaggacattacgaagatcacc

SEQ ID NO: 326189 - DNA, 25 bp, Artificial
  probe
  misc_feature (1)..(25): SEQ ID NO: 2453; WAN024FJ5; Start 8; Stop 32
caaggacattacgaagatcacctgg

SEQ ID NO: 326190 - DNA, 25 bp, Artificial
  probe
  misc_feature (1)..(25): SEQ ID NO: 2453; WAN024FJ5; Start 63; Stop 87
ttcacctgaagaaccaccatcatct

SEQ ID NO: 326191 - DNA, 25 bp, Artificial
  probe
  misc_feature (1)..(25): SEQ ID NO: 2453; WAN024FJ5; Start 4; Stop 28
gccacaaggacattacgaagatcac

SEQ ID NO: 326192 - DNA, 25 bp, Artificial
  probe
  misc_feature (1)..(25): SEQ ID NO: 2453; WAN024FJ5; Start 64; Stop 88
tcacctgaagaaccaccatcatctg

SEQ ID NO: 326193 - DNA, 25 bp, Artificial
  probe
  misc_feature (1)..(25): SEQ ID NO: 2453; WAN024FJ5; Start 160; Stop 184
cctccaccaatcaccgttatctttg

SEQ ID NO: 326194 - DNA, 25 bp, Artificial
  probe
  misc_feature (1)..(25): SEQ ID NO: 2453; WAN024FJ5; Start 167; Stop 191
caatcaccgttatctttggttttct

SEQ ID NO: 326195 - DNA, 25 bp, Artificial
  probe
  misc_feature (1)..(25): SEQ ID NO: 2453; WAN024FJ5; Start 168; Stop 192
aatcaccgttatctttggttttctc

SEQ ID NO: 326196 - DNA, 25 bp, Artificial
  probe
  misc_feature (1)..(25): SEQ ID NO: 2453; WAN024FJ5; Start 170; Stop 194
tcaccgttatctttggttttctcat

SEQ ID NO: 326197 - DNA, 25 bp, Artificial
  probe
  misc_feature (1)..(25): SEQ ID NO: 2453; WAN024FJ5; Start 169; Stop 193
atcaccgttatctttggttttctca

SEQ ID NO: 326198 - DNA, 25 bp, Artificial
  probe
  misc_feature (1)..(25): SEQ ID NO: 2453; WAN024FJ5; Start 9; Stop 33
aaggacattacgaagatcacctggc

SEQ ID NO: 326199 - DNA, 25 bp, Artificial
  probe
  misc_feature (1)..(25): SEQ ID NO: 2453; WAN024FJ5; Start 98; Stop 122
cgatagctgcgatttccacatcttt

SEQ ID NO: 326200 - DNA, 25 bp, Artificial
  probe
  misc_feature (1)..(25): SEQ ID NO: 2453; WAN024FJ5; Start 171; Stop 195
caccgttatctttggttttctcatg

SEQ ID NO: 326201 - DNA, 25 bp, Artificial
  probe
  misc_feature (1)..(25): SEQ ID NO: 2453; WAN024FJ5; Start 159; Stop 183
ccctccaccaatcaccgttatcttt

SEQ ID NO: 326202 - DNA, 25 bp, Artificial
  probe
  misc_feature (1)..(25): SEQ ID NO: 2453; WAN024FJ5; Start 99; Stop 123
gatagctgcgatttccacatctttt

SEQ ID NO: 326203 - DNA, 25 bp, Artificial
  probe
  misc_feature (1)..(25): SEQ ID NO: 2453; WAN024FJ5; Start 62; Stop 86
gttcacctgaagaaccaccatcatc

SEQ ID NO: 326204 - DNA, 25 bp, Artificial
  probe
  misc_feature (1)..(25): SEQ ID NO: 2453; WAN024FJ5; Start 61; Stop 85
agttcacctgaagaaccaccatcat

SEQ ID NO: 326205 - DNA, 25 bp, Artificial
  probe
  misc_feature (1)..(25): SEQ ID NO: 2453; WAN024FJ5; Start 173; Stop 197
ccgttatctttggttttctcatgaa

SEQ ID NO: 326206 - DNA, 25 bp, Artificial
  probe
  misc_feature (1)..(25): SEQ ID NO: 2453; WAN024FJ5; Start 97; Stop 121
acgatagctgcgatttccacatctt

SEQ ID NO: 326207 - DNA, 25 bp, Artificial
  probe
  misc_feature (1)..(25): SEQ ID NO: 2453; WAN024FJ5; Start 180; Stop 204
ctttggttttctcatgaacggttta

SEQ ID NO: 326208 - DNA, 25 bp, Artificial
  probe
  misc_feature (1)..(25): SEQ ID NO: 2453; WAN024FJ5; Start 176; Stop 200
ttatctttggttttctcatgaacgg

SEQ ID NO: 326209 - DNA, 25 bp, Artificial
  probe
  misc_feature (1)..(25): SEQ ID NO: 2453; WAN024FJ5; Start 181; Stop 205
tttggttttctcatgaacggtttac

SEQ ID NO: 326210 - DNA, 25 bp, Artificial
  probe
  misc_feature (1)..(25): SEQ ID NO: 2453; WAN024FJ5; Start 177; Stop 201
tatctttggttttctcatgaacggt

SEQ ID NO: 326211 - DNA, 25 bp, Artificial
  probe
  misc_feature (1)..(25): SEQ ID NO: 2453; WAN024FJ5; Start 3; Stop 27
ggccacaaggacattacgaagatca

SEQ ID NO: 326212 - DNA, 25 bp, Artificial
  probe
  misc_feature (1)..(25): SEQ ID NO: 2453; WAN024FJ5; Start 175; Stop 199
gttatctttggttttctcatgaacg

SEQ ID NO: 326213 - DNA, 25 bp, Artificial
  probe
  misc_feature (1)..(25): SEQ ID NO: 2453; WAN024FJ5; Start 174; Stop 198
cgttatctttggttttctcatgaac

SEQ ID NO: 326214 - DNA, 25 bp, Artificial
  probe
  misc_feature (1)..(25): SEQ ID NO: 2453; WAN024FJ5; Start 60; Stop 84
gagttcacctgaagaaccaccatca

SEQ ID NO: 326215 - DNA, 25 bp, Artificial
  probe
  misc_feature (1)..(25): SEQ ID NO: 2453; WAN024FJ5; Start 178; Stop 202
atctttggttttctcatgaacggtt

SEQ ID NO: 326216 - DNA, 25 bp, Artificial
  probe
  misc_feature (1)..(25): SEQ ID NO: 2453; WAN024FJ5; Start 179; Stop 203
tctttggttttctcatgaacggttt

SEQ ID NO: 326217 - DNA, 25 bp, Artificial
  probe
  misc_feature (1)..(25): SEQ ID NO: 2453; WAN024FJ5; Start 172; Stop 196
accgttatctttggttttctcatga

SEQ ID NO: 326218 - DNA, 25 bp, Artificial
  probe
  misc_feature (1)..(25): SEQ ID NO: 2453; WAN024FJ5; Start 59; Stop 83
ggagttcacctgaagaaccaccatc

SEQ ID NO: 326219 - DNA, 25 bp, Artificial
  probe
  misc_feature (1)..(25): SEQ ID NO: 2454; WAN024FE8; Start 463; Stop 487
atagcagatagagtccgaataacac

SEQ ID NO: 326220 - DNA, 25 bp, Artificial
  probe
  misc_feature (1)..(25): SEQ ID NO: 2454; WAN024FE8; Start 459; Stop 483
gcatatagcagatagagtccgaata

SEQ ID NO: 326221 - DNA, 25 bp, Artificial
  probe
  misc_feature (1)..(25): SEQ ID NO: 2454; WAN024FE8; Start 349; Stop 373
gaatacttcatctgtctggtaggtc

SEQ ID NO: 326222 - DNA, 25 bp, Artificial
  probe
  misc_feature (1)..(25): SEQ ID NO: 2454; WAN024FE8; Start 348; Stop 372
ggaatacttcatctgtctggtaggt

SEQ ID NO: 326223 - DNA, 25 bp, Artificial
  probe
  misc_feature (1)..(25): SEQ ID NO: 2454; WAN024FE8; Start 462; Stop 486
tatagcagatagagtccgaataaca

SEQ ID NO: 326224 - DNA, 25 bp, Artificial
  probe
  misc_feature (1)..(25): SEQ ID NO: 2454; WAN024FE8; Start 350; Stop 374
aatacttcatctgtctggtaggtcg

SEQ ID NO: 326225 - DNA, 25 bp, Artificial
  probe
  misc_feature (1)..(25): SEQ ID NO: 2454; WAN024FE8; Start 464; Stop 488
tagcagatagagtccgaataacacg

SEQ ID NO: 326226 - DNA, 25 bp, Artificial
  probe
  misc_feature (1)..(25): SEQ ID NO: 2454; WAN024FE8; Start 44; Stop 68
atggtcatgctaatctcctacttct

SEQ ID NO: 326227 - DNA, 25 bp, Artificial
  probe
  misc_feature (1)..(25): SEQ ID NO: 2454; WAN024FE8; Start 45; Stop 69
tggtcatgctaatctcctacttctg

SEQ ID NO: 326228 - DNA, 25 bp, Artificial
  probe
  misc_feature (1)..(25): SEQ ID NO: 2454; WAN024FE8; Start 461; Stop 485
atatagcagatagagtccgaataac

SEQ ID NO: 326229 - DNA, 25 bp, Artificial
  probe
  misc_feature (1)..(25): SEQ ID NO: 2454; WAN024FE8; Start 460; Stop 484
catatagcagatagagtccgaataa

SEQ ID NO: 326230 - DNA, 25 bp, Artificial
  probe
  misc_feature (1)..(25): SEQ ID NO: 2454; WAN024FE8; Start 510; Stop 534
ccttggacaaattcagcatattacc

SEQ ID NO: 326231 - DNA, 25 bp, Artificial
  probe
  misc_feature (1)..(25): SEQ ID NO: 2454; WAN024FE8; Start 157; Stop 181
ttccagcaagatatcataggtcaag

SEQ ID NO: 326232 - DNA, 25 bp, Artificial
  probe
  misc_feature (1)..(25): SEQ ID NO: 2454; WAN024FE8; Start 156; Stop 180
gttccagcaagatatcataggtcaa

SEQ ID NO: 326233 - DNA, 25 bp, Artificial
  probe
  misc_feature (1)..(25): SEQ ID NO: 2454; WAN024FE8; Start 159; Stop 183
ccagcaagatatcataggtcaagat

SEQ ID NO: 326234 - DNA, 25 bp, Artificial
  probe
  misc_feature (1)..(25): SEQ ID NO: 2454; WAN024FE8; Start 513; Stop 537
tggacaaattcagcatattaccttc

SEQ ID NO: 326235 - DNA, 25 bp, Artificial
  probe
  misc_feature (1)..(25): SEQ ID NO: 2454; WAN024FE8; Start 335; Stop 359
taggaatagccagggaatacttcat

SEQ ID NO: 326236 - DNA, 25 bp, Artificial
  probe
  misc_feature (1)..(25): SEQ ID NO: 2454; WAN024FE8; Start 511; Stop 535
cttggacaaattcagcatattacct

SEQ ID NO: 326237 - DNA, 25 bp, Artificial
  probe
  misc_feature (1)..(25): SEQ ID NO: 2454; WAN024FE8; Start 442; Stop 466
tacttccacctcatcctgcatatag

SEQ ID NO: 326238 - DNA, 25 bp, Artificial
  probe
  misc_feature (1)..(25): SEQ ID NO: 2454; WAN024FE8; Start 441; Stop 465
ctacttccacctcatcctgcatata

SEQ ID NO: 326239 - DNA, 25 bp, Artificial
  probe
  misc_feature (1)..(25): SEQ ID NO: 2454; WAN024FE8; Start 182; Stop 206
atctcataggtcctctcctcatgta

SEQ ID NO: 326240 - DNA, 25 bp, Artificial
  probe
  misc_feature (1)..(25): SEQ ID NO: 2454; WAN024FE8; Start 509; Stop 533
gccttggacaaattcagcatattac

SEQ ID NO: 326241 - DNA, 25 bp, Artificial
  probe
  misc_feature (1)..(25): SEQ ID NO: 2454; WAN024FE8; Start 158; Stop 182
tccagcaagatatcataggtcaaga

SEQ ID NO: 326242 - DNA, 25 bp, Artificial
  probe
  misc_feature (1)..(25): SEQ ID NO: 2454; WAN024FE8; Start 514; Stop 538
ggacaaattcagcatattaccttct

SEQ ID NO: 326243 - DNA, 25 bp, Artificial
  probe
  misc_feature (1)..(25): SEQ ID NO: 2454; WAN024FE8; Start 186; Stop 210
cataggtcctctcctcatgtacttc

SEQ ID NO: 326244 - DNA, 25 bp, Artificial
  probe
  misc_feature (1)..(25): SEQ ID NO: 2454; WAN024FE8; Start 512; Stop 536
ttggacaaattcagcatattacctt

SEQ ID NO: 326245 - DNA, 25 bp, Artificial
  probe
  misc_feature (1)..(25): SEQ ID NO: 2454; WAN024FE8; Start 346; Stop 370
agggaatacttcatctgtctggtag

SEQ ID NO: 326246 - DNA, 25 bp, Artificial
  probe
  misc_feature (1)..(25): SEQ ID NO: 2454; WAN024FE8; Start 160; Stop 184
cagcaagatatcataggtcaagatc

SEQ ID NO: 326247 - DNA, 25 bp, Artificial
  probe
  misc_feature (1)..(25): SEQ ID NO: 2454; WAN024FE8; Start 155; Stop 179
tgttccagcaagatatcataggtca

SEQ ID NO: 326248 - DNA, 25 bp, Artificial
  probe
  misc_feature (1)..(25): SEQ ID NO: 2454; WAN024FE8; Start 188; Stop 212
taggtcctctcctcatgtacttcat

SEQ ID NO: 326249 - DNA, 25 bp, Artificial
  probe
  misc_feature (1)..(25): SEQ ID NO: 2454; WAN024FE8; Start 187; Stop 211
ataggtcctctcctcatgtacttca

SEQ ID NO: 326250 - DNA, 25 bp, Artificial
  probe
  misc_feature (1)..(25): SEQ ID NO: 2454; WAN024FE8; Start 185; Stop 209
tcataggtcctctcctcatgtactt

SEQ ID NO: 326251 - DNA, 25 bp, Artificial
  probe
  misc_feature (1)..(25): SEQ ID NO: 2454; WAN024FE8; Start 334; Stop 358
gtaggaatagccagggaatacttca

SEQ ID NO: 326252 - DNA, 25 bp, Artificial
  probe
  misc_feature (1)..(25): SEQ ID NO: 2455; WAN024DOI; Start 154; Stop 178
aaggatcattatttagcgggttatc

SEQ ID NO: 326253 - DNA, 25 bp, Artificial
  probe
  misc_feature (1)..(25): SEQ ID NO: 2455; WAN024DOI; Start 153; Stop 177
taaggatcattatttagcgggttat

SEQ ID NO: 326254 - DNA, 25 bp, Artificial
  probe
  misc_feature (1)..(25): SEQ ID NO: 2455; WAN024DOI; Start 152; Stop 176
ataaggatcattatttagcgggtta

SEQ ID NO: 326255 - DNA, 25 bp, Artificial
  probe
  misc_feature (1)..(25): SEQ ID NO: 2455; WAN024DOI; Start 151; Stop 175
aataaggatcattatttagcgggtt

SEQ ID NO: 326256 - DNA, 25 bp, Artificial
  probe
  misc_feature (1)..(25): SEQ ID NO: 2455; WAN024DOI; Start 150; Stop 174
taataaggatcattatttagcgggt

SEQ ID NO: 326257 - DNA, 25 bp, Artificial
  probe
  misc_feature (1)..(25): SEQ ID NO: 2455; WAN024DOI; Start 13; Stop 37
gatttgctctaccacgatggacttt

SEQ ID NO: 326258 - DNA, 25 bp, Artificial
  probe
  misc_feature (1)..(25): SEQ ID NO: 2455; WAN024DOI; Start 27; Stop 51
cgatggacttttcttttcagctaaa

SEQ ID NO: 326259 - DNA, 25 bp, Artificial
  probe
  misc_feature (1)..(25): SEQ ID NO: 2455; WAN024DOI; Start 26; Stop 50
acgatggacttttcttttcagctaa

SEQ ID NO: 326260 - DNA, 25 bp, Artificial
  probe
  misc_feature (1)..(25): SEQ ID NO: 2455; WAN024DOI; Start 20; Stop 44
tctaccacgatggacttttcttttc

SEQ ID NO: 326261 - DNA, 25 bp, Artificial
  probe
  misc_feature (1)..(25): SEQ ID NO: 2455; WAN024DOI; Start 19; Stop 43
ctctaccacgatggacttttctttt

SEQ ID NO: 326262 - DNA, 25 bp, Artificial
  probe
  misc_feature (1)..(25): SEQ ID NO: 2455; WAN024DOI; Start 25; Stop 49
cacgatggacttttcttttcagcta

SEQ ID NO: 326263 - DNA, 25 bp, Artificial
  probe
  misc_feature (1)..(25): SEQ ID NO: 2455; WAN024DOI; Start 22; Stop 46
taccacgatggacttttcttttcag

SEQ ID NO: 326264 - DNA, 25 bp, Artificial
  probe
  misc_feature (1)..(25): SEQ ID NO: 2455; WAN024DOI; Start 21; Stop 45
ctaccacgatggacttttcttttca

SEQ ID NO: 326265 - DNA, 25 bp, Artificial
  probe
  misc_feature (1)..(25): SEQ ID NO: 2455; WAN024DOI; Start 149; Stop 173
ttaataaggatcattatttagcggg

SEQ ID NO: 326266 - DNA, 25 bp, Artificial
  probe
  misc_feature (1)..(25): SEQ ID NO: 2455; WAN024DOI; Start 28; Stop 52
gatggacttttcttttcagctaaaa

SEQ ID NO: 326267 - DNA, 25 bp, Artificial
  probe
  misc_feature (1)..(25): SEQ ID NO: 2455; WAN024DOI; Start 14; Stop 38
atttgctctaccacgatggactttt

SEQ ID NO: 326268 - DNA, 25 bp, Artificial
  probe
  misc_feature (1)..(25): SEQ ID NO: 2455; WAN024DOI; Start 53; Stop 77
aagaagacggtacctatgactttca

SEQ ID NO: 326269 - DNA, 25 bp, Artificial
  probe
  misc_feature (1)..(25): SEQ ID NO: 2455; WAN024DOI; Start 18; Stop 42
gctctaccacgatggacttttcttt

SEQ ID NO: 326270 - DNA, 25 bp, Artificial
  probe
  misc_feature (1)..(25): SEQ ID NO: 2455; WAN024DOI; Start 12; Stop 36
ggatttgctctaccacgatggactt

SEQ ID NO: 326271 - DNA, 25 bp, Artificial
  probe
  misc_feature (1)..(25): SEQ ID NO: 2455; WAN024DOI; Start 15; Stop 39
tttgctctaccacgatggacttttc

SEQ ID NO: 326272 - DNA, 25 bp, Artificial
  probe
  misc_feature (1)..(25): SEQ ID NO: 2455; WAN024DOI; Start 52; Stop 76
aaagaagacggtacctatgactttc

SEQ ID NO: 326273 - DNA, 25 bp, Artificial
  probe
  misc_feature (1)..(25): SEQ ID NO: 2455; WAN024DOI; Start 55; Stop 79
gaagacggtacctatgactttcatg

SEQ ID NO: 326274 - DNA, 25 bp, Artificial
  probe
  misc_feature (1)..(25): SEQ ID NO: 2455; WAN024DOI; Start 54; Stop 78
agaagacggtacctatgactttcat

SEQ ID NO: 326275 - DNA, 25 bp, Artificial
  probe
  misc_feature (1)..(25): SEQ ID NO: 2455; WAN024DOI; Start 81; Stop 105
aaattttgagtatgtgactccttgg

SEQ ID NO: 326276 - DNA, 25 bp, Artificial
  probe
  misc_feature (1)..(25): SEQ ID NO: 2455; WAN024DOI; Start 56; Stop 80
aagacggtacctatgactttcatga

SEQ ID NO: 326277 - DNA, 25 bp, Artificial
  probe
  misc_feature (1)..(25): SEQ ID NO: 2455; WAN024DOI; Start 23; Stop 47
accacgatggacttttcttttcagc

SEQ ID NO: 326278 - DNA, 25 bp, Artificial
  probe
  misc_feature (1)..(25): SEQ ID NO: 2455; WAN024DOI; Start 17; Stop 41
tgctctaccacgatggacttttctt

SEQ ID NO: 326279 - DNA, 25 bp, Artificial
  probe
  misc_feature (1)..(25): SEQ ID NO: 2455; WAN024DOI; Start 16; Stop 40
ttgctctaccacgatggacttttct

SEQ ID NO: 326280 - DNA, 25 bp, Artificial
  probe
  misc_feature (1)..(25): SEQ ID NO: 2455; WAN024DOI; Start 24; Stop 48
ccacgatggacttttcttttcagct

SEQ ID NO: 326281 - DNA, 25 bp, Artificial
  probe
  misc_feature (1)..(25): SEQ ID NO: 2455; WAN024DOI; Start 148; Stop 172
attaataaggatcattatttagcgg

SEQ ID NO: 326282 - DNA, 25 bp, Artificial
  probe
  misc_feature (1)..(25): SEQ ID NO: 2455; WAN024DOI; Start 51; Stop 75
aaaagaagacggtacctatgacttt

SEQ ID NO: 326283 - DNA, 25 bp, Artificial
  probe
  misc_feature (1)..(25): SEQ ID NO: 2455; WAN024DOI; Start 75; Stop 99
tcatgaaaattttgagtatgtgact

SEQ ID NO: 326284 - DNA, 25 bp, Artificial
  probe
  misc_feature (1)..(25): SEQ ID NO: 2455; WAN024DOI; Start 78; Stop 102
tgaaaattttgagtatgtgactcct

SEQ ID NO: 326285 - DNA, 25 bp, Artificial
  probe
  misc_feature (1)..(25): SEQ ID NO: 2456; WAN024CHC; Start 61; Stop 85
agaaccattcggattgtacttagaa

SEQ ID NO: 326286 - DNA, 25 bp, Artificial
  probe
  misc_feature (1)..(25): SEQ ID NO: 2456; WAN024CHC; Start 60; Stop 84
cagaaccattcggattgtacttaga

SEQ ID NO: 326287 - DNA, 25 bp, Artificial
  probe
  misc_feature (1)..(25): SEQ ID NO: 2456; WAN024CHC; Start 59; Stop 83
acagaaccattcggattgtacttag

SEQ ID NO: 326288 - DNA, 25 bp, Artificial
  probe
  misc_feature (1)..(25): SEQ ID NO: 2456; WAN024CHC; Start 58; Stop 82
gacagaaccattcggattgtactta

SEQ ID NO: 326289 - DNA, 25 bp, Artificial
  probe
  misc_feature (1)..(25): SEQ ID NO: 2456; WAN024CHC; Start 28; Stop 52
attcttgctggtaattccttcgatg

SEQ ID NO: 326290 - DNA, 25 bp, Artificial
  probe
  misc_feature (1)..(25): SEQ ID NO: 2456; WAN024CHC; Start 27; Stop 51
cattcttgctggtaattccttcgat

SEQ ID NO: 326291 - DNA, 25 bp, Artificial
  probe
  misc_feature (1)..(25): SEQ ID NO: 2456; WAN024CHC; Start 8; Stop 32
atcttaccgatgatttgaccattct

SEQ ID NO: 326292 - DNA, 25 bp, Artificial
  probe
  misc_feature (1)..(25): SEQ ID NO: 2456; WAN024CHC; Start 10; Stop 34
cttaccgatgatttgaccattcttg

SEQ ID NO: 326293 - DNA, 25 bp, Artificial
  probe
  misc_feature (1)..(25): SEQ ID NO: 2456; WAN024CHC; Start 9; Stop 33
tcttaccgatgatttgaccattctt

SEQ ID NO: 326294 - DNA, 25 bp, Artificial
  probe
  misc_feature (1)..(25): SEQ ID NO: 2456; WAN024CHC; Start 63; Stop 87
aaccattcggattgtacttagaatc

SEQ ID NO: 326295 - DNA, 25 bp, Artificial
  probe
  misc_feature (1)..(25): SEQ ID NO: 2456; WAN024CHC; Start 62; Stop 86
gaaccattcggattgtacttagaat

SEQ ID NO: 326296 - DNA, 25 bp, Artificial
  probe
  misc_feature (1)..(25): SEQ ID NO: 2456; WAN024CHC; Start 11; Stop 35
ttaccgatgatttgaccattcttgc

SEQ ID NO: 326297 - DNA, 25 bp, Artificial
  probe
  misc_feature (1)..(25): SEQ ID NO: 2456; WAN024CHC; Start 57; Stop 81
ggacagaaccattcggattgtactt

SEQ ID NO: 326298 - DNA, 25 bp, Artificial
  probe
  misc_feature (1)..(25): SEQ ID NO: 2456; WAN024CHC; Start 74; Stop 98
ttgtacttagaatccatacttggtt

SEQ ID NO: 326299 - DNA, 25 bp, Artificial
  probe
  misc_feature (1)..(25): SEQ ID NO: 2456; WAN024CHC; Start 82; Stop 106
agaatccatacttggtttaccgtta

SEQ ID NO: 326300 - DNA, 25 bp, Artificial
  probe
  misc_feature (1)..(25): SEQ ID NO: 2456; WAN024CHC; Start 81; Stop 105
tagaatccatacttggtttaccgtt

SEQ ID NO: 326301 - DNA, 25 bp, Artificial
  probe
  misc_feature (1)..(25): SEQ ID NO: 2456; WAN024CHC; Start 80; Stop 104
ttagaatccatacttggtttaccgt

SEQ ID NO: 326302 - DNA, 25 bp, Artificial
  probe
  misc_feature (1)..(25): SEQ ID NO: 2456; WAN024CHC; Start 73; Stop 97
attgtacttagaatccatacttggt

SEQ ID NO: 326303 - DNA, 25 bp, Artificial
  probe
  misc_feature (1)..(25): SEQ ID NO: 2456; WAN024CHC; Start 12; Stop 36
taccgatgatttgaccattcttgct

SEQ ID NO: 326304 - DNA, 25 bp, Artificial
  probe
  misc_feature (1)..(25): SEQ ID NO: 2456; WAN024CHC; Start 79; Stop 103
cttagaatccatacttggtttaccg

SEQ ID NO: 326305 - DNA, 25 bp, Artificial
  probe
  misc_feature (1)..(25): SEQ ID NO: 2456; WAN024CHC; Start 85; Stop 109
atccatacttggtttaccgttaaag

SEQ ID NO: 326306 - DNA, 25 bp, Artificial
  probe
  misc_feature (1)..(25): SEQ ID NO: 2456; WAN024CHC; Start 83; Stop 107
gaatccatacttggtttaccgttaa

SEQ ID NO: 326307 - DNA, 25 bp, Artificial
  probe
  misc_feature (1)..(25): SEQ ID NO: 2456; WAN024CHC; Start 29; Stop 53
ttcttgctggtaattccttcgatgg

SEQ ID NO: 326308 - DNA, 25 bp, Artificial
  probe
  misc_feature (1)..(25): SEQ ID NO: 2456; WAN024CHC; Start 84; Stop 108
aatccatacttggtttaccgttaaa

SEQ ID NO: 326309 - DNA, 25 bp, Artificial
  probe
  misc_feature (1)..(25): SEQ ID NO: 2456; WAN024CHC; Start 72; Stop 96
gattgtacttagaatccatacttgg

SEQ ID NO: 326310 - DNA, 25 bp, Artificial
  probe
  misc_feature (1)..(25): SEQ ID NO: 2456; WAN024CHC; Start 103; Stop 127
gttaaagtcaacgtattggctgaaa

SEQ ID NO: 326311 - DNA, 25 bp, Artificial
  probe
  misc_feature (1)..(25): SEQ ID NO: 2456; WAN024CHC; Start 78; Stop 102
acttagaatccatacttggtttacc

SEQ ID NO: 326312 - DNA, 25 bp, Artificial
  probe
  misc_feature (1)..(25): SEQ ID NO: 2456; WAN024CHC; Start 87; Stop 111
ccatacttggtttaccgttaaagtc

SEQ ID NO: 326313 - DNA, 25 bp, Artificial
  probe
  misc_feature (1)..(25): SEQ ID NO: 2456; WAN024CHC; Start 86; Stop 110
tccatacttggtttaccgttaaagt

SEQ ID NO: 326314 - DNA, 25 bp, Artificial
  probe
  misc_feature (1)..(25): SEQ ID NO: 2456; WAN024CHC; Start 90; Stop 114
tacttggtttaccgttaaagtcaac

SEQ ID NO: 326315 - DNA, 25 bp, Artificial
  probe
  misc_feature (1)..(25): SEQ ID NO: 2456; WAN024CHC; Start 88; Stop 112
catacttggtttaccgttaaagtca

SEQ ID NO: 326316 - DNA, 25 bp, Artificial
  probe
  misc_feature (1)..(25): SEQ ID NO: 2456; WAN024CHC; Start 26; Stop 50
ccattcttgctggtaattccttcga

SEQ ID NO: 326317 - DNA, 25 bp, Artificial
  probe
  misc_feature (1)..(25): SEQ ID NO: 2456; WAN024CHC; Start 75; Stop 99
tgtacttagaatccatacttggttt

SEQ ID NO: 326318 - DNA, 25 bp, Artificial
  probe
  misc_feature (1)..(25): SEQ ID NO: 2457; WAN024G8J; Start 650; Stop 674
ttacagatacagatggtcaagagtt

SEQ ID NO: 326319 - DNA, 25 bp, Artificial
  probe
  misc_feature (1)..(25): SEQ ID NO: 2457; WAN024G8J; Start 864; Stop 888
gatgattatcgtggtcaacaagtgg

SEQ ID NO: 326320 - DNA, 25 bp, Artificial
  probe
  misc_feature (1)..(25): SEQ ID NO: 2457; WAN024G8J; Start 863; Stop 887
ggatgattatcgtggtcaacaagtg

SEQ ID NO: 326321 - DNA, 25 bp, Artificial
  probe
  misc_feature (1)..(25): SEQ ID NO: 2457; WAN024G8J; Start 696; Stop 720
tatgcgtaagtctggtaaggtttat

SEQ ID NO: 326322 - DNA, 25 bp, Artificial
  probe
  misc_feature (1)..(25): SEQ ID NO: 2457; WAN024G8J; Start 695; Stop 719
gtatgcgtaagtctggtaaggttta

SEQ ID NO: 326323 - DNA, 25 bp, Artificial
  probe
  misc_feature (1)..(25): SEQ ID NO: 2457; WAN024G8J; Start 962; Stop 986
cttacgcaccgattatctttgtatc

SEQ ID NO: 326324 - DNA, 25 bp, Artificial
  probe
  misc_feature (1)..(25): SEQ ID NO: 2457; WAN024G8J; Start 1027; Stop 1051
attaagcaaatcagcgaaagtcaaa

SEQ ID NO: 326325 - DNA, 25 bp, Artificial
  probe
  misc_feature (1)..(25): SEQ ID NO: 2457; WAN024G8J; Start 963; Stop 987
ttacgcaccgattatctttgtatca

SEQ ID NO: 326326 - DNA, 25 bp, Artificial
  probe
  misc_feature (1)..(25): SEQ ID NO: 2457; WAN024G8J; Start 699; Stop 723
gcgtaagtctggtaaggtttatgaa

SEQ ID NO: 326327 - DNA, 25 bp, Artificial
  probe
  misc_feature (1)..(25): SEQ ID NO: 2457; WAN024G8J; Start 652; Stop 676
acagatacagatggtcaagagttta

SEQ ID NO: 326328 - DNA, 25 bp, Artificial
  probe
  misc_feature (1)..(25): SEQ ID NO: 2457; WAN024G8J; Start 651; Stop 675
tacagatacagatggtcaagagttt

SEQ ID NO: 326329 - DNA, 25 bp, Artificial
  probe
  misc_feature (1)..(25): SEQ ID NO: 2457; WAN024G8J; Start 649; Stop 673
tttacagatacagatggtcaagagt

SEQ ID NO: 326330 - DNA, 25 bp, Artificial
  probe
  misc_feature (1)..(25): SEQ ID NO: 2457; WAN024G8J; Start 8; Stop 32
taccaactattgccattgtaggacg

SEQ ID NO: 326331 - DNA, 25 bp, Artificial
  probe
  misc_feature (1)..(25): SEQ ID NO: 2457; WAN024G8J; Start 697; Stop 721
atgcgtaagtctggtaaggtttatg

SEQ ID NO: 326332 - DNA, 25 bp, Artificial
  probe
  misc_feature (1)..(25): SEQ ID NO: 2457; WAN024G8J; Start 74; Stop 98
gtgagcgaatctccattgtagaaga

SEQ ID NO: 326333 - DNA, 25 bp, Artificial
  probe
  misc_feature (1)..(25): SEQ ID NO: 2457; WAN024G8J; Start 964; Stop 988
tacgcaccgattatctttgtatcag

SEQ ID NO: 326334 - DNA, 25 bp, Artificial
  probe
  misc_feature (1)..(25): SEQ ID NO: 2457; WAN024G8J; Start 653; Stop 677
cagatacagatggtcaagagtttac

SEQ ID NO: 326335 - DNA, 25 bp, Artificial
  probe
  misc_feature (1)..(25): SEQ ID NO: 2457; WAN024G8J; Start 961; Stop 985
ccttacgcaccgattatctttgtat

SEQ ID NO: 326336 - DNA, 25 bp, Artificial
  probe
  misc_feature (1)..(25): SEQ ID NO: 2457; WAN024G8J; Start 638; Stop 662
ttgatacccactttacagatacaga

SEQ ID NO: 326337 - DNA, 25 bp, Artificial
  probe
  misc_feature (1)..(25): SEQ ID NO: 2457; WAN024G8J; Start 322; Stop 346
tataagacccacaaaccagttatcc

SEQ ID NO: 326338 - DNA, 25 bp, Artificial
  probe
  misc_feature (1)..(25): SEQ ID NO: 2457; WAN024G8J; Start 700; Stop 724
cgtaagtctggtaaggtttatgaaa

SEQ ID NO: 326339 - DNA, 25 bp, Artificial
  probe
  misc_feature (1)..(25): SEQ ID NO: 2457; WAN024G8J; Start 647; Stop 671
actttacagatacagatggtcaaga

SEQ ID NO: 326340 - DNA, 25 bp, Artificial
  probe
  misc_feature (1)..(25): SEQ ID NO: 2457; WAN024G8J; Start 646; Stop 670
cactttacagatacagatggtcaag

SEQ ID NO: 326341 - DNA, 25 bp, Artificial
  probe
  misc_feature (1)..(25): SEQ ID NO: 2457; WAN024G8J; Start 639; Stop 663
tgatacccactttacagatacagat

SEQ ID NO: 326342 - DNA, 25 bp, Artificial
  probe
  misc_feature (1)..(25): SEQ ID NO: 2457; WAN024G8J; Start 640; Stop 664
gatacccactttacagatacagatg

SEQ ID NO: 326343 - DNA, 25 bp, Artificial
  probe
  misc_feature (1)..(25): SEQ ID NO: 2457; WAN024G8J; Start 648; Stop 672
ctttacagatacagatggtcaagag

SEQ ID NO: 326344 - DNA, 25 bp, Artificial
  probe
  misc_feature (1)..(25): SEQ ID NO: 2457; WAN024G8J; Start 1071; Stop 1095
tgtcttgaacgatgtcatcatggat

SEQ ID NO: 326345 - DNA, 25 bp, Artificial
  probe
  misc_feature (1)..(25): SEQ ID NO: 2457; WAN024G8J; Start 858; Stop 882
taaagggatgattatcgtggtcaac

SEQ ID NO: 326346 - DNA, 25 bp, Artificial
  probe
  misc_feature (1)..(25): SEQ ID NO: 2457; WAN024G8J; Start 857; Stop 881
gtaaagggatgattatcgtggtcaa

SEQ ID NO: 326347 - DNA, 25 bp, Artificial
  probe
  misc_feature (1)..(25): SEQ ID NO: 2457; WAN024G8J; Start 83; Stop 107
tctccattgtagaagatgtcgaagg

SEQ ID NO: 326348 - DNA, 25 bp, Artificial
  probe
  misc_feature (1)..(25): SEQ ID NO: 2457; WAN024G8J; Start 76; Stop 100
gagcgaatctccattgtagaagatg

SEQ ID NO: 326349 - DNA, 25 bp, Artificial
  probe
  misc_feature (1)..(25): SEQ ID NO: 2457; WAN024G8J; Start 698; Stop 722
tgcgtaagtctggtaaggtttatga

SEQ ID NO: 326350 - DNA, 25 bp, Artificial
  probe
  misc_feature (1)..(25): SEQ ID NO: 2457; WAN024G8J; Start 323; Stop 347
ataagacccacaaaccagttatcct

SEQ ID NO: 326351 - DNA, 25 bp, Artificial
  probe
  misc_feature (1)..(25): SEQ ID NO: 2458; WAN024FEO; Start 1009; Stop 1033
gtagccattcttcactcaggattat

SEQ ID NO: 326352 - DNA, 25 bp, Artificial
  probe
  misc_feature (1)..(25): SEQ ID NO: 2458; WAN024FEO; Start 1010; Stop 1034
tagccattcttcactcaggattatc

SEQ ID NO: 326353 - DNA, 25 bp, Artificial
  probe
  misc_feature (1)..(25): SEQ ID NO: 2458; WAN024FEO; Start 1576; Stop 1600
accaagactatgaactgccattatt

SEQ ID NO: 326354 - DNA, 25 bp, Artificial
  probe
  misc_feature (1)..(25): SEQ ID NO: 2458; WAN024FEO; Start 1575; Stop 1599
taccaagactatgaactgccattat

SEQ ID NO: 326355 - DNA, 25 bp, Artificial
  probe
  misc_feature (1)..(25): SEQ ID NO: 2458; WAN024FEO; Start 1574; Stop 1598
ataccaagactatgaactgccatta

SEQ ID NO: 326356 - DNA, 25 bp, Artificial
  probe
  misc_feature (1)..(25): SEQ ID NO: 2458; WAN024FEO; Start 1579; Stop 1603
aagactatgaactgccattattgtg

SEQ ID NO: 326357 - DNA, 25 bp, Artificial
  probe
  misc_feature (1)..(25): SEQ ID NO: 2458; WAN024FEO; Start 1573; Stop 1597
gataccaagactatgaactgccatt

SEQ ID NO: 326358 - DNA, 25 bp, Artificial
  probe
  misc_feature (1)..(25): SEQ ID NO: 2458; WAN024FEO; Start 2247; Stop 2271
ccacaacctctatcattaccagatt

SEQ ID NO: 326359 - DNA, 25 bp, Artificial
  probe
  misc_feature (1)..(25): SEQ ID NO: 2458; WAN024FEO; Start 1577; Stop 1601
ccaagactatgaactgccattattg

SEQ ID NO: 326360 - DNA, 25 bp, Artificial
  probe
  misc_feature (1)..(25): SEQ ID NO: 2458; WAN024FEO; Start 344; Stop 368
gctatgacaagattctctatcctct

SEQ ID NO: 326361 - DNA, 25 bp, Artificial
  probe
  misc_feature (1)..(25): SEQ ID NO: 2458; WAN024FEO; Start 1578; Stop 1602
caagactatgaactgccattattgt

SEQ ID NO: 326362 - DNA, 25 bp, Artificial
  probe
  misc_feature (1)..(25): SEQ ID NO: 2458; WAN024FEO; Start 346; Stop 370
tatgacaagattctctatcctctgg

SEQ ID NO: 326363 - DNA, 25 bp, Artificial
  probe
  misc_feature (1)..(25): SEQ ID NO: 2458; WAN024FEO; Start 1008; Stop 1032
ggtagccattcttcactcaggatta

SEQ ID NO: 326364 - DNA, 25 bp, Artificial
  probe
  misc_feature (1)..(25): SEQ ID NO: 2458; WAN024FEO; Start 752; Stop 776
ttgaaggaattgaagcaagtagacc

SEQ ID NO: 326365 - DNA, 25 bp, Artificial
  probe
  misc_feature (1)..(25): SEQ ID NO: 2458; WAN024FEO; Start 2083; Stop 2107
caactcggctatccaccttactatt

SEQ ID NO: 326366 - DNA, 25 bp, Artificial
  probe
  misc_feature (1)..(25): SEQ ID NO: 2458; WAN024FEO; Start 600; Stop 624
gttggaactgagagattatctgctg

SEQ ID NO: 326367 - DNA, 25 bp, Artificial
  probe
  misc_feature (1)..(25): SEQ ID NO: 2458; WAN024FEO; Start 1226; Stop 1250
ctcagtataatcaagcaactctggt

SEQ ID NO: 326368 - DNA, 25 bp, Artificial
  probe
  misc_feature (1)..(25): SEQ ID NO: 2458; WAN024FEO; Start 178; Stop 202
gatggagaagagatggagcaagatt

SEQ ID NO: 326369 - DNA, 25 bp, Artificial
  probe
  misc_feature (1)..(25): SEQ ID NO: 2458; WAN024FEO; Start 598; Stop 622
aagttggaactgagagattatctgc

SEQ ID NO: 326370 - DNA, 25 bp, Artificial
  probe
  misc_feature (1)..(25): SEQ ID NO: 2458; WAN024FEO; Start 1227; Stop 1251
tcagtataatcaagcaactctggta

SEQ ID NO: 326371 - DNA, 25 bp, Artificial
  probe
  misc_feature (1)..(25): SEQ ID NO: 2458; WAN024FEO; Start 601; Stop 625
ttggaactgagagattatctgctgt

SEQ ID NO: 326372 - DNA, 25 bp, Artificial
  probe
  misc_feature (1)..(25): SEQ ID NO: 2458; WAN024FEO; Start 1230; Stop 1254
gtataatcaagcaactctggtactt

SEQ ID NO: 326373 - DNA, 25 bp, Artificial
  probe
  misc_feature (1)..(25): SEQ ID NO: 2458; WAN024FEO; Start 1572; Stop 1596
ggataccaagactatgaactgccat

SEQ ID NO: 326374 - DNA, 25 bp, Artificial
  probe
  misc_feature (1)..(25): SEQ ID NO: 2458; WAN024FEO; Start 603; Stop 627
ggaactgagagattatctgctgtct

SEQ ID NO: 326375 - DNA, 25 bp, Artificial
  probe
  misc_feature (1)..(25): SEQ ID NO: 2458; WAN024FEO; Start 1615; Stop 1639
gatattcctcaggtctgtcctaact

SEQ ID NO: 326376 - DNA, 25 bp, Artificial
  probe
  misc_feature (1)..(25): SEQ ID NO: 2458; WAN024FEO; Start 599; Stop 623
agttggaactgagagattatctgct

SEQ ID NO: 326377 - DNA, 25 bp, Artificial
  probe
  misc_feature (1)..(25): SEQ ID NO: 2458; WAN024FEO; Start 349; Stop 373
gacaagattctctatcctctggaag

SEQ ID NO: 326378 - DNA, 25 bp, Artificial
  probe
  misc_feature (1)..(25): SEQ ID NO: 2458; WAN024FEO; Start 347; Stop 371
atgacaagattctctatcctctgga

SEQ ID NO: 326379 - DNA, 25 bp, Artificial
  probe
  misc_feature (1)..(25): SEQ ID NO: 2458; WAN024FEO; Start 1616; Stop 1640
atattcctcaggtctgtcctaactg

SEQ ID NO: 326380 - DNA, 25 bp, Artificial
  probe
  misc_feature (1)..(25): SEQ ID NO: 2458; WAN024FEO; Start 817; Stop 841
gttgtgagttctattggcagttctc

SEQ ID NO: 326381 - DNA, 25 bp, Artificial
  probe
  misc_feature (1)..(25): SEQ ID NO: 2458; WAN024FEO; Start 602; Stop 626
tggaactgagagattatctgctgtc

SEQ ID NO: 326382 - DNA, 25 bp, Artificial
  probe
  misc_feature (1)..(25): SEQ ID NO: 2458; WAN024FEO; Start 348; Stop 372
tgacaagattctctatcctctggaa

SEQ ID NO: 326383 - DNA, 25 bp, Artificial
  probe
  misc_feature (1)..(25): SEQ ID NO: 2458; WAN024FEO; Start 345; Stop 369
ctatgacaagattctctatcctctg

SEQ ID NO: 326384 - DNA, 25 bp, Artificial
  probe
  misc_feature (1)..(25): SEQ ID NO: 2459; WAN024G6R; Start 129; Stop 153
tcgtaagatagcaatattctctgga

SEQ ID NO: 326385 - DNA, 25 bp, Artificial
  probe
  misc_feature (1)..(25): SEQ ID NO: 2459; WAN024G6R; Start 128; Stop 152
ctcgtaagatagcaatattctctgg

SEQ ID NO: 326386 - DNA, 25 bp, Artificial
  probe
  misc_feature (1)..(25): SEQ ID NO: 2459; WAN024G6R; Start 315; Stop 339
aatagccttgattggacttgactcg

SEQ ID NO: 326387 - DNA, 25 bp, Artificial
  probe
  misc_feature (1)..(25): SEQ ID NO: 2459; WAN024G6R; Start 307; Stop 331
aaacttgaaatagccttgattggac

SEQ ID NO: 326388 - DNA, 25 bp, Artificial
  probe
  misc_feature (1)..(25): SEQ ID NO: 2459; WAN024G6R; Start 84; Stop 108
atttgaaagaagcgattggaagaaa

SEQ ID NO: 326389 - DNA, 25 bp, Artificial
  probe
  misc_feature (1)..(25): SEQ ID NO: 2459; WAN024G6R; Start 310; Stop 334
cttgaaatagccttgattggacttg

SEQ ID NO: 326390 - DNA, 25 bp, Artificial
  probe
  misc_feature (1)..(25): SEQ ID NO: 2459; WAN024G6R; Start 85; Stop 109
tttgaaagaagcgattggaagaaag

SEQ ID NO: 326391 - DNA, 25 bp, Artificial
  probe
  misc_feature (1)..(25): SEQ ID NO: 2459; WAN024G6R; Start 311; Stop 335
ttgaaatagccttgattggacttga

SEQ ID NO: 326392 - DNA, 25 bp, Artificial
  probe
  misc_feature (1)..(25): SEQ ID NO: 2459; WAN024G6R; Start 309; Stop 333
acttgaaatagccttgattggactt

SEQ ID NO: 326393 - DNA, 25 bp, Artificial
  probe
  misc_feature (1)..(25): SEQ ID NO: 2459; WAN024G6R; Start 308; Stop 332
aacttgaaatagccttgattggact

SEQ ID NO: 326394 - DNA, 25 bp, Artificial
  probe
  misc_feature (1)..(25): SEQ ID NO: 2459; WAN024G6R; Start 83; Stop 107
catttgaaagaagcgattggaagaa

SEQ ID NO: 326395 - DNA, 25 bp, Artificial
  probe
  misc_feature (1)..(25): SEQ ID NO: 2459; WAN024G6R; Start 81; Stop 105
aacatttgaaagaagcgattggaag

SEQ ID NO: 326396 - DNA, 25 bp, Artificial
  probe
  misc_feature (1)..(25): SEQ ID NO: 2459; WAN024G6R; Start 314; Stop 338
aaatagccttgattggacttgactc

SEQ ID NO: 326397 - DNA, 25 bp, Artificial
  probe
  misc_feature (1)..(25): SEQ ID NO: 2459; WAN024G6R; Start 313; Stop 337
gaaatagccttgattggacttgact

SEQ ID NO: 326398 - DNA, 25 bp, Artificial
  probe
  misc_feature (1)..(25): SEQ ID NO: 2459; WAN024G6R; Start 15; Stop 39
ctcgtcttcacaaagtttagcatat

SEQ ID NO: 326399 - DNA, 25 bp, Artificial
  probe
  misc_feature (1)..(25): SEQ ID NO: 2459; WAN024G6R; Start 130; Stop 154
cgtaagatagcaatattctctggat

SEQ ID NO: 326400 - DNA, 25 bp, Artificial
  probe
  misc_feature (1)..(25): SEQ ID NO: 2459; WAN024G6R; Start 312; Stop 336
tgaaatagccttgattggacttgac

SEQ ID NO: 326401 - DNA, 25 bp, Artificial
  probe
  misc_feature (1)..(25): SEQ ID NO: 2459; WAN024G6R; Start 16; Stop 40
tcgtcttcacaaagtttagcatatt

SEQ ID NO: 326402 - DNA, 25 bp, Artificial
  probe
  misc_feature (1)..(25): SEQ ID NO: 2459; WAN024G6R; Start 82; Stop 106
acatttgaaagaagcgattggaaga

SEQ ID NO: 326403 - DNA, 25 bp, Artificial
  probe
  misc_feature (1)..(25): SEQ ID NO: 2459; WAN024G6R; Start 17; Stop 41
cgtcttcacaaagtttagcatattc

SEQ ID NO: 326404 - DNA, 25 bp, Artificial
  probe
  misc_feature (1)..(25): SEQ ID NO: 2459; WAN024G6R; Start 127; Stop 151
tctcgtaagatagcaatattctctg

SEQ ID NO: 326405 - DNA, 25 bp, Artificial
  probe
  misc_feature (1)..(25): SEQ ID NO: 2459; WAN024G6R; Start 80; Stop 104
caacatttgaaagaagcgattggaa

SEQ ID NO: 326406 - DNA, 25 bp, Artificial
  probe
  misc_feature (1)..(25): SEQ ID NO: 2459; WAN024G6R; Start 86; Stop 110
ttgaaagaagcgattggaagaaagg

SEQ ID NO: 326407 - DNA, 25 bp, Artificial
  probe
  misc_feature (1)..(25): SEQ ID NO: 2459; WAN024G6R; Start 204; Stop 228
gaacataacacgactctgtgaccat

SEQ ID NO: 326408 - DNA, 25 bp, Artificial
  probe
  misc_feature (1)..(25): SEQ ID NO: 2459; WAN024G6R; Start 18; Stop 42
gtcttcacaaagtttagcatattca

SEQ ID NO: 326409 - DNA, 25 bp, Artificial
  probe
  misc_feature (1)..(25): SEQ ID NO: 2459; WAN024G6R; Start 262; Stop 286
atttcagtaatagtcttacgagcgg

SEQ ID NO: 326410 - DNA, 25 bp, Artificial
  probe
  misc_feature (1)..(25): SEQ ID NO: 2459; WAN024G6R; Start 261; Stop 285
gatttcagtaatagtcttacgagcg

SEQ ID NO: 326411 - DNA, 25 bp, Artificial
  probe
  misc_feature (1)..(25): SEQ ID NO: 2459; WAN024G6R; Start 260; Stop 284
cgatttcagtaatagtcttacgagc

SEQ ID NO: 326412 - DNA, 25 bp, Artificial
  probe
  misc_feature (1)..(25): SEQ ID NO: 2459; WAN024G6R; Start 258; Stop 282
accgatttcagtaatagtcttacga

SEQ ID NO: 326413 - DNA, 25 bp, Artificial
  probe
  misc_feature (1)..(25): SEQ ID NO: 2459; WAN024G6R; Start 257; Stop 281
caccgatttcagtaatagtcttacg

SEQ ID NO: 326414 - DNA, 25 bp, Artificial
  probe
  misc_feature (1)..(25): SEQ ID NO: 2459; WAN024G6R; Start 320; Stop 344
ccttgattggacttgactcgaagaa

SEQ ID NO: 326415 - DNA, 25 bp, Artificial
  probe
  misc_feature (1)..(25): SEQ ID NO: 2459; WAN024G6R; Start 256; Stop 280
ccaccgatttcagtaatagtcttac

SEQ ID NO: 326416 - DNA, 25 bp, Artificial
  probe
  misc_feature (1)..(25): SEQ ID NO: 2459; WAN024G6R; Start 323; Stop 347
tgattggacttgactcgaagaaata

SEQ ID NO: 326417 - DNA, 25 bp, Artificial
  probe
  misc_feature (1)..(25): SEQ ID NO: 2460; WAN024G4Q; Start 598; Stop 622
gttaatactcttgttggtggtgttg

SEQ ID NO: 326418 - DNA, 25 bp, Artificial
  probe
  misc_feature (1)..(25): SEQ ID NO: 2460; WAN024G4Q; Start 595; Stop 619
gttgttaatactcttgttggtggtg

SEQ ID NO: 326419 - DNA, 25 bp, Artificial
  probe
  misc_feature (1)..(25): SEQ ID NO: 2460; WAN024G4Q; Start 597; Stop 621
tgttaatactcttgttggtggtgtt

SEQ ID NO: 326420 - DNA, 25 bp, Artificial
  probe
  misc_feature (1)..(25): SEQ ID NO: 2460; WAN024G4Q; Start 596; Stop 620
ttgttaatactcttgttggtggtgt

SEQ ID NO: 326421 - DNA, 25 bp, Artificial
  probe
  misc_feature (1)..(25): SEQ ID NO: 2460; WAN024G4Q; Start 463; Stop 487
attccaaccaagacctaccttcata

SEQ ID NO: 326422 - DNA, 25 bp, Artificial
  probe
  misc_feature (1)..(25): SEQ ID NO: 2460; WAN024G4Q; Start 462; Stop 486
tattccaaccaagacctaccttcat

SEQ ID NO: 326423 - DNA, 25 bp, Artificial
  probe
  misc_feature (1)..(25): SEQ ID NO: 2460; WAN024G4Q; Start 1130; Stop 1154
ttgaaggtattggagaggttgagtt

SEQ ID NO: 326424 - DNA, 25 bp, Artificial
  probe
  misc_feature (1)..(25): SEQ ID NO: 2460; WAN024G4Q; Start 594; Stop 618
agttgttaatactcttgttggtggt

SEQ ID NO: 326425 - DNA, 25 bp, Artificial
  probe
  misc_feature (1)..(25): SEQ ID NO: 2460; WAN024G4Q; Start 459; Stop 483
atgtattccaaccaagacctacctt

SEQ ID NO: 326426 - DNA, 25 bp, Artificial
  probe
  misc_feature (1)..(25): SEQ ID NO: 2460; WAN024G4Q; Start 593; Stop 617
aagttgttaatactcttgttggtgg

SEQ ID NO: 326427 - DNA, 25 bp, Artificial
  probe
  misc_feature (1)..(25): SEQ ID NO: 2460; WAN024G4Q; Start 458; Stop 482
gatgtattccaaccaagacctacct

SEQ ID NO: 326428 - DNA, 25 bp, Artificial
  probe
  misc_feature (1)..(25): SEQ ID NO: 2460; WAN024G4Q; Start 599; Stop 623
ttaatactcttgttggtggtgttgc

SEQ ID NO: 326429 - DNA, 25 bp, Artificial
  probe
  misc_feature (1)..(25): SEQ ID NO: 2460; WAN024G4Q; Start 1129; Stop 1153
cttgaaggtattggagaggttgagt

SEQ ID NO: 326430 - DNA, 25 bp, Artificial
  probe
  misc_feature (1)..(25): SEQ ID NO: 2460; WAN024G4Q; Start 544; Stop 568
aatcctaacttcactgttgatatgg

SEQ ID NO: 326431 - DNA, 25 bp, Artificial
  probe
  misc_feature (1)..(25): SEQ ID NO: 2460; WAN024G4Q; Start 461; Stop 485
gtattccaaccaagacctaccttca

SEQ ID NO: 326432 - DNA, 25 bp, Artificial
  probe
  misc_feature (1)..(25): SEQ ID NO: 2460; WAN024G4Q; Start 460; Stop 484
tgtattccaaccaagacctaccttc

SEQ ID NO: 326433 - DNA, 25 bp, Artificial
  probe
  misc_feature (1)..(25): SEQ ID NO: 2460; WAN024G4Q; Start 1631; Stop 1655
cttactctgaagtgatgtacgaagc

SEQ ID NO: 326434 - DNA, 25 bp, Artificial
  probe
  misc_feature (1)..(25): SEQ ID NO: 2460; WAN024G4Q; Start 1155; Stop 1179
tgaattggatcgtggttgtatcaag

SEQ ID NO: 326435 - DNA, 25 bp, Artificial
  probe
  misc_feature (1)..(25): SEQ ID NO: 2460; WAN024G4Q; Start 546; Stop 570
tcctaacttcactgttgatatggaa

SEQ ID NO: 326436 - DNA, 25 bp, Artificial
  probe
  misc_feature (1)..(25): SEQ ID NO: 2460; WAN024G4Q; Start 545; Stop 569
atcctaacttcactgttgatatgga

SEQ ID NO: 326437 - DNA, 25 bp, Artificial
  probe
  misc_feature (1)..(25): SEQ ID NO: 2460; WAN024G4Q; Start 1223; Stop 1247
caggtgacatcaacggtactaagat

SEQ ID NO: 326438 - DNA, 25 bp, Artificial
  probe
  misc_feature (1)..(25): SEQ ID NO: 2460; WAN024G4Q; Start 1156; Stop 1180
gaattggatcgtggttgtatcaagg

SEQ ID NO: 326439 - DNA, 25 bp, Artificial
  probe
  misc_feature (1)..(25): SEQ ID NO: 2460; WAN024G4Q; Start 1490; Stop 1514
tcgctgataagaaatacggagaaat

SEQ ID NO: 326440 - DNA, 25 bp, Artificial
  probe
  misc_feature (1)..(25): SEQ ID NO: 2460; WAN024G4Q; Start 1554; Stop 1578
aataaacgaagcatcaagcatcatc

SEQ ID NO: 326441 - DNA, 25 bp, Artificial
  probe
  misc_feature (1)..(25): SEQ ID NO: 2460; WAN024G4Q; Start 1553; Stop 1577
taataaacgaagcatcaagcatcat

SEQ ID NO: 326442 - DNA, 25 bp, Artificial
  probe
  misc_feature (1)..(25): SEQ ID NO: 2460; WAN024G4Q; Start 1491; Stop 1515
cgctgataagaaatacggagaaatc

SEQ ID NO: 326443 - DNA, 25 bp, Artificial
  probe
  misc_feature (1)..(25): SEQ ID NO: 2460; WAN024G4Q; Start 1489; Stop 1513
atcgctgataagaaatacggagaaa

SEQ ID NO: 326444 - DNA, 25 bp, Artificial
  probe
  misc_feature (1)..(25): SEQ ID NO: 2460; WAN024G4Q; Start 1552; Stop 1576
ttaataaacgaagcatcaagcatca

SEQ ID NO: 326445 - DNA, 25 bp, Artificial
  probe
  misc_feature (1)..(25): SEQ ID NO: 2460; WAN024G4Q; Start 1135; Stop 1159
ggtattggagaggttgagtttgaat

SEQ ID NO: 326446 - DNA, 25 bp, Artificial
  probe
  misc_feature (1)..(25): SEQ ID NO: 2460; WAN024G4Q; Start 1137; Stop 1161
tattggagaggttgagtttgaattg

SEQ ID NO: 326447 - DNA, 25 bp, Artificial
  probe
  misc_feature (1)..(25): SEQ ID NO: 2460; WAN024G4Q; Start 1136; Stop 1160
gtattggagaggttgagtttgaatt

SEQ ID NO: 326448 - DNA, 25 bp, Artificial
  probe
  misc_feature (1)..(25): SEQ ID NO: 2460; WAN024G4Q; Start 415; Stop 439
cttgttgagaaatctgaacttggtg

SEQ ID NO: 326449 - DNA, 25 bp, Artificial
  probe
  misc_feature (1)..(25): SEQ ID NO: 2460; WAN024G4Q; Start 1132; Stop 1156
gaaggtattggagaggttgagtttg

SEQ ID NO: 326450 - DNA, 25 bp, Artificial
  probe
  misc_feature (1)..(25): SEQ ID NO: 2461; WAN024CWK; Start 241; Stop 265
atcttcagtgataacaaccttagca

SEQ ID NO: 326451 - DNA, 25 bp, Artificial
  probe
  misc_feature (1)..(25): SEQ ID NO: 2461; WAN024CWK; Start 240; Stop 264
catcttcagtgataacaaccttagc

SEQ ID NO: 326452 - DNA, 25 bp, Artificial
  probe
  misc_feature (1)..(25): SEQ ID NO: 2461; WAN024CWK; Start 239; Stop 263
gcatcttcagtgataacaaccttag

SEQ ID NO: 326453 - DNA, 25 bp, Artificial
  probe
  misc_feature (1)..(25): SEQ ID NO: 2461; WAN024CWK; Start 238; Stop 262
ggcatcttcagtgataacaacctta

SEQ ID NO: 326454 - DNA, 25 bp, Artificial
  probe
  misc_feature (1)..(25): SEQ ID NO: 2461; WAN024CWK; Start 171; Stop 195
gaggattgttcataatgctacgata

SEQ ID NO: 326455 - DNA, 25 bp, Artificial
  probe
  misc_feature (1)..(25): SEQ ID NO: 2461; WAN024CWK; Start 170; Stop 194
tgaggattgttcataatgctacgat

SEQ ID NO: 326456 - DNA, 25 bp, Artificial
  probe
  misc_feature (1)..(25): SEQ ID NO: 2461; WAN024CWK; Start 168; Stop 192
cttgaggattgttcataatgctacg

SEQ ID NO: 326457 - DNA, 25 bp, Artificial
  probe
  misc_feature (1)..(25): SEQ ID NO: 2461; WAN024CWK; Start 234; Stop 258
cattggcatcttcagtgataacaac

SEQ ID NO: 326458 - DNA, 25 bp, Artificial
  probe
  misc_feature (1)..(25): SEQ ID NO: 2461; WAN024CWK; Start 169; Stop 193
ttgaggattgttcataatgctacga

SEQ ID NO: 326459 - DNA, 25 bp, Artificial
  probe
  misc_feature (1)..(25): SEQ ID NO: 2461; WAN024CWK; Start 249; Stop 273
tgataacaaccttagcacttggaag

SEQ ID NO: 326460 - DNA, 25 bp, Artificial
  probe
  misc_feature (1)..(25): SEQ ID NO: 2461; WAN024CWK; Start 166; Stop 190
accttgaggattgttcataatgcta

SEQ ID NO: 326461 - DNA, 25 bp, Artificial
  probe
  misc_feature (1)..(25): SEQ ID NO: 2461; WAN024CWK; Start 163; Stop 187
ccaaccttgaggattgttcataatg

SEQ ID NO: 326462 - DNA, 25 bp, Artificial
  probe
  misc_feature (1)..(25): SEQ ID NO: 2461; WAN024CWK; Start 167; Stop 191
ccttgaggattgttcataatgctac

SEQ ID NO: 326463 - DNA, 25 bp, Artificial
  probe
  misc_feature (1)..(25): SEQ ID NO: 2461; WAN024CWK; Start 165; Stop 189
aaccttgaggattgttcataatgct

SEQ ID NO: 326464 - DNA, 25 bp, Artificial
  probe
  misc_feature (1)..(25): SEQ ID NO: 2461; WAN024CWK; Start 164; Stop 188
caaccttgaggattgttcataatgc

SEQ ID NO: 326465 - DNA, 25 bp, Artificial
  probe
  misc_feature (1)..(25): SEQ ID NO: 2461; WAN024CWK; Start 172; Stop 196
aggattgttcataatgctacgataa

SEQ ID NO: 326466 - DNA, 25 bp, Artificial
  probe
  misc_feature (1)..(25): SEQ ID NO: 2461; WAN024CWK; Start 173; Stop 197
ggattgttcataatgctacgataag

SEQ ID NO: 326467 - DNA, 25 bp, Artificial
  probe
  misc_feature (1)..(25): SEQ ID NO: 2461; WAN024CWK; Start 235; Stop 259
attggcatcttcagtgataacaacc

SEQ ID NO: 326468 - DNA, 25 bp, Artificial
  probe
  misc_feature (1)..(25): SEQ ID NO: 2461; WAN024CWK; Start 251; Stop 275
ataacaaccttagcacttggaagtt

SEQ ID NO: 326469 - DNA, 25 bp, Artificial
  probe
  misc_feature (1)..(25): SEQ ID NO: 2461; WAN024CWK; Start 250; Stop 274
gataacaaccttagcacttggaagt

SEQ ID NO: 326470 - DNA, 25 bp, Artificial
  probe
  misc_feature (1)..(25): SEQ ID NO: 2461; WAN024CWK; Start 242; Stop 266
tcttcagtgataacaaccttagcac

SEQ ID NO: 326471 - DNA, 25 bp, Artificial
  probe
  misc_feature (1)..(25): SEQ ID NO: 2461; WAN024CWK; Start 252; Stop 276
taacaaccttagcacttggaagttc

SEQ ID NO: 326472 - DNA, 25 bp, Artificial
  probe
  misc_feature (1)..(25): SEQ ID NO: 2461; WAN024CWK; Start 233; Stop 257
gcattggcatcttcagtgataacaa

SEQ ID NO: 326473 - DNA, 25 bp, Artificial
  probe
  misc_feature (1)..(25): SEQ ID NO: 2461; WAN024CWK; Start 248; Stop 272
gtgataacaaccttagcacttggaa

SEQ ID NO: 326474 - DNA, 25 bp, Artificial
  probe
  misc_feature (1)..(25): SEQ ID NO: 2461; WAN024CWK; Start 237; Stop 261
tggcatcttcagtgataacaacctt

SEQ ID NO: 326475 - DNA, 25 bp, Artificial
  probe
  misc_feature (1)..(25): SEQ ID NO: 2461; WAN024CWK; Start 74; Stop 98
ataccatccaaggtcataaggaatg

SEQ ID NO: 326476 - DNA, 25 bp, Artificial
  probe
  misc_feature (1)..(25): SEQ ID NO: 2461; WAN024CWK; Start 73; Stop 97
gataccatccaaggtcataaggaat

SEQ ID NO: 326477 - DNA, 25 bp, Artificial
  probe
  misc_feature (1)..(25): SEQ ID NO: 2461; WAN024CWK; Start 236; Stop 260
ttggcatcttcagtgataacaacct

SEQ ID NO: 326478 - DNA, 25 bp, Artificial
  probe
  misc_feature (1)..(25): SEQ ID NO: 2461; WAN024CWK; Start 72; Stop 96
tgataccatccaaggtcataaggaa

SEQ ID NO: 326479 - DNA, 25 bp, Artificial
  probe
  misc_feature (1)..(25): SEQ ID NO: 2461; WAN024CWK; Start 71; Stop 95
ttgataccatccaaggtcataagga

SEQ ID NO: 326480 - DNA, 25 bp, Artificial
  probe
  misc_feature (1)..(25): SEQ ID NO: 2461; WAN024CWK; Start 336; Stop 360
tgtggattcctacatagttggcatt

SEQ ID NO: 326481 - DNA, 25 bp, Artificial
  probe
  misc_feature (1)..(25): SEQ ID NO: 2461; WAN024CWK; Start 354; Stop 378
tggcatttccgactgtttctttata

SEQ ID NO: 326482 - DNA, 25 bp, Artificial
  probe
  misc_feature (1)..(25): SEQ ID NO: 2461; WAN024CWK; Start 335; Stop 359
ctgtggattcctacatagttggcat

SEQ ID NO: 326483 - DNA, 25 bp, Artificial
  probe
  misc_feature (1)..(25): SEQ ID NO: 2462; WAN024F5W; Start 1098; Stop 1122
agaagaagcagtgaatgaagaagtt

SEQ ID NO: 326484 - DNA, 25 bp, Artificial
  probe
  misc_feature (1)..(25): SEQ ID NO: 2462; WAN024F5W; Start 1097; Stop 1121
aagaagaagcagtgaatgaagaagt

SEQ ID NO: 326485 - DNA, 25 bp, Artificial
  probe
  misc_feature (1)..(25): SEQ ID NO: 2462; WAN024F5W; Start 368; Stop 392
atattgacgaattgctcttgtctca

SEQ ID NO: 326486 - DNA, 25 bp, Artificial
  probe
  misc_feature (1)..(25): SEQ ID NO: 2462; WAN024F5W; Start 1032; Stop 1056
tggcttgattgatggagaagaagtt

SEQ ID NO: 326487 - DNA, 25 bp, Artificial
  probe
  misc_feature (1)..(25): SEQ ID NO: 2462; WAN024F5W; Start 1031; Stop 1055
ttggcttgattgatggagaagaagt

SEQ ID NO: 326488 - DNA, 25 bp, Artificial
  probe
  misc_feature (1)..(25): SEQ ID NO: 2462; WAN024F5W; Start 705; Stop 729
cttggatgttcgtggtaatacacaa

SEQ ID NO: 326489 - DNA, 25 bp, Artificial
  probe
  misc_feature (1)..(25): SEQ ID NO: 2462; WAN024F5W; Start 1095; Stop 1119
gaaagaagaagcagtgaatgaagaa

SEQ ID NO: 326490 - DNA, 25 bp, Artificial
  probe
  misc_feature (1)..(25): SEQ ID NO: 2462; WAN024F5W; Start 1091; Stop 1115
caaagaaagaagaagcagtgaatga

SEQ ID NO: 326491 - DNA, 25 bp, Artificial
  probe
  misc_feature (1)..(25): SEQ ID NO: 2462; WAN024F5W; Start 1096; Stop 1120
aaagaagaagcagtgaatgaagaag

SEQ ID NO: 326492 - DNA, 25 bp, Artificial
  probe
  misc_feature (1)..(25): SEQ ID NO: 2462; WAN024F5W; Start 1093; Stop 1117
aagaaagaagaagcagtgaatgaag

SEQ ID NO: 326493 - DNA, 25 bp, Artificial
  probe
  misc_feature (1)..(25): SEQ ID NO: 2462; WAN024F5W; Start 1081; Stop 1105
aaagatgagccaaagaaagaagaag

SEQ ID NO: 326494 - DNA, 25 bp, Artificial
  probe
  misc_feature (1)..(25): SEQ ID NO: 2462; WAN024F5W; Start 1094; Stop 1118
agaaagaagaagcagtgaatgaaga

SEQ ID NO: 326495 - DNA, 25 bp, Artificial
  probe
  misc_feature (1)..(25): SEQ ID NO: 2462; WAN024F5W; Start 631; Stop 655
aaagttggagtgatgtttggaaatc

SEQ ID NO: 326496 - DNA, 25 bp, Artificial
  probe
  misc_feature (1)..(25): SEQ ID NO: 2462; WAN024F5W; Start 367; Stop 391
aatattgacgaattgctcttgtctc

SEQ ID NO: 326497 - DNA, 25 bp, Artificial
  probe
  misc_feature (1)..(25): SEQ ID NO: 2462; WAN024F5W; Start 1092; Stop 1116
aaagaaagaagaagcagtgaatgaa

SEQ ID NO: 326498 - DNA, 25 bp, Artificial
  probe
  misc_feature (1)..(25): SEQ ID NO: 2462; WAN024F5W; Start 1090; Stop 1114
ccaaagaaagaagaagcagtgaatg

SEQ ID NO: 326499 - DNA, 25 bp, Artificial
  probe
  misc_feature (1)..(25): SEQ ID NO: 2462; WAN024F5W; Start 818; Stop 842
aggaagccgtagttgaaattatgta

SEQ ID NO: 326500 - DNA, 25 bp, Artificial
  probe
  misc_feature (1)..(25): SEQ ID NO: 2462; WAN024F5W; Start 813; Stop 837
gtttaaggaagccgtagttgaaatt

SEQ ID NO: 326501 - DNA, 25 bp, Artificial
  probe
  misc_feature (1)..(25): SEQ ID NO: 2462; WAN024F5W; Start 758; Stop 782
ccaatgtcggtaaagaaactaagat

SEQ ID NO: 326502 - DNA, 25 bp, Artificial
  probe
  misc_feature (1)..(25): SEQ ID NO: 2462; WAN024F5W; Start 956; Stop 980
ctgagaatgctaagaaatacttggc

SEQ ID NO: 326503 - DNA, 25 bp, Artificial
  probe
  misc_feature (1)..(25): SEQ ID NO: 2462; WAN024F5W; Start 1127; Stop 1151
ttgacttaggcgatgaacttgaaat

SEQ ID NO: 326504 - DNA, 25 bp, Artificial
  probe
  misc_feature (1)..(25): SEQ ID NO: 2462; WAN024F5W; Start 1034; Stop 1058
gcttgattgatggagaagaagtttc

SEQ ID NO: 326505 - DNA, 25 bp, Artificial
  probe
  misc_feature (1)..(25): SEQ ID NO: 2462; WAN024F5W; Start 984; Stop 1008
gcacccagaaatctttgatgaaatt

SEQ ID NO: 326506 - DNA, 25 bp, Artificial
  probe
  misc_feature (1)..(25): SEQ ID NO: 2462; WAN024F5W; Start 817; Stop 841
aaggaagccgtagttgaaattatgt

SEQ ID NO: 326507 - DNA, 25 bp, Artificial
  probe
  misc_feature (1)..(25): SEQ ID NO: 2462; WAN024F5W; Start 1044; Stop 1068
tggagaagaagtttcagaacaagat

SEQ ID NO: 326508 - DNA, 25 bp, Artificial
  probe
  misc_feature (1)..(25): SEQ ID NO: 2462; WAN024F5W; Start 1043; Stop 1067
atggagaagaagtttcagaacaaga

SEQ ID NO: 326509 - DNA, 25 bp, Artificial
  probe
  misc_feature (1)..(25): SEQ ID NO: 2462; WAN024F5W; Start 1042; Stop 1066
gatggagaagaagtttcagaacaag

SEQ ID NO: 326510 - DNA, 25 bp, Artificial
  probe
  misc_feature (1)..(25): SEQ ID NO: 2462; WAN024F5W; Start 816; Stop 840
taaggaagccgtagttgaaattatg

SEQ ID NO: 326511 - DNA, 25 bp, Artificial
  probe
  misc_feature (1)..(25): SEQ ID NO: 2462; WAN024F5W; Start 1029; Stop 1053
atttggcttgattgatggagaagaa

SEQ ID NO: 326512 - DNA, 25 bp, Artificial
  probe
  misc_feature (1)..(25): SEQ ID NO: 2462; WAN024F5W; Start 986; Stop 1010
acccagaaatctttgatgaaattga

SEQ ID NO: 326513 - DNA, 25 bp, Artificial
  probe
  misc_feature (1)..(25): SEQ ID NO: 2462; WAN024F5W; Start 985; Stop 1009
cacccagaaatctttgatgaaattg

SEQ ID NO: 326514 - DNA, 25 bp, Artificial
  probe
  misc_feature (1)..(25): SEQ ID NO: 2462; WAN024F5W; Start 983; Stop 1007
agcacccagaaatctttgatgaaat

SEQ ID NO: 326515 - DNA, 25 bp, Artificial
  probe
  misc_feature (1)..(25): SEQ ID NO: 2462; WAN024F5W; Start 1001; Stop 1025
atgaaattgataagcaagtccgttc

SEQ ID NO: 326516 - DNA, 25 bp, Artificial
  probe
  misc_feature (1)..(25): SEQ ID NO: 2463; WAN024DMA; Start 354; Stop 378
ccaagcaagtattcaagcctatcta

SEQ ID NO: 326517 - DNA, 25 bp, Artificial
  probe
  misc_feature (1)..(25): SEQ ID NO: 2463; WAN024DMA; Start 352; Stop 376
ttccaagcaagtattcaagcctatc

SEQ ID NO: 326518 - DNA, 25 bp, Artificial
  probe
  misc_feature (1)..(25): SEQ ID NO: 2463; WAN024DMA; Start 356; Stop 380
aagcaagtattcaagcctatctagc

SEQ ID NO: 326519 - DNA, 25 bp, Artificial
  probe
  misc_feature (1)..(25): SEQ ID NO: 2463; WAN024DMA; Start 355; Stop 379
caagcaagtattcaagcctatctag

SEQ ID NO: 326520 - DNA, 25 bp, Artificial
  probe
  misc_feature (1)..(25): SEQ ID NO: 2463; WAN024DMA; Start 360; Stop 384
aagtattcaagcctatctagcagac

SEQ ID NO: 326521 - DNA, 25 bp, Artificial
  probe
  misc_feature (1)..(25): SEQ ID NO: 2463; WAN024DMA; Start 359; Stop 383
caagtattcaagcctatctagcaga

SEQ ID NO: 326522 - DNA, 25 bp, Artificial
  probe
  misc_feature (1)..(25): SEQ ID NO: 2463; WAN024DMA; Start 353; Stop 377
tccaagcaagtattcaagcctatct

SEQ ID NO: 326523 - DNA, 25 bp, Artificial
  probe
  misc_feature (1)..(25): SEQ ID NO: 2463; WAN024DMA; Start 358; Stop 382
gcaagtattcaagcctatctagcag

SEQ ID NO: 326524 - DNA, 25 bp, Artificial
  probe
  misc_feature (1)..(25): SEQ ID NO: 2463; WAN024DMA; Start 357; Stop 381
agcaagtattcaagcctatctagca

SEQ ID NO: 326525 - DNA, 25 bp, Artificial
  probe
  misc_feature (1)..(25): SEQ ID NO: 2463; WAN024DMA; Start 348; Stop 372
ttatttccaagcaagtattcaagcc

SEQ ID NO: 326526 - DNA, 25 bp, Artificial
  probe
  misc_feature (1)..(25): SEQ ID NO: 2463; WAN024DMA; Start 283; Stop 307
ttagatgctttgcttgcttatacag

SEQ ID NO: 326527 - DNA, 25 bp, Artificial
  probe
  misc_feature (1)..(25): SEQ ID NO: 2463; WAN024DMA; Start 351; Stop 375
tttccaagcaagtattcaagcctat

SEQ ID NO: 326528 - DNA, 25 bp, Artificial
  probe
  misc_feature (1)..(25): SEQ ID NO: 2463; WAN024DMA; Start 350; Stop 374
atttccaagcaagtattcaagccta

SEQ ID NO: 326529 - DNA, 25 bp, Artificial
  probe
  misc_feature (1)..(25): SEQ ID NO: 2463; WAN024DMA; Start 349; Stop 373
tatttccaagcaagtattcaagcct

SEQ ID NO: 326530 - DNA, 25 bp, Artificial
  probe
  misc_feature (1)..(25): SEQ ID NO: 2463; WAN024DMA; Start 282; Stop 306
tttagatgctttgcttgcttataca

SEQ ID NO: 326531 - DNA, 25 bp, Artificial
  probe
  misc_feature (1)..(25): SEQ ID NO: 2463; WAN024DMA; Start 311; Stop 335
ctgatattgaagggctagatggttt

SEQ ID NO: 326532 - DNA, 25 bp, Artificial
  probe
  misc_feature (1)..(25): SEQ ID NO: 2463; WAN024DMA; Start 347; Stop 371
cttatttccaagcaagtattcaagc

SEQ ID NO: 326533 - DNA, 25 bp, Artificial
  probe
  misc_feature (1)..(25): SEQ ID NO: 2463; WAN024DMA; Start 310; Stop 334
actgatattgaagggctagatggtt

SEQ ID NO: 326534 - DNA, 25 bp, Artificial
  probe
  misc_feature (1)..(25): SEQ ID NO: 2463; WAN024DMA; Start 309; Stop 333
gactgatattgaagggctagatggt

SEQ ID NO: 326535 - DNA, 25 bp, Artificial
  probe
  misc_feature (1)..(25): SEQ ID NO: 2463; WAN024DMA; Start 638; Stop 662
atattgagcaattggtggataagga

SEQ ID NO: 326536 - DNA, 25 bp, Artificial
  probe
  misc_feature (1)..(25): SEQ ID NO: 2463; WAN024DMA; Start 639; Stop 663
tattgagcaattggtggataaggaa

SEQ ID NO: 326537 - DNA, 25 bp, Artificial
  probe
  misc_feature (1)..(25): SEQ ID NO: 2463; WAN024DMA; Start 634; Stop 658
gcctatattgagcaattggtggata

SEQ ID NO: 326538 - DNA, 25 bp, Artificial
  probe
  misc_feature (1)..(25): SEQ ID NO: 2463; WAN024DMA; Start 227; Stop 251
gtgtcgatcttcctgacctactaac

SEQ ID NO: 326539 - DNA, 25 bp, Artificial
  probe
  misc_feature (1)..(25): SEQ ID NO: 2463; WAN024DMA; Start 640; Stop 664
attgagcaattggtggataaggaag

SEQ ID NO: 326540 - DNA, 25 bp, Artificial
  probe
  misc_feature (1)..(25): SEQ ID NO: 2463; WAN024DMA; Start 637; Stop 661
tatattgagcaattggtggataagg

SEQ ID NO: 326541 - DNA, 25 bp, Artificial
  probe
  misc_feature (1)..(25): SEQ ID NO: 2463; WAN024DMA; Start 635; Stop 659
cctatattgagcaattggtggataa

SEQ ID NO: 326542 - DNA, 25 bp, Artificial
  probe
  misc_feature (1)..(25): SEQ ID NO: 2463; WAN024DMA; Start 228; Stop 252
tgtcgatcttcctgacctactaaca

SEQ ID NO: 326543 - DNA, 25 bp, Artificial
  probe
  misc_feature (1)..(25): SEQ ID NO: 2463; WAN024DMA; Start 633; Stop 657
agcctatattgagcaattggtggat

SEQ ID NO: 326544 - DNA, 25 bp, Artificial
  probe
  misc_feature (1)..(25): SEQ ID NO: 2463; WAN024DMA; Start 32; Stop 56
agagcattttaggagaacaagagat

SEQ ID NO: 326545 - DNA, 25 bp, Artificial
  probe
  misc_feature (1)..(25): SEQ ID NO: 2463; WAN024DMA; Start 29; Stop 53
aacagagcattttaggagaacaaga

SEQ ID NO: 326546 - DNA, 25 bp, Artificial
  probe
  misc_feature (1)..(25): SEQ ID NO: 2463; WAN024DMA; Start 28; Stop 52
aaacagagcattttaggagaacaag

SEQ ID NO: 326547 - DNA, 25 bp, Artificial
  probe
  misc_feature (1)..(25): SEQ ID NO: 2463; WAN024DMA; Start 31; Stop 55
cagagcattttaggagaacaagaga

SEQ ID NO: 326548 - DNA, 25 bp, Artificial
  probe
  misc_feature (1)..(25): SEQ ID NO: 2463; WAN024DMA; Start 429; Stop 453
tttctttagtcgtgagaacttgaaa

SEQ ID NO: 326549 - DNA, 25 bp, Artificial
  probe
  misc_feature (1)..(25): SEQ ID NO: 2464; WAN024CAJ; Start 197; Stop 221
agcatctctggcaattcaataatat

SEQ ID NO: 326550 - DNA, 25 bp, Artificial
  probe
  misc_feature (1)..(25): SEQ ID NO: 2464; WAN024CAJ; Start 198; Stop 222
gcatctctggcaattcaataatatg

SEQ ID NO: 326551 - DNA, 25 bp, Artificial
  probe
  misc_feature (1)..(25): SEQ ID NO: 2464; WAN024CAJ; Start 196; Stop 220
cagcatctctggcaattcaataata

SEQ ID NO: 326552 - DNA, 25 bp, Artificial
  probe
  misc_feature (1)..(25): SEQ ID NO: 2464; WAN024CAJ; Start 203; Stop 227
tctggcaattcaataatatgagaca

SEQ ID NO: 326553 - DNA, 25 bp, Artificial
  probe
  misc_feature (1)..(25): SEQ ID NO: 2464; WAN024CAJ; Start 202; Stop 226
ctctggcaattcaataatatgagac

SEQ ID NO: 326554 - DNA, 25 bp, Artificial
  probe
  misc_feature (1)..(25): SEQ ID NO: 2464; WAN024CAJ; Start 50; Stop 74
ttatccgtgatttgaaccttcttga

SEQ ID NO: 326555 - DNA, 25 bp, Artificial
  probe
  misc_feature (1)..(25): SEQ ID NO: 2464; WAN024CAJ; Start 205; Stop 229
tggcaattcaataatatgagacatc

SEQ ID NO: 326556 - DNA, 25 bp, Artificial
  probe
  misc_feature (1)..(25): SEQ ID NO: 2464; WAN024CAJ; Start 204; Stop 228
ctggcaattcaataatatgagacat

SEQ ID NO: 326557 - DNA, 25 bp, Artificial
  probe
  misc_feature (1)..(25): SEQ ID NO: 2464; WAN024CAJ; Start 51; Stop 75
tatccgtgatttgaaccttcttgag

SEQ ID NO: 326558 - DNA, 25 bp, Artificial
  probe
  misc_feature (1)..(25): SEQ ID NO: 2464; WAN024CAJ; Start 49; Stop 73
gttatccgtgatttgaaccttcttg

SEQ ID NO: 326559 - DNA, 25 bp, Artificial
  probe
  misc_feature (1)..(25): SEQ ID NO: 2464; WAN024CAJ; Start 206; Stop 230
ggcaattcaataatatgagacatct

SEQ ID NO: 326560 - DNA, 25 bp, Artificial
  probe
  misc_feature (1)..(25): SEQ ID NO: 2464; WAN024CAJ; Start 199; Stop 223
catctctggcaattcaataatatga

SEQ ID NO: 326561 - DNA, 25 bp, Artificial
  probe
  misc_feature (1)..(25): SEQ ID NO: 2464; WAN024CAJ; Start 37; Stop 61
aattccatgaccgttatccgtgatt

SEQ ID NO: 326562 - DNA, 25 bp, Artificial
  probe
  misc_feature (1)..(25): SEQ ID NO: 2464; WAN024CAJ; Start 56; Stop 80
gtgatttgaaccttcttgagaccag

SEQ ID NO: 326563 - DNA, 25 bp, Artificial
  probe
  misc_feature (1)..(25): SEQ ID NO: 2464; WAN024CAJ; Start 48; Stop 72
cgttatccgtgatttgaaccttctt

SEQ ID NO: 326564 - DNA, 25 bp, Artificial
  probe
  misc_feature (1)..(25): SEQ ID NO: 2464; WAN024CAJ; Start 214; Stop 238
aataatatgagacatctttcagccc

SEQ ID NO: 326565 - DNA, 25 bp, Artificial
  probe
  misc_feature (1)..(25): SEQ ID NO: 2464; WAN024CAJ; Start 200; Stop 224
atctctggcaattcaataatatgag

SEQ ID NO: 326566 - DNA, 25 bp, Artificial
  probe
  misc_feature (1)..(25): SEQ ID NO: 2464; WAN024CAJ; Start 52; Stop 76
atccgtgatttgaaccttcttgaga

SEQ ID NO: 326567 - DNA, 25 bp, Artificial
  probe
  misc_feature (1)..(25): SEQ ID NO: 2464; WAN024CAJ; Start 129; Stop 153
tttctaccaactctttgaccacact

SEQ ID NO: 326568 - DNA, 25 bp, Artificial
  probe
  misc_feature (1)..(25): SEQ ID NO: 2464; WAN024CAJ; Start 36; Stop 60
caattccatgaccgttatccgtgat

SEQ ID NO: 326569 - DNA, 25 bp, Artificial
  probe
  misc_feature (1)..(25): SEQ ID NO: 2464; WAN024CAJ; Start 213; Stop 237
caataatatgagacatctttcagcc

SEQ ID NO: 326570 - DNA, 25 bp, Artificial
  probe
  misc_feature (1)..(25): SEQ ID NO: 2464; WAN024CAJ; Start 130; Stop 154
ttctaccaactctttgaccacactg

SEQ ID NO: 326571 - DNA, 25 bp, Artificial
  probe
  misc_feature (1)..(25): SEQ ID NO: 2464; WAN024CAJ; Start 53; Stop 77
tccgtgatttgaaccttcttgagac

SEQ ID NO: 326572 - DNA, 25 bp, Artificial
  probe
  misc_feature (1)..(25): SEQ ID NO: 2464; WAN024CAJ; Start 38; Stop 62
attccatgaccgttatccgtgattt

SEQ ID NO: 326573 - DNA, 25 bp, Artificial
  probe
  misc_feature (1)..(25): SEQ ID NO: 2464; WAN024CAJ; Start 57; Stop 81
tgatttgaaccttcttgagaccagc

SEQ ID NO: 326574 - DNA, 25 bp, Artificial
  probe
  misc_feature (1)..(25): SEQ ID NO: 2464; WAN024CAJ; Start 55; Stop 79
cgtgatttgaaccttcttgagacca

SEQ ID NO: 326575 - DNA, 25 bp, Artificial
  probe
  misc_feature (1)..(25): SEQ ID NO: 2464; WAN024CAJ; Start 42; Stop 66
catgaccgttatccgtgatttgaac

SEQ ID NO: 326576 - DNA, 25 bp, Artificial
  probe
  misc_feature (1)..(25): SEQ ID NO: 2464; WAN024CAJ; Start 47; Stop 71
ccgttatccgtgatttgaaccttct

SEQ ID NO: 326577 - DNA, 25 bp, Artificial
  probe
  misc_feature (1)..(25): SEQ ID NO: 2464; WAN024CAJ; Start 235; Stop 259
gcccctttctgtatctattttccta

SEQ ID NO: 326578 - DNA, 25 bp, Artificial
  probe
  misc_feature (1)..(25): SEQ ID NO: 2464; WAN024CAJ; Start 212; Stop 236
tcaataatatgagacatctttcagc

SEQ ID NO: 326579 - DNA, 25 bp, Artificial
  probe
  misc_feature (1)..(25): SEQ ID NO: 2464; WAN024CAJ; Start 46; Stop 70
accgttatccgtgatttgaaccttc

SEQ ID NO: 326580 - DNA, 25 bp, Artificial
  probe
  misc_feature (1)..(25): SEQ ID NO: 2464; WAN024CAJ; Start 45; Stop 69
gaccgttatccgtgatttgaacctt

SEQ ID NO: 326581 - DNA, 25 bp, Artificial
  probe
  misc_feature (1)..(25): SEQ ID NO: 2464; WAN024CAJ; Start 207; Stop 231
gcaattcaataatatgagacatctt

SEQ ID NO: 326582 - DNA, 25 bp, Artificial
  probe
  misc_feature (1)..(25): SEQ ID NO: 2465; WAN024DEO; Start 1; Stop 25
atggcgactactgagttgattgaac

SEQ ID NO: 326583 - DNA, 25 bp, Artificial
  probe
  misc_feature (1)..(25): SEQ ID NO: 2465; WAN024DEO; Start 209; Stop 233
tttcagaattgattgtctatggtca

SEQ ID NO: 326584 - DNA, 25 bp, Artificial
  probe
  misc_feature (1)..(25): SEQ ID NO: 2465; WAN024DEO; Start 9; Stop 33
tactgagttgattgaactggcaatt

SEQ ID NO: 326585 - DNA, 25 bp, Artificial
  probe
  misc_feature (1)..(25): SEQ ID NO: 2465; WAN024DEO; Start 8; Stop 32
ctactgagttgattgaactggcaat

SEQ ID NO: 326586 - DNA, 25 bp, Artificial
  probe
  misc_feature (1)..(25): SEQ ID NO: 2465; WAN024DEO; Start 210; Stop 234
ttcagaattgattgtctatggtcaa

SEQ ID NO: 326587 - DNA, 25 bp, Artificial
  probe
  misc_feature (1)..(25): SEQ ID NO: 2465; WAN024DEO; Start 61; Stop 85
tattctcactttcctatcggagcag

SEQ ID NO: 326588 - DNA, 25 bp, Artificial
  probe
  misc_feature (1)..(25): SEQ ID NO: 2465; WAN024DEO; Start 60; Stop 84
ctattctcactttcctatcggagca

SEQ ID NO: 326589 - DNA, 25 bp, Artificial
  probe
  misc_feature (1)..(25): SEQ ID NO: 2465; WAN024DEO; Start 58; Stop 82
ccctattctcactttcctatcggag

SEQ ID NO: 326590 - DNA, 25 bp, Artificial
  probe
  misc_feature (1)..(25): SEQ ID NO: 2465; WAN024DEO; Start 7; Stop 31
actactgagttgattgaactggcaa

SEQ ID NO: 326591 - DNA, 25 bp, Artificial
  probe
  misc_feature (1)..(25): SEQ ID NO: 2465; WAN024DEO; Start 52; Stop 76
tatgtcccctattctcactttccta

SEQ ID NO: 326592 - DNA, 25 bp, Artificial
  probe
  misc_feature (1)..(25): SEQ ID NO: 2465; WAN024DEO; Start 53; Stop 77
atgtcccctattctcactttcctat

SEQ ID NO: 326593 - DNA, 25 bp, Artificial
  probe
  misc_feature (1)..(25): SEQ ID NO: 2465; WAN024DEO; Start 59; Stop 83
cctattctcactttcctatcggagc

SEQ ID NO: 326594 - DNA, 25 bp, Artificial
  probe
  misc_feature (1)..(25): SEQ ID NO: 2465; WAN024DEO; Start 54; Stop 78
tgtcccctattctcactttcctatc

SEQ ID NO: 326595 - DNA, 25 bp, Artificial
  probe
  misc_feature (1)..(25): SEQ ID NO: 2465; WAN024DEO; Start 51; Stop 75
ctatgtcccctattctcactttcct

SEQ ID NO: 326596 - DNA, 25 bp, Artificial
  probe
  misc_feature (1)..(25): SEQ ID NO: 2465; WAN024DEO; Start 6; Stop 30
gactactgagttgattgaactggca

SEQ ID NO: 326597 - DNA, 25 bp, Artificial
  probe
  misc_feature (1)..(25): SEQ ID NO: 2465; WAN024DEO; Start 217; Stop 241
ttgattgtctatggtcaaactgaaa

SEQ ID NO: 326598 - DNA, 25 bp, Artificial
  probe
  misc_feature (1)..(25): SEQ ID NO: 2465; WAN024DEO; Start 184; Stop 208
gctatatctgaaggccaaagagaat

SEQ ID NO: 326599 - DNA, 25 bp, Artificial
  probe
  misc_feature (1)..(25): SEQ ID NO: 2465; WAN024DEO; Start 216; Stop 240
attgattgtctatggtcaaactgaa

SEQ ID NO: 326600 - DNA, 25 bp, Artificial
  probe
  misc_feature (1)..(25): SEQ ID NO: 2465; WAN024DEO; Start 215; Stop 239
aattgattgtctatggtcaaactga

SEQ ID NO: 326601 - DNA, 25 bp, Artificial
  probe
  misc_feature (1)..(25): SEQ ID NO: 2465; WAN024DEO; Start 218; Stop 242
tgattgtctatggtcaaactgaaaa

SEQ ID NO: 326602 - DNA, 25 bp, Artificial
  probe
  misc_feature (1)..(25): SEQ ID NO: 2465; WAN024DEO; Start 50; Stop 74
cctatgtcccctattctcactttcc

SEQ ID NO: 326603 - DNA, 25 bp, Artificial
  probe
  misc_feature (1)..(25): SEQ ID NO: 2465; WAN024DEO; Start 214; Stop 238
gaattgattgtctatggtcaaactg

SEQ ID NO: 326604 - DNA, 25 bp, Artificial
  probe
  misc_feature (1)..(25): SEQ ID NO: 2465; WAN024DEO; Start 212; Stop 236
cagaattgattgtctatggtcaaac

SEQ ID NO: 326605 - DNA, 25 bp, Artificial
  probe
  misc_feature (1)..(25): SEQ ID NO: 2465; WAN024DEO; Start 154; Stop 178
aattgcggtgagagaacagctattt

SEQ ID NO: 326606 - DNA, 25 bp, Artificial
  probe
  misc_feature (1)..(25): SEQ ID NO: 2465; WAN024DEO; Start 55; Stop 79
gtcccctattctcactttcctatcg

SEQ ID NO: 326607 - DNA, 25 bp, Artificial
  probe
  misc_feature (1)..(25): SEQ ID NO: 2465; WAN024DEO; Start 213; Stop 237
agaattgattgtctatggtcaaact

SEQ ID NO: 326608 - DNA, 25 bp, Artificial
  probe
  misc_feature (1)..(25): SEQ ID NO: 2465; WAN024DEO; Start 211; Stop 235
tcagaattgattgtctatggtcaaa

SEQ ID NO: 326609 - DNA, 25 bp, Artificial
  probe
  misc_feature (1)..(25): SEQ ID NO: 2465; WAN024DEO; Start 197; Stop 221
gccaaagagaattttcagaattgat

SEQ ID NO: 326610 - DNA, 25 bp, Artificial
  probe
  misc_feature (1)..(25): SEQ ID NO: 2465; WAN024DEO; Start 185; Stop 209
ctatatctgaaggccaaagagaatt

SEQ ID NO: 326611 - DNA, 25 bp, Artificial
  probe
  misc_feature (1)..(25): SEQ ID NO: 2465; WAN024DEO; Start 49; Stop 73
gcctatgtcccctattctcactttc

SEQ ID NO: 326612 - DNA, 25 bp, Artificial
  probe
  misc_feature (1)..(25): SEQ ID NO: 2465; WAN024DEO; Start 70; Stop 94
tttcctatcggagcagttttagtag

SEQ ID NO: 326613 - DNA, 25 bp, Artificial
  probe
  misc_feature (1)..(25): SEQ ID NO: 2465; WAN024DEO; Start 69; Stop 93
ctttcctatcggagcagttttagta

SEQ ID NO: 326614 - DNA, 25 bp, Artificial
  probe
  misc_feature (1)..(25): SEQ ID NO: 2465; WAN024DEO; Start 62; Stop 86
attctcactttcctatcggagcagt

SEQ ID NO: 326615 - DNA, 25 bp, Artificial
  probe
  misc_feature (1)..(25): SEQ ID NO: 2466; WAN024FX8; Start 213; Stop 237
gacttacttctccttgctcatcata

SEQ ID NO: 326616 - DNA, 25 bp, Artificial
  probe
  misc_feature (1)..(25): SEQ ID NO: 2466; WAN024FX8; Start 216; Stop 240
ttacttctccttgctcatcataaca

SEQ ID NO: 326617 - DNA, 25 bp, Artificial
  probe
  misc_feature (1)..(25): SEQ ID NO: 2466; WAN024FX8; Start 217; Stop 241
tacttctccttgctcatcataacat

SEQ ID NO: 326618 - DNA, 25 bp, Artificial
  probe
  misc_feature (1)..(25): SEQ ID NO: 2466; WAN024FX8; Start 214; Stop 238
acttacttctccttgctcatcataa

SEQ ID NO: 326619 - DNA, 25 bp, Artificial
  probe
  misc_feature (1)..(25): SEQ ID NO: 2466; WAN024FX8; Start 215; Stop 239
cttacttctccttgctcatcataac

SEQ ID NO: 326620 - DNA, 25 bp, Artificial
  probe
  misc_feature (1)..(25): SEQ ID NO: 2466; WAN024FX8; Start 127; Stop 151
gatacattcaccagaagaaccattg

SEQ ID NO: 326621 - DNA, 25 bp, Artificial
  probe
  misc_feature (1)..(25): SEQ ID NO: 2466; WAN024FX8; Start 126; Stop 150
agatacattcaccagaagaaccatt

SEQ ID NO: 326622 - DNA, 25 bp, Artificial
  probe
  misc_feature (1)..(25): SEQ ID NO: 2466; WAN024FX8; Start 124; Stop 148
gtagatacattcaccagaagaacca

SEQ ID NO: 326623 - DNA, 25 bp, Artificial
  probe
  misc_feature (1)..(25): SEQ ID NO: 2466; WAN024FX8; Start 125; Stop 149
tagatacattcaccagaagaaccat

SEQ ID NO: 326624 - DNA, 25 bp, Artificial
  probe
  misc_feature (1)..(25): SEQ ID NO: 2466; WAN024FX8; Start 132; Stop 156
attcaccagaagaaccattgacata

SEQ ID NO: 326625 - DNA, 25 bp, Artificial
  probe
  misc_feature (1)..(25): SEQ ID NO: 2466; WAN024FX8; Start 128; Stop 152
atacattcaccagaagaaccattga

SEQ ID NO: 326626 - DNA, 25 bp, Artificial
  probe
  misc_feature (1)..(25): SEQ ID NO: 2466; WAN024FX8; Start 133; Stop 157
ttcaccagaagaaccattgacataa

SEQ ID NO: 326627 - DNA, 25 bp, Artificial
  probe
  misc_feature (1)..(25): SEQ ID NO: 2466; WAN024FX8; Start 129; Stop 153
tacattcaccagaagaaccattgac

SEQ ID NO: 326628 - DNA, 25 bp, Artificial
  probe
  misc_feature (1)..(25): SEQ ID NO: 2466; WAN024FX8; Start 131; Stop 155
cattcaccagaagaaccattgacat

SEQ ID NO: 326629 - DNA, 25 bp, Artificial
  probe
  misc_feature (1)..(25): SEQ ID NO: 2466; WAN024FX8; Start 218; Stop 242
acttctccttgctcatcataacatg

SEQ ID NO: 326630 - DNA, 25 bp, Artificial
  probe
  misc_feature (1)..(25): SEQ ID NO: 2466; WAN024FX8; Start 226; Stop 250
ttgctcatcataacatgcgtagaag

SEQ ID NO: 326631 - DNA, 25 bp, Artificial
  probe
  misc_feature (1)..(25): SEQ ID NO: 2466; WAN024FX8; Start 225; Stop 249
cttgctcatcataacatgcgtagaa

SEQ ID NO: 326632 - DNA, 25 bp, Artificial
  probe
  misc_feature (1)..(25): SEQ ID NO: 2466; WAN024FX8; Start 123; Stop 147
ggtagatacattcaccagaagaacc

SEQ ID NO: 326633 - DNA, 25 bp, Artificial
  probe
  misc_feature (1)..(25): SEQ ID NO: 2466; WAN024FX8; Start 139; Stop 163
agaagaaccattgacataaagacct

SEQ ID NO: 326634 - DNA, 25 bp, Artificial
  probe
  misc_feature (1)..(25): SEQ ID NO: 2466; WAN024FX8; Start 138; Stop 162
cagaagaaccattgacataaagacc

SEQ ID NO: 326635 - DNA, 25 bp, Artificial
  probe
  misc_feature (1)..(25): SEQ ID NO: 2466; WAN024FX8; Start 137; Stop 161
ccagaagaaccattgacataaagac

SEQ ID NO: 326636 - DNA, 25 bp, Artificial
  probe
  misc_feature (1)..(25): SEQ ID NO: 2466; WAN024FX8; Start 136; Stop 160
accagaagaaccattgacataaaga

SEQ ID NO: 326637 - DNA, 25 bp, Artificial
  probe
  misc_feature (1)..(25): SEQ ID NO: 2466; WAN024FX8; Start 135; Stop 159
caccagaagaaccattgacataaag

SEQ ID NO: 326638 - DNA, 25 bp, Artificial
  probe
  misc_feature (1)..(25): SEQ ID NO: 2466; WAN024FX8; Start 142; Stop 166
agaaccattgacataaagaccttga

SEQ ID NO: 326639 - DNA, 25 bp, Artificial
  probe
  misc_feature (1)..(25): SEQ ID NO: 2466; WAN024FX8; Start 219; Stop 243
cttctccttgctcatcataacatgc

SEQ ID NO: 326640 - DNA, 25 bp, Artificial
  probe
  misc_feature (1)..(25): SEQ ID NO: 2466; WAN024FX8; Start 148; Stop 172
attgacataaagaccttgaacacct

SEQ ID NO: 326641 - DNA, 25 bp, Artificial
  probe
  misc_feature (1)..(25): SEQ ID NO: 2466; WAN024FX8; Start 147; Stop 171
cattgacataaagaccttgaacacc

SEQ ID NO: 326642 - DNA, 25 bp, Artificial
  probe
  misc_feature (1)..(25): SEQ ID NO: 2466; WAN024FX8; Start 146; Stop 170
ccattgacataaagaccttgaacac

SEQ ID NO: 326643 - DNA, 25 bp, Artificial
  probe
  misc_feature (1)..(25): SEQ ID NO: 2466; WAN024FX8; Start 144; Stop 168
aaccattgacataaagaccttgaac

SEQ ID NO: 326644 - DNA, 25 bp, Artificial
  probe
  misc_feature (1)..(25): SEQ ID NO: 2466; WAN024FX8; Start 143; Stop 167
gaaccattgacataaagaccttgaa

SEQ ID NO: 326645 - DNA, 25 bp, Artificial
  probe
  misc_feature (1)..(25): SEQ ID NO: 2466; WAN024FX8; Start 145; Stop 169
accattgacataaagaccttgaaca

SEQ ID NO: 326646 - DNA, 25 bp, Artificial
  probe
  misc_feature (1)..(25): SEQ ID NO: 2466; WAN024FX8; Start 149; Stop 173
ttgacataaagaccttgaacacctt

SEQ ID NO: 326647 - DNA, 25 bp, Artificial
  probe
  misc_feature (1)..(25): SEQ ID NO: 2466; WAN024FX8; Start 141; Stop 165
aagaaccattgacataaagaccttg

SEQ ID NO: 326648 - DNA, 25 bp, Artificial
  probe
  misc_feature (1)..(25): SEQ ID NO: 2467; WAN024D2W; Start 209; Stop 233
agcaattctgtatcaaccttctcaa

SEQ ID NO: 326649 - DNA, 25 bp, Artificial
  probe
  misc_feature (1)..(25): SEQ ID NO: 2467; WAN024D2W; Start 210; Stop 234
gcaattctgtatcaaccttctcaag

SEQ ID NO: 326650 - DNA, 25 bp, Artificial
  probe
  misc_feature (1)..(25): SEQ ID NO: 2467; WAN024D2W; Start 211; Stop 235
caattctgtatcaaccttctcaaga

SEQ ID NO: 326651 - DNA, 25 bp, Artificial
  probe
  misc_feature (1)..(25): SEQ ID NO: 2467; WAN024D2W; Start 206; Stop 230
ctgagcaattctgtatcaaccttct

SEQ ID NO: 326652 - DNA, 25 bp, Artificial
  probe
  misc_feature (1)..(25): SEQ ID NO: 2467; WAN024D2W; Start 205; Stop 229
actgagcaattctgtatcaaccttc

SEQ ID NO: 326653 - DNA, 25 bp, Artificial
  probe
  misc_feature (1)..(25): SEQ ID NO: 2467; WAN024D2W; Start 204; Stop 228
gactgagcaattctgtatcaacctt

SEQ ID NO: 326654 - DNA, 25 bp, Artificial
  probe
  misc_feature (1)..(25): SEQ ID NO: 2467; WAN024D2W; Start 208; Stop 232
gagcaattctgtatcaaccttctca

SEQ ID NO: 326655 - DNA, 25 bp, Artificial
  probe
  misc_feature (1)..(25): SEQ ID NO: 2467; WAN024D2W; Start 207; Stop 231
tgagcaattctgtatcaaccttctc

SEQ ID NO: 326656 - DNA, 25 bp, Artificial
  probe
  misc_feature (1)..(25): SEQ ID NO: 2467; WAN024D2W; Start 199; Stop 223
ctgttgactgagcaattctgtatca

SEQ ID NO: 326657 - DNA, 25 bp, Artificial
  probe
  misc_feature (1)..(25): SEQ ID NO: 2467; WAN024D2W; Start 198; Stop 222
cctgttgactgagcaattctgtatc

SEQ ID NO: 326658 - DNA, 25 bp, Artificial
  probe
  misc_feature (1)..(25): SEQ ID NO: 2467; WAN024D2W; Start 213; Stop 237
attctgtatcaaccttctcaagatt

SEQ ID NO: 326659 - DNA, 25 bp, Artificial
  probe
  misc_feature (1)..(25): SEQ ID NO: 2467; WAN024D2W; Start 212; Stop 236
aattctgtatcaaccttctcaagat

SEQ ID NO: 326660 - DNA, 25 bp, Artificial
  probe
  misc_feature (1)..(25): SEQ ID NO: 2467; WAN024D2W; Start 203; Stop 227
tgactgagcaattctgtatcaacct

SEQ ID NO: 326661 - DNA, 25 bp, Artificial
  probe
  misc_feature (1)..(25): SEQ ID NO: 2467; WAN024D2W; Start 197; Stop 221
gcctgttgactgagcaattctgtat

SEQ ID NO: 326662 - DNA, 25 bp, Artificial
  probe
  misc_feature (1)..(25): SEQ ID NO: 2467; WAN024D2W; Start 200; Stop 224
tgttgactgagcaattctgtatcaa

SEQ ID NO: 326663 - DNA, 25 bp, Artificial
  probe
  misc_feature (1)..(25): SEQ ID NO: 2467; WAN024D2W; Start 125; Stop 149
atatcatccaactcaaactgcttgc

SEQ ID NO: 326664 - DNA, 25 bp, Artificial
  probe
  misc_feature (1)..(25): SEQ ID NO: 2467; WAN024D2W; Start 202; Stop 226
ttgactgagcaattctgtatcaacc

SEQ ID NO: 326665 - DNA, 25 bp, Artificial
  probe
  misc_feature (1)..(25): SEQ ID NO: 2467; WAN024D2W; Start 152; Stop 176
atcaaaccttgttggagatttgttt

SEQ ID NO: 326666 - DNA, 25 bp, Artificial
  probe
  misc_feature (1)..(25): SEQ ID NO: 2467; WAN024D2W; Start 151; Stop 175
aatcaaaccttgttggagatttgtt

SEQ ID NO: 326667 - DNA, 25 bp, Artificial
  probe
  misc_feature (1)..(25): SEQ ID NO: 2467; WAN024D2W; Start 150; Stop 174
gaatcaaaccttgttggagatttgt

SEQ ID NO: 326668 - DNA, 25 bp, Artificial
  probe
  misc_feature (1)..(25): SEQ ID NO: 2467; WAN024D2W; Start 134; Stop 158
aactcaaactgcttgcgaatcaaac

SEQ ID NO: 326669 - DNA, 25 bp, Artificial
  probe
  misc_feature (1)..(25): SEQ ID NO: 2467; WAN024D2W; Start 133; Stop 157
caactcaaactgcttgcgaatcaaa

SEQ ID NO: 326670 - DNA, 25 bp, Artificial
  probe
  misc_feature (1)..(25): SEQ ID NO: 2467; WAN024D2W; Start 149; Stop 173
cgaatcaaaccttgttggagatttg

SEQ ID NO: 326671 - DNA, 25 bp, Artificial
  probe
  misc_feature (1)..(25): SEQ ID NO: 2467; WAN024D2W; Start 148; Stop 172
gcgaatcaaaccttgttggagattt

SEQ ID NO: 326672 - DNA, 25 bp, Artificial
  probe
  misc_feature (1)..(25): SEQ ID NO: 2467; WAN024D2W; Start 146; Stop 170
ttgcgaatcaaaccttgttggagat

SEQ ID NO: 326673 - DNA, 25 bp, Artificial
  probe
  misc_feature (1)..(25): SEQ ID NO: 2467; WAN024D2W; Start 126; Stop 150
tatcatccaactcaaactgcttgcg

SEQ ID NO: 326674 - DNA, 25 bp, Artificial
  probe
  misc_feature (1)..(25): SEQ ID NO: 2467; WAN024D2W; Start 145; Stop 169
cttgcgaatcaaaccttgttggaga

SEQ ID NO: 326675 - DNA, 25 bp, Artificial
  probe
  misc_feature (1)..(25): SEQ ID NO: 2467; WAN024D2W; Start 138; Stop 162
caaactgcttgcgaatcaaaccttg

SEQ ID NO: 326676 - DNA, 25 bp, Artificial
  probe
  misc_feature (1)..(25): SEQ ID NO: 2467; WAN024D2W; Start 147; Stop 171
tgcgaatcaaaccttgttggagatt

SEQ ID NO: 326677 - DNA, 25 bp, Artificial
  probe
  misc_feature (1)..(25): SEQ ID NO: 2467; WAN024D2W; Start 137; Stop 161
tcaaactgcttgcgaatcaaacctt

SEQ ID NO: 326678 - DNA, 25 bp, Artificial
  probe
  misc_feature (1)..(25): SEQ ID NO: 2467; WAN024D2W; Start 140; Stop 164
aactgcttgcgaatcaaaccttgtt

SEQ ID NO: 326679 - DNA, 25 bp, Artificial
  probe
  misc_feature (1)..(25): SEQ ID NO: 2467; WAN024D2W; Start 139; Stop 163
aaactgcttgcgaatcaaaccttgt

SEQ ID NO: 326680 - DNA, 25 bp, Artificial
  probe
  misc_feature (1)..(25): SEQ ID NO: 2467; WAN024D2W; Start 130; Stop 154
atccaactcaaactgcttgcgaatc

SEQ ID NO: 326681 - DNA, 25 bp, Artificial
  probe
  misc_feature (1)..(25): SEQ ID NO: 2468; WAN024FED; Start 272; Stop 296
aatcactctctatggaagcaatcac

SEQ ID NO: 326682 - DNA, 25 bp, Artificial
  probe
  misc_feature (1)..(25): SEQ ID NO: 2468; WAN024FED; Start 273; Stop 297
atcactctctatggaagcaatcacc

SEQ ID NO: 326683 - DNA, 25 bp, Artificial
  probe
  misc_feature (1)..(25): SEQ ID NO: 2468; WAN024FED; Start 209; Stop 233
tcgcaatgatagccttcttcagatt

SEQ ID NO: 326684 - DNA, 25 bp, Artificial
  probe
  misc_feature (1)..(25): SEQ ID NO: 2468; WAN024FED; Start 271; Stop 295
aaatcactctctatggaagcaatca

SEQ ID NO: 326685 - DNA, 25 bp, Artificial
  probe
  misc_feature (1)..(25): SEQ ID NO: 2468; WAN024FED; Start 270; Stop 294
caaatcactctctatggaagcaatc

SEQ ID NO: 326686 - DNA, 25 bp, Artificial
  probe
  misc_feature (1)..(25): SEQ ID NO: 2468; WAN024FED; Start 269; Stop 293
acaaatcactctctatggaagcaat

SEQ ID NO: 326687 - DNA, 25 bp, Artificial
  probe
  misc_feature (1)..(25): SEQ ID NO: 2468; WAN024FED; Start 268; Stop 292
aacaaatcactctctatggaagcaa

SEQ ID NO: 326688 - DNA, 25 bp, Artificial
  probe
  misc_feature (1)..(25): SEQ ID NO: 2468; WAN024FED; Start 267; Stop 291
caacaaatcactctctatggaagca

SEQ ID NO: 326689 - DNA, 25 bp, Artificial
  probe
  misc_feature (1)..(25): SEQ ID NO: 2468; WAN024FED; Start 201; Stop 225
atcttctgtcgcaatgatagccttc

SEQ ID NO: 326690 - DNA, 25 bp, Artificial
  probe
  misc_feature (1)..(25): SEQ ID NO: 2468; WAN024FED; Start 204; Stop 228
ttctgtcgcaatgatagccttcttc

SEQ ID NO: 326691 - DNA, 25 bp, Artificial
  probe
  misc_feature (1)..(25): SEQ ID NO: 2468; WAN024FED; Start 203; Stop 227
cttctgtcgcaatgatagccttctt

SEQ ID NO: 326692 - DNA, 25 bp, Artificial
  probe
  misc_feature (1)..(25): SEQ ID NO: 2468; WAN024FED; Start 191; Stop 215
taaagtgttcatcttctgtcgcaat

SEQ ID NO: 326693 - DNA, 25 bp, Artificial
  probe
  misc_feature (1)..(25): SEQ ID NO: 2468; WAN024FED; Start 190; Stop 214
ttaaagtgttcatcttctgtcgcaa

SEQ ID NO: 326694 - DNA, 25 bp, Artificial
  probe
  misc_feature (1)..(25): SEQ ID NO: 2468; WAN024FED; Start 200; Stop 224
catcttctgtcgcaatgatagcctt

SEQ ID NO: 326695 - DNA, 25 bp, Artificial
  probe
  misc_feature (1)..(25): SEQ ID NO: 2468; WAN024FED; Start 208; Stop 232
gtcgcaatgatagccttcttcagat

SEQ ID NO: 326696 - DNA, 25 bp, Artificial
  probe
  misc_feature (1)..(25): SEQ ID NO: 2468; WAN024FED; Start 265; Stop 289
cgcaacaaatcactctctatggaag

SEQ ID NO: 326697 - DNA, 25 bp, Artificial
  probe
  misc_feature (1)..(25): SEQ ID NO: 2468; WAN024FED; Start 266; Stop 290
gcaacaaatcactctctatggaagc

SEQ ID NO: 326698 - DNA, 25 bp, Artificial
  probe
  misc_feature (1)..(25): SEQ ID NO: 2468; WAN024FED; Start 196; Stop 220
tgttcatcttctgtcgcaatgatag

SEQ ID NO: 326699 - DNA, 25 bp, Artificial
  probe
  misc_feature (1)..(25): SEQ ID NO: 2468; WAN024FED; Start 210; Stop 234
cgcaatgatagccttcttcagattt

SEQ ID NO: 326700 - DNA, 25 bp, Artificial
  probe
  misc_feature (1)..(25): SEQ ID NO: 2468; WAN024FED; Start 195; Stop 219
gtgttcatcttctgtcgcaatgata

SEQ ID NO: 326701 - DNA, 25 bp, Artificial
  probe
  misc_feature (1)..(25): SEQ ID NO: 2468; WAN024FED; Start 78; Stop 102
ctgtttaattagttgctgggtcaag

SEQ ID NO: 326702 - DNA, 25 bp, Artificial
  probe
  misc_feature (1)..(25): SEQ ID NO: 2468; WAN024FED; Start 115; Stop 139
ctagaggaacccaaacctacaaatt

SEQ ID NO: 326703 - DNA, 25 bp, Artificial
  probe
  misc_feature (1)..(25): SEQ ID NO: 2468; WAN024FED; Start 81; Stop 105
tttaattagttgctgggtcaaggtt

SEQ ID NO: 326704 - DNA, 25 bp, Artificial
  probe
  misc_feature (1)..(25): SEQ ID NO: 2468; WAN024FED; Start 192; Stop 216
aaagtgttcatcttctgtcgcaatg

SEQ ID NO: 326705 - DNA, 25 bp, Artificial
  probe
  misc_feature (1)..(25): SEQ ID NO: 2468; WAN024FED; Start 202; Stop 226
tcttctgtcgcaatgatagccttct

SEQ ID NO: 326706 - DNA, 25 bp, Artificial
  probe
  misc_feature (1)..(25): SEQ ID NO: 2468; WAN024FED; Start 241; Stop 265
atttgctcagatgagatagaagtgc

SEQ ID NO: 326707 - DNA, 25 bp, Artificial
  probe
  misc_feature (1)..(25): SEQ ID NO: 2468; WAN024FED; Start 240; Stop 264
aatttgctcagatgagatagaagtg

SEQ ID NO: 326708 - DNA, 25 bp, Artificial
  probe
  misc_feature (1)..(25): SEQ ID NO: 2468; WAN024FED; Start 114; Stop 138
actagaggaacccaaacctacaaat

SEQ ID NO: 326709 - DNA, 25 bp, Artificial
  probe
  misc_feature (1)..(25): SEQ ID NO: 2468; WAN024FED; Start 82; Stop 106
ttaattagttgctgggtcaaggttg

SEQ ID NO: 326710 - DNA, 25 bp, Artificial
  probe
  misc_feature (1)..(25): SEQ ID NO: 2468; WAN024FED; Start 80; Stop 104
gtttaattagttgctgggtcaaggt

SEQ ID NO: 326711 - DNA, 25 bp, Artificial
  probe
  misc_feature (1)..(25): SEQ ID NO: 2468; WAN024FED; Start 79; Stop 103
tgtttaattagttgctgggtcaagg

SEQ ID NO: 326712 - DNA, 25 bp, Artificial
  probe
  misc_feature (1)..(25): SEQ ID NO: 2468; WAN024FED; Start 67; Stop 91
ccaaccacctgctgtttaattagtt

SEQ ID NO: 326713 - DNA, 25 bp, Artificial
  probe
  misc_feature (1)..(25): SEQ ID NO: 2468; WAN024FED; Start 189; Stop 213
tttaaagtgttcatcttctgtcgca

SEQ ID NO: 326714 - DNA, 25 bp, Artificial
  probe
  misc_feature (1)..(25): SEQ ID NO: 2469; WAN024CIC; Start 41; Stop 65
ataaacttcttagattcccacctgt

SEQ ID NO: 326715 - DNA, 25 bp, Artificial
  probe
  misc_feature (1)..(25): SEQ ID NO: 2469; WAN024CIC; Start 39; Stop 63
tgataaacttcttagattcccacct

SEQ ID NO: 326716 - DNA, 25 bp, Artificial
  probe
  misc_feature (1)..(25): SEQ ID NO: 2469; WAN024CIC; Start 44; Stop 68
aacttcttagattcccacctgttag

SEQ ID NO: 326717 - DNA, 25 bp, Artificial
  probe
  misc_feature (1)..(25): SEQ ID NO: 2469; WAN024CIC; Start 43; Stop 67
aaacttcttagattcccacctgtta

SEQ ID NO: 326718 - DNA, 25 bp, Artificial
  probe
  misc_feature (1)..(25): SEQ ID NO: 2469; WAN024CIC; Start 42; Stop 66
taaacttcttagattcccacctgtt

SEQ ID NO: 326719 - DNA, 25 bp, Artificial
  probe
  misc_feature (1)..(25): SEQ ID NO: 2469; WAN024CIC; Start 40; Stop 64
gataaacttcttagattcccacctg

SEQ ID NO: 326720 - DNA, 25 bp, Artificial
  probe
  misc_feature (1)..(25): SEQ ID NO: 2469; WAN024CIC; Start 38; Stop 62
ttgataaacttcttagattcccacc

SEQ ID NO: 326721 - DNA, 25 bp, Artificial
  probe
  misc_feature (1)..(25): SEQ ID NO: 2469; WAN024CIC; Start 45; Stop 69
acttcttagattcccacctgttagg

SEQ ID NO: 326722 - DNA, 25 bp, Artificial
  probe
  misc_feature (1)..(25): SEQ ID NO: 2469; WAN024CIC; Start 37; Stop 61
attgataaacttcttagattcccac

SEQ ID NO: 326723 - DNA, 25 bp, Artificial
  probe
  misc_feature (1)..(25): SEQ ID NO: 2469; WAN024CIC; Start 36; Stop 60
aattgataaacttcttagattccca

SEQ ID NO: 326724 - DNA, 25 bp, Artificial
  probe
  misc_feature (1)..(25): SEQ ID NO: 2469; WAN024CIC; Start 46; Stop 70
cttcttagattcccacctgttaggg

SEQ ID NO: 326725 - DNA, 25 bp, Artificial
  probe
  misc_feature (1)..(25): SEQ ID NO: 2469; WAN024CIC; Start 11; Stop 35
tccaaggggataatccaacagaaaa

SEQ ID NO: 326726 - DNA, 25 bp, Artificial
  probe
  misc_feature (1)..(25): SEQ ID NO: 2469; WAN024CIC; Start 35; Stop 59
aaattgataaacttcttagattccc

SEQ ID NO: 326727 - DNA, 25 bp, Artificial
  probe
  misc_feature (1)..(25): SEQ ID NO: 2469; WAN024CIC; Start 47; Stop 71
ttcttagattcccacctgttagggc

SEQ ID NO: 326728 - DNA, 25 bp, Artificial
  probe
  misc_feature (1)..(25): SEQ ID NO: 2469; WAN024CIC; Start 10; Stop 34
atccaaggggataatccaacagaaa

SEQ ID NO: 326729 - DNA, 25 bp, Artificial
  probe
  misc_feature (1)..(25): SEQ ID NO: 2469; WAN024CIC; Start 9; Stop 33
catccaaggggataatccaacagaa

SEQ ID NO: 326730 - DNA, 25 bp, Artificial
  probe
  misc_feature (1)..(25): SEQ ID NO: 2469; WAN024CIC; Start 7; Stop 31
gacatccaaggggataatccaacag

SEQ ID NO: 326731 - DNA, 25 bp, Artificial
  probe
  misc_feature (1)..(25): SEQ ID NO: 2469; WAN024CIC; Start 8; Stop 32
acatccaaggggataatccaacaga

SEQ ID NO: 326732 - DNA, 25 bp, Artificial
  probe
  misc_feature (1)..(25): SEQ ID NO: 2469; WAN024CIC; Start 6; Stop 30
ggacatccaaggggataatccaaca

SEQ ID NO: 326733 - DNA, 25 bp, Artificial
  probe
  misc_feature (1)..(25): SEQ ID NO: 2469; WAN024CIC; Start 5; Stop 29
cggacatccaaggggataatccaac

SEQ ID NO: 326734 - DNA, 25 bp, Artificial
  probe
  misc_feature (1)..(25): SEQ ID NO: 2470; WAN024G25; Start 487; Stop 511
cttcaactcaatactctgtgcgatt

SEQ ID NO: 326735 - DNA, 25 bp, Artificial
  probe
  misc_feature (1)..(25): SEQ ID NO: 2470; WAN024G25; Start 114; Stop 138
cattgttggcagttgtaatagcatg

SEQ ID NO: 326736 - DNA, 25 bp, Artificial
  probe
  misc_feature (1)..(25): SEQ ID NO: 2470; WAN024G25; Start 113; Stop 137
gcattgttggcagttgtaatagcat

SEQ ID NO: 326737 - DNA, 25 bp, Artificial
  probe
  misc_feature (1)..(25): SEQ ID NO: 2470; WAN024G25; Start 500; Stop 524
ctctgtgcgatttcaatatctgttt

SEQ ID NO: 326738 - DNA, 25 bp, Artificial
  probe
  misc_feature (1)..(25): SEQ ID NO: 2470; WAN024G25; Start 498; Stop 522
tactctgtgcgatttcaatatctgt

SEQ ID NO: 326739 - DNA, 25 bp, Artificial
  probe
  misc_feature (1)..(25): SEQ ID NO: 2470; WAN024G25; Start 493; Stop 517
ctcaatactctgtgcgatttcaata

SEQ ID NO: 326740 - DNA, 25 bp, Artificial
  probe
  misc_feature (1)..(25): SEQ ID NO: 2470; WAN024G25; Start 492; Stop 516
actcaatactctgtgcgatttcaat

SEQ ID NO: 326741 - DNA, 25 bp, Artificial
  probe
  misc_feature (1)..(25): SEQ ID NO: 2470; WAN024G25; Start 499; Stop 523
actctgtgcgatttcaatatctgtt

SEQ ID NO: 326742 - DNA, 25 bp, Artificial
  probe
  misc_feature (1)..(25): SEQ ID NO: 2470; WAN024G25; Start 491; Stop 515
aactcaatactctgtgcgatttcaa

SEQ ID NO: 326743 - DNA, 25 bp, Artificial
  probe
  misc_feature (1)..(25): SEQ ID NO: 2470; WAN024G25; Start 488; Stop 512
ttcaactcaatactctgtgcgattt

SEQ ID NO: 326744 - DNA, 25 bp, Artificial
  probe
  misc_feature (1)..(25): SEQ ID NO: 2470; WAN024G25; Start 497; Stop 521
atactctgtgcgatttcaatatctg

SEQ ID NO: 326745 - DNA, 25 bp, Artificial
  probe
  misc_feature (1)..(25): SEQ ID NO: 2470; WAN024G25; Start 458; Stop 482
ccaagtttctctacaacatcaacaa

SEQ ID NO: 326746 - DNA, 25 bp, Artificial
  probe
  misc_feature (1)..(25): SEQ ID NO: 2470; WAN024G25; Start 481; Stop 505
aattggcttcaactcaatactctgt

SEQ ID NO: 326747 - DNA, 25 bp, Artificial
  probe
  misc_feature (1)..(25): SEQ ID NO: 2470; WAN024G25; Start 457; Stop 481
accaagtttctctacaacatcaaca

SEQ ID NO: 326748 - DNA, 25 bp, Artificial
  probe
  misc_feature (1)..(25): SEQ ID NO: 2470; WAN024G25; Start 494; Stop 518
tcaatactctgtgcgatttcaatat

SEQ ID NO: 326749 - DNA, 25 bp, Artificial
  probe
  misc_feature (1)..(25): SEQ ID NO: 2470; WAN024G25; Start 489; Stop 513
tcaactcaatactctgtgcgatttc

SEQ ID NO: 326750 - DNA, 25 bp, Artificial
  probe
  misc_feature (1)..(25): SEQ ID NO: 2470; WAN024G25; Start 456; Stop 480
taccaagtttctctacaacatcaac

SEQ ID NO: 326751 - DNA, 25 bp, Artificial
  probe
  misc_feature (1)..(25): SEQ ID NO: 2470; WAN024G25; Start 161; Stop 185
ttgatgtcttccattggcagaactt

SEQ ID NO: 326752 - DNA, 25 bp, Artificial
  probe
  misc_feature (1)..(25): SEQ ID NO: 2470; WAN024G25; Start 490; Stop 514
caactcaatactctgtgcgatttca

SEQ ID NO: 326753 - DNA, 25 bp, Artificial
  probe
  misc_feature (1)..(25): SEQ ID NO: 2470; WAN024G25; Start 147; Stop 171
cagtaaagtggaggttgatgtcttc

SEQ ID NO: 326754 - DNA, 25 bp, Artificial
  probe
  misc_feature (1)..(25): SEQ ID NO: 2470; WAN024G25; Start 495; Stop 519
caatactctgtgcgatttcaatatc

SEQ ID NO: 326755 - DNA, 25 bp, Artificial
  probe
  misc_feature (1)..(25): SEQ ID NO: 2470; WAN024G25; Start 482; Stop 506
attggcttcaactcaatactctgtg

SEQ ID NO: 326756 - DNA, 25 bp, Artificial
  probe
  misc_feature (1)..(25): SEQ ID NO: 2470; WAN024G25; Start 496; Stop 520
aatactctgtgcgatttcaatatct

SEQ ID NO: 326757 - DNA, 25 bp, Artificial
  probe
  misc_feature (1)..(25): SEQ ID NO: 2470; WAN024G25; Start 486; Stop 510
gcttcaactcaatactctgtgcgat

SEQ ID NO: 326758 - DNA, 25 bp, Artificial
  probe
  misc_feature (1)..(25): SEQ ID NO: 2470; WAN024G25; Start 455; Stop 479
ataccaagtttctctacaacatcaa

SEQ ID NO: 326759 - DNA, 25 bp, Artificial
  probe
  misc_feature (1)..(25): SEQ ID NO: 2470; WAN024G25; Start 454; Stop 478
aataccaagtttctctacaacatca

SEQ ID NO: 326760 - DNA, 25 bp, Artificial
  probe
  misc_feature (1)..(25): SEQ ID NO: 2470; WAN024G25; Start 459; Stop 483
caagtttctctacaacatcaacaat

SEQ ID NO: 326761 - DNA, 25 bp, Artificial
  probe
  misc_feature (1)..(25): SEQ ID NO: 2470; WAN024G25; Start 483; Stop 507
ttggcttcaactcaatactctgtgc

SEQ ID NO: 326762 - DNA, 25 bp, Artificial
  probe
  misc_feature (1)..(25): SEQ ID NO: 2470; WAN024G25; Start 163; Stop 187
gatgtcttccattggcagaacttgt

SEQ ID NO: 326763 - DNA, 25 bp, Artificial
  probe
  misc_feature (1)..(25): SEQ ID NO: 2470; WAN024G25; Start 160; Stop 184
gttgatgtcttccattggcagaact

SEQ ID NO: 326764 - DNA, 25 bp, Artificial
  probe
  misc_feature (1)..(25): SEQ ID NO: 2470; WAN024G25; Start 162; Stop 186
tgatgtcttccattggcagaacttg

SEQ ID NO: 326765 - DNA, 25 bp, Artificial
  probe
  misc_feature (1)..(25): SEQ ID NO: 2470; WAN024G25; Start 408; Stop 432
tgagtttagccttgtactttccgta

SEQ ID NO: 326766 - DNA, 25 bp, Artificial
  probe
  misc_feature (1)..(25): SEQ ID NO: 2470; WAN024G25; Start 468; Stop 492
ctacaacatcaacaattggcttcaa

SEQ ID NO: 326767 - DNA, 25 bp, Artificial
  probe
  misc_feature (1)..(25): SEQ ID NO: 2471; WAN0249N9; Start 112; Stop 136
ggcatataggtaatcgtagacaagt

SEQ ID NO: 326768 - DNA, 25 bp, Artificial
  probe
  misc_feature (1)..(25): SEQ ID NO: 2471; WAN0249N9; Start 113; Stop 137
gcatataggtaatcgtagacaagtg

SEQ ID NO: 326769 - DNA, 25 bp, Artificial
  probe
  misc_feature (1)..(25): SEQ ID NO: 2471; WAN0249N9; Start 114; Stop 138
catataggtaatcgtagacaagtgt

SEQ ID NO: 326770 - DNA, 25 bp, Artificial
  probe
  misc_feature (1)..(25): SEQ ID NO: 2471; WAN0249N9; Start 109; Stop 133
tagggcatataggtaatcgtagaca

SEQ ID NO: 326771 - DNA, 25 bp, Artificial
  probe
  misc_feature (1)..(25): SEQ ID NO: 2471; WAN0249N9; Start 103; Stop 127
ctggaatagggcatataggtaatcg

SEQ ID NO: 326772 - DNA, 25 bp, Artificial
  probe
  misc_feature (1)..(25): SEQ ID NO: 2471; WAN0249N9; Start 111; Stop 135
gggcatataggtaatcgtagacaag

SEQ ID NO: 326773 - DNA, 25 bp, Artificial
  probe
  misc_feature (1)..(25): SEQ ID NO: 2471; WAN0249N9; Start 110; Stop 134
agggcatataggtaatcgtagacaa

SEQ ID NO: 326774 - DNA, 25 bp, Artificial
  probe
  misc_feature (1)..(25): SEQ ID NO: 2471; WAN0249N9; Start 104; Stop 128
tggaatagggcatataggtaatcgt

SEQ ID NO: 326775 - DNA, 25 bp, Artificial
  probe
  misc_feature (1)..(25): SEQ ID NO: 2471; WAN0249N9; Start 102; Stop 126
actggaatagggcatataggtaatc

SEQ ID NO: 326776 - DNA, 25 bp, Artificial
  probe
  misc_feature (1)..(25): SEQ ID NO: 2471; WAN0249N9; Start 105; Stop 129
ggaatagggcatataggtaatcgta

SEQ ID NO: 326777 - DNA, 25 bp, Artificial
  probe
  misc_feature (1)..(25): SEQ ID NO: 2471; WAN0249N9; Start 115; Stop 139
atataggtaatcgtagacaagtgtt

SEQ ID NO: 326778 - DNA, 25 bp, Artificial
  probe
  misc_feature (1)..(25): SEQ ID NO: 2471; WAN0249N9; Start 108; Stop 132
atagggcatataggtaatcgtagac

SEQ ID NO: 326779 - DNA, 25 bp, Artificial
  probe
  misc_feature (1)..(25): SEQ ID NO: 2471; WAN0249N9; Start 98; Stop 122
aaatactggaatagggcatataggt

SEQ ID NO: 326780 - DNA, 25 bp, Artificial
  probe
  misc_feature (1)..(25): SEQ ID NO: 2471; WAN0249N9; Start 107; Stop 131
aatagggcatataggtaatcgtaga

SEQ ID NO: 326781 - DNA, 25 bp, Artificial
  probe
  misc_feature (1)..(25): SEQ ID NO: 2471; WAN0249N9; Start 106; Stop 130
gaatagggcatataggtaatcgtag

SEQ ID NO: 326782 - DNA, 25 bp, Artificial
  probe
  misc_feature (1)..(25): SEQ ID NO: 2471; WAN0249N9; Start 101; Stop 125
tactggaatagggcatataggtaat

SEQ ID NO: 326783 - DNA, 25 bp, Artificial
  probe
  misc_feature (1)..(25): SEQ ID NO: 2471; WAN0249N9; Start 100; Stop 124
atactggaatagggcatataggtaa

SEQ ID NO: 326784 - DNA, 25 bp, Artificial
  probe
  misc_feature (1)..(25): SEQ ID NO: 2471; WAN0249N9; Start 99; Stop 123
aatactggaatagggcatataggta

SEQ ID NO: 326785 - DNA, 25 bp, Artificial
  probe
  misc_feature (1)..(25): SEQ ID NO: 2471; WAN0249N9; Start 170; Stop 194
tgtatagcaagcatcactaaacata

SEQ ID NO: 326786 - DNA, 25 bp, Artificial
  probe
  misc_feature (1)..(25): SEQ ID NO: 2471; WAN0249N9; Start 116; Stop 140
tataggtaatcgtagacaagtgttt

SEQ ID NO: 326787 - DNA, 25 bp, Artificial
  probe
  misc_feature (1)..(25): SEQ ID NO: 2471; WAN0249N9; Start 171; Stop 195
gtatagcaagcatcactaaacatat

SEQ ID NO: 326788 - DNA, 25 bp, Artificial
  probe
  misc_feature (1)..(25): SEQ ID NO: 2471; WAN0249N9; Start 1; Stop 25
atggcggattgaaactaaaacacta

SEQ ID NO: 326789 - DNA, 25 bp, Artificial
  probe
  misc_feature (1)..(25): SEQ ID NO: 2471; WAN0249N9; Start 91; Stop 115
gcttctaaaatactggaatagggca

SEQ ID NO: 326790 - DNA, 25 bp, Artificial
  probe
  misc_feature (1)..(25): SEQ ID NO: 2471; WAN0249N9; Start 90; Stop 114
tgcttctaaaatactggaatagggc

SEQ ID NO: 326791 - DNA, 25 bp, Artificial
  probe
  misc_feature (1)..(25): SEQ ID NO: 2471; WAN0249N9; Start 89; Stop 113
gtgcttctaaaatactggaataggg

SEQ ID NO: 326792 - DNA, 25 bp, Artificial
  probe
  misc_feature (1)..(25): SEQ ID NO: 2471; WAN0249N9; Start 133; Stop 157
aagtgttttatagattgtctcgcag

SEQ ID NO: 326793 - DNA, 25 bp, Artificial
  probe
  misc_feature (1)..(25): SEQ ID NO: 2471; WAN0249N9; Start 132; Stop 156
caagtgttttatagattgtctcgca

SEQ ID NO: 326794 - DNA, 25 bp, Artificial
  probe
  misc_feature (1)..(25): SEQ ID NO: 2471; WAN0249N9; Start 4; Stop 28
gcggattgaaactaaaacactacaa

SEQ ID NO: 326795 - DNA, 25 bp, Artificial
  probe
  misc_feature (1)..(25): SEQ ID NO: 2471; WAN0249N9; Start 135; Stop 159
gtgttttatagattgtctcgcagga

SEQ ID NO: 326796 - DNA, 25 bp, Artificial
  probe
  misc_feature (1)..(25): SEQ ID NO: 2471; WAN0249N9; Start 134; Stop 158
agtgttttatagattgtctcgcagg

SEQ ID NO: 326797 - DNA, 25 bp, Artificial
  probe
  misc_feature (1)..(25): SEQ ID NO: 2471; WAN0249N9; Start 136; Stop 160
tgttttatagattgtctcgcaggag

SEQ ID NO: 326798 - DNA, 25 bp, Artificial
  probe
  misc_feature (1)..(25): SEQ ID NO: 2471; WAN0249N9; Start 3; Stop 27
ggcggattgaaactaaaacactaca

SEQ ID NO: 326799 - DNA, 25 bp, Artificial
  probe
  misc_feature (1)..(25): SEQ ID NO: 2471; WAN0249N9; Start 2; Stop 26
tggcggattgaaactaaaacactac

SEQ ID NO: 326800 - DNA, 25 bp, Artificial
  probe
  misc_feature (1)..(25): SEQ ID NO: 2472; WAN024GF2; Start 209; Stop 233
ttcacctcattcattgtcctaacta

SEQ ID NO: 326801 - DNA, 25 bp, Artificial
  probe
  misc_feature (1)..(25): SEQ ID NO: 2472; WAN024GF2; Start 210; Stop 234
tcacctcattcattgtcctaactag

SEQ ID NO: 326802 - DNA, 25 bp, Artificial
  probe
  misc_feature (1)..(25): SEQ ID NO: 2472; WAN024GF2; Start 84; Stop 108
tacatacttggaattagcaacagtc

SEQ ID NO: 326803 - DNA, 25 bp, Artificial
  probe
  misc_feature (1)..(25): SEQ ID NO: 2472; WAN024GF2; Start 82; Stop 106
gttacatacttggaattagcaacag

SEQ ID NO: 326804 - DNA, 25 bp, Artificial
  probe
  misc_feature (1)..(25): SEQ ID NO: 2472; WAN024GF2; Start 83; Stop 107
ttacatacttggaattagcaacagt

SEQ ID NO: 326805 - DNA, 25 bp, Artificial
  probe
  misc_feature (1)..(25): SEQ ID NO: 2472; WAN024GF2; Start 81; Stop 105
agttacatacttggaattagcaaca

SEQ ID NO: 326806 - DNA, 25 bp, Artificial
  probe
  misc_feature (1)..(25): SEQ ID NO: 2472; WAN024GF2; Start 80; Stop 104
cagttacatacttggaattagcaac

SEQ ID NO: 326807 - DNA, 25 bp, Artificial
  probe
  misc_feature (1)..(25): SEQ ID NO: 2472; WAN024GF2; Start 78; Stop 102
accagttacatacttggaattagca

SEQ ID NO: 326808 - DNA, 25 bp, Artificial
  probe
  misc_feature (1)..(25): SEQ ID NO: 2472; WAN024GF2; Start 85; Stop 109
acatacttggaattagcaacagtcc

SEQ ID NO: 326809 - DNA, 25 bp, Artificial
  probe
  misc_feature (1)..(25): SEQ ID NO: 2472; WAN024GF2; Start 77; Stop 101
caccagttacatacttggaattagc

SEQ ID NO: 326810 - DNA, 25 bp, Artificial
  probe
  misc_feature (1)..(25): SEQ ID NO: 2472; WAN024GF2; Start 76; Stop 100
gcaccagttacatacttggaattag

SEQ ID NO: 326811 - DNA, 25 bp, Artificial
  probe
  misc_feature (1)..(25): SEQ ID NO: 2472; WAN024GF2; Start 75; Stop 99
ggcaccagttacatacttggaatta

SEQ ID NO: 326812 - DNA, 25 bp, Artificial
  probe
  misc_feature (1)..(25): SEQ ID NO: 2472; WAN024GF2; Start 79; Stop 103
ccagttacatacttggaattagcaa

SEQ ID NO: 326813 - DNA, 25 bp, Artificial
  probe
  misc_feature (1)..(25): SEQ ID NO: 2472; WAN024GF2; Start 208; Stop 232
tttcacctcattcattgtcctaact

SEQ ID NO: 326814 - DNA, 25 bp, Artificial
  probe
  misc_feature (1)..(25): SEQ ID NO: 2472; WAN024GF2; Start 202; Stop 226
atttcgtttcacctcattcattgtc

SEQ ID NO: 326815 - DNA, 25 bp, Artificial
  probe
  misc_feature (1)..(25): SEQ ID NO: 2472; WAN024GF2; Start 199; Stop 223
gtcatttcgtttcacctcattcatt

SEQ ID NO: 326816 - DNA, 25 bp, Artificial
  probe
  misc_feature (1)..(25): SEQ ID NO: 2472; WAN024GF2; Start 200; Stop 224
tcatttcgtttcacctcattcattg

SEQ ID NO: 326817 - DNA, 25 bp, Artificial
  probe
  misc_feature (1)..(25): SEQ ID NO: 2472; WAN024GF2; Start 196; Stop 220
tttgtcatttcgtttcacctcattc

SEQ ID NO: 326818 - DNA, 25 bp, Artificial
  probe
  misc_feature (1)..(25): SEQ ID NO: 2472; WAN024GF2; Start 201; Stop 225
catttcgtttcacctcattcattgt

SEQ ID NO: 326819 - DNA, 25 bp, Artificial
  probe
  misc_feature (1)..(25): SEQ ID NO: 2472; WAN024GF2; Start 147; Stop 171
accttcctttagaatgcgttcaata

SEQ ID NO: 326820 - DNA, 25 bp, Artificial
  probe
  misc_feature (1)..(25): SEQ ID NO: 2472; WAN024GF2; Start 207; Stop 231
gtttcacctcattcattgtcctaac

SEQ ID NO: 326821 - DNA, 25 bp, Artificial
  probe
  misc_feature (1)..(25): SEQ ID NO: 2472; WAN024GF2; Start 148; Stop 172
ccttcctttagaatgcgttcaatat

SEQ ID NO: 326822 - DNA, 25 bp, Artificial
  probe
  misc_feature (1)..(25): SEQ ID NO: 2472; WAN024GF2; Start 198; Stop 222
tgtcatttcgtttcacctcattcat

SEQ ID NO: 326823 - DNA, 25 bp, Artificial
  probe
  misc_feature (1)..(25): SEQ ID NO: 2472; WAN024GF2; Start 206; Stop 230
cgtttcacctcattcattgtcctaa

SEQ ID NO: 326824 - DNA, 25 bp, Artificial
  probe
  misc_feature (1)..(25): SEQ ID NO: 2472; WAN024GF2; Start 197; Stop 221
ttgtcatttcgtttcacctcattca

SEQ ID NO: 326825 - DNA, 25 bp, Artificial
  probe
  misc_feature (1)..(25): SEQ ID NO: 2472; WAN024GF2; Start 74; Stop 98
aggcaccagttacatacttggaatt

SEQ ID NO: 326826 - DNA, 25 bp, Artificial
  probe
  misc_feature (1)..(25): SEQ ID NO: 2472; WAN024GF2; Start 73; Stop 97
aaggcaccagttacatacttggaat

SEQ ID NO: 326827 - DNA, 25 bp, Artificial
  probe
  misc_feature (1)..(25): SEQ ID NO: 2472; WAN024GF2; Start 205; Stop 229
tcgtttcacctcattcattgtccta

SEQ ID NO: 326828 - DNA, 25 bp, Artificial
  probe
  misc_feature (1)..(25): SEQ ID NO: 2472; WAN024GF2; Start 203; Stop 227
tttcgtttcacctcattcattgtcc

SEQ ID NO: 326829 - DNA, 25 bp, Artificial
  probe
  misc_feature (1)..(25): SEQ ID NO: 2472; WAN024GF2; Start 146; Stop 170
caccttcctttagaatgcgttcaat

SEQ ID NO: 326830 - DNA, 25 bp, Artificial
  probe
  misc_feature (1)..(25): SEQ ID NO: 2472; WAN024GF2; Start 49; Stop 73
cctttagataagtcgtactcggaaa

SEQ ID NO: 326831 - DNA, 25 bp, Artificial
  probe
  misc_feature (1)..(25): SEQ ID NO: 2472; WAN024GF2; Start 45; Stop 69
ttctcctttagataagtcgtactcg

SEQ ID NO: 326832 - DNA, 25 bp, Artificial
  probe
  misc_feature (1)..(25): SEQ ID NO: 2472; WAN024GF2; Start 46; Stop 70
tctcctttagataagtcgtactcgg

SEQ ID NO: 326833 - DNA, 25 bp, Artificial
  probe
  misc_feature (1)..(25): SEQ ID NO: 2473; WAN024CGH; Start 161; Stop 185
aagttatgctgttgttagttcacgg

SEQ ID NO: 326834 - DNA, 25 bp, Artificial
  probe
  misc_feature (1)..(25): SEQ ID NO: 2473; WAN024CGH; Start 160; Stop 184
aaagttatgctgttgttagttcacg

SEQ ID NO: 326835 - DNA, 25 bp, Artificial
  probe
  misc_feature (1)..(25): SEQ ID NO: 2473; WAN024CGH; Start 159; Stop 183
gaaagttatgctgttgttagttcac

SEQ ID NO: 326836 - DNA, 25 bp, Artificial
  probe
  misc_feature (1)..(25): SEQ ID NO: 2473; WAN024CGH; Start 291; Stop 315
tttaatgccactctttgaagtatcg

SEQ ID NO: 326837 - DNA, 25 bp, Artificial
  probe
  misc_feature (1)..(25): SEQ ID NO: 2473; WAN024CGH; Start 153; Stop 177
gcctttgaaagttatgctgttgtta

SEQ ID NO: 326838 - DNA, 25 bp, Artificial
  probe
  misc_feature (1)..(25): SEQ ID NO: 2473; WAN024CGH; Start 292; Stop 316
ttaatgccactctttgaagtatcgg

SEQ ID NO: 326839 - DNA, 25 bp, Artificial
  probe
  misc_feature (1)..(25): SEQ ID NO: 2473; WAN024CGH; Start 154; Stop 178
cctttgaaagttatgctgttgttag

SEQ ID NO: 326840 - DNA, 25 bp, Artificial
  probe
  misc_feature (1)..(25): SEQ ID NO: 2473; WAN024CGH; Start 157; Stop 181
ttgaaagttatgctgttgttagttc

SEQ ID NO: 326841 - DNA, 25 bp, Artificial
  probe
  misc_feature (1)..(25): SEQ ID NO: 2473; WAN024CGH; Start 194; Stop 218
agcagtatgaacatgggtattcttt

SEQ ID NO: 326842 - DNA, 25 bp, Artificial
  probe
  misc_feature (1)..(25): SEQ ID NO: 2473; WAN024CGH; Start 156; Stop 180
tttgaaagttatgctgttgttagtt

SEQ ID NO: 326843 - DNA, 25 bp, Artificial
  probe
  misc_feature (1)..(25): SEQ ID NO: 2473; WAN024CGH; Start 193; Stop 217
cagcagtatgaacatgggtattctt

SEQ ID NO: 326844 - DNA, 25 bp, Artificial
  probe
  misc_feature (1)..(25): SEQ ID NO: 2473; WAN024CGH; Start 155; Stop 179
ctttgaaagttatgctgttgttagt

SEQ ID NO: 326845 - DNA, 25 bp, Artificial
  probe
  misc_feature (1)..(25): SEQ ID NO: 2473; WAN024CGH; Start 162; Stop 186
agttatgctgttgttagttcacggc

SEQ ID NO: 326846 - DNA, 25 bp, Artificial
  probe
  misc_feature (1)..(25): SEQ ID NO: 2473; WAN024CGH; Start 147; Stop 171
tttaccgcctttgaaagttatgctg

SEQ ID NO: 326847 - DNA, 25 bp, Artificial
  probe
  misc_feature (1)..(25): SEQ ID NO: 2473; WAN024CGH; Start 218; Stop 242
ttgaggatgtctatgatttatacga

SEQ ID NO: 326848 - DNA, 25 bp, Artificial
  probe
  misc_feature (1)..(25): SEQ ID NO: 2473; WAN024CGH; Start 293; Stop 317
taatgccactctttgaagtatcggg

SEQ ID NO: 326849 - DNA, 25 bp, Artificial
  probe
  misc_feature (1)..(25): SEQ ID NO: 2473; WAN024CGH; Start 221; Stop 245
aggatgtctatgatttatacgatga

SEQ ID NO: 326850 - DNA, 25 bp, Artificial
  probe
  misc_feature (1)..(25): SEQ ID NO: 2473; WAN024CGH; Start 219; Stop 243
tgaggatgtctatgatttatacgat

SEQ ID NO: 326851 - DNA, 25 bp, Artificial
  probe
  misc_feature (1)..(25): SEQ ID NO: 2473; WAN024CGH; Start 40; Stop 64
aaagagttgaagctacgtttgacat

SEQ ID NO: 326852 - DNA, 25 bp, Artificial
  probe
  misc_feature (1)..(25): SEQ ID NO: 2473; WAN024CGH; Start 236; Stop 260
tatacgatgaatacgtggacaatgg

SEQ ID NO: 326853 - DNA, 25 bp, Artificial
  probe
  misc_feature (1)..(25): SEQ ID NO: 2473; WAN024CGH; Start 41; Stop 65
aagagttgaagctacgtttgacatc

SEQ ID NO: 326854 - DNA, 25 bp, Artificial
  probe
  misc_feature (1)..(25): SEQ ID NO: 2473; WAN024CGH; Start 220; Stop 244
gaggatgtctatgatttatacgatg

SEQ ID NO: 326855 - DNA, 25 bp, Artificial
  probe
  misc_feature (1)..(25): SEQ ID NO: 2473; WAN024CGH; Start 235; Stop 259
ttatacgatgaatacgtggacaatg

SEQ ID NO: 326856 - DNA, 25 bp, Artificial
  probe
  misc_feature (1)..(25): SEQ ID NO: 2473; WAN024CGH; Start 241; Stop 265
gatgaatacgtggacaatggtggag

SEQ ID NO: 326857 - DNA, 25 bp, Artificial
  probe
  misc_feature (1)..(25): SEQ ID NO: 2473; WAN024CGH; Start 46; Stop 70
ttgaagctacgtttgacatctcatc

SEQ ID NO: 326858 - DNA, 25 bp, Artificial
  probe
  misc_feature (1)..(25): SEQ ID NO: 2473; WAN024CGH; Start 152; Stop 176
cgcctttgaaagttatgctgttgtt

SEQ ID NO: 326859 - DNA, 25 bp, Artificial
  probe
  misc_feature (1)..(25): SEQ ID NO: 2473; WAN024CGH; Start 217; Stop 241
tttgaggatgtctatgatttatacg

SEQ ID NO: 326860 - DNA, 25 bp, Artificial
  probe
  misc_feature (1)..(25): SEQ ID NO: 2473; WAN024CGH; Start 207; Stop 231
tgggtattcttttgaggatgtctat

SEQ ID NO: 326861 - DNA, 25 bp, Artificial
  probe
  misc_feature (1)..(25): SEQ ID NO: 2473; WAN024CGH; Start 206; Stop 230
atgggtattcttttgaggatgtcta

SEQ ID NO: 326862 - DNA, 25 bp, Artificial
  probe
  misc_feature (1)..(25): SEQ ID NO: 2473; WAN024CGH; Start 208; Stop 232
gggtattcttttgaggatgtctatg

SEQ ID NO: 326863 - DNA, 25 bp, Artificial
  probe
  misc_feature (1)..(25): SEQ ID NO: 2473; WAN024CGH; Start 45; Stop 69
gttgaagctacgtttgacatctcat

SEQ ID NO: 326864 - DNA, 25 bp, Artificial
  probe
  misc_feature (1)..(25): SEQ ID NO: 2473; WAN024CGH; Start 4; Stop 28
gcgttaaaatacacaacttggaaag

SEQ ID NO: 326865 - DNA, 25 bp, Artificial
  probe
  misc_feature (1)..(25): SEQ ID NO: 2473; WAN024CGH; Start 192; Stop 216
gcagcagtatgaacatgggtattct

SEQ ID NO: 326866 - DNA, 25 bp, Artificial
  probe
  misc_feature (1)..(25): SEQ ID NO: 2474; WAN024FAO; Start 9; Stop 33
ggaagaagagatagacaatggtgat

SEQ ID NO: 326867 - DNA, 25 bp, Artificial
  probe
  misc_feature (1)..(25): SEQ ID NO: 2474; WAN024FAO; Start 21; Stop 45
agacaatggtgatactgataatgcc

SEQ ID NO: 326868 - DNA, 25 bp, Artificial
  probe
  misc_feature (1)..(25): SEQ ID NO: 2474; WAN024FAO; Start 8; Stop 32
tggaagaagagatagacaatggtga

SEQ ID NO: 326869 - DNA, 25 bp, Artificial
  probe
  misc_feature (1)..(25): SEQ ID NO: 2474; WAN024FAO; Start 14; Stop 38
aagagatagacaatggtgatactga

SEQ ID NO: 326870 - DNA, 25 bp, Artificial
  probe
  misc_feature (1)..(25): SEQ ID NO: 2474; WAN024FAO; Start 7; Stop 31
ttggaagaagagatagacaatggtg

SEQ ID NO: 326871 - DNA, 25 bp, Artificial
  probe
  misc_feature (1)..(25): SEQ ID NO: 2474; WAN024FAO; Start 6; Stop 30
gttggaagaagagatagacaatggt

SEQ ID NO: 326872 - DNA, 25 bp, Artificial
  probe
  misc_feature (1)..(25): SEQ ID NO: 2474; WAN024FAO; Start 13; Stop 37
gaagagatagacaatggtgatactg

SEQ ID NO: 326873 - DNA, 25 bp, Artificial
  probe
  misc_feature (1)..(25): SEQ ID NO: 2474; WAN024FAO; Start 20; Stop 44
tagacaatggtgatactgataatgc

SEQ ID NO: 326874 - DNA, 25 bp, Artificial
  probe
  misc_feature (1)..(25): SEQ ID NO: 2474; WAN024FAO; Start 15; Stop 39
agagatagacaatggtgatactgat

SEQ ID NO: 326875 - DNA, 25 bp, Artificial
  probe
  misc_feature (1)..(25): SEQ ID NO: 2474; WAN024FAO; Start 12; Stop 36
agaagagatagacaatggtgatact

SEQ ID NO: 326876 - DNA, 25 bp, Artificial
  probe
  misc_feature (1)..(25): SEQ ID NO: 2474; WAN024FAO; Start 354; Stop 378
cataggtcaagtagagcaagatcaa

SEQ ID NO: 326877 - DNA, 25 bp, Artificial
  probe
  misc_feature (1)..(25): SEQ ID NO: 2474; WAN024FAO; Start 5; Stop 29
cgttggaagaagagatagacaatgg

SEQ ID NO: 326878 - DNA, 25 bp, Artificial
  probe
  misc_feature (1)..(25): SEQ ID NO: 2474; WAN024FAO; Start 24; Stop 48
caatggtgatactgataatgccgac

SEQ ID NO: 326879 - DNA, 25 bp, Artificial
  probe
  misc_feature (1)..(25): SEQ ID NO: 2474; WAN024FAO; Start 22; Stop 46
gacaatggtgatactgataatgccg

SEQ ID NO: 326880 - DNA, 25 bp, Artificial
  probe
  misc_feature (1)..(25): SEQ ID NO: 2474; WAN024FAO; Start 444; Stop 468
aaggtacgaagattccgaggattaa

SEQ ID NO: 326881 - DNA, 25 bp, Artificial
  probe
  misc_feature (1)..(25): SEQ ID NO: 2474; WAN024FAO; Start 23; Stop 47
acaatggtgatactgataatgccga

SEQ ID NO: 326882 - DNA, 25 bp, Artificial
  probe
  misc_feature (1)..(25): SEQ ID NO: 2474; WAN024FAO; Start 11; Stop 35
aagaagagatagacaatggtgatac

SEQ ID NO: 326883 - DNA, 25 bp, Artificial
  probe
  misc_feature (1)..(25): SEQ ID NO: 2474; WAN024FAO; Start 4; Stop 28
gcgttggaagaagagatagacaatg

SEQ ID NO: 326884 - DNA, 25 bp, Artificial
  probe
  misc_feature (1)..(25): SEQ ID NO: 2474; WAN024FAO; Start 10; Stop 34
gaagaagagatagacaatggtgata

SEQ ID NO: 326885 - DNA, 25 bp, Artificial
  probe
  misc_feature (1)..(25): SEQ ID NO: 2474; WAN024FAO; Start 353; Stop 377
gcataggtcaagtagagcaagatca

SEQ ID NO: 326886 - DNA, 25 bp, Artificial
  probe
  misc_feature (1)..(25): SEQ ID NO: 2474; WAN024FAO; Start 160; Stop 184
caacatgaagtcattccagaaccaa

SEQ ID NO: 326887 - DNA, 25 bp, Artificial
  probe
  misc_feature (1)..(25): SEQ ID NO: 2474; WAN024FAO; Start 349; Stop 373
aatcgcataggtcaagtagagcaag

SEQ ID NO: 326888 - DNA, 25 bp, Artificial
  probe
  misc_feature (1)..(25): SEQ ID NO: 2474; WAN024FAO; Start 348; Stop 372
gaatcgcataggtcaagtagagcaa

SEQ ID NO: 326889 - DNA, 25 bp, Artificial
  probe
  misc_feature (1)..(25): SEQ ID NO: 2474; WAN024FAO; Start 345; Stop 369
gtggaatcgcataggtcaagtagag

SEQ ID NO: 326890 - DNA, 25 bp, Artificial
  probe
  misc_feature (1)..(25): SEQ ID NO: 2474; WAN024FAO; Start 16; Stop 40
gagatagacaatggtgatactgata

SEQ ID NO: 326891 - DNA, 25 bp, Artificial
  probe
  misc_feature (1)..(25): SEQ ID NO: 2474; WAN024FAO; Start 235; Stop 259
gatgatgcggaaataggttgtaaat

SEQ ID NO: 326892 - DNA, 25 bp, Artificial
  probe
  misc_feature (1)..(25): SEQ ID NO: 2474; WAN024FAO; Start 318; Stop 342
tatagccaacatagagaaagagggt

SEQ ID NO: 326893 - DNA, 25 bp, Artificial
  probe
  misc_feature (1)..(25): SEQ ID NO: 2474; WAN024FAO; Start 234; Stop 258
agatgatgcggaaataggttgtaaa

SEQ ID NO: 326894 - DNA, 25 bp, Artificial
  probe
  misc_feature (1)..(25): SEQ ID NO: 2474; WAN024FAO; Start 233; Stop 257
aagatgatgcggaaataggttgtaa

SEQ ID NO: 326895 - DNA, 25 bp, Artificial
  probe
  misc_feature (1)..(25): SEQ ID NO: 2474; WAN024FAO; Start 317; Stop 341
atatagccaacatagagaaagaggg

SEQ ID NO: 326896 - DNA, 25 bp, Artificial
  probe
  misc_feature (1)..(25): SEQ ID NO: 2474; WAN024FAO; Start 3; Stop 27
ggcgttggaagaagagatagacaat

SEQ ID NO: 326897 - DNA, 25 bp, Artificial
  probe
  misc_feature (1)..(25): SEQ ID NO: 2474; WAN024FAO; Start 238; Stop 262
gatgcggaaataggttgtaaattga

SEQ ID NO: 326898 - DNA, 25 bp, Artificial
  probe
  misc_feature (1)..(25): SEQ ID NO: 2474; WAN024FAO; Start 237; Stop 261
tgatgcggaaataggttgtaaattg

SEQ ID NO: 326899 - DNA, 25 bp, Artificial
  probe
  misc_feature (1)..(25): SEQ ID NO: 2475; WAN024GG5; Start 339; Stop 363
agttatcgctacacctgatatgatg

SEQ ID NO: 326900 - DNA, 25 bp, Artificial
  probe
  misc_feature (1)..(25): SEQ ID NO: 2475; WAN024GG5; Start 340; Stop 364
gttatcgctacacctgatatgatgg

SEQ ID NO: 326901 - DNA, 25 bp, Artificial
  probe
  misc_feature (1)..(25): SEQ ID NO: 2475; WAN024GG5; Start 636; Stop 660
gactatcacaactactcaaggtgtt

SEQ ID NO: 326902 - DNA, 25 bp, Artificial
  probe
  misc_feature (1)..(25): SEQ ID NO: 2475; WAN024GG5; Start 338; Stop 362
tagttatcgctacacctgatatgat

SEQ ID NO: 326903 - DNA, 25 bp, Artificial
  probe
  misc_feature (1)..(25): SEQ ID NO: 2475; WAN024GG5; Start 348; Stop 372
tacacctgatatgatggctcttgtt

SEQ ID NO: 326904 - DNA, 25 bp, Artificial
  probe
  misc_feature (1)..(25): SEQ ID NO: 2475; WAN024GG5; Start 635; Stop 659
tgactatcacaactactcaaggtgt

SEQ ID NO: 326905 - DNA, 25 bp, Artificial
  probe
  misc_feature (1)..(25): SEQ ID NO: 2475; WAN024GG5; Start 347; Stop 371
ctacacctgatatgatggctcttgt

SEQ ID NO: 326906 - DNA, 25 bp, Artificial
  probe
  misc_feature (1)..(25): SEQ ID NO: 2475; WAN024GG5; Start 513; Stop 537
tcaagcaatcatcggtaaagtatca

SEQ ID NO: 326907 - DNA, 25 bp, Artificial
  probe
  misc_feature (1)..(25): SEQ ID NO: 2475; WAN024GG5; Start 511; Stop 535
gttcaagcaatcatcggtaaagtat

SEQ ID NO: 326908 - DNA, 25 bp, Artificial
  probe
  misc_feature (1)..(25): SEQ ID NO: 2475; WAN024GG5; Start 514; Stop 538
caagcaatcatcggtaaagtatcat

SEQ ID NO: 326909 - DNA, 25 bp, Artificial
  probe
  misc_feature (1)..(25): SEQ ID NO: 2475; WAN024GG5; Start 512; Stop 536
ttcaagcaatcatcggtaaagtatc

SEQ ID NO: 326910 - DNA, 25 bp, Artificial
  probe
  misc_feature (1)..(25): SEQ ID NO: 2475; WAN024GG5; Start 341; Stop 365
ttatcgctacacctgatatgatggc

SEQ ID NO: 326911 - DNA, 25 bp, Artificial
  probe
  misc_feature (1)..(25): SEQ ID NO: 2475; WAN024GG5; Start 515; Stop 539
aagcaatcatcggtaaagtatcatt

SEQ ID NO: 326912 - DNA, 25 bp, Artificial
  probe
  misc_feature (1)..(25): SEQ ID NO: 2475; WAN024GG5; Start 516; Stop 540
agcaatcatcggtaaagtatcattt

SEQ ID NO: 326913 - DNA, 25 bp, Artificial
  probe
  misc_feature (1)..(25): SEQ ID NO: 2475; WAN024GG5; Start 346; Stop 370
gctacacctgatatgatggctcttg

SEQ ID NO: 326914 - DNA, 25 bp, Artificial
  probe
  misc_feature (1)..(25): SEQ ID NO: 2475; WAN024GG5; Start 645; Stop 669
aactactcaaggtgttggtatcaaa

SEQ ID NO: 326915 - DNA, 25 bp, Artificial
  probe
  misc_feature (1)..(25): SEQ ID NO: 2475; WAN024GG5; Start 646; Stop 670
actactcaaggtgttggtatcaaag

SEQ ID NO: 326916 - DNA, 25 bp, Artificial
  probe
  misc_feature (1)..(25): SEQ ID NO: 2475; WAN024GG5; Start 648; Stop 672
tactcaaggtgttggtatcaaagtt

SEQ ID NO: 326917 - DNA, 25 bp, Artificial
  probe
  misc_feature (1)..(25): SEQ ID NO: 2475; WAN024GG5; Start 647; Stop 671
ctactcaaggtgttggtatcaaagt

SEQ ID NO: 326918 - DNA, 25 bp, Artificial
  probe
  misc_feature (1)..(25): SEQ ID NO: 2475; WAN024GG5; Start 624; Stop 648
cgtaacaaacttgactatcacaact

SEQ ID NO: 326919 - DNA, 25 bp, Artificial
  probe
  misc_feature (1)..(25): SEQ ID NO: 2475; WAN024GG5; Start 337; Stop 361
gtagttatcgctacacctgatatga

SEQ ID NO: 326920 - DNA, 25 bp, Artificial
  probe
  misc_feature (1)..(25): SEQ ID NO: 2475; WAN024GG5; Start 521; Stop 545
tcatcggtaaagtatcatttgaagc

SEQ ID NO: 326921 - DNA, 25 bp, Artificial
  probe
  misc_feature (1)..(25): SEQ ID NO: 2475; WAN024GG5; Start 352; Stop 376
cctgatatgatggctcttgttggac

SEQ ID NO: 326922 - DNA, 25 bp, Artificial
  probe
  misc_feature (1)..(25): SEQ ID NO: 2475; WAN024GG5; Start 336; Stop 360
cgtagttatcgctacacctgatatg

SEQ ID NO: 326923 - DNA, 25 bp, Artificial
  probe
  misc_feature (1)..(25): SEQ ID NO: 2475; WAN024GG5; Start 510; Stop 534
cgttcaagcaatcatcggtaaagta

SEQ ID NO: 326924 - DNA, 25 bp, Artificial
  probe
  misc_feature (1)..(25): SEQ ID NO: 2475; WAN024GG5; Start 517; Stop 541
gcaatcatcggtaaagtatcatttg

SEQ ID NO: 326925 - DNA, 25 bp, Artificial
  probe
  misc_feature (1)..(25): SEQ ID NO: 2475; WAN024GG5; Start 349; Stop 373
acacctgatatgatggctcttgttg

SEQ ID NO: 326926 - DNA, 25 bp, Artificial
  probe
  misc_feature (1)..(25): SEQ ID NO: 2475; WAN024GG5; Start 629; Stop 653
caaacttgactatcacaactactca

SEQ ID NO: 326927 - DNA, 25 bp, Artificial
  probe
  misc_feature (1)..(25): SEQ ID NO: 2475; WAN024GG5; Start 628; Stop 652
acaaacttgactatcacaactactc

SEQ ID NO: 326928 - DNA, 25 bp, Artificial
  probe
  misc_feature (1)..(25): SEQ ID NO: 2475; WAN024GG5; Start 350; Stop 374
cacctgatatgatggctcttgttgg

SEQ ID NO: 326929 - DNA, 25 bp, Artificial
  probe
  misc_feature (1)..(25): SEQ ID NO: 2475; WAN024GG5; Start 649; Stop 673
actcaaggtgttggtatcaaagttg

SEQ ID NO: 326930 - DNA, 25 bp, Artificial
  probe
  misc_feature (1)..(25): SEQ ID NO: 2475; WAN024GG5; Start 353; Stop 377
ctgatatgatggctcttgttggacg

SEQ ID NO: 326931 - DNA, 25 bp, Artificial
  probe
  misc_feature (1)..(25): SEQ ID NO: 2475; WAN024GG5; Start 351; Stop 375
acctgatatgatggctcttgttgga

SEQ ID NO: 326932 - DNA, 25 bp, Artificial
  probe
  misc_feature (1)..(25): SEQ ID NO: 2476; WAN024GG7; Start 156; Stop 180
gatcattccagttgttatctcagtt

SEQ ID NO: 326933 - DNA, 25 bp, Artificial
  probe
  misc_feature (1)..(25): SEQ ID NO: 2476; WAN024GG7; Start 162; Stop 186
tccagttgttatctcagtttacgaa

SEQ ID NO: 326934 - DNA, 25 bp, Artificial
  probe
  misc_feature (1)..(25): SEQ ID NO: 2476; WAN024GG7; Start 161; Stop 185
ttccagttgttatctcagtttacga

SEQ ID NO: 326935 - DNA, 25 bp, Artificial
  probe
  misc_feature (1)..(25): SEQ ID NO: 2476; WAN024GG7; Start 163; Stop 187
ccagttgttatctcagtttacgaag

SEQ ID NO: 326936 - DNA, 25 bp, Artificial
  probe
  misc_feature (1)..(25): SEQ ID NO: 2476; WAN024GG7; Start 327; Stop 351
agaaactaagatgccagatttgaac

SEQ ID NO: 326937 - DNA, 25 bp, Artificial
  probe
  misc_feature (1)..(25): SEQ ID NO: 2476; WAN024GG7; Start 326; Stop 350
cagaaactaagatgccagatttgaa

SEQ ID NO: 326938 - DNA, 25 bp, Artificial
  probe
  misc_feature (1)..(25): SEQ ID NO: 2476; WAN024GG7; Start 328; Stop 352
gaaactaagatgccagatttgaacg

SEQ ID NO: 326939 - DNA, 25 bp, Artificial
  probe
  misc_feature (1)..(25): SEQ ID NO: 2476; WAN024GG7; Start 160; Stop 184
attccagttgttatctcagtttacg

SEQ ID NO: 326940 - DNA, 25 bp, Artificial
  probe
  misc_feature (1)..(25): SEQ ID NO: 2476; WAN024GG7; Start 164; Stop 188
cagttgttatctcagtttacgaaga

SEQ ID NO: 326941 - DNA, 25 bp, Artificial
  probe
  misc_feature (1)..(25): SEQ ID NO: 2476; WAN024GG7; Start 157; Stop 181
atcattccagttgttatctcagttt

SEQ ID NO: 326942 - DNA, 25 bp, Artificial
  probe
  misc_feature (1)..(25): SEQ ID NO: 2476; WAN024GG7; Start 283; Stop 307
actaaagttgctacagttactcgtg

SEQ ID NO: 326943 - DNA, 25 bp, Artificial
  probe
  misc_feature (1)..(25): SEQ ID NO: 2476; WAN024GG7; Start 95; Stop 119
gtatcaacatcatgggattcacaaa

SEQ ID NO: 326944 - DNA, 25 bp, Artificial
  probe
  misc_feature (1)..(25): SEQ ID NO: 2476; WAN024GG7; Start 159; Stop 183
cattccagttgttatctcagtttac

SEQ ID NO: 326945 - DNA, 25 bp, Artificial
  probe
  misc_feature (1)..(25): SEQ ID NO: 2476; WAN024GG7; Start 158; Stop 182
tcattccagttgttatctcagttta

SEQ ID NO: 326946 - DNA, 25 bp, Artificial
  probe
  misc_feature (1)..(25): SEQ ID NO: 2476; WAN024GG7; Start 94; Stop 118
ggtatcaacatcatgggattcacaa

SEQ ID NO: 326947 - DNA, 25 bp, Artificial
  probe
  misc_feature (1)..(25): SEQ ID NO: 2476; WAN024GG7; Start 83; Stop 107
ttggtcaagctggtatcaacatcat

SEQ ID NO: 326948 - DNA, 25 bp, Artificial
  probe
  misc_feature (1)..(25): SEQ ID NO: 2476; WAN024GG7; Start 329; Stop 353
aaactaagatgccagatttgaacgc

SEQ ID NO: 326949 - DNA, 25 bp, Artificial
  probe
  misc_feature (1)..(25): SEQ ID NO: 2476; WAN024GG7; Start 284; Stop 308
ctaaagttgctacagttactcgtgc

SEQ ID NO: 326950 - DNA, 25 bp, Artificial
  probe
  misc_feature (1)..(25): SEQ ID NO: 2476; WAN024GG7; Start 92; Stop 116
ctggtatcaacatcatgggattcac

SEQ ID NO: 326951 - DNA, 25 bp, Artificial
  probe
  misc_feature (1)..(25): SEQ ID NO: 2476; WAN024GG7; Start 84; Stop 108
tggtcaagctggtatcaacatcatg

SEQ ID NO: 326952 - DNA, 25 bp, Artificial
  probe
  misc_feature (1)..(25): SEQ ID NO: 2476; WAN024GG7; Start 81; Stop 105
tcttggtcaagctggtatcaacatc

SEQ ID NO: 326953 - DNA, 25 bp, Artificial
  probe
  misc_feature (1)..(25): SEQ ID NO: 2476; WAN024GG7; Start 80; Stop 104
ctcttggtcaagctggtatcaacat

SEQ ID NO: 326954 - DNA, 25 bp, Artificial
  probe
  misc_feature (1)..(25): SEQ ID NO: 2476; WAN024GG7; Start 93; Stop 117
tggtatcaacatcatgggattcaca

SEQ ID NO: 326955 - DNA, 25 bp, Artificial
  probe
  misc_feature (1)..(25): SEQ ID NO: 2476; WAN024GG7; Start 82; Stop 106
cttggtcaagctggtatcaacatca

SEQ ID NO: 326956 - DNA, 25 bp, Artificial
  probe
  misc_feature (1)..(25): SEQ ID NO: 2476; WAN024GG7; Start 155; Stop 179
tgatcattccagttgttatctcagt

SEQ ID NO: 326957 - DNA, 25 bp, Artificial
  probe
  misc_feature (1)..(25): SEQ ID NO: 2476; WAN024GG7; Start 89; Stop 113
aagctggtatcaacatcatgggatt

SEQ ID NO: 326958 - DNA, 25 bp, Artificial
  probe
  misc_feature (1)..(25): SEQ ID NO: 2476; WAN024GG7; Start 85; Stop 109
ggtcaagctggtatcaacatcatgg

SEQ ID NO: 326959 - DNA, 25 bp, Artificial
  probe
  misc_feature (1)..(25): SEQ ID NO: 2476; WAN024GG7; Start 315; Stop 339
acaagaaattgcagaaactaagatg

SEQ ID NO: 326960 - DNA, 25 bp, Artificial
  probe
  misc_feature (1)..(25): SEQ ID NO: 2476; WAN024GG7; Start 91; Stop 115
gctggtatcaacatcatgggattca

SEQ ID NO: 326961 - DNA, 25 bp, Artificial
  probe
  misc_feature (1)..(25): SEQ ID NO: 2476; WAN024GG7; Start 282; Stop 306
aactaaagttgctacagttactcgt

SEQ ID NO: 326962 - DNA, 25 bp, Artificial
  probe
  misc_feature (1)..(25): SEQ ID NO: 2476; WAN024GG7; Start 361; Stop 385
gtagagtctgcaatgcgtatgatcg

SEQ ID NO: 326963 - DNA, 25 bp, Artificial
  probe
  misc_feature (1)..(25): SEQ ID NO: 2476; WAN024GG7; Start 360; Stop 384
cgtagagtctgcaatgcgtatgatc

SEQ ID NO: 326964 - DNA, 25 bp, Artificial
  probe
  misc_feature (1)..(25): SEQ ID NO: 2476; WAN024GG7; Start 90; Stop 114
agctggtatcaacatcatgggattc

SEQ ID NO: 326965 - DNA, 25 bp, Artificial
  probe
  misc_feature (1)..(25): SEQ ID NO: 2477; WAN024DRG; Start 104; Stop 128
gtttatctaaattacctcgcaacgc

SEQ ID NO: 326966 - DNA, 25 bp, Artificial
  probe
  misc_feature (1)..(25): SEQ ID NO: 2477; WAN024DRG; Start 92; Stop 116
gggactacgaaggtttatctaaatt

SEQ ID NO: 326967 - DNA, 25 bp, Artificial
  probe
  misc_feature (1)..(25): SEQ ID NO: 2477; WAN024DRG; Start 231; Stop 255
taaaggtcaaattcctggtgtaaca

SEQ ID NO: 326968 - DNA, 25 bp, Artificial
  probe
  misc_feature (1)..(25): SEQ ID NO: 2477; WAN024DRG; Start 230; Stop 254
ataaaggtcaaattcctggtgtaac

SEQ ID NO: 326969 - DNA, 25 bp, Artificial
  probe
  misc_feature (1)..(25): SEQ ID NO: 2477; WAN024DRG; Start 229; Stop 253
cataaaggtcaaattcctggtgtaa

SEQ ID NO: 326970 - DNA, 25 bp, Artificial
  probe
  misc_feature (1)..(25): SEQ ID NO: 2477; WAN024DRG; Start 233; Stop 257
aaggtcaaattcctggtgtaacaaa

SEQ ID NO: 326971 - DNA, 25 bp, Artificial
  probe
  misc_feature (1)..(25): SEQ ID NO: 2477; WAN024DRG; Start 232; Stop 256
aaaggtcaaattcctggtgtaacaa

SEQ ID NO: 326972 - DNA, 25 bp, Artificial
  probe
  misc_feature (1)..(25): SEQ ID NO: 2477; WAN024DRG; Start 228; Stop 252
gcataaaggtcaaattcctggtgta

SEQ ID NO: 326973 - DNA, 25 bp, Artificial
  probe
  misc_feature (1)..(25): SEQ ID NO: 2477; WAN024DRG; Start 103; Stop 127
ggtttatctaaattacctcgcaacg

SEQ ID NO: 326974 - DNA, 25 bp, Artificial
  probe
  misc_feature (1)..(25): SEQ ID NO: 2477; WAN024DRG; Start 191; Stop 215
aatttggtctgagtcgtatcgcttt

SEQ ID NO: 326975 - DNA, 25 bp, Artificial
  probe
  misc_feature (1)..(25): SEQ ID NO: 2477; WAN024DRG; Start 134; Stop 158
cgactcgtttacataatcgttgtag

SEQ ID NO: 326976 - DNA, 25 bp, Artificial
  probe
  misc_feature (1)..(25): SEQ ID NO: 2477; WAN024DRG; Start 133; Stop 157
ccgactcgtttacataatcgttgta

SEQ ID NO: 326977 - DNA, 25 bp, Artificial
  probe
  misc_feature (1)..(25): SEQ ID NO: 2477; WAN024DRG; Start 91; Stop 115
ggggactacgaaggtttatctaaat

SEQ ID NO: 326978 - DNA, 25 bp, Artificial
  probe
  misc_feature (1)..(25): SEQ ID NO: 2477; WAN024DRG; Start 90; Stop 114
aggggactacgaaggtttatctaaa

SEQ ID NO: 326979 - DNA, 25 bp, Artificial
  probe
  misc_feature (1)..(25): SEQ ID NO: 2477; WAN024DRG; Start 44; Stop 68
aaattgttgaccgttatgctgaaaa

SEQ ID NO: 326980 - DNA, 25 bp, Artificial
  probe
  misc_feature (1)..(25): SEQ ID NO: 2477; WAN024DRG; Start 43; Stop 67
aaaattgttgaccgttatgctgaaa

SEQ ID NO: 326981 - DNA, 25 bp, Artificial
  probe
  misc_feature (1)..(25): SEQ ID NO: 2477; WAN024DRG; Start 239; Stop 263
aaattcctggtgtaacaaaagcatc

SEQ ID NO: 326982 - DNA, 25 bp, Artificial
  probe
  misc_feature (1)..(25): SEQ ID NO: 2477; WAN024DRG; Start 238; Stop 262
caaattcctggtgtaacaaaagcat

SEQ ID NO: 326983 - DNA, 25 bp, Artificial
  probe
  misc_feature (1)..(25): SEQ ID NO: 2477; WAN024DRG; Start 235; Stop 259
ggtcaaattcctggtgtaacaaaag

SEQ ID NO: 326984 - DNA, 25 bp, Artificial
  probe
  misc_feature (1)..(25): SEQ ID NO: 2477; WAN024DRG; Start 89; Stop 113
caggggactacgaaggtttatctaa

SEQ ID NO: 326985 - DNA, 25 bp, Artificial
  probe
  misc_feature (1)..(25): SEQ ID NO: 2477; WAN024DRG; Start 240; Stop 264
aattcctggtgtaacaaaagcatct

SEQ ID NO: 326986 - DNA, 25 bp, Artificial
  probe
  misc_feature (1)..(25): SEQ ID NO: 2477; WAN024DRG; Start 236; Stop 260
gtcaaattcctggtgtaacaaaagc

SEQ ID NO: 326987 - DNA, 25 bp, Artificial
  probe
  misc_feature (1)..(25): SEQ ID NO: 2477; WAN024DRG; Start 241; Stop 265
attcctggtgtaacaaaagcatctt

SEQ ID NO: 326988 - DNA, 25 bp, Artificial
  probe
  misc_feature (1)..(25): SEQ ID NO: 2477; WAN024DRG; Start 237; Stop 261
tcaaattcctggtgtaacaaaagca

SEQ ID NO: 326989 - DNA, 25 bp, Artificial
  probe
  misc_feature (1)..(25): SEQ ID NO: 2477; WAN024DRG; Start 246; Stop 270
tggtgtaacaaaagcatcttggtaa

SEQ ID NO: 326990 - DNA, 25 bp, Artificial
  probe
  misc_feature (1)..(25): SEQ ID NO: 2477; WAN024DRG; Start 171; Stop 195
cccacattcagtttaccgcaaattt

SEQ ID NO: 326991 - DNA, 25 bp, Artificial
  probe
  misc_feature (1)..(25): SEQ ID NO: 2477; WAN024DRG; Start 245; Stop 269
ctggtgtaacaaaagcatcttggta

SEQ ID NO: 326992 - DNA, 25 bp, Artificial
  probe
  misc_feature (1)..(25): SEQ ID NO: 2477; WAN024DRG; Start 190; Stop 214
aaatttggtctgagtcgtatcgctt

SEQ ID NO: 326993 - DNA, 25 bp, Artificial
  probe
  misc_feature (1)..(25): SEQ ID NO: 2477; WAN024DRG; Start 93; Stop 117
ggactacgaaggtttatctaaatta

SEQ ID NO: 326994 - DNA, 25 bp, Artificial
  probe
  misc_feature (1)..(25): SEQ ID NO: 2477; WAN024DRG; Start 131; Stop 155
caccgactcgtttacataatcgttg

SEQ ID NO: 326995 - DNA, 25 bp, Artificial
  probe
  misc_feature (1)..(25): SEQ ID NO: 2477; WAN024DRG; Start 130; Stop 154
tcaccgactcgtttacataatcgtt

SEQ ID NO: 326996 - DNA, 25 bp, Artificial
  probe
  misc_feature (1)..(25): SEQ ID NO: 2477; WAN024DRG; Start 242; Stop 266
ttcctggtgtaacaaaagcatcttg

SEQ ID NO: 326997 - DNA, 25 bp, Artificial
  probe
  misc_feature (1)..(25): SEQ ID NO: 2477; WAN024DRG; Start 132; Stop 156
accgactcgtttacataatcgttgt

SEQ ID NO: 326998 - DNA, 25 bp, Artificial
  probe
  misc_feature (1)..(25): SEQ ID NO: 2478; WAN024DRD; Start 1; Stop 25
atggctaaacaaggacaaatagtgt

SEQ ID NO: 326999 - DNA, 25 bp, Artificial
  probe
  misc_feature (1)..(25): SEQ ID NO: 2478; WAN024DRD; Start 4; Stop 28
gctaaacaaggacaaatagtgtcaa

SEQ ID NO: 327000 - DNA, 25 bp, Artificial
  probe
  misc_feature (1)..(25): SEQ ID NO: 2478; WAN024DRD; Start 3; Stop 27
ggctaaacaaggacaaatagtgtca

SEQ ID NO: 327001 - DNA, 25 bp, Artificial
  probe
  misc_feature (1)..(25): SEQ ID NO: 2478; WAN024DRD; Start 2; Stop 26
tggctaaacaaggacaaatagtgtc

SEQ ID NO: 327002 - DNA, 25 bp, Artificial
  probe
  misc_feature (1)..(25): SEQ ID NO: 2478; WAN024DRD; Start 5; Stop 29
ctaaacaaggacaaatagtgtcaaa

SEQ ID NO: 327003 - DNA, 25 bp, Artificial
  probe
  misc_feature (1)..(25): SEQ ID NO: 2478; WAN024DRD; Start 6; Stop 30
taaacaaggacaaatagtgtcaaaa

SEQ ID NO: 327004 - DNA, 25 bp, Artificial
  probe
  misc_feature (1)..(25): SEQ ID NO: 2478; WAN024DRD; Start 50; Stop 74
gtcgtgagcttggggtcttttctag

SEQ ID NO: 327005 - DNA, 25 bp, Artificial
  probe
  misc_feature (1)..(25): SEQ ID NO: 2478; WAN024DRD; Start 54; Stop 78
tgagcttggggtcttttctagccta

SEQ ID NO: 327006 - DNA, 25 bp, Artificial
  probe
  misc_feature (1)..(25): SEQ ID NO: 2479; WAN024DGJ; Start 6; Stop 30
taaaggattcgctaaaggtcttgta

SEQ ID NO: 327007 - DNA, 25 bp, Artificial
  probe
  misc_feature (1)..(25): SEQ ID NO: 2479; WAN024DGJ; Start 7; Stop 31
aaaggattcgctaaaggtcttgtaa

SEQ ID NO: 327008 - DNA, 25 bp, Artificial
  probe
  misc_feature (1)..(25): SEQ ID NO: 2479; WAN024DGJ; Start 5; Stop 29
ctaaaggattcgctaaaggtcttgt

SEQ ID NO: 327009 - DNA, 25 bp, Artificial
  probe
  misc_feature (1)..(25): SEQ ID NO: 2479; WAN024DGJ; Start 8; Stop 32
aaggattcgctaaaggtcttgtaac

SEQ ID NO: 327010 - DNA, 25 bp, Artificial
  probe
  misc_feature (1)..(25): SEQ ID NO: 2479; WAN024DGJ; Start 11; Stop 35
gattcgctaaaggtcttgtaacagg

SEQ ID NO: 327011 - DNA, 25 bp, Artificial
  probe
  misc_feature (1)..(25): SEQ ID NO: 2479; WAN024DGJ; Start 10; Stop 34
ggattcgctaaaggtcttgtaacag

SEQ ID NO: 327012 - DNA, 25 bp, Artificial
  probe
  misc_feature (1)..(25): SEQ ID NO: 2479; WAN024DGJ; Start 9; Stop 33
aggattcgctaaaggtcttgtaaca

SEQ ID NO: 327013 - DNA, 25 bp, Artificial
  probe
  misc_feature (1)..(25): SEQ ID NO: 2479; WAN024DGJ; Start 4; Stop 28
gctaaaggattcgctaaaggtcttg

SEQ ID NO: 327014 - DNA, 25 bp, Artificial
  probe
  misc_feature (1)..(25): SEQ ID NO: 2479; WAN024DGJ; Start 12; Stop 36
attcgctaaaggtcttgtaacaggt

SEQ ID NO: 327015 - DNA, 25 bp, Artificial
  probe
  misc_feature (1)..(25): SEQ ID NO: 2479; WAN024DGJ; Start 88; Stop 112
aaagtaatcgaaccagaagagcaaa

SEQ ID NO: 327016 - DNA, 25 bp, Artificial
  probe
  misc_feature (1)..(25): SEQ ID NO: 2479; WAN024DGJ; Start 84; Stop 108
aaagaaagtaatcgaaccagaagag

SEQ ID NO: 327017 - DNA, 25 bp, Artificial
  probe
  misc_feature (1)..(25): SEQ ID NO: 2479; WAN024DGJ; Start 85; Stop 109
aagaaagtaatcgaaccagaagagc

SEQ ID NO: 327018 - DNA, 25 bp, Artificial
  probe
  misc_feature (1)..(25): SEQ ID NO: 2479; WAN024DGJ; Start 87; Stop 111
gaaagtaatcgaaccagaagagcaa

SEQ ID NO: 327019 - DNA, 25 bp, Artificial
  probe
  misc_feature (1)..(25): SEQ ID NO: 2479; WAN024DGJ; Start 1; Stop 25
atggctaaaggattcgctaaaggtc

SEQ ID NO: 327020 - DNA, 25 bp, Artificial
  probe
  misc_feature (1)..(25): SEQ ID NO: 2479; WAN024DGJ; Start 3; Stop 27
ggctaaaggattcgctaaaggtctt

SEQ ID NO: 327021 - DNA, 25 bp, Artificial
  probe
  misc_feature (1)..(25): SEQ ID NO: 2479; WAN024DGJ; Start 13; Stop 37
ttcgctaaaggtcttgtaacaggtg

SEQ ID NO: 327022 - DNA, 25 bp, Artificial
  probe
  misc_feature (1)..(25): SEQ ID NO: 2479; WAN024DGJ; Start 86; Stop 110
agaaagtaatcgaaccagaagagca

SEQ ID NO: 327023 - DNA, 25 bp, Artificial
  probe
  misc_feature (1)..(25): SEQ ID NO: 2479; WAN024DGJ; Start 17; Stop 41
ctaaaggtcttgtaacaggtgtcgc

SEQ ID NO: 327024 - DNA, 25 bp, Artificial
  probe
  misc_feature (1)..(25): SEQ ID NO: 2479; WAN024DGJ; Start 16; Stop 40
gctaaaggtcttgtaacaggtgtcg

SEQ ID NO: 327025 - DNA, 25 bp, Artificial
  probe
  misc_feature (1)..(25): SEQ ID NO: 2479; WAN024DGJ; Start 15; Stop 39
cgctaaaggtcttgtaacaggtgtc

SEQ ID NO: 327026 - DNA, 25 bp, Artificial
  probe
  misc_feature (1)..(25): SEQ ID NO: 2479; WAN024DGJ; Start 2; Stop 26
tggctaaaggattcgctaaaggtct

SEQ ID NO: 327027 - DNA, 25 bp, Artificial
  probe
  misc_feature (1)..(25): SEQ ID NO: 2479; WAN024DGJ; Start 14; Stop 38
tcgctaaaggtcttgtaacaggtgt

SEQ ID NO: 327028 - DNA, 25 bp, Artificial
  probe
  misc_feature (1)..(25): SEQ ID NO: 2479; WAN024DGJ; Start 18; Stop 42
taaaggtcttgtaacaggtgtcgca

SEQ ID NO: 327029 - DNA, 25 bp, Artificial
  probe
  misc_feature (1)..(25): SEQ ID NO: 2479; WAN024DGJ; Start 89; Stop 113
aagtaatcgaaccagaagagcaaaa

SEQ ID NO: 327030 - DNA, 25 bp, Artificial
  probe
  misc_feature (1)..(25): SEQ ID NO: 2479; WAN024DGJ; Start 83; Stop 107
aaaagaaagtaatcgaaccagaaga

SEQ ID NO: 327031 - DNA, 25 bp, Artificial
  probe
  misc_feature (1)..(25): SEQ ID NO: 2479; WAN024DGJ; Start 118; Stop 142
gctttcatcgaagaaaaccgtaaaa

SEQ ID NO: 327032 - DNA, 25 bp, Artificial
  probe
  misc_feature (1)..(25): SEQ ID NO: 2479; WAN024DGJ; Start 117; Stop 141
agctttcatcgaagaaaaccgtaaa

SEQ ID NO: 327033 - DNA, 25 bp, Artificial
  probe
  misc_feature (1)..(25): SEQ ID NO: 2479; WAN024DGJ; Start 116; Stop 140
cagctttcatcgaagaaaaccgtaa

SEQ ID NO: 327034 - DNA, 25 bp, Artificial
  probe
  misc_feature (1)..(25): SEQ ID NO: 2479; WAN024DGJ; Start 60; Stop 84
tgcaggtgcagtatacgcatttaaa

SEQ ID NO: 327035 - DNA, 25 bp, Artificial
  probe
  misc_feature (1)..(25): SEQ ID NO: 2479; WAN024DGJ; Start 59; Stop 83
ttgcaggtgcagtatacgcatttaa

SEQ ID NO: 327036 - DNA, 25 bp, Artificial
  probe
  misc_feature (1)..(25): SEQ ID NO: 2479; WAN024DGJ; Start 111; Stop 135
aaaagcagctttcatcgaagaaaac

SEQ ID NO: 327037 - DNA, 25 bp, Artificial
  probe
  misc_feature (1)..(25): SEQ ID NO: 2479; WAN024DGJ; Start 58; Stop 82
gttgcaggtgcagtatacgcattta

SEQ ID NO: 327038 - DNA, 25 bp, Artificial
  probe
  misc_feature (1)..(25): SEQ ID NO: 2479; WAN024DGJ; Start 61; Stop 85
gcaggtgcagtatacgcatttaaaa

SEQ ID NO: 327039 - DNA, 25 bp, Artificial
  probe
  misc_feature (1)..(25): SEQ ID NO: 2480; WAN024GN9; Start 37; Stop 61
ggtatgagtacaagtctgctagtga

SEQ ID NO: 327040 - DNA, 25 bp, Artificial
  probe
  misc_feature (1)..(25): SEQ ID NO: 2480; WAN024GN9; Start 36; Stop 60
aggtatgagtacaagtctgctagtg

SEQ ID NO: 327041 - DNA, 25 bp, Artificial
  probe
  misc_feature (1)..(25): SEQ ID NO: 2480; WAN024GN9; Start 38; Stop 62
gtatgagtacaagtctgctagtgac

SEQ ID NO: 327042 - DNA, 25 bp, Artificial
  probe
  misc_feature (1)..(25): SEQ ID NO: 2480; WAN024GN9; Start 39; Stop 63
tatgagtacaagtctgctagtgaca

SEQ ID NO: 327043 - DNA, 25 bp, Artificial
  probe
  misc_feature (1)..(25): SEQ ID NO: 2480; WAN024GN9; Start 35; Stop 59
caggtatgagtacaagtctgctagt

SEQ ID NO: 327044 - DNA, 25 bp, Artificial
  probe
  misc_feature (1)..(25): SEQ ID NO: 2480; WAN024GN9; Start 40; Stop 64
atgagtacaagtctgctagtgacaa

SEQ ID NO: 327045 - DNA, 25 bp, Artificial
  probe
  misc_feature (1)..(25): SEQ ID NO: 2480; WAN024GN9; Start 125; Stop 149
ctgaagcagaagaaattgtagcaac

SEQ ID NO: 327046 - DNA, 25 bp, Artificial
  probe
  misc_feature (1)..(25): SEQ ID NO: 2480; WAN024GN9; Start 45; Stop 69
tacaagtctgctagtgacaaagatg

SEQ ID NO: 327047 - DNA, 25 bp, Artificial
  probe
  misc_feature (1)..(25): SEQ ID NO: 2480; WAN024GN9; Start 126; Stop 150
tgaagcagaagaaattgtagcaaca

SEQ ID NO: 327048 - DNA, 25 bp, Artificial
  probe
  misc_feature (1)..(25): SEQ ID NO: 2480; WAN024GN9; Start 44; Stop 68
gtacaagtctgctagtgacaaagat

SEQ ID NO: 327049 - DNA, 25 bp, Artificial
  probe
  misc_feature (1)..(25): SEQ ID NO: 2480; WAN024GN9; Start 124; Stop 148
cctgaagcagaagaaattgtagcaa

SEQ ID NO: 327050 - DNA, 25 bp, Artificial
  probe
  misc_feature (1)..(25): SEQ ID NO: 2480; WAN024GN9; Start 42; Stop 66
gagtacaagtctgctagtgacaaag

SEQ ID NO: 327051 - DNA, 25 bp, Artificial
  probe
  misc_feature (1)..(25): SEQ ID NO: 2480; WAN024GN9; Start 17; Stop 41
ttatgttagcatgtgcagcaggtat

SEQ ID NO: 327052 - DNA, 25 bp, Artificial
  probe
  misc_feature (1)..(25): SEQ ID NO: 2480; WAN024GN9; Start 16; Stop 40
attatgttagcatgtgcagcaggta

SEQ ID NO: 327053 - DNA, 25 bp, Artificial
  probe
  misc_feature (1)..(25): SEQ ID NO: 2480; WAN024GN9; Start 122; Stop 146
ctcctgaagcagaagaaattgtagc

SEQ ID NO: 327054 - DNA, 25 bp, Artificial
  probe
  misc_feature (1)..(25): SEQ ID NO: 2480; WAN024GN9; Start 43; Stop 67
agtacaagtctgctagtgacaaaga

SEQ ID NO: 327055 - DNA, 25 bp, Artificial
  probe
  misc_feature (1)..(25): SEQ ID NO: 2480; WAN024GN9; Start 13; Stop 37
acaattatgttagcatgtgcagcag

SEQ ID NO: 327056 - DNA, 25 bp, Artificial
  probe
  misc_feature (1)..(25): SEQ ID NO: 2480; WAN024GN9; Start 41; Stop 65
tgagtacaagtctgctagtgacaaa

SEQ ID NO: 327057 - DNA, 25 bp, Artificial
  probe
  misc_feature (1)..(25): SEQ ID NO: 2480; WAN024GN9; Start 14; Stop 38
caattatgttagcatgtgcagcagg

SEQ ID NO: 327058 - DNA, 25 bp, Artificial
  probe
  misc_feature (1)..(25): SEQ ID NO: 2480; WAN024GN9; Start 123; Stop 147
tcctgaagcagaagaaattgtagca

SEQ ID NO: 327059 - DNA, 25 bp, Artificial
  probe
  misc_feature (1)..(25): SEQ ID NO: 2480; WAN024GN9; Start 18; Stop 42
tatgttagcatgtgcagcaggtatg

SEQ ID NO: 327060 - DNA, 25 bp, Artificial
  probe
  misc_feature (1)..(25): SEQ ID NO: 2480; WAN024GN9; Start 15; Stop 39
aattatgttagcatgtgcagcaggt

SEQ ID NO: 327061 - DNA, 25 bp, Artificial
  probe
  misc_feature (1)..(25): SEQ ID NO: 2480; WAN024GN9; Start 188; Stop 212
gctatttactaggggactttcaaga

SEQ ID NO: 327062 - DNA, 25 bp, Artificial
  probe
  misc_feature (1)..(25): SEQ ID NO: 2480; WAN024GN9; Start 187; Stop 211
cgctatttactaggggactttcaag

SEQ ID NO: 327063 - DNA, 25 bp, Artificial
  probe
  misc_feature (1)..(25): SEQ ID NO: 2480; WAN024GN9; Start 184; Stop 208
gttcgctatttactaggggactttc

SEQ ID NO: 327064 - DNA, 25 bp, Artificial
  probe
  misc_feature (1)..(25): SEQ ID NO: 2480; WAN024GN9; Start 121; Stop 145
gctcctgaagcagaagaaattgtag

SEQ ID NO: 327065 - DNA, 25 bp, Artificial
  probe
  misc_feature (1)..(25): SEQ ID NO: 2480; WAN024GN9; Start 186; Stop 210
tcgctatttactaggggactttcaa

SEQ ID NO: 327066 - DNA, 25 bp, Artificial
  probe
  misc_feature (1)..(25): SEQ ID NO: 2480; WAN024GN9; Start 185; Stop 209
ttcgctatttactaggggactttca

SEQ ID NO: 327067 - DNA, 25 bp, Artificial
  probe
  misc_feature (1)..(25): SEQ ID NO: 2480; WAN024GN9; Start 22; Stop 46
ttagcatgtgcagcaggtatgagta

SEQ ID NO: 327068 - DNA, 25 bp, Artificial
  probe
  misc_feature (1)..(25): SEQ ID NO: 2480; WAN024GN9; Start 46; Stop 70
acaagtctgctagtgacaaagatgc

SEQ ID NO: 327069 - DNA, 25 bp, Artificial
  probe
  misc_feature (1)..(25): SEQ ID NO: 2480; WAN024GN9; Start 128; Stop 152
aagcagaagaaattgtagcaacaaa

SEQ ID NO: 327070 - DNA, 25 bp, Artificial
  probe
  misc_feature (1)..(25): SEQ ID NO: 2480; WAN024GN9; Start 26; Stop 50
catgtgcagcaggtatgagtacaag

SEQ ID NO: 327071 - DNA, 25 bp, Artificial
  probe
  misc_feature (1)..(25): SEQ ID NO: 2480; WAN024GN9; Start 127; Stop 151
gaagcagaagaaattgtagcaacaa

SEQ ID NO: 327072 - DNA, 25 bp, Artificial
  probe
  misc_feature (1)..(25): SEQ ID NO: 2481; WAN024DIL; Start 159; Stop 183
tttgaaatcaggtaaagttgaacgc

SEQ ID NO: 327073 - DNA, 25 bp, Artificial
  probe
  misc_feature (1)..(25): SEQ ID NO: 2481; WAN024DIL; Start 27; Stop 51
tcgtaagactgtatcaggaaacaac

SEQ ID NO: 327074 - DNA, 25 bp, Artificial
  probe
  misc_feature (1)..(25): SEQ ID NO: 2481; WAN024DIL; Start 26; Stop 50
gtcgtaagactgtatcaggaaacaa

SEQ ID NO: 327075 - DNA, 25 bp, Artificial
  probe
  misc_feature (1)..(25): SEQ ID NO: 2481; WAN024DIL; Start 13; Stop 37
tgttactttacaggtcgtaagactg

SEQ ID NO: 327076 - DNA, 25 bp, Artificial
  probe
  misc_feature (1)..(25): SEQ ID NO: 2481; WAN024DIL; Start 29; Stop 53
gtaagactgtatcaggaaacaaccg

SEQ ID NO: 327077 - DNA, 25 bp, Artificial
  probe
  misc_feature (1)..(25): SEQ ID NO: 2481; WAN024DIL; Start 28; Stop 52
cgtaagactgtatcaggaaacaacc

SEQ ID NO: 327078 - DNA, 25 bp, Artificial
  probe
  misc_feature (1)..(25): SEQ ID NO: 2481; WAN024DIL; Start 12; Stop 36
atgttactttacaggtcgtaagact

SEQ ID NO: 327079 - DNA, 25 bp, Artificial
  probe
  misc_feature (1)..(25): SEQ ID NO: 2481; WAN024DIL; Start 30; Stop 54
taagactgtatcaggaaacaaccgt

SEQ ID NO: 327080 - DNA, 25 bp, Artificial
  probe
  misc_feature (1)..(25): SEQ ID NO: 2481; WAN024DIL; Start 24; Stop 48
aggtcgtaagactgtatcaggaaac

SEQ ID NO: 327081 - DNA, 25 bp, Artificial
  probe
  misc_feature (1)..(25): SEQ ID NO: 2481; WAN024DIL; Start 23; Stop 47
caggtcgtaagactgtatcaggaaa

SEQ ID NO: 327082 - DNA, 25 bp, Artificial
  probe
  misc_feature (1)..(25): SEQ ID NO: 2481; WAN024DIL; Start 25; Stop 49
ggtcgtaagactgtatcaggaaaca

SEQ ID NO: 327083 - DNA, 25 bp, Artificial
  probe
  misc_feature (1)..(25): SEQ ID NO: 2481; WAN024DIL; Start 155; Stop 179
gtgctttgaaatcaggtaaagttga

SEQ ID NO: 327084 - DNA, 25 bp, Artificial
  probe
  misc_feature (1)..(25): SEQ ID NO: 2481; WAN024DIL; Start 156; Stop 180
tgctttgaaatcaggtaaagttgaa

SEQ ID NO: 327085 - DNA, 25 bp, Artificial
  probe
  misc_feature (1)..(25): SEQ ID NO: 2481; WAN024DIL; Start 11; Stop 35
tatgttactttacaggtcgtaagac

SEQ ID NO: 327086 - DNA, 25 bp, Artificial
  probe
  misc_feature (1)..(25): SEQ ID NO: 2481; WAN024DIL; Start 10; Stop 34
gtatgttactttacaggtcgtaaga

SEQ ID NO: 327087 - DNA, 25 bp, Artificial
  probe
  misc_feature (1)..(25): SEQ ID NO: 2481; WAN024DIL; Start 157; Stop 181
gctttgaaatcaggtaaagttgaac

SEQ ID NO: 327088 - DNA, 25 bp, Artificial
  probe
  misc_feature (1)..(25): SEQ ID NO: 2481; WAN024DIL; Start 158; Stop 182
ctttgaaatcaggtaaagttgaacg

SEQ ID NO: 327089 - DNA, 25 bp, Artificial
  probe
  misc_feature (1)..(25): SEQ ID NO: 2481; WAN024DIL; Start 31; Stop 55
aagactgtatcaggaaacaaccgtt

SEQ ID NO: 327090 - DNA, 25 bp, Artificial
  probe
  misc_feature (1)..(25): SEQ ID NO: 2481; WAN024DIL; Start 9; Stop 33
agtatgttactttacaggtcgtaag

SEQ ID NO: 327091 - DNA, 25 bp, Artificial
  probe
  misc_feature (1)..(25): SEQ ID NO: 2481; WAN024DIL; Start 154; Stop 178
cgtgctttgaaatcaggtaaagttg

SEQ ID NO: 327092 - DNA, 25 bp, Artificial
  probe
  misc_feature (1)..(25): SEQ ID NO: 2481; WAN024DIL; Start 153; Stop 177
tcgtgctttgaaatcaggtaaagtt

SEQ ID NO: 327093 - DNA, 25 bp, Artificial
  probe
  misc_feature (1)..(25): SEQ ID NO: 2481; WAN024DIL; Start 32; Stop 56
agactgtatcaggaaacaaccgttc

SEQ ID NO: 327094 - DNA, 25 bp, Artificial
  probe
  misc_feature (1)..(25): SEQ ID NO: 2481; WAN024DIL; Start 152; Stop 176
ctcgtgctttgaaatcaggtaaagt

SEQ ID NO: 327095 - DNA, 25 bp, Artificial
  probe
  misc_feature (1)..(25): SEQ ID NO: 2481; WAN024DIL; Start 33; Stop 57
gactgtatcaggaaacaaccgttca

SEQ ID NO: 327096 - DNA, 25 bp, Artificial
  probe
  misc_feature (1)..(25): SEQ ID NO: 2481; WAN024DIL; Start 35; Stop 59
ctgtatcaggaaacaaccgttcaca

SEQ ID NO: 327097 - DNA, 25 bp, Artificial
  probe
  misc_feature (1)..(25): SEQ ID NO: 2481; WAN024DIL; Start 34; Stop 58
actgtatcaggaaacaaccgttcac

SEQ ID NO: 327098 - DNA, 25 bp, Artificial
  probe
  misc_feature (1)..(25): SEQ ID NO: 2481; WAN024DIL; Start 36; Stop 60
tgtatcaggaaacaaccgttcacac

SEQ ID NO: 327099 - DNA, 25 bp, Artificial
  probe
  misc_feature (1)..(25): SEQ ID NO: 2481; WAN024DIL; Start 151; Stop 175
gctcgtgctttgaaatcaggtaaag

SEQ ID NO: 327100 - DNA, 25 bp, Artificial
  probe
  misc_feature (1)..(25): SEQ ID NO: 2481; WAN024DIL; Start 109; Stop 133
actgttcttatcgatggtaaaccta

SEQ ID NO: 327101 - DNA, 25 bp, Artificial
  probe
  misc_feature (1)..(25): SEQ ID NO: 2481; WAN024DIL; Start 108; Stop 132
tactgttcttatcgatggtaaacct

SEQ ID NO: 327102 - DNA, 25 bp, Artificial
  probe
  misc_feature (1)..(25): SEQ ID NO: 2481; WAN024DIL; Start 104; Stop 128
aagttactgttcttatcgatggtaa

SEQ ID NO: 327103 - DNA, 25 bp, Artificial
  probe
  misc_feature (1)..(25): SEQ ID NO: 2481; WAN024DIL; Start 110; Stop 134
ctgttcttatcgatggtaaacctaa

SEQ ID NO: 327104 - DNA, 25 bp, Artificial
  probe
  misc_feature (1)..(25): SEQ ID NO: 2481; WAN024DIL; Start 80; Stop 104
gtgccgtaaaaccaaaccttcaaaa

SEQ ID NO: 327105 - DNA, 25 bp, Artificial
  probe
  misc_feature (1)..(25): SEQ ID NO: 2482; WAN024D7L; Start 28; Stop 52
attcgtccaaacattgaagaagaag

SEQ ID NO: 327106 - DNA, 25 bp, Artificial
  probe
  misc_feature (1)..(25): SEQ ID NO: 2482; WAN024D7L; Start 27; Stop 51
cattcgtccaaacattgaagaagaa

SEQ ID NO: 327107 - DNA, 25 bp, Artificial
  probe
  misc_feature (1)..(25): SEQ ID NO: 2482; WAN024D7L; Start 25; Stop 49
atcattcgtccaaacattgaagaag

SEQ ID NO: 327108 - DNA, 25 bp, Artificial
  probe
  misc_feature (1)..(25): SEQ ID NO: 2482; WAN024D7L; Start 26; Stop 50
tcattcgtccaaacattgaagaaga

SEQ ID NO: 327109 - DNA, 25 bp, Artificial
  probe
  misc_feature (1)..(25): SEQ ID NO: 2482; WAN024D7L; Start 24; Stop 48
tatcattcgtccaaacattgaagaa

SEQ ID NO: 327110 - DNA, 25 bp, Artificial
  probe
  misc_feature (1)..(25): SEQ ID NO: 2482; WAN024D7L; Start 23; Stop 47
atatcattcgtccaaacattgaaga

SEQ ID NO: 327111 - DNA, 25 bp, Artificial
  probe
  misc_feature (1)..(25): SEQ ID NO: 2482; WAN024D7L; Start 254; Stop 278
acattcttcgtcacatgatcgtcaa

SEQ ID NO: 327112 - DNA, 25 bp, Artificial
  probe
  misc_feature (1)..(25): SEQ ID NO: 2482; WAN024D7L; Start 29; Stop 53
ttcgtccaaacattgaagaagaagc

SEQ ID NO: 327113 - DNA, 25 bp, Artificial
  probe
  misc_feature (1)..(25): SEQ ID NO: 2482; WAN024D7L; Start 32; Stop 56
gtccaaacattgaagaagaagctaa

SEQ ID NO: 327114 - DNA, 25 bp, Artificial
  probe
  misc_feature (1)..(25): SEQ ID NO: 2482; WAN024D7L; Start 33; Stop 57
tccaaacattgaagaagaagctaaa

SEQ ID NO: 327115 - DNA, 25 bp, Artificial
  probe
  misc_feature (1)..(25): SEQ ID NO: 2482; WAN024D7L; Start 22; Stop 46
tatatcattcgtccaaacattgaag

SEQ ID NO: 327116 - DNA, 25 bp, Artificial
  probe
  misc_feature (1)..(25): SEQ ID NO: 2482; WAN024D7L; Start 255; Stop 279
cattcttcgtcacatgatcgtcaaa

SEQ ID NO: 327117 - DNA, 25 bp, Artificial
  probe
  misc_feature (1)..(25): SEQ ID NO: 2482; WAN024D7L; Start 253; Stop 277
gacattcttcgtcacatgatcgtca

SEQ ID NO: 327118 - DNA, 25 bp, Artificial
  probe
  misc_feature (1)..(25): SEQ ID NO: 2482; WAN024D7L; Start 157; Stop 181
caagatttccgtgaaggactttacc

SEQ ID NO: 327119 - DNA, 25 bp, Artificial
  probe
  misc_feature (1)..(25): SEQ ID NO: 2482; WAN024D7L; Start 156; Stop 180
ccaagatttccgtgaaggactttac

SEQ ID NO: 327120 - DNA, 25 bp, Artificial
  probe
  misc_feature (1)..(25): SEQ ID NO: 2482; WAN024D7L; Start 31; Stop 55
cgtccaaacattgaagaagaagcta

SEQ ID NO: 327121 - DNA, 25 bp, Artificial
  probe
  misc_feature (1)..(25): SEQ ID NO: 2482; WAN024D7L; Start 155; Stop 179
tccaagatttccgtgaaggacttta

SEQ ID NO: 327122 - DNA, 25 bp, Artificial
  probe
  misc_feature (1)..(25): SEQ ID NO: 2482; WAN024D7L; Start 158; Stop 182
aagatttccgtgaaggactttacca

SEQ ID NO: 327123 - DNA, 25 bp, Artificial
  probe
  misc_feature (1)..(25): SEQ ID NO: 2482; WAN024D7L; Start 18; Stop 42
tctttatatcattcgtccaaacatt

SEQ ID NO: 327124 - DNA, 25 bp, Artificial
  probe
  misc_feature (1)..(25): SEQ ID NO: 2482; WAN024D7L; Start 17; Stop 41
ttctttatatcattcgtccaaacat

SEQ ID NO: 327125 - DNA, 25 bp, Artificial
  probe
  misc_feature (1)..(25): SEQ ID NO: 2482; WAN024D7L; Start 16; Stop 40
attctttatatcattcgtccaaaca

SEQ ID NO: 327126 - DNA, 25 bp, Artificial
  probe
  misc_feature (1)..(25): SEQ ID NO: 2482; WAN024D7L; Start 21; Stop 45
ttatatcattcgtccaaacattgaa

SEQ ID NO: 327127 - DNA, 25 bp, Artificial
  probe
  misc_feature (1)..(25): SEQ ID NO: 2482; WAN024D7L; Start 20; Stop 44
tttatatcattcgtccaaacattga

SEQ ID NO: 327128 - DNA, 25 bp, Artificial
  probe
  misc_feature (1)..(25): SEQ ID NO: 2482; WAN024D7L; Start 73; Stop 97
cgttttgactctattttgactgaca

SEQ ID NO: 327129 - DNA, 25 bp, Artificial
  probe
  misc_feature (1)..(25): SEQ ID NO: 2482; WAN024D7L; Start 19; Stop 43
ctttatatcattcgtccaaacattg

SEQ ID NO: 327130 - DNA, 25 bp, Artificial
  probe
  misc_feature (1)..(25): SEQ ID NO: 2482; WAN024D7L; Start 161; Stop 185
atttccgtgaaggactttaccacat

SEQ ID NO: 327131 - DNA, 25 bp, Artificial
  probe
  misc_feature (1)..(25): SEQ ID NO: 2482; WAN024D7L; Start 154; Stop 178
atccaagatttccgtgaaggacttt

SEQ ID NO: 327132 - DNA, 25 bp, Artificial
  probe
  misc_feature (1)..(25): SEQ ID NO: 2482; WAN024D7L; Start 200; Stop 224
caaatgacgatgcagctcttaaaga

SEQ ID NO: 327133 - DNA, 25 bp, Artificial
  probe
  misc_feature (1)..(25): SEQ ID NO: 2482; WAN024D7L; Start 153; Stop 177
aatccaagatttccgtgaaggactt

SEQ ID NO: 327134 - DNA, 25 bp, Artificial
  probe
  misc_feature (1)..(25): SEQ ID NO: 2482; WAN024D7L; Start 76; Stop 100
tttgactctattttgactgacaacg

SEQ ID NO: 327135 - DNA, 25 bp, Artificial
  probe
  misc_feature (1)..(25): SEQ ID NO: 2482; WAN024D7L; Start 159; Stop 183
agatttccgtgaaggactttaccac

SEQ ID NO: 327136 - DNA, 25 bp, Artificial
  probe
  misc_feature (1)..(25): SEQ ID NO: 2482; WAN024D7L; Start 162; Stop 186
tttccgtgaaggactttaccacatc

SEQ ID NO: 327137 - DNA, 25 bp, Artificial
  probe
  misc_feature (1)..(25): SEQ ID NO: 2482; WAN024D7L; Start 160; Stop 184
gatttccgtgaaggactttaccaca

SEQ ID NO: 327138 - DNA, 25 bp, Artificial
  probe
  misc_feature (1)..(25): SEQ ID NO: 2483; WAN024CRK-5; Start 397; Stop 421
catatcttgtggactctgagaatcg

SEQ ID NO: 327139 - DNA, 25 bp, Artificial
  probe
  misc_feature (1)..(25): SEQ ID NO: 2483; WAN024CRK-5; Start 393; Stop 417
caatcatatcttgtggactctgaga

SEQ ID NO: 327140 - DNA, 25 bp, Artificial
  probe
  misc_feature (1)..(25): SEQ ID NO: 2483; WAN024CRK-5; Start 396; Stop 420
tcatatcttgtggactctgagaatc

SEQ ID NO: 327141 - DNA, 25 bp, Artificial
  probe
  misc_feature (1)..(25): SEQ ID NO: 2483; WAN024CRK-5; Start 382; Stop 406
gaagcaggaaccaatcatatcttgt

SEQ ID NO: 327142 - DNA, 25 bp, Artificial
  probe
  misc_feature (1)..(25): SEQ ID NO: 2483; WAN024CRK-5; Start 394; Stop 418
aatcatatcttgtggactctgagaa

SEQ ID NO: 327143 - DNA, 25 bp, Artificial
  probe
  misc_feature (1)..(25): SEQ ID NO: 2483; WAN024CRK-5; Start 395; Stop 419
atcatatcttgtggactctgagaat

SEQ ID NO: 327144 - DNA, 25 bp, Artificial
  probe
  misc_feature (1)..(25): SEQ ID NO: 2483; WAN024CRK-5; Start 383; Stop 407
aagcaggaaccaatcatatcttgtg

SEQ ID NO: 327145 - DNA, 25 bp, Artificial
  probe
  misc_feature (1)..(25): SEQ ID NO: 2483; WAN024CRK-5; Start 398; Stop 422
atatcttgtggactctgagaatcgg

SEQ ID NO: 327146 - DNA, 25 bp, Artificial
  probe
  misc_feature (1)..(25): SEQ ID NO: 2483; WAN024CRK-5; Start 381; Stop 405
ggaagcaggaaccaatcatatcttg

SEQ ID NO: 327147 - DNA, 25 bp, Artificial
  probe
  misc_feature (1)..(25): SEQ ID NO: 2483; WAN024CRK-5; Start 389; Stop 413
gaaccaatcatatcttgtggactct

SEQ ID NO: 327148 - DNA, 25 bp, Artificial
  probe
  misc_feature (1)..(25): SEQ ID NO: 2483; WAN024CRK-5; Start 390; Stop 414
aaccaatcatatcttgtggactctg

SEQ ID NO: 327149 - DNA, 25 bp, Artificial
  probe
  misc_feature (1)..(25): SEQ ID NO: 2483; WAN024CRK-5; Start 392; Stop 416
ccaatcatatcttgtggactctgag

SEQ ID NO: 327150 - DNA, 25 bp, Artificial
  probe
  misc_feature (1)..(25): SEQ ID NO: 2483; WAN024CRK-5; Start 490; Stop 514
agaaagtcgtatatgattggcaaga

SEQ ID NO: 327151 - DNA, 25 bp, Artificial
  probe
  misc_feature (1)..(25): SEQ ID NO: 2483; WAN024CRK-5; Start 489; Stop 513
gagaaagtcgtatatgattggcaag

SEQ ID NO: 327152 - DNA, 25 bp, Artificial
  probe
  misc_feature (1)..(25): SEQ ID NO: 2483; WAN024CRK-5; Start 488; Stop 512
agagaaagtcgtatatgattggcaa

SEQ ID NO: 327153 - DNA, 25 bp, Artificial
  probe
  misc_feature (1)..(25): SEQ ID NO: 2483; WAN024CRK-5; Start 485; Stop 509
agcagagaaagtcgtatatgattgg

SEQ ID NO: 327154 - DNA, 25 bp, Artificial
  probe
  misc_feature (1)..(25): SEQ ID NO: 2483; WAN024CRK-5; Start 1135; Stop 1159
aatagacaggtatctagccgacaag

SEQ ID NO: 327155 - DNA, 25 bp, Artificial
  probe
  misc_feature (1)..(25): SEQ ID NO: 2483; WAN024CRK-5; Start 502; Stop 526
atgattggcaagatttatgaggagt

SEQ ID NO: 327156 - DNA, 25 bp, Artificial
  probe
  misc_feature (1)..(25): SEQ ID NO: 2483; WAN024CRK-5; Start 391; Stop 415
accaatcatatcttgtggactctga

SEQ ID NO: 327157 - DNA, 25 bp, Artificial
  probe
  misc_feature (1)..(25): SEQ ID NO: 2483; WAN024CRK-5; Start 388; Stop 412
ggaaccaatcatatcttgtggactc

SEQ ID NO: 327158 - DNA, 25 bp, Artificial
  probe
  misc_feature (1)..(25): SEQ ID NO: 2483; WAN024CRK-5; Start 484; Stop 508
gagcagagaaagtcgtatatgattg

SEQ ID NO: 327159 - DNA, 25 bp, Artificial
  probe
  misc_feature (1)..(25): SEQ ID NO: 2483; WAN024CRK-5; Start 487; Stop 511
cagagaaagtcgtatatgattggca

SEQ ID NO: 327160 - DNA, 25 bp, Artificial
  probe
  misc_feature (1)..(25): SEQ ID NO: 2483; WAN024CRK-5; Start 491; Stop 515
gaaagtcgtatatgattggcaagat

SEQ ID NO: 327161 - DNA, 25 bp, Artificial
  probe
  misc_feature (1)..(25): SEQ ID NO: 2483; WAN024CRK-5; Start 503; Stop 527
tgattggcaagatttatgaggagtc

SEQ ID NO: 327162 - DNA, 25 bp, Artificial
  probe
  misc_feature (1)..(25): SEQ ID NO: 2483; WAN024CRK-5; Start 387; Stop 411
aggaaccaatcatatcttgtggact

SEQ ID NO: 327163 - DNA, 25 bp, Artificial
  probe
  misc_feature (1)..(25): SEQ ID NO: 2483; WAN024CRK-5; Start 386; Stop 410
caggaaccaatcatatcttgtggac

SEQ ID NO: 327164 - DNA, 25 bp, Artificial
  probe
  misc_feature (1)..(25): SEQ ID NO: 2483; WAN024CRK-5; Start 1079; Stop 1103
actttgacagggaagaagataatcg

SEQ ID NO: 327165 - DNA, 25 bp, Artificial
  probe
  misc_feature (1)..(25): SEQ ID NO: 2483; WAN024CRK-5; Start 911; Stop 935
ttctcaaggaaattaaagcgttacc

SEQ ID NO: 327166 - DNA, 25 bp, Artificial
  probe
  misc_feature (1)..(25): SEQ ID NO: 2483; WAN024CRK-5; Start 908; Stop 932
gtcttctcaaggaaattaaagcgtt

SEQ ID NO: 327167 - DNA, 25 bp, Artificial
  probe
  misc_feature (1)..(25): SEQ ID NO: 2483; WAN024CRK-5; Start 904; Stop 928
atgcgtcttctcaaggaaattaaag

SEQ ID NO: 327168 - DNA, 25 bp, Artificial
  probe
  misc_feature (1)..(25): SEQ ID NO: 2483; WAN024CRK-5; Start 903; Stop 927
gatgcgtcttctcaaggaaattaaa

SEQ ID NO: 327169 - DNA, 25 bp, Artificial
  probe
  misc_feature (1)..(25): SEQ ID NO: 2483; WAN024CRK-5; Start 493; Stop 517
aagtcgtatatgattggcaagattt

SEQ ID NO: 327170 - DNA, 25 bp, Artificial
  probe
  misc_feature (1)..(25): SEQ ID NO: 2483; WAN024CRK-5; Start 492; Stop 516
aaagtcgtatatgattggcaagatt

SEQ ID NO: 327171 - DNA, 25 bp, Artificial
  probe
  misc_feature (1)..(25): SEQ ID NO: 2484; WAN024G92; Start 150; Stop 174
tcttaaccaaatcgcttcaattacg

SEQ ID NO: 327172 - DNA, 25 bp, Artificial
  probe
  misc_feature (1)..(25): SEQ ID NO: 2484; WAN024G92; Start 148; Stop 172
cctcttaaccaaatcgcttcaatta

SEQ ID NO: 327173 - DNA, 25 bp, Artificial
  probe
  misc_feature (1)..(25): SEQ ID NO: 2484; WAN024G92; Start 333; Stop 357
tgaccttgctaaagaagtgaagaag

SEQ ID NO: 327174 - DNA, 25 bp, Artificial
  probe
  misc_feature (1)..(25): SEQ ID NO: 2484; WAN024G92; Start 147; Stop 171
tcctcttaaccaaatcgcttcaatt

SEQ ID NO: 327175 - DNA, 25 bp, Artificial
  probe
  misc_feature (1)..(25): SEQ ID NO: 2484; WAN024G92; Start 146; Stop 170
ctcctcttaaccaaatcgcttcaat

SEQ ID NO: 327176 - DNA, 25 bp, Artificial
  probe
  misc_feature (1)..(25): SEQ ID NO: 2484; WAN024G92; Start 149; Stop 173
ctcttaaccaaatcgcttcaattac

SEQ ID NO: 327177 - DNA, 25 bp, Artificial
  probe
  misc_feature (1)..(25): SEQ ID NO: 2484; WAN024G92; Start 332; Stop 356
gtgaccttgctaaagaagtgaagaa

SEQ ID NO: 327178 - DNA, 25 bp, Artificial
  probe
  misc_feature (1)..(25): SEQ ID NO: 2484; WAN024G92; Start 143; Stop 167
aaactcctcttaaccaaatcgcttc

SEQ ID NO: 327179 - DNA, 25 bp, Artificial
  probe
  misc_feature (1)..(25): SEQ ID NO: 2484; WAN024G92; Start 142; Stop 166
gaaactcctcttaaccaaatcgctt

SEQ ID NO: 327180 - DNA, 25 bp, Artificial
  probe
  misc_feature (1)..(25): SEQ ID NO: 2484; WAN024G92; Start 199; Stop 223
gtaacaccatttgacaagtcttcat

SEQ ID NO: 327181 - DNA, 25 bp, Artificial
  probe
  misc_feature (1)..(25): SEQ ID NO: 2484; WAN024G92; Start 201; Stop 225
aacaccatttgacaagtcttcattg

SEQ ID NO: 327182 - DNA, 25 bp, Artificial
  probe
  misc_feature (1)..(25): SEQ ID NO: 2484; WAN024G92; Start 200; Stop 224
taacaccatttgacaagtcttcatt

SEQ ID NO: 327183 - DNA, 25 bp, Artificial
  probe
  misc_feature (1)..(25): SEQ ID NO: 2484; WAN024G92; Start 275; Stop 299
ctaatgacggttctgtgattcgctt

SEQ ID NO: 327184 - DNA, 25 bp, Artificial
  probe
  misc_feature (1)..(25): SEQ ID NO: 2484; WAN024G92; Start 202; Stop 226
acaccatttgacaagtcttcattga

SEQ ID NO: 327185 - DNA, 25 bp, Artificial
  probe
  misc_feature (1)..(25): SEQ ID NO: 2484; WAN024G92; Start 203; Stop 227
caccatttgacaagtcttcattgaa

SEQ ID NO: 327186 - DNA, 25 bp, Artificial
  probe
  misc_feature (1)..(25): SEQ ID NO: 2484; WAN024G92; Start 337; Stop 361
cttgctaaagaagtgaagaaggtcg

SEQ ID NO: 327187 - DNA, 25 bp, Artificial
  probe
  misc_feature (1)..(25): SEQ ID NO: 2484; WAN024G92; Start 204; Stop 228
accatttgacaagtcttcattgaaa

SEQ ID NO: 327188 - DNA, 25 bp, Artificial
  probe
  misc_feature (1)..(25): SEQ ID NO: 2484; WAN024G92; Start 205; Stop 229
ccatttgacaagtcttcattgaaag

SEQ ID NO: 327189 - DNA, 25 bp, Artificial
  probe
  misc_feature (1)..(25): SEQ ID NO: 2484; WAN024G92; Start 276; Stop 300
taatgacggttctgtgattcgcttg

SEQ ID NO: 327190 - DNA, 25 bp, Artificial
  probe
  misc_feature (1)..(25): SEQ ID NO: 2484; WAN024G92; Start 145; Stop 169
actcctcttaaccaaatcgcttcaa

SEQ ID NO: 327191 - DNA, 25 bp, Artificial
  probe
  misc_feature (1)..(25): SEQ ID NO: 2484; WAN024G92; Start 144; Stop 168
aactcctcttaaccaaatcgcttca

SEQ ID NO: 327192 - DNA, 25 bp, Artificial
  probe
  misc_feature (1)..(25): SEQ ID NO: 2484; WAN024G92; Start 283; Stop 307
ggttctgtgattcgcttggttatcc

SEQ ID NO: 327193 - DNA, 25 bp, Artificial
  probe
  misc_feature (1)..(25): SEQ ID NO: 2484; WAN024G92; Start 338; Stop 362
ttgctaaagaagtgaagaaggtcgg

SEQ ID NO: 327194 - DNA, 25 bp, Artificial
  probe
  misc_feature (1)..(25): SEQ ID NO: 2484; WAN024G92; Start 138; Stop 162
agtcgaaactcctcttaaccaaatc

SEQ ID NO: 327195 - DNA, 25 bp, Artificial
  probe
  misc_feature (1)..(25): SEQ ID NO: 2484; WAN024G92; Start 198; Stop 222
ggtaacaccatttgacaagtcttca

SEQ ID NO: 327196 - DNA, 25 bp, Artificial
  probe
  misc_feature (1)..(25): SEQ ID NO: 2484; WAN024G92; Start 123; Stop 147
tgtagaatactatggagtcgaaact

SEQ ID NO: 327197 - DNA, 25 bp, Artificial
  probe
  misc_feature (1)..(25): SEQ ID NO: 2484; WAN024G92; Start 331; Stop 355
cgtgaccttgctaaagaagtgaaga

SEQ ID NO: 327198 - DNA, 25 bp, Artificial
  probe
  misc_feature (1)..(25): SEQ ID NO: 2484; WAN024G92; Start 330; Stop 354
tcgtgaccttgctaaagaagtgaag

SEQ ID NO: 327199 - DNA, 25 bp, Artificial
  probe
  misc_feature (1)..(25): SEQ ID NO: 2484; WAN024G92; Start 282; Stop 306
cggttctgtgattcgcttggttatc

SEQ ID NO: 327200 - DNA, 25 bp, Artificial
  probe
  misc_feature (1)..(25): SEQ ID NO: 2484; WAN024G92; Start 151; Stop 175
cttaaccaaatcgcttcaattacga

SEQ ID NO: 327201 - DNA, 25 bp, Artificial
  probe
  misc_feature (1)..(25): SEQ ID NO: 2484; WAN024G92; Start 329; Stop 353
gtcgtgaccttgctaaagaagtgaa

SEQ ID NO: 327202 - DNA, 25 bp, Artificial
  probe
  misc_feature (1)..(25): SEQ ID NO: 2484; WAN024G92; Start 122; Stop 146
atgtagaatactatggagtcgaaac

SEQ ID NO: 327203 - DNA, 25 bp, Artificial
  probe
  misc_feature (1)..(25): SEQ ID NO: 2484; WAN024G92; Start 121; Stop 145
catgtagaatactatggagtcgaaa

SEQ ID NO: 327204 - DNA, 25 bp, Artificial
  probe
  misc_feature (1)..(25): SEQ ID NO: 2485; WAN024G34; Start 287; Stop 311
ttaccgatgtcatgctacagaatag

SEQ ID NO: 327205 - DNA, 25 bp, Artificial
  probe
  misc_feature (1)..(25): SEQ ID NO: 2485; WAN024G34; Start 288; Stop 312
taccgatgtcatgctacagaatagt

SEQ ID NO: 327206 - DNA, 25 bp, Artificial
  probe
  misc_feature (1)..(25): SEQ ID NO: 2485; WAN024G34; Start 766; Stop 790
gagattaaagaagcagtagagaggg

SEQ ID NO: 327207 - DNA, 25 bp, Artificial
  probe
  misc_feature (1)..(25): SEQ ID NO: 2485; WAN024G34; Start 297; Stop 321
catgctacagaatagtgccaagttg

SEQ ID NO: 327208 - DNA, 25 bp, Artificial
  probe
  misc_feature (1)..(25): SEQ ID NO: 2485; WAN024G34; Start 296; Stop 320
tcatgctacagaatagtgccaagtt

SEQ ID NO: 327209 - DNA, 25 bp, Artificial
  probe
  misc_feature (1)..(25): SEQ ID NO: 2485; WAN024G34; Start 765; Stop 789
tgagattaaagaagcagtagagagg

SEQ ID NO: 327210 - DNA, 25 bp, Artificial
  probe
  misc_feature (1)..(25): SEQ ID NO: 2485; WAN024G34; Start 447; Stop 471
ctttgccagtattgatgtgagtttc

SEQ ID NO: 327211 - DNA, 25 bp, Artificial
  probe
  misc_feature (1)..(25): SEQ ID NO: 2485; WAN024G34; Start 614; Stop 638
agaatgtccttgaatctgtaacagc

SEQ ID NO: 327212 - DNA, 25 bp, Artificial
  probe
  misc_feature (1)..(25): SEQ ID NO: 2485; WAN024G34; Start 617; Stop 641
atgtccttgaatctgtaacagctat

SEQ ID NO: 327213 - DNA, 25 bp, Artificial
  probe
  misc_feature (1)..(25): SEQ ID NO: 2485; WAN024G34; Start 616; Stop 640
aatgtccttgaatctgtaacagcta

SEQ ID NO: 327214 - DNA, 25 bp, Artificial
  probe
  misc_feature (1)..(25): SEQ ID NO: 2485; WAN024G34; Start 618; Stop 642
tgtccttgaatctgtaacagctatg

SEQ ID NO: 327215 - DNA, 25 bp, Artificial
  probe
  misc_feature (1)..(25): SEQ ID NO: 2485; WAN024G34; Start 461; Stop 485
atgtgagtttcatttcccttagtct

SEQ ID NO: 327216 - DNA, 25 bp, Artificial
  probe
  misc_feature (1)..(25): SEQ ID NO: 2485; WAN024G34; Start 459; Stop 483
tgatgtgagtttcatttcccttagt

SEQ ID NO: 327217 - DNA, 25 bp, Artificial
  probe
  misc_feature (1)..(25): SEQ ID NO: 2485; WAN024G34; Start 451; Stop 475
gccagtattgatgtgagtttcattt

SEQ ID NO: 327218 - DNA, 25 bp, Artificial
  probe
  misc_feature (1)..(25): SEQ ID NO: 2485; WAN024G34; Start 625; Stop 649
gaatctgtaacagctatggcagtag

SEQ ID NO: 327219 - DNA, 25 bp, Artificial
  probe
  misc_feature (1)..(25): SEQ ID NO: 2485; WAN024G34; Start 615; Stop 639
gaatgtccttgaatctgtaacagct

SEQ ID NO: 327220 - DNA, 25 bp, Artificial
  probe
  misc_feature (1)..(25): SEQ ID NO: 2485; WAN024G34; Start 464; Stop 488
tgagtttcatttcccttagtctgat

SEQ ID NO: 327221 - DNA, 25 bp, Artificial
  probe
  misc_feature (1)..(25): SEQ ID NO: 2485; WAN024G34; Start 463; Stop 487
gtgagtttcatttcccttagtctga

SEQ ID NO: 327222 - DNA, 25 bp, Artificial
  probe
  misc_feature (1)..(25): SEQ ID NO: 2485; WAN024G34; Start 460; Stop 484
gatgtgagtttcatttcccttagtc

SEQ ID NO: 327223 - DNA, 25 bp, Artificial
  probe
  misc_feature (1)..(25): SEQ ID NO: 2485; WAN024G34; Start 88; Stop 112
ctagtcgtagcagtccttaatggag

SEQ ID NO: 327224 - DNA, 25 bp, Artificial
  probe
  misc_feature (1)..(25): SEQ ID NO: 2485; WAN024G34; Start 462; Stop 486
tgtgagtttcatttcccttagtctg

SEQ ID NO: 327225 - DNA, 25 bp, Artificial
  probe
  misc_feature (1)..(25): SEQ ID NO: 2485; WAN024G34; Start 455; Stop 479
gtattgatgtgagtttcatttccct

SEQ ID NO: 327226 - DNA, 25 bp, Artificial
  probe
  misc_feature (1)..(25): SEQ ID NO: 2485; WAN024G34; Start 454; Stop 478
agtattgatgtgagtttcatttccc

SEQ ID NO: 327227 - DNA, 25 bp, Artificial
  probe
  misc_feature (1)..(25): SEQ ID NO: 2485; WAN024G34; Start 619; Stop 643
gtccttgaatctgtaacagctatgg

SEQ ID NO: 327228 - DNA, 25 bp, Artificial
  probe
  misc_feature (1)..(25): SEQ ID NO: 2485; WAN024G34; Start 458; Stop 482
ttgatgtgagtttcatttcccttag

SEQ ID NO: 327229 - DNA, 25 bp, Artificial
  probe
  misc_feature (1)..(25): SEQ ID NO: 2485; WAN024G34; Start 626; Stop 650
aatctgtaacagctatggcagtaga

SEQ ID NO: 327230 - DNA, 25 bp, Artificial
  probe
  misc_feature (1)..(25): SEQ ID NO: 2485; WAN024G34; Start 450; Stop 474
tgccagtattgatgtgagtttcatt

SEQ ID NO: 327231 - DNA, 25 bp, Artificial
  probe
  misc_feature (1)..(25): SEQ ID NO: 2485; WAN024G34; Start 449; Stop 473
ttgccagtattgatgtgagtttcat

SEQ ID NO: 327232 - DNA, 25 bp, Artificial
  probe
  misc_feature (1)..(25): SEQ ID NO: 2485; WAN024G34; Start 295; Stop 319
gtcatgctacagaatagtgccaagt

SEQ ID NO: 327233 - DNA, 25 bp, Artificial
  probe
  misc_feature (1)..(25): SEQ ID NO: 2485; WAN024G34; Start 89; Stop 113
tagtcgtagcagtccttaatggaga

SEQ ID NO: 327234 - DNA, 25 bp, Artificial
  probe
  misc_feature (1)..(25): SEQ ID NO: 2485; WAN024G34; Start 448; Stop 472
tttgccagtattgatgtgagtttca

SEQ ID NO: 327235 - DNA, 25 bp, Artificial
  probe
  misc_feature (1)..(25): SEQ ID NO: 2485; WAN024G34; Start 767; Stop 791
agattaaagaagcagtagagagggc

SEQ ID NO: 327236 - DNA, 25 bp, Artificial
  probe
  misc_feature (1)..(25): SEQ ID NO: 2485; WAN024G34; Start 624; Stop 648
tgaatctgtaacagctatggcagta

SEQ ID NO: 327237 - DNA, 25 bp, Artificial
  probe
  misc_feature (1)..(25): SEQ ID NO: 2486; WAN024D98; Start 70; Stop 94
taccttgatatggatgctctgattg

SEQ ID NO: 327238 - DNA, 25 bp, Artificial
  probe
  misc_feature (1)..(25): SEQ ID NO: 2486; WAN024D98; Start 69; Stop 93
ttaccttgatatggatgctctgatt

SEQ ID NO: 327239 - DNA, 25 bp, Artificial
  probe
  misc_feature (1)..(25): SEQ ID NO: 2486; WAN024D98; Start 68; Stop 92
attaccttgatatggatgctctgat

SEQ ID NO: 327240 - DNA, 25 bp, Artificial
  probe
  misc_feature (1)..(25): SEQ ID NO: 2486; WAN024D98; Start 67; Stop 91
aattaccttgatatggatgctctga

SEQ ID NO: 327241 - DNA, 25 bp, Artificial
  probe
  misc_feature (1)..(25): SEQ ID NO: 2486; WAN024D98; Start 71; Stop 95
accttgatatggatgctctgattga

SEQ ID NO: 327242 - DNA, 25 bp, Artificial
  probe
  misc_feature (1)..(25): SEQ ID NO: 2486; WAN024D98; Start 74; Stop 98
ttgatatggatgctctgattgagaa

SEQ ID NO: 327243 - DNA, 25 bp, Artificial
  probe
  misc_feature (1)..(25): SEQ ID NO: 2486; WAN024D98; Start 73; Stop 97
cttgatatggatgctctgattgaga

SEQ ID NO: 327244 - DNA, 25 bp, Artificial
  probe
  misc_feature (1)..(25): SEQ ID NO: 2486; WAN024D98; Start 243; Stop 267
tcgtgacttactcaagactaataca

SEQ ID NO: 327245 - DNA, 25 bp, Artificial
  probe
  misc_feature (1)..(25): SEQ ID NO: 2486; WAN024D98; Start 244; Stop 268
cgtgacttactcaagactaatacag

SEQ ID NO: 327246 - DNA, 25 bp, Artificial
  probe
  misc_feature (1)..(25): SEQ ID NO: 2486; WAN024D98; Start 72; Stop 96
ccttgatatggatgctctgattgag

SEQ ID NO: 327247 - DNA, 25 bp, Artificial
  probe
  misc_feature (1)..(25): SEQ ID NO: 2486; WAN024D98; Start 64; Stop 88
cctaattaccttgatatggatgctc

SEQ ID NO: 327248 - DNA, 25 bp, Artificial
  probe
  misc_feature (1)..(25): SEQ ID NO: 2486; WAN024D98; Start 242; Stop 266
atcgtgacttactcaagactaatac

SEQ ID NO: 327249 - DNA, 25 bp, Artificial
  probe
  misc_feature (1)..(25): SEQ ID NO: 2486; WAN024D98; Start 66; Stop 90
taattaccttgatatggatgctctg

SEQ ID NO: 327250 - DNA, 25 bp, Artificial
  probe
  misc_feature (1)..(25): SEQ ID NO: 2486; WAN024D98; Start 245; Stop 269
gtgacttactcaagactaatacaga

SEQ ID NO: 327251 - DNA, 25 bp, Artificial
  probe
  misc_feature (1)..(25): SEQ ID NO: 2486; WAN024D98; Start 65; Stop 89
ctaattaccttgatatggatgctct

SEQ ID NO: 327252 - DNA, 25 bp, Artificial
  probe
  misc_feature (1)..(25): SEQ ID NO: 2486; WAN024D98; Start 154; Stop 178
cgtcaggtagaatcagaagtcctag

SEQ ID NO: 327253 - DNA, 25 bp, Artificial
  probe
  misc_feature (1)..(25): SEQ ID NO: 2486; WAN024D98; Start 443; Stop 467
taagcccagaggaaattatagagga

SEQ ID NO: 327254 - DNA, 25 bp, Artificial
  probe
  misc_feature (1)..(25): SEQ ID NO: 2486; WAN024D98; Start 442; Stop 466
ctaagcccagaggaaattatagagg

SEQ ID NO: 327255 - DNA, 25 bp, Artificial
  probe
  misc_feature (1)..(25): SEQ ID NO: 2486; WAN024D98; Start 153; Stop 177
tcgtcaggtagaatcagaagtccta

SEQ ID NO: 327256 - DNA, 25 bp, Artificial
  probe
  misc_feature (1)..(25): SEQ ID NO: 2486; WAN024D98; Start 155; Stop 179
gtcaggtagaatcagaagtcctagc

SEQ ID NO: 327257 - DNA, 25 bp, Artificial
  probe
  misc_feature (1)..(25): SEQ ID NO: 2486; WAN024D98; Start 444; Stop 468
aagcccagaggaaattatagaggaa

SEQ ID NO: 327258 - DNA, 25 bp, Artificial
  probe
  misc_feature (1)..(25): SEQ ID NO: 2486; WAN024D98; Start 150; Stop 174
ctttcgtcaggtagaatcagaagtc

SEQ ID NO: 327259 - DNA, 25 bp, Artificial
  probe
  misc_feature (1)..(25): SEQ ID NO: 2486; WAN024D98; Start 241; Stop 265
aatcgtgacttactcaagactaata

SEQ ID NO: 327260 - DNA, 25 bp, Artificial
  probe
  misc_feature (1)..(25): SEQ ID NO: 2486; WAN024D98; Start 447; Stop 471
cccagaggaaattatagaggaacta

SEQ ID NO: 327261 - DNA, 25 bp, Artificial
  probe
  misc_feature (1)..(25): SEQ ID NO: 2486; WAN024D98; Start 441; Stop 465
gctaagcccagaggaaattatagag

SEQ ID NO: 327262 - DNA, 25 bp, Artificial
  probe
  misc_feature (1)..(25): SEQ ID NO: 2486; WAN024D98; Start 238; Stop 262
agaaatcgtgacttactcaagacta

SEQ ID NO: 327263 - DNA, 25 bp, Artificial
  probe
  misc_feature (1)..(25): SEQ ID NO: 2486; WAN024D98; Start 237; Stop 261
gagaaatcgtgacttactcaagact

SEQ ID NO: 327264 - DNA, 25 bp, Artificial
  probe
  misc_feature (1)..(25): SEQ ID NO: 2486; WAN024D98; Start 236; Stop 260
agagaaatcgtgacttactcaagac

SEQ ID NO: 327265 - DNA, 25 bp, Artificial
  probe
  misc_feature (1)..(25): SEQ ID NO: 2486; WAN024D98; Start 235; Stop 259
cagagaaatcgtgacttactcaaga

SEQ ID NO: 327266 - DNA, 25 bp, Artificial
  probe
  misc_feature (1)..(25): SEQ ID NO: 2486; WAN024D98; Start 234; Stop 258
tcagagaaatcgtgacttactcaag

SEQ ID NO: 327267 - DNA, 25 bp, Artificial
  probe
  misc_feature (1)..(25): SEQ ID NO: 2486; WAN024D98; Start 233; Stop 257
ctcagagaaatcgtgacttactcaa

SEQ ID NO: 327268 - DNA, 25 bp, Artificial
  probe
  misc_feature (1)..(25): SEQ ID NO: 2486; WAN024D98; Start 446; Stop 470
gcccagaggaaattatagaggaact

SEQ ID NO: 327269 - DNA, 25 bp, Artificial
  probe
  misc_feature (1)..(25): SEQ ID NO: 2486; WAN024D98; Start 445; Stop 469
agcccagaggaaattatagaggaac

SEQ ID NO: 327270 - DNA, 25 bp, Artificial
  probe
  misc_feature (1)..(25): SEQ ID NO: 2487; WAN024DIG; Start 60; Stop 84
aatcacaggctaccgtatctctaaa

SEQ ID NO: 327271 - DNA, 25 bp, Artificial
  probe
  misc_feature (1)..(25): SEQ ID NO: 2487; WAN024DIG; Start 59; Stop 83
aaatcacaggctaccgtatctctaa

SEQ ID NO: 327272 - DNA, 25 bp, Artificial
  probe
  misc_feature (1)..(25): SEQ ID NO: 2487; WAN024DIG; Start 65; Stop 89
caggctaccgtatctctaaagaaac

SEQ ID NO: 327273 - DNA, 25 bp, Artificial
  probe
  misc_feature (1)..(25): SEQ ID NO: 2487; WAN024DIG; Start 61; Stop 85
atcacaggctaccgtatctctaaag

SEQ ID NO: 327274 - DNA, 25 bp, Artificial
  probe
  misc_feature (1)..(25): SEQ ID NO: 2487; WAN024DIG; Start 64; Stop 88
acaggctaccgtatctctaaagaaa

SEQ ID NO: 327275 - DNA, 25 bp, Artificial
  probe
  misc_feature (1)..(25): SEQ ID NO: 2487; WAN024DIG; Start 63; Stop 87
cacaggctaccgtatctctaaagaa

SEQ ID NO: 327276 - DNA, 25 bp, Artificial
  probe
  misc_feature (1)..(25): SEQ ID NO: 2487; WAN024DIG; Start 62; Stop 86
tcacaggctaccgtatctctaaaga

SEQ ID NO: 327277 - DNA, 25 bp, Artificial
  probe
  misc_feature (1)..(25): SEQ ID NO: 2487; WAN024DIG; Start 53; Stop 77
ataagaaaatcacaggctaccgtat

SEQ ID NO: 327278 - DNA, 25 bp, Artificial
  probe
  misc_feature (1)..(25): SEQ ID NO: 2487; WAN024DIG; Start 54; Stop 78
taagaaaatcacaggctaccgtatc

SEQ ID NO: 327279 - DNA, 25 bp, Artificial
  probe
  misc_feature (1)..(25): SEQ ID NO: 2487; WAN024DIG; Start 52; Stop 76
gataagaaaatcacaggctaccgta

SEQ ID NO: 327280 - DNA, 25 bp, Artificial
  probe
  misc_feature (1)..(25): SEQ ID NO: 2487; WAN024DIG; Start 58; Stop 82
aaaatcacaggctaccgtatctcta

SEQ ID NO: 327281 - DNA, 25 bp, Artificial
  probe
  misc_feature (1)..(25): SEQ ID NO: 2487; WAN024DIG; Start 68; Stop 92
gctaccgtatctctaaagaaacgaa

SEQ ID NO: 327282 - DNA, 25 bp, Artificial
  probe
  misc_feature (1)..(25): SEQ ID NO: 2487; WAN024DIG; Start 97; Stop 121
cgtgaaatgtctatcattgctctgg

SEQ ID NO: 327283 - DNA, 25 bp, Artificial
  probe
  misc_feature (1)..(25): SEQ ID NO: 2487; WAN024DIG; Start 98; Stop 122
gtgaaatgtctatcattgctctggc

SEQ ID NO: 327284 - DNA, 25 bp, Artificial
  probe
  misc_feature (1)..(25): SEQ ID NO: 2487; WAN024DIG; Start 71; Stop 95
accgtatctctaaagaaacgaatgc

SEQ ID NO: 327285 - DNA, 25 bp, Artificial
  probe
  misc_feature (1)..(25): SEQ ID NO: 2487; WAN024DIG; Start 22; Stop 46
aaagtagaatcagttgttggctggg

SEQ ID NO: 327286 - DNA, 25 bp, Artificial
  probe
  misc_feature (1)..(25): SEQ ID NO: 2487; WAN024DIG; Start 70; Stop 94
taccgtatctctaaagaaacgaatg

SEQ ID NO: 327287 - DNA, 25 bp, Artificial
  probe
  misc_feature (1)..(25): SEQ ID NO: 2487; WAN024DIG; Start 96; Stop 120
gcgtgaaatgtctatcattgctctg

SEQ ID NO: 327288 - DNA, 25 bp, Artificial
  probe
  misc_feature (1)..(25): SEQ ID NO: 2487; WAN024DIG; Start 69; Stop 93
ctaccgtatctctaaagaaacgaat

SEQ ID NO: 327289 - DNA, 25 bp, Artificial
  probe
  misc_feature (1)..(25): SEQ ID NO: 2487; WAN024DIG; Start 57; Stop 81
gaaaatcacaggctaccgtatctct

SEQ ID NO: 327290 - DNA, 25 bp, Artificial
  probe
  misc_feature (1)..(25): SEQ ID NO: 2487; WAN024DIG; Start 55; Stop 79
aagaaaatcacaggctaccgtatct

SEQ ID NO: 327291 - DNA, 25 bp, Artificial
  probe
  misc_feature (1)..(25): SEQ ID NO: 2487; WAN024DIG; Start 67; Stop 91
ggctaccgtatctctaaagaaacga

SEQ ID NO: 327292 - DNA, 25 bp, Artificial
  probe
  misc_feature (1)..(25): SEQ ID NO: 2487; WAN024DIG; Start 66; Stop 90
aggctaccgtatctctaaagaaacg

SEQ ID NO: 327293 - DNA, 25 bp, Artificial
  probe
  misc_feature (1)..(25): SEQ ID NO: 2487; WAN024DIG; Start 56; Stop 80
agaaaatcacaggctaccgtatctc

SEQ ID NO: 327294 - DNA, 25 bp, Artificial
  probe
  misc_feature (1)..(25): SEQ ID NO: 2487; WAN024DIG; Start 72; Stop 96
ccgtatctctaaagaaacgaatgcg

SEQ ID NO: 327295 - DNA, 25 bp, Artificial
  probe
  misc_feature (1)..(25): SEQ ID NO: 2487; WAN024DIG; Start 25; Stop 49
gtagaatcagttgttggctgggttc

SEQ ID NO: 327296 - DNA, 25 bp, Artificial
  probe
  misc_feature (1)..(25): SEQ ID NO: 2487; WAN024DIG; Start 21; Stop 45
aaaagtagaatcagttgttggctgg

SEQ ID NO: 327297 - DNA, 25 bp, Artificial
  probe
  misc_feature (1)..(25): SEQ ID NO: 2487; WAN024DIG; Start 38; Stop 62
ttggctgggttcgtgataagaaaat

SEQ ID NO: 327298 - DNA, 25 bp, Artificial
  probe
  misc_feature (1)..(25): SEQ ID NO: 2487; WAN024DIG; Start 99; Stop 123
tgaaatgtctatcattgctctggcg

SEQ ID NO: 327299 - DNA, 25 bp, Artificial
  probe
  misc_feature (1)..(25): SEQ ID NO: 2487; WAN024DIG; Start 24; Stop 48
agtagaatcagttgttggctgggtt

SEQ ID NO: 327300 - DNA, 25 bp, Artificial
  probe
  misc_feature (1)..(25): SEQ ID NO: 2487; WAN024DIG; Start 23; Stop 47
aagtagaatcagttgttggctgggt

SEQ ID NO: 327301 - DNA, 25 bp, Artificial
  probe
  misc_feature (1)..(25): SEQ ID NO: 2487; WAN024DIG; Start 36; Stop 60
tgttggctgggttcgtgataagaaa

SEQ ID NO: 327302 - DNA, 25 bp, Artificial
  probe
  misc_feature (1)..(25): SEQ ID NO: 2487; WAN024DIG; Start 35; Stop 59
ttgttggctgggttcgtgataagaa

SEQ ID NO: 327303 - DNA, 25 bp, Artificial
  probe
  misc_feature (1)..(25): SEQ ID NO: 2488; WAN024CC5; Start 318; Stop 342
tccagagtatctacagtatgcgtat

SEQ ID NO: 327304 - DNA, 25 bp, Artificial
  probe
  misc_feature (1)..(25): SEQ ID NO: 2488; WAN024CC5; Start 319; Stop 343
ccagagtatctacagtatgcgtatt

SEQ ID NO: 327305 - DNA, 25 bp, Artificial
  probe
  misc_feature (1)..(25): SEQ ID NO: 2488; WAN024CC5; Start 271; Stop 295
gattccatctctgttccatattgtt

SEQ ID NO: 327306 - DNA, 25 bp, Artificial
  probe
  misc_feature (1)..(25): SEQ ID NO: 2488; WAN024CC5; Start 311; Stop 335
aagacagtccagagtatctacagta

SEQ ID NO: 327307 - DNA, 25 bp, Artificial
  probe
  misc_feature (1)..(25): SEQ ID NO: 2488; WAN024CC5; Start 308; Stop 332
ttgaagacagtccagagtatctaca

SEQ ID NO: 327308 - DNA, 25 bp, Artificial
  probe
  misc_feature (1)..(25): SEQ ID NO: 2488; WAN024CC5; Start 313; Stop 337
gacagtccagagtatctacagtatg

SEQ ID NO: 327309 - DNA, 25 bp, Artificial
  probe
  misc_feature (1)..(25): SEQ ID NO: 2488; WAN024CC5; Start 312; Stop 336
agacagtccagagtatctacagtat

SEQ ID NO: 327310 - DNA, 25 bp, Artificial
  probe
  misc_feature (1)..(25): SEQ ID NO: 2488; WAN024CC5; Start 317; Stop 341
gtccagagtatctacagtatgcgta

SEQ ID NO: 327311 - DNA, 25 bp, Artificial
  probe
  misc_feature (1)..(25): SEQ ID NO: 2488; WAN024CC5; Start 314; Stop 338
acagtccagagtatctacagtatgc

SEQ ID NO: 327312 - DNA, 25 bp, Artificial
  probe
  misc_feature (1)..(25): SEQ ID NO: 2488; WAN024CC5; Start 310; Stop 334
gaagacagtccagagtatctacagt

SEQ ID NO: 327313 - DNA, 25 bp, Artificial
  probe
  misc_feature (1)..(25): SEQ ID NO: 2488; WAN024CC5; Start 309; Stop 333
tgaagacagtccagagtatctacag

SEQ ID NO: 327314 - DNA, 25 bp, Artificial
  probe
  misc_feature (1)..(25): SEQ ID NO: 2488; WAN024CC5; Start 229; Stop 253
gctcataatgctcaacagtacagta

SEQ ID NO: 327315 - DNA, 25 bp, Artificial
  probe
  misc_feature (1)..(25): SEQ ID NO: 2488; WAN024CC5; Start 232; Stop 256
cataatgctcaacagtacagtaaca

SEQ ID NO: 327316 - DNA, 25 bp, Artificial
  probe
  misc_feature (1)..(25): SEQ ID NO: 2488; WAN024CC5; Start 321; Stop 345
agagtatctacagtatgcgtattct

SEQ ID NO: 327317 - DNA, 25 bp, Artificial
  probe
  misc_feature (1)..(25): SEQ ID NO: 2488; WAN024CC5; Start 320; Stop 344
cagagtatctacagtatgcgtattc

SEQ ID NO: 327318 - DNA, 25 bp, Artificial
  probe
  misc_feature (1)..(25): SEQ ID NO: 2488; WAN024CC5; Start 231; Stop 255
tcataatgctcaacagtacagtaac

SEQ ID NO: 327319 - DNA, 25 bp, Artificial
  probe
  misc_feature (1)..(25): SEQ ID NO: 2488; WAN024CC5; Start 230; Stop 254
ctcataatgctcaacagtacagtaa

SEQ ID NO: 327320 - DNA, 25 bp, Artificial
  probe
  misc_feature (1)..(25): SEQ ID NO: 2488; WAN024CC5; Start 315; Stop 339
cagtccagagtatctacagtatgcg

SEQ ID NO: 327321 - DNA, 25 bp, Artificial
  probe
  misc_feature (1)..(25): SEQ ID NO: 2488; WAN024CC5; Start 269; Stop 293
aggattccatctctgttccatattg

SEQ ID NO: 327322 - DNA, 25 bp, Artificial
  probe
  misc_feature (1)..(25): SEQ ID NO: 2488; WAN024CC5; Start 268; Stop 292
caggattccatctctgttccatatt

SEQ ID NO: 327323 - DNA, 25 bp, Artificial
  probe
  misc_feature (1)..(25): SEQ ID NO: 2488; WAN024CC5; Start 270; Stop 294
ggattccatctctgttccatattgt

SEQ ID NO: 327324 - DNA, 25 bp, Artificial
  probe
  misc_feature (1)..(25): SEQ ID NO: 2488; WAN024CC5; Start 233; Stop 257
ataatgctcaacagtacagtaacat

SEQ ID NO: 327325 - DNA, 25 bp, Artificial
  probe
  misc_feature (1)..(25): SEQ ID NO: 2488; WAN024CC5; Start 316; Stop 340
agtccagagtatctacagtatgcgt

SEQ ID NO: 327326 - DNA, 25 bp, Artificial
  probe
  misc_feature (1)..(25): SEQ ID NO: 2488; WAN024CC5; Start 322; Stop 346
gagtatctacagtatgcgtattcta

SEQ ID NO: 327327 - DNA, 25 bp, Artificial
  probe
  misc_feature (1)..(25): SEQ ID NO: 2488; WAN024CC5; Start 186; Stop 210
tgatgatggattaataacgactgat

SEQ ID NO: 327328 - DNA, 25 bp, Artificial
  probe
  misc_feature (1)..(25): SEQ ID NO: 2488; WAN024CC5; Start 185; Stop 209
atgatgatggattaataacgactga

SEQ ID NO: 327329 - DNA, 25 bp, Artificial
  probe
  misc_feature (1)..(25): SEQ ID NO: 2488; WAN024CC5; Start 184; Stop 208
catgatgatggattaataacgactg

SEQ ID NO: 327330 - DNA, 25 bp, Artificial
  probe
  misc_feature (1)..(25): SEQ ID NO: 2488; WAN024CC5; Start 376; Stop 400
attcaaacggatgggattgtctata

SEQ ID NO: 327331 - DNA, 25 bp, Artificial
  probe
  misc_feature (1)..(25): SEQ ID NO: 2488; WAN024CC5; Start 375; Stop 399
tattcaaacggatgggattgtctat

SEQ ID NO: 327332 - DNA, 25 bp, Artificial
  probe
  misc_feature (1)..(25): SEQ ID NO: 2488; WAN024CC5; Start 374; Stop 398
atattcaaacggatgggattgtcta

SEQ ID NO: 327333 - DNA, 25 bp, Artificial
  probe
  misc_feature (1)..(25): SEQ ID NO: 2488; WAN024CC5; Start 377; Stop 401
ttcaaacggatgggattgtctatac

SEQ ID NO: 327334 - DNA, 25 bp, Artificial
  probe
  misc_feature (1)..(25): SEQ ID NO: 2488; WAN024CC5; Start 307; Stop 331
tttgaagacagtccagagtatctac

SEQ ID NO: 327335 - DNA, 25 bp, Artificial
  probe
  misc_feature (1)..(25): SEQ ID NO: 2488; WAN024CC5; Start 370; Stop 394
aatgatattcaaacggatgggattg

SEQ ID NO: 327336 - DNA, 25 bp, Artificial
  probe
  misc_feature (1)..(25): SEQ ID NO: 2489; WAN024FFW; Start 2142; Stop 2166
gattctacgagtggtggataacaag

SEQ ID NO: 327337 - DNA, 25 bp, Artificial
  probe
  misc_feature (1)..(25): SEQ ID NO: 2489; WAN024FFW; Start 2003; Stop 2027
ctattacgatggaagacttgtcagg

SEQ ID NO: 327338 - DNA, 25 bp, Artificial
  probe
  misc_feature (1)..(25): SEQ ID NO: 2489; WAN024FFW; Start 623; Stop 647
aggttgactctatcttgattgacga

SEQ ID NO: 327339 - DNA, 25 bp, Artificial
  probe
  misc_feature (1)..(25): SEQ ID NO: 2489; WAN024FFW; Start 907; Stop 931
gatattgactatgtggtgagcgaag

SEQ ID NO: 327340 - DNA, 25 bp, Artificial
  probe
  misc_feature (1)..(25): SEQ ID NO: 2489; WAN024FFW; Start 2002; Stop 2026
tctattacgatggaagacttgtcag

SEQ ID NO: 327341 - DNA, 25 bp, Artificial
  probe
  misc_feature (1)..(25): SEQ ID NO: 2489; WAN024FFW; Start 2001; Stop 2025
ttctattacgatggaagacttgtca

SEQ ID NO: 327342 - DNA, 25 bp, Artificial
  probe
  misc_feature (1)..(25): SEQ ID NO: 2489; WAN024FFW; Start 2143; Stop 2167
attctacgagtggtggataacaagt

SEQ ID NO: 327343 - DNA, 25 bp, Artificial
  probe
  misc_feature (1)..(25): SEQ ID NO: 2489; WAN024FFW; Start 2141; Stop 2165
tgattctacgagtggtggataacaa

SEQ ID NO: 327344 - DNA, 25 bp, Artificial
  probe
  misc_feature (1)..(25): SEQ ID NO: 2489; WAN024FFW; Start 2140; Stop 2164
ttgattctacgagtggtggataaca

SEQ ID NO: 327345 - DNA, 25 bp, Artificial
  probe
  misc_feature (1)..(25): SEQ ID NO: 2489; WAN024FFW; Start 908; Stop 932
atattgactatgtggtgagcgaaga

SEQ ID NO: 327346 - DNA, 25 bp, Artificial
  probe
  misc_feature (1)..(25): SEQ ID NO: 2489; WAN024FFW; Start 2155; Stop 2179
gtggataacaagtggacagatcata

SEQ ID NO: 327347 - DNA, 25 bp, Artificial
  probe
  misc_feature (1)..(25): SEQ ID NO: 2489; WAN024FFW; Start 621; Stop 645
tgaggttgactctatcttgattgac

SEQ ID NO: 327348 - DNA, 25 bp, Artificial
  probe
  misc_feature (1)..(25): SEQ ID NO: 2489; WAN024FFW; Start 618; Stop 642
cgatgaggttgactctatcttgatt

SEQ ID NO: 327349 - DNA, 25 bp, Artificial
  probe
  misc_feature (1)..(25): SEQ ID NO: 2489; WAN024FFW; Start 2156; Stop 2180
tggataacaagtggacagatcatat

SEQ ID NO: 327350 - DNA, 25 bp, Artificial
  probe
  misc_feature (1)..(25): SEQ ID NO: 2489; WAN024FFW; Start 494; Stop 518
aagaagcctatgagtgtgatattac

SEQ ID NO: 327351 - DNA, 25 bp, Artificial
  probe
  misc_feature (1)..(25): SEQ ID NO: 2489; WAN024FFW; Start 620; Stop 644
atgaggttgactctatcttgattga

SEQ ID NO: 327352 - DNA, 25 bp, Artificial
  probe
  misc_feature (1)..(25): SEQ ID NO: 2489; WAN024FFW; Start 1999; Stop 2023
gattctattacgatggaagacttgt

SEQ ID NO: 327353 - DNA, 25 bp, Artificial
  probe
  misc_feature (1)..(25): SEQ ID NO: 2489; WAN024FFW; Start 495; Stop 519
agaagcctatgagtgtgatattact

SEQ ID NO: 327354 - DNA, 25 bp, Artificial
  probe
  misc_feature (1)..(25): SEQ ID NO: 2489; WAN024FFW; Start 625; Stop 649
gttgactctatcttgattgacgagg

SEQ ID NO: 327355 - DNA, 25 bp, Artificial
  probe
  misc_feature (1)..(25): SEQ ID NO: 2489; WAN024FFW; Start 624; Stop 648
ggttgactctatcttgattgacgag

SEQ ID NO: 327356 - DNA, 25 bp, Artificial
  probe
  misc_feature (1)..(25): SEQ ID NO: 2489; WAN024FFW; Start 622; Stop 646
gaggttgactctatcttgattgacg

SEQ ID NO: 327357 - DNA, 25 bp, Artificial
  probe
  misc_feature (1)..(25): SEQ ID NO: 2489; WAN024FFW; Start 619; Stop 643
gatgaggttgactctatcttgattg

SEQ ID NO: 327358 - DNA, 25 bp, Artificial
  probe
  misc_feature (1)..(25): SEQ ID NO: 2489; WAN024FFW; Start 2000; Stop 2024
attctattacgatggaagacttgtc

SEQ ID NO: 327359 - DNA, 25 bp, Artificial
  probe
  misc_feature (1)..(25): SEQ ID NO: 2489; WAN024FFW; Start 1604; Stop 1628
agtcacaattctacctatctcttga

SEQ ID NO: 327360 - DNA, 25 bp, Artificial
  probe
  misc_feature (1)..(25): SEQ ID NO: 2489; WAN024FFW; Start 1121; Stop 1145
caggtaagactgaggaagaagaatt

SEQ ID NO: 327361 - DNA, 25 bp, Artificial
  probe
  misc_feature (1)..(25): SEQ ID NO: 2489; WAN024FFW; Start 1119; Stop 1143
tacaggtaagactgaggaagaagaa

SEQ ID NO: 327362 - DNA, 25 bp, Artificial
  probe
  misc_feature (1)..(25): SEQ ID NO: 2489; WAN024FFW; Start 977; Stop 1001
aaggtcgtcgttattctgatggatt

SEQ ID NO: 327363 - DNA, 25 bp, Artificial
  probe
  misc_feature (1)..(25): SEQ ID NO: 2489; WAN024FFW; Start 1998; Stop 2022
agattctattacgatggaagacttg

SEQ ID NO: 327364 - DNA, 25 bp, Artificial
  probe
  misc_feature (1)..(25): SEQ ID NO: 2489; WAN024FFW; Start 1602; Stop 1626
tgagtcacaattctacctatctctt

SEQ ID NO: 327365 - DNA, 25 bp, Artificial
  probe
  misc_feature (1)..(25): SEQ ID NO: 2489; WAN024FFW; Start 1120; Stop 1144
acaggtaagactgaggaagaagaat

SEQ ID NO: 327366 - DNA, 25 bp, Artificial
  probe
  misc_feature (1)..(25): SEQ ID NO: 2489; WAN024FFW; Start 909; Stop 933
tattgactatgtggtgagcgaagag

SEQ ID NO: 327367 - DNA, 25 bp, Artificial
  probe
  misc_feature (1)..(25): SEQ ID NO: 2489; WAN024FFW; Start 1603; Stop 1627
gagtcacaattctacctatctcttg

SEQ ID NO: 327368 - DNA, 25 bp, Artificial
  probe
  misc_feature (1)..(25): SEQ ID NO: 2489; WAN024FFW; Start 2144; Stop 2168
ttctacgagtggtggataacaagtg

SEQ ID NO: 327369 - DNA, 25 bp, Artificial
  probe
  misc_feature (1)..(25): SEQ ID NO: 2490; WAN024DJ9; Start 254; Stop 278
attggaatgaaggcaatcagatgaa

SEQ ID NO: 327370 - DNA, 25 bp, Artificial
  probe
  misc_feature (1)..(25): SEQ ID NO: 2490; WAN024DJ9; Start 253; Stop 277
aattggaatgaaggcaatcagatga

SEQ ID NO: 327371 - DNA, 25 bp, Artificial
  probe
  misc_feature (1)..(25): SEQ ID NO: 2490; WAN024DJ9; Start 94; Stop 118
cgtaaagatttagaggctatggcag

SEQ ID NO: 327372 - DNA, 25 bp, Artificial
  probe
  misc_feature (1)..(25): SEQ ID NO: 2490; WAN024DJ9; Start 255; Stop 279
ttggaatgaaggcaatcagatgaaa

SEQ ID NO: 327373 - DNA, 25 bp, Artificial
  probe
  misc_feature (1)..(25): SEQ ID NO: 2490; WAN024DJ9; Start 257; Stop 281
ggaatgaaggcaatcagatgaaact

SEQ ID NO: 327374 - DNA, 25 bp, Artificial
  probe
  misc_feature (1)..(25): SEQ ID NO: 2490; WAN024DJ9; Start 258; Stop 282
gaatgaaggcaatcagatgaaactg

SEQ ID NO: 327375 - DNA, 25 bp, Artificial
  probe
  misc_feature (1)..(25): SEQ ID NO: 2490; WAN024DJ9; Start 174; Stop 198
tttagaggttgctcaggagatgaaa

SEQ ID NO: 327376 - DNA, 25 bp, Artificial
  probe
  misc_feature (1)..(25): SEQ ID NO: 2490; WAN024DJ9; Start 256; Stop 280
tggaatgaaggcaatcagatgaaac

SEQ ID NO: 327377 - DNA, 25 bp, Artificial
  probe
  misc_feature (1)..(25): SEQ ID NO: 2490; WAN024DJ9; Start 288; Stop 312
ctttaagcaggtagactttgtcaaa

SEQ ID NO: 327378 - DNA, 25 bp, Artificial
  probe
  misc_feature (1)..(25): SEQ ID NO: 2490; WAN024DJ9; Start 292; Stop 316
aagcaggtagactttgtcaaatatg

SEQ ID NO: 327379 - DNA, 25 bp, Artificial
  probe
  misc_feature (1)..(25): SEQ ID NO: 2490; WAN024DJ9; Start 289; Stop 313
tttaagcaggtagactttgtcaaat

SEQ ID NO: 327380 - DNA, 25 bp, Artificial
  probe
  misc_feature (1)..(25): SEQ ID NO: 2490; WAN024DJ9; Start 290; Stop 314
ttaagcaggtagactttgtcaaata

SEQ ID NO: 327381 - DNA, 25 bp, Artificial
  probe
  misc_feature (1)..(25): SEQ ID NO: 2490; WAN024DJ9; Start 252; Stop 276
aaattggaatgaaggcaatcagatg

SEQ ID NO: 327382 - DNA, 25 bp, Artificial
  probe
  misc_feature (1)..(25): SEQ ID NO: 2490; WAN024DJ9; Start 291; Stop 315
taagcaggtagactttgtcaaatat

SEQ ID NO: 327383 - DNA, 25 bp, Artificial
  probe
  misc_feature (1)..(25): SEQ ID NO: 2490; WAN024DJ9; Start 93; Stop 117
acgtaaagatttagaggctatggca

SEQ ID NO: 327384 - DNA, 25 bp, Artificial
  probe
  misc_feature (1)..(25): SEQ ID NO: 2490; WAN024DJ9; Start 19; Stop 43
ttaggctattctgcttttgatttgg

SEQ ID NO: 327385 - DNA, 25 bp, Artificial
  probe
  misc_feature (1)..(25): SEQ ID NO: 2490; WAN024DJ9; Start 15; Stop 39
ggttttaggctattctgcttttgat

SEQ ID NO: 327386 - DNA, 25 bp, Artificial
  probe
  misc_feature (1)..(25): SEQ ID NO: 2490; WAN024DJ9; Start 13; Stop 37
ttggttttaggctattctgcttttg

SEQ ID NO: 327387 - DNA, 25 bp, Artificial
  probe
  misc_feature (1)..(25): SEQ ID NO: 2490; WAN024DJ9; Start 11; Stop 35
ctttggttttaggctattctgcttt

SEQ ID NO: 327388 - DNA, 25 bp, Artificial
  probe
  misc_feature (1)..(25): SEQ ID NO: 2490; WAN024DJ9; Start 12; Stop 36
tttggttttaggctattctgctttt

SEQ ID NO: 327389 - DNA, 25 bp, Artificial
  probe
  misc_feature (1)..(25): SEQ ID NO: 2490; WAN024DJ9; Start 23; Stop 47
gctattctgcttttgatttgggttt

SEQ ID NO: 327390 - DNA, 25 bp, Artificial
  probe
  misc_feature (1)..(25): SEQ ID NO: 2490; WAN024DJ9; Start 14; Stop 38
tggttttaggctattctgcttttga

SEQ ID NO: 327391 - DNA, 25 bp, Artificial
  probe
  misc_feature (1)..(25): SEQ ID NO: 2490; WAN024DJ9; Start 95; Stop 119
gtaaagatttagaggctatggcagc

SEQ ID NO: 327392 - DNA, 25 bp, Artificial
  probe
  misc_feature (1)..(25): SEQ ID NO: 2490; WAN024DJ9; Start 20; Stop 44
taggctattctgcttttgatttggg

SEQ ID NO: 327393 - DNA, 25 bp, Artificial
  probe
  misc_feature (1)..(25): SEQ ID NO: 2490; WAN024DJ9; Start 96; Stop 120
taaagatttagaggctatggcagca

SEQ ID NO: 327394 - DNA, 25 bp, Artificial
  probe
  misc_feature (1)..(25): SEQ ID NO: 2490; WAN024DJ9; Start 18; Stop 42
tttaggctattctgcttttgatttg

SEQ ID NO: 327395 - DNA, 25 bp, Artificial
  probe
  misc_feature (1)..(25): SEQ ID NO: 2490; WAN024DJ9; Start 16; Stop 40
gttttaggctattctgcttttgatt

SEQ ID NO: 327396 - DNA, 25 bp, Artificial
  probe
  misc_feature (1)..(25): SEQ ID NO: 2490; WAN024DJ9; Start 30; Stop 54
tgcttttgatttgggtttattttct

SEQ ID NO: 327397 - DNA, 25 bp, Artificial
  probe
  misc_feature (1)..(25): SEQ ID NO: 2490; WAN024DJ9; Start 28; Stop 52
tctgcttttgatttgggtttatttt

SEQ ID NO: 327398 - DNA, 25 bp, Artificial
  probe
  misc_feature (1)..(25): SEQ ID NO: 2490; WAN024DJ9; Start 27; Stop 51
ttctgcttttgatttgggtttattt

SEQ ID NO: 327399 - DNA, 25 bp, Artificial
  probe
  misc_feature (1)..(25): SEQ ID NO: 2490; WAN024DJ9; Start 293; Stop 317
agcaggtagactttgtcaaatatgc

SEQ ID NO: 327400 - DNA, 25 bp, Artificial
  probe
  misc_feature (1)..(25): SEQ ID NO: 2490; WAN024DJ9; Start 165; Stop 189
atattgggttttagaggttgctcag

SEQ ID NO: 327401 - DNA, 25 bp, Artificial
  probe
  misc_feature (1)..(25): SEQ ID NO: 2490; WAN024DJ9; Start 31; Stop 55
gcttttgatttgggtttattttctg

SEQ ID NO: 327402 - DNA, 25 bp, Artificial
  probe
  misc_feature (1)..(25): SEQ ID NO: 2491; WAN024FCX; Start 173; Stop 197
tgaactacgctattaacctcttctt

SEQ ID NO: 327403 - DNA, 25 bp, Artificial
  probe
  misc_feature (1)..(25): SEQ ID NO: 2491; WAN024FCX; Start 172; Stop 196
ttgaactacgctattaacctcttct

SEQ ID NO: 327404 - DNA, 25 bp, Artificial
  probe
  misc_feature (1)..(25): SEQ ID NO: 2491; WAN024FCX; Start 170; Stop 194
tgttgaactacgctattaacctctt

SEQ ID NO: 327405 - DNA, 25 bp, Artificial
  probe
  misc_feature (1)..(25): SEQ ID NO: 2491; WAN024FCX; Start 171; Stop 195
gttgaactacgctattaacctcttc

SEQ ID NO: 327406 - DNA, 25 bp, Artificial
  probe
  misc_feature (1)..(25): SEQ ID NO: 2491; WAN024FCX; Start 169; Stop 193
gtgttgaactacgctattaacctct

SEQ ID NO: 327407 - DNA, 25 bp, Artificial
  probe
  misc_feature (1)..(25): SEQ ID NO: 2491; WAN024FCX; Start 73; Stop 97
cgacttaacaaatctcataaacgct

SEQ ID NO: 327408 - DNA, 25 bp, Artificial
  probe
  misc_feature (1)..(25): SEQ ID NO: 2491; WAN024FCX; Start 67; Stop 91
tccaaccgacttaacaaatctcata

SEQ ID NO: 327409 - DNA, 25 bp, Artificial
  probe
  misc_feature (1)..(25): SEQ ID NO: 2491; WAN024FCX; Start 71; Stop 95
accgacttaacaaatctcataaacg

SEQ ID NO: 327410 - DNA, 25 bp, Artificial
  probe
  misc_feature (1)..(25): SEQ ID NO: 2491; WAN024FCX; Start 64; Stop 88
aattccaaccgacttaacaaatctc

SEQ ID NO: 327411 - DNA, 25 bp, Artificial
  probe
  misc_feature (1)..(25): SEQ ID NO: 2491; WAN024FCX; Start 68; Stop 92
ccaaccgacttaacaaatctcataa

SEQ ID NO: 327412 - DNA, 25 bp, Artificial
  probe
  misc_feature (1)..(25): SEQ ID NO: 2491; WAN024FCX; Start 66; Stop 90
ttccaaccgacttaacaaatctcat

SEQ ID NO: 327413 - DNA, 25 bp, Artificial
  probe
  misc_feature (1)..(25): SEQ ID NO: 2491; WAN024FCX; Start 65; Stop 89
attccaaccgacttaacaaatctca

SEQ ID NO: 327414 - DNA, 25 bp, Artificial
  probe
  misc_feature (1)..(25): SEQ ID NO: 2491; WAN024FCX; Start 72; Stop 96
ccgacttaacaaatctcataaacgc

SEQ ID NO: 327415 - DNA, 25 bp, Artificial
  probe
  misc_feature (1)..(25): SEQ ID NO: 2491; WAN024FCX; Start 63; Stop 87
taattccaaccgacttaacaaatct

SEQ ID NO: 327416 - DNA, 25 bp, Artificial
  probe
  misc_feature (1)..(25): SEQ ID NO: 2491; WAN024FCX; Start 174; Stop 198
gaactacgctattaacctcttcttt

SEQ ID NO: 327417 - DNA, 25 bp, Artificial
  probe
  misc_feature (1)..(25): SEQ ID NO: 2491; WAN024FCX; Start 76; Stop 100
cttaacaaatctcataaacgcttca

SEQ ID NO: 327418 - DNA, 25 bp, Artificial
  probe
  misc_feature (1)..(25): SEQ ID NO: 2491; WAN024FCX; Start 75; Stop 99
acttaacaaatctcataaacgcttc

SEQ ID NO: 327419 - DNA, 25 bp, Artificial
  probe
  misc_feature (1)..(25): SEQ ID NO: 2491; WAN024FCX; Start 74; Stop 98
gacttaacaaatctcataaacgctt

SEQ ID NO: 327420 - DNA, 25 bp, Artificial
  probe
  misc_feature (1)..(25): SEQ ID NO: 2491; WAN024FCX; Start 108; Stop 132
acggtgtattcttataaactcctgc

SEQ ID NO: 327421 - DNA, 25 bp, Artificial
  probe
  misc_feature (1)..(25): SEQ ID NO: 2491; WAN024FCX; Start 70; Stop 94
aaccgacttaacaaatctcataaac

SEQ ID NO: 327422 - DNA, 25 bp, Artificial
  probe
  misc_feature (1)..(25): SEQ ID NO: 2491; WAN024FCX; Start 69; Stop 93
caaccgacttaacaaatctcataaa

SEQ ID NO: 327423 - DNA, 25 bp, Artificial
  probe
  misc_feature (1)..(25): SEQ ID NO: 2491; WAN024FCX; Start 165; Stop 189
cttcgtgttgaactacgctattaac

SEQ ID NO: 327424 - DNA, 25 bp, Artificial
  probe
  misc_feature (1)..(25): SEQ ID NO: 2491; WAN024FCX; Start 79; Stop 103
aacaaatctcataaacgcttcatgc

SEQ ID NO: 327425 - DNA, 25 bp, Artificial
  probe
  misc_feature (1)..(25): SEQ ID NO: 2491; WAN024FCX; Start 107; Stop 131
gacggtgtattcttataaactcctg

SEQ ID NO: 327426 - DNA, 25 bp, Artificial
  probe
  misc_feature (1)..(25): SEQ ID NO: 2491; WAN024FCX; Start 103; Stop 127
cccagacggtgtattcttataaact

SEQ ID NO: 327427 - DNA, 25 bp, Artificial
  probe
  misc_feature (1)..(25): SEQ ID NO: 2491; WAN024FCX; Start 62; Stop 86
ttaattccaaccgacttaacaaatc

SEQ ID NO: 327428 - DNA, 25 bp, Artificial
  probe
  misc_feature (1)..(25): SEQ ID NO: 2491; WAN024FCX; Start 106; Stop 130
agacggtgtattcttataaactcct

SEQ ID NO: 327429 - DNA, 25 bp, Artificial
  probe
  misc_feature (1)..(25): SEQ ID NO: 2491; WAN024FCX; Start 105; Stop 129
cagacggtgtattcttataaactcc

SEQ ID NO: 327430 - DNA, 25 bp, Artificial
  probe
  misc_feature (1)..(25): SEQ ID NO: 2491; WAN024FCX; Start 104; Stop 128
ccagacggtgtattcttataaactc

SEQ ID NO: 327431 - DNA, 25 bp, Artificial
  probe
  misc_feature (1)..(25): SEQ ID NO: 2491; WAN024FCX; Start 77; Stop 101
ttaacaaatctcataaacgcttcat

SEQ ID NO: 327432 - DNA, 25 bp, Artificial
  probe
  misc_feature (1)..(25): SEQ ID NO: 2491; WAN024FCX; Start 175; Stop 199
aactacgctattaacctcttcttta

SEQ ID NO: 327433 - DNA, 25 bp, Artificial
  probe
  misc_feature (1)..(25): SEQ ID NO: 2491; WAN024FCX; Start 166; Stop 190
ttcgtgttgaactacgctattaacc

SEQ ID NO: 327434 - DNA, 25 bp, Artificial
  probe
  misc_feature (1)..(25): SEQ ID NO: 2491; WAN024FCX; Start 78; Stop 102
taacaaatctcataaacgcttcatg

SEQ ID NO: 327435 - DNA, 25 bp, Artificial
  probe
  misc_feature (1)..(25): SEQ ID NO: 2492; WAN024D4A; Start 895; Stop 919
cgagcaggtatggatattcttaaca

SEQ ID NO: 327436 - DNA, 25 bp, Artificial
  probe
  misc_feature (1)..(25): SEQ ID NO: 2492; WAN024D4A; Start 896; Stop 920
gagcaggtatggatattcttaacaa

SEQ ID NO: 327437 - DNA, 25 bp, Artificial
  probe
  misc_feature (1)..(25): SEQ ID NO: 2492; WAN024D4A; Start 226; Stop 250
gacgacctctactactaccagattc

SEQ ID NO: 327438 - DNA, 25 bp, Artificial
  probe
  misc_feature (1)..(25): SEQ ID NO: 2492; WAN024D4A; Start 232; Stop 256
ctctactactaccagattcgcctag

SEQ ID NO: 327439 - DNA, 25 bp, Artificial
  probe
  misc_feature (1)..(25): SEQ ID NO: 2492; WAN024D4A; Start 231; Stop 255
cctctactactaccagattcgccta

SEQ ID NO: 327440 - DNA, 25 bp, Artificial
  probe
  misc_feature (1)..(25): SEQ ID NO: 2492; WAN024D4A; Start 547; Stop 571
gaaacaacagaccaagaagaaatca

SEQ ID NO: 327441 - DNA, 25 bp, Artificial
  probe
  misc_feature (1)..(25): SEQ ID NO: 2492; WAN024D4A; Start 549; Stop 573
aacaacagaccaagaagaaatcatt

SEQ ID NO: 327442 - DNA, 25 bp, Artificial
  probe
  misc_feature (1)..(25): SEQ ID NO: 2492; WAN024D4A; Start 548; Stop 572
aaacaacagaccaagaagaaatcat

SEQ ID NO: 327443 - DNA, 25 bp, Artificial
  probe
  misc_feature (1)..(25): SEQ ID NO: 2492; WAN024D4A; Start 90; Stop 114
tacagaagaaaccagacaccgtatt

SEQ ID NO: 327444 - DNA, 25 bp, Artificial
  probe
  misc_feature (1)..(25): SEQ ID NO: 2492; WAN024D4A; Start 89; Stop 113
ttacagaagaaaccagacaccgtat

SEQ ID NO: 327445 - DNA, 25 bp, Artificial
  probe
  misc_feature (1)..(25): SEQ ID NO: 2492; WAN024D4A; Start 91; Stop 115
acagaagaaaccagacaccgtattt

SEQ ID NO: 327446 - DNA, 25 bp, Artificial
  probe
  misc_feature (1)..(25): SEQ ID NO: 2492; WAN024D4A; Start 229; Stop 253
gacctctactactaccagattcgcc

SEQ ID NO: 327447 - DNA, 25 bp, Artificial
  probe
  misc_feature (1)..(25): SEQ ID NO: 2492; WAN024D4A; Start 88; Stop 112
gttacagaagaaaccagacaccgta

SEQ ID NO: 327448 - DNA, 25 bp, Artificial
  probe
  misc_feature (1)..(25): SEQ ID NO: 2492; WAN024D4A; Start 230; Stop 254
acctctactactaccagattcgcct

SEQ ID NO: 327449 - DNA, 25 bp, Artificial
  probe
  misc_feature (1)..(25): SEQ ID NO: 2492; WAN024D4A; Start 981; Stop 1005
aagagaaagtaccctaaatcaagaa

SEQ ID NO: 327450 - DNA, 25 bp, Artificial
  probe
  misc_feature (1)..(25): SEQ ID NO: 2492; WAN024D4A; Start 982; Stop 1006
agagaaagtaccctaaatcaagaat

SEQ ID NO: 327451 - DNA, 25 bp, Artificial
  probe
  misc_feature (1)..(25): SEQ ID NO: 2492; WAN024D4A; Start 227; Stop 251
acgacctctactactaccagattcg

SEQ ID NO: 327452 - DNA, 25 bp, Artificial
  probe
  misc_feature (1)..(25): SEQ ID NO: 2492; WAN024D4A; Start 378; Stop 402
gatttctgcctttgaagaataccaa

SEQ ID NO: 327453 - DNA, 25 bp, Artificial
  probe
  misc_feature (1)..(25): SEQ ID NO: 2492; WAN024D4A; Start 377; Stop 401
agatttctgcctttgaagaatacca

SEQ ID NO: 327454 - DNA, 25 bp, Artificial
  probe
  misc_feature (1)..(25): SEQ ID NO: 2492; WAN024D4A; Start 481; Stop 505
aaacaggttgtcgattatttcctca

SEQ ID NO: 327455 - DNA, 25 bp, Artificial
  probe
  misc_feature (1)..(25): SEQ ID NO: 2492; WAN024D4A; Start 93; Stop 117
agaagaaaccagacaccgtatttta

SEQ ID NO: 327456 - DNA, 25 bp, Artificial
  probe
  misc_feature (1)..(25): SEQ ID NO: 2492; WAN024D4A; Start 95; Stop 119
aagaaaccagacaccgtattttaac

SEQ ID NO: 327457 - DNA, 25 bp, Artificial
  probe
  misc_feature (1)..(25): SEQ ID NO: 2492; WAN024D4A; Start 482; Stop 506
aacaggttgtcgattatttcctcag

SEQ ID NO: 327458 - DNA, 25 bp, Artificial
  probe
  misc_feature (1)..(25): SEQ ID NO: 2492; WAN024D4A; Start 379; Stop 403
atttctgcctttgaagaataccaaa

SEQ ID NO: 327459 - DNA, 25 bp, Artificial
  probe
  misc_feature (1)..(25): SEQ ID NO: 2492; WAN024D4A; Start 94; Stop 118
gaagaaaccagacaccgtattttaa

SEQ ID NO: 327460 - DNA, 25 bp, Artificial
  probe
  misc_feature (1)..(25): SEQ ID NO: 2492; WAN024D4A; Start 376; Stop 400
cagatttctgcctttgaagaatacc

SEQ ID NO: 327461 - DNA, 25 bp, Artificial
  probe
  misc_feature (1)..(25): SEQ ID NO: 2492; WAN024D4A; Start 375; Stop 399
tcagatttctgcctttgaagaatac

SEQ ID NO: 327462 - DNA, 25 bp, Artificial
  probe
  misc_feature (1)..(25): SEQ ID NO: 2492; WAN024D4A; Start 374; Stop 398
ctcagatttctgcctttgaagaata

SEQ ID NO: 327463 - DNA, 25 bp, Artificial
  probe
  misc_feature (1)..(25): SEQ ID NO: 2492; WAN024D4A; Start 980; Stop 1004
taagagaaagtaccctaaatcaaga

SEQ ID NO: 327464 - DNA, 25 bp, Artificial
  probe
  misc_feature (1)..(25): SEQ ID NO: 2492; WAN024D4A; Start 853; Stop 877
cctcccctctctagtattacagttt

SEQ ID NO: 327465 - DNA, 25 bp, Artificial
  probe
  misc_feature (1)..(25): SEQ ID NO: 2492; WAN024D4A; Start 96; Stop 120
agaaaccagacaccgtattttaacc

SEQ ID NO: 327466 - DNA, 25 bp, Artificial
  probe
  misc_feature (1)..(25): SEQ ID NO: 2492; WAN024D4A; Start 850; Stop 874
tatcctcccctctctagtattacag

SEQ ID NO: 327467 - DNA, 25 bp, Artificial
  probe
  misc_feature (1)..(25): SEQ ID NO: 2492; WAN024D4A; Start 849; Stop 873
ctatcctcccctctctagtattaca

SEQ ID NO: 327468 - DNA, 25 bp, Artificial
  probe
  misc_feature (1)..(25): SEQ ID NO: 2493; WAN024FGW; Start 651; Stop 675
tacaatccgtaatcaagaactccag

SEQ ID NO: 327469 - DNA, 25 bp, Artificial
  probe
  misc_feature (1)..(25): SEQ ID NO: 2493; WAN024FGW; Start 650; Stop 674
ctacaatccgtaatcaagaactcca

SEQ ID NO: 327470 - DNA, 25 bp, Artificial
  probe
  misc_feature (1)..(25): SEQ ID NO: 2493; WAN024FGW; Start 670; Stop 694
ctccagttcacacatattctccaag

SEQ ID NO: 327471 - DNA, 25 bp, Artificial
  probe
  misc_feature (1)..(25): SEQ ID NO: 2493; WAN024FGW; Start 916; Stop 940
aagcaagaattagatagaaggcgtc

SEQ ID NO: 327472 - DNA, 25 bp, Artificial
  probe
  misc_feature (1)..(25): SEQ ID NO: 2493; WAN024FGW; Start 914; Stop 938
tcaagcaagaattagatagaaggcg

SEQ ID NO: 327473 - DNA, 25 bp, Artificial
  probe
  misc_feature (1)..(25): SEQ ID NO: 2493; WAN024FGW; Start 913; Stop 937
atcaagcaagaattagatagaaggc

SEQ ID NO: 327474 - DNA, 25 bp, Artificial
  probe
  misc_feature (1)..(25): SEQ ID NO: 2493; WAN024FGW; Start 915; Stop 939
caagcaagaattagatagaaggcgt

SEQ ID NO: 327475 - DNA, 25 bp, Artificial
  probe
  misc_feature (1)..(25): SEQ ID NO: 2493; WAN024FGW; Start 649; Stop 673
gctacaatccgtaatcaagaactcc

SEQ ID NO: 327476 - DNA, 25 bp, Artificial
  probe
  misc_feature (1)..(25): SEQ ID NO: 2493; WAN024FGW; Start 669; Stop 693
actccagttcacacatattctccaa

SEQ ID NO: 327477 - DNA, 25 bp, Artificial
  probe
  misc_feature (1)..(25): SEQ ID NO: 2493; WAN024FGW; Start 671; Stop 695
tccagttcacacatattctccaaga

SEQ ID NO: 327478 - DNA, 25 bp, Artificial
  probe
  misc_feature (1)..(25): SEQ ID NO: 2493; WAN024FGW; Start 648; Stop 672
cgctacaatccgtaatcaagaactc

SEQ ID NO: 327479 - DNA, 25 bp, Artificial
  probe
  misc_feature (1)..(25): SEQ ID NO: 2493; WAN024FGW; Start 475; Stop 499
tatacaggacctcgtactatcttgc

SEQ ID NO: 327480 - DNA, 25 bp, Artificial
  probe
  misc_feature (1)..(25): SEQ ID NO: 2493; WAN024FGW; Start 474; Stop 498
ttatacaggacctcgtactatcttg

SEQ ID NO: 327481 - DNA, 25 bp, Artificial
  probe
  misc_feature (1)..(25): SEQ ID NO: 2493; WAN024FGW; Start 652; Stop 676
acaatccgtaatcaagaactccagt

SEQ ID NO: 327482 - DNA, 25 bp, Artificial
  probe
  misc_feature (1)..(25): SEQ ID NO: 2493; WAN024FGW; Start 917; Stop 941
agcaagaattagatagaaggcgtct

SEQ ID NO: 327483 - DNA, 25 bp, Artificial
  probe
  misc_feature (1)..(25): SEQ ID NO: 2493; WAN024FGW; Start 647; Stop 671
tcgctacaatccgtaatcaagaact

SEQ ID NO: 327484 - DNA, 25 bp, Artificial
  probe
  misc_feature (1)..(25): SEQ ID NO: 2493; WAN024FGW; Start 646; Stop 670
gtcgctacaatccgtaatcaagaac

SEQ ID NO: 327485 - DNA, 25 bp, Artificial
  probe
  misc_feature (1)..(25): SEQ ID NO: 2493; WAN024FGW; Start 653; Stop 677
caatccgtaatcaagaactccagtt

SEQ ID NO: 327486 - DNA, 25 bp, Artificial
  probe
  misc_feature (1)..(25): SEQ ID NO: 2493; WAN024FGW; Start 691; Stop 715
caagaaggtggagattatgtaacta

SEQ ID NO: 327487 - DNA, 25 bp, Artificial
  probe
  misc_feature (1)..(25): SEQ ID NO: 2493; WAN024FGW; Start 918; Stop 942
gcaagaattagatagaaggcgtcta

SEQ ID NO: 327488 - DNA, 25 bp, Artificial
  probe
  misc_feature (1)..(25): SEQ ID NO: 2493; WAN024FGW; Start 668; Stop 692
aactccagttcacacatattctcca

SEQ ID NO: 327489 - DNA, 25 bp, Artificial
  probe
  misc_feature (1)..(25): SEQ ID NO: 2493; WAN024FGW; Start 690; Stop 714
ccaagaaggtggagattatgtaact

SEQ ID NO: 327490 - DNA, 25 bp, Artificial
  probe
  misc_feature (1)..(25): SEQ ID NO: 2493; WAN024FGW; Start 1051; Stop 1075
aatcaagttggtatccgtaatccag

SEQ ID NO: 327491 - DNA, 25 bp, Artificial
  probe
  misc_feature (1)..(25): SEQ ID NO: 2493; WAN024FGW; Start 137; Stop 161
ttattgttgatattgatgcagcagc

SEQ ID NO: 327492 - DNA, 25 bp, Artificial
  probe
  misc_feature (1)..(25): SEQ ID NO: 2493; WAN024FGW; Start 603; Stop 627
atttggtgctacagtgattgatatg

SEQ ID NO: 327493 - DNA, 25 bp, Artificial
  probe
  misc_feature (1)..(25): SEQ ID NO: 2493; WAN024FGW; Start 692; Stop 716
aagaaggtggagattatgtaactaa

SEQ ID NO: 327494 - DNA, 25 bp, Artificial
  probe
  misc_feature (1)..(25): SEQ ID NO: 2493; WAN024FGW; Start 86; Stop 110
taaatgtaattggcgtgagtaatgc

SEQ ID NO: 327495 - DNA, 25 bp, Artificial
  probe
  misc_feature (1)..(25): SEQ ID NO: 2493; WAN024FGW; Start 66; Stop 90
cgagcagagaaatggtgaattaaat

SEQ ID NO: 327496 - DNA, 25 bp, Artificial
  probe
  misc_feature (1)..(25): SEQ ID NO: 2493; WAN024FGW; Start 1090; Stop 1114
attagtttatcagaatttgcgggtc

SEQ ID NO: 327497 - DNA, 25 bp, Artificial
  probe
  misc_feature (1)..(25): SEQ ID NO: 2493; WAN024FGW; Start 28; Stop 52
ctagatattggaacaagctctgtca

SEQ ID NO: 327498 - DNA, 25 bp, Artificial
  probe
  misc_feature (1)..(25): SEQ ID NO: 2493; WAN024FGW; Start 454; Stop 478
cttgaaatgcgtggtttgctttata

SEQ ID NO: 327499 - DNA, 25 bp, Artificial
  probe
  misc_feature (1)..(25): SEQ ID NO: 2493; WAN024FGW; Start 29; Stop 53
tagatattggaacaagctctgtcaa

SEQ ID NO: 327500 - DNA, 25 bp, Artificial
  probe
  misc_feature (1)..(25): SEQ ID NO: 2493; WAN024FGW; Start 645; Stop 669
tgtcgctacaatccgtaatcaagaa

SEQ ID NO: 327501 - DNA, 25 bp, Artificial
  probe
  misc_feature (1)..(25): SEQ ID NO: 2494; WAN024EZD; Start 145; Stop 169
gcaatcacaatcacaacagataata

SEQ ID NO: 327502 - DNA, 25 bp, Artificial
  probe
  misc_feature (1)..(25): SEQ ID NO: 2494; WAN024EZD; Start 144; Stop 168
tgcaatcacaatcacaacagataat

SEQ ID NO: 327503 - DNA, 25 bp, Artificial
  probe
  misc_feature (1)..(25): SEQ ID NO: 2494; WAN024EZD; Start 99; Stop 123
atcaaatacattgctggattggttt

SEQ ID NO: 327504 - DNA, 25 bp, Artificial
  probe
  misc_feature (1)..(25): SEQ ID NO: 2494; WAN024EZD; Start 98; Stop 122
catcaaatacattgctggattggtt

SEQ ID NO: 327505 - DNA, 25 bp, Artificial
  probe
  misc_feature (1)..(25): SEQ ID NO: 2494; WAN024EZD; Start 65; Stop 89
ctttactgcgttcaaacaaatcacc

SEQ ID NO: 327506 - DNA, 25 bp, Artificial
  probe
  misc_feature (1)..(25): SEQ ID NO: 2494; WAN024EZD; Start 82; Stop 106
aaatcacctgaactggcatcaaata

SEQ ID NO: 327507 - DNA, 25 bp, Artificial
  probe
  misc_feature (1)..(25): SEQ ID NO: 2494; WAN024EZD; Start 66; Stop 90
tttactgcgttcaaacaaatcacct

SEQ ID NO: 327508 - DNA, 25 bp, Artificial
  probe
  misc_feature (1)..(25): SEQ ID NO: 2494; WAN024EZD; Start 146; Stop 170
caatcacaatcacaacagataatac

SEQ ID NO: 327509 - DNA, 25 bp, Artificial
  probe
  misc_feature (1)..(25): SEQ ID NO: 2494; WAN024EZD; Start 147; Stop 171
aatcacaatcacaacagataatact

SEQ ID NO: 327510 - DNA, 25 bp, Artificial
  probe
  misc_feature (1)..(25): SEQ ID NO: 2494; WAN024EZD; Start 64; Stop 88
gctttactgcgttcaaacaaatcac

SEQ ID NO: 327511 - DNA, 25 bp, Artificial
  probe
  misc_feature (1)..(25): SEQ ID NO: 2494; WAN024EZD; Start 83; Stop 107
aatcacctgaactggcatcaaatac

SEQ ID NO: 327512 - DNA, 25 bp, Artificial
  probe
  misc_feature (1)..(25): SEQ ID NO: 2494; WAN024EZD; Start 87; Stop 111
acctgaactggcatcaaatacattg

SEQ ID NO: 327513 - DNA, 25 bp, Artificial
  probe
  misc_feature (1)..(25): SEQ ID NO: 2494; WAN024EZD; Start 86; Stop 110
cacctgaactggcatcaaatacatt

SEQ ID NO: 327514 - DNA, 25 bp, Artificial
  probe
  misc_feature (1)..(25): SEQ ID NO: 2494; WAN024EZD; Start 242; Stop 266
acttagattcaagatgtagggttac

SEQ ID NO: 327515 - DNA, 25 bp, Artificial
  probe
  misc_feature (1)..(25): SEQ ID NO: 2494; WAN024EZD; Start 67; Stop 91
ttactgcgttcaaacaaatcacctg

SEQ ID NO: 327516 - DNA, 25 bp, Artificial
  probe
  misc_feature (1)..(25): SEQ ID NO: 2494; WAN024EZD; Start 243; Stop 267
cttagattcaagatgtagggttact

SEQ ID NO: 327517 - DNA, 25 bp, Artificial
  probe
  misc_feature (1)..(25): SEQ ID NO: 2494; WAN024EZD; Start 81; Stop 105
caaatcacctgaactggcatcaaat

SEQ ID NO: 327518 - DNA, 25 bp, Artificial
  probe
  misc_feature (1)..(25): SEQ ID NO: 2494; WAN024EZD; Start 85; Stop 109
tcacctgaactggcatcaaatacat

SEQ ID NO: 327519 - DNA, 25 bp, Artificial
  probe
  misc_feature (1)..(25): SEQ ID NO: 2494; WAN024EZD; Start 84; Stop 108
atcacctgaactggcatcaaataca

SEQ ID NO: 327520 - DNA, 25 bp, Artificial
  probe
  misc_feature (1)..(25): SEQ ID NO: 2494; WAN024EZD; Start 149; Stop 173
tcacaatcacaacagataatactaa

SEQ ID NO: 327521 - DNA, 25 bp, Artificial
  probe
  misc_feature (1)..(25): SEQ ID NO: 2494; WAN024EZD; Start 269; Stop 293
ttctttccttgggacaatactttaa

SEQ ID NO: 327522 - DNA, 25 bp, Artificial
  probe
  misc_feature (1)..(25): SEQ ID NO: 2494; WAN024EZD; Start 268; Stop 292
tttctttccttgggacaatacttta

SEQ ID NO: 327523 - DNA, 25 bp, Artificial
  probe
  misc_feature (1)..(25): SEQ ID NO: 2494; WAN024EZD; Start 62; Stop 86
gagctttactgcgttcaaacaaatc

SEQ ID NO: 327524 - DNA, 25 bp, Artificial
  probe
  misc_feature (1)..(25): SEQ ID NO: 2494; WAN024EZD; Start 245; Stop 269
tagattcaagatgtagggttacttt

SEQ ID NO: 327525 - DNA, 25 bp, Artificial
  probe
  misc_feature (1)..(25): SEQ ID NO: 2494; WAN024EZD; Start 244; Stop 268
ttagattcaagatgtagggttactt

SEQ ID NO: 327526 - DNA, 25 bp, Artificial
  probe
  misc_feature (1)..(25): SEQ ID NO: 2494; WAN024EZD; Start 77; Stop 101
caaacaaatcacctgaactggcatc

SEQ ID NO: 327527 - DNA, 25 bp, Artificial
  probe
  misc_feature (1)..(25): SEQ ID NO: 2494; WAN024EZD; Start 148; Stop 172
atcacaatcacaacagataatacta

SEQ ID NO: 327528 - DNA, 25 bp, Artificial
  probe
  misc_feature (1)..(25): SEQ ID NO: 2494; WAN024EZD; Start 63; Stop 87
agctttactgcgttcaaacaaatca

SEQ ID NO: 327529 - DNA, 25 bp, Artificial
  probe
  misc_feature (1)..(25): SEQ ID NO: 2494; WAN024EZD; Start 68; Stop 92
tactgcgttcaaacaaatcacctga

SEQ ID NO: 327530 - DNA, 25 bp, Artificial
  probe
  misc_feature (1)..(25): SEQ ID NO: 2494; WAN024EZD; Start 291; Stop 315
taaaacctcaatcttgtctggatgg

SEQ ID NO: 327531 - DNA, 25 bp, Artificial
  probe
  misc_feature (1)..(25): SEQ ID NO: 2494; WAN024EZD; Start 290; Stop 314
ttaaaacctcaatcttgtctggatg

SEQ ID NO: 327532 - DNA, 25 bp, Artificial
  probe
  misc_feature (1)..(25): SEQ ID NO: 2494; WAN024EZD; Start 100; Stop 124
tcaaatacattgctggattggtttt

SEQ ID NO: 327533 - DNA, 25 bp, Artificial
  probe
  misc_feature (1)..(25): SEQ ID NO: 2494; WAN024EZD; Start 80; Stop 104
acaaatcacctgaactggcatcaaa

SEQ ID NO: 327534 - DNA, 25 bp, Artificial
  probe
  misc_feature (1)..(25): SEQ ID NO: 2495; WAN024FVL; Start 898; Stop 922
tctatcggtattggtgagtctatgt

SEQ ID NO: 327535 - DNA, 25 bp, Artificial
  probe
  misc_feature (1)..(25): SEQ ID NO: 2495; WAN024FVL; Start 897; Stop 921
atctatcggtattggtgagtctatg

SEQ ID NO: 327536 - DNA, 25 bp, Artificial
  probe
  misc_feature (1)..(25): SEQ ID NO: 2495; WAN024FVL; Start 895; Stop 919
gaatctatcggtattggtgagtcta

SEQ ID NO: 327537 - DNA, 25 bp, Artificial
  probe
  misc_feature (1)..(25): SEQ ID NO: 2495; WAN024FVL; Start 114; Stop 138
aatcaatcaatcagcacattcagat

SEQ ID NO: 327538 - DNA, 25 bp, Artificial
  probe
  misc_feature (1)..(25): SEQ ID NO: 2495; WAN024FVL; Start 1207; Stop 1231
gtcgttatcatcacacacaagatta

SEQ ID NO: 327539 - DNA, 25 bp, Artificial
  probe
  misc_feature (1)..(25): SEQ ID NO: 2495; WAN024FVL; Start 899; Stop 923
ctatcggtattggtgagtctatgta

SEQ ID NO: 327540 - DNA, 25 bp, Artificial
  probe
  misc_feature (1)..(25): SEQ ID NO: 2495; WAN024FVL; Start 892; Stop 916
gtagaatctatcggtattggtgagt

SEQ ID NO: 327541 - DNA, 25 bp, Artificial
  probe
  misc_feature (1)..(25): SEQ ID NO: 2495; WAN024FVL; Start 891; Stop 915
tgtagaatctatcggtattggtgag

SEQ ID NO: 327542 - DNA, 25 bp, Artificial
  probe
  misc_feature (1)..(25): SEQ ID NO: 2495; WAN024FVL; Start 894; Stop 918
agaatctatcggtattggtgagtct

SEQ ID NO: 327543 - DNA, 25 bp, Artificial
  probe
  misc_feature (1)..(25): SEQ ID NO: 2495; WAN024FVL; Start 893; Stop 917
tagaatctatcggtattggtgagtc

SEQ ID NO: 327544 - DNA, 25 bp, Artificial
  probe
  misc_feature (1)..(25): SEQ ID NO: 2495; WAN024FVL; Start 896; Stop 920
aatctatcggtattggtgagtctat

SEQ ID NO: 327545 - DNA, 25 bp, Artificial
  probe
  misc_feature (1)..(25): SEQ ID NO: 2495; WAN024FVL; Start 890; Stop 914
ttgtagaatctatcggtattggtga

SEQ ID NO: 327546 - DNA, 25 bp, Artificial
  probe
  misc_feature (1)..(25): SEQ ID NO: 2495; WAN024FVL; Start 149; Stop 173
ctaaggtattggtcaaggatgaaga

SEQ ID NO: 327547 - DNA, 25 bp, Artificial
  probe
  misc_feature (1)..(25): SEQ ID NO: 2495; WAN024FVL; Start 116; Stop 140
tcaatcaatcagcacattcagatat

SEQ ID NO: 327548 - DNA, 25 bp, Artificial
  probe
  misc_feature (1)..(25): SEQ ID NO: 2495; WAN024FVL; Start 115; Stop 139
atcaatcaatcagcacattcagata

SEQ ID NO: 327549 - DNA, 25 bp, Artificial
  probe
  misc_feature (1)..(25): SEQ ID NO: 2495; WAN024FVL; Start 1299; Stop 1323
cttcaaggtgctaggagaataacta

SEQ ID NO: 327550 - DNA, 25 bp, Artificial
  probe
  misc_feature (1)..(25): SEQ ID NO: 2495; WAN024FVL; Start 153; Stop 177
ggtattggtcaaggatgaagatgaa

SEQ ID NO: 327551 - DNA, 25 bp, Artificial
  probe
  misc_feature (1)..(25): SEQ ID NO: 2495; WAN024FVL; Start 151; Stop 175
aaggtattggtcaaggatgaagatg

SEQ ID NO: 327552 - DNA, 25 bp, Artificial
  probe
  misc_feature (1)..(25): SEQ ID NO: 2495; WAN024FVL; Start 1208; Stop 1232
tcgttatcatcacacacaagattaa

SEQ ID NO: 327553 - DNA, 25 bp, Artificial
  probe
  misc_feature (1)..(25): SEQ ID NO: 2495; WAN024FVL; Start 1301; Stop 1325
tcaaggtgctaggagaataactaat

SEQ ID NO: 327554 - DNA, 25 bp, Artificial
  probe
  misc_feature (1)..(25): SEQ ID NO: 2495; WAN024FVL; Start 1300; Stop 1324
ttcaaggtgctaggagaataactaa

SEQ ID NO: 327555 - DNA, 25 bp, Artificial
  probe
  misc_feature (1)..(25): SEQ ID NO: 2495; WAN024FVL; Start 150; Stop 174
taaggtattggtcaaggatgaagat

SEQ ID NO: 327556 - DNA, 25 bp, Artificial
  probe
  misc_feature (1)..(25): SEQ ID NO: 2495; WAN024FVL; Start 900; Stop 924
tatcggtattggtgagtctatgtac

SEQ ID NO: 327557 - DNA, 25 bp, Artificial
  probe
  misc_feature (1)..(25): SEQ ID NO: 2495; WAN024FVL; Start 152; Stop 176
aggtattggtcaaggatgaagatga

SEQ ID NO: 327558 - DNA, 25 bp, Artificial
  probe
  misc_feature (1)..(25): SEQ ID NO: 2495; WAN024FVL; Start 148; Stop 172
gctaaggtattggtcaaggatgaag

SEQ ID NO: 327559 - DNA, 25 bp, Artificial
  probe
  misc_feature (1)..(25): SEQ ID NO: 2495; WAN024FVL; Start 1206; Stop 1230
tgtcgttatcatcacacacaagatt

SEQ ID NO: 327560 - DNA, 25 bp, Artificial
  probe
  misc_feature (1)..(25): SEQ ID NO: 2495; WAN024FVL; Start 906; Stop 930
tattggtgagtctatgtactacgga

SEQ ID NO: 327561 - DNA, 25 bp, Artificial
  probe
  misc_feature (1)..(25): SEQ ID NO: 2495; WAN024FVL; Start 905; Stop 929
gtattggtgagtctatgtactacgg

SEQ ID NO: 327562 - DNA, 25 bp, Artificial
  probe
  misc_feature (1)..(25): SEQ ID NO: 2495; WAN024FVL; Start 904; Stop 928
ggtattggtgagtctatgtactacg

SEQ ID NO: 327563 - DNA, 25 bp, Artificial
  probe
  misc_feature (1)..(25): SEQ ID NO: 2495; WAN024FVL; Start 903; Stop 927
cggtattggtgagtctatgtactac

SEQ ID NO: 327564 - DNA, 25 bp, Artificial
  probe
  misc_feature (1)..(25): SEQ ID NO: 2495; WAN024FVL; Start 902; Stop 926
tcggtattggtgagtctatgtacta

SEQ ID NO: 327565 - DNA, 25 bp, Artificial
  probe
  misc_feature (1)..(25): SEQ ID NO: 2495; WAN024FVL; Start 145; Stop 169
gttgctaaggtattggtcaaggatg

SEQ ID NO: 327566 - DNA, 25 bp, Artificial
  probe
  misc_feature (1)..(25): SEQ ID NO: 2495; WAN024FVL; Start 144; Stop 168
agttgctaaggtattggtcaaggat

SEQ ID NO: 327567 - DNA, 25 bp, Artificial
  probe
  misc_feature (1)..(25): SEQ ID NO: 2496; WAN024DVY; Start 441; Stop 465
ctatgtgattactgatgaagaacgc

SEQ ID NO: 327568 - DNA, 25 bp, Artificial
  probe
  misc_feature (1)..(25): SEQ ID NO: 2496; WAN024DVY; Start 442; Stop 466
tatgtgattactgatgaagaacgca

SEQ ID NO: 327569 - DNA, 25 bp, Artificial
  probe
  misc_feature (1)..(25): SEQ ID NO: 2496; WAN024DVY; Start 474; Stop 498
gatggtaatggttgacaagaatagc

SEQ ID NO: 327570 - DNA, 25 bp, Artificial
  probe
  misc_feature (1)..(25): SEQ ID NO: 2496; WAN024DVY; Start 468; Stop 492
ggttaagatggtaatggttgacaag

SEQ ID NO: 327571 - DNA, 25 bp, Artificial
  probe
  misc_feature (1)..(25): SEQ ID NO: 2496; WAN024DVY; Start 467; Stop 491
aggttaagatggtaatggttgacaa

SEQ ID NO: 327572 - DNA, 25 bp, Artificial
  probe
  misc_feature (1)..(25): SEQ ID NO: 2496; WAN024DVY; Start 466; Stop 490
aaggttaagatggtaatggttgaca

SEQ ID NO: 327573 - DNA, 25 bp, Artificial
  probe
  misc_feature (1)..(25): SEQ ID NO: 2496; WAN024DVY; Start 443; Stop 467
atgtgattactgatgaagaacgcaa

SEQ ID NO: 327574 - DNA, 25 bp, Artificial
  probe
  misc_feature (1)..(25): SEQ ID NO: 2496; WAN024DVY; Start 469; Stop 493
gttaagatggtaatggttgacaaga

SEQ ID NO: 327575 - DNA, 25 bp, Artificial
  probe
  misc_feature (1)..(25): SEQ ID NO: 2496; WAN024DVY; Start 448; Stop 472
attactgatgaagaacgcaaggtta

SEQ ID NO: 327576 - DNA, 25 bp, Artificial
  probe
  misc_feature (1)..(25): SEQ ID NO: 2496; WAN024DVY; Start 475; Stop 499
atggtaatggttgacaagaatagcc

SEQ ID NO: 327577 - DNA, 25 bp, Artificial
  probe
  misc_feature (1)..(25): SEQ ID NO: 2496; WAN024DVY; Start 440; Stop 464
actatgtgattactgatgaagaacg

SEQ ID NO: 327578 - DNA, 25 bp, Artificial
  probe
  misc_feature (1)..(25): SEQ ID NO: 2496; WAN024DVY; Start 465; Stop 489
caaggttaagatggtaatggttgac

SEQ ID NO: 327579 - DNA, 25 bp, Artificial
  probe
  misc_feature (1)..(25): SEQ ID NO: 2496; WAN024DVY; Start 458; Stop 482
aagaacgcaaggttaagatggtaat

SEQ ID NO: 327580 - DNA, 25 bp, Artificial
  probe
  misc_feature (1)..(25): SEQ ID NO: 2496; WAN024DVY; Start 449; Stop 473
ttactgatgaagaacgcaaggttaa

SEQ ID NO: 327581 - DNA, 25 bp, Artificial
  probe
  misc_feature (1)..(25): SEQ ID NO: 2496; WAN024DVY; Start 477; Stop 501
ggtaatggttgacaagaatagcctt

SEQ ID NO: 327582 - DNA, 25 bp, Artificial
  probe
  misc_feature (1)..(25): SEQ ID NO: 2496; WAN024DVY; Start 473; Stop 497
agatggtaatggttgacaagaatag

SEQ ID NO: 327583 - DNA, 25 bp, Artificial
  probe
  misc_feature (1)..(25): SEQ ID NO: 2496; WAN024DVY; Start 450; Stop 474
tactgatgaagaacgcaaggttaag

SEQ ID NO: 327584 - DNA, 25 bp, Artificial
  probe
  misc_feature (1)..(25): SEQ ID NO: 2496; WAN024DVY; Start 444; Stop 468
tgtgattactgatgaagaacgcaag

SEQ ID NO: 327585 - DNA, 25 bp, Artificial
  probe
  misc_feature (1)..(25): SEQ ID NO: 2496; WAN024DVY; Start 470; Stop 494
ttaagatggtaatggttgacaagaa

SEQ ID NO: 327586 - DNA, 25 bp, Artificial
  probe
  misc_feature (1)..(25): SEQ ID NO: 2496; WAN024DVY; Start 459; Stop 483
agaacgcaaggttaagatggtaatg

SEQ ID NO: 327587 - DNA, 25 bp, Artificial
  probe
  misc_feature (1)..(25): SEQ ID NO: 2496; WAN024DVY; Start 457; Stop 481
gaagaacgcaaggttaagatggtaa

SEQ ID NO: 327588 - DNA, 25 bp, Artificial
  probe
  misc_feature (1)..(25): SEQ ID NO: 2496; WAN024DVY; Start 452; Stop 476
ctgatgaagaacgcaaggttaagat

SEQ ID NO: 327589 - DNA, 25 bp, Artificial
  probe
  misc_feature (1)..(25): SEQ ID NO: 2496; WAN024DVY; Start 464; Stop 488
gcaaggttaagatggtaatggttga

SEQ ID NO: 327590 - DNA, 25 bp, Artificial
  probe
  misc_feature (1)..(25): SEQ ID NO: 2496; WAN024DVY; Start 472; Stop 496
aagatggtaatggttgacaagaata

SEQ ID NO: 327591 - DNA, 25 bp, Artificial
  probe
  misc_feature (1)..(25): SEQ ID NO: 2496; WAN024DVY; Start 471; Stop 495
taagatggtaatggttgacaagaat

SEQ ID NO: 327592 - DNA, 25 bp, Artificial
  probe
  misc_feature (1)..(25): SEQ ID NO: 2496; WAN024DVY; Start 447; Stop 471
gattactgatgaagaacgcaaggtt

SEQ ID NO: 327593 - DNA, 25 bp, Artificial
  probe
  misc_feature (1)..(25): SEQ ID NO: 2496; WAN024DVY; Start 453; Stop 477
tgatgaagaacgcaaggttaagatg

SEQ ID NO: 327594 - DNA, 25 bp, Artificial
  probe
  misc_feature (1)..(25): SEQ ID NO: 2496; WAN024DVY; Start 476; Stop 500
tggtaatggttgacaagaatagcct

SEQ ID NO: 327595 - DNA, 25 bp, Artificial
  probe
  misc_feature (1)..(25): SEQ ID NO: 2496; WAN024DVY; Start 445; Stop 469
gtgattactgatgaagaacgcaagg

SEQ ID NO: 327596 - DNA, 25 bp, Artificial
  probe
  misc_feature (1)..(25): SEQ ID NO: 2496; WAN024DVY; Start 1059; Stop 1083
ttctaagaatgccttgattgatgcc

SEQ ID NO: 327597 - DNA, 25 bp, Artificial
  probe
  misc_feature (1)..(25): SEQ ID NO: 2496; WAN024DVY; Start 1061; Stop 1085
ctaagaatgccttgattgatgcctg

SEQ ID NO: 327598 - DNA, 25 bp, Artificial
  probe
  misc_feature (1)..(25): SEQ ID NO: 2496; WAN024DVY; Start 460; Stop 484
gaacgcaaggttaagatggtaatgg

SEQ ID NO: 327599 - DNA, 25 bp, Artificial
  probe
  misc_feature (1)..(25): SEQ ID NO: 2496; WAN024DVY; Start 456; Stop 480
tgaagaacgcaaggttaagatggta

SEQ ID NO: 327600 - DNA, 25 bp, Artificial
  probe
  misc_feature (1)..(25): SEQ ID NO: 2497; WAN024DKO; Start 143; Stop 167
cagcagtatctcacttagtaacagt

SEQ ID NO: 327601 - DNA, 25 bp, Artificial
  probe
  misc_feature (1)..(25): SEQ ID NO: 2497; WAN024DKO; Start 142; Stop 166
acagcagtatctcacttagtaacag

SEQ ID NO: 327602 - DNA, 25 bp, Artificial
  probe
  misc_feature (1)..(25): SEQ ID NO: 2497; WAN024DKO; Start 145; Stop 169
gcagtatctcacttagtaacagttg

SEQ ID NO: 327603 - DNA, 25 bp, Artificial
  probe
  misc_feature (1)..(25): SEQ ID NO: 2497; WAN024DKO; Start 144; Stop 168
agcagtatctcacttagtaacagtt

SEQ ID NO: 327604 - DNA, 25 bp, Artificial
  probe
  misc_feature (1)..(25): SEQ ID NO: 2497; WAN024DKO; Start 151; Stop 175
tctcacttagtaacagttgaagaag

SEQ ID NO: 327605 - DNA, 25 bp, Artificial
  probe
  misc_feature (1)..(25): SEQ ID NO: 2497; WAN024DKO; Start 146; Stop 170
cagtatctcacttagtaacagttga

SEQ ID NO: 327606 - DNA, 25 bp, Artificial
  probe
  misc_feature (1)..(25): SEQ ID NO: 2497; WAN024DKO; Start 150; Stop 174
atctcacttagtaacagttgaagaa

SEQ ID NO: 327607 - DNA, 25 bp, Artificial
  probe
  misc_feature (1)..(25): SEQ ID NO: 2497; WAN024DKO; Start 147; Stop 171
agtatctcacttagtaacagttgaa

SEQ ID NO: 327608 - DNA, 25 bp, Artificial
  probe
  misc_feature (1)..(25): SEQ ID NO: 2497; WAN024DKO; Start 148; Stop 172
gtatctcacttagtaacagttgaag

SEQ ID NO: 327609 - DNA, 25 bp, Artificial
  probe
  misc_feature (1)..(25): SEQ ID NO: 2497; WAN024DKO; Start 149; Stop 173
tatctcacttagtaacagttgaaga

SEQ ID NO: 327610 - DNA, 25 bp, Artificial
  probe
  misc_feature (1)..(25): SEQ ID NO: 2497; WAN024DKO; Start 106; Stop 130
attaaagaagataacgctgctatcc

SEQ ID NO: 327611 - DNA, 25 bp, Artificial
  probe
  misc_feature (1)..(25): SEQ ID NO: 2497; WAN024DKO; Start 107; Stop 131
ttaaagaagataacgctgctatccg

SEQ ID NO: 327612 - DNA, 25 bp, Artificial
  probe
  misc_feature (1)..(25): SEQ ID NO: 2497; WAN024DKO; Start 152; Stop 176
ctcacttagtaacagttgaagaagt

SEQ ID NO: 327613 - DNA, 25 bp, Artificial
  probe
  misc_feature (1)..(25): SEQ ID NO: 2497; WAN024DKO; Start 153; Stop 177
tcacttagtaacagttgaagaagta

SEQ ID NO: 327614 - DNA, 25 bp, Artificial
  probe
  misc_feature (1)..(25): SEQ ID NO: 2497; WAN024DKO; Start 60; Stop 84
taaaactgttgtagcacttggactt

SEQ ID NO: 327615 - DNA, 25 bp, Artificial
  probe
  misc_feature (1)..(25): SEQ ID NO: 2497; WAN024DKO; Start 74; Stop 98
cacttggacttggcaaattgaacag

SEQ ID NO: 327616 - DNA, 25 bp, Artificial
  probe
  misc_feature (1)..(25): SEQ ID NO: 2497; WAN024DKO; Start 71; Stop 95
tagcacttggacttggcaaattgaa

SEQ ID NO: 327617 - DNA, 25 bp, Artificial
  probe
  misc_feature (1)..(25): SEQ ID NO: 2497; WAN024DKO; Start 105; Stop 129
tattaaagaagataacgctgctatc

SEQ ID NO: 327618 - DNA, 25 bp, Artificial
  probe
  misc_feature (1)..(25): SEQ ID NO: 2497; WAN024DKO; Start 59; Stop 83
gtaaaactgttgtagcacttggact

SEQ ID NO: 327619 - DNA, 25 bp, Artificial
  probe
  misc_feature (1)..(25): SEQ ID NO: 2497; WAN024DKO; Start 62; Stop 86
aaactgttgtagcacttggacttgg

SEQ ID NO: 327620 - DNA, 25 bp, Artificial
  probe
  misc_feature (1)..(25): SEQ ID NO: 2497; WAN024DKO; Start 104; Stop 128
ttattaaagaagataacgctgctat

SEQ ID NO: 327621 - DNA, 25 bp, Artificial
  probe
  misc_feature (1)..(25): SEQ ID NO: 2497; WAN024DKO; Start 17; Stop 41
ttactttgactaagtctccaatcgg

SEQ ID NO: 327622 - DNA, 25 bp, Artificial
  probe
  misc_feature (1)..(25): SEQ ID NO: 2497; WAN024DKO; Start 18; Stop 42
tactttgactaagtctccaatcgga

SEQ ID NO: 327623 - DNA, 25 bp, Artificial
  probe
  misc_feature (1)..(25): SEQ ID NO: 2497; WAN024DKO; Start 154; Stop 178
cacttagtaacagttgaagaagtaa

SEQ ID NO: 327624 - DNA, 25 bp, Artificial
  probe
  misc_feature (1)..(25): SEQ ID NO: 2497; WAN024DKO; Start 68; Stop 92
ttgtagcacttggacttggcaaatt

SEQ ID NO: 327625 - DNA, 25 bp, Artificial
  probe
  misc_feature (1)..(25): SEQ ID NO: 2497; WAN024DKO; Start 16; Stop 40
attactttgactaagtctccaatcg

SEQ ID NO: 327626 - DNA, 25 bp, Artificial
  probe
  misc_feature (1)..(25): SEQ ID NO: 2497; WAN024DKO; Start 61; Stop 85
aaaactgttgtagcacttggacttg

SEQ ID NO: 327627 - DNA, 25 bp, Artificial
  probe
  misc_feature (1)..(25): SEQ ID NO: 2497; WAN024DKO; Start 108; Stop 132
taaagaagataacgctgctatccgt

SEQ ID NO: 327628 - DNA, 25 bp, Artificial
  probe
  misc_feature (1)..(25): SEQ ID NO: 2497; WAN024DKO; Start 156; Stop 180
cttagtaacagttgaagaagtaaac

SEQ ID NO: 327629 - DNA, 25 bp, Artificial
  probe
  misc_feature (1)..(25): SEQ ID NO: 2497; WAN024DKO; Start 70; Stop 94
gtagcacttggacttggcaaattga

SEQ ID NO: 327630 - DNA, 25 bp, Artificial
  probe
  misc_feature (1)..(25): SEQ ID NO: 2497; WAN024DKO; Start 58; Stop 82
cgtaaaactgttgtagcacttggac

SEQ ID NO: 327631 - DNA, 25 bp, Artificial
  probe
  misc_feature (1)..(25): SEQ ID NO: 2497; WAN024DKO; Start 116; Stop 140
ataacgctgctatccgtggtatgat

SEQ ID NO: 327632 - DNA, 25 bp, Artificial
  probe
  misc_feature (1)..(25): SEQ ID NO: 2497; WAN024DKO; Start 113; Stop 137
aagataacgctgctatccgtggtat

SEQ ID NO: 327633 - DNA, 25 bp, Artificial
  probe
  misc_feature (1)..(25): SEQ ID NO: 2498; WAN024FK3; Start 140; Stop 164
gtcgtgtaacaggaacttcagctaa

SEQ ID NO: 327634 - DNA, 25 bp, Artificial
  probe
  misc_feature (1)..(25): SEQ ID NO: 2498; WAN024FK3; Start 42; Stop 66
agttgattacatcgcagcaaacaaa

SEQ ID NO: 327635 - DNA, 25 bp, Artificial
  probe
  misc_feature (1)..(25): SEQ ID NO: 2498; WAN024FK3; Start 41; Stop 65
aagttgattacatcgcagcaaacaa

SEQ ID NO: 327636 - DNA, 25 bp, Artificial
  probe
  misc_feature (1)..(25): SEQ ID NO: 2498; WAN024FK3; Start 40; Stop 64
aaagttgattacatcgcagcaaaca

SEQ ID NO: 327637 - DNA, 25 bp, Artificial
  probe
  misc_feature (1)..(25): SEQ ID NO: 2498; WAN024FK3; Start 141; Stop 165
tcgtgtaacaggaacttcagctaaa

SEQ ID NO: 327638 - DNA, 25 bp, Artificial
  probe
  misc_feature (1)..(25): SEQ ID NO: 2498; WAN024FK3; Start 76; Stop 100
gttgattacaaagatactgagcttc

SEQ ID NO: 327639 - DNA, 25 bp, Artificial
  probe
  misc_feature (1)..(25): SEQ ID NO: 2498; WAN024FK3; Start 75; Stop 99
tgttgattacaaagatactgagctt

SEQ ID NO: 327640 - DNA, 25 bp, Artificial
  probe
  misc_feature (1)..(25): SEQ ID NO: 2498; WAN024FK3; Start 77; Stop 101
ttgattacaaagatactgagcttct

SEQ ID NO: 327641 - DNA, 25 bp, Artificial
  probe
  misc_feature (1)..(25): SEQ ID NO: 2498; WAN024FK3; Start 74; Stop 98
atgttgattacaaagatactgagct

SEQ ID NO: 327642 - DNA, 25 bp, Artificial
  probe
  misc_feature (1)..(25): SEQ ID NO: 2498; WAN024FK3; Start 73; Stop 97
tatgttgattacaaagatactgagc

SEQ ID NO: 327643 - DNA, 25 bp, Artificial
  probe
  misc_feature (1)..(25): SEQ ID NO: 2498; WAN024FK3; Start 45; Stop 69
tgattacatcgcagcaaacaaaatt

SEQ ID NO: 327644 - DNA, 25 bp, Artificial
  probe
  misc_feature (1)..(25): SEQ ID NO: 2498; WAN024FK3; Start 52; Stop 76
atcgcagcaaacaaaattgaatatg

SEQ ID NO: 327645 - DNA, 25 bp, Artificial
  probe
  misc_feature (1)..(25): SEQ ID NO: 2498; WAN024FK3; Start 51; Stop 75
catcgcagcaaacaaaattgaatat

SEQ ID NO: 327646 - DNA, 25 bp, Artificial
  probe
  misc_feature (1)..(25): SEQ ID NO: 2498; WAN024FK3; Start 44; Stop 68
ttgattacatcgcagcaaacaaaat

SEQ ID NO: 327647 - DNA, 25 bp, Artificial
  probe
  misc_feature (1)..(25): SEQ ID NO: 2498; WAN024FK3; Start 46; Stop 70
gattacatcgcagcaaacaaaattg

SEQ ID NO: 327648 - DNA, 25 bp, Artificial
  probe
  misc_feature (1)..(25): SEQ ID NO: 2498; WAN024FK3; Start 50; Stop 74
acatcgcagcaaacaaaattgaata

SEQ ID NO: 327649 - DNA, 25 bp, Artificial
  probe
  misc_feature (1)..(25): SEQ ID NO: 2498; WAN024FK3; Start 49; Stop 73
tacatcgcagcaaacaaaattgaat

SEQ ID NO: 327650 - DNA, 25 bp, Artificial
  probe
  misc_feature (1)..(25): SEQ ID NO: 2498; WAN024FK3; Start 47; Stop 71
attacatcgcagcaaacaaaattga

SEQ ID NO: 327651 - DNA, 25 bp, Artificial
  probe
  misc_feature (1)..(25): SEQ ID NO: 2498; WAN024FK3; Start 82; Stop 106
tacaaagatactgagcttcttagcc

SEQ ID NO: 327652 - DNA, 25 bp, Artificial
  probe
  misc_feature (1)..(25): SEQ ID NO: 2498; WAN024FK3; Start 48; Stop 72
ttacatcgcagcaaacaaaattgaa

SEQ ID NO: 327653 - DNA, 25 bp, Artificial
  probe
  misc_feature (1)..(25): SEQ ID NO: 2498; WAN024FK3; Start 39; Stop 63
aaaagttgattacatcgcagcaaac

SEQ ID NO: 327654 - DNA, 25 bp, Artificial
  probe
  misc_feature (1)..(25): SEQ ID NO: 2498; WAN024FK3; Start 53; Stop 77
tcgcagcaaacaaaattgaatatgt

SEQ ID NO: 327655 - DNA, 25 bp, Artificial
  probe
  misc_feature (1)..(25): SEQ ID NO: 2498; WAN024FK3; Start 43; Stop 67
gttgattacatcgcagcaaacaaaa

SEQ ID NO: 327656 - DNA, 25 bp, Artificial
  probe
  misc_feature (1)..(25): SEQ ID NO: 2498; WAN024FK3; Start 81; Stop 105
ttacaaagatactgagcttcttagc

SEQ ID NO: 327657 - DNA, 25 bp, Artificial
  probe
  misc_feature (1)..(25): SEQ ID NO: 2498; WAN024FK3; Start 97; Stop 121
cttcttagccgtttcgtttcagaac

SEQ ID NO: 327658 - DNA, 25 bp, Artificial
  probe
  misc_feature (1)..(25): SEQ ID NO: 2498; WAN024FK3; Start 86; Stop 110
aagatactgagcttcttagccgttt

SEQ ID NO: 327659 - DNA, 25 bp, Artificial
  probe
  misc_feature (1)..(25): SEQ ID NO: 2498; WAN024FK3; Start 85; Stop 109
aaagatactgagcttcttagccgtt

SEQ ID NO: 327660 - DNA, 25 bp, Artificial
  probe
  misc_feature (1)..(25): SEQ ID NO: 2498; WAN024FK3; Start 78; Stop 102
tgattacaaagatactgagcttctt

SEQ ID NO: 327661 - DNA, 25 bp, Artificial
  probe
  misc_feature (1)..(25): SEQ ID NO: 2498; WAN024FK3; Start 139; Stop 163
cgtcgtgtaacaggaacttcagcta

SEQ ID NO: 327662 - DNA, 25 bp, Artificial
  probe
  misc_feature (1)..(25): SEQ ID NO: 2498; WAN024FK3; Start 142; Stop 166
cgtgtaacaggaacttcagctaaaa

SEQ ID NO: 327663 - DNA, 25 bp, Artificial
  probe
  misc_feature (1)..(25): SEQ ID NO: 2498; WAN024FK3; Start 87; Stop 111
agatactgagcttcttagccgtttc

SEQ ID NO: 327664 - DNA, 25 bp, Artificial
  probe
  misc_feature (1)..(25): SEQ ID NO: 2498; WAN024FK3; Start 127; Stop 151
aaaatccttcctcgtcgtgtaacag

SEQ ID NO: 327665 - DNA, 25 bp, Artificial
  probe
  misc_feature (1)..(25): SEQ ID NO: 2498; WAN024FK3; Start 84; Stop 108
caaagatactgagcttcttagccgt

SEQ ID NO: 327666 - DNA, 25 bp, Artificial
  probe
  misc_feature (1)..(25): SEQ ID NO: 2499; WAN024DIF; Start 274; Stop 298
agttatgcttatggtatggattggt

SEQ ID NO: 327667 - DNA, 25 bp, Artificial
  probe
  misc_feature (1)..(25): SEQ ID NO: 2499; WAN024DIF; Start 279; Stop 303
tgcttatggtatggattggttagaa

SEQ ID NO: 327668 - DNA, 25 bp, Artificial
  probe
  misc_feature (1)..(25): SEQ ID NO: 2499; WAN024DIF; Start 114; Stop 138
tgtgttaggaatgaagatgatgagt

SEQ ID NO: 327669 - DNA, 25 bp, Artificial
  probe
  misc_feature (1)..(25): SEQ ID NO: 2499; WAN024DIF; Start 278; Stop 302
atgcttatggtatggattggttaga

SEQ ID NO: 327670 - DNA, 25 bp, Artificial
  probe
  misc_feature (1)..(25): SEQ ID NO: 2499; WAN024DIF; Start 275; Stop 299
gttatgcttatggtatggattggtt

SEQ ID NO: 327671 - DNA, 25 bp, Artificial
  probe
  misc_feature (1)..(25): SEQ ID NO: 2499; WAN024DIF; Start 236; Stop 260
ttgatactattgacctctctgttct

SEQ ID NO: 327672 - DNA, 25 bp, Artificial
  probe
  misc_feature (1)..(25): SEQ ID NO: 2499; WAN024DIF; Start 113; Stop 137
atgtgttaggaatgaagatgatgag

SEQ ID NO: 327673 - DNA, 25 bp, Artificial
  probe
  misc_feature (1)..(25): SEQ ID NO: 2499; WAN024DIF; Start 108; Stop 132
tgagtatgtgttaggaatgaagatg

SEQ ID NO: 327674 - DNA, 25 bp, Artificial
  probe
  misc_feature (1)..(25): SEQ ID NO: 2499; WAN024DIF; Start 277; Stop 301
tatgcttatggtatggattggttag

SEQ ID NO: 327675 - DNA, 25 bp, Artificial
  probe
  misc_feature (1)..(25): SEQ ID NO: 2499; WAN024DIF; Start 273; Stop 297
tagttatgcttatggtatggattgg

SEQ ID NO: 327676 - DNA, 25 bp, Artificial
  probe
  misc_feature (1)..(25): SEQ ID NO: 2499; WAN024DIF; Start 115; Stop 139
gtgttaggaatgaagatgatgagta

SEQ ID NO: 327677 - DNA, 25 bp, Artificial
  probe
  misc_feature (1)..(25): SEQ ID NO: 2499; WAN024DIF; Start 109; Stop 133
gagtatgtgttaggaatgaagatga

SEQ ID NO: 327678 - DNA, 25 bp, Artificial
  probe
  misc_feature (1)..(25): SEQ ID NO: 2499; WAN024DIF; Start 237; Stop 261
tgatactattgacctctctgttcta

SEQ ID NO: 327679 - DNA, 25 bp, Artificial
  probe
  misc_feature (1)..(25): SEQ ID NO: 2499; WAN024DIF; Start 276; Stop 300
ttatgcttatggtatggattggtta

SEQ ID NO: 327680 - DNA, 25 bp, Artificial
  probe
  misc_feature (1)..(25): SEQ ID NO: 2499; WAN024DIF; Start 107; Stop 131
ttgagtatgtgttaggaatgaagat

SEQ ID NO: 327681 - DNA, 25 bp, Artificial
  probe
  misc_feature (1)..(25): SEQ ID NO: 2499; WAN024DIF; Start 106; Stop 130
attgagtatgtgttaggaatgaaga

SEQ ID NO: 327682 - DNA, 25 bp, Artificial
  probe
  misc_feature (1)..(25): SEQ ID NO: 2499; WAN024DIF; Start 111; Stop 135
gtatgtgttaggaatgaagatgatg

SEQ ID NO: 327683 - DNA, 25 bp, Artificial
  probe
  misc_feature (1)..(25): SEQ ID NO: 2499; WAN024DIF; Start 112; Stop 136
tatgtgttaggaatgaagatgatga

SEQ ID NO: 327684 - DNA, 25 bp, Artificial
  probe
  misc_feature (1)..(25): SEQ ID NO: 2499; WAN024DIF; Start 110; Stop 134
agtatgtgttaggaatgaagatgat

SEQ ID NO: 327685 - DNA, 25 bp, Artificial
  probe
  misc_feature (1)..(25): SEQ ID NO: 2499; WAN024DIF; Start 116; Stop 140
tgttaggaatgaagatgatgagtat

SEQ ID NO: 327686 - DNA, 25 bp, Artificial
  probe
  misc_feature (1)..(25): SEQ ID NO: 2499; WAN024DIF; Start 26; Stop 50
caaatatgaacaaacaacctccctt

SEQ ID NO: 327687 - DNA, 25 bp, Artificial
  probe
  misc_feature (1)..(25): SEQ ID NO: 2499; WAN024DIF; Start 230; Stop 254
tgggatttgatactattgacctctc

SEQ ID NO: 327688 - DNA, 25 bp, Artificial
  probe
  misc_feature (1)..(25): SEQ ID NO: 2499; WAN024DIF; Start 23; Stop 47
aagcaaatatgaacaaacaacctcc

SEQ ID NO: 327689 - DNA, 25 bp, Artificial
  probe
  misc_feature (1)..(25): SEQ ID NO: 2499; WAN024DIF; Start 231; Stop 255
gggatttgatactattgacctctct

SEQ ID NO: 327690 - DNA, 25 bp, Artificial
  probe
  misc_feature (1)..(25): SEQ ID NO: 2499; WAN024DIF; Start 20; Stop 44
gcaaagcaaatatgaacaaacaacc

SEQ ID NO: 327691 - DNA, 25 bp, Artificial
  probe
  misc_feature (1)..(25): SEQ ID NO: 2499; WAN024DIF; Start 241; Stop 265
actattgacctctctgttctattag

SEQ ID NO: 327692 - DNA, 25 bp, Artificial
  probe
  misc_feature (1)..(25): SEQ ID NO: 2499; WAN024DIF; Start 21; Stop 45
caaagcaaatatgaacaaacaacct

SEQ ID NO: 327693 - DNA, 25 bp, Artificial
  probe
  misc_feature (1)..(25): SEQ ID NO: 2499; WAN024DIF; Start 229; Stop 253
atgggatttgatactattgacctct

SEQ ID NO: 327694 - DNA, 25 bp, Artificial
  probe
  misc_feature (1)..(25): SEQ ID NO: 2499; WAN024DIF; Start 22; Stop 46
aaagcaaatatgaacaaacaacctc

SEQ ID NO: 327695 - DNA, 25 bp, Artificial
  probe
  misc_feature (1)..(25): SEQ ID NO: 2499; WAN024DIF; Start 280; Stop 304
gcttatggtatggattggttagaaa

SEQ ID NO: 327696 - DNA, 25 bp, Artificial
  probe
  misc_feature (1)..(25): SEQ ID NO: 2499; WAN024DIF; Start 238; Stop 262
gatactattgacctctctgttctat

SEQ ID NO: 327697 - DNA, 25 bp, Artificial
  probe
  misc_feature (1)..(25): SEQ ID NO: 2499; WAN024DIF; Start 27; Stop 51
aaatatgaacaaacaacctccctta

SEQ ID NO: 327698 - DNA, 25 bp, Artificial
  probe
  misc_feature (1)..(25): SEQ ID NO: 2499; WAN024DIF; Start 117; Stop 141
gttaggaatgaagatgatgagtatc

SEQ ID NO: 327699 - DNA, 25 bp, Artificial
  probe
  misc_feature (1)..(25): SEQ ID NO: 2500; WAN024FLG; Start 319; Stop 343
attgaagaagcacaagacaaacatt

SEQ ID NO: 327700 - DNA, 25 bp, Artificial
  probe
  misc_feature (1)..(25): SEQ ID NO: 2500; WAN024FLG; Start 320; Stop 344
ttgaagaagcacaagacaaacattt

SEQ ID NO: 327701 - DNA, 25 bp, Artificial
  probe
  misc_feature (1)..(25): SEQ ID NO: 2500; WAN024FLG; Start 318; Stop 342
aattgaagaagcacaagacaaacat

SEQ ID NO: 327702 - DNA, 25 bp, Artificial
  probe
  misc_feature (1)..(25): SEQ ID NO: 2500; WAN024FLG; Start 134; Stop 158
tagcagttgatgaagtaaaggtaaa

SEQ ID NO: 327703 - DNA, 25 bp, Artificial
  probe
  misc_feature (1)..(25): SEQ ID NO: 2500; WAN024FLG; Start 133; Stop 157
ttagcagttgatgaagtaaaggtaa

SEQ ID NO: 327704 - DNA, 25 bp, Artificial
  probe
  misc_feature (1)..(25): SEQ ID NO: 2500; WAN024FLG; Start 330; Stop 354
acaagacaaacatttgattgaccaa

SEQ ID NO: 327705 - DNA, 25 bp, Artificial
  probe
  misc_feature (1)..(25): SEQ ID NO: 2500; WAN024FLG; Start 325; Stop 349
gaagcacaagacaaacatttgattg

SEQ ID NO: 327706 - DNA, 25 bp, Artificial
  probe
  misc_feature (1)..(25): SEQ ID NO: 2500; WAN024FLG; Start 324; Stop 348
agaagcacaagacaaacatttgatt

SEQ ID NO: 327707 - DNA, 25 bp, Artificial
  probe
  misc_feature (1)..(25): SEQ ID NO: 2500; WAN024FLG; Start 323; Stop 347
aagaagcacaagacaaacatttgat

SEQ ID NO: 327708 - DNA, 25 bp, Artificial
  probe
  misc_feature (1)..(25): SEQ ID NO: 2500; WAN024FLG; Start 334; Stop 358
gacaaacatttgattgaccaagaac

SEQ ID NO: 327709 - DNA, 25 bp, Artificial
  probe
  misc_feature (1)..(25): SEQ ID NO: 2500; WAN024FLG; Start 333; Stop 357
agacaaacatttgattgaccaagaa

SEQ ID NO: 327710 - DNA, 25 bp, Artificial
  probe
  misc_feature (1)..(25): SEQ ID NO: 2500; WAN024FLG; Start 332; Stop 356
aagacaaacatttgattgaccaaga

SEQ ID NO: 327711 - DNA, 25 bp, Artificial
  probe
  misc_feature (1)..(25): SEQ ID NO: 2500; WAN024FLG; Start 331; Stop 355
caagacaaacatttgattgaccaag

SEQ ID NO: 327712 - DNA, 25 bp, Artificial
  probe
  misc_feature (1)..(25): SEQ ID NO: 2500; WAN024FLG; Start 326; Stop 350
aagcacaagacaaacatttgattga

SEQ ID NO: 327713 - DNA, 25 bp, Artificial
  probe
  misc_feature (1)..(25): SEQ ID NO: 2500; WAN024FLG; Start 329; Stop 353
cacaagacaaacatttgattgacca

SEQ ID NO: 327714 - DNA, 25 bp, Artificial
  probe
  misc_feature (1)..(25): SEQ ID NO: 2500; WAN024FLG; Start 322; Stop 346
gaagaagcacaagacaaacatttga

SEQ ID NO: 327715 - DNA, 25 bp, Artificial
  probe
  misc_feature (1)..(25): SEQ ID NO: 2500; WAN024FLG; Start 321; Stop 345
tgaagaagcacaagacaaacatttg

SEQ ID NO: 327716 - DNA, 25 bp, Artificial
  probe
  misc_feature (1)..(25): SEQ ID NO: 2500; WAN024FLG; Start 335; Stop 359
acaaacatttgattgaccaagaacg

SEQ ID NO: 327717 - DNA, 25 bp, Artificial
  probe
  misc_feature (1)..(25): SEQ ID NO: 2500; WAN024FLG; Start 327; Stop 351
agcacaagacaaacatttgattgac

SEQ ID NO: 327718 - DNA, 25 bp, Artificial
  probe
  misc_feature (1)..(25): SEQ ID NO: 2500; WAN024FLG; Start 132; Stop 156
tttagcagttgatgaagtaaaggta

SEQ ID NO: 327719 - DNA, 25 bp, Artificial
  probe
  misc_feature (1)..(25): SEQ ID NO: 2500; WAN024FLG; Start 328; Stop 352
gcacaagacaaacatttgattgacc

SEQ ID NO: 327720 - DNA, 25 bp, Artificial
  probe
  misc_feature (1)..(25): SEQ ID NO: 2500; WAN024FLG; Start 336; Stop 360
caaacatttgattgaccaagaacgt

SEQ ID NO: 327721 - DNA, 25 bp, Artificial
  probe
  misc_feature (1)..(25): SEQ ID NO: 2500; WAN024FLG; Start 46; Stop 70
tatgatcaccatgccagctatgtat

SEQ ID NO: 327722 - DNA, 25 bp, Artificial
  probe
  misc_feature (1)..(25): SEQ ID NO: 2500; WAN024FLG; Start 337; Stop 361
aaacatttgattgaccaagaacgtc

SEQ ID NO: 327723 - DNA, 25 bp, Artificial
  probe
  misc_feature (1)..(25): SEQ ID NO: 2500; WAN024FLG; Start 135; Stop 159
agcagttgatgaagtaaaggtaaaa

SEQ ID NO: 327724 - DNA, 25 bp, Artificial
  probe
  misc_feature (1)..(25): SEQ ID NO: 2500; WAN024FLG; Start 45; Stop 69
ctatgatcaccatgccagctatgta

SEQ ID NO: 327725 - DNA, 25 bp, Artificial
  probe
  misc_feature (1)..(25): SEQ ID NO: 2500; WAN024FLG; Start 128; Stop 152
cggttttagcagttgatgaagtaaa

SEQ ID NO: 327726 - DNA, 25 bp, Artificial
  probe
  misc_feature (1)..(25): SEQ ID NO: 2500; WAN024FLG; Start 136; Stop 160
gcagttgatgaagtaaaggtaaaac

SEQ ID NO: 327727 - DNA, 25 bp, Artificial
  probe
  misc_feature (1)..(25): SEQ ID NO: 2500; WAN024FLG; Start 137; Stop 161
cagttgatgaagtaaaggtaaaacg

SEQ ID NO: 327728 - DNA, 25 bp, Artificial
  probe
  misc_feature (1)..(25): SEQ ID NO: 2500; WAN024FLG; Start 131; Stop 155
ttttagcagttgatgaagtaaaggt

SEQ ID NO: 327729 - DNA, 25 bp, Artificial
  probe
  misc_feature (1)..(25): SEQ ID NO: 2500; WAN024FLG; Start 130; Stop 154
gttttagcagttgatgaagtaaagg

SEQ ID NO: 327730 - DNA, 25 bp, Artificial
  probe
  misc_feature (1)..(25): SEQ ID NO: 2500; WAN024FLG; Start 129; Stop 153
ggttttagcagttgatgaagtaaag

SEQ ID NO: 327731 - DNA, 25 bp, Artificial
  probe
  misc_feature (1)..(25): SEQ ID NO: 2500; WAN024FLG; Start 47; Stop 71
atgatcaccatgccagctatgtatc

SEQ ID NO: 327732 - DNA, 25 bp, Artificial
  probe
  misc_feature (1)..(25): SEQ ID NO: 2501; WAN024FZE; Start 64; Stop 88
gtccaccttgatttgtctgagaaac

SEQ ID NO: 327733 - DNA, 25 bp, Artificial
  probe
  misc_feature (1)..(25): SEQ ID NO: 2501; WAN024FZE; Start 78; Stop 102
gtctgagaaacaaagtggttccaaa

SEQ ID NO: 327734 - DNA, 25 bp, Artificial
  probe
  misc_feature (1)..(25): SEQ ID NO: 2501; WAN024FZE; Start 65; Stop 89
tccaccttgatttgtctgagaaaca

SEQ ID NO: 327735 - DNA, 25 bp, Artificial
  probe
  misc_feature (1)..(25): SEQ ID NO: 2501; WAN024FZE; Start 63; Stop 87
ggtccaccttgatttgtctgagaaa

SEQ ID NO: 327736 - DNA, 25 bp, Artificial
  probe
  misc_feature (1)..(25): SEQ ID NO: 2501; WAN024FZE; Start 77; Stop 101
tgtctgagaaacaaagtggttccaa

SEQ ID NO: 327737 - DNA, 25 bp, Artificial
  probe
  misc_feature (1)..(25): SEQ ID NO: 2501; WAN024FZE; Start 92; Stop 116
gtggttccaaaattctttctgacta

SEQ ID NO: 327738 - DNA, 25 bp, Artificial
  probe
  misc_feature (1)..(25): SEQ ID NO: 2501; WAN024FZE; Start 90; Stop 114
aagtggttccaaaattctttctgac

SEQ ID NO: 327739 - DNA, 25 bp, Artificial
  probe
  misc_feature (1)..(25): SEQ ID NO: 2501; WAN024FZE; Start 81; Stop 105
tgagaaacaaagtggttccaaaatt

SEQ ID NO: 327740 - DNA, 25 bp, Artificial
  probe
  misc_feature (1)..(25): SEQ ID NO: 2501; WAN024FZE; Start 80; Stop 104
ctgagaaacaaagtggttccaaaat

SEQ ID NO: 327741 - DNA, 25 bp, Artificial
  probe
  misc_feature (1)..(25): SEQ ID NO: 2501; WAN024FZE; Start 82; Stop 106
gagaaacaaagtggttccaaaattc

SEQ ID NO: 327742 - DNA, 25 bp, Artificial
  probe
  misc_feature (1)..(25): SEQ ID NO: 2501; WAN024FZE; Start 84; Stop 108
gaaacaaagtggttccaaaattctt

SEQ ID NO: 327743 - DNA, 25 bp, Artificial
  probe
  misc_feature (1)..(25): SEQ ID NO: 2501; WAN024FZE; Start 93; Stop 117
tggttccaaaattctttctgactat

SEQ ID NO: 327744 - DNA, 25 bp, Artificial
  probe
  misc_feature (1)..(25): SEQ ID NO: 2501; WAN024FZE; Start 91; Stop 115
agtggttccaaaattctttctgact

SEQ ID NO: 327745 - DNA, 25 bp, Artificial
  probe
  misc_feature (1)..(25): SEQ ID NO: 2501; WAN024FZE; Start 79; Stop 103
tctgagaaacaaagtggttccaaaa

SEQ ID NO: 327746 - DNA, 25 bp, Artificial
  probe
  misc_feature (1)..(25): SEQ ID NO: 2501; WAN024FZE; Start 94; Stop 118
ggttccaaaattctttctgactatc

SEQ ID NO: 327747 - DNA, 25 bp, Artificial
  probe
  misc_feature (1)..(25): SEQ ID NO: 2501; WAN024FZE; Start 16; Stop 40
gataagttttggacaccagttcaat

SEQ ID NO: 327748 - DNA, 25 bp, Artificial
  probe
  misc_feature (1)..(25): SEQ ID NO: 2501; WAN024FZE; Start 66; Stop 90
ccaccttgatttgtctgagaaacaa

SEQ ID NO: 327749 - DNA, 25 bp, Artificial
  probe
  misc_feature (1)..(25): SEQ ID NO: 2501; WAN024FZE; Start 20; Stop 44
agttttggacaccagttcaattatt

SEQ ID NO: 327750 - DNA, 25 bp, Artificial
  probe
  misc_feature (1)..(25): SEQ ID NO: 2501; WAN024FZE; Start 19; Stop 43
aagttttggacaccagttcaattat

SEQ ID NO: 327751 - DNA, 25 bp, Artificial
  probe
  misc_feature (1)..(25): SEQ ID NO: 2501; WAN024FZE; Start 17; Stop 41
ataagttttggacaccagttcaatt

SEQ ID NO: 327752 - DNA, 25 bp, Artificial
  probe
  misc_feature (1)..(25): SEQ ID NO: 2501; WAN024FZE; Start 95; Stop 119
gttccaaaattctttctgactatct

SEQ ID NO: 327753 - DNA, 25 bp, Artificial
  probe
  misc_feature (1)..(25): SEQ ID NO: 2501; WAN024FZE; Start 46; Stop 70
tatgattttgcagataaggtccacc

SEQ ID NO: 327754 - DNA, 25 bp, Artificial
  probe
  misc_feature (1)..(25): SEQ ID NO: 2501; WAN024FZE; Start 26; Stop 50
ggacaccagttcaattattttatga

SEQ ID NO: 327755 - DNA, 25 bp, Artificial
  probe
  misc_feature (1)..(25): SEQ ID NO: 2501; WAN024FZE; Start 18; Stop 42
taagttttggacaccagttcaatta

SEQ ID NO: 327756 - DNA, 25 bp, Artificial
  probe
  misc_feature (1)..(25): SEQ ID NO: 2501; WAN024FZE; Start 21; Stop 45
gttttggacaccagttcaattattt

SEQ ID NO: 327757 - DNA, 25 bp, Artificial
  probe
  misc_feature (1)..(25): SEQ ID NO: 2501; WAN024FZE; Start 15; Stop 39
ggataagttttggacaccagttcaa

SEQ ID NO: 327758 - DNA, 25 bp, Artificial
  probe
  misc_feature (1)..(25): SEQ ID NO: 2501; WAN024FZE; Start 87; Stop 111
acaaagtggttccaaaattctttct

SEQ ID NO: 327759 - DNA, 25 bp, Artificial
  probe
  misc_feature (1)..(25): SEQ ID NO: 2501; WAN024FZE; Start 45; Stop 69
ttatgattttgcagataaggtccac

SEQ ID NO: 327760 - DNA, 25 bp, Artificial
  probe
  misc_feature (1)..(25): SEQ ID NO: 2501; WAN024FZE; Start 89; Stop 113
aaagtggttccaaaattctttctga

SEQ ID NO: 327761 - DNA, 25 bp, Artificial
  probe
  misc_feature (1)..(25): SEQ ID NO: 2501; WAN024FZE; Start 88; Stop 112
caaagtggttccaaaattctttctg

SEQ ID NO: 327762 - DNA, 25 bp, Artificial
  probe
  misc_feature (1)..(25): SEQ ID NO: 2501; WAN024FZE; Start 86; Stop 110
aacaaagtggttccaaaattctttc

SEQ ID NO: 327763 - DNA, 25 bp, Artificial
  probe
  misc_feature (1)..(25): SEQ ID NO: 2501; WAN024FZE; Start 13; Stop 37
caggataagttttggacaccagttc

SEQ ID NO: 327764 - DNA, 25 bp, Artificial
  probe
  misc_feature (1)..(25): SEQ ID NO: 2501; WAN024FZE; Start 83; Stop 107
agaaacaaagtggttccaaaattct

SEQ ID NO: 327765 - DNA, 25 bp, Artificial
  probe
  misc_feature (1)..(25): SEQ ID NO: 2502; WAN024CBI; Start 154; Stop 178
gactgttaccacttcctacctattc

SEQ ID NO: 327766 - DNA, 25 bp, Artificial
  probe
  misc_feature (1)..(25): SEQ ID NO: 2502; WAN024CBI; Start 153; Stop 177
agactgttaccacttcctacctatt

SEQ ID NO: 327767 - DNA, 25 bp, Artificial
  probe
  misc_feature (1)..(25): SEQ ID NO: 2502; WAN024CBI; Start 156; Stop 180
ctgttaccacttcctacctattcac

SEQ ID NO: 327768 - DNA, 25 bp, Artificial
  probe
  misc_feature (1)..(25): SEQ ID NO: 2502; WAN024CBI; Start 152; Stop 176
tagactgttaccacttcctacctat

SEQ ID NO: 327769 - DNA, 25 bp, Artificial
  probe
  misc_feature (1)..(25): SEQ ID NO: 2502; WAN024CBI; Start 151; Stop 175
atagactgttaccacttcctaccta

SEQ ID NO: 327770 - DNA, 25 bp, Artificial
  probe
  misc_feature (1)..(25): SEQ ID NO: 2502; WAN024CBI; Start 155; Stop 179
actgttaccacttcctacctattca

SEQ ID NO: 327771 - DNA, 25 bp, Artificial
  probe
  misc_feature (1)..(25): SEQ ID NO: 2502; WAN024CBI; Start 150; Stop 174
catagactgttaccacttcctacct

SEQ ID NO: 327772 - DNA, 25 bp, Artificial
  probe
  misc_feature (1)..(25): SEQ ID NO: 2502; WAN024CBI; Start 157; Stop 181
tgttaccacttcctacctattcacc

SEQ ID NO: 327773 - DNA, 25 bp, Artificial
  probe
  misc_feature (1)..(25): SEQ ID NO: 2502; WAN024CBI; Start 149; Stop 173
gcatagactgttaccacttcctacc

SEQ ID NO: 327774 - DNA, 25 bp, Artificial
  probe
  misc_feature (1)..(25): SEQ ID NO: 2502; WAN024CBI; Start 148; Stop 172
ggcatagactgttaccacttcctac

SEQ ID NO: 327775 - DNA, 25 bp, Artificial
  probe
  misc_feature (1)..(25): SEQ ID NO: 2502; WAN024CBI; Start 174; Stop 198
tattcacccgagtataatcccattg

SEQ ID NO: 327776 - DNA, 25 bp, Artificial
  probe
  misc_feature (1)..(25): SEQ ID NO: 2502; WAN024CBI; Start 13; Stop 37
acctataaagatacgatgacgagtg

SEQ ID NO: 327777 - DNA, 25 bp, Artificial
  probe
  misc_feature (1)..(25): SEQ ID NO: 2502; WAN024CBI; Start 173; Stop 197
ctattcacccgagtataatcccatt

SEQ ID NO: 327778 - DNA, 25 bp, Artificial
  probe
  misc_feature (1)..(25): SEQ ID NO: 2502; WAN024CBI; Start 166; Stop 190
ttcctacctattcacccgagtataa

SEQ ID NO: 327779 - DNA, 25 bp, Artificial
  probe
  misc_feature (1)..(25): SEQ ID NO: 2502; WAN024CBI; Start 167; Stop 191
tcctacctattcacccgagtataat

SEQ ID NO: 327780 - DNA, 25 bp, Artificial
  probe
  misc_feature (1)..(25): SEQ ID NO: 2502; WAN024CBI; Start 14; Stop 38
cctataaagatacgatgacgagtga

SEQ ID NO: 327781 - DNA, 25 bp, Artificial
  probe
  misc_feature (1)..(25): SEQ ID NO: 2502; WAN024CBI; Start 12; Stop 36
gacctataaagatacgatgacgagt

SEQ ID NO: 327782 - DNA, 25 bp, Artificial
  probe
  misc_feature (1)..(25): SEQ ID NO: 2502; WAN024CBI; Start 11; Stop 35
tgacctataaagatacgatgacgag

SEQ ID NO: 327783 - DNA, 25 bp, Artificial
  probe
  misc_feature (1)..(25): SEQ ID NO: 2502; WAN024CBI; Start 7; Stop 31
ccgatgacctataaagatacgatga

SEQ ID NO: 327784 - DNA, 25 bp, Artificial
  probe
  misc_feature (1)..(25): SEQ ID NO: 2502; WAN024CBI; Start 6; Stop 30
tccgatgacctataaagatacgatg

SEQ ID NO: 327785 - DNA, 25 bp, Artificial
  probe
  misc_feature (1)..(25): SEQ ID NO: 2502; WAN024CBI; Start 169; Stop 193
ctacctattcacccgagtataatcc

SEQ ID NO: 327786 - DNA, 25 bp, Artificial
  probe
  misc_feature (1)..(25): SEQ ID NO: 2502; WAN024CBI; Start 168; Stop 192
cctacctattcacccgagtataatc

SEQ ID NO: 327787 - DNA, 25 bp, Artificial
  probe
  misc_feature (1)..(25): SEQ ID NO: 2502; WAN024CBI; Start 165; Stop 189
cttcctacctattcacccgagtata

SEQ ID NO: 327788 - DNA, 25 bp, Artificial
  probe
  misc_feature (1)..(25): SEQ ID NO: 2502; WAN024CBI; Start 5; Stop 29
ctccgatgacctataaagatacgat

SEQ ID NO: 327789 - DNA, 25 bp, Artificial
  probe
  misc_feature (1)..(25): SEQ ID NO: 2502; WAN024CBI; Start 71; Stop 95
tacctactttagatacaccatccct

SEQ ID NO: 327790 - DNA, 25 bp, Artificial
  probe
  misc_feature (1)..(25): SEQ ID NO: 2502; WAN024CBI; Start 72; Stop 96
acctactttagatacaccatccctt

SEQ ID NO: 327791 - DNA, 25 bp, Artificial
  probe
  misc_feature (1)..(25): SEQ ID NO: 2502; WAN024CBI; Start 1; Stop 25
atggctccgatgacctataaagata

SEQ ID NO: 327792 - DNA, 25 bp, Artificial
  probe
  misc_feature (1)..(25): SEQ ID NO: 2502; WAN024CBI; Start 170; Stop 194
tacctattcacccgagtataatccc

SEQ ID NO: 327793 - DNA, 25 bp, Artificial
  probe
  misc_feature (1)..(25): SEQ ID NO: 2502; WAN024CBI; Start 70; Stop 94
ctacctactttagatacaccatccc

SEQ ID NO: 327794 - DNA, 25 bp, Artificial
  probe
  misc_feature (1)..(25): SEQ ID NO: 2502; WAN024CBI; Start 10; Stop 34
atgacctataaagatacgatgacga

SEQ ID NO: 327795 - DNA, 25 bp, Artificial
  probe
  misc_feature (1)..(25): SEQ ID NO: 2502; WAN024CBI; Start 17; Stop 41
ataaagatacgatgacgagtgactt

SEQ ID NO: 327796 - DNA, 25 bp, Artificial
  probe
  misc_feature (1)..(25): SEQ ID NO: 2502; WAN024CBI; Start 179; Stop 203
acccgagtataatcccattgagaaa

SEQ ID NO: 327797 - DNA, 25 bp, Artificial
  probe
  misc_feature (1)..(25): SEQ ID NO: 2502; WAN024CBI; Start 172; Stop 196
cctattcacccgagtataatcccat

SEQ ID NO: 327798 - DNA, 25 bp, Artificial
  probe
  misc_feature (1)..(25): SEQ ID NO: 2503; WAN024C8J; Start 41; Stop 65
gcgtagtaatctcattgacttatgt

SEQ ID NO: 327799 - DNA, 25 bp, Artificial
  probe
  misc_feature (1)..(25): SEQ ID NO: 2503; WAN024C8J; Start 4; Stop 28
gctcgtattgctggagttgatattc

SEQ ID NO: 327800 - DNA, 25 bp, Artificial
  probe
  misc_feature (1)..(25): SEQ ID NO: 2503; WAN024C8J; Start 148; Stop 172
tcagatcaagaagatgctatccgtc

SEQ ID NO: 327801 - DNA, 25 bp, Artificial
  probe
  misc_feature (1)..(25): SEQ ID NO: 2503; WAN024C8J; Start 5; Stop 29
ctcgtattgctggagttgatattcc

SEQ ID NO: 327802 - DNA, 25 bp, Artificial
  probe
  misc_feature (1)..(25): SEQ ID NO: 2503; WAN024C8J; Start 59; Stop 83
cttatgtttatggtatcggacttgc

SEQ ID NO: 327803 - DNA, 25 bp, Artificial
  probe
  misc_feature (1)..(25): SEQ ID NO: 2503; WAN024C8J; Start 56; Stop 80
tgacttatgtttatggtatcggact

SEQ ID NO: 327804 - DNA, 25 bp, Artificial
  probe
  misc_feature (1)..(25): SEQ ID NO: 2503; WAN024C8J; Start 58; Stop 82
acttatgtttatggtatcggacttg

SEQ ID NO: 327805 - DNA, 25 bp, Artificial
  probe
  misc_feature (1)..(25): SEQ ID NO: 2503; WAN024C8J; Start 55; Stop 79
ttgacttatgtttatggtatcggac

SEQ ID NO: 327806 - DNA, 25 bp, Artificial
  probe
  misc_feature (1)..(25): SEQ ID NO: 2503; WAN024C8J; Start 18; Stop 42
agttgatattccaaatgacaaacgc

SEQ ID NO: 327807 - DNA, 25 bp, Artificial
  probe
  misc_feature (1)..(25): SEQ ID NO: 2503; WAN024C8J; Start 57; Stop 81
gacttatgtttatggtatcggactt

SEQ ID NO: 327808 - DNA, 25 bp, Artificial
  probe
  misc_feature (1)..(25): SEQ ID NO: 2503; WAN024C8J; Start 17; Stop 41
gagttgatattccaaatgacaaacg

SEQ ID NO: 327809 - DNA, 25 bp, Artificial
  probe
  misc_feature (1)..(25): SEQ ID NO: 2503; WAN024C8J; Start 112; Stop 136
ggaatctcagaagatgttcgtgtac

SEQ ID NO: 327810 - DNA, 25 bp, Artificial
  probe
  misc_feature (1)..(25): SEQ ID NO: 2503; WAN024C8J; Start 111; Stop 135
tggaatctcagaagatgttcgtgta

SEQ ID NO: 327811 - DNA, 25 bp, Artificial
  probe
  misc_feature (1)..(25): SEQ ID NO: 2503; WAN024C8J; Start 3; Stop 27
ggctcgtattgctggagttgatatt

SEQ ID NO: 327812 - DNA, 25 bp, Artificial
  probe
  misc_feature (1)..(25): SEQ ID NO: 2503; WAN024C8J; Start 113; Stop 137
gaatctcagaagatgttcgtgtacg

SEQ ID NO: 327813 - DNA, 25 bp, Artificial
  probe
  misc_feature (1)..(25): SEQ ID NO: 2503; WAN024C8J; Start 149; Stop 173
cagatcaagaagatgctatccgtcg

SEQ ID NO: 327814 - DNA, 25 bp, Artificial
  probe
  misc_feature (1)..(25): SEQ ID NO: 2503; WAN024C8J; Start 206; Stop 230
ttcgtcgtgaagtaaacttgaacat

SEQ ID NO: 327815 - DNA, 25 bp, Artificial
  probe
  misc_feature (1)..(25): SEQ ID NO: 2503; WAN024C8J; Start 42; Stop 66
cgtagtaatctcattgacttatgtt

SEQ ID NO: 327816 - DNA, 25 bp, Artificial
  probe
  misc_feature (1)..(25): SEQ ID NO: 2503; WAN024C8J; Start 154; Stop 178
caagaagatgctatccgtcgtgaag

SEQ ID NO: 327817 - DNA, 25 bp, Artificial
  probe
  misc_feature (1)..(25): SEQ ID NO: 2503; WAN024C8J; Start 54; Stop 78
attgacttatgtttatggtatcgga

SEQ ID NO: 327818 - DNA, 25 bp, Artificial
  probe
  misc_feature (1)..(25): SEQ ID NO: 2503; WAN024C8J; Start 53; Stop 77
cattgacttatgtttatggtatcgg

SEQ ID NO: 327819 - DNA, 25 bp, Artificial
  probe
  misc_feature (1)..(25): SEQ ID NO: 2503; WAN024C8J; Start 207; Stop 231
tcgtcgtgaagtaaacttgaacatc

SEQ ID NO: 327820 - DNA, 25 bp, Artificial
  probe
  misc_feature (1)..(25): SEQ ID NO: 2503; WAN024C8J; Start 151; Stop 175
gatcaagaagatgctatccgtcgtg

SEQ ID NO: 327821 - DNA, 25 bp, Artificial
  probe
  misc_feature (1)..(25): SEQ ID NO: 2503; WAN024C8J; Start 150; Stop 174
agatcaagaagatgctatccgtcgt

SEQ ID NO: 327822 - DNA, 25 bp, Artificial
  probe
  misc_feature (1)..(25): SEQ ID NO: 2503; WAN024C8J; Start 155; Stop 179
aagaagatgctatccgtcgtgaagt

SEQ ID NO: 327823 - DNA, 25 bp, Artificial
  probe
  misc_feature (1)..(25): SEQ ID NO: 2503; WAN024C8J; Start 152; Stop 176
atcaagaagatgctatccgtcgtga

SEQ ID NO: 327824 - DNA, 25 bp, Artificial
  probe
  misc_feature (1)..(25): SEQ ID NO: 2503; WAN024C8J; Start 208; Stop 232
cgtcgtgaagtaaacttgaacatca

SEQ ID NO: 327825 - DNA, 25 bp, Artificial
  probe
  misc_feature (1)..(25): SEQ ID NO: 2503; WAN024C8J; Start 16; Stop 40
ggagttgatattccaaatgacaaac

SEQ ID NO: 327826 - DNA, 25 bp, Artificial
  probe
  misc_feature (1)..(25): SEQ ID NO: 2503; WAN024C8J; Start 60; Stop 84
ttatgtttatggtatcggacttgca

SEQ ID NO: 327827 - DNA, 25 bp, Artificial
  probe
  misc_feature (1)..(25): SEQ ID NO: 2503; WAN024C8J; Start 110; Stop 134
ctggaatctcagaagatgttcgtgt

SEQ ID NO: 327828 - DNA, 25 bp, Artificial
  probe
  misc_feature (1)..(25): SEQ ID NO: 2503; WAN024C8J; Start 118; Stop 142
tcagaagatgttcgtgtacgtgatc

SEQ ID NO: 327829 - DNA, 25 bp, Artificial
  probe
  misc_feature (1)..(25): SEQ ID NO: 2503; WAN024C8J; Start 117; Stop 141
ctcagaagatgttcgtgtacgtgat

SEQ ID NO: 327830 - DNA, 25 bp, Artificial
  probe
  misc_feature (1)..(25): SEQ ID NO: 2503; WAN024C8J; Start 153; Stop 177
tcaagaagatgctatccgtcgtgaa

SEQ ID NO: 327831 - DNA, 25 bp, Artificial
  probe
  misc_feature (1)..(25): SEQ ID NO: 2504; WAN024F3U; Start 808; Stop 832
agagacttaccagatacgattgcta

SEQ ID NO: 327832 - DNA, 25 bp, Artificial
  probe
  misc_feature (1)..(25): SEQ ID NO: 2504; WAN024F3U; Start 805; Stop 829
agaagagacttaccagatacgattg

SEQ ID NO: 327833 - DNA, 25 bp, Artificial
  probe
  misc_feature (1)..(25): SEQ ID NO: 2504; WAN024F3U; Start 118; Stop 142
tgtaagcataccatctatcagaagg

SEQ ID NO: 327834 - DNA, 25 bp, Artificial
  probe
  misc_feature (1)..(25): SEQ ID NO: 2504; WAN024F3U; Start 119; Stop 143
gtaagcataccatctatcagaagga

SEQ ID NO: 327835 - DNA, 25 bp, Artificial
  probe
  misc_feature (1)..(25): SEQ ID NO: 2504; WAN024F3U; Start 809; Stop 833
gagacttaccagatacgattgctag

SEQ ID NO: 327836 - DNA, 25 bp, Artificial
  probe
  misc_feature (1)..(25): SEQ ID NO: 2504; WAN024F3U; Start 804; Stop 828
aagaagagacttaccagatacgatt

SEQ ID NO: 327837 - DNA, 25 bp, Artificial
  probe
  misc_feature (1)..(25): SEQ ID NO: 2504; WAN024F3U; Start 806; Stop 830
gaagagacttaccagatacgattgc

SEQ ID NO: 327838 - DNA, 25 bp, Artificial
  probe
  misc_feature (1)..(25): SEQ ID NO: 2504; WAN024F3U; Start 807; Stop 831
aagagacttaccagatacgattgct

SEQ ID NO: 327839 - DNA, 25 bp, Artificial
  probe
  misc_feature (1)..(25): SEQ ID NO: 2504; WAN024F3U; Start 75; Stop 99
taagccagaggttccagatgaatta

SEQ ID NO: 327840 - DNA, 25 bp, Artificial
  probe
  misc_feature (1)..(25): SEQ ID NO: 2504; WAN024F3U; Start 120; Stop 144
taagcataccatctatcagaaggat

SEQ ID NO: 327841 - DNA, 25 bp, Artificial
  probe
  misc_feature (1)..(25): SEQ ID NO: 2504; WAN024F3U; Start 122; Stop 146
agcataccatctatcagaaggatct

SEQ ID NO: 327842 - DNA, 25 bp, Artificial
  probe
  misc_feature (1)..(25): SEQ ID NO: 2504; WAN024F3U; Start 121; Stop 145
aagcataccatctatcagaaggatc

SEQ ID NO: 327843 - DNA, 25 bp, Artificial
  probe
  misc_feature (1)..(25): SEQ ID NO: 2504; WAN024F3U; Start 341; Stop 365
ttgtgacaggaactgctcttattaa

SEQ ID NO: 327844 - DNA, 25 bp, Artificial
  probe
  misc_feature (1)..(25): SEQ ID NO: 2504; WAN024F3U; Start 77; Stop 101
agccagaggttccagatgaattatt

SEQ ID NO: 327845 - DNA, 25 bp, Artificial
  probe
  misc_feature (1)..(25): SEQ ID NO: 2504; WAN024F3U; Start 76; Stop 100
aagccagaggttccagatgaattat

SEQ ID NO: 327846 - DNA, 25 bp, Artificial
  probe
  misc_feature (1)..(25): SEQ ID NO: 2504; WAN024F3U; Start 340; Stop 364
gttgtgacaggaactgctcttatta

SEQ ID NO: 327847 - DNA, 25 bp, Artificial
  probe
  misc_feature (1)..(25): SEQ ID NO: 2504; WAN024F3U; Start 117; Stop 141
ctgtaagcataccatctatcagaag

SEQ ID NO: 327848 - DNA, 25 bp, Artificial
  probe
  misc_feature (1)..(25): SEQ ID NO: 2504; WAN024F3U; Start 74; Stop 98
ctaagccagaggttccagatgaatt

SEQ ID NO: 327849 - DNA, 25 bp, Artificial
  probe
  misc_feature (1)..(25): SEQ ID NO: 2504; WAN024F3U; Start 240; Stop 264
agaattgtttacagggattgaaagc

SEQ ID NO: 327850 - DNA, 25 bp, Artificial
  probe
  misc_feature (1)..(25): SEQ ID NO: 2504; WAN024F3U; Start 241; Stop 265
gaattgtttacagggattgaaagca

SEQ ID NO: 327851 - DNA, 25 bp, Artificial
  probe
  misc_feature (1)..(25): SEQ ID NO: 2504; WAN024F3U; Start 212; Stop 236
ctttgacgattgatatgggaacctt

SEQ ID NO: 327852 - DNA, 25 bp, Artificial
  probe
  misc_feature (1)..(25): SEQ ID NO: 2504; WAN024F3U; Start 377; Stop 401
tggctcttgggattatggattctaa

SEQ ID NO: 327853 - DNA, 25 bp, Artificial
  probe
  misc_feature (1)..(25): SEQ ID NO: 2504; WAN024F3U; Start 213; Stop 237
tttgacgattgatatgggaaccttc

SEQ ID NO: 327854 - DNA, 25 bp, Artificial
  probe
  misc_feature (1)..(25): SEQ ID NO: 2504; WAN024F3U; Start 803; Stop 827
aaagaagagacttaccagatacgat

SEQ ID NO: 327855 - DNA, 25 bp, Artificial
  probe
  misc_feature (1)..(25): SEQ ID NO: 2504; WAN024F3U; Start 228; Stop 252
gggaaccttcaaagaattgtttaca

SEQ ID NO: 327856 - DNA, 25 bp, Artificial
  probe
  misc_feature (1)..(25): SEQ ID NO: 2504; WAN024F3U; Start 227; Stop 251
tgggaaccttcaaagaattgtttac

SEQ ID NO: 327857 - DNA, 25 bp, Artificial
  probe
  misc_feature (1)..(25): SEQ ID NO: 2504; WAN024F3U; Start 354; Stop 378
tgctcttattaaaggtcagactgtg

SEQ ID NO: 327858 - DNA, 25 bp, Artificial
  probe
  misc_feature (1)..(25): SEQ ID NO: 2504; WAN024F3U; Start 243; Stop 267
attgtttacagggattgaaagcaag

SEQ ID NO: 327859 - DNA, 25 bp, Artificial
  probe
  misc_feature (1)..(25): SEQ ID NO: 2504; WAN024F3U; Start 242; Stop 266
aattgtttacagggattgaaagcaa

SEQ ID NO: 327860 - DNA, 25 bp, Artificial
  probe
  misc_feature (1)..(25): SEQ ID NO: 2504; WAN024F3U; Start 116; Stop 140
gctgtaagcataccatctatcagaa

SEQ ID NO: 327861 - DNA, 25 bp, Artificial
  probe
  misc_feature (1)..(25): SEQ ID NO: 2504; WAN024F3U; Start 223; Stop 247
gatatgggaaccttcaaagaattgt

SEQ ID NO: 327862 - DNA, 25 bp, Artificial
  probe
  misc_feature (1)..(25): SEQ ID NO: 2504; WAN024F3U; Start 78; Stop 102
gccagaggttccagatgaattattt

SEQ ID NO: 327863 - DNA, 25 bp, Artificial
  probe
  misc_feature (1)..(25): SEQ ID NO: 2504; WAN024F3U; Start 358; Stop 382
cttattaaaggtcagactgtggctc

SEQ ID NO: 327864 - DNA, 25 bp, Artificial
  probe
  misc_feature (1)..(25): SEQ ID NO: 2505; WAN024CWP; Start 10; Stop 34
gaactgagtagacaagacctccttc

SEQ ID NO: 327865 - DNA, 25 bp, Artificial
  probe
  misc_feature (1)..(25): SEQ ID NO: 2505; WAN024CWP; Start 152; Stop 176
gcttcattgtcatggtcaactgtaa

SEQ ID NO: 327866 - DNA, 25 bp, Artificial
  probe
  misc_feature (1)..(25): SEQ ID NO: 2505; WAN024CWP; Start 11; Stop 35
aactgagtagacaagacctccttct

SEQ ID NO: 327867 - DNA, 25 bp, Artificial
  probe
  misc_feature (1)..(25): SEQ ID NO: 2505; WAN024CWP; Start 195; Stop 219
caacttctacagaggtgatttccaa

SEQ ID NO: 327868 - DNA, 25 bp, Artificial
  probe
  misc_feature (1)..(25): SEQ ID NO: 2505; WAN024CWP; Start 39; Stop 63
ctccatcaactgtataataagaagg

SEQ ID NO: 327869 - DNA, 25 bp, Artificial
  probe
  misc_feature (1)..(25): SEQ ID NO: 2505; WAN024CWP; Start 65; Stop 89
taaatccctgtcatgttgtctgtaa

SEQ ID NO: 327870 - DNA, 25 bp, Artificial
  probe
  misc_feature (1)..(25): SEQ ID NO: 2505; WAN024CWP; Start 36; Stop 60
tgactccatcaactgtataataaga

SEQ ID NO: 327871 - DNA, 25 bp, Artificial
  probe
  misc_feature (1)..(25): SEQ ID NO: 2505; WAN024CWP; Start 68; Stop 92
atccctgtcatgttgtctgtaattt

SEQ ID NO: 327872 - DNA, 25 bp, Artificial
  probe
  misc_feature (1)..(25): SEQ ID NO: 2505; WAN024CWP; Start 67; Stop 91
aatccctgtcatgttgtctgtaatt

SEQ ID NO: 327873 - DNA, 25 bp, Artificial
  probe
  misc_feature (1)..(25): SEQ ID NO: 2505; WAN024CWP; Start 66; Stop 90
aaatccctgtcatgttgtctgtaat

SEQ ID NO: 327874 - DNA, 25 bp, Artificial
  probe
  misc_feature (1)..(25): SEQ ID NO: 2505; WAN024CWP; Start 64; Stop 88
gtaaatccctgtcatgttgtctgta

SEQ ID NO: 327875 - DNA, 25 bp, Artificial
  probe
  misc_feature (1)..(25): SEQ ID NO: 2505; WAN024CWP; Start 41; Stop 65
ccatcaactgtataataagaagggt

SEQ ID NO: 327876 - DNA, 25 bp, Artificial
  probe
  misc_feature (1)..(25): SEQ ID NO: 2505; WAN024CWP; Start 30; Stop 54
ccttcttgactccatcaactgtata

SEQ ID NO: 327877 - DNA, 25 bp, Artificial
  probe
  misc_feature (1)..(25): SEQ ID NO: 2505; WAN024CWP; Start 153; Stop 177
cttcattgtcatggtcaactgtaaa

SEQ ID NO: 327878 - DNA, 25 bp, Artificial
  probe
  misc_feature (1)..(25): SEQ ID NO: 2505; WAN024CWP; Start 40; Stop 64
tccatcaactgtataataagaaggg

SEQ ID NO: 327879 - DNA, 25 bp, Artificial
  probe
  misc_feature (1)..(25): SEQ ID NO: 2505; WAN024CWP; Start 157; Stop 181
attgtcatggtcaactgtaaatgga

SEQ ID NO: 327880 - DNA, 25 bp, Artificial
  probe
  misc_feature (1)..(25): SEQ ID NO: 2505; WAN024CWP; Start 154; Stop 178
ttcattgtcatggtcaactgtaaat

SEQ ID NO: 327881 - DNA, 25 bp, Artificial
  probe
  misc_feature (1)..(25): SEQ ID NO: 2505; WAN024CWP; Start 29; Stop 53
tccttcttgactccatcaactgtat

SEQ ID NO: 327882 - DNA, 25 bp, Artificial
  probe
  misc_feature (1)..(25): SEQ ID NO: 2505; WAN024CWP; Start 288; Stop 312
tcttggtctcacgactcaaatctaa

SEQ ID NO: 327883 - DNA, 25 bp, Artificial
  probe
  misc_feature (1)..(25): SEQ ID NO: 2505; WAN024CWP; Start 37; Stop 61
gactccatcaactgtataataagaa

SEQ ID NO: 327884 - DNA, 25 bp, Artificial
  probe
  misc_feature (1)..(25): SEQ ID NO: 2505; WAN024CWP; Start 151; Stop 175
ggcttcattgtcatggtcaactgta

SEQ ID NO: 327885 - DNA, 25 bp, Artificial
  probe
  misc_feature (1)..(25): SEQ ID NO: 2505; WAN024CWP; Start 9; Stop 33
cgaactgagtagacaagacctcctt

SEQ ID NO: 327886 - DNA, 25 bp, Artificial
  probe
  misc_feature (1)..(25): SEQ ID NO: 2505; WAN024CWP; Start 38; Stop 62
actccatcaactgtataataagaag

SEQ ID NO: 327887 - DNA, 25 bp, Artificial
  probe
  misc_feature (1)..(25): SEQ ID NO: 2505; WAN024CWP; Start 194; Stop 218
gcaacttctacagaggtgatttcca

SEQ ID NO: 327888 - DNA, 25 bp, Artificial
  probe
  misc_feature (1)..(25): SEQ ID NO: 2505; WAN024CWP; Start 12; Stop 36
actgagtagacaagacctccttctt

SEQ ID NO: 327889 - DNA, 25 bp, Artificial
  probe
  misc_feature (1)..(25): SEQ ID NO: 2505; WAN024CWP; Start 31; Stop 55
cttcttgactccatcaactgtataa

SEQ ID NO: 327890 - DNA, 25 bp, Artificial
  probe
  misc_feature (1)..(25): SEQ ID NO: 2505; WAN024CWP; Start 28; Stop 52
ctccttcttgactccatcaactgta

SEQ ID NO: 327891 - DNA, 25 bp, Artificial
  probe
  misc_feature (1)..(25): SEQ ID NO: 2505; WAN024CWP; Start 287; Stop 311
gtcttggtctcacgactcaaatcta

SEQ ID NO: 327892 - DNA, 25 bp, Artificial
  probe
  misc_feature (1)..(25): SEQ ID NO: 2505; WAN024CWP; Start 158; Stop 182
ttgtcatggtcaactgtaaatggac

SEQ ID NO: 327893 - DNA, 25 bp, Artificial
  probe
  misc_feature (1)..(25): SEQ ID NO: 2505; WAN024CWP; Start 6; Stop 30
tctcgaactgagtagacaagacctc

SEQ ID NO: 327894 - DNA, 25 bp, Artificial
  probe
  misc_feature (1)..(25): SEQ ID NO: 2505; WAN024CWP; Start 5; Stop 29
ctctcgaactgagtagacaagacct

SEQ ID NO: 327895 - DNA, 25 bp, Artificial
  probe
  misc_feature (1)..(25): SEQ ID NO: 2505; WAN024CWP; Start 32; Stop 56
ttcttgactccatcaactgtataat

SEQ ID NO: 327896 - DNA, 25 bp, Artificial
  probe
  misc_feature (1)..(25): SEQ ID NO: 2505; WAN024CWP; Start 155; Stop 179
tcattgtcatggtcaactgtaaatg

SEQ ID NO: 327897 - DNA, 25 bp, Artificial
  probe
  misc_feature (1)..(25): SEQ ID NO: 2506; WAN024EYI; Start 155; Stop 179
atccatcatccagaactcagtcaag

SEQ ID NO: 327898 - DNA, 25 bp, Artificial
  probe
  misc_feature (1)..(25): SEQ ID NO: 2506; WAN024EYI; Start 154; Stop 178
catccatcatccagaactcagtcaa

SEQ ID NO: 327899 - DNA, 25 bp, Artificial
  probe
  misc_feature (1)..(25): SEQ ID NO: 2506; WAN024EYI; Start 158; Stop 182
catcatccagaactcagtcaagtga

SEQ ID NO: 327900 - DNA, 25 bp, Artificial
  probe
  misc_feature (1)..(25): SEQ ID NO: 2506; WAN024EYI; Start 12; Stop 36
atgtagcgtttcaagagttctgtat

SEQ ID NO: 327901 - DNA, 25 bp, Artificial
  probe
  misc_feature (1)..(25): SEQ ID NO: 2506; WAN024EYI; Start 11; Stop 35
aatgtagcgtttcaagagttctgta

SEQ ID NO: 327902 - DNA, 25 bp, Artificial
  probe
  misc_feature (1)..(25): SEQ ID NO: 2506; WAN024EYI; Start 15; Stop 39
tagcgtttcaagagttctgtatcac

SEQ ID NO: 327903 - DNA, 25 bp, Artificial
  probe
  misc_feature (1)..(25): SEQ ID NO: 2506; WAN024EYI; Start 14; Stop 38
gtagcgtttcaagagttctgtatca

SEQ ID NO: 327904 - DNA, 25 bp, Artificial
  probe
  misc_feature (1)..(25): SEQ ID NO: 2506; WAN024EYI; Start 13; Stop 37
tgtagcgtttcaagagttctgtatc

SEQ ID NO: 327905 - DNA, 25 bp, Artificial
  probe
  misc_feature (1)..(25): SEQ ID NO: 2506; WAN024EYI; Start 147; Stop 171
tactcagcatccatcatccagaact

SEQ ID NO: 327906 - DNA, 25 bp, Artificial
  probe
  misc_feature (1)..(25): SEQ ID NO: 2506; WAN024EYI; Start 23; Stop 47
caagagttctgtatcacgttccaag

SEQ ID NO: 327907 - DNA, 25 bp, Artificial
  probe
  misc_feature (1)..(25): SEQ ID NO: 2506; WAN024EYI; Start 22; Stop 46
tcaagagttctgtatcacgttccaa

SEQ ID NO: 327908 - DNA, 25 bp, Artificial
  probe
  misc_feature (1)..(25): SEQ ID NO: 2506; WAN024EYI; Start 21; Stop 45
ttcaagagttctgtatcacgttcca

SEQ ID NO: 327909 - DNA, 25 bp, Artificial
  probe
  misc_feature (1)..(25): SEQ ID NO: 2506; WAN024EYI; Start 10; Stop 34
caatgtagcgtttcaagagttctgt

SEQ ID NO: 327910 - DNA, 25 bp, Artificial
  probe
  misc_feature (1)..(25): SEQ ID NO: 2506; WAN024EYI; Start 146; Stop 170
gtactcagcatccatcatccagaac

SEQ ID NO: 327911 - DNA, 25 bp, Artificial
  probe
  misc_feature (1)..(25): SEQ ID NO: 2506; WAN024EYI; Start 157; Stop 181
ccatcatccagaactcagtcaagtg

SEQ ID NO: 327912 - DNA, 25 bp, Artificial
  probe
  misc_feature (1)..(25): SEQ ID NO: 2506; WAN024EYI; Start 156; Stop 180
tccatcatccagaactcagtcaagt

SEQ ID NO: 327913 - DNA, 25 bp, Artificial
  probe
  misc_feature (1)..(25): SEQ ID NO: 2506; WAN024EYI; Start 119; Stop 143
aagcgactcatcatgtgtcaagtat

SEQ ID NO: 327914 - DNA, 25 bp, Artificial
  probe
  misc_feature (1)..(25): SEQ ID NO: 2506; WAN024EYI; Start 159; Stop 183
atcatccagaactcagtcaagtgac

SEQ ID NO: 327915 - DNA, 25 bp, Artificial
  probe
  misc_feature (1)..(25): SEQ ID NO: 2506; WAN024EYI; Start 24; Stop 48
aagagttctgtatcacgttccaagg

SEQ ID NO: 327916 - DNA, 25 bp, Artificial
  probe
  misc_feature (1)..(25): SEQ ID NO: 2506; WAN024EYI; Start 26; Stop 50
gagttctgtatcacgttccaaggtt

SEQ ID NO: 327917 - DNA, 25 bp, Artificial
  probe
  misc_feature (1)..(25): SEQ ID NO: 2506; WAN024EYI; Start 120; Stop 144
agcgactcatcatgtgtcaagtatg

SEQ ID NO: 327918 - DNA, 25 bp, Artificial
  probe
  misc_feature (1)..(25): SEQ ID NO: 2506; WAN024EYI; Start 19; Stop 43
gtttcaagagttctgtatcacgttc

SEQ ID NO: 327919 - DNA, 25 bp, Artificial
  probe
  misc_feature (1)..(25): SEQ ID NO: 2506; WAN024EYI; Start 118; Stop 142
caagcgactcatcatgtgtcaagta

SEQ ID NO: 327920 - DNA, 25 bp, Artificial
  probe
  misc_feature (1)..(25): SEQ ID NO: 2506; WAN024EYI; Start 20; Stop 44
tttcaagagttctgtatcacgttcc

SEQ ID NO: 327921 - DNA, 25 bp, Artificial
  probe
  misc_feature (1)..(25): SEQ ID NO: 2506; WAN024EYI; Start 80; Stop 104
accttgtagaagagctttcacataa

SEQ ID NO: 327922 - DNA, 25 bp, Artificial
  probe
  misc_feature (1)..(25): SEQ ID NO: 2506; WAN024EYI; Start 9; Stop 33
gcaatgtagcgtttcaagagttctg

SEQ ID NO: 327923 - DNA, 25 bp, Artificial
  probe
  misc_feature (1)..(25): SEQ ID NO: 2506; WAN024EYI; Start 79; Stop 103
caccttgtagaagagctttcacata

SEQ ID NO: 327924 - DNA, 25 bp, Artificial
  probe
  misc_feature (1)..(25): SEQ ID NO: 2506; WAN024EYI; Start 150; Stop 174
tcagcatccatcatccagaactcag

SEQ ID NO: 327925 - DNA, 25 bp, Artificial
  probe
  misc_feature (1)..(25): SEQ ID NO: 2506; WAN024EYI; Start 149; Stop 173
ctcagcatccatcatccagaactca

SEQ ID NO: 327926 - DNA, 25 bp, Artificial
  probe
  misc_feature (1)..(25): SEQ ID NO: 2506; WAN024EYI; Start 148; Stop 172
actcagcatccatcatccagaactc

SEQ ID NO: 327927 - DNA, 25 bp, Artificial
  probe
  misc_feature (1)..(25): SEQ ID NO: 2506; WAN024EYI; Start 81; Stop 105
ccttgtagaagagctttcacataag

SEQ ID NO: 327928 - DNA, 25 bp, Artificial
  probe
  misc_feature (1)..(25): SEQ ID NO: 2506; WAN024EYI; Start 152; Stop 176
agcatccatcatccagaactcagtc

SEQ ID NO: 327929 - DNA, 25 bp, Artificial
  probe
  misc_feature (1)..(25): SEQ ID NO: 2506; WAN024EYI; Start 74; Stop 98
aagaacaccttgtagaagagctttc

SEQ ID NO: 327930 - DNA, 25 bp, Artificial
  probe
  misc_feature (1)..(25): SEQ ID NO: 2507; WAN024GAO; Start 1161; Stop 1185
cttgtcagcatcagatactattcca

SEQ ID NO: 327931 - DNA, 25 bp, Artificial
  probe
  misc_feature (1)..(25): SEQ ID NO: 2507; WAN024GAO; Start 1160; Stop 1184
acttgtcagcatcagatactattcc

SEQ ID NO: 327932 - DNA, 25 bp, Artificial
  probe
  misc_feature (1)..(25): SEQ ID NO: 2507; WAN024GAO; Start 1163; Stop 1187
tgtcagcatcagatactattccatt

SEQ ID NO: 327933 - DNA, 25 bp, Artificial
  probe
  misc_feature (1)..(25): SEQ ID NO: 2507; WAN024GAO; Start 1162; Stop 1186
ttgtcagcatcagatactattccat

SEQ ID NO: 327934 - DNA, 25 bp, Artificial
  probe
  misc_feature (1)..(25): SEQ ID NO: 2507; WAN024GAO; Start 588; Stop 612
tgtcaaggtagatattccacttcaa

SEQ ID NO: 327935 - DNA, 25 bp, Artificial
  probe
  misc_feature (1)..(25): SEQ ID NO: 2507; WAN024GAO; Start 1003; Stop 1027
aagatgattcacaatgctccacata

SEQ ID NO: 327936 - DNA, 25 bp, Artificial
  probe
  misc_feature (1)..(25): SEQ ID NO: 2507; WAN024GAO; Start 1002; Stop 1026
taagatgattcacaatgctccacat

SEQ ID NO: 327937 - DNA, 25 bp, Artificial
  probe
  misc_feature (1)..(25): SEQ ID NO: 2507; WAN024GAO; Start 109; Stop 133
ggtgttattcgtgaattatctgctg

SEQ ID NO: 327938 - DNA, 25 bp, Artificial
  probe
  misc_feature (1)..(25): SEQ ID NO: 2507; WAN024GAO; Start 108; Stop 132
aggtgttattcgtgaattatctgct

SEQ ID NO: 327939 - DNA, 25 bp, Artificial
  probe
  misc_feature (1)..(25): SEQ ID NO: 2507; WAN024GAO; Start 107; Stop 131
aaggtgttattcgtgaattatctgc

SEQ ID NO: 327940 - DNA, 25 bp, Artificial
  probe
  misc_feature (1)..(25): SEQ ID NO: 2507; WAN024GAO; Start 708; Stop 732
tacagcaccaacatattcaagcaat

SEQ ID NO: 327941 - DNA, 25 bp, Artificial
  probe
  misc_feature (1)..(25): SEQ ID NO: 2507; WAN024GAO; Start 1159; Stop 1183
gacttgtcagcatcagatactattc

SEQ ID NO: 327942 - DNA, 25 bp, Artificial
  probe
  misc_feature (1)..(25): SEQ ID NO: 2507; WAN024GAO; Start 1001; Stop 1025
ctaagatgattcacaatgctccaca

SEQ ID NO: 327943 - DNA, 25 bp, Artificial
  probe
  misc_feature (1)..(25): SEQ ID NO: 2507; WAN024GAO; Start 112; Stop 136
gttattcgtgaattatctgctgcta

SEQ ID NO: 327944 - DNA, 25 bp, Artificial
  probe
  misc_feature (1)..(25): SEQ ID NO: 2507; WAN024GAO; Start 710; Stop 734
cagcaccaacatattcaagcaatag

SEQ ID NO: 327945 - DNA, 25 bp, Artificial
  probe
  misc_feature (1)..(25): SEQ ID NO: 2507; WAN024GAO; Start 114; Stop 138
tattcgtgaattatctgctgctaag

SEQ ID NO: 327946 - DNA, 25 bp, Artificial
  probe
  misc_feature (1)..(25): SEQ ID NO: 2507; WAN024GAO; Start 111; Stop 135
tgttattcgtgaattatctgctgct

SEQ ID NO: 327947 - DNA, 25 bp, Artificial
  probe
  misc_feature (1)..(25): SEQ ID NO: 2507; WAN024GAO; Start 110; Stop 134
gtgttattcgtgaattatctgctgc

SEQ ID NO: 327948 - DNA, 25 bp, Artificial
  probe
  misc_feature (1)..(25): SEQ ID NO: 2507; WAN024GAO; Start 1004; Stop 1028
agatgattcacaatgctccacatac

SEQ ID NO: 327949 - DNA, 25 bp, Artificial
  probe
  misc_feature (1)..(25): SEQ ID NO: 2507; WAN024GAO; Start 709; Stop 733
acagcaccaacatattcaagcaata

SEQ ID NO: 327950 - DNA, 25 bp, Artificial
  probe
  misc_feature (1)..(25): SEQ ID NO: 2507; WAN024GAO; Start 115; Stop 139
attcgtgaattatctgctgctaagg

SEQ ID NO: 327951 - DNA, 25 bp, Artificial
  probe
  misc_feature (1)..(25): SEQ ID NO: 2507; WAN024GAO; Start 113; Stop 137
ttattcgtgaattatctgctgctaa

SEQ ID NO: 327952 - DNA, 25 bp, Artificial
  probe
  misc_feature (1)..(25): SEQ ID NO: 2507; WAN024GAO; Start 443; Stop 467
ttacagatacagattccgcactcaa

SEQ ID NO: 327953 - DNA, 25 bp, Artificial
  probe
  misc_feature (1)..(25): SEQ ID NO: 2507; WAN024GAO; Start 444; Stop 468
tacagatacagattccgcactcaag

SEQ ID NO: 327954 - DNA, 25 bp, Artificial
  probe
  misc_feature (1)..(25): SEQ ID NO: 2507; WAN024GAO; Start 587; Stop 611
gtgtcaaggtagatattccacttca

SEQ ID NO: 327955 - DNA, 25 bp, Artificial
  probe
  misc_feature (1)..(25): SEQ ID NO: 2507; WAN024GAO; Start 1005; Stop 1029
gatgattcacaatgctccacatacc

SEQ ID NO: 327956 - DNA, 25 bp, Artificial
  probe
  misc_feature (1)..(25): SEQ ID NO: 2507; WAN024GAO; Start 399; Stop 423
ttaccacaacatgaaggaagagttc

SEQ ID NO: 327957 - DNA, 25 bp, Artificial
  probe
  misc_feature (1)..(25): SEQ ID NO: 2507; WAN024GAO; Start 1000; Stop 1024
gctaagatgattcacaatgctccac

SEQ ID NO: 327958 - DNA, 25 bp, Artificial
  probe
  misc_feature (1)..(25): SEQ ID NO: 2507; WAN024GAO; Start 586; Stop 610
ggtgtcaaggtagatattccacttc

SEQ ID NO: 327959 - DNA, 25 bp, Artificial
  probe
  misc_feature (1)..(25): SEQ ID NO: 2507; WAN024GAO; Start 711; Stop 735
agcaccaacatattcaagcaatagc

SEQ ID NO: 327960 - DNA, 25 bp, Artificial
  probe
  misc_feature (1)..(25): SEQ ID NO: 2507; WAN024GAO; Start 106; Stop 130
gaaggtgttattcgtgaattatctg

SEQ ID NO: 327961 - DNA, 25 bp, Artificial
  probe
  misc_feature (1)..(25): SEQ ID NO: 2507; WAN024GAO; Start 585; Stop 609
aggtgtcaaggtagatattccactt

SEQ ID NO: 327962 - DNA, 25 bp, Artificial
  probe
  misc_feature (1)..(25): SEQ ID NO: 2507; WAN024GAO; Start 584; Stop 608
aaggtgtcaaggtagatattccact

SEQ ID NO: 327963 - DNA, 25 bp, Artificial
  probe
  misc_feature (1)..(25): SEQ ID NO: 2508; WAN024CYL; Start 171; Stop 195
cattgacgaaccatttgagattgat

SEQ ID NO: 327964 - DNA, 25 bp, Artificial
  probe
  misc_feature (1)..(25): SEQ ID NO: 2508; WAN024CYL; Start 172; Stop 196
attgacgaaccatttgagattgata

SEQ ID NO: 327965 - DNA, 25 bp, Artificial
  probe
  misc_feature (1)..(25): SEQ ID NO: 2508; WAN024CYL; Start 174; Stop 198
tgacgaaccatttgagattgatatt

SEQ ID NO: 327966 - DNA, 25 bp, Artificial
  probe
  misc_feature (1)..(25): SEQ ID NO: 2508; WAN024CYL; Start 173; Stop 197
ttgacgaaccatttgagattgatat

SEQ ID NO: 327967 - DNA, 25 bp, Artificial
  probe
  misc_feature (1)..(25): SEQ ID NO: 2508; WAN024CYL; Start 168; Stop 192
aaccattgacgaaccatttgagatt

SEQ ID NO: 327968 - DNA, 25 bp, Artificial
  probe
  misc_feature (1)..(25): SEQ ID NO: 2508; WAN024CYL; Start 167; Stop 191
aaaccattgacgaaccatttgagat

SEQ ID NO: 327969 - DNA, 25 bp, Artificial
  probe
  misc_feature (1)..(25): SEQ ID NO: 2508; WAN024CYL; Start 161; Stop 185
tatcagaaaccattgacgaaccatt

SEQ ID NO: 327970 - DNA, 25 bp, Artificial
  probe
  misc_feature (1)..(25): SEQ ID NO: 2508; WAN024CYL; Start 170; Stop 194
ccattgacgaaccatttgagattga

SEQ ID NO: 327971 - DNA, 25 bp, Artificial
  probe
  misc_feature (1)..(25): SEQ ID NO: 2508; WAN024CYL; Start 105; Stop 129
aatcgaatatctcctcacagagtgt

SEQ ID NO: 327972 - DNA, 25 bp, Artificial
  probe
  misc_feature (1)..(25): SEQ ID NO: 2508; WAN024CYL; Start 160; Stop 184
gtatcagaaaccattgacgaaccat

SEQ ID NO: 327973 - DNA, 25 bp, Artificial
  probe
  misc_feature (1)..(25): SEQ ID NO: 2508; WAN024CYL; Start 169; Stop 193
accattgacgaaccatttgagattg

SEQ ID NO: 327974 - DNA, 25 bp, Artificial
  probe
  misc_feature (1)..(25): SEQ ID NO: 2508; WAN024CYL; Start 166; Stop 190
gaaaccattgacgaaccatttgaga

SEQ ID NO: 327975 - DNA, 25 bp, Artificial
  probe
  misc_feature (1)..(25): SEQ ID NO: 2508; WAN024CYL; Start 165; Stop 189
agaaaccattgacgaaccatttgag

SEQ ID NO: 327976 - DNA, 25 bp, Artificial
  probe
  misc_feature (1)..(25): SEQ ID NO: 2508; WAN024CYL; Start 175; Stop 199
gacgaaccatttgagattgatattt

SEQ ID NO: 327977 - DNA, 25 bp, Artificial
  probe
  misc_feature (1)..(25): SEQ ID NO: 2508; WAN024CYL; Start 162; Stop 186
atcagaaaccattgacgaaccattt

SEQ ID NO: 327978 - DNA, 25 bp, Artificial
  probe
  misc_feature (1)..(25): SEQ ID NO: 2508; WAN024CYL; Start 164; Stop 188
cagaaaccattgacgaaccatttga

SEQ ID NO: 327979 - DNA, 25 bp, Artificial
  probe
  misc_feature (1)..(25): SEQ ID NO: 2508; WAN024CYL; Start 34; Stop 58
cgactctcaacaaagttatacgctg

SEQ ID NO: 327980 - DNA, 25 bp, Artificial
  probe
  misc_feature (1)..(25): SEQ ID NO: 2508; WAN024CYL; Start 163; Stop 187
tcagaaaccattgacgaaccatttg

SEQ ID NO: 327981 - DNA, 25 bp, Artificial
  probe
  misc_feature (1)..(25): SEQ ID NO: 2508; WAN024CYL; Start 35; Stop 59
gactctcaacaaagttatacgctgc

SEQ ID NO: 327982 - DNA, 25 bp, Artificial
  probe
  misc_feature (1)..(25): SEQ ID NO: 2508; WAN024CYL; Start 31; Stop 55
cttcgactctcaacaaagttatacg

SEQ ID NO: 327983 - DNA, 25 bp, Artificial
  probe
  misc_feature (1)..(25): SEQ ID NO: 2508; WAN024CYL; Start 29; Stop 53
cccttcgactctcaacaaagttata

SEQ ID NO: 327984 - DNA, 25 bp, Artificial
  probe
  misc_feature (1)..(25): SEQ ID NO: 2508; WAN024CYL; Start 30; Stop 54
ccttcgactctcaacaaagttatac

SEQ ID NO: 327985 - DNA, 25 bp, Artificial
  probe
  misc_feature (1)..(25): SEQ ID NO: 2508; WAN024CYL; Start 103; Stop 127
caaatcgaatatctcctcacagagt

SEQ ID NO: 327986 - DNA, 25 bp, Artificial
  probe
  misc_feature (1)..(25): SEQ ID NO: 2508; WAN024CYL; Start 32; Stop 56
ttcgactctcaacaaagttatacgc

SEQ ID NO: 327987 - DNA, 25 bp, Artificial
  probe
  misc_feature (1)..(25): SEQ ID NO: 2508; WAN024CYL; Start 104; Stop 128
aaatcgaatatctcctcacagagtg

SEQ ID NO: 327988 - DNA, 25 bp, Artificial
  probe
  misc_feature (1)..(25): SEQ ID NO: 2508; WAN024CYL; Start 176; Stop 200
acgaaccatttgagattgatattta

SEQ ID NO: 327989 - DNA, 25 bp, Artificial
  probe
  misc_feature (1)..(25): SEQ ID NO: 2508; WAN024CYL; Start 33; Stop 57
tcgactctcaacaaagttatacgct

SEQ ID NO: 327990 - DNA, 25 bp, Artificial
  probe
  misc_feature (1)..(25): SEQ ID NO: 2508; WAN024CYL; Start 37; Stop 61
ctctcaacaaagttatacgctgcac

SEQ ID NO: 327991 - DNA, 25 bp, Artificial
  probe
  misc_feature (1)..(25): SEQ ID NO: 2508; WAN024CYL; Start 39; Stop 63
ctcaacaaagttatacgctgcactc

SEQ ID NO: 327992 - DNA, 25 bp, Artificial
  probe
  misc_feature (1)..(25): SEQ ID NO: 2508; WAN024CYL; Start 177; Stop 201
cgaaccatttgagattgatatttaa

SEQ ID NO: 327993 - DNA, 25 bp, Artificial
  probe
  misc_feature (1)..(25): SEQ ID NO: 2508; WAN024CYL; Start 38; Stop 62
tctcaacaaagttatacgctgcact

SEQ ID NO: 327994 - DNA, 25 bp, Artificial
  probe
  misc_feature (1)..(25): SEQ ID NO: 2508; WAN024CYL; Start 36; Stop 60
actctcaacaaagttatacgctgca

SEQ ID NO: 327995 - DNA, 25 bp, Artificial
  probe
  misc_feature (1)..(25): SEQ ID NO: 2508; WAN024CYL; Start 136; Stop 160
caacggaagaaagacggaaaatacg

SEQ ID NO: 327996 - DNA, 25 bp, Artificial
  probe
  misc_feature (1)..(25): SEQ ID NO: 2509; WAN024FBE; Start 808; Stop 832
gaagcagactggtcaggttatatta

SEQ ID NO: 327997 - DNA, 25 bp, Artificial
  probe
  misc_feature (1)..(25): SEQ ID NO: 2509; WAN024FBE; Start 809; Stop 833
aagcagactggtcaggttatattaa

SEQ ID NO: 327998 - DNA, 25 bp, Artificial
  probe
  misc_feature (1)..(25): SEQ ID NO: 2509; WAN024FBE; Start 462; Stop 486
tgataagttaggctacgatgtggaa

SEQ ID NO: 327999 - DNA, 25 bp, Artificial
  probe
  misc_feature (1)..(25): SEQ ID NO: 2509; WAN024FBE; Start 331; Stop 355
caactcttgtatgtagaattgccta

SEQ ID NO: 328000 - DNA, 25 bp, Artificial
  probe
  misc_feature (1)..(25): SEQ ID NO: 2509; WAN024FBE; Start 807; Stop 831
tgaagcagactggtcaggttatatt

SEQ ID NO: 328001 - DNA, 25 bp, Artificial
  probe
  misc_feature (1)..(25): SEQ ID NO: 2509; WAN024FBE; Start 806; Stop 830
ttgaagcagactggtcaggttatat

SEQ ID NO: 328002 - DNA, 25 bp, Artificial
  probe
  misc_feature (1)..(25): SEQ ID NO: 2509; WAN024FBE; Start 332; Stop 356
aactcttgtatgtagaattgcctaa

SEQ ID NO: 328003 - DNA, 25 bp, Artificial
  probe
  misc_feature (1)..(25): SEQ ID NO: 2509; WAN024FBE; Start 811; Stop 835
gcagactggtcaggttatattaact

SEQ ID NO: 328004 - DNA, 25 bp, Artificial
  probe
  misc_feature (1)..(25): SEQ ID NO: 2509; WAN024FBE; Start 810; Stop 834
agcagactggtcaggttatattaac

SEQ ID NO: 328005 - DNA, 25 bp, Artificial
  probe
  misc_feature (1)..(25): SEQ ID NO: 2509; WAN024FBE; Start 22; Stop 46
tgtggagcatgtagaattatgacaa

SEQ ID NO: 328006 - DNA, 25 bp, Artificial
  probe
  misc_feature (1)..(25): SEQ ID NO: 2509; WAN024FBE; Start 21; Stop 45
atgtggagcatgtagaattatgaca

SEQ ID NO: 328007 - DNA, 25 bp, Artificial
  probe
  misc_feature (1)..(25): SEQ ID NO: 2509; WAN024FBE; Start 931; Stop 955
aatagtcaatctcaccgtgccttag

SEQ ID NO: 328008 - DNA, 25 bp, Artificial
  probe
  misc_feature (1)..(25): SEQ ID NO: 2509; WAN024FBE; Start 805; Stop 829
gttgaagcagactggtcaggttata

SEQ ID NO: 328009 - DNA, 25 bp, Artificial
  probe
  misc_feature (1)..(25): SEQ ID NO: 2509; WAN024FBE; Start 790; Stop 814
aaggaaagtttagttgttgaagcag

SEQ ID NO: 328010 - DNA, 25 bp, Artificial
  probe
  misc_feature (1)..(25): SEQ ID NO: 2509; WAN024FBE; Start 780; Stop 804
cagcccaaataaggaaagtttagtt

SEQ ID NO: 328011 - DNA, 25 bp, Artificial
  probe
  misc_feature (1)..(25): SEQ ID NO: 2509; WAN024FBE; Start 463; Stop 487
gataagttaggctacgatgtggaaa

SEQ ID NO: 328012 - DNA, 25 bp, Artificial
  probe
  misc_feature (1)..(25): SEQ ID NO: 2509; WAN024FBE; Start 792; Stop 816
ggaaagtttagttgttgaagcagac

SEQ ID NO: 328013 - DNA, 25 bp, Artificial
  probe
  misc_feature (1)..(25): SEQ ID NO: 2509; WAN024FBE; Start 791; Stop 815
aggaaagtttagttgttgaagcaga

SEQ ID NO: 328014 - DNA, 25 bp, Artificial
  probe
  misc_feature (1)..(25): SEQ ID NO: 2509; WAN024FBE; Start 789; Stop 813
taaggaaagtttagttgttgaagca

SEQ ID NO: 328015 - DNA, 25 bp, Artificial
  probe
  misc_feature (1)..(25): SEQ ID NO: 2509; WAN024FBE; Start 779; Stop 803
ccagcccaaataaggaaagtttagt

SEQ ID NO: 328016 - DNA, 25 bp, Artificial
  probe
  misc_feature (1)..(25): SEQ ID NO: 2509; WAN024FBE; Start 782; Stop 806
gcccaaataaggaaagtttagttgt

SEQ ID NO: 328017 - DNA, 25 bp, Artificial
  probe
  misc_feature (1)..(25): SEQ ID NO: 2509; WAN024FBE; Start 325; Stop 349
aatgggcaactcttgtatgtagaat

SEQ ID NO: 328018 - DNA, 25 bp, Artificial
  probe
  misc_feature (1)..(25): SEQ ID NO: 2509; WAN024FBE; Start 781; Stop 805
agcccaaataaggaaagtttagttg

SEQ ID NO: 328019 - DNA, 25 bp, Artificial
  probe
  misc_feature (1)..(25): SEQ ID NO: 2509; WAN024FBE; Start 324; Stop 348
aaatgggcaactcttgtatgtagaa

SEQ ID NO: 328020 - DNA, 25 bp, Artificial
  probe
  misc_feature (1)..(25): SEQ ID NO: 2509; WAN024FBE; Start 990; Stop 1014
gcaaagcaaaccatcattgtaacta

SEQ ID NO: 328021 - DNA, 25 bp, Artificial
  probe
  misc_feature (1)..(25): SEQ ID NO: 2509; WAN024FBE; Start 812; Stop 836
cagactggtcaggttatattaactt

SEQ ID NO: 328022 - DNA, 25 bp, Artificial
  probe
  misc_feature (1)..(25): SEQ ID NO: 2509; WAN024FBE; Start 326; Stop 350
atgggcaactcttgtatgtagaatt

SEQ ID NO: 328023 - DNA, 25 bp, Artificial
  probe
  misc_feature (1)..(25): SEQ ID NO: 2509; WAN024FBE; Start 793; Stop 817
gaaagtttagttgttgaagcagact

SEQ ID NO: 328024 - DNA, 25 bp, Artificial
  probe
  misc_feature (1)..(25): SEQ ID NO: 2509; WAN024FBE; Start 168; Stop 192
atttggagatgaagagtatggtttc

SEQ ID NO: 328025 - DNA, 25 bp, Artificial
  probe
  misc_feature (1)..(25): SEQ ID NO: 2509; WAN024FBE; Start 794; Stop 818
aaagtttagttgttgaagcagactg

SEQ ID NO: 328026 - DNA, 25 bp, Artificial
  probe
  misc_feature (1)..(25): SEQ ID NO: 2509; WAN024FBE; Start 327; Stop 351
tgggcaactcttgtatgtagaattg

SEQ ID NO: 328027 - DNA, 25 bp, Artificial
  probe
  misc_feature (1)..(25): SEQ ID NO: 2509; WAN024FBE; Start 799; Stop 823
ttagttgttgaagcagactggtcag

SEQ ID NO: 328028 - DNA, 25 bp, Artificial
  probe
  misc_feature (1)..(25): SEQ ID NO: 2509; WAN024FBE; Start 991; Stop 1015
caaagcaaaccatcattgtaactaa

SEQ ID NO: 328029 - DNA, 25 bp, Artificial
  probe
  misc_feature (1)..(25): SEQ ID NO: 2510; WAN024CJK; Start 52; Stop 76
tttgctaaactccctgatttgaaac

SEQ ID NO: 328030 - DNA, 25 bp, Artificial
  probe
  misc_feature (1)..(25): SEQ ID NO: 2510; WAN024CJK; Start 53; Stop 77
ttgctaaactccctgatttgaaaca

SEQ ID NO: 328031 - DNA, 25 bp, Artificial
  probe
  misc_feature (1)..(25): SEQ ID NO: 2510; WAN024CJK; Start 55; Stop 79
gctaaactccctgatttgaaacaag

SEQ ID NO: 328032 - DNA, 25 bp, Artificial
  probe
  misc_feature (1)..(25): SEQ ID NO: 2510; WAN024CJK; Start 56; Stop 80
ctaaactccctgatttgaaacaagt

SEQ ID NO: 328033 - DNA, 25 bp, Artificial
  probe
  misc_feature (1)..(25): SEQ ID NO: 2510; WAN024CJK; Start 54; Stop 78
tgctaaactccctgatttgaaacaa

SEQ ID NO: 328034 - DNA, 25 bp, Artificial
  probe
  misc_feature (1)..(25): SEQ ID NO: 2510; WAN024CJK; Start 31; Stop 55
ttggacaagatgtttgaagagtttg

SEQ ID NO: 328035 - DNA, 25 bp, Artificial
  probe
  misc_feature (1)..(25): SEQ ID NO: 2510; WAN024CJK; Start 34; Stop 58
gacaagatgtttgaagagtttgcta

SEQ ID NO: 328036 - DNA, 25 bp, Artificial
  probe
  misc_feature (1)..(25): SEQ ID NO: 2510; WAN024CJK; Start 35; Stop 59
acaagatgtttgaagagtttgctaa

SEQ ID NO: 328037 - DNA, 25 bp, Artificial
  probe
  misc_feature (1)..(25): SEQ ID NO: 2510; WAN024CJK; Start 36; Stop 60
caagatgtttgaagagtttgctaaa

SEQ ID NO: 328038 - DNA, 25 bp, Artificial
  probe
  misc_feature (1)..(25): SEQ ID NO: 2510; WAN024CJK; Start 30; Stop 54
cttggacaagatgtttgaagagttt

SEQ ID NO: 328039 - DNA, 25 bp, Artificial
  probe
  misc_feature (1)..(25): SEQ ID NO: 2510; WAN024CJK; Start 29; Stop 53
acttggacaagatgtttgaagagtt

SEQ ID NO: 328040 - DNA, 25 bp, Artificial
  probe
  misc_feature (1)..(25): SEQ ID NO: 2510; WAN024CJK; Start 33; Stop 57
ggacaagatgtttgaagagtttgct

SEQ ID NO: 328041 - DNA, 25 bp, Artificial
  probe
  misc_feature (1)..(25): SEQ ID NO: 2510; WAN024CJK; Start 28; Stop 52
gacttggacaagatgtttgaagagt

SEQ ID NO: 328042 - DNA, 25 bp, Artificial
  probe
  misc_feature (1)..(25): SEQ ID NO: 2510; WAN024CJK; Start 32; Stop 56
tggacaagatgtttgaagagtttgc

SEQ ID NO: 328043 - DNA, 25 bp, Artificial
  probe
  misc_feature (1)..(25): SEQ ID NO: 2510; WAN024CJK; Start 51; Stop 75
gtttgctaaactccctgatttgaaa

SEQ ID NO: 328044 - DNA, 25 bp, Artificial
  probe
  misc_feature (1)..(25): SEQ ID NO: 2510; WAN024CJK; Start 27; Stop 51
cgacttggacaagatgtttgaagag

SEQ ID NO: 328045 - DNA, 25 bp, Artificial
  probe
  misc_feature (1)..(25): SEQ ID NO: 2510; WAN024CJK; Start 25; Stop 49
gacgacttggacaagatgtttgaag

SEQ ID NO: 328046 - DNA, 25 bp, Artificial
  probe
  misc_feature (1)..(25): SEQ ID NO: 2510; WAN024CJK; Start 37; Stop 61
aagatgtttgaagagtttgctaaac

SEQ ID NO: 328047 - DNA, 25 bp, Artificial
  probe
  misc_feature (1)..(25): SEQ ID NO: 2510; WAN024CJK; Start 26; Stop 50
acgacttggacaagatgtttgaaga

SEQ ID NO: 328048 - DNA, 25 bp, Artificial
  probe
  misc_feature (1)..(25): SEQ ID NO: 2510; WAN024CJK; Start 24; Stop 48
agacgacttggacaagatgtttgaa

SEQ ID NO: 328049 - DNA, 25 bp, Artificial
  probe
  misc_feature (1)..(25): SEQ ID NO: 2510; WAN024CJK; Start 11; Stop 35
aatttacaaaacgagacgacttgga

SEQ ID NO: 328050 - DNA, 25 bp, Artificial
  probe
  misc_feature (1)..(25): SEQ ID NO: 2510; WAN024CJK; Start 23; Stop 47
gagacgacttggacaagatgtttga

SEQ ID NO: 328051 - DNA, 25 bp, Artificial
  probe
  misc_feature (1)..(25): SEQ ID NO: 2510; WAN024CJK; Start 12; Stop 36
atttacaaaacgagacgacttggac

SEQ ID NO: 328052 - DNA, 25 bp, Artificial
  probe
  misc_feature (1)..(25): SEQ ID NO: 2510; WAN024CJK; Start 20; Stop 44
aacgagacgacttggacaagatgtt

SEQ ID NO: 328053 - DNA, 25 bp, Artificial
  probe
  misc_feature (1)..(25): SEQ ID NO: 2510; WAN024CJK; Start 10; Stop 34
aaatttacaaaacgagacgacttgg

SEQ ID NO: 328054 - DNA, 25 bp, Artificial
  probe
  misc_feature (1)..(25): SEQ ID NO: 2510; WAN024CJK; Start 82; Stop 106
actttccctgatgacaaagagaaaa

SEQ ID NO: 328055 - DNA, 25 bp, Artificial
  probe
  misc_feature (1)..(25): SEQ ID NO: 2510; WAN024CJK; Start 14; Stop 38
ttacaaaacgagacgacttggacaa

SEQ ID NO: 328056 - DNA, 25 bp, Artificial
  probe
  misc_feature (1)..(25): SEQ ID NO: 2510; WAN024CJK; Start 13; Stop 37
tttacaaaacgagacgacttggaca

SEQ ID NO: 328057 - DNA, 25 bp, Artificial
  probe
  misc_feature (1)..(25): SEQ ID NO: 2510; WAN024CJK; Start 22; Stop 46
cgagacgacttggacaagatgtttg

SEQ ID NO: 328058 - DNA, 25 bp, Artificial
  probe
  misc_feature (1)..(25): SEQ ID NO: 2510; WAN024CJK; Start 21; Stop 45
acgagacgacttggacaagatgttt

SEQ ID NO: 328059 - DNA, 25 bp, Artificial
  probe
  misc_feature (1)..(25): SEQ ID NO: 2510; WAN024CJK; Start 19; Stop 43
aaacgagacgacttggacaagatgt

SEQ ID NO: 328060 - DNA, 25 bp, Artificial
  probe
  misc_feature (1)..(25): SEQ ID NO: 2510; WAN024CJK; Start 15; Stop 39
tacaaaacgagacgacttggacaag

SEQ ID NO: 328061 - DNA, 25 bp, Artificial
  probe
  misc_feature (1)..(25): SEQ ID NO: 2510; WAN024CJK; Start 18; Stop 42
aaaacgagacgacttggacaagatg

SEQ ID NO: 328062 - DNA, 25 bp, Artificial
  probe
  misc_feature (1)..(25): SEQ ID NO: 2511; WAN024C8B; Start 243; Stop 267
gtacacttctactacagcacttcaa

SEQ ID NO: 328063 - DNA, 25 bp, Artificial
  probe
  misc_feature (1)..(25): SEQ ID NO: 2511; WAN024C8B; Start 225; Stop 249
tgatgaagcaactgataagtacact

SEQ ID NO: 328064 - DNA, 25 bp, Artificial
  probe
  misc_feature (1)..(25): SEQ ID NO: 2511; WAN024C8B; Start 224; Stop 248
atgatgaagcaactgataagtacac

SEQ ID NO: 328065 - DNA, 25 bp, Artificial
  probe
  misc_feature (1)..(25): SEQ ID NO: 2511; WAN024C8B; Start 226; Stop 250
gatgaagcaactgataagtacactt

SEQ ID NO: 328066 - DNA, 25 bp, Artificial
  probe
  misc_feature (1)..(25): SEQ ID NO: 2511; WAN024C8B; Start 220; Stop 244
aactatgatgaagcaactgataagt

SEQ ID NO: 328067 - DNA, 25 bp, Artificial
  probe
  misc_feature (1)..(25): SEQ ID NO: 2511; WAN024C8B; Start 230; Stop 254
aagcaactgataagtacacttctac

SEQ ID NO: 328068 - DNA, 25 bp, Artificial
  probe
  misc_feature (1)..(25): SEQ ID NO: 2511; WAN024C8B; Start 221; Stop 245
actatgatgaagcaactgataagta

SEQ ID NO: 328069 - DNA, 25 bp, Artificial
  probe
  misc_feature (1)..(25): SEQ ID NO: 2511; WAN024C8B; Start 231; Stop 255
agcaactgataagtacacttctact

SEQ ID NO: 328070 - DNA, 25 bp, Artificial
  probe
  misc_feature (1)..(25): SEQ ID NO: 2511; WAN024C8B; Start 242; Stop 266
agtacacttctactacagcacttca

SEQ ID NO: 328071 - DNA, 25 bp, Artificial
  probe
  misc_feature (1)..(25): SEQ ID NO: 2511; WAN024C8B; Start 223; Stop 247
tatgatgaagcaactgataagtaca

SEQ ID NO: 328072 - DNA, 25 bp, Artificial
  probe
  misc_feature (1)..(25): SEQ ID NO: 2511; WAN024C8B; Start 239; Stop 263
ataagtacacttctactacagcact

SEQ ID NO: 328073 - DNA, 25 bp, Artificial
  probe
  misc_feature (1)..(25): SEQ ID NO: 2511; WAN024C8B; Start 237; Stop 261
tgataagtacacttctactacagca

SEQ ID NO: 328074 - DNA, 25 bp, Artificial
  probe
  misc_feature (1)..(25): SEQ ID NO: 2511; WAN024C8B; Start 238; Stop 262
gataagtacacttctactacagcac

SEQ ID NO: 328075 - DNA, 25 bp, Artificial
  probe
  misc_feature (1)..(25): SEQ ID NO: 2511; WAN024C8B; Start 236; Stop 260
ctgataagtacacttctactacagc

SEQ ID NO: 328076 - DNA, 25 bp, Artificial
  probe
  misc_feature (1)..(25): SEQ ID NO: 2511; WAN024C8B; Start 222; Stop 246
ctatgatgaagcaactgataagtac

SEQ ID NO: 328077 - DNA, 25 bp, Artificial
  probe
  misc_feature (1)..(25): SEQ ID NO: 2511; WAN024C8B; Start 232; Stop 256
gcaactgataagtacacttctacta

SEQ ID NO: 328078 - DNA, 25 bp, Artificial
  probe
  misc_feature (1)..(25): SEQ ID NO: 2511; WAN024C8B; Start 241; Stop 265
aagtacacttctactacagcacttc

SEQ ID NO: 328079 - DNA, 25 bp, Artificial
  probe
  misc_feature (1)..(25): SEQ ID NO: 2511; WAN024C8B; Start 82; Stop 106
gaatcaatcgtgacaactgaagctc

SEQ ID NO: 328080 - DNA, 25 bp, Artificial
  probe
  misc_feature (1)..(25): SEQ ID NO: 2511; WAN024C8B; Start 240; Stop 264
taagtacacttctactacagcactt

SEQ ID NO: 328081 - DNA, 25 bp, Artificial
  probe
  misc_feature (1)..(25): SEQ ID NO: 2511; WAN024C8B; Start 228; Stop 252
tgaagcaactgataagtacacttct

SEQ ID NO: 328082 - DNA, 25 bp, Artificial
  probe
  misc_feature (1)..(25): SEQ ID NO: 2511; WAN024C8B; Start 365; Stop 389
tggcgatcatcgaattagtataact

SEQ ID NO: 328083 - DNA, 25 bp, Artificial
  probe
  misc_feature (1)..(25): SEQ ID NO: 2511; WAN024C8B; Start 219; Stop 243
aaactatgatgaagcaactgataag

SEQ ID NO: 328084 - DNA, 25 bp, Artificial
  probe
  misc_feature (1)..(25): SEQ ID NO: 2511; WAN024C8B; Start 227; Stop 251
atgaagcaactgataagtacacttc

SEQ ID NO: 328085 - DNA, 25 bp, Artificial
  probe
  misc_feature (1)..(25): SEQ ID NO: 2511; WAN024C8B; Start 364; Stop 388
atggcgatcatcgaattagtataac

SEQ ID NO: 328086 - DNA, 25 bp, Artificial
  probe
  misc_feature (1)..(25): SEQ ID NO: 2511; WAN024C8B; Start 362; Stop 386
caatggcgatcatcgaattagtata

SEQ ID NO: 328087 - DNA, 25 bp, Artificial
  probe
  misc_feature (1)..(25): SEQ ID NO: 2511; WAN024C8B; Start 361; Stop 385
ccaatggcgatcatcgaattagtat

SEQ ID NO: 328088 - DNA, 25 bp, Artificial
  probe
  misc_feature (1)..(25): SEQ ID NO: 2511; WAN024C8B; Start 144; Stop 168
tactctaggtaaacgtggtgatttg

SEQ ID NO: 328089 - DNA, 25 bp, Artificial
  probe
  misc_feature (1)..(25): SEQ ID NO: 2511; WAN024C8B; Start 294; Stop 318
ttatgctgaacgtaacggtggatac

SEQ ID NO: 328090 - DNA, 25 bp, Artificial
  probe
  misc_feature (1)..(25): SEQ ID NO: 2511; WAN024C8B; Start 235; Stop 259
actgataagtacacttctactacag

SEQ ID NO: 328091 - DNA, 25 bp, Artificial
  probe
  misc_feature (1)..(25): SEQ ID NO: 2511; WAN024C8B; Start 229; Stop 253
gaagcaactgataagtacacttcta

SEQ ID NO: 328092 - DNA, 25 bp, Artificial
  probe
  misc_feature (1)..(25): SEQ ID NO: 2511; WAN024C8B; Start 363; Stop 387
aatggcgatcatcgaattagtataa

SEQ ID NO: 328093 - DNA, 25 bp, Artificial
  probe
  misc_feature (1)..(25): SEQ ID NO: 2511; WAN024C8B; Start 366; Stop 390
ggcgatcatcgaattagtataacta

SEQ ID NO: 328094 - DNA, 25 bp, Artificial
  probe
  misc_feature (1)..(25): SEQ ID NO: 2511; WAN024C8B; Start 234; Stop 258
aactgataagtacacttctactaca

SEQ ID NO: 328095 - DNA, 25 bp, Artificial
  probe
  misc_feature (1)..(25): SEQ ID NO: 2512; WAN024FIM; Start 51; Stop 75
gtcaaggataagggtttcaatgtct

SEQ ID NO: 328096 - DNA, 25 bp, Artificial
  probe
  misc_feature (1)..(25): SEQ ID NO: 2512; WAN024FIM; Start 52; Stop 76
tcaaggataagggtttcaatgtctt

SEQ ID NO: 328097 - DNA, 25 bp, Artificial
  probe
  misc_feature (1)..(25): SEQ ID NO: 2512; WAN024FIM; Start 187; Stop 211
ccatatactgaacggactttgactc

SEQ ID NO: 328098 - DNA, 25 bp, Artificial
  probe
  misc_feature (1)..(25): SEQ ID NO: 2512; WAN024FIM; Start 174; Stop 198
aatgcttgatccgccatatactgaa

SEQ ID NO: 328099 - DNA, 25 bp, Artificial
  probe
  misc_feature (1)..(25): SEQ ID NO: 2512; WAN024FIM; Start 48; Stop 72
ttcgtcaaggataagggtttcaatg

SEQ ID NO: 328100 - DNA, 25 bp, Artificial
  probe
  misc_feature (1)..(25): SEQ ID NO: 2512; WAN024FIM; Start 54; Stop 78
aaggataagggtttcaatgtcttgt

SEQ ID NO: 328101 - DNA, 25 bp, Artificial
  probe
  misc_feature (1)..(25): SEQ ID NO: 2512; WAN024FIM; Start 55; Stop 79
aggataagggtttcaatgtcttgta

SEQ ID NO: 328102 - DNA, 25 bp, Artificial
  probe
  misc_feature (1)..(25): SEQ ID NO: 2512; WAN024FIM; Start 47; Stop 71
cttcgtcaaggataagggtttcaat

SEQ ID NO: 328103 - DNA, 25 bp, Artificial
  probe
  misc_feature (1)..(25): SEQ ID NO: 2512; WAN024FIM; Start 56; Stop 80
ggataagggtttcaatgtcttgtaa

SEQ ID NO: 328104 - DNA, 25 bp, Artificial
  probe
  misc_feature (1)..(25): SEQ ID NO: 2512; WAN024FIM; Start 61; Stop 85
agggtttcaatgtcttgtaatttca

SEQ ID NO: 328105 - DNA, 25 bp, Artificial
  probe
  misc_feature (1)..(25): SEQ ID NO: 2512; WAN024FIM; Start 50; Stop 74
cgtcaaggataagggtttcaatgtc

SEQ ID NO: 328106 - DNA, 25 bp, Artificial
  probe
  misc_feature (1)..(25): SEQ ID NO: 2512; WAN024FIM; Start 62; Stop 86
gggtttcaatgtcttgtaatttcaa

SEQ ID NO: 328107 - DNA, 25 bp, Artificial
  probe
  misc_feature (1)..(25): SEQ ID NO: 2512; WAN024FIM; Start 175; Stop 199
atgcttgatccgccatatactgaac

SEQ ID NO: 328108 - DNA, 25 bp, Artificial
  probe
  misc_feature (1)..(25): SEQ ID NO: 2512; WAN024FIM; Start 49; Stop 73
tcgtcaaggataagggtttcaatgt

SEQ ID NO: 328109 - DNA, 25 bp, Artificial
  probe
  misc_feature (1)..(25): SEQ ID NO: 2512; WAN024FIM; Start 173; Stop 197
caatgcttgatccgccatatactga

SEQ ID NO: 328110 - DNA, 25 bp, Artificial
  probe
  misc_feature (1)..(25): SEQ ID NO: 2512; WAN024FIM; Start 60; Stop 84
aagggtttcaatgtcttgtaatttc

SEQ ID NO: 328111 - DNA, 25 bp, Artificial
  probe
  misc_feature (1)..(25): SEQ ID NO: 2512; WAN024FIM; Start 188; Stop 212
catatactgaacggactttgactcc

SEQ ID NO: 328112 - DNA, 25 bp, Artificial
  probe
  misc_feature (1)..(25): SEQ ID NO: 2512; WAN024FIM; Start 186; Stop 210
gccatatactgaacggactttgact

SEQ ID NO: 328113 - DNA, 25 bp, Artificial
  probe
  misc_feature (1)..(25): SEQ ID NO: 2512; WAN024FIM; Start 57; Stop 81
gataagggtttcaatgtcttgtaat

SEQ ID NO: 328114 - DNA, 25 bp, Artificial
  probe
  misc_feature (1)..(25): SEQ ID NO: 2512; WAN024FIM; Start 189; Stop 213
atatactgaacggactttgactccc

SEQ ID NO: 328115 - DNA, 25 bp, Artificial
  probe
  misc_feature (1)..(25): SEQ ID NO: 2512; WAN024FIM; Start 171; Stop 195
ttcaatgcttgatccgccatatact

SEQ ID NO: 328116 - DNA, 25 bp, Artificial
  probe
  misc_feature (1)..(25): SEQ ID NO: 2512; WAN024FIM; Start 59; Stop 83
taagggtttcaatgtcttgtaattt

SEQ ID NO: 328117 - DNA, 25 bp, Artificial
  probe
  misc_feature (1)..(25): SEQ ID NO: 2512; WAN024FIM; Start 46; Stop 70
gcttcgtcaaggataagggtttcaa

SEQ ID NO: 328118 - DNA, 25 bp, Artificial
  probe
  misc_feature (1)..(25): SEQ ID NO: 2512; WAN024FIM; Start 202; Stop 226
actttgactcccttactacgaccaa

SEQ ID NO: 328119 - DNA, 25 bp, Artificial
  probe
  misc_feature (1)..(25): SEQ ID NO: 2512; WAN024FIM; Start 21; Stop 45
gaagcccatgttaagcatttcatcc

SEQ ID NO: 328120 - DNA, 25 bp, Artificial
  probe
  misc_feature (1)..(25): SEQ ID NO: 2512; WAN024FIM; Start 20; Stop 44
ggaagcccatgttaagcatttcatc

SEQ ID NO: 328121 - DNA, 25 bp, Artificial
  probe
  misc_feature (1)..(25): SEQ ID NO: 2512; WAN024FIM; Start 201; Stop 225
gactttgactcccttactacgacca

SEQ ID NO: 328122 - DNA, 25 bp, Artificial
  probe
  misc_feature (1)..(25): SEQ ID NO: 2512; WAN024FIM; Start 58; Stop 82
ataagggtttcaatgtcttgtaatt

SEQ ID NO: 328123 - DNA, 25 bp, Artificial
  probe
  misc_feature (1)..(25): SEQ ID NO: 2512; WAN024FIM; Start 17; Stop 41
caaggaagcccatgttaagcatttc

SEQ ID NO: 328124 - DNA, 25 bp, Artificial
  probe
  misc_feature (1)..(25): SEQ ID NO: 2512; WAN024FIM; Start 196; Stop 220
gaacggactttgactcccttactac

SEQ ID NO: 328125 - DNA, 25 bp, Artificial
  probe
  misc_feature (1)..(25): SEQ ID NO: 2512; WAN024FIM; Start 19; Stop 43
aggaagcccatgttaagcatttcat

SEQ ID NO: 328126 - DNA, 25 bp, Artificial
  probe
  misc_feature (1)..(25): SEQ ID NO: 2512; WAN024FIM; Start 190; Stop 214
tatactgaacggactttgactccct

SEQ ID NO: 328127 - DNA, 25 bp, Artificial
  probe
  misc_feature (1)..(25): SEQ ID NO: 2512; WAN024FIM; Start 195; Stop 219
tgaacggactttgactcccttacta

SEQ ID NO: 328128 - DNA, 25 bp, Artificial
  probe
  misc_feature (1)..(25): SEQ ID NO: 2513; WAN024DAJ; Start 136; Stop 160
tcaattatgggtgttatgagtcttg

SEQ ID NO: 328129 - DNA, 25 bp, Artificial
  probe
  misc_feature (1)..(25): SEQ ID NO: 2513; WAN024DAJ; Start 135; Stop 159
atcaattatgggtgttatgagtctt

SEQ ID NO: 328130 - DNA, 25 bp, Artificial
  probe
  misc_feature (1)..(25): SEQ ID NO: 2513; WAN024DAJ; Start 134; Stop 158
aatcaattatgggtgttatgagtct

SEQ ID NO: 328131 - DNA, 25 bp, Artificial
  probe
  misc_feature (1)..(25): SEQ ID NO: 2513; WAN024DAJ; Start 133; Stop 157
aaatcaattatgggtgttatgagtc

SEQ ID NO: 328132 - DNA, 25 bp, Artificial
  probe
  misc_feature (1)..(25): SEQ ID NO: 2513; WAN024DAJ; Start 218; Stop 242
ctatcgctgcaatctcagaaacaat

SEQ ID NO: 328133 - DNA, 25 bp, Artificial
  probe
  misc_feature (1)..(25): SEQ ID NO: 2513; WAN024DAJ; Start 1; Stop 25
atggcttctaaagatttccacgtag

SEQ ID NO: 328134 - DNA, 25 bp, Artificial
  probe
  misc_feature (1)..(25): SEQ ID NO: 2513; WAN024DAJ; Start 82; Stop 106
aaatttgcttcagatatcactcttg

SEQ ID NO: 328135 - DNA, 25 bp, Artificial
  probe
  misc_feature (1)..(25): SEQ ID NO: 2513; WAN024DAJ; Start 129; Stop 153
ccttaaatcaattatgggtgttatg

SEQ ID NO: 328136 - DNA, 25 bp, Artificial
  probe
  misc_feature (1)..(25): SEQ ID NO: 2513; WAN024DAJ; Start 3; Stop 27
ggcttctaaagatttccacgtagtg

SEQ ID NO: 328137 - DNA, 25 bp, Artificial
  probe
  misc_feature (1)..(25): SEQ ID NO: 2513; WAN024DAJ; Start 219; Stop 243
tatcgctgcaatctcagaaacaatg

SEQ ID NO: 328138 - DNA, 25 bp, Artificial
  probe
  misc_feature (1)..(25): SEQ ID NO: 2513; WAN024DAJ; Start 2; Stop 26
tggcttctaaagatttccacgtagt

SEQ ID NO: 328139 - DNA, 25 bp, Artificial
  probe
  misc_feature (1)..(25): SEQ ID NO: 2513; WAN024DAJ; Start 132; Stop 156
taaatcaattatgggtgttatgagt

SEQ ID NO: 328140 - DNA, 25 bp, Artificial
  probe
  misc_feature (1)..(25): SEQ ID NO: 2513; WAN024DAJ; Start 223; Stop 247
gctgcaatctcagaaacaatggaaa

SEQ ID NO: 328141 - DNA, 25 bp, Artificial
  probe
  misc_feature (1)..(25): SEQ ID NO: 2513; WAN024DAJ; Start 22; Stop 46
gtagtggcagaaacaggtattcacg

SEQ ID NO: 328142 - DNA, 25 bp, Artificial
  probe
  misc_feature (1)..(25): SEQ ID NO: 2513; WAN024DAJ; Start 21; Stop 45
cgtagtggcagaaacaggtattcac

SEQ ID NO: 328143 - DNA, 25 bp, Artificial
  probe
  misc_feature (1)..(25): SEQ ID NO: 2513; WAN024DAJ; Start 127; Stop 151
aaccttaaatcaattatgggtgtta

SEQ ID NO: 328144 - DNA, 25 bp, Artificial
  probe
  misc_feature (1)..(25): SEQ ID NO: 2513; WAN024DAJ; Start 126; Stop 150
taaccttaaatcaattatgggtgtt

SEQ ID NO: 328145 - DNA, 25 bp, Artificial
  probe
  misc_feature (1)..(25): SEQ ID NO: 2513; WAN024DAJ; Start 125; Stop 149
ttaaccttaaatcaattatgggtgt

SEQ ID NO: 328146 - DNA, 25 bp, Artificial
  probe
  misc_feature (1)..(25): SEQ ID NO: 2513; WAN024DAJ; Start 128; Stop 152
accttaaatcaattatgggtgttat

SEQ ID NO: 328147 - DNA, 25 bp, Artificial
  probe
  misc_feature (1)..(25): SEQ ID NO: 2513; WAN024DAJ; Start 224; Stop 248
ctgcaatctcagaaacaatggaaaa

SEQ ID NO: 328148 - DNA, 25 bp, Artificial
  probe
  misc_feature (1)..(25): SEQ ID NO: 2513; WAN024DAJ; Start 169; Stop 193
caaggtgctgacgtaactatctcag

SEQ ID NO: 328149 - DNA, 25 bp, Artificial
  probe
  misc_feature (1)..(25): SEQ ID NO: 2513; WAN024DAJ; Start 20; Stop 44
acgtagtggcagaaacaggtattca

SEQ ID NO: 328150 - DNA, 25 bp, Artificial
  probe
  misc_feature (1)..(25): SEQ ID NO: 2513; WAN024DAJ; Start 131; Stop 155
ttaaatcaattatgggtgttatgag

SEQ ID NO: 328151 - DNA, 25 bp, Artificial
  probe
  misc_feature (1)..(25): SEQ ID NO: 2513; WAN024DAJ; Start 130; Stop 154
cttaaatcaattatgggtgttatga

SEQ ID NO: 328152 - DNA, 25 bp, Artificial
  probe
  misc_feature (1)..(25): SEQ ID NO: 2513; WAN024DAJ; Start 19; Stop 43
cacgtagtggcagaaacaggtattc

SEQ ID NO: 328153 - DNA, 25 bp, Artificial
  probe
  misc_feature (1)..(25): SEQ ID NO: 2513; WAN024DAJ; Start 56; Stop 80
caacattgttggtacaaactgctag

SEQ ID NO: 328154 - DNA, 25 bp, Artificial
  probe
  misc_feature (1)..(25): SEQ ID NO: 2513; WAN024DAJ; Start 217; Stop 241
gctatcgctgcaatctcagaaacaa

SEQ ID NO: 328155 - DNA, 25 bp, Artificial
  probe
  misc_feature (1)..(25): SEQ ID NO: 2513; WAN024DAJ; Start 122; Stop 146
cagttaaccttaaatcaattatggg

SEQ ID NO: 328156 - DNA, 25 bp, Artificial
  probe
  misc_feature (1)..(25): SEQ ID NO: 2513; WAN024DAJ; Start 220; Stop 244
atcgctgcaatctcagaaacaatgg

SEQ ID NO: 328157 - DNA, 25 bp, Artificial
  probe
  misc_feature (1)..(25): SEQ ID NO: 2513; WAN024DAJ; Start 124; Stop 148
gttaaccttaaatcaattatgggtg

SEQ ID NO: 328158 - DNA, 25 bp, Artificial
  probe
  misc_feature (1)..(25): SEQ ID NO: 2513; WAN024DAJ; Start 222; Stop 246
cgctgcaatctcagaaacaatggaa

SEQ ID NO: 328159 - DNA, 25 bp, Artificial
  probe
  misc_feature (1)..(25): SEQ ID NO: 2513; WAN024DAJ; Start 23; Stop 47
tagtggcagaaacaggtattcacgc

SEQ ID NO: 328160 - DNA, 25 bp, Artificial
  probe
  misc_feature (1)..(25): SEQ ID NO: 2513; WAN024DAJ; Start 123; Stop 147
agttaaccttaaatcaattatgggt

SEQ ID NO: 328161 - DNA, 25 bp, Artificial
  probe
  misc_feature (1)..(25): SEQ ID NO: 2514; WAN024F62; Start 86; Stop 110
tcattgccaagaagtacaagatatt

SEQ ID NO: 328162 - DNA, 25 bp, Artificial
  probe
  misc_feature (1)..(25): SEQ ID NO: 2514; WAN024F62; Start 84; Stop 108
aatcattgccaagaagtacaagata

SEQ ID NO: 328163 - DNA, 25 bp, Artificial
  probe
  misc_feature (1)..(25): SEQ ID NO: 2514; WAN024F62; Start 85; Stop 109
atcattgccaagaagtacaagatat

SEQ ID NO: 328164 - DNA, 25 bp, Artificial
  probe
  misc_feature (1)..(25): SEQ ID NO: 2514; WAN024F62; Start 40; Stop 64
aaggctggaatcggaataagattaa

SEQ ID NO: 328165 - DNA, 25 bp, Artificial
  probe
  misc_feature (1)..(25): SEQ ID NO: 2514; WAN024F62; Start 39; Stop 63
caaggctggaatcggaataagatta

SEQ ID NO: 328166 - DNA, 25 bp, Artificial
  probe
  misc_feature (1)..(25): SEQ ID NO: 2514; WAN024F62; Start 131; Stop 155
catcactacttgccttaaagatagc

SEQ ID NO: 328167 - DNA, 25 bp, Artificial
  probe
  misc_feature (1)..(25): SEQ ID NO: 2514; WAN024F62; Start 13; Stop 37
atattgagcacaatcttaccaccat

SEQ ID NO: 328168 - DNA, 25 bp, Artificial
  probe
  misc_feature (1)..(25): SEQ ID NO: 2514; WAN024F62; Start 10; Stop 34
aggatattgagcacaatcttaccac

SEQ ID NO: 328169 - DNA, 25 bp, Artificial
  probe
  misc_feature (1)..(25): SEQ ID NO: 2514; WAN024F62; Start 9; Stop 33
taggatattgagcacaatcttacca

SEQ ID NO: 328170 - DNA, 25 bp, Artificial
  probe
  misc_feature (1)..(25): SEQ ID NO: 2514; WAN024F62; Start 14; Stop 38
tattgagcacaatcttaccaccatc

SEQ ID NO: 328171 - DNA, 25 bp, Artificial
  probe
  misc_feature (1)..(25): SEQ ID NO: 2514; WAN024F62; Start 12; Stop 36
gatattgagcacaatcttaccacca

SEQ ID NO: 328172 - DNA, 25 bp, Artificial
  probe
  misc_feature (1)..(25): SEQ ID NO: 2514; WAN024F62; Start 4; Stop 28
gcttctaggatattgagcacaatct

SEQ ID NO: 328173 - DNA, 25 bp, Artificial
  probe
  misc_feature (1)..(25): SEQ ID NO: 2514; WAN024F62; Start 8; Stop 32
ctaggatattgagcacaatcttacc

SEQ ID NO: 328174 - DNA, 25 bp, Artificial
  probe
  misc_feature (1)..(25): SEQ ID NO: 2514; WAN024F62; Start 11; Stop 35
ggatattgagcacaatcttaccacc

SEQ ID NO: 328175 - DNA, 25 bp, Artificial
  probe
  misc_feature (1)..(25): SEQ ID NO: 2514; WAN024F62; Start 5; Stop 29
cttctaggatattgagcacaatctt

SEQ ID NO: 328176 - DNA, 25 bp, Artificial
  probe
  misc_feature (1)..(25): SEQ ID NO: 2514; WAN024F62; Start 82; Stop 106
gaaatcattgccaagaagtacaaga

SEQ ID NO: 328177 - DNA, 25 bp, Artificial
  probe
  misc_feature (1)..(25): SEQ ID NO: 2514; WAN024F62; Start 3; Stop 27
ggcttctaggatattgagcacaatc

SEQ ID NO: 328178 - DNA, 25 bp, Artificial
  probe
  misc_feature (1)..(25): SEQ ID NO: 2514; WAN024F62; Start 81; Stop 105
ggaaatcattgccaagaagtacaag

SEQ ID NO: 328179 - DNA, 25 bp, Artificial
  probe
  misc_feature (1)..(25): SEQ ID NO: 2514; WAN024F62; Start 83; Stop 107
aaatcattgccaagaagtacaagat

SEQ ID NO: 328180 - DNA, 25 bp, Artificial
  probe
  misc_feature (1)..(25): SEQ ID NO: 2514; WAN024F62; Start 7; Stop 31
tctaggatattgagcacaatcttac

SEQ ID NO: 328181 - DNA, 25 bp, Artificial
  probe
  misc_feature (1)..(25): SEQ ID NO: 2514; WAN024F62; Start 2; Stop 26
tggcttctaggatattgagcacaat

SEQ ID NO: 328182 - DNA, 25 bp, Artificial
  probe
  misc_feature (1)..(25): SEQ ID NO: 2514; WAN024F62; Start 1; Stop 25
atggcttctaggatattgagcacaa

SEQ ID NO: 328183 - DNA, 25 bp, Artificial
  probe
  misc_feature (1)..(25): SEQ ID NO: 2514; WAN024F62; Start 18; Stop 42
gagcacaatcttaccaccatccaag

SEQ ID NO: 328184 - DNA, 25 bp, Artificial
  probe
  misc_feature (1)..(25): SEQ ID NO: 2514; WAN024F62; Start 41; Stop 65
aggctggaatcggaataagattaaa

SEQ ID NO: 328185 - DNA, 25 bp, Artificial
  probe
  misc_feature (1)..(25): SEQ ID NO: 2514; WAN024F62; Start 38; Stop 62
ccaaggctggaatcggaataagatt

SEQ ID NO: 328186 - DNA, 25 bp, Artificial
  probe
  misc_feature (1)..(25): SEQ ID NO: 2514; WAN024F62; Start 78; Stop 102
gatggaaatcattgccaagaagtac

SEQ ID NO: 328187 - DNA, 25 bp, Artificial
  probe
  misc_feature (1)..(25): SEQ ID NO: 2514; WAN024F62; Start 6; Stop 30
ttctaggatattgagcacaatctta

SEQ ID NO: 328188 - DNA, 25 bp, Artificial
  probe
  misc_feature (1)..(25): SEQ ID NO: 2514; WAN024F62; Start 79; Stop 103
atggaaatcattgccaagaagtaca

SEQ ID NO: 328189 - DNA, 25 bp, Artificial
  probe
  misc_feature (1)..(25): SEQ ID NO: 2514; WAN024F62; Start 248; Stop 272
aaccacctacaaacatggatagaaa

SEQ ID NO: 328190 - DNA, 25 bp, Artificial
  probe
  misc_feature (1)..(25): SEQ ID NO: 2514; WAN024F62; Start 247; Stop 271
aaaccacctacaaacatggatagaa

SEQ ID NO: 328191 - DNA, 25 bp, Artificial
  probe
  misc_feature (1)..(25): SEQ ID NO: 2514; WAN024F62; Start 17; Stop 41
tgagcacaatcttaccaccatccaa

SEQ ID NO: 328192 - DNA, 25 bp, Artificial
  probe
  misc_feature (1)..(25): SEQ ID NO: 2514; WAN024F62; Start 80; Stop 104
tggaaatcattgccaagaagtacaa

SEQ ID NO: 328193 - DNA, 25 bp, Artificial
  probe
  misc_feature (1)..(25): SEQ ID NO: 2514; WAN024F62; Start 124; Stop 148
ttagcagcatcactacttgccttaa

SEQ ID NO: 328194 - DNA, 25 bp, Artificial
  probe
  misc_feature (1)..(25): SEQ ID NO: 2515; WAN024GDJ; Start 2; Stop 26
tggcttctctggttaataaattgga

SEQ ID NO: 328195 - DNA, 25 bp, Artificial
  probe
  misc_feature (1)..(25): SEQ ID NO: 2515; WAN024GDJ; Start 1; Stop 25
atggcttctctggttaataaattgg

SEQ ID NO: 328196 - DNA, 25 bp, Artificial
  probe
  misc_feature (1)..(25): SEQ ID NO: 2515; WAN024GDJ; Start 66; Stop 90
agagattctacgttcagacataaca

SEQ ID NO: 328197 - DNA, 25 bp, Artificial
  probe
  misc_feature (1)..(25): SEQ ID NO: 2515; WAN024GDJ; Start 3; Stop 27
ggcttctctggttaataaattggat

SEQ ID NO: 328198 - DNA, 25 bp, Artificial
  probe
  misc_feature (1)..(25): SEQ ID NO: 2515; WAN024GDJ; Start 65; Stop 89
cagagattctacgttcagacataac

SEQ ID NO: 328199 - DNA, 25 bp, Artificial
  probe
  misc_feature (1)..(25): SEQ ID NO: 2515; WAN024GDJ; Start 64; Stop 88
tcagagattctacgttcagacataa

SEQ ID NO: 328200 - DNA, 25 bp, Artificial
  probe
  misc_feature (1)..(25): SEQ ID NO: 2515; WAN024GDJ; Start 63; Stop 87
ttcagagattctacgttcagacata

SEQ ID NO: 328201 - DNA, 25 bp, Artificial
  probe
  misc_feature (1)..(25): SEQ ID NO: 2515; WAN024GDJ; Start 67; Stop 91
gagattctacgttcagacataacat

SEQ ID NO: 328202 - DNA, 25 bp, Artificial
  probe
  misc_feature (1)..(25): SEQ ID NO: 2515; WAN024GDJ; Start 68; Stop 92
agattctacgttcagacataacatt

SEQ ID NO: 328203 - DNA, 25 bp, Artificial
  probe
  misc_feature (1)..(25): SEQ ID NO: 2515; WAN024GDJ; Start 99; Stop 123
ctacttgtcacaacagacggatgat

SEQ ID NO: 328204 - DNA, 25 bp, Artificial
  probe
  misc_feature (1)..(25): SEQ ID NO: 2515; WAN024GDJ; Start 97; Stop 121
ttctacttgtcacaacagacggatg

SEQ ID NO: 328205 - DNA, 25 bp, Artificial
  probe
  misc_feature (1)..(25): SEQ ID NO: 2515; WAN024GDJ; Start 100; Stop 124
tacttgtcacaacagacggatgatg

SEQ ID NO: 328206 - DNA, 25 bp, Artificial
  probe
  misc_feature (1)..(25): SEQ ID NO: 2515; WAN024GDJ; Start 4; Stop 28
gcttctctggttaataaattggatt

SEQ ID NO: 328207 - DNA, 25 bp, Artificial
  probe
  misc_feature (1)..(25): SEQ ID NO: 2515; WAN024GDJ; Start 92; Stop 116
tttctttctacttgtcacaacagac

SEQ ID NO: 328208 - DNA, 25 bp, Artificial
  probe
  misc_feature (1)..(25): SEQ ID NO: 2515; WAN024GDJ; Start 10; Stop 34
ctggttaataaattggattcttggt

SEQ ID NO: 328209 - DNA, 25 bp, Artificial
  probe
  misc_feature (1)..(25): SEQ ID NO: 2515; WAN024GDJ; Start 93; Stop 117
ttctttctacttgtcacaacagacg

SEQ ID NO: 328210 - DNA, 25 bp, Artificial
  probe
  misc_feature (1)..(25): SEQ ID NO: 2515; WAN024GDJ; Start 9; Stop 33
tctggttaataaattggattcttgg

SEQ ID NO: 328211 - DNA, 25 bp, Artificial
  probe
  misc_feature (1)..(25): SEQ ID NO: 2515; WAN024GDJ; Start 62; Stop 86
tttcagagattctacgttcagacat

SEQ ID NO: 328212 - DNA, 25 bp, Artificial
  probe
  misc_feature (1)..(25): SEQ ID NO: 2515; WAN024GDJ; Start 11; Stop 35
tggttaataaattggattcttggtt

SEQ ID NO: 328213 - DNA, 25 bp, Artificial
  probe
  misc_feature (1)..(25): SEQ ID NO: 2515; WAN024GDJ; Start 98; Stop 122
tctacttgtcacaacagacggatga

SEQ ID NO: 328214 - DNA, 25 bp, Artificial
  probe
  misc_feature (1)..(25): SEQ ID NO: 2515; WAN024GDJ; Start 96; Stop 120
tttctacttgtcacaacagacggat

SEQ ID NO: 328215 - DNA, 25 bp, Artificial
  probe
  misc_feature (1)..(25): SEQ ID NO: 2515; WAN024GDJ; Start 23; Stop 47
tggattcttggtttgattttctgag

SEQ ID NO: 328216 - DNA, 25 bp, Artificial
  probe
  misc_feature (1)..(25): SEQ ID NO: 2515; WAN024GDJ; Start 22; Stop 46
ttggattcttggtttgattttctga

SEQ ID NO: 328217 - DNA, 25 bp, Artificial
  probe
  misc_feature (1)..(25): SEQ ID NO: 2515; WAN024GDJ; Start 24; Stop 48
ggattcttggtttgattttctgaga

SEQ ID NO: 328218 - DNA, 25 bp, Artificial
  probe
  misc_feature (1)..(25): SEQ ID NO: 2515; WAN024GDJ; Start 53; Stop 77
caagagacttttcagagattctacg

SEQ ID NO: 328219 - DNA, 25 bp, Artificial
  probe
  misc_feature (1)..(25): SEQ ID NO: 2515; WAN024GDJ; Start 21; Stop 45
attggattcttggtttgattttctg

SEQ ID NO: 328220 - DNA, 25 bp, Artificial
  probe
  misc_feature (1)..(25): SEQ ID NO: 2515; WAN024GDJ; Start 95; Stop 119
ctttctacttgtcacaacagacgga

SEQ ID NO: 328221 - DNA, 25 bp, Artificial
  probe
  misc_feature (1)..(25): SEQ ID NO: 2515; WAN024GDJ; Start 94; Stop 118
tctttctacttgtcacaacagacgg

SEQ ID NO: 328222 - DNA, 25 bp, Artificial
  probe
  misc_feature (1)..(25): SEQ ID NO: 2515; WAN024GDJ; Start 69; Stop 93
gattctacgttcagacataacattt

SEQ ID NO: 328223 - DNA, 25 bp, Artificial
  probe
  misc_feature (1)..(25): SEQ ID NO: 2515; WAN024GDJ; Start 12; Stop 36
ggttaataaattggattcttggttt

SEQ ID NO: 328224 - DNA, 25 bp, Artificial
  probe
  misc_feature (1)..(25): SEQ ID NO: 2515; WAN024GDJ; Start 8; Stop 32
ctctggttaataaattggattcttg

SEQ ID NO: 328225 - DNA, 25 bp, Artificial
  probe
  misc_feature (1)..(25): SEQ ID NO: 2515; WAN024GDJ; Start 46; Stop 70
agattttcaagagacttttcagaga

SEQ ID NO: 328226 - DNA, 25 bp, Artificial
  probe
  misc_feature (1)..(25): SEQ ID NO: 2515; WAN024GDJ; Start 76; Stop 100
cgttcagacataacattttctttct

SEQ ID NO: 328227 - DNA, 25 bp, Artificial
  probe
  misc_feature (1)..(25): SEQ ID NO: 2516; WAN024CZR; Start 161; Stop 185
tcttggtagcagatgaattgactaa

SEQ ID NO: 328228 - DNA, 25 bp, Artificial
  probe
  misc_feature (1)..(25): SEQ ID NO: 2516; WAN024CZR; Start 160; Stop 184
gtcttggtagcagatgaattgacta

SEQ ID NO: 328229 - DNA, 25 bp, Artificial
  probe
  misc_feature (1)..(25): SEQ ID NO: 2516; WAN024CZR; Start 158; Stop 182
aagtcttggtagcagatgaattgac

SEQ ID NO: 328230 - DNA, 25 bp, Artificial
  probe
  misc_feature (1)..(25): SEQ ID NO: 2516; WAN024CZR; Start 449; Stop 473
gttctgagtgtgtggctgaagatat

SEQ ID NO: 328231 - DNA, 25 bp, Artificial
  probe
  misc_feature (1)..(25): SEQ ID NO: 2516; WAN024CZR; Start 162; Stop 186
cttggtagcagatgaattgactaaa

SEQ ID NO: 328232 - DNA, 25 bp, Artificial
  probe
  misc_feature (1)..(25): SEQ ID NO: 2516; WAN024CZR; Start 157; Stop 181
aaagtcttggtagcagatgaattga

SEQ ID NO: 328233 - DNA, 25 bp, Artificial
  probe
  misc_feature (1)..(25): SEQ ID NO: 2516; WAN024CZR; Start 163; Stop 187
ttggtagcagatgaattgactaaat

SEQ ID NO: 328234 - DNA, 25 bp, Artificial
  probe
  misc_feature (1)..(25): SEQ ID NO: 2516; WAN024CZR; Start 53; Stop 77
atggtatcatctcagctcttgcatt

SEQ ID NO: 328235 - DNA, 25 bp, Artificial
  probe
  misc_feature (1)..(25): SEQ ID NO: 2516; WAN024CZR; Start 52; Stop 76
aatggtatcatctcagctcttgcat

SEQ ID NO: 328236 - DNA, 25 bp, Artificial
  probe
  misc_feature (1)..(25): SEQ ID NO: 2516; WAN024CZR; Start 164; Stop 188
tggtagcagatgaattgactaaata

SEQ ID NO: 328237 - DNA, 25 bp, Artificial
  probe
  misc_feature (1)..(25): SEQ ID NO: 2516; WAN024CZR; Start 212; Stop 236
ctgagtatggacttccagcaactaa

SEQ ID NO: 328238 - DNA, 25 bp, Artificial
  probe
  misc_feature (1)..(25): SEQ ID NO: 2516; WAN024CZR; Start 758; Stop 782
cagctaaactcttccaagatactct

SEQ ID NO: 328239 - DNA, 25 bp, Artificial
  probe
  misc_feature (1)..(25): SEQ ID NO: 2516; WAN024CZR; Start 757; Stop 781
tcagctaaactcttccaagatactc

SEQ ID NO: 328240 - DNA, 25 bp, Artificial
  probe
  misc_feature (1)..(25): SEQ ID NO: 2516; WAN024CZR; Start 752; Stop 776
gtgtatcagctaaactcttccaaga

SEQ ID NO: 328241 - DNA, 25 bp, Artificial
  probe
  misc_feature (1)..(25): SEQ ID NO: 2516; WAN024CZR; Start 450; Stop 474
ttctgagtgtgtggctgaagatatc

SEQ ID NO: 328242 - DNA, 25 bp, Artificial
  probe
  misc_feature (1)..(25): SEQ ID NO: 2516; WAN024CZR; Start 753; Stop 777
tgtatcagctaaactcttccaagat

SEQ ID NO: 328243 - DNA, 25 bp, Artificial
  probe
  misc_feature (1)..(25): SEQ ID NO: 2516; WAN024CZR; Start 751; Stop 775
ggtgtatcagctaaactcttccaag

SEQ ID NO: 328244 - DNA, 25 bp, Artificial
  probe
  misc_feature (1)..(25): SEQ ID NO: 2516; WAN024CZR; Start 756; Stop 780
atcagctaaactcttccaagatact

SEQ ID NO: 328245 - DNA, 25 bp, Artificial
  probe
  misc_feature (1)..(25): SEQ ID NO: 2516; WAN024CZR; Start 202; Stop 226
cttcttgaccctgagtatggacttc

SEQ ID NO: 328246 - DNA, 25 bp, Artificial
  probe
  misc_feature (1)..(25): SEQ ID NO: 2516; WAN024CZR; Start 253; Stop 277
gctggtcttctccttgcttatgaaa

SEQ ID NO: 328247 - DNA, 25 bp, Artificial
  probe
  misc_feature (1)..(25): SEQ ID NO: 2516; WAN024CZR; Start 582; Stop 606
ttcagacccacgctttaacattgat

SEQ ID NO: 328248 - DNA, 25 bp, Artificial
  probe
  misc_feature (1)..(25): SEQ ID NO: 2516; WAN024CZR; Start 57; Stop 81
tatcatctcagctcttgcatttgac

SEQ ID NO: 328249 - DNA, 25 bp, Artificial
  probe
  misc_feature (1)..(25): SEQ ID NO: 2516; WAN024CZR; Start 56; Stop 80
gtatcatctcagctcttgcatttga

SEQ ID NO: 328250 - DNA, 25 bp, Artificial
  probe
  misc_feature (1)..(25): SEQ ID NO: 2516; WAN024CZR; Start 448; Stop 472
ggttctgagtgtgtggctgaagata

SEQ ID NO: 328251 - DNA, 25 bp, Artificial
  probe
  misc_feature (1)..(25): SEQ ID NO: 2516; WAN024CZR; Start 55; Stop 79
ggtatcatctcagctcttgcatttg

SEQ ID NO: 328252 - DNA, 25 bp, Artificial
  probe
  misc_feature (1)..(25): SEQ ID NO: 2516; WAN024CZR; Start 214; Stop 238
gagtatggacttccagcaactaaag

SEQ ID NO: 328253 - DNA, 25 bp, Artificial
  probe
  misc_feature (1)..(25): SEQ ID NO: 2516; WAN024CZR; Start 581; Stop 605
tttcagacccacgctttaacattga

SEQ ID NO: 328254 - DNA, 25 bp, Artificial
  probe
  misc_feature (1)..(25): SEQ ID NO: 2516; WAN024CZR; Start 542; Stop 566
aagtaaaaccacacaaagttatcgg

SEQ ID NO: 328255 - DNA, 25 bp, Artificial
  probe
  misc_feature (1)..(25): SEQ ID NO: 2516; WAN024CZR; Start 254; Stop 278
ctggtcttctccttgcttatgaaaa

SEQ ID NO: 328256 - DNA, 25 bp, Artificial
  probe
  misc_feature (1)..(25): SEQ ID NO: 2516; WAN024CZR; Start 54; Stop 78
tggtatcatctcagctcttgcattt

SEQ ID NO: 328257 - DNA, 25 bp, Artificial
  probe
  misc_feature (1)..(25): SEQ ID NO: 2516; WAN024CZR; Start 755; Stop 779
tatcagctaaactcttccaagatac

SEQ ID NO: 328258 - DNA, 25 bp, Artificial
  probe
  misc_feature (1)..(25): SEQ ID NO: 2516; WAN024CZR; Start 754; Stop 778
gtatcagctaaactcttccaagata

SEQ ID NO: 328259 - DNA, 25 bp, Artificial
  probe
  misc_feature (1)..(25): SEQ ID NO: 2516; WAN024CZR; Start 213; Stop 237
tgagtatggacttccagcaactaaa

SEQ ID NO: 328260 - DNA, 25 bp, Artificial
  probe
  misc_feature (1)..(25): SEQ ID NO: 2517; WAN024EXV; Start 6; Stop 30
tttagccaagagttcatcaaaggaa

SEQ ID NO: 328261 - DNA, 25 bp, Artificial
  probe
  misc_feature (1)..(25): SEQ ID NO: 2517; WAN024EXV; Start 23; Stop 47
caaaggaagttatcaagagttgctt

SEQ ID NO: 328262 - DNA, 25 bp, Artificial
  probe
  misc_feature (1)..(25): SEQ ID NO: 2517; WAN024EXV; Start 22; Stop 46
tcaaaggaagttatcaagagttgct

SEQ ID NO: 328263 - DNA, 25 bp, Artificial
  probe
  misc_feature (1)..(25): SEQ ID NO: 2517; WAN024EXV; Start 21; Stop 45
atcaaaggaagttatcaagagttgc

SEQ ID NO: 328264 - DNA, 25 bp, Artificial
  probe
  misc_feature (1)..(25): SEQ ID NO: 2517; WAN024EXV; Start 11; Stop 35
ccaagagttcatcaaaggaagttat

SEQ ID NO: 328265 - DNA, 25 bp, Artificial
  probe
  misc_feature (1)..(25): SEQ ID NO: 2517; WAN024EXV; Start 7; Stop 31
ttagccaagagttcatcaaaggaag

SEQ ID NO: 328266 - DNA, 25 bp, Artificial
  probe
  misc_feature (1)..(25): SEQ ID NO: 2517; WAN024EXV; Start 187; Stop 211
ataccgagggctaagaaagaagaaa

SEQ ID NO: 328267 - DNA, 25 bp, Artificial
  probe
  misc_feature (1)..(25): SEQ ID NO: 2517; WAN024EXV; Start 10; Stop 34
gccaagagttcatcaaaggaagtta

SEQ ID NO: 328268 - DNA, 25 bp, Artificial
  probe
  misc_feature (1)..(25): SEQ ID NO: 2517; WAN024EXV; Start 186; Stop 210
gataccgagggctaagaaagaagaa

SEQ ID NO: 328269 - DNA, 25 bp, Artificial
  probe
  misc_feature (1)..(25): SEQ ID NO: 2517; WAN024EXV; Start 86; Stop 110
cacccatagtaataaacatatccgt

SEQ ID NO: 328270 - DNA, 25 bp, Artificial
  probe
  misc_feature (1)..(25): SEQ ID NO: 2517; WAN024EXV; Start 85; Stop 109
acacccatagtaataaacatatccg

SEQ ID NO: 328271 - DNA, 25 bp, Artificial
  probe
  misc_feature (1)..(25): SEQ ID NO: 2517; WAN024EXV; Start 184; Stop 208
atgataccgagggctaagaaagaag

SEQ ID NO: 328272 - DNA, 25 bp, Artificial
  probe
  misc_feature (1)..(25): SEQ ID NO: 2517; WAN024EXV; Start 183; Stop 207
gatgataccgagggctaagaaagaa

SEQ ID NO: 328273 - DNA, 25 bp, Artificial
  probe
  misc_feature (1)..(25): SEQ ID NO: 2517; WAN024EXV; Start 181; Stop 205
aagatgataccgagggctaagaaag

SEQ ID NO: 328274 - DNA, 25 bp, Artificial
  probe
  misc_feature (1)..(25): SEQ ID NO: 2517; WAN024EXV; Start 19; Stop 43
tcatcaaaggaagttatcaagagtt

SEQ ID NO: 328275 - DNA, 25 bp, Artificial
  probe
  misc_feature (1)..(25): SEQ ID NO: 2517; WAN024EXV; Start 82; Stop 106
cccacacccatagtaataaacatat

SEQ ID NO: 328276 - DNA, 25 bp, Artificial
  probe
  misc_feature (1)..(25): SEQ ID NO: 2517; WAN024EXV; Start 180; Stop 204
caagatgataccgagggctaagaaa

SEQ ID NO: 328277 - DNA, 25 bp, Artificial
  probe
  misc_feature (1)..(25): SEQ ID NO: 2517; WAN024EXV; Start 166; Stop 190
ttagcgacaccaatcaagatgatac

SEQ ID NO: 328278 - DNA, 25 bp, Artificial
  probe
  misc_feature (1)..(25): SEQ ID NO: 2517; WAN024EXV; Start 18; Stop 42
ttcatcaaaggaagttatcaagagt

SEQ ID NO: 328279 - DNA, 25 bp, Artificial
  probe
  misc_feature (1)..(25): SEQ ID NO: 2517; WAN024EXV; Start 16; Stop 40
agttcatcaaaggaagttatcaaga

SEQ ID NO: 328280 - DNA, 25 bp, Artificial
  probe
  misc_feature (1)..(25): SEQ ID NO: 2517; WAN024EXV; Start 14; Stop 38
agagttcatcaaaggaagttatcaa

SEQ ID NO: 328281 - DNA, 25 bp, Artificial
  probe
  misc_feature (1)..(25): SEQ ID NO: 2517; WAN024EXV; Start 13; Stop 37
aagagttcatcaaaggaagttatca

SEQ ID NO: 328282 - DNA, 25 bp, Artificial
  probe
  misc_feature (1)..(25): SEQ ID NO: 2517; WAN024EXV; Start 8; Stop 32
tagccaagagttcatcaaaggaagt

SEQ ID NO: 328283 - DNA, 25 bp, Artificial
  probe
  misc_feature (1)..(25): SEQ ID NO: 2517; WAN024EXV; Start 20; Stop 44
catcaaaggaagttatcaagagttg

SEQ ID NO: 328284 - DNA, 25 bp, Artificial
  probe
  misc_feature (1)..(25): SEQ ID NO: 2517; WAN024EXV; Start 17; Stop 41
gttcatcaaaggaagttatcaagag

SEQ ID NO: 328285 - DNA, 25 bp, Artificial
  probe
  misc_feature (1)..(25): SEQ ID NO: 2517; WAN024EXV; Start 15; Stop 39
gagttcatcaaaggaagttatcaag

SEQ ID NO: 328286 - DNA, 25 bp, Artificial
  probe
  misc_feature (1)..(25): SEQ ID NO: 2517; WAN024EXV; Start 12; Stop 36
caagagttcatcaaaggaagttatc

SEQ ID NO: 328287 - DNA, 25 bp, Artificial
  probe
  misc_feature (1)..(25): SEQ ID NO: 2517; WAN024EXV; Start 182; Stop 206
agatgataccgagggctaagaaaga

SEQ ID NO: 328288 - DNA, 25 bp, Artificial
  probe
  misc_feature (1)..(25): SEQ ID NO: 2517; WAN024EXV; Start 185; Stop 209
tgataccgagggctaagaaagaaga

SEQ ID NO: 328289 - DNA, 25 bp, Artificial
  probe
  misc_feature (1)..(25): SEQ ID NO: 2517; WAN024EXV; Start 9; Stop 33
agccaagagttcatcaaaggaagtt

SEQ ID NO: 328290 - DNA, 25 bp, Artificial
  probe
  misc_feature (1)..(25): SEQ ID NO: 2517; WAN024EXV; Start 238; Stop 262
ttgataatcgagtttcctttgatgt

SEQ ID NO: 328291 - DNA, 25 bp, Artificial
  probe
  misc_feature (1)..(25): SEQ ID NO: 2517; WAN024EXV; Start 84; Stop 108
cacacccatagtaataaacatatcc

SEQ ID NO: 328292 - DNA, 25 bp, Artificial
  probe
  misc_feature (1)..(25): SEQ ID NO: 2517; WAN024EXV; Start 83; Stop 107
ccacacccatagtaataaacatatc

SEQ ID NO: 328293 - DNA, 25 bp, Artificial
  probe
  misc_feature (1)..(25): SEQ ID NO: 2518; WAN024BFE; Start 522; Stop 546
tatcggagatgttctagcagttatg

SEQ ID NO: 328294 - DNA, 25 bp, Artificial
  probe
  misc_feature (1)..(25): SEQ ID NO: 2518; WAN024BFE; Start 521; Stop 545
ctatcggagatgttctagcagttat

SEQ ID NO: 328295 - DNA, 25 bp, Artificial
  probe
  misc_feature (1)..(25): SEQ ID NO: 2518; WAN024BFE; Start 520; Stop 544
actatcggagatgttctagcagtta

SEQ ID NO: 328296 - DNA, 25 bp, Artificial
  probe
  misc_feature (1)..(25): SEQ ID NO: 2518; WAN024BFE; Start 514; Stop 538
cctgagactatcggagatgttctag

SEQ ID NO: 328297 - DNA, 25 bp, Artificial
  probe
  misc_feature (1)..(25): SEQ ID NO: 2518; WAN024BFE; Start 517; Stop 541
gagactatcggagatgttctagcag

SEQ ID NO: 328298 - DNA, 25 bp, Artificial
  probe
  misc_feature (1)..(25): SEQ ID NO: 2518; WAN024BFE; Start 515; Stop 539
ctgagactatcggagatgttctagc

SEQ ID NO: 328299 - DNA, 25 bp, Artificial
  probe
  misc_feature (1)..(25): SEQ ID NO: 2518; WAN024BFE; Start 501; Stop 525
atctgctcttgatcctgagactatc

SEQ ID NO: 328300 - DNA, 25 bp, Artificial
  probe
  misc_feature (1)..(25): SEQ ID NO: 2518; WAN024BFE; Start 519; Stop 543
gactatcggagatgttctagcagtt

SEQ ID NO: 328301 - DNA, 25 bp, Artificial
  probe
  misc_feature (1)..(25): SEQ ID NO: 2518; WAN024BFE; Start 500; Stop 524
catctgctcttgatcctgagactat

SEQ ID NO: 328302 - DNA, 25 bp, Artificial
  probe
  misc_feature (1)..(25): SEQ ID NO: 2518; WAN024BFE; Start 516; Stop 540
tgagactatcggagatgttctagca

SEQ ID NO: 328303 - DNA, 25 bp, Artificial
  probe
  misc_feature (1)..(25): SEQ ID NO: 2518; WAN024BFE; Start 513; Stop 537
tcctgagactatcggagatgttcta

SEQ ID NO: 328304 - DNA, 25 bp, Artificial
  probe
  misc_feature (1)..(25): SEQ ID NO: 2518; WAN024BFE; Start 518; Stop 542
agactatcggagatgttctagcagt

SEQ ID NO: 328305 - DNA, 25 bp, Artificial
  probe
  misc_feature (1)..(25): SEQ ID NO: 2518; WAN024BFE; Start 512; Stop 536
atcctgagactatcggagatgttct

SEQ ID NO: 328306 - DNA, 25 bp, Artificial
  probe
  misc_feature (1)..(25): SEQ ID NO: 2518; WAN024BFE; Start 511; Stop 535
gatcctgagactatcggagatgttc

SEQ ID NO: 328307 - DNA, 25 bp, Artificial
  probe
  misc_feature (1)..(25): SEQ ID NO: 2518; WAN024BFE; Start 508; Stop 532
cttgatcctgagactatcggagatg

SEQ ID NO: 328308 - DNA, 25 bp, Artificial
  probe
  misc_feature (1)..(25): SEQ ID NO: 2518; WAN024BFE; Start 507; Stop 531
tcttgatcctgagactatcggagat

SEQ ID NO: 328309 - DNA, 25 bp, Artificial
  probe
  misc_feature (1)..(25): SEQ ID NO: 2518; WAN024BFE; Start 499; Stop 523
acatctgctcttgatcctgagacta

SEQ ID NO: 328310 - DNA, 25 bp, Artificial
  probe
  misc_feature (1)..(25): SEQ ID NO: 2518; WAN024BFE; Start 510; Stop 534
tgatcctgagactatcggagatgtt

SEQ ID NO: 328311 - DNA, 25 bp, Artificial
  probe
  misc_feature (1)..(25): SEQ ID NO: 2518; WAN024BFE; Start 509; Stop 533
ttgatcctgagactatcggagatgt

SEQ ID NO: 328312 - DNA, 25 bp, Artificial
  probe
  misc_feature (1)..(25): SEQ ID NO: 2518; WAN024BFE; Start 727; Stop 751
attatcaaccacgaaagtgacaaag

SEQ ID NO: 328313 - DNA, 25 bp, Artificial
  probe
  misc_feature (1)..(25): SEQ ID NO: 2518; WAN024BFE; Start 726; Stop 750
aattatcaaccacgaaagtgacaaa

SEQ ID NO: 328314 - DNA, 25 bp, Artificial
  probe
  misc_feature (1)..(25): SEQ ID NO: 2518; WAN024BFE; Start 725; Stop 749
aaattatcaaccacgaaagtgacaa

SEQ ID NO: 328315 - DNA, 25 bp, Artificial
  probe
  misc_feature (1)..(25): SEQ ID NO: 2518; WAN024BFE; Start 491; Stop 515
atgaaccaacatctgctcttgatcc

SEQ ID NO: 328316 - DNA, 25 bp, Artificial
  probe
  misc_feature (1)..(25): SEQ ID NO: 2518; WAN024BFE; Start 506; Stop 530
ctcttgatcctgagactatcggaga

SEQ ID NO: 328317 - DNA, 25 bp, Artificial
  probe
  misc_feature (1)..(25): SEQ ID NO: 2518; WAN024BFE; Start 728; Stop 752
ttatcaaccacgaaagtgacaaagt

SEQ ID NO: 328318 - DNA, 25 bp, Artificial
  probe
  misc_feature (1)..(25): SEQ ID NO: 2518; WAN024BFE; Start 497; Stop 521
caacatctgctcttgatcctgagac

SEQ ID NO: 328319 - DNA, 25 bp, Artificial
  probe
  misc_feature (1)..(25): SEQ ID NO: 2518; WAN024BFE; Start 502; Stop 526
tctgctcttgatcctgagactatcg

SEQ ID NO: 328320 - DNA, 25 bp, Artificial
  probe
  misc_feature (1)..(25): SEQ ID NO: 2518; WAN024BFE; Start 498; Stop 522
aacatctgctcttgatcctgagact

SEQ ID NO: 328321 - DNA, 25 bp, Artificial
  probe
  misc_feature (1)..(25): SEQ ID NO: 2518; WAN024BFE; Start 729; Stop 753
tatcaaccacgaaagtgacaaagtc

SEQ ID NO: 328322 - DNA, 25 bp, Artificial
  probe
  misc_feature (1)..(25): SEQ ID NO: 2518; WAN024BFE; Start 478; Stop 502
ctcctcctctttgatgaaccaacat

SEQ ID NO: 328323 - DNA, 25 bp, Artificial
  probe
  misc_feature (1)..(25): SEQ ID NO: 2518; WAN024BFE; Start 475; Stop 499
gaactcctcctctttgatgaaccaa

SEQ ID NO: 328324 - DNA, 25 bp, Artificial
  probe
  misc_feature (1)..(25): SEQ ID NO: 2518; WAN024BFE; Start 476; Stop 500
aactcctcctctttgatgaaccaac

SEQ ID NO: 328325 - DNA, 25 bp, Artificial
  probe
  misc_feature (1)..(25): SEQ ID NO: 2518; WAN024BFE; Start 493; Stop 517
gaaccaacatctgctcttgatcctg

SEQ ID NO: 328326 - DNA, 25 bp, Artificial
  probe
  misc_feature (1)..(25): SEQ ID NO: 2519; WAN024DIT; Start 712; Stop 736
atagaggtgacagacttggattatc

SEQ ID NO: 328327 - DNA, 25 bp, Artificial
  probe
  misc_feature (1)..(25): SEQ ID NO: 2519; WAN024DIT; Start 725; Stop 749
acttggattatctgctacttcatca

SEQ ID NO: 328328 - DNA, 25 bp, Artificial
  probe
  misc_feature (1)..(25): SEQ ID NO: 2519; WAN024DIT; Start 724; Stop 748
gacttggattatctgctacttcatc

SEQ ID NO: 328329 - DNA, 25 bp, Artificial
  probe
  misc_feature (1)..(25): SEQ ID NO: 2519; WAN024DIT; Start 713; Stop 737
tagaggtgacagacttggattatct

SEQ ID NO: 328330 - DNA, 25 bp, Artificial
  probe
  misc_feature (1)..(25): SEQ ID NO: 2519; WAN024DIT; Start 15; Stop 39
aataagtcaggttgctcattatgtg

SEQ ID NO: 328331 - DNA, 25 bp, Artificial
  probe
  misc_feature (1)..(25): SEQ ID NO: 2519; WAN024DIT; Start 723; Stop 747
agacttggattatctgctacttcat

SEQ ID NO: 328332 - DNA, 25 bp, Artificial
  probe
  misc_feature (1)..(25): SEQ ID NO: 2519; WAN024DIT; Start 687; Stop 711
caagcagactattgatgaatctcct

SEQ ID NO: 328333 - DNA, 25 bp, Artificial
  probe
  misc_feature (1)..(25): SEQ ID NO: 2519; WAN024DIT; Start 688; Stop 712
aagcagactattgatgaatctccta

SEQ ID NO: 328334 - DNA, 25 bp, Artificial
  probe
  misc_feature (1)..(25): SEQ ID NO: 2519; WAN024DIT; Start 135; Stop 159
ttcaagaacagaatctaccagtgat

SEQ ID NO: 328335 - DNA, 25 bp, Artificial
  probe
  misc_feature (1)..(25): SEQ ID NO: 2519; WAN024DIT; Start 689; Stop 713
agcagactattgatgaatctcctat

SEQ ID NO: 328336 - DNA, 25 bp, Artificial
  probe
  misc_feature (1)..(25): SEQ ID NO: 2519; WAN024DIT; Start 16; Stop 40
ataagtcaggttgctcattatgtgc

SEQ ID NO: 328337 - DNA, 25 bp, Artificial
  probe
  misc_feature (1)..(25): SEQ ID NO: 2519; WAN024DIT; Start 711; Stop 735
tatagaggtgacagacttggattat

SEQ ID NO: 328338 - DNA, 25 bp, Artificial
  probe
  misc_feature (1)..(25): SEQ ID NO: 2519; WAN024DIT; Start 727; Stop 751
ttggattatctgctacttcatcaag

SEQ ID NO: 328339 - DNA, 25 bp, Artificial
  probe
  misc_feature (1)..(25): SEQ ID NO: 2519; WAN024DIT; Start 726; Stop 750
cttggattatctgctacttcatcaa

SEQ ID NO: 328340 - DNA, 25 bp, Artificial
  probe
  misc_feature (1)..(25): SEQ ID NO: 2519; WAN024DIT; Start 62; Stop 86
acgacttggctcagattatggatac

SEQ ID NO: 328341 - DNA, 25 bp, Artificial
  probe
  misc_feature (1)..(25): SEQ ID NO: 2519; WAN024DIT; Start 61; Stop 85
cacgacttggctcagattatggata

SEQ ID NO: 328342 - DNA, 25 bp, Artificial
  probe
  misc_feature (1)..(25): SEQ ID NO: 2519; WAN024DIT; Start 816; Stop 840
caatatgatggaatatggcaatacc

SEQ ID NO: 328343 - DNA, 25 bp, Artificial
  probe
  misc_feature (1)..(25): SEQ ID NO: 2519; WAN024DIT; Start 670; Stop 694
gatgtagccaagtctatcaagcaga

SEQ ID NO: 328344 - DNA, 25 bp, Artificial
  probe
  misc_feature (1)..(25): SEQ ID NO: 2519; WAN024DIT; Start 669; Stop 693
agatgtagccaagtctatcaagcag

SEQ ID NO: 328345 - DNA, 25 bp, Artificial
  probe
  misc_feature (1)..(25): SEQ ID NO: 2519; WAN024DIT; Start 668; Stop 692
gagatgtagccaagtctatcaagca

SEQ ID NO: 328346 - DNA, 25 bp, Artificial
  probe
  misc_feature (1)..(25): SEQ ID NO: 2519; WAN024DIT; Start 870; Stop 894
agagtgtgtagaacaaggtctcatc

SEQ ID NO: 328347 - DNA, 25 bp, Artificial
  probe
  misc_feature (1)..(25): SEQ ID NO: 2519; WAN024DIT; Start 69; Stop 93
ggctcagattatggataccaatgat

SEQ ID NO: 328348 - DNA, 25 bp, Artificial
  probe
  misc_feature (1)..(25): SEQ ID NO: 2519; WAN024DIT; Start 819; Stop 843
tatgatggaatatggcaataccagt

SEQ ID NO: 328349 - DNA, 25 bp, Artificial
  probe
  misc_feature (1)..(25): SEQ ID NO: 2519; WAN024DIT; Start 237; Stop 261
taccattactccagattcgatgatg

SEQ ID NO: 328350 - DNA, 25 bp, Artificial
  probe
  misc_feature (1)..(25): SEQ ID NO: 2519; WAN024DIT; Start 236; Stop 260
ctaccattactccagattcgatgat

SEQ ID NO: 328351 - DNA, 25 bp, Artificial
  probe
  misc_feature (1)..(25): SEQ ID NO: 2519; WAN024DIT; Start 136; Stop 160
tcaagaacagaatctaccagtgatt

SEQ ID NO: 328352 - DNA, 25 bp, Artificial
  probe
  misc_feature (1)..(25): SEQ ID NO: 2519; WAN024DIT; Start 867; Stop 891
ttcagagtgtgtagaacaaggtctc

SEQ ID NO: 328353 - DNA, 25 bp, Artificial
  probe
  misc_feature (1)..(25): SEQ ID NO: 2519; WAN024DIT; Start 70; Stop 94
gctcagattatggataccaatgatg

SEQ ID NO: 328354 - DNA, 25 bp, Artificial
  probe
  misc_feature (1)..(25): SEQ ID NO: 2519; WAN024DIT; Start 78; Stop 102
tatggataccaatgatgagtggatt

SEQ ID NO: 328355 - DNA, 25 bp, Artificial
  probe
  misc_feature (1)..(25): SEQ ID NO: 2519; WAN024DIT; Start 77; Stop 101
ttatggataccaatgatgagtggat

SEQ ID NO: 328356 - DNA, 25 bp, Artificial
  probe
  misc_feature (1)..(25): SEQ ID NO: 2519; WAN024DIT; Start 76; Stop 100
attatggataccaatgatgagtgga

SEQ ID NO: 328357 - DNA, 25 bp, Artificial
  probe
  misc_feature (1)..(25): SEQ ID NO: 2519; WAN024DIT; Start 869; Stop 893
cagagtgtgtagaacaaggtctcat

SEQ ID NO: 328358 - DNA, 25 bp, Artificial
  probe
  misc_feature (1)..(25): SEQ ID NO: 2519; WAN024DIT; Start 690; Stop 714
gcagactattgatgaatctcctata

SEQ ID NO: 328359 - DNA, 25 bp, Artificial
  probe
  misc_feature (1)..(25): SEQ ID NO: 2520; WAN024DOR; Start 212; Stop 236
atgaagatttatttcggaggtaact

SEQ ID NO: 328360 - DNA, 25 bp, Artificial
  probe
  misc_feature (1)..(25): SEQ ID NO: 2520; WAN024DOR; Start 213; Stop 237
tgaagatttatttcggaggtaacta

SEQ ID NO: 328361 - DNA, 25 bp, Artificial
  probe
  misc_feature (1)..(25): SEQ ID NO: 2520; WAN024DOR; Start 78; Stop 102
aatgtttgcgggagagtttcactat

SEQ ID NO: 328362 - DNA, 25 bp, Artificial
  probe
  misc_feature (1)..(25): SEQ ID NO: 2520; WAN024DOR; Start 208; Stop 232
gattatgaagatttatttcggaggt

SEQ ID NO: 328363 - DNA, 25 bp, Artificial
  probe
  misc_feature (1)..(25): SEQ ID NO: 2520; WAN024DOR; Start 77; Stop 101
aaatgtttgcgggagagtttcacta

SEQ ID NO: 328364 - DNA, 25 bp, Artificial
  probe
  misc_feature (1)..(25): SEQ ID NO: 2520; WAN024DOR; Start 217; Stop 241
gatttatttcggaggtaactaatga

SEQ ID NO: 328365 - DNA, 25 bp, Artificial
  probe
  misc_feature (1)..(25): SEQ ID NO: 2520; WAN024DOR; Start 216; Stop 240
agatttatttcggaggtaactaatg

SEQ ID NO: 328366 - DNA, 25 bp, Artificial
  probe
  misc_feature (1)..(25): SEQ ID NO: 2520; WAN024DOR; Start 214; Stop 238
gaagatttatttcggaggtaactaa

SEQ ID NO: 328367 - DNA, 25 bp, Artificial
  probe
  misc_feature (1)..(25): SEQ ID NO: 2520; WAN024DOR; Start 211; Stop 235
tatgaagatttatttcggaggtaac

SEQ ID NO: 328368 - DNA, 25 bp, Artificial
  probe
  misc_feature (1)..(25): SEQ ID NO: 2520; WAN024DOR; Start 79; Stop 103
atgtttgcgggagagtttcactatc

SEQ ID NO: 328369 - DNA, 25 bp, Artificial
  probe
  misc_feature (1)..(25): SEQ ID NO: 2520; WAN024DOR; Start 146; Stop 170
agatggaacaacgaatgcctcaaag

SEQ ID NO: 328370 - DNA, 25 bp, Artificial
  probe
  misc_feature (1)..(25): SEQ ID NO: 2520; WAN024DOR; Start 218; Stop 242
atttatttcggaggtaactaatgaa

SEQ ID NO: 328371 - DNA, 25 bp, Artificial
  probe
  misc_feature (1)..(25): SEQ ID NO: 2520; WAN024DOR; Start 215; Stop 239
aagatttatttcggaggtaactaat

SEQ ID NO: 328372 - DNA, 25 bp, Artificial
  probe
  misc_feature (1)..(25): SEQ ID NO: 2520; WAN024DOR; Start 148; Stop 172
atggaacaacgaatgcctcaaagtc

SEQ ID NO: 328373 - DNA, 25 bp, Artificial
  probe
  misc_feature (1)..(25): SEQ ID NO: 2520; WAN024DOR; Start 147; Stop 171
gatggaacaacgaatgcctcaaagt

SEQ ID NO: 328374 - DNA, 25 bp, Artificial
  probe
  misc_feature (1)..(25): SEQ ID NO: 2520; WAN024DOR; Start 210; Stop 234
ttatgaagatttatttcggaggtaa

SEQ ID NO: 328375 - DNA, 25 bp, Artificial
  probe
  misc_feature (1)..(25): SEQ ID NO: 2520; WAN024DOR; Start 151; Stop 175
gaacaacgaatgcctcaaagtccat

SEQ ID NO: 328376 - DNA, 25 bp, Artificial
  probe
  misc_feature (1)..(25): SEQ ID NO: 2520; WAN024DOR; Start 11; Stop 35
gattttgggagaacttgtccattat

SEQ ID NO: 328377 - DNA, 25 bp, Artificial
  probe
  misc_feature (1)..(25): SEQ ID NO: 2520; WAN024DOR; Start 209; Stop 233
attatgaagatttatttcggaggta

SEQ ID NO: 328378 - DNA, 25 bp, Artificial
  probe
  misc_feature (1)..(25): SEQ ID NO: 2520; WAN024DOR; Start 14; Stop 38
tttgggagaacttgtccattatttt

SEQ ID NO: 328379 - DNA, 25 bp, Artificial
  probe
  misc_feature (1)..(25): SEQ ID NO: 2520; WAN024DOR; Start 13; Stop 37
ttttgggagaacttgtccattattt

SEQ ID NO: 328380 - DNA, 25 bp, Artificial
  probe
  misc_feature (1)..(25): SEQ ID NO: 2520; WAN024DOR; Start 12; Stop 36
attttgggagaacttgtccattatt

SEQ ID NO: 328381 - DNA, 25 bp, Artificial
  probe
  misc_feature (1)..(25): SEQ ID NO: 2520; WAN024DOR; Start 10; Stop 34
cgattttgggagaacttgtccatta

SEQ ID NO: 328382 - DNA, 25 bp, Artificial
  probe
  misc_feature (1)..(25): SEQ ID NO: 2520; WAN024DOR; Start 219; Stop 243
tttatttcggaggtaactaatgaaa

SEQ ID NO: 328383 - DNA, 25 bp, Artificial
  probe
  misc_feature (1)..(25): SEQ ID NO: 2520; WAN024DOR; Start 152; Stop 176
aacaacgaatgcctcaaagtccatg

SEQ ID NO: 328384 - DNA, 25 bp, Artificial
  probe
  misc_feature (1)..(25): SEQ ID NO: 2520; WAN024DOR; Start 222; Stop 246
atttcggaggtaactaatgaaaaga

SEQ ID NO: 328385 - DNA, 25 bp, Artificial
  probe
  misc_feature (1)..(25): SEQ ID NO: 2520; WAN024DOR; Start 76; Stop 100
aaaatgtttgcgggagagtttcact

SEQ ID NO: 328386 - DNA, 25 bp, Artificial
  probe
  misc_feature (1)..(25): SEQ ID NO: 2520; WAN024DOR; Start 9; Stop 33
acgattttgggagaacttgtccatt

SEQ ID NO: 328387 - DNA, 25 bp, Artificial
  probe
  misc_feature (1)..(25): SEQ ID NO: 2520; WAN024DOR; Start 8; Stop 32
aacgattttgggagaacttgtccat

SEQ ID NO: 328388 - DNA, 25 bp, Artificial
  probe
  misc_feature (1)..(25): SEQ ID NO: 2520; WAN024DOR; Start 7; Stop 31
gaacgattttgggagaacttgtcca

SEQ ID NO: 328389 - DNA, 25 bp, Artificial
  probe
  misc_feature (1)..(25): SEQ ID NO: 2520; WAN024DOR; Start 221; Stop 245
tatttcggaggtaactaatgaaaag

SEQ ID NO: 328390 - DNA, 25 bp, Artificial
  probe
  misc_feature (1)..(25): SEQ ID NO: 2520; WAN024DOR; Start 220; Stop 244
ttatttcggaggtaactaatgaaaa

SEQ ID NO: 328391 - DNA, 25 bp, Artificial
  probe
  misc_feature (1)..(25): SEQ ID NO: 2520; WAN024DOR; Start 166; Stop 190
caaagtccatgggtagaaaggattg

SEQ ID NO: 328392 - DNA, 25 bp, Artificial
  probe
  misc_feature (1)..(25): SEQ ID NO: 2521; WAN024CIY; Start 1729; Stop 1753
ggattatctggagcaagtatagcat

SEQ ID NO: 328393 - DNA, 25 bp, Artificial
  probe
  misc_feature (1)..(25): SEQ ID NO: 2521; WAN024CIY; Start 1723; Stop 1747
gcattaggattatctggagcaagta

SEQ ID NO: 328394 - DNA, 25 bp, Artificial
  probe
  misc_feature (1)..(25): SEQ ID NO: 2521; WAN024CIY; Start 1499; Stop 1523
gtgttattctgcttggcttgttatt

SEQ ID NO: 328395 - DNA, 25 bp, Artificial
  probe
  misc_feature (1)..(25): SEQ ID NO: 2521; WAN024CIY; Start 1731; Stop 1755
attatctggagcaagtatagcatca

SEQ ID NO: 328396 - DNA, 25 bp, Artificial
  probe
  misc_feature (1)..(25): SEQ ID NO: 2521; WAN024CIY; Start 1717; Stop 1741
ttgatggcattaggattatctggag

SEQ ID NO: 328397 - DNA, 25 bp, Artificial
  probe
  misc_feature (1)..(25): SEQ ID NO: 2521; WAN024CIY; Start 1714; Stop 1738
cgattgatggcattaggattatctg

SEQ ID NO: 328398 - DNA, 25 bp, Artificial
  probe
  misc_feature (1)..(25): SEQ ID NO: 2521; WAN024CIY; Start 1727; Stop 1751
taggattatctggagcaagtatagc

SEQ ID NO: 328399 - DNA, 25 bp, Artificial
  probe
  misc_feature (1)..(25): SEQ ID NO: 2521; WAN024CIY; Start 1716; Stop 1740
attgatggcattaggattatctgga

SEQ ID NO: 328400 - DNA, 25 bp, Artificial
  probe
  misc_feature (1)..(25): SEQ ID NO: 2521; WAN024CIY; Start 1728; Stop 1752
aggattatctggagcaagtatagca

SEQ ID NO: 328401 - DNA, 25 bp, Artificial
  probe
  misc_feature (1)..(25): SEQ ID NO: 2521; WAN024CIY; Start 1715; Stop 1739
gattgatggcattaggattatctgg

SEQ ID NO: 328402 - DNA, 25 bp, Artificial
  probe
  misc_feature (1)..(25): SEQ ID NO: 2521; WAN024CIY; Start 1730; Stop 1754
gattatctggagcaagtatagcatc

SEQ ID NO: 328403 - DNA, 25 bp, Artificial
  probe
  misc_feature (1)..(25): SEQ ID NO: 2521; WAN024CIY; Start 1498; Stop 1522
tgtgttattctgcttggcttgttat

SEQ ID NO: 328404 - DNA, 25 bp, Artificial
  probe
  misc_feature (1)..(25): SEQ ID NO: 2521; WAN024CIY; Start 620; Stop 644
ctaatgatagagagtacggtgttgt

SEQ ID NO: 328405 - DNA, 25 bp, Artificial
  probe
  misc_feature (1)..(25): SEQ ID NO: 2521; WAN024CIY; Start 622; Stop 646
aatgatagagagtacggtgttgttg

SEQ ID NO: 328406 - DNA, 25 bp, Artificial
  probe
  misc_feature (1)..(25): SEQ ID NO: 2521; WAN024CIY; Start 621; Stop 645
taatgatagagagtacggtgttgtt

SEQ ID NO: 328407 - DNA, 25 bp, Artificial
  probe
  misc_feature (1)..(25): SEQ ID NO: 2521; WAN024CIY; Start 1121; Stop 1145
atcctacacctgtattagcaccatt

SEQ ID NO: 328408 - DNA, 25 bp, Artificial
  probe
  misc_feature (1)..(25): SEQ ID NO: 2521; WAN024CIY; Start 70; Stop 94
actattcaagaactagagtcagtgc

SEQ ID NO: 328409 - DNA, 25 bp, Artificial
  probe
  misc_feature (1)..(25): SEQ ID NO: 2521; WAN024CIY; Start 1720; Stop 1744
atggcattaggattatctggagcaa

SEQ ID NO: 328410 - DNA, 25 bp, Artificial
  probe
  misc_feature (1)..(25): SEQ ID NO: 2521; WAN024CIY; Start 1859; Stop 1883
tactatcaggatatgttcatggagc

SEQ ID NO: 328411 - DNA, 25 bp, Artificial
  probe
  misc_feature (1)..(25): SEQ ID NO: 2521; WAN024CIY; Start 1497; Stop 1521
gtgtgttattctgcttggcttgtta

SEQ ID NO: 328412 - DNA, 25 bp, Artificial
  probe
  misc_feature (1)..(25): SEQ ID NO: 2521; WAN024CIY; Start 1724; Stop 1748
cattaggattatctggagcaagtat

SEQ ID NO: 328413 - DNA, 25 bp, Artificial
  probe
  misc_feature (1)..(25): SEQ ID NO: 2521; WAN024CIY; Start 1732; Stop 1756
ttatctggagcaagtatagcatcag

SEQ ID NO: 328414 - DNA, 25 bp, Artificial
  probe
  misc_feature (1)..(25): SEQ ID NO: 2521; WAN024CIY; Start 1856; Stop 1880
cgttactatcaggatatgttcatgg

SEQ ID NO: 328415 - DNA, 25 bp, Artificial
  probe
  misc_feature (1)..(25): SEQ ID NO: 2521; WAN024CIY; Start 623; Stop 647
atgatagagagtacggtgttgttgt

SEQ ID NO: 328416 - DNA, 25 bp, Artificial
  probe
  misc_feature (1)..(25): SEQ ID NO: 2521; WAN024CIY; Start 1120; Stop 1144
gatcctacacctgtattagcaccat

SEQ ID NO: 328417 - DNA, 25 bp, Artificial
  probe
  misc_feature (1)..(25): SEQ ID NO: 2521; WAN024CIY; Start 1118; Stop 1142
aagatcctacacctgtattagcacc

SEQ ID NO: 328418 - DNA, 25 bp, Artificial
  probe
  misc_feature (1)..(25): SEQ ID NO: 2521; WAN024CIY; Start 1719; Stop 1743
gatggcattaggattatctggagca

SEQ ID NO: 328419 - DNA, 25 bp, Artificial
  probe
  misc_feature (1)..(25): SEQ ID NO: 2521; WAN024CIY; Start 1718; Stop 1742
tgatggcattaggattatctggagc

SEQ ID NO: 328420 - DNA, 25 bp, Artificial
  probe
  misc_feature (1)..(25): SEQ ID NO: 2521; WAN024CIY; Start 624; Stop 648
tgatagagagtacggtgttgttgtt

SEQ ID NO: 328421 - DNA, 25 bp, Artificial
  probe
  misc_feature (1)..(25): SEQ ID NO: 2521; WAN024CIY; Start 1722; Stop 1746
ggcattaggattatctggagcaagt

SEQ ID NO: 328422 - DNA, 25 bp, Artificial
  probe
  misc_feature (1)..(25): SEQ ID NO: 2521; WAN024CIY; Start 1721; Stop 1745
tggcattaggattatctggagcaag

SEQ ID NO: 328423 - DNA, 25 bp, Artificial
  probe
  misc_feature (1)..(25): SEQ ID NO: 2521; WAN024CIY; Start 1711; Stop 1735
actcgattgatggcattaggattat

SEQ ID NO: 328424 - DNA, 25 bp, Artificial
  probe
  misc_feature (1)..(25): SEQ ID NO: 2521; WAN024CIY; Start 1713; Stop 1737
tcgattgatggcattaggattatct

SEQ ID NO: 328425 - DNA, 25 bp, Artificial
  probe
  misc_feature (1)..(25): SEQ ID NO: 2522; WAN024DIV; Start 147; Stop 171
tccttggagccatatcaatcagatt

SEQ ID NO: 328426 - DNA, 25 bp, Artificial
  probe
  misc_feature (1)..(25): SEQ ID NO: 2522; WAN024DIV; Start 146; Stop 170
ttccttggagccatatcaatcagat

SEQ ID NO: 328427 - DNA, 25 bp, Artificial
  probe
  misc_feature (1)..(25): SEQ ID NO: 2522; WAN024DIV; Start 145; Stop 169
attccttggagccatatcaatcaga

SEQ ID NO: 328428 - DNA, 25 bp, Artificial
  probe
  misc_feature (1)..(25): SEQ ID NO: 2522; WAN024DIV; Start 144; Stop 168
gattccttggagccatatcaatcag

SEQ ID NO: 328429 - DNA, 25 bp, Artificial
  probe
  misc_feature (1)..(25): SEQ ID NO: 2522; WAN024DIV; Start 142; Stop 166
cagattccttggagccatatcaatc

SEQ ID NO: 328430 - DNA, 25 bp, Artificial
  probe
  misc_feature (1)..(25): SEQ ID NO: 2522; WAN024DIV; Start 143; Stop 167
agattccttggagccatatcaatca

SEQ ID NO: 328431 - DNA, 25 bp, Artificial
  probe
  misc_feature (1)..(25): SEQ ID NO: 2522; WAN024DIV; Start 141; Stop 165
ccagattccttggagccatatcaat

SEQ ID NO: 328432 - DNA, 25 bp, Artificial
  probe
  misc_feature (1)..(25): SEQ ID NO: 2522; WAN024DIV; Start 129; Stop 153
cgaacaatttatccagattccttgg

SEQ ID NO: 328433 - DNA, 25 bp, Artificial
  probe
  misc_feature (1)..(25): SEQ ID NO: 2522; WAN024DIV; Start 127; Stop 151
gtcgaacaatttatccagattcctt

SEQ ID NO: 328434 - DNA, 25 bp, Artificial
  probe
  misc_feature (1)..(25): SEQ ID NO: 2522; WAN024DIV; Start 157; Stop 181
catatcaatcagattggagccaatg

SEQ ID NO: 328435 - DNA, 25 bp, Artificial
  probe
  misc_feature (1)..(25): SEQ ID NO: 2522; WAN024DIV; Start 158; Stop 182
atatcaatcagattggagccaatgt

SEQ ID NO: 328436 - DNA, 25 bp, Artificial
  probe
  misc_feature (1)..(25): SEQ ID NO: 2522; WAN024DIV; Start 128; Stop 152
tcgaacaatttatccagattccttg

SEQ ID NO: 328437 - DNA, 25 bp, Artificial
  probe
  misc_feature (1)..(25): SEQ ID NO: 2522; WAN024DIV; Start 149; Stop 173
cttggagccatatcaatcagattgg

SEQ ID NO: 328438 - DNA, 25 bp, Artificial
  probe
  misc_feature (1)..(25): SEQ ID NO: 2522; WAN024DIV; Start 148; Stop 172
ccttggagccatatcaatcagattg

SEQ ID NO: 328439 - DNA, 25 bp, Artificial
  probe
  misc_feature (1)..(25): SEQ ID NO: 2522; WAN024DIV; Start 159; Stop 183
tatcaatcagattggagccaatgtc

SEQ ID NO: 328440 - DNA, 25 bp, Artificial
  probe
  misc_feature (1)..(25): SEQ ID NO: 2522; WAN024DIV; Start 156; Stop 180
ccatatcaatcagattggagccaat

SEQ ID NO: 328441 - DNA, 25 bp, Artificial
  probe
  misc_feature (1)..(25): SEQ ID NO: 2522; WAN024DIV; Start 39; Stop 63
gacaggcacttcctacctctctatc

SEQ ID NO: 328442 - DNA, 25 bp, Artificial
  probe
  misc_feature (1)..(25): SEQ ID NO: 2522; WAN024DIV; Start 126; Stop 150
tgtcgaacaatttatccagattcct

SEQ ID NO: 328443 - DNA, 25 bp, Artificial
  probe
  misc_feature (1)..(25): SEQ ID NO: 2522; WAN024DIV; Start 120; Stop 144
tgtcaatgtcgaacaatttatccag

SEQ ID NO: 328444 - DNA, 25 bp, Artificial
  probe
  misc_feature (1)..(25): SEQ ID NO: 2522; WAN024DIV; Start 115; Stop 139
ccagatgtcaatgtcgaacaattta

SEQ ID NO: 328445 - DNA, 25 bp, Artificial
  probe
  misc_feature (1)..(25): SEQ ID NO: 2522; WAN024DIV; Start 121; Stop 145
gtcaatgtcgaacaatttatccaga

SEQ ID NO: 328446 - DNA, 25 bp, Artificial
  probe
  misc_feature (1)..(25): SEQ ID NO: 2522; WAN024DIV; Start 150; Stop 174
ttggagccatatcaatcagattgga

SEQ ID NO: 328447 - DNA, 25 bp, Artificial
  probe
  misc_feature (1)..(25): SEQ ID NO: 2522; WAN024DIV; Start 125; Stop 149
atgtcgaacaatttatccagattcc

SEQ ID NO: 328448 - DNA, 25 bp, Artificial
  probe
  misc_feature (1)..(25): SEQ ID NO: 2522; WAN024DIV; Start 119; Stop 143
atgtcaatgtcgaacaatttatcca

SEQ ID NO: 328449 - DNA, 25 bp, Artificial
  probe
  misc_feature (1)..(25): SEQ ID NO: 2522; WAN024DIV; Start 118; Stop 142
gatgtcaatgtcgaacaatttatcc

SEQ ID NO: 328450 - DNA, 25 bp, Artificial
  probe
  misc_feature (1)..(25): SEQ ID NO: 2522; WAN024DIV; Start 122; Stop 146
tcaatgtcgaacaatttatccagat

SEQ ID NO: 328451 - DNA, 25 bp, Artificial
  probe
  misc_feature (1)..(25): SEQ ID NO: 2522; WAN024DIV; Start 151; Stop 175
tggagccatatcaatcagattggag

SEQ ID NO: 328452 - DNA, 25 bp, Artificial
  probe
  misc_feature (1)..(25): SEQ ID NO: 2522; WAN024DIV; Start 51; Stop 75
ctacctctctatcgctgggaaagtt

SEQ ID NO: 328453 - DNA, 25 bp, Artificial
  probe
  misc_feature (1)..(25): SEQ ID NO: 2522; WAN024DIV; Start 105; Stop 129
ggaattttacccagatgtcaatgtc

SEQ ID NO: 328454 - DNA, 25 bp, Artificial
  probe
  misc_feature (1)..(25): SEQ ID NO: 2522; WAN024DIV; Start 59; Stop 83
ctatcgctgggaaagttgggaaatt

SEQ ID NO: 328455 - DNA, 25 bp, Artificial
  probe
  misc_feature (1)..(25): SEQ ID NO: 2522; WAN024DIV; Start 116; Stop 140
cagatgtcaatgtcgaacaatttat

SEQ ID NO: 328456 - DNA, 25 bp, Artificial
  probe
  misc_feature (1)..(25): SEQ ID NO: 2522; WAN024DIV; Start 106; Stop 130
gaattttacccagatgtcaatgtcg

SEQ ID NO: 328457 - DNA, 25 bp, Artificial
  probe
  misc_feature (1)..(25): SEQ ID NO: 2522; WAN024DIV; Start 314; Stop 338
ttccgaccctgattcagacaattag

SEQ ID NO: 328458 - DNA, 25 bp, Artificial
  probe
  misc_feature (1)..(25): SEQ ID NO: 2523; WAN024DRI; Start 48; Stop 72
ttatcacgagaaacactctaaaggt

SEQ ID NO: 328459 - DNA, 25 bp, Artificial
  probe
  misc_feature (1)..(25): SEQ ID NO: 2523; WAN024DRI; Start 47; Stop 71
gttatcacgagaaacactctaaagg

SEQ ID NO: 328460 - DNA, 25 bp, Artificial
  probe
  misc_feature (1)..(25): SEQ ID NO: 2523; WAN024DRI; Start 49; Stop 73
tatcacgagaaacactctaaaggtg

SEQ ID NO: 328461 - DNA, 25 bp, Artificial
  probe
  misc_feature (1)..(25): SEQ ID NO: 2523; WAN024DRI; Start 93; Stop 117
cttgcttagcttcagagaacaattt

SEQ ID NO: 328462 - DNA, 25 bp, Artificial
  probe
  misc_feature (1)..(25): SEQ ID NO: 2523; WAN024DRI; Start 66; Stop 90
taaaggtggagctggtaagaaagaa

SEQ ID NO: 328463 - DNA, 25 bp, Artificial
  probe
  misc_feature (1)..(25): SEQ ID NO: 2523; WAN024DRI; Start 77; Stop 101
ctggtaagaaagaacgcttgcttag

SEQ ID NO: 328464 - DNA, 25 bp, Artificial
  probe
  misc_feature (1)..(25): SEQ ID NO: 2523; WAN024DRI; Start 65; Stop 89
ctaaaggtggagctggtaagaaaga

SEQ ID NO: 328465 - DNA, 25 bp, Artificial
  probe
  misc_feature (1)..(25): SEQ ID NO: 2523; WAN024DRI; Start 92; Stop 116
gcttgcttagcttcagagaacaatt

SEQ ID NO: 328466 - DNA, 25 bp, Artificial
  probe
  misc_feature (1)..(25): SEQ ID NO: 2523; WAN024DRI; Start 64; Stop 88
tctaaaggtggagctggtaagaaag

SEQ ID NO: 328467 - DNA, 25 bp, Artificial
  probe
  misc_feature (1)..(25): SEQ ID NO: 2523; WAN024DRI; Start 50; Stop 74
atcacgagaaacactctaaaggtgg

SEQ ID NO: 328468 - DNA, 25 bp, Artificial
  probe
  misc_feature (1)..(25): SEQ ID NO: 2523; WAN024DRI; Start 63; Stop 87
ctctaaaggtggagctggtaagaaa

SEQ ID NO: 328469 - DNA, 25 bp, Artificial
  probe
  misc_feature (1)..(25): SEQ ID NO: 2523; WAN024DRI; Start 46; Stop 70
cgttatcacgagaaacactctaaag

SEQ ID NO: 328470 - DNA, 25 bp, Artificial
  probe
  misc_feature (1)..(25): SEQ ID NO: 2523; WAN024DRI; Start 45; Stop 69
ccgttatcacgagaaacactctaaa

SEQ ID NO: 328471 - DNA, 25 bp, Artificial
  probe
  misc_feature (1)..(25): SEQ ID NO: 2523; WAN024DRI; Start 52; Stop 76
cacgagaaacactctaaaggtggag

SEQ ID NO: 328472 - DNA, 25 bp, Artificial
  probe
  misc_feature (1)..(25): SEQ ID NO: 2523; WAN024DRI; Start 67; Stop 91
aaaggtggagctggtaagaaagaac

SEQ ID NO: 328473 - DNA, 25 bp, Artificial
  probe
  misc_feature (1)..(25): SEQ ID NO: 2523; WAN024DRI; Start 7; Stop 31
aaatatcaactagacgataaggggc

SEQ ID NO: 328474 - DNA, 25 bp, Artificial
  probe
  misc_feature (1)..(25): SEQ ID NO: 2523; WAN024DRI; Start 62; Stop 86
actctaaaggtggagctggtaagaa

SEQ ID NO: 328475 - DNA, 25 bp, Artificial
  probe
  misc_feature (1)..(25): SEQ ID NO: 2523; WAN024DRI; Start 51; Stop 75
tcacgagaaacactctaaaggtgga

SEQ ID NO: 328476 - DNA, 25 bp, Artificial
  probe
  misc_feature (1)..(25): SEQ ID NO: 2523; WAN024DRI; Start 81; Stop 105
taagaaagaacgcttgcttagcttc

SEQ ID NO: 328477 - DNA, 25 bp, Artificial
  probe
  misc_feature (1)..(25): SEQ ID NO: 2523; WAN024DRI; Start 44; Stop 68
cccgttatcacgagaaacactctaa

SEQ ID NO: 328478 - DNA, 25 bp, Artificial
  probe
  misc_feature (1)..(25): SEQ ID NO: 2523; WAN024DRI; Start 94; Stop 118
ttgcttagcttcagagaacaatttt

SEQ ID NO: 328479 - DNA, 25 bp, Artificial
  probe
  misc_feature (1)..(25): SEQ ID NO: 2523; WAN024DRI; Start 80; Stop 104
gtaagaaagaacgcttgcttagctt

SEQ ID NO: 328480 - DNA, 25 bp, Artificial
  probe
  misc_feature (1)..(25): SEQ ID NO: 2523; WAN024DRI; Start 6; Stop 30
aaaatatcaactagacgataagggg

SEQ ID NO: 328481 - DNA, 25 bp, Artificial
  probe
  misc_feature (1)..(25): SEQ ID NO: 2523; WAN024DRI; Start 76; Stop 100
gctggtaagaaagaacgcttgctta

SEQ ID NO: 328482 - DNA, 25 bp, Artificial
  probe
  misc_feature (1)..(25): SEQ ID NO: 2523; WAN024DRI; Start 55; Stop 79
gagaaacactctaaaggtggagctg

SEQ ID NO: 328483 - DNA, 25 bp, Artificial
  probe
  misc_feature (1)..(25): SEQ ID NO: 2523; WAN024DRI; Start 8; Stop 32
aatatcaactagacgataaggggcg

SEQ ID NO: 328484 - DNA, 25 bp, Artificial
  probe
  misc_feature (1)..(25): SEQ ID NO: 2523; WAN024DRI; Start 91; Stop 115
cgcttgcttagcttcagagaacaat

SEQ ID NO: 328485 - DNA, 25 bp, Artificial
  probe
  misc_feature (1)..(25): SEQ ID NO: 2523; WAN024DRI; Start 59; Stop 83
aacactctaaaggtggagctggtaa

SEQ ID NO: 328486 - DNA, 25 bp, Artificial
  probe
  misc_feature (1)..(25): SEQ ID NO: 2523; WAN024DRI; Start 58; Stop 82
aaacactctaaaggtggagctggta

SEQ ID NO: 328487 - DNA, 25 bp, Artificial
  probe
  misc_feature (1)..(25): SEQ ID NO: 2523; WAN024DRI; Start 2; Stop 26
tgggaaaatatcaactagacgataa

SEQ ID NO: 328488 - DNA, 25 bp, Artificial
  probe
  misc_feature (1)..(25): SEQ ID NO: 2523; WAN024DRI; Start 61; Stop 85
cactctaaaggtggagctggtaaga

SEQ ID NO: 328489 - DNA, 25 bp, Artificial
  probe
  misc_feature (1)..(25): SEQ ID NO: 2523; WAN024DRI; Start 1; Stop 25
atgggaaaatatcaactagacgata

SEQ ID NO: 328490 - DNA, 25 bp, Artificial
  probe
  misc_feature (1)..(25): SEQ ID NO: 2523; WAN024DRI; Start 43; Stop 67
acccgttatcacgagaaacactcta

SEQ ID NO: 328491 - DNA, 25 bp, Artificial
  probe
  misc_feature (1)..(25): SEQ ID NO: 2524; WAN024D7V; Start 176; Stop 200
gttatacctatgccagtgaagactt

SEQ ID NO: 328492 - DNA, 25 bp, Artificial
  probe
  misc_feature (1)..(25): SEQ ID NO: 2524; WAN024D7V; Start 179; Stop 203
atacctatgccagtgaagacttaat

SEQ ID NO: 328493 - DNA, 25 bp, Artificial
  probe
  misc_feature (1)..(25): SEQ ID NO: 2524; WAN024D7V; Start 180; Stop 204
tacctatgccagtgaagacttaatt

SEQ ID NO: 328494 - DNA, 25 bp, Artificial
  probe
  misc_feature (1)..(25): SEQ ID NO: 2524; WAN024D7V; Start 178; Stop 202
tatacctatgccagtgaagacttaa

SEQ ID NO: 328495 - DNA, 25 bp, Artificial
  probe
  misc_feature (1)..(25): SEQ ID NO: 2524; WAN024D7V; Start 177; Stop 201
ttatacctatgccagtgaagactta

SEQ ID NO: 328496 - DNA, 25 bp, Artificial
  probe
  misc_feature (1)..(25): SEQ ID NO: 2524; WAN024D7V; Start 371; Stop 395
gcagtgtcaagttgaataatcgtag

SEQ ID NO: 328497 - DNA, 25 bp, Artificial
  probe
  misc_feature (1)..(25): SEQ ID NO: 2524; WAN024D7V; Start 644; Stop 668
tcaataccatcaatcctgccttcaa

SEQ ID NO: 328498 - DNA, 25 bp, Artificial
  probe
  misc_feature (1)..(25): SEQ ID NO: 2524; WAN024D7V; Start 643; Stop 667
ttcaataccatcaatcctgccttca

SEQ ID NO: 328499 - DNA, 25 bp, Artificial
  probe
  misc_feature (1)..(25): SEQ ID NO: 2524; WAN024D7V; Start 372; Stop 396
cagtgtcaagttgaataatcgtaga

SEQ ID NO: 328500 - DNA, 25 bp, Artificial
  probe
  misc_feature (1)..(25): SEQ ID NO: 2524; WAN024D7V; Start 181; Stop 205
acctatgccagtgaagacttaatta

SEQ ID NO: 328501 - DNA, 25 bp, Artificial
  probe
  misc_feature (1)..(25): SEQ ID NO: 2524; WAN024D7V; Start 172; Stop 196
tatggttatacctatgccagtgaag

SEQ ID NO: 328502 - DNA, 25 bp, Artificial
  probe
  misc_feature (1)..(25): SEQ ID NO: 2524; WAN024D7V; Start 224; Stop 248
aagctacacaatacggttacaactt

SEQ ID NO: 328503 - DNA, 25 bp, Artificial
  probe
  misc_feature (1)..(25): SEQ ID NO: 2524; WAN024D7V; Start 223; Stop 247
gaagctacacaatacggttacaact

SEQ ID NO: 328504 - DNA, 25 bp, Artificial
  probe
  misc_feature (1)..(25): SEQ ID NO: 2524; WAN024D7V; Start 370; Stop 394
cgcagtgtcaagttgaataatcgta

SEQ ID NO: 328505 - DNA, 25 bp, Artificial
  probe
  misc_feature (1)..(25): SEQ ID NO: 2524; WAN024D7V; Start 171; Stop 195
ttatggttatacctatgccagtgaa

SEQ ID NO: 328506 - DNA, 25 bp, Artificial
  probe
  misc_feature (1)..(25): SEQ ID NO: 2524; WAN024D7V; Start 634; Stop 658
caccagtctttcaataccatcaatc

SEQ ID NO: 328507 - DNA, 25 bp, Artificial
  probe
  misc_feature (1)..(25): SEQ ID NO: 2524; WAN024D7V; Start 173; Stop 197
atggttatacctatgccagtgaaga

SEQ ID NO: 328508 - DNA, 25 bp, Artificial
  probe
  misc_feature (1)..(25): SEQ ID NO: 2524; WAN024D7V; Start 957; Stop 981
tacctacttgatttggcttgacttt

SEQ ID NO: 328509 - DNA, 25 bp, Artificial
  probe
  misc_feature (1)..(25): SEQ ID NO: 2524; WAN024D7V; Start 630; Stop 654
caaacaccagtctttcaataccatc

SEQ ID NO: 328510 - DNA, 25 bp, Artificial
  probe
  misc_feature (1)..(25): SEQ ID NO: 2524; WAN024D7V; Start 373; Stop 397
agtgtcaagttgaataatcgtagat

SEQ ID NO: 328511 - DNA, 25 bp, Artificial
  probe
  misc_feature (1)..(25): SEQ ID NO: 2524; WAN024D7V; Start 633; Stop 657
acaccagtctttcaataccatcaat

SEQ ID NO: 328512 - DNA, 25 bp, Artificial
  probe
  misc_feature (1)..(25): SEQ ID NO: 2524; WAN024D7V; Start 62; Stop 86
aagaaacagaaacggatagtgaagt

SEQ ID NO: 328513 - DNA, 25 bp, Artificial
  probe
  misc_feature (1)..(25): SEQ ID NO: 2524; WAN024D7V; Start 57; Stop 81
atggaaagaaacagaaacggatagt

SEQ ID NO: 328514 - DNA, 25 bp, Artificial
  probe
  misc_feature (1)..(25): SEQ ID NO: 2524; WAN024D7V; Start 56; Stop 80
aatggaaagaaacagaaacggatag

SEQ ID NO: 328515 - DNA, 25 bp, Artificial
  probe
  misc_feature (1)..(25): SEQ ID NO: 2524; WAN024D7V; Start 636; Stop 660
ccagtctttcaataccatcaatcct

SEQ ID NO: 328516 - DNA, 25 bp, Artificial
  probe
  misc_feature (1)..(25): SEQ ID NO: 2524; WAN024D7V; Start 61; Stop 85
aaagaaacagaaacggatagtgaag

SEQ ID NO: 328517 - DNA, 25 bp, Artificial
  probe
  misc_feature (1)..(25): SEQ ID NO: 2524; WAN024D7V; Start 60; Stop 84
gaaagaaacagaaacggatagtgaa

SEQ ID NO: 328518 - DNA, 25 bp, Artificial
  probe
  misc_feature (1)..(25): SEQ ID NO: 2524; WAN024D7V; Start 632; Stop 656
aacaccagtctttcaataccatcaa

SEQ ID NO: 328519 - DNA, 25 bp, Artificial
  probe
  misc_feature (1)..(25): SEQ ID NO: 2524; WAN024D7V; Start 631; Stop 655
aaacaccagtctttcaataccatca

SEQ ID NO: 328520 - DNA, 25 bp, Artificial
  probe
  misc_feature (1)..(25): SEQ ID NO: 2524; WAN024D7V; Start 626; Stop 650
gtcacaaacaccagtctttcaatac

SEQ ID NO: 328521 - DNA, 25 bp, Artificial
  probe
  misc_feature (1)..(25): SEQ ID NO: 2524; WAN024D7V; Start 635; Stop 659
accagtctttcaataccatcaatcc

SEQ ID NO: 328522 - DNA, 25 bp, Artificial
  probe
  misc_feature (1)..(25): SEQ ID NO: 2524; WAN024D7V; Start 55; Stop 79
aaatggaaagaaacagaaacggata

SEQ ID NO: 328523 - DNA, 25 bp, Artificial
  probe
  misc_feature (1)..(25): SEQ ID NO: 2524; WAN024D7V; Start 54; Stop 78
taaatggaaagaaacagaaacggat

SEQ ID NO: 328524 - DNA, 25 bp, Artificial
  probe
  misc_feature (1)..(25): SEQ ID NO: 2525; WAN024FN9; Start 81; Stop 105
tattcaacttagtggtgatggactg

SEQ ID NO: 328525 - DNA, 25 bp, Artificial
  probe
  misc_feature (1)..(25): SEQ ID NO: 2525; WAN024FN9; Start 80; Stop 104
atattcaacttagtggtgatggact

SEQ ID NO: 328526 - DNA, 25 bp, Artificial
  probe
  misc_feature (1)..(25): SEQ ID NO: 2525; WAN024FN9; Start 447; Stop 471
tatagtagatactccaccaatcggc

SEQ ID NO: 328527 - DNA, 25 bp, Artificial
  probe
  misc_feature (1)..(25): SEQ ID NO: 2525; WAN024FN9; Start 446; Stop 470
ttatagtagatactccaccaatcgg

SEQ ID NO: 328528 - DNA, 25 bp, Artificial
  probe
  misc_feature (1)..(25): SEQ ID NO: 2525; WAN024FN9; Start 341; Stop 365
tctatatattacaagcaggagtcgt

SEQ ID NO: 328529 - DNA, 25 bp, Artificial
  probe
  misc_feature (1)..(25): SEQ ID NO: 2525; WAN024FN9; Start 65; Stop 89
atgccttacagaccaatattcaact

SEQ ID NO: 328530 - DNA, 25 bp, Artificial
  probe
  misc_feature (1)..(25): SEQ ID NO: 2525; WAN024FN9; Start 82; Stop 106
attcaacttagtggtgatggactga

SEQ ID NO: 328531 - DNA, 25 bp, Artificial
  probe
  misc_feature (1)..(25): SEQ ID NO: 2525; WAN024FN9; Start 66; Stop 90
tgccttacagaccaatattcaactt

SEQ ID NO: 328532 - DNA, 25 bp, Artificial
  probe
  misc_feature (1)..(25): SEQ ID NO: 2525; WAN024FN9; Start 64; Stop 88
aatgccttacagaccaatattcaac

SEQ ID NO: 328533 - DNA, 25 bp, Artificial
  probe
  misc_feature (1)..(25): SEQ ID NO: 2525; WAN024FN9; Start 67; Stop 91
gccttacagaccaatattcaactta

SEQ ID NO: 328534 - DNA, 25 bp, Artificial
  probe
  misc_feature (1)..(25): SEQ ID NO: 2525; WAN024FN9; Start 342; Stop 366
ctatatattacaagcaggagtcgtt

SEQ ID NO: 328535 - DNA, 25 bp, Artificial
  probe
  misc_feature (1)..(25): SEQ ID NO: 2525; WAN024FN9; Start 224; Stop 248
gtaattcagtgatgtcaggaatgtt

SEQ ID NO: 328536 - DNA, 25 bp, Artificial
  probe
  misc_feature (1)..(25): SEQ ID NO: 2525; WAN024FN9; Start 79; Stop 103
aatattcaacttagtggtgatggac

SEQ ID NO: 328537 - DNA, 25 bp, Artificial
  probe
  misc_feature (1)..(25): SEQ ID NO: 2525; WAN024FN9; Start 78; Stop 102
caatattcaacttagtggtgatgga

SEQ ID NO: 328538 - DNA, 25 bp, Artificial
  probe
  misc_feature (1)..(25): SEQ ID NO: 2525; WAN024FN9; Start 63; Stop 87
taatgccttacagaccaatattcaa

SEQ ID NO: 328539 - DNA, 25 bp, Artificial
  probe
  misc_feature (1)..(25): SEQ ID NO: 2525; WAN024FN9; Start 62; Stop 86
ttaatgccttacagaccaatattca

SEQ ID NO: 328540 - DNA, 25 bp, Artificial
  probe
  misc_feature (1)..(25): SEQ ID NO: 2525; WAN024FN9; Start 345; Stop 369
tatattacaagcaggagtcgtttca

SEQ ID NO: 328541 - DNA, 25 bp, Artificial
  probe
  misc_feature (1)..(25): SEQ ID NO: 2525; WAN024FN9; Start 223; Stop 247
cgtaattcagtgatgtcaggaatgt

SEQ ID NO: 328542 - DNA, 25 bp, Artificial
  probe
  misc_feature (1)..(25): SEQ ID NO: 2525; WAN024FN9; Start 340; Stop 364
ctctatatattacaagcaggagtcg

SEQ ID NO: 328543 - DNA, 25 bp, Artificial
  probe
  misc_feature (1)..(25): SEQ ID NO: 2525; WAN024FN9; Start 255; Stop 279
tagggaaagaataacaggtttgact

SEQ ID NO: 328544 - DNA, 25 bp, Artificial
  probe
  misc_feature (1)..(25): SEQ ID NO: 2525; WAN024FN9; Start 470; Stop 494
gccaagtaatagatgctgcaattat

SEQ ID NO: 328545 - DNA, 25 bp, Artificial
  probe
  misc_feature (1)..(25): SEQ ID NO: 2525; WAN024FN9; Start 364; Stop 388
gtttcaccgaatcccttatctctat

SEQ ID NO: 328546 - DNA, 25 bp, Artificial
  probe
  misc_feature (1)..(25): SEQ ID NO: 2525; WAN024FN9; Start 365; Stop 389
tttcaccgaatcccttatctctatt

SEQ ID NO: 328547 - DNA, 25 bp, Artificial
  probe
  misc_feature (1)..(25): SEQ ID NO: 2525; WAN024FN9; Start 346; Stop 370
atattacaagcaggagtcgtttcac

SEQ ID NO: 328548 - DNA, 25 bp, Artificial
  probe
  misc_feature (1)..(25): SEQ ID NO: 2525; WAN024FN9; Start 254; Stop 278
ctagggaaagaataacaggtttgac

SEQ ID NO: 328549 - DNA, 25 bp, Artificial
  probe
  misc_feature (1)..(25): SEQ ID NO: 2525; WAN024FN9; Start 367; Stop 391
tcaccgaatcccttatctctattaa

SEQ ID NO: 328550 - DNA, 25 bp, Artificial
  probe
  misc_feature (1)..(25): SEQ ID NO: 2525; WAN024FN9; Start 146; Stop 170
aatcgactatatcagttggcttgtc

SEQ ID NO: 328551 - DNA, 25 bp, Artificial
  probe
  misc_feature (1)..(25): SEQ ID NO: 2525; WAN024FN9; Start 152; Stop 176
ctatatcagttggcttgtccatgtc

SEQ ID NO: 328552 - DNA, 25 bp, Artificial
  probe
  misc_feature (1)..(25): SEQ ID NO: 2525; WAN024FN9; Start 150; Stop 174
gactatatcagttggcttgtccatg

SEQ ID NO: 328553 - DNA, 25 bp, Artificial
  probe
  misc_feature (1)..(25): SEQ ID NO: 2525; WAN024FN9; Start 77; Stop 101
ccaatattcaacttagtggtgatgg

SEQ ID NO: 328554 - DNA, 25 bp, Artificial
  probe
  misc_feature (1)..(25): SEQ ID NO: 2525; WAN024FN9; Start 445; Stop 469
attatagtagatactccaccaatcg

SEQ ID NO: 328555 - DNA, 25 bp, Artificial
  probe
  misc_feature (1)..(25): SEQ ID NO: 2525; WAN024FN9; Start 228; Stop 252
ttcagtgatgtcaggaatgtttcat

SEQ ID NO: 328556 - DNA, 25 bp, Artificial
  probe
  misc_feature (1)..(25): SEQ ID NO: 2525; WAN024FN9; Start 366; Stop 390
ttcaccgaatcccttatctctatta

SEQ ID NO: 328557 - DNA, 25 bp, Artificial
  probe
  misc_feature (1)..(25): SEQ ID NO: 2526; WAN024FTR; Start 17; Stop 41
taacaatagcagtgccatcatacaa

SEQ ID NO: 328558 - DNA, 25 bp, Artificial
  probe
  misc_feature (1)..(25): SEQ ID NO: 2526; WAN024FTR; Start 16; Stop 40
ttaacaatagcagtgccatcataca

SEQ ID NO: 328559 - DNA, 25 bp, Artificial
  probe
  misc_feature (1)..(25): SEQ ID NO: 2526; WAN024FTR; Start 15; Stop 39
attaacaatagcagtgccatcatac

SEQ ID NO: 328560 - DNA, 25 bp, Artificial
  probe
  misc_feature (1)..(25): SEQ ID NO: 2526; WAN024FTR; Start 18; Stop 42
aacaatagcagtgccatcatacaat

SEQ ID NO: 328561 - DNA, 25 bp, Artificial
  probe
  misc_feature (1)..(25): SEQ ID NO: 2526; WAN024FTR; Start 13; Stop 37
ttattaacaatagcagtgccatcat

SEQ ID NO: 328562 - DNA, 25 bp, Artificial
  probe
  misc_feature (1)..(25): SEQ ID NO: 2526; WAN024FTR; Start 12; Stop 36
attattaacaatagcagtgccatca

SEQ ID NO: 328563 - DNA, 25 bp, Artificial
  probe
  misc_feature (1)..(25): SEQ ID NO: 2526; WAN024FTR; Start 19; Stop 43
acaatagcagtgccatcatacaatg

SEQ ID NO: 328564 - DNA, 25 bp, Artificial
  probe
  misc_feature (1)..(25): SEQ ID NO: 2526; WAN024FTR; Start 377; Stop 401
atgttaatcaagctggagatgtagt

SEQ ID NO: 328565 - DNA, 25 bp, Artificial
  probe
  misc_feature (1)..(25): SEQ ID NO: 2526; WAN024FTR; Start 378; Stop 402
tgttaatcaagctggagatgtagta

SEQ ID NO: 328566 - DNA, 25 bp, Artificial
  probe
  misc_feature (1)..(25): SEQ ID NO: 2526; WAN024FTR; Start 14; Stop 38
tattaacaatagcagtgccatcata

SEQ ID NO: 328567 - DNA, 25 bp, Artificial
  probe
  misc_feature (1)..(25): SEQ ID NO: 2526; WAN024FTR; Start 11; Stop 35
aattattaacaatagcagtgccatc

SEQ ID NO: 328568 - DNA, 25 bp, Artificial
  probe
  misc_feature (1)..(25): SEQ ID NO: 2526; WAN024FTR; Start 651; Stop 675
aggaacatctacgcaaagtattagt

SEQ ID NO: 328569 - DNA, 25 bp, Artificial
  probe
  misc_feature (1)..(25): SEQ ID NO: 2526; WAN024FTR; Start 379; Stop 403
gttaatcaagctggagatgtagtat

SEQ ID NO: 328570 - DNA, 25 bp, Artificial
  probe
  misc_feature (1)..(25): SEQ ID NO: 2526; WAN024FTR; Start 376; Stop 400
tatgttaatcaagctggagatgtag

SEQ ID NO: 328571 - DNA, 25 bp, Artificial
  probe
  misc_feature (1)..(25): SEQ ID NO: 2526; WAN024FTR; Start 165; Stop 189
cgagcgaaattaccctgatattatt

SEQ ID NO: 328572 - DNA, 25 bp, Artificial
  probe
  misc_feature (1)..(25): SEQ ID NO: 2526; WAN024FTR; Start 280; Stop 304
gcagatgattgggttgatacagaaa

SEQ ID NO: 328573 - DNA, 25 bp, Artificial
  probe
  misc_feature (1)..(25): SEQ ID NO: 2526; WAN024FTR; Start 647; Stop 671
gtttaggaacatctacgcaaagtat

SEQ ID NO: 328574 - DNA, 25 bp, Artificial
  probe
  misc_feature (1)..(25): SEQ ID NO: 2526; WAN024FTR; Start 380; Stop 404
ttaatcaagctggagatgtagtatc

SEQ ID NO: 328575 - DNA, 25 bp, Artificial
  probe
  misc_feature (1)..(25): SEQ ID NO: 2526; WAN024FTR; Start 652; Stop 676
ggaacatctacgcaaagtattagta

SEQ ID NO: 328576 - DNA, 25 bp, Artificial
  probe
  misc_feature (1)..(25): SEQ ID NO: 2526; WAN024FTR; Start 648; Stop 672
tttaggaacatctacgcaaagtatt

SEQ ID NO: 328577 - DNA, 25 bp, Artificial
  probe
  misc_feature (1)..(25): SEQ ID NO: 2526; WAN024FTR; Start 650; Stop 674
taggaacatctacgcaaagtattag

SEQ ID NO: 328578 - DNA, 25 bp, Artificial
  probe
  misc_feature (1)..(25): SEQ ID NO: 2526; WAN024FTR; Start 375; Stop 399
ttatgttaatcaagctggagatgta

SEQ ID NO: 328579 - DNA, 25 bp, Artificial
  probe
  misc_feature (1)..(25): SEQ ID NO: 2526; WAN024FTR; Start 576; Stop 600
ggaatatatcacctatgttctacca

SEQ ID NO: 328580 - DNA, 25 bp, Artificial
  probe
  misc_feature (1)..(25): SEQ ID NO: 2526; WAN024FTR; Start 575; Stop 599
tggaatatatcacctatgttctacc

SEQ ID NO: 328581 - DNA, 25 bp, Artificial
  probe
  misc_feature (1)..(25): SEQ ID NO: 2526; WAN024FTR; Start 483; Stop 507
tagaaccgtaggaatgcacactatg

SEQ ID NO: 328582 - DNA, 25 bp, Artificial
  probe
  misc_feature (1)..(25): SEQ ID NO: 2526; WAN024FTR; Start 482; Stop 506
gtagaaccgtaggaatgcacactat

SEQ ID NO: 328583 - DNA, 25 bp, Artificial
  probe
  misc_feature (1)..(25): SEQ ID NO: 2526; WAN024FTR; Start 331; Stop 355
aaagaaacagatgtggatgaaattc

SEQ ID NO: 328584 - DNA, 25 bp, Artificial
  probe
  misc_feature (1)..(25): SEQ ID NO: 2526; WAN024FTR; Start 807; Stop 831
tcagcagtggaatatctatttcaat

SEQ ID NO: 328585 - DNA, 25 bp, Artificial
  probe
  misc_feature (1)..(25): SEQ ID NO: 2526; WAN024FTR; Start 806; Stop 830
atcagcagtggaatatctatttcaa

SEQ ID NO: 328586 - DNA, 25 bp, Artificial
  probe
  misc_feature (1)..(25): SEQ ID NO: 2526; WAN024FTR; Start 805; Stop 829
aatcagcagtggaatatctatttca

SEQ ID NO: 328587 - DNA, 25 bp, Artificial
  probe
  misc_feature (1)..(25): SEQ ID NO: 2526; WAN024FTR; Start 334; Stop 358
gaaacagatgtggatgaaattcttt

SEQ ID NO: 328588 - DNA, 25 bp, Artificial
  probe
  misc_feature (1)..(25): SEQ ID NO: 2526; WAN024FTR; Start 649; Stop 673
ttaggaacatctacgcaaagtatta

SEQ ID NO: 328589 - DNA, 25 bp, Artificial
  probe
  misc_feature (1)..(25): SEQ ID NO: 2526; WAN024FTR; Start 433; Stop 457
attcagacagataaagtgtaccagg

SEQ ID NO: 328590 - DNA, 25 bp, Artificial
  probe
  misc_feature (1)..(25): SEQ ID NO: 2527; WAN024CRM; Start 63; Stop 87
cttaattcaggcaggttatcaggtc

SEQ ID NO: 328591 - DNA, 25 bp, Artificial
  probe
  misc_feature (1)..(25): SEQ ID NO: 2527; WAN024CRM; Start 246; Stop 270
taagaccagtgaacaggacaagatt

SEQ ID NO: 328592 - DNA, 25 bp, Artificial
  probe
  misc_feature (1)..(25): SEQ ID NO: 2527; WAN024CRM; Start 65; Stop 89
taattcaggcaggttatcaggtctt

SEQ ID NO: 328593 - DNA, 25 bp, Artificial
  probe
  misc_feature (1)..(25): SEQ ID NO: 2527; WAN024CRM; Start 64; Stop 88
ttaattcaggcaggttatcaggtct

SEQ ID NO: 328594 - DNA, 25 bp, Artificial
  probe
  misc_feature (1)..(25): SEQ ID NO: 2527; WAN024CRM; Start 245; Stop 269
ctaagaccagtgaacaggacaagat

SEQ ID NO: 328595 - DNA, 25 bp, Artificial
  probe
  misc_feature (1)..(25): SEQ ID NO: 2527; WAN024CRM; Start 192; Stop 216
aatcagtgaggttcaatacttatca

SEQ ID NO: 328596 - DNA, 25 bp, Artificial
  probe
  misc_feature (1)..(25): SEQ ID NO: 2527; WAN024CRM; Start 668; Stop 692
ataagatagagaaaccgagaggaca

SEQ ID NO: 328597 - DNA, 25 bp, Artificial
  probe
  misc_feature (1)..(25): SEQ ID NO: 2527; WAN024CRM; Start 66; Stop 90
aattcaggcaggttatcaggtcttg

SEQ ID NO: 328598 - DNA, 25 bp, Artificial
  probe
  misc_feature (1)..(25): SEQ ID NO: 2527; WAN024CRM; Start 669; Stop 693
taagatagagaaaccgagaggacaa

SEQ ID NO: 328599 - DNA, 25 bp, Artificial
  probe
  misc_feature (1)..(25): SEQ ID NO: 2527; WAN024CRM; Start 169; Stop 193
cctcggatggatggttatgatttaa

SEQ ID NO: 328600 - DNA, 25 bp, Artificial
  probe
  misc_feature (1)..(25): SEQ ID NO: 2527; WAN024CRM; Start 27; Stop 51
cgacgaggtagaaatcacagatatt

SEQ ID NO: 328601 - DNA, 25 bp, Artificial
  probe
  misc_feature (1)..(25): SEQ ID NO: 2527; WAN024CRM; Start 561; Stop 585
ggatgacaccaataccttgaatgtg

SEQ ID NO: 328602 - DNA, 25 bp, Artificial
  probe
  misc_feature (1)..(25): SEQ ID NO: 2527; WAN024CRM; Start 662; Stop 686
tgggatataagatagagaaaccgag

SEQ ID NO: 328603 - DNA, 25 bp, Artificial
  probe
  misc_feature (1)..(25): SEQ ID NO: 2527; WAN024CRM; Start 29; Stop 53
acgaggtagaaatcacagatattca

SEQ ID NO: 328604 - DNA, 25 bp, Artificial
  probe
  misc_feature (1)..(25): SEQ ID NO: 2527; WAN024CRM; Start 670; Stop 694
aagatagagaaaccgagaggacaaa

SEQ ID NO: 328605 - DNA, 25 bp, Artificial
  probe
  misc_feature (1)..(25): SEQ ID NO: 2527; WAN024CRM; Start 462; Stop 486
tgttaaatcatttgaattgctgtgg

SEQ ID NO: 328606 - DNA, 25 bp, Artificial
  probe
  misc_feature (1)..(25): SEQ ID NO: 2527; WAN024CRM; Start 667; Stop 691
tataagatagagaaaccgagaggac

SEQ ID NO: 328607 - DNA, 25 bp, Artificial
  probe
  misc_feature (1)..(25): SEQ ID NO: 2527; WAN024CRM; Start 663; Stop 687
gggatataagatagagaaaccgaga

SEQ ID NO: 328608 - DNA, 25 bp, Artificial
  probe
  misc_feature (1)..(25): SEQ ID NO: 2527; WAN024CRM; Start 170; Stop 194
ctcggatggatggttatgatttaat

SEQ ID NO: 328609 - DNA, 25 bp, Artificial
  probe
  misc_feature (1)..(25): SEQ ID NO: 2527; WAN024CRM; Start 26; Stop 50
acgacgaggtagaaatcacagatat

SEQ ID NO: 328610 - DNA, 25 bp, Artificial
  probe
  misc_feature (1)..(25): SEQ ID NO: 2527; WAN024CRM; Start 514; Stop 538
ttctccaagacagacctctatgaaa

SEQ ID NO: 328611 - DNA, 25 bp, Artificial
  probe
  misc_feature (1)..(25): SEQ ID NO: 2527; WAN024CRM; Start 513; Stop 537
tttctccaagacagacctctatgaa

SEQ ID NO: 328612 - DNA, 25 bp, Artificial
  probe
  misc_feature (1)..(25): SEQ ID NO: 2527; WAN024CRM; Start 661; Stop 685
ttgggatataagatagagaaaccga

SEQ ID NO: 328613 - DNA, 25 bp, Artificial
  probe
  misc_feature (1)..(25): SEQ ID NO: 2527; WAN024CRM; Start 28; Stop 52
gacgaggtagaaatcacagatattc

SEQ ID NO: 328614 - DNA, 25 bp, Artificial
  probe
  misc_feature (1)..(25): SEQ ID NO: 2527; WAN024CRM; Start 463; Stop 487
gttaaatcatttgaattgctgtgga

SEQ ID NO: 328615 - DNA, 25 bp, Artificial
  probe
  misc_feature (1)..(25): SEQ ID NO: 2527; WAN024CRM; Start 249; Stop 273
gaccagtgaacaggacaagatttac

SEQ ID NO: 328616 - DNA, 25 bp, Artificial
  probe
  misc_feature (1)..(25): SEQ ID NO: 2527; WAN024CRM; Start 248; Stop 272
agaccagtgaacaggacaagattta

SEQ ID NO: 328617 - DNA, 25 bp, Artificial
  probe
  misc_feature (1)..(25): SEQ ID NO: 2527; WAN024CRM; Start 559; Stop 583
gtggatgacaccaataccttgaatg

SEQ ID NO: 328618 - DNA, 25 bp, Artificial
  probe
  misc_feature (1)..(25): SEQ ID NO: 2527; WAN024CRM; Start 171; Stop 195
tcggatggatggttatgatttaatc

SEQ ID NO: 328619 - DNA, 25 bp, Artificial
  probe
  misc_feature (1)..(25): SEQ ID NO: 2527; WAN024CRM; Start 660; Stop 684
gttgggatataagatagagaaaccg

SEQ ID NO: 328620 - DNA, 25 bp, Artificial
  probe
  misc_feature (1)..(25): SEQ ID NO: 2527; WAN024CRM; Start 25; Stop 49
gacgacgaggtagaaatcacagata

SEQ ID NO: 328621 - DNA, 25 bp, Artificial
  probe
  misc_feature (1)..(25): SEQ ID NO: 2527; WAN024CRM; Start 671; Stop 695
agatagagaaaccgagaggacaaac

SEQ ID NO: 328622 - DNA, 25 bp, Artificial
  probe
  misc_feature (1)..(25): SEQ ID NO: 2527; WAN024CRM; Start 560; Stop 584
tggatgacaccaataccttgaatgt

SEQ ID NO: 328623 - DNA, 25 bp, Artificial
  probe
  misc_feature (1)..(25): SEQ ID NO: 2528; WAN024CD4; Start 520; Stop 544
gagatggttccttcagttgatattg

SEQ ID NO: 328624 - DNA, 25 bp, Artificial
  probe
  misc_feature (1)..(25): SEQ ID NO: 2528; WAN024CD4; Start 519; Stop 543
agagatggttccttcagttgatatt

SEQ ID NO: 328625 - DNA, 25 bp, Artificial
  probe
  misc_feature (1)..(25): SEQ ID NO: 2528; WAN024CD4; Start 518; Stop 542
tagagatggttccttcagttgatat

SEQ ID NO: 328626 - DNA, 25 bp, Artificial
  probe
  misc_feature (1)..(25): SEQ ID NO: 2528; WAN024CD4; Start 521; Stop 545
agatggttccttcagttgatattga

SEQ ID NO: 328627 - DNA, 25 bp, Artificial
  probe
  misc_feature (1)..(25): SEQ ID NO: 2528; WAN024CD4; Start 522; Stop 546
gatggttccttcagttgatattgat

SEQ ID NO: 328628 - DNA, 25 bp, Artificial
  probe
  misc_feature (1)..(25): SEQ ID NO: 2528; WAN024CD4; Start 733; Stop 757
ttcaatgaattggcacttacacatg

SEQ ID NO: 328629 - DNA, 25 bp, Artificial
  probe
  misc_feature (1)..(25): SEQ ID NO: 2528; WAN024CD4; Start 524; Stop 548
tggttccttcagttgatattgataa

SEQ ID NO: 328630 - DNA, 25 bp, Artificial
  probe
  misc_feature (1)..(25): SEQ ID NO: 2528; WAN024CD4; Start 523; Stop 547
atggttccttcagttgatattgata

SEQ ID NO: 328631 - DNA, 25 bp, Artificial
  probe
  misc_feature (1)..(25): SEQ ID NO: 2528; WAN024CD4; Start 289; Stop 313
caagatgatatttggaaagagcaca

SEQ ID NO: 328632 - DNA, 25 bp, Artificial
  probe
  misc_feature (1)..(25): SEQ ID NO: 2528; WAN024CD4; Start 291; Stop 315
agatgatatttggaaagagcacaag

SEQ ID NO: 328633 - DNA, 25 bp, Artificial
  probe
  misc_feature (1)..(25): SEQ ID NO: 2528; WAN024CD4; Start 55; Stop 79
tcacaacagattgatagtattaggt

SEQ ID NO: 328634 - DNA, 25 bp, Artificial
  probe
  misc_feature (1)..(25): SEQ ID NO: 2528; WAN024CD4; Start 56; Stop 80
cacaacagattgatagtattaggtc

SEQ ID NO: 328635 - DNA, 25 bp, Artificial
  probe
  misc_feature (1)..(25): SEQ ID NO: 2528; WAN024CD4; Start 288; Stop 312
tcaagatgatatttggaaagagcac

SEQ ID NO: 328636 - DNA, 25 bp, Artificial
  probe
  misc_feature (1)..(25): SEQ ID NO: 2528; WAN024CD4; Start 290; Stop 314
aagatgatatttggaaagagcacaa

SEQ ID NO: 328637 - DNA, 25 bp, Artificial
  probe
  misc_feature (1)..(25): SEQ ID NO: 2528; WAN024CD4; Start 54; Stop 78
gtcacaacagattgatagtattagg

SEQ ID NO: 328638 - DNA, 25 bp, Artificial
  probe
  misc_feature (1)..(25): SEQ ID NO: 2528; WAN024CD4; Start 57; Stop 81
acaacagattgatagtattaggtct

SEQ ID NO: 328639 - DNA, 25 bp, Artificial
  probe
  misc_feature (1)..(25): SEQ ID NO: 2528; WAN024CD4; Start 922; Stop 946
atcggcttatataccatcatgcttt

SEQ ID NO: 328640 - DNA, 25 bp, Artificial
  probe
  misc_feature (1)..(25): SEQ ID NO: 2528; WAN024CD4; Start 732; Stop 756
tttcaatgaattggcacttacacat

SEQ ID NO: 328641 - DNA, 25 bp, Artificial
  probe
  misc_feature (1)..(25): SEQ ID NO: 2528; WAN024CD4; Start 605; Stop 629
tagagtatgggaaggtgttgttctg

SEQ ID NO: 328642 - DNA, 25 bp, Artificial
  probe
  misc_feature (1)..(25): SEQ ID NO: 2528; WAN024CD4; Start 731; Stop 755
gtttcaatgaattggcacttacaca

SEQ ID NO: 328643 - DNA, 25 bp, Artificial
  probe
  misc_feature (1)..(25): SEQ ID NO: 2528; WAN024CD4; Start 604; Stop 628
ctagagtatgggaaggtgttgttct

SEQ ID NO: 328644 - DNA, 25 bp, Artificial
  probe
  misc_feature (1)..(25): SEQ ID NO: 2528; WAN024CD4; Start 603; Stop 627
actagagtatgggaaggtgttgttc

SEQ ID NO: 328645 - DNA, 25 bp, Artificial
  probe
  misc_feature (1)..(25): SEQ ID NO: 2528; WAN024CD4; Start 59; Stop 83
aacagattgatagtattaggtctca

SEQ ID NO: 328646 - DNA, 25 bp, Artificial
  probe
  misc_feature (1)..(25): SEQ ID NO: 2528; WAN024CD4; Start 58; Stop 82
caacagattgatagtattaggtctc

SEQ ID NO: 328647 - DNA, 25 bp, Artificial
  probe
  misc_feature (1)..(25): SEQ ID NO: 2528; WAN024CD4; Start 730; Stop 754
ggtttcaatgaattggcacttacac

SEQ ID NO: 328648 - DNA, 25 bp, Artificial
  probe
  misc_feature (1)..(25): SEQ ID NO: 2528; WAN024CD4; Start 727; Stop 751
ttgggtttcaatgaattggcactta

SEQ ID NO: 328649 - DNA, 25 bp, Artificial
  probe
  misc_feature (1)..(25): SEQ ID NO: 2528; WAN024CD4; Start 358; Stop 382
gagatggtttactctgatatgtcaa

SEQ ID NO: 328650 - DNA, 25 bp, Artificial
  probe
  misc_feature (1)..(25): SEQ ID NO: 2528; WAN024CD4; Start 433; Stop 457
gggattgaattaccgaacataaata

SEQ ID NO: 328651 - DNA, 25 bp, Artificial
  probe
  misc_feature (1)..(25): SEQ ID NO: 2528; WAN024CD4; Start 53; Stop 77
tgtcacaacagattgatagtattag

SEQ ID NO: 328652 - DNA, 25 bp, Artificial
  probe
  misc_feature (1)..(25): SEQ ID NO: 2528; WAN024CD4; Start 729; Stop 753
gggtttcaatgaattggcacttaca

SEQ ID NO: 328653 - DNA, 25 bp, Artificial
  probe
  misc_feature (1)..(25): SEQ ID NO: 2528; WAN024CD4; Start 728; Stop 752
tgggtttcaatgaattggcacttac

SEQ ID NO: 328654 - DNA, 25 bp, Artificial
  probe
  misc_feature (1)..(25): SEQ ID NO: 2528; WAN024CD4; Start 197; Stop 221
cctcaaagtttcatggagcttatta

SEQ ID NO: 328655 - DNA, 25 bp, Artificial
  probe
  misc_feature (1)..(25): SEQ ID NO: 2528; WAN024CD4; Start 602; Stop 626
cactagagtatgggaaggtgttgtt

SEQ ID NO: 328656 - DNA, 25 bp, Artificial
  probe
  misc_feature (1)..(25): SEQ ID NO: 2529; WAN024FN8; Start 231; Stop 255
gaagtctggaggctatgatattgtt

SEQ ID NO: 328657 - DNA, 25 bp, Artificial
  probe
  misc_feature (1)..(25): SEQ ID NO: 2529; WAN024FN8; Start 229; Stop 253
ttgaagtctggaggctatgatattg

SEQ ID NO: 328658 - DNA, 25 bp, Artificial
  probe
  misc_feature (1)..(25): SEQ ID NO: 2529; WAN024FN8; Start 1010; Stop 1034
tgaaggatactaagaagaagcaaga

SEQ ID NO: 328659 - DNA, 25 bp, Artificial
  probe
  misc_feature (1)..(25): SEQ ID NO: 2529; WAN024FN8; Start 230; Stop 254
tgaagtctggaggctatgatattgt

SEQ ID NO: 328660 - DNA, 25 bp, Artificial
  probe
  misc_feature (1)..(25): SEQ ID NO: 2529; WAN024FN8; Start 912; Stop 936
caatagaggacacgccagtattata

SEQ ID NO: 328661 - DNA, 25 bp, Artificial
  probe
  misc_feature (1)..(25): SEQ ID NO: 2529; WAN024FN8; Start 914; Stop 938
atagaggacacgccagtattataca

SEQ ID NO: 328662 - DNA, 25 bp, Artificial
  probe
  misc_feature (1)..(25): SEQ ID NO: 2529; WAN024FN8; Start 915; Stop 939
tagaggacacgccagtattatacaa

SEQ ID NO: 328663 - DNA, 25 bp, Artificial
  probe
  misc_feature (1)..(25): SEQ ID NO: 2529; WAN024FN8; Start 913; Stop 937
aatagaggacacgccagtattatac

SEQ ID NO: 328664 - DNA, 25 bp, Artificial
  probe
  misc_feature (1)..(25): SEQ ID NO: 2529; WAN024FN8; Start 1021; Stop 1045
aagaagaagcaagaattagtggagc

SEQ ID NO: 328665 - DNA, 25 bp, Artificial
  probe
  misc_feature (1)..(25): SEQ ID NO: 2529; WAN024FN8; Start 911; Stop 935
tcaatagaggacacgccagtattat

SEQ ID NO: 328666 - DNA, 25 bp, Artificial
  probe
  misc_feature (1)..(25): SEQ ID NO: 2529; WAN024FN8; Start 910; Stop 934
atcaatagaggacacgccagtatta

SEQ ID NO: 328667 - DNA, 25 bp, Artificial
  probe
  misc_feature (1)..(25): SEQ ID NO: 2529; WAN024FN8; Start 1009; Stop 1033
atgaaggatactaagaagaagcaag

SEQ ID NO: 328668 - DNA, 25 bp, Artificial
  probe
  misc_feature (1)..(25): SEQ ID NO: 2529; WAN024FN8; Start 1020; Stop 1044
taagaagaagcaagaattagtggag

SEQ ID NO: 328669 - DNA, 25 bp, Artificial
  probe
  misc_feature (1)..(25): SEQ ID NO: 2529; WAN024FN8; Start 919; Stop 943
ggacacgccagtattatacaagatg

SEQ ID NO: 328670 - DNA, 25 bp, Artificial
  probe
  misc_feature (1)..(25): SEQ ID NO: 2529; WAN024FN8; Start 918; Stop 942
aggacacgccagtattatacaagat

SEQ ID NO: 328671 - DNA, 25 bp, Artificial
  probe
  misc_feature (1)..(25): SEQ ID NO: 2529; WAN024FN8; Start 1011; Stop 1035
gaaggatactaagaagaagcaagaa

SEQ ID NO: 328672 - DNA, 25 bp, Artificial
  probe
  misc_feature (1)..(25): SEQ ID NO: 2529; WAN024FN8; Start 1024; Stop 1048
aagaagcaagaattagtggagcaag

SEQ ID NO: 328673 - DNA, 25 bp, Artificial
  probe
  misc_feature (1)..(25): SEQ ID NO: 2529; WAN024FN8; Start 1023; Stop 1047
gaagaagcaagaattagtggagcaa

SEQ ID NO: 328674 - DNA, 25 bp, Artificial
  probe
  misc_feature (1)..(25): SEQ ID NO: 2529; WAN024FN8; Start 811; Stop 835
tacgcttgttctgatatatgtgttg

SEQ ID NO: 328675 - DNA, 25 bp, Artificial
  probe
  misc_feature (1)..(25): SEQ ID NO: 2529; WAN024FN8; Start 1008; Stop 1032
aatgaaggatactaagaagaagcaa

SEQ ID NO: 328676 - DNA, 25 bp, Artificial
  probe
  misc_feature (1)..(25): SEQ ID NO: 2529; WAN024FN8; Start 917; Stop 941
gaggacacgccagtattatacaaga

SEQ ID NO: 328677 - DNA, 25 bp, Artificial
  probe
  misc_feature (1)..(25): SEQ ID NO: 2529; WAN024FN8; Start 916; Stop 940
agaggacacgccagtattatacaag

SEQ ID NO: 328678 - DNA, 25 bp, Artificial
  probe
  misc_feature (1)..(25): SEQ ID NO: 2529; WAN024FN8; Start 810; Stop 834
ttacgcttgttctgatatatgtgtt

SEQ ID NO: 328679 - DNA, 25 bp, Artificial
  probe
  misc_feature (1)..(25): SEQ ID NO: 2529; WAN024FN8; Start 1012; Stop 1036
aaggatactaagaagaagcaagaat

SEQ ID NO: 328680 - DNA, 25 bp, Artificial
  probe
  misc_feature (1)..(25): SEQ ID NO: 2529; WAN024FN8; Start 1022; Stop 1046
agaagaagcaagaattagtggagca

SEQ ID NO: 328681 - DNA, 25 bp, Artificial
  probe
  misc_feature (1)..(25): SEQ ID NO: 2529; WAN024FN8; Start 484; Stop 508
caggttcaatcctatctagtgagtg

SEQ ID NO: 328682 - DNA, 25 bp, Artificial
  probe
  misc_feature (1)..(25): SEQ ID NO: 2529; WAN024FN8; Start 483; Stop 507
acaggttcaatcctatctagtgagt

SEQ ID NO: 328683 - DNA, 25 bp, Artificial
  probe
  misc_feature (1)..(25): SEQ ID NO: 2529; WAN024FN8; Start 482; Stop 506
aacaggttcaatcctatctagtgag

SEQ ID NO: 328684 - DNA, 25 bp, Artificial
  probe
  misc_feature (1)..(25): SEQ ID NO: 2529; WAN024FN8; Start 1013; Stop 1037
aggatactaagaagaagcaagaatt

SEQ ID NO: 328685 - DNA, 25 bp, Artificial
  probe
  misc_feature (1)..(25): SEQ ID NO: 2529; WAN024FN8; Start 1019; Stop 1043
ctaagaagaagcaagaattagtgga

SEQ ID NO: 328686 - DNA, 25 bp, Artificial
  probe
  misc_feature (1)..(25): SEQ ID NO: 2529; WAN024FN8; Start 490; Stop 514
caatcctatctagtgagtggaatgg

SEQ ID NO: 328687 - DNA, 25 bp, Artificial
  probe
  misc_feature (1)..(25): SEQ ID NO: 2529; WAN024FN8; Start 487; Stop 511
gttcaatcctatctagtgagtggaa

SEQ ID NO: 328688 - DNA, 25 bp, Artificial
  probe
  misc_feature (1)..(25): SEQ ID NO: 2529; WAN024FN8; Start 949; Stop 973
aacggtctattagtccaattaggaa

SEQ ID NO: 328689 - DNA, 25 bp, Artificial
  probe
  misc_feature (1)..(25): SEQ ID NO: 2530; WAN024GA4-5; Start 225; Stop 249
tatcgtagattctgaactccacaag

SEQ ID NO: 328690 - DNA, 25 bp, Artificial
  probe
  misc_feature (1)..(25): SEQ ID NO: 2530; WAN024GA4-5; Start 224; Stop 248
atatcgtagattctgaactccacaa

SEQ ID NO: 328691 - DNA, 25 bp, Artificial
  probe
  misc_feature (1)..(25): SEQ ID NO: 2530; WAN024GA4-5; Start 1645; Stop 1669
acggatggtctacattatgatgatt

SEQ ID NO: 328692 - DNA, 25 bp, Artificial
  probe
  misc_feature (1)..(25): SEQ ID NO: 2530; WAN024GA4-5; Start 1642; Stop 1666
cctacggatggtctacattatgatg

SEQ ID NO: 328693 - DNA, 25 bp, Artificial
  probe
  misc_feature (1)..(25): SEQ ID NO: 2530; WAN024GA4-5; Start 1643; Stop 1667
ctacggatggtctacattatgatga

SEQ ID NO: 328694 - DNA, 25 bp, Artificial
  probe
  misc_feature (1)..(25): SEQ ID NO: 2530; WAN024GA4-5; Start 1644; Stop 1668
tacggatggtctacattatgatgat

SEQ ID NO: 328695 - DNA, 25 bp, Artificial
  probe
  misc_feature (1)..(25): SEQ ID NO: 2530; WAN024GA4-5; Start 1201; Stop 1225
ttagccgatagaacttccttggtta

SEQ ID NO: 328696 - DNA, 25 bp, Artificial
  probe
  misc_feature (1)..(25): SEQ ID NO: 2530; WAN024GA4-5; Start 1202; Stop 1226
tagccgatagaacttccttggttaa

SEQ ID NO: 328697 - DNA, 25 bp, Artificial
  probe
  misc_feature (1)..(25): SEQ ID NO: 2530; WAN024GA4-5; Start 1206; Stop 1230
cgatagaacttccttggttaagcaa

SEQ ID NO: 328698 - DNA, 25 bp, Artificial
  probe
  misc_feature (1)..(25): SEQ ID NO: 2530; WAN024GA4-5; Start 893; Stop 917
tgaagcactatatacttgatggtcc

SEQ ID NO: 328699 - DNA, 25 bp, Artificial
  probe
  misc_feature (1)..(25): SEQ ID NO: 2530; WAN024GA4-5; Start 1406; Stop 1430
ttatcataattgacgaatctcaccg

SEQ ID NO: 328700 - DNA, 25 bp, Artificial
  probe
  misc_feature (1)..(25): SEQ ID NO: 2530; WAN024GA4-5; Start 897; Stop 921
gcactatatacttgatggtccgaac

SEQ ID NO: 328701 - DNA, 25 bp, Artificial
  probe
  misc_feature (1)..(25): SEQ ID NO: 2530; WAN024GA4-5; Start 896; Stop 920
agcactatatacttgatggtccgaa

SEQ ID NO: 328702 - DNA, 25 bp, Artificial
  probe
  misc_feature (1)..(25): SEQ ID NO: 2530; WAN024GA4-5; Start 890; Stop 914
ggttgaagcactatatacttgatgg

SEQ ID NO: 328703 - DNA, 25 bp, Artificial
  probe
  misc_feature (1)..(25): SEQ ID NO: 2530; WAN024GA4-5; Start 894; Stop 918
gaagcactatatacttgatggtccg

SEQ ID NO: 328704 - DNA, 25 bp, Artificial
  probe
  misc_feature (1)..(25): SEQ ID NO: 2530; WAN024GA4-5; Start 895; Stop 919
aagcactatatacttgatggtccga

SEQ ID NO: 328705 - DNA, 25 bp, Artificial
  probe
  misc_feature (1)..(25): SEQ ID NO: 2530; WAN024GA4-5; Start 713; Stop 737
gttcaggaattggttactgtgacta

SEQ ID NO: 328706 - DNA, 25 bp, Artificial
  probe
  misc_feature (1)..(25): SEQ ID NO: 2530; WAN024GA4-5; Start 891; Stop 915
gttgaagcactatatacttgatggt

SEQ ID NO: 328707 - DNA, 25 bp, Artificial
  probe
  misc_feature (1)..(25): SEQ ID NO: 2530; WAN024GA4-5; Start 892; Stop 916
ttgaagcactatatacttgatggtc

SEQ ID NO: 328708 - DNA, 25 bp, Artificial
  probe
  misc_feature (1)..(25): SEQ ID NO: 2530; WAN024GA4-5; Start 138; Stop 162
ccattggatatatagtcacgattca

SEQ ID NO: 328709 - DNA, 25 bp, Artificial
  probe
  misc_feature (1)..(25): SEQ ID NO: 2530; WAN024GA4-5; Start 1200; Stop 1224
cttagccgatagaacttccttggtt

SEQ ID NO: 328710 - DNA, 25 bp, Artificial
  probe
  misc_feature (1)..(25): SEQ ID NO: 2530; WAN024GA4-5; Start 1203; Stop 1227
agccgatagaacttccttggttaag

SEQ ID NO: 328711 - DNA, 25 bp, Artificial
  probe
  misc_feature (1)..(25): SEQ ID NO: 2530; WAN024GA4-5; Start 1640; Stop 1664
tacctacggatggtctacattatga

SEQ ID NO: 328712 - DNA, 25 bp, Artificial
  probe
  misc_feature (1)..(25): SEQ ID NO: 2530; WAN024GA4-5; Start 1639; Stop 1663
ctacctacggatggtctacattatg

SEQ ID NO: 328713 - DNA, 25 bp, Artificial
  probe
  misc_feature (1)..(25): SEQ ID NO: 2530; WAN024GA4-5; Start 1638; Stop 1662
actacctacggatggtctacattat

SEQ ID NO: 328714 - DNA, 25 bp, Artificial
  probe
  misc_feature (1)..(25): SEQ ID NO: 2530; WAN024GA4-5; Start 1637; Stop 1661
aactacctacggatggtctacatta

SEQ ID NO: 328715 - DNA, 25 bp, Artificial
  probe
  misc_feature (1)..(25): SEQ ID NO: 2530; WAN024GA4-5; Start 1403; Stop 1427
accttatcataattgacgaatctca

SEQ ID NO: 328716 - DNA, 25 bp, Artificial
  probe
  misc_feature (1)..(25): SEQ ID NO: 2530; WAN024GA4-5; Start 1401; Stop 1425
tgaccttatcataattgacgaatct

SEQ ID NO: 328717 - DNA, 25 bp, Artificial
  probe
  misc_feature (1)..(25): SEQ ID NO: 2530; WAN024GA4-5; Start 1641; Stop 1665
acctacggatggtctacattatgat

SEQ ID NO: 328718 - DNA, 25 bp, Artificial
  probe
  misc_feature (1)..(25): SEQ ID NO: 2530; WAN024GA4-5; Start 226; Stop 250
atcgtagattctgaactccacaagc

SEQ ID NO: 328719 - DNA, 25 bp, Artificial
  probe
  misc_feature (1)..(25): SEQ ID NO: 2530; WAN024GA4-5; Start 1205; Stop 1229
ccgatagaacttccttggttaagca

SEQ ID NO: 328720 - DNA, 25 bp, Artificial
  probe
  misc_feature (1)..(25): SEQ ID NO: 2530; WAN024GA4-5; Start 1405; Stop 1429
cttatcataattgacgaatctcacc

SEQ ID NO: 328721 - DNA, 25 bp, Artificial
  probe
  misc_feature (1)..(25): SEQ ID NO: 2530; WAN024GA4-5; Start 1404; Stop 1428
ccttatcataattgacgaatctcac

SEQ ID NO: 328722 - DNA, 25 bp, Artificial
  probe
  misc_feature (1)..(25): SEQ ID NO: 2531; WAN024CZ8; Start 729; Stop 753
ctatatttcaggacggttcggataa

SEQ ID NO: 328723 - DNA, 25 bp, Artificial
  probe
  misc_feature (1)..(25): SEQ ID NO: 2531; WAN024CZ8; Start 500; Stop 524
ttctgttaatggatgagccgacttc

SEQ ID NO: 328724 - DNA, 25 bp, Artificial
  probe
  misc_feature (1)..(25): SEQ ID NO: 2531; WAN024CZ8; Start 723; Stop 747
agaagactatatttcaggacggttc

SEQ ID NO: 328725 - DNA, 25 bp, Artificial
  probe
  misc_feature (1)..(25): SEQ ID NO: 2531; WAN024CZ8; Start 722; Stop 746
cagaagactatatttcaggacggtt

SEQ ID NO: 328726 - DNA, 25 bp, Artificial
  probe
  misc_feature (1)..(25): SEQ ID NO: 2531; WAN024CZ8; Start 728; Stop 752
actatatttcaggacggttcggata

SEQ ID NO: 328727 - DNA, 25 bp, Artificial
  probe
  misc_feature (1)..(25): SEQ ID NO: 2531; WAN024CZ8; Start 730; Stop 754
tatatttcaggacggttcggataac

SEQ ID NO: 328728 - DNA, 25 bp, Artificial
  probe
  misc_feature (1)..(25): SEQ ID NO: 2531; WAN024CZ8; Start 720; Stop 744
cacagaagactatatttcaggacgg

SEQ ID NO: 328729 - DNA, 25 bp, Artificial
  probe
  misc_feature (1)..(25): SEQ ID NO: 2531; WAN024CZ8; Start 721; Stop 745
acagaagactatatttcaggacggt

SEQ ID NO: 328730 - DNA, 25 bp, Artificial
  probe
  misc_feature (1)..(25): SEQ ID NO: 2531; WAN024CZ8; Start 724; Stop 748
gaagactatatttcaggacggttcg

SEQ ID NO: 328731 - DNA, 25 bp, Artificial
  probe
  misc_feature (1)..(25): SEQ ID NO: 2531; WAN024CZ8; Start 68; Stop 92
cgattcaattaccagaaagacagat

SEQ ID NO: 328732 - DNA, 25 bp, Artificial
  probe
  misc_feature (1)..(25): SEQ ID NO: 2531; WAN024CZ8; Start 190; Stop 214
caagtcctcttagatgagcaagata

SEQ ID NO: 328733 - DNA, 25 bp, Artificial
  probe
  misc_feature (1)..(25): SEQ ID NO: 2531; WAN024CZ8; Start 732; Stop 756
tatttcaggacggttcggataacta

SEQ ID NO: 328734 - DNA, 25 bp, Artificial
  probe
  misc_feature (1)..(25): SEQ ID NO: 2531; WAN024CZ8; Start 719; Stop 743
gcacagaagactatatttcaggacg

SEQ ID NO: 328735 - DNA, 25 bp, Artificial
  probe
  misc_feature (1)..(25): SEQ ID NO: 2531; WAN024CZ8; Start 718; Stop 742
cgcacagaagactatatttcaggac

SEQ ID NO: 328736 - DNA, 25 bp, Artificial
  probe
  misc_feature (1)..(25): SEQ ID NO: 2531; WAN024CZ8; Start 291; Stop 315
catgtctatctatgataacgtggct

SEQ ID NO: 328737 - DNA, 25 bp, Artificial
  probe
  misc_feature (1)..(25): SEQ ID NO: 2531; WAN024CZ8; Start 288; Stop 312
tgccatgtctatctatgataacgtg

SEQ ID NO: 328738 - DNA, 25 bp, Artificial
  probe
  misc_feature (1)..(25): SEQ ID NO: 2531; WAN024CZ8; Start 287; Stop 311
ttgccatgtctatctatgataacgt

SEQ ID NO: 328739 - DNA, 25 bp, Artificial
  probe
  misc_feature (1)..(25): SEQ ID NO: 2531; WAN024CZ8; Start 297; Stop 321
tatctatgataacgtggcttatggc

SEQ ID NO: 328740 - DNA, 25 bp, Artificial
  probe
  misc_feature (1)..(25): SEQ ID NO: 2531; WAN024CZ8; Start 292; Stop 316
atgtctatctatgataacgtggctt

SEQ ID NO: 328741 - DNA, 25 bp, Artificial
  probe
  misc_feature (1)..(25): SEQ ID NO: 2531; WAN024CZ8; Start 526; Stop 550
gccttagaccctatctccactttaa

SEQ ID NO: 328742 - DNA, 25 bp, Artificial
  probe
  misc_feature (1)..(25): SEQ ID NO: 2531; WAN024CZ8; Start 278; Stop 302
ctaatccctttgccatgtctatcta

SEQ ID NO: 328743 - DNA, 25 bp, Artificial
  probe
  misc_feature (1)..(25): SEQ ID NO: 2531; WAN024CZ8; Start 293; Stop 317
tgtctatctatgataacgtggctta

SEQ ID NO: 328744 - DNA, 25 bp, Artificial
  probe
  misc_feature (1)..(25): SEQ ID NO: 2531; WAN024CZ8; Start 192; Stop 216
agtcctcttagatgagcaagatatt

SEQ ID NO: 328745 - DNA, 25 bp, Artificial
  probe
  misc_feature (1)..(25): SEQ ID NO: 2531; WAN024CZ8; Start 191; Stop 215
aagtcctcttagatgagcaagatat

SEQ ID NO: 328746 - DNA, 25 bp, Artificial
  probe
  misc_feature (1)..(25): SEQ ID NO: 2531; WAN024CZ8; Start 731; Stop 755
atatttcaggacggttcggataact

SEQ ID NO: 328747 - DNA, 25 bp, Artificial
  probe
  misc_feature (1)..(25): SEQ ID NO: 2531; WAN024CZ8; Start 727; Stop 751
gactatatttcaggacggttcggat

SEQ ID NO: 328748 - DNA, 25 bp, Artificial
  probe
  misc_feature (1)..(25): SEQ ID NO: 2531; WAN024CZ8; Start 296; Stop 320
ctatctatgataacgtggcttatgg

SEQ ID NO: 328749 - DNA, 25 bp, Artificial
  probe
  misc_feature (1)..(25): SEQ ID NO: 2531; WAN024CZ8; Start 280; Stop 304
aatccctttgccatgtctatctatg

SEQ ID NO: 328750 - DNA, 25 bp, Artificial
  probe
  misc_feature (1)..(25): SEQ ID NO: 2531; WAN024CZ8; Start 279; Stop 303
taatccctttgccatgtctatctat

SEQ ID NO: 328751 - DNA, 25 bp, Artificial
  probe
  misc_feature (1)..(25): SEQ ID NO: 2531; WAN024CZ8; Start 734; Stop 758
tttcaggacggttcggataactaat

SEQ ID NO: 328752 - DNA, 25 bp, Artificial
  probe
  misc_feature (1)..(25): SEQ ID NO: 2531; WAN024CZ8; Start 733; Stop 757
atttcaggacggttcggataactaa

SEQ ID NO: 328753 - DNA, 25 bp, Artificial
  probe
  misc_feature (1)..(25): SEQ ID NO: 2531; WAN024CZ8; Start 81; Stop 105
agaaagacagattactgccttgata

SEQ ID NO: 328754 - DNA, 25 bp, Artificial
  probe
  misc_feature (1)..(25): SEQ ID NO: 2531; WAN024CZ8; Start 725; Stop 749
aagactatatttcaggacggttcgg

SEQ ID NO: 328755 - DNA, 25 bp, Artificial
  probe
  misc_feature (1)..(25): SEQ ID NO: 2532; WAN024C5S; Start 19; Stop 43
attgaagacttggaattgttatggc

SEQ ID NO: 328756 - DNA, 25 bp, Artificial
  probe
  misc_feature (1)..(25): SEQ ID NO: 2532; WAN024C5S; Start 18; Stop 42
gattgaagacttggaattgttatgg

SEQ ID NO: 328757 - DNA, 25 bp, Artificial
  probe
  misc_feature (1)..(25): SEQ ID NO: 2532; WAN024C5S; Start 20; Stop 44
ttgaagacttggaattgttatggcg

SEQ ID NO: 328758 - DNA, 25 bp, Artificial
  probe
  misc_feature (1)..(25): SEQ ID NO: 2532; WAN024C5S; Start 17; Stop 41
agattgaagacttggaattgttatg

SEQ ID NO: 328759 - DNA, 25 bp, Artificial
  probe
  misc_feature (1)..(25): SEQ ID NO: 2532; WAN024C5S; Start 465; Stop 489
atcgtgatgttgagattgaggttca

SEQ ID NO: 328760 - DNA, 25 bp, Artificial
  probe
  misc_feature (1)..(25): SEQ ID NO: 2532; WAN024C5S; Start 464; Stop 488
catcgtgatgttgagattgaggttc

SEQ ID NO: 328761 - DNA, 25 bp, Artificial
  probe
  misc_feature (1)..(25): SEQ ID NO: 2532; WAN024C5S; Start 685; Stop 709
atcgtggaatagaaaggttatggtt

SEQ ID NO: 328762 - DNA, 25 bp, Artificial
  probe
  misc_feature (1)..(25): SEQ ID NO: 2532; WAN024C5S; Start 418; Stop 442
aatagacaaggtggaaactggtaat

SEQ ID NO: 328763 - DNA, 25 bp, Artificial
  probe
  misc_feature (1)..(25): SEQ ID NO: 2532; WAN024C5S; Start 419; Stop 443
atagacaaggtggaaactggtaatg

SEQ ID NO: 328764 - DNA, 25 bp, Artificial
  probe
  misc_feature (1)..(25): SEQ ID NO: 2532; WAN024C5S; Start 415; Stop 439
tttaatagacaaggtggaaactggt

SEQ ID NO: 328765 - DNA, 25 bp, Artificial
  probe
  misc_feature (1)..(25): SEQ ID NO: 2532; WAN024C5S; Start 684; Stop 708
tatcgtggaatagaaaggttatggt

SEQ ID NO: 328766 - DNA, 25 bp, Artificial
  probe
  misc_feature (1)..(25): SEQ ID NO: 2532; WAN024C5S; Start 417; Stop 441
taatagacaaggtggaaactggtaa

SEQ ID NO: 328767 - DNA, 25 bp, Artificial
  probe
  misc_feature (1)..(25): SEQ ID NO: 2532; WAN024C5S; Start 687; Stop 711
cgtggaatagaaaggttatggttga

SEQ ID NO: 328768 - DNA, 25 bp, Artificial
  probe
  misc_feature (1)..(25): SEQ ID NO: 2532; WAN024C5S; Start 686; Stop 710
tcgtggaatagaaaggttatggttg

SEQ ID NO: 328769 - DNA, 25 bp, Artificial
  probe
  misc_feature (1)..(25): SEQ ID NO: 2532; WAN024C5S; Start 456; Stop 480
atccaatccatcgtgatgttgagat

SEQ ID NO: 328770 - DNA, 25 bp, Artificial
  probe
  misc_feature (1)..(25): SEQ ID NO: 2532; WAN024C5S; Start 92; Stop 116
ttgtatctaattctttgcgagtgga

SEQ ID NO: 328771 - DNA, 25 bp, Artificial
  probe
  misc_feature (1)..(25): SEQ ID NO: 2532; WAN024C5S; Start 91; Stop 115
gttgtatctaattctttgcgagtgg

SEQ ID NO: 328772 - DNA, 25 bp, Artificial
  probe
  misc_feature (1)..(25): SEQ ID NO: 2532; WAN024C5S; Start 416; Stop 440
ttaatagacaaggtggaaactggta

SEQ ID NO: 328773 - DNA, 25 bp, Artificial
  probe
  misc_feature (1)..(25): SEQ ID NO: 2532; WAN024C5S; Start 77; Stop 101
aggctttgttggaagttgtatctaa

SEQ ID NO: 328774 - DNA, 25 bp, Artificial
  probe
  misc_feature (1)..(25): SEQ ID NO: 2532; WAN024C5S; Start 688; Stop 712
gtggaatagaaaggttatggttgaa

SEQ ID NO: 328775 - DNA, 25 bp, Artificial
  probe
  misc_feature (1)..(25): SEQ ID NO: 2532; WAN024C5S; Start 90; Stop 114
agttgtatctaattctttgcgagtg

SEQ ID NO: 328776 - DNA, 25 bp, Artificial
  probe
  misc_feature (1)..(25): SEQ ID NO: 2532; WAN024C5S; Start 78; Stop 102
ggctttgttggaagttgtatctaat

SEQ ID NO: 328777 - DNA, 25 bp, Artificial
  probe
  misc_feature (1)..(25): SEQ ID NO: 2532; WAN024C5S; Start 76; Stop 100
gaggctttgttggaagttgtatcta

SEQ ID NO: 328778 - DNA, 25 bp, Artificial
  probe
  misc_feature (1)..(25): SEQ ID NO: 2532; WAN024C5S; Start 94; Stop 118
gtatctaattctttgcgagtggaag

SEQ ID NO: 328779 - DNA, 25 bp, Artificial
  probe
  misc_feature (1)..(25): SEQ ID NO: 2532; WAN024C5S; Start 254; Stop 278
tatctgaaagtgccttgggttattc

SEQ ID NO: 328780 - DNA, 25 bp, Artificial
  probe
  misc_feature (1)..(25): SEQ ID NO: 2532; WAN024C5S; Start 93; Stop 117
tgtatctaattctttgcgagtggaa

SEQ ID NO: 328781 - DNA, 25 bp, Artificial
  probe
  misc_feature (1)..(25): SEQ ID NO: 2532; WAN024C5S; Start 86; Stop 110
tggaagttgtatctaattctttgcg

SEQ ID NO: 328782 - DNA, 25 bp, Artificial
  probe
  misc_feature (1)..(25): SEQ ID NO: 2532; WAN024C5S; Start 690; Stop 714
ggaatagaaaggttatggttgaagt

SEQ ID NO: 328783 - DNA, 25 bp, Artificial
  probe
  misc_feature (1)..(25): SEQ ID NO: 2532; WAN024C5S; Start 689; Stop 713
tggaatagaaaggttatggttgaag

SEQ ID NO: 328784 - DNA, 25 bp, Artificial
  probe
  misc_feature (1)..(25): SEQ ID NO: 2532; WAN024C5S; Start 420; Stop 444
tagacaaggtggaaactggtaatga

SEQ ID NO: 328785 - DNA, 25 bp, Artificial
  probe
  misc_feature (1)..(25): SEQ ID NO: 2532; WAN024C5S; Start 87; Stop 111
ggaagttgtatctaattctttgcga

SEQ ID NO: 328786 - DNA, 25 bp, Artificial
  probe
  misc_feature (1)..(25): SEQ ID NO: 2532; WAN024C5S; Start 667; Stop 691
tgagtcaatgattccattatcgtgg

SEQ ID NO: 328787 - DNA, 25 bp, Artificial
  probe
  misc_feature (1)..(25): SEQ ID NO: 2532; WAN024C5S; Start 460; Stop 484
aatccatcgtgatgttgagattgag

SEQ ID NO: 328788 - DNA, 25 bp, Artificial
  probe
  misc_feature (1)..(25): SEQ ID NO: 2533; WAN024FLN; Start 56; Stop 80
aagtaaggagtgtaagacaagcatt

SEQ ID NO: 328789 - DNA, 25 bp, Artificial
  probe
  misc_feature (1)..(25): SEQ ID NO: 2533; WAN024FLN; Start 39; Stop 63
tacatttaggagcgagaaagtaagg

SEQ ID NO: 328790 - DNA, 25 bp, Artificial
  probe
  misc_feature (1)..(25): SEQ ID NO: 2533; WAN024FLN; Start 41; Stop 65
catttaggagcgagaaagtaaggag

SEQ ID NO: 328791 - DNA, 25 bp, Artificial
  probe
  misc_feature (1)..(25): SEQ ID NO: 2533; WAN024FLN; Start 42; Stop 66
atttaggagcgagaaagtaaggagt

SEQ ID NO: 328792 - DNA, 25 bp, Artificial
  probe
  misc_feature (1)..(25): SEQ ID NO: 2533; WAN024FLN; Start 67; Stop 91
gtaagacaagcatttcatttgacac

SEQ ID NO: 328793 - DNA, 25 bp, Artificial
  probe
  misc_feature (1)..(25): SEQ ID NO: 2533; WAN024FLN; Start 68; Stop 92
taagacaagcatttcatttgacacg

SEQ ID NO: 328794 - DNA, 25 bp, Artificial
  probe
  misc_feature (1)..(25): SEQ ID NO: 2533; WAN024FLN; Start 40; Stop 64
acatttaggagcgagaaagtaagga

SEQ ID NO: 328795 - DNA, 25 bp, Artificial
  probe
  misc_feature (1)..(25): SEQ ID NO: 2533; WAN024FLN; Start 48; Stop 72
gagcgagaaagtaaggagtgtaaga

SEQ ID NO: 328796 - DNA, 25 bp, Artificial
  probe
  misc_feature (1)..(25): SEQ ID NO: 2533; WAN024FLN; Start 62; Stop 86
ggagtgtaagacaagcatttcattt

SEQ ID NO: 328797 - DNA, 25 bp, Artificial
  probe
  misc_feature (1)..(25): SEQ ID NO: 2533; WAN024FLN; Start 59; Stop 83
taaggagtgtaagacaagcatttca

SEQ ID NO: 328798 - DNA, 25 bp, Artificial
  probe
  misc_feature (1)..(25): SEQ ID NO: 2533; WAN024FLN; Start 58; Stop 82
gtaaggagtgtaagacaagcatttc

SEQ ID NO: 328799 - DNA, 25 bp, Artificial
  probe
  misc_feature (1)..(25): SEQ ID NO: 2533; WAN024FLN; Start 57; Stop 81
agtaaggagtgtaagacaagcattt

SEQ ID NO: 328800 - DNA, 25 bp, Artificial
  probe
  misc_feature (1)..(25): SEQ ID NO: 2533; WAN024FLN; Start 55; Stop 79
aaagtaaggagtgtaagacaagcat

SEQ ID NO: 328801 - DNA, 25 bp, Artificial
  probe
  misc_feature (1)..(25): SEQ ID NO: 2533; WAN024FLN; Start 66; Stop 90
tgtaagacaagcatttcatttgaca

SEQ ID NO: 328802 - DNA, 25 bp, Artificial
  probe
  misc_feature (1)..(25): SEQ ID NO: 2533; WAN024FLN; Start 51; Stop 75
cgagaaagtaaggagtgtaagacaa

SEQ ID NO: 328803 - DNA, 25 bp, Artificial
  probe
  misc_feature (1)..(25): SEQ ID NO: 2533; WAN024FLN; Start 65; Stop 89
gtgtaagacaagcatttcatttgac

SEQ ID NO: 328804 - DNA, 25 bp, Artificial
  probe
  misc_feature (1)..(25): SEQ ID NO: 2533; WAN024FLN; Start 53; Stop 77
agaaagtaaggagtgtaagacaagc

SEQ ID NO: 328805 - DNA, 25 bp, Artificial
  probe
  misc_feature (1)..(25): SEQ ID NO: 2533; WAN024FLN; Start 64; Stop 88
agtgtaagacaagcatttcatttga

SEQ ID NO: 328806 - DNA, 25 bp, Artificial
  probe
  misc_feature (1)..(25): SEQ ID NO: 2533; WAN024FLN; Start 61; Stop 85
aggagtgtaagacaagcatttcatt

SEQ ID NO: 328807 - DNA, 25 bp, Artificial
  probe
  misc_feature (1)..(25): SEQ ID NO: 2533; WAN024FLN; Start 60; Stop 84
aaggagtgtaagacaagcatttcat

SEQ ID NO: 328808 - DNA, 25 bp, Artificial
  probe
  misc_feature (1)..(25): SEQ ID NO: 2533; WAN024FLN; Start 54; Stop 78
gaaagtaaggagtgtaagacaagca

SEQ ID NO: 328809 - DNA, 25 bp, Artificial
  probe
  misc_feature (1)..(25): SEQ ID NO: 2533; WAN024FLN; Start 49; Stop 73
agcgagaaagtaaggagtgtaagac

SEQ ID NO: 328810 - DNA, 25 bp, Artificial
  probe
  misc_feature (1)..(25): SEQ ID NO: 2533; WAN024FLN; Start 43; Stop 67
tttaggagcgagaaagtaaggagtg

SEQ ID NO: 328811 - DNA, 25 bp, Artificial
  probe
  misc_feature (1)..(25): SEQ ID NO: 2533; WAN024FLN; Start 63; Stop 87
gagtgtaagacaagcatttcatttg

SEQ ID NO: 328812 - DNA, 25 bp, Artificial
  probe
  misc_feature (1)..(25): SEQ ID NO: 2533; WAN024FLN; Start 52; Stop 76
gagaaagtaaggagtgtaagacaag

SEQ ID NO: 328813 - DNA, 25 bp, Artificial
  probe
  misc_feature (1)..(25): SEQ ID NO: 2533; WAN024FLN; Start 45; Stop 69
taggagcgagaaagtaaggagtgta

SEQ ID NO: 328814 - DNA, 25 bp, Artificial
  probe
  misc_feature (1)..(25): SEQ ID NO: 2533; WAN024FLN; Start 36; Stop 60
ccttacatttaggagcgagaaagta

SEQ ID NO: 328815 - DNA, 25 bp, Artificial
  probe
  misc_feature (1)..(25): SEQ ID NO: 2533; WAN024FLN; Start 69; Stop 93
aagacaagcatttcatttgacacga

SEQ ID NO: 328816 - DNA, 25 bp, Artificial
  probe
  misc_feature (1)..(25): SEQ ID NO: 2533; WAN024FLN; Start 27; Stop 51
cactctatcccttacatttaggagc

SEQ ID NO: 328817 - DNA, 25 bp, Artificial
  probe
  misc_feature (1)..(25): SEQ ID NO: 2533; WAN024FLN; Start 32; Stop 56
tatcccttacatttaggagcgagaa

SEQ ID NO: 328818 - DNA, 25 bp, Artificial
  probe
  misc_feature (1)..(25): SEQ ID NO: 2533; WAN024FLN; Start 47; Stop 71
ggagcgagaaagtaaggagtgtaag

SEQ ID NO: 328819 - DNA, 25 bp, Artificial
  probe
  misc_feature (1)..(25): SEQ ID NO: 2533; WAN024FLN; Start 20; Stop 44
aggaaatcactctatcccttacatt

SEQ ID NO: 328820 - DNA, 25 bp, Artificial
  probe
  misc_feature (1)..(25): SEQ ID NO: 2533; WAN024FLN; Start 70; Stop 94
agacaagcatttcatttgacacgag

SEQ ID NO: 328821 - DNA, 25 bp, Artificial
  probe
  misc_feature (1)..(25): SEQ ID NO: 2534; WAN024CLJ; Start 122; Stop 146
cgattgtgattactgtagtgtcatt

SEQ ID NO: 328822 - DNA, 25 bp, Artificial
  probe
  misc_feature (1)..(25): SEQ ID NO: 2534; WAN024CLJ; Start 121; Stop 145
gcgattgtgattactgtagtgtcat

SEQ ID NO: 328823 - DNA, 25 bp, Artificial
  probe
  misc_feature (1)..(25): SEQ ID NO: 2534; WAN024CLJ; Start 125; Stop 149
ttgtgattactgtagtgtcattctt

SEQ ID NO: 328824 - DNA, 25 bp, Artificial
  probe
  misc_feature (1)..(25): SEQ ID NO: 2534; WAN024CLJ; Start 124; Stop 148
attgtgattactgtagtgtcattct

SEQ ID NO: 328825 - DNA, 25 bp, Artificial
  probe
  misc_feature (1)..(25): SEQ ID NO: 2534; WAN024CLJ; Start 120; Stop 144
agcgattgtgattactgtagtgtca

SEQ ID NO: 328826 - DNA, 25 bp, Artificial
  probe
  misc_feature (1)..(25): SEQ ID NO: 2534; WAN024CLJ; Start 123; Stop 147
gattgtgattactgtagtgtcattc

SEQ ID NO: 328827 - DNA, 25 bp, Artificial
  probe
  misc_feature (1)..(25): SEQ ID NO: 2534; WAN024CLJ; Start 119; Stop 143
cagcgattgtgattactgtagtgtc

SEQ ID NO: 328828 - DNA, 25 bp, Artificial
  probe
  misc_feature (1)..(25): SEQ ID NO: 2534; WAN024CLJ; Start 10; Stop 34
atcgcaaatgtattcgctggtttag

SEQ ID NO: 328829 - DNA, 25 bp, Artificial
  probe
  misc_feature (1)..(25): SEQ ID NO: 2534; WAN024CLJ; Start 126; Stop 150
tgtgattactgtagtgtcattcttt

SEQ ID NO: 328830 - DNA, 25 bp, Artificial
  probe
  misc_feature (1)..(25): SEQ ID NO: 2534; WAN024CLJ; Start 14; Stop 38
caaatgtattcgctggtttagtcgg

SEQ ID NO: 328831 - DNA, 25 bp, Artificial
  probe
  misc_feature (1)..(25): SEQ ID NO: 2534; WAN024CLJ; Start 9; Stop 33
catcgcaaatgtattcgctggttta

SEQ ID NO: 328832 - DNA, 25 bp, Artificial
  probe
  misc_feature (1)..(25): SEQ ID NO: 2534; WAN024CLJ; Start 109; Stop 133
attgtaggtgcagcgattgtgatta

SEQ ID NO: 328833 - DNA, 25 bp, Artificial
  probe
  misc_feature (1)..(25): SEQ ID NO: 2534; WAN024CLJ; Start 108; Stop 132
tattgtaggtgcagcgattgtgatt

SEQ ID NO: 328834 - DNA, 25 bp, Artificial
  probe
  misc_feature (1)..(25): SEQ ID NO: 2534; WAN024CLJ; Start 118; Stop 142
gcagcgattgtgattactgtagtgt

SEQ ID NO: 328835 - DNA, 25 bp, Artificial
  probe
  misc_feature (1)..(25): SEQ ID NO: 2534; WAN024CLJ; Start 13; Stop 37
gcaaatgtattcgctggtttagtcg

SEQ ID NO: 328836 - DNA, 25 bp, Artificial
  probe
  misc_feature (1)..(25): SEQ ID NO: 2534; WAN024CLJ; Start 12; Stop 36
cgcaaatgtattcgctggtttagtc

SEQ ID NO: 328837 - DNA, 25 bp, Artificial
  probe
  misc_feature (1)..(25): SEQ ID NO: 2534; WAN024CLJ; Start 107; Stop 131
ctattgtaggtgcagcgattgtgat

SEQ ID NO: 328838 - DNA, 25 bp, Artificial
  probe
  misc_feature (1)..(25): SEQ ID NO: 2534; WAN024CLJ; Start 139; Stop 163
gtgtcattctttacaggtagaaagc

SEQ ID NO: 328839 - DNA, 25 bp, Artificial
  probe
  misc_feature (1)..(25): SEQ ID NO: 2534; WAN024CLJ; Start 135; Stop 159
tgtagtgtcattctttacaggtaga

SEQ ID NO: 328840 - DNA, 25 bp, Artificial
  probe
  misc_feature (1)..(25): SEQ ID NO: 2534; WAN024CLJ; Start 105; Stop 129
atctattgtaggtgcagcgattgtg

SEQ ID NO: 328841 - DNA, 25 bp, Artificial
  probe
  misc_feature (1)..(25): SEQ ID NO: 2534; WAN024CLJ; Start 104; Stop 128
catctattgtaggtgcagcgattgt

SEQ ID NO: 328842 - DNA, 25 bp, Artificial
  probe
  misc_feature (1)..(25): SEQ ID NO: 2534; WAN024CLJ; Start 11; Stop 35
tcgcaaatgtattcgctggtttagt

SEQ ID NO: 328843 - DNA, 25 bp, Artificial
  probe
  misc_feature (1)..(25): SEQ ID NO: 2534; WAN024CLJ; Start 46; Stop 70
gcaggacaatctcttttaggtagtt

SEQ ID NO: 328844 - DNA, 25 bp, Artificial
  probe
  misc_feature (1)..(25): SEQ ID NO: 2534; WAN024CLJ; Start 1; Stop 25
atgggaatcatcgcaaatgtattcg

SEQ ID NO: 328845 - DNA, 25 bp, Artificial
  probe
  misc_feature (1)..(25): SEQ ID NO: 2534; WAN024CLJ; Start 95; Stop 119
ctttgctcccatctattgtaggtgc

SEQ ID NO: 328846 - DNA, 25 bp, Artificial
  probe
  misc_feature (1)..(25): SEQ ID NO: 2534; WAN024CLJ; Start 94; Stop 118
gctttgctcccatctattgtaggtg

SEQ ID NO: 328847 - DNA, 25 bp, Artificial
  probe
  misc_feature (1)..(25): SEQ ID NO: 2534; WAN024CLJ; Start 15; Stop 39
aaatgtattcgctggtttagtcggg

SEQ ID NO: 328848 - DNA, 25 bp, Artificial
  probe
  misc_feature (1)..(25): SEQ ID NO: 2534; WAN024CLJ; Start 138; Stop 162
agtgtcattctttacaggtagaaag

SEQ ID NO: 328849 - DNA, 25 bp, Artificial
  probe
  misc_feature (1)..(25): SEQ ID NO: 2534; WAN024CLJ; Start 48; Stop 72
aggacaatctcttttaggtagttgg

SEQ ID NO: 328850 - DNA, 25 bp, Artificial
  probe
  misc_feature (1)..(25): SEQ ID NO: 2534; WAN024CLJ; Start 110; Stop 134
ttgtaggtgcagcgattgtgattac

SEQ ID NO: 328851 - DNA, 25 bp, Artificial
  probe
  misc_feature (1)..(25): SEQ ID NO: 2534; WAN024CLJ; Start 52; Stop 76
caatctcttttaggtagttggggtc

SEQ ID NO: 328852 - DNA, 25 bp, Artificial
  probe
  misc_feature (1)..(25): SEQ ID NO: 2534; WAN024CLJ; Start 50; Stop 74
gacaatctcttttaggtagttgggg

SEQ ID NO: 328853 - DNA, 25 bp, Artificial
  probe
  misc_feature (1)..(25): SEQ ID NO: 2534; WAN024CLJ; Start 49; Stop 73
ggacaatctcttttaggtagttggg

SEQ ID NO: 328854 - DNA, 25 bp, Artificial
  probe
  misc_feature (1)..(25): SEQ ID NO: 2535; WAN024CE7; Start 218; Stop 242
tattaaggttatcttgacaggtgct

SEQ ID NO: 328855 - DNA, 25 bp, Artificial
  probe
  misc_feature (1)..(25): SEQ ID NO: 2535; WAN024CE7; Start 217; Stop 241
atattaaggttatcttgacaggtgc

SEQ ID NO: 328856 - DNA, 25 bp, Artificial
  probe
  misc_feature (1)..(25): SEQ ID NO: 2535; WAN024CE7; Start 219; Stop 243
attaaggttatcttgacaggtgctg

SEQ ID NO: 328857 - DNA, 25 bp, Artificial
  probe
  misc_feature (1)..(25): SEQ ID NO: 2535; WAN024CE7; Start 1179; Stop 1203
cgtgtagtacaaggtgtcataattc

SEQ ID NO: 328858 - DNA, 25 bp, Artificial
  probe
  misc_feature (1)..(25): SEQ ID NO: 2535; WAN024CE7; Start 1178; Stop 1202
ccgtgtagtacaaggtgtcataatt

SEQ ID NO: 328859 - DNA, 25 bp, Artificial
  probe
  misc_feature (1)..(25): SEQ ID NO: 2535; WAN024CE7; Start 1184; Stop 1208
agtacaaggtgtcataattcacgaa

SEQ ID NO: 328860 - DNA, 25 bp, Artificial
  probe
  misc_feature (1)..(25): SEQ ID NO: 2535; WAN024CE7; Start 1183; Stop 1207
tagtacaaggtgtcataattcacga

SEQ ID NO: 328861 - DNA, 25 bp, Artificial
  probe
  misc_feature (1)..(25): SEQ ID NO: 2535; WAN024CE7; Start 1182; Stop 1206
gtagtacaaggtgtcataattcacg

SEQ ID NO: 328862 - DNA, 25 bp, Artificial
  probe
  misc_feature (1)..(25): SEQ ID NO: 2535; WAN024CE7; Start 1185; Stop 1209
gtacaaggtgtcataattcacgaat

SEQ ID NO: 328863 - DNA, 25 bp, Artificial
  probe
  misc_feature (1)..(25): SEQ ID NO: 2535; WAN024CE7; Start 1180; Stop 1204
gtgtagtacaaggtgtcataattca

SEQ ID NO: 328864 - DNA, 25 bp, Artificial
  probe
  misc_feature (1)..(25): SEQ ID NO: 2535; WAN024CE7; Start 1187; Stop 1211
acaaggtgtcataattcacgaatat

SEQ ID NO: 328865 - DNA, 25 bp, Artificial
  probe
  misc_feature (1)..(25): SEQ ID NO: 2535; WAN024CE7; Start 1190; Stop 1214
aggtgtcataattcacgaatatcaa

SEQ ID NO: 328866 - DNA, 25 bp, Artificial
  probe
  misc_feature (1)..(25): SEQ ID NO: 2535; WAN024CE7; Start 1189; Stop 1213
aaggtgtcataattcacgaatatca

SEQ ID NO: 328867 - DNA, 25 bp, Artificial
  probe
  misc_feature (1)..(25): SEQ ID NO: 2535; WAN024CE7; Start 1067; Stop 1091
tgatatttaccgtgtcttcccttac

SEQ ID NO: 328868 - DNA, 25 bp, Artificial
  probe
  misc_feature (1)..(25): SEQ ID NO: 2535; WAN024CE7; Start 1065; Stop 1089
aatgatatttaccgtgtcttccctt

SEQ ID NO: 328869 - DNA, 25 bp, Artificial
  probe
  misc_feature (1)..(25): SEQ ID NO: 2535; WAN024CE7; Start 187; Stop 211
tcctacaagaaatcgctgataaaca

SEQ ID NO: 328870 - DNA, 25 bp, Artificial
  probe
  misc_feature (1)..(25): SEQ ID NO: 2535; WAN024CE7; Start 1057; Stop 1081
gtgtcttgaatgatatttaccgtgt

SEQ ID NO: 328871 - DNA, 25 bp, Artificial
  probe
  misc_feature (1)..(25): SEQ ID NO: 2535; WAN024CE7; Start 188; Stop 212
cctacaagaaatcgctgataaacat

SEQ ID NO: 328872 - DNA, 25 bp, Artificial
  probe
  misc_feature (1)..(25): SEQ ID NO: 2535; WAN024CE7; Start 1181; Stop 1205
tgtagtacaaggtgtcataattcac

SEQ ID NO: 328873 - DNA, 25 bp, Artificial
  probe
  misc_feature (1)..(25): SEQ ID NO: 2535; WAN024CE7; Start 1066; Stop 1090
atgatatttaccgtgtcttccctta

SEQ ID NO: 328874 - DNA, 25 bp, Artificial
  probe
  misc_feature (1)..(25): SEQ ID NO: 2535; WAN024CE7; Start 1058; Stop 1082
tgtcttgaatgatatttaccgtgtc

SEQ ID NO: 328875 - DNA, 25 bp, Artificial
  probe
  misc_feature (1)..(25): SEQ ID NO: 2535; WAN024CE7; Start 1188; Stop 1212
caaggtgtcataattcacgaatatc

SEQ ID NO: 328876 - DNA, 25 bp, Artificial
  probe
  misc_feature (1)..(25): SEQ ID NO: 2535; WAN024CE7; Start 1064; Stop 1088
gaatgatatttaccgtgtcttccct

SEQ ID NO: 328877 - DNA, 25 bp, Artificial
  probe
  misc_feature (1)..(25): SEQ ID NO: 2535; WAN024CE7; Start 1059; Stop 1083
gtcttgaatgatatttaccgtgtct

SEQ ID NO: 328878 - DNA, 25 bp, Artificial
  probe
  misc_feature (1)..(25): SEQ ID NO: 2535; WAN024CE7; Start 1186; Stop 1210
tacaaggtgtcataattcacgaata

SEQ ID NO: 328879 - DNA, 25 bp, Artificial
  probe
  misc_feature (1)..(25): SEQ ID NO: 2535; WAN024CE7; Start 1063; Stop 1087
tgaatgatatttaccgtgtcttccc

SEQ ID NO: 328880 - DNA, 25 bp, Artificial
  probe
  misc_feature (1)..(25): SEQ ID NO: 2535; WAN024CE7; Start 186; Stop 210
ttcctacaagaaatcgctgataaac

SEQ ID NO: 328881 - DNA, 25 bp, Artificial
  probe
  misc_feature (1)..(25): SEQ ID NO: 2535; WAN024CE7; Start 184; Stop 208
ccttcctacaagaaatcgctgataa

SEQ ID NO: 328882 - DNA, 25 bp, Artificial
  probe
  misc_feature (1)..(25): SEQ ID NO: 2535; WAN024CE7; Start 1049; Stop 1073
ttgtggcggtgtcttgaatgatatt

SEQ ID NO: 328883 - DNA, 25 bp, Artificial
  probe
  misc_feature (1)..(25): SEQ ID NO: 2535; WAN024CE7; Start 723; Stop 747
ctcgttgatttagactttaaccgtg

SEQ ID NO: 328884 - DNA, 25 bp, Artificial
  probe
  misc_feature (1)..(25): SEQ ID NO: 2535; WAN024CE7; Start 1062; Stop 1086
ttgaatgatatttaccgtgtcttcc

SEQ ID NO: 328885 - DNA, 25 bp, Artificial
  probe
  misc_feature (1)..(25): SEQ ID NO: 2535; WAN024CE7; Start 185; Stop 209
cttcctacaagaaatcgctgataaa

SEQ ID NO: 328886 - DNA, 25 bp, Artificial
  probe
  misc_feature (1)..(25): SEQ ID NO: 2535; WAN024CE7; Start 283; Stop 307
ttaaggaagtctatgacgaacgcaa

SEQ ID NO: 328887 - DNA, 25 bp, Artificial
  probe
  misc_feature (1)..(25): SEQ ID NO: 2536; WAN024GMC; Start 61; Stop 85
agaataatcttatctcctgccttgc

SEQ ID NO: 328888 - DNA, 25 bp, Artificial
  probe
  misc_feature (1)..(25): SEQ ID NO: 2536; WAN024GMC; Start 53; Stop 77
ttcgtggcagaataatcttatctcc

SEQ ID NO: 328889 - DNA, 25 bp, Artificial
  probe
  misc_feature (1)..(25): SEQ ID NO: 2536; WAN024GMC; Start 115; Stop 139
gaagttgttccaccaatcattagaa

SEQ ID NO: 328890 - DNA, 25 bp, Artificial
  probe
  misc_feature (1)..(25): SEQ ID NO: 2536; WAN024GMC; Start 114; Stop 138
tgaagttgttccaccaatcattaga

SEQ ID NO: 328891 - DNA, 25 bp, Artificial
  probe
  misc_feature (1)..(25): SEQ ID NO: 2536; WAN024GMC; Start 54; Stop 78
tcgtggcagaataatcttatctcct

SEQ ID NO: 328892 - DNA, 25 bp, Artificial
  probe
  misc_feature (1)..(25): SEQ ID NO: 2536; WAN024GMC; Start 60; Stop 84
cagaataatcttatctcctgccttg

SEQ ID NO: 328893 - DNA, 25 bp, Artificial
  probe
  misc_feature (1)..(25): SEQ ID NO: 2536; WAN024GMC; Start 55; Stop 79
cgtggcagaataatcttatctcctg

SEQ ID NO: 328894 - DNA, 25 bp, Artificial
  probe
  misc_feature (1)..(25): SEQ ID NO: 2536; WAN024GMC; Start 13; Stop 37
ccacatagaaccaacgcattgatag

SEQ ID NO: 328895 - DNA, 25 bp, Artificial
  probe
  misc_feature (1)..(25): SEQ ID NO: 2536; WAN024GMC; Start 16; Stop 40
catagaaccaacgcattgatagcag

SEQ ID NO: 328896 - DNA, 25 bp, Artificial
  probe
  misc_feature (1)..(25): SEQ ID NO: 2536; WAN024GMC; Start 18; Stop 42
tagaaccaacgcattgatagcagat

SEQ ID NO: 328897 - DNA, 25 bp, Artificial
  probe
  misc_feature (1)..(25): SEQ ID NO: 2536; WAN024GMC; Start 17; Stop 41
atagaaccaacgcattgatagcaga

SEQ ID NO: 328898 - DNA, 25 bp, Artificial
  probe
  misc_feature (1)..(25): SEQ ID NO: 2536; WAN024GMC; Start 263; Stop 287
ctaagagttcgacaagttctggatt

SEQ ID NO: 328899 - DNA, 25 bp, Artificial
  probe
  misc_feature (1)..(25): SEQ ID NO: 2536; WAN024GMC; Start 14; Stop 38
cacatagaaccaacgcattgatagc

SEQ ID NO: 328900 - DNA, 25 bp, Artificial
  probe
  misc_feature (1)..(25): SEQ ID NO: 2536; WAN024GMC; Start 12; Stop 36
accacatagaaccaacgcattgata

SEQ ID NO: 328901 - DNA, 25 bp, Artificial
  probe
  misc_feature (1)..(25): SEQ ID NO: 2536; WAN024GMC; Start 34; Stop 58
atagcagatttatggacatttcgtg

SEQ ID NO: 328902 - DNA, 25 bp, Artificial
  probe
  misc_feature (1)..(25): SEQ ID NO: 2536; WAN024GMC; Start 33; Stop 57
gatagcagatttatggacatttcgt

SEQ ID NO: 328903 - DNA, 25 bp, Artificial
  probe
  misc_feature (1)..(25): SEQ ID NO: 2536; WAN024GMC; Start 32; Stop 56
tgatagcagatttatggacatttcg

SEQ ID NO: 328904 - DNA, 25 bp, Artificial
  probe
  misc_feature (1)..(25): SEQ ID NO: 2536; WAN024GMC; Start 28; Stop 52
gcattgatagcagatttatggacat
